(19) United States
(12) Patent Application Publication
(10) Pub. No.: US 2023/0183706 A1
(43) Pub. Date: Jun. 15, 2023

(54) COMPOSITIONS AND METHODS FOR TREATING SUBJECTS HAVING A HETEROZYGOUS ALANINE-GLYOXYLATE AMINOTRANSFERASE GENE (AGXT) VARIANT

(71) Applicant: Alnylam Pharmaceuticals, Inc., Cambridge, MA (US)

(72) Inventors: Aimee M. Deaton, Somerville, MA (US); David Erbe, Arlington, MA (US)

(21) Appl. No.: 17/945,151

(22) Filed: Sep. 15, 2022

Related U.S. Application Data
(63) Continuation of application No. PCT/US2021/022666, filed on Mar. 17, 2021.
(60) Provisional application No. 62/991,138, filed on Mar. 18, 2020.

(51) Int. Cl. C12N 15/113; C12N 9/10; A61P 13/04

(52) U.S. Cl. CPC C12N 15/1137; C12Y 101/01027; C12Y 101/03015; C12N 9/1096; C12Y 206/01044; A61P 13/04; C12N 2310/11; C12N 2310/315

(57) ABSTRACT

The present invention provides methods for treating subjects suffering from a kidney stone disease carrying a heterozygous AGXT gene variant, methods for identifying such subjects, and compositions comprising nucleic acid inhibitors, e.g., double stranded ribonucleic acid (dsRNA) agents or single stranded antisense polynucleotide agents targeting lactate dehydrogenase A (LDHA) and/or hydroxyacid oxidase (HAO1), for treating such subjects.

### RELATED APPLICATIONS

[0001] This application is a 35 § U.S.C. 111(a) continuation application which claims the benefit of priority to PCT/US2021/022666, filed on Mar. 17, 2021, which, in turn, claims the benefit of priority to U.S. Provisional Application No. 62/991,138, filed on Mar. 18, 2020. The entire contents of each of the foregoing applications are incorporated herein by reference.

### SEQUENCE LISTING

[0002] The instant application contains a Sequence Listing which has been submitted electronically in XML format and is hereby incorporated by reference in its entirety. Said XML copy, created on Nov. 29, 2022, is named 121301-12002_SL.xml and is 30,487,753 bytes in size.

### BACKGROUND OF THE INVENTION

[0003] Oxalate (C₂O₄²⁻) is the salt-forming ion of oxalic acid (C₂H₂O₄) that is widely distributed in both plants and animals. It is an unavoidable component of the human diet and a ubiquitous component of plants and plant-derived foods. Oxalate can also be synthesized endogenously via the metabolic pathways that occur in the liver. Dietary and endogenous contributions to urinary oxalate excretion are equal. Glyoxylate is an immediate precursor to oxalate and is derived from the oxidation of glycolate by the enzyme glycolate oxidase (GO), also known, and referred to herein, as hydroxyacid oxidase (HAO1), or by catabolism of hydroxyproline, a component of collagen. Transamination of glyoxylate with alanine by the enzyme alanine-glyoxylate aminotransferase (AGXT) results in the formation of pyruvate and glycine. Excess glyoxylate is converted to oxalate by lactate dehydrogenase A (referred to herein as LDHA). The endogenous pathway for oxalate metabolism is illustrated in FIG. 1A.

[0004] Lactate dehydrogenase is a protein found in all tissues. It is composed of four subunits with the two most common subunits being the LDH-M and LDH-H proteins. These proteins are encoded by the LDHA and LDHB genes, respectively. Various combinations of the LDH-M and LDH-H proteins result in five distinct isoforms of LDH. LDHA is the most important gene involved in the liver lactate dehydrogenase isoform. Specifically, within the liver, LDHA is important as the final step in the endogenous production of oxalate, by converting the precursor glyoxylate to oxalate. It also serves an important role in the Cori Cycle and in the anaerobic phase of glycolysis where it converts lactate to pyruvate and vice versa (see, FIG. 1B).

[0005] Oxalic acid may form oxalate salts with various cations, such as sodium, potassium, magnesium, and calcium. Although sodium oxalate, potassium oxalate, and magnesium oxalate are water soluble, calcium oxalate (CaOx) is nearly insoluble. Excretion of oxalate occurs primarily by the kidneys via glomerular filtration and tubular secretion.

[0006] Since oxalate binds with calcium in the kidney, urinary CaOx supersaturation may occur, resulting in the formation and deposition of CaOx crystals in renal tissue or collecting system. These CaOx crystals contribute to the formation of diffuse renal calcifications (nephrocalcinosis) and stones (nephrolithiasis). Subjects having diffuse renal calcifications or non-obstructing stones typically have no symptoms. However, obstructing stones can cause severe pain. Moreover, over time, these CaOx crystals cause injury and progressive inflammation to the kidney and, when secondary complications such as obstruction are present, these CaOx crystals may lead to decreased renal function and in severe cases even to end-stage renal failure and the need for dialysis.

[0007] Among the most well-known diseases associated with the formation of recurrent bladder and kidney stones are the inherited primary hyperoxalurias. Autosomal recessive mutations in the AGXT gene cause primary hyperoxaluria type 1 (PH1); autosomal recessive mutations in the GRHPR gene cause primary hyperoxaluria type 2 (PH2); and autosomal recessive mutations in the HOGA1 gene cause primary hyperoxaluria type 3 (PH3) (see, FIG. 1A). There are few treatment options for subjects having a hereditary hyperoxaluria. Ultimately, some subjects with hereditary hyperoxaluria develop end stage renal disease (ESRD) and require kidney/liver transplants.

[0008] Recently, however, two investigational therapeutics for the treatment of subjects having PH1 or PH2 have entered the clinic. Specifically, Lumasiran, an RNA interference (RNAi) therapeutic targeting glycolate oxidase (GO) for the treatment of primary hyperoxaluria type 1 (PH1) is currently being evaluated in a Phase III clinical trail (see, e.g., NCT03681184), and DCR-PHXC, an RNA interference (RNAi) therapeutic targeting LDHA for the treatment of primary hyperoxaluria type 1 (PH1) and prmary hyperoxaluria type 2 (PH2) has entered Phase II clinical trials (see, e.g., NCT03847909).

[0009] Nonetheless, there are a significant number of subjects that do not have PH1, PH2, or PH3 and yet may still suffer from recurrent kidney stone disease for which no treatments currently exist.

[0010] Accordingly, there is a need in the art for methods to identify subjects suffering or prone to suffering from kidney stone disease that would benefit from treatment with agents that reduce oxalate, such as a nucleic acid inhibitor of lactate dehydrogenase A (LDHA) and/or a nucleic acid inhibitor of hydroxyacid oxidase (HAO1), and methods to treat such subjects.

### SUMMARY OF THE INVENTION

[0011] The present invention is based, at least in part, on the discovery of a population of subjects that would benefit from treatment with an agent that reduces oxalate, such as a nucleic acid inhibitor of lactate dehydrogenase A (LDHA) and/or a nucleic acid inhibitor of hydroxyacid oxidase (HAO1).

[0012] Specifically, it has been discovered that the presence of a heterozygous alanine-glyoxylate aminotransferase (AGXT) gene variant, e.g., a loss-of-function AGXT gene variant or a variant annotated in Clinvar as being pathogenic or pathogenic/likely pathogenic, is associated with kidney stone disease, e.g., non-recurrent or recurrent kidney stone disease, in a subject, such as a human subject. Accordingly, the present invention provides methods for treating subjects suffering from a kidney stone disease carrying a heterozygous AGXT gene variant, methods for identifying such subjects, and compositions comprising nucleic acid inhibitors, e.g., double stranded ribonucleic acid (dsRNA) agents or single stranded antisense polynucleotide agents targeting lactate dehydrogenase A (LDHA) and/or hydroxyacid oxidase (HAO1), for treating such subjects.

[0013] In one aspect, the present invention provides a method for treating a subject suffering from a kidney stone disease, The method includes determining the presence or absence of a heterozygous alanine-glyoxylate amino transferase (AGXT) gene variant in a sample obtained from the subject; and administering to the subject a therapeutically effective amount of a nucleic acid inhibitor of lactate dehydrogenase A (LDHA) and/or a nucleic acid inhibitor of hydroxyacid oxidase (HAO1), if a heterozygous AGXT gene variant is present in the sample obtained from the subject, thereby treating the subject suffering from a kidney stone formation disease.

[0014] In another aspect, the present invention provides a method of diagnosing and treating a kidney stone disease in a subject. The method includes detecting the presence or absence of a heterozygous alanine-glyoxylate amino transferase (AGXT) gene variant in a sample obtained from the subject; diagnosing the subject with a kidney stone disease if a heterozygous AGXT gene variant is present in the sample obtained from the subject; and administering to the subject a therapeutically effective amount of a nucleic acid inhibitor of lactate dehydrogenase A (LDHA) and/or a nucleic acid inhibitor of hydroxyacid oxidase (HAO1), thereby treating the subject suffering from a kidney stone disease.

[0015] In some embodiments, the heterozygous AGXT gene variant is selected from the group consisting of the any one or more of the AGXT gene variants in Table any one of Tables 16, 18, and 20-23.

[0016] In one embodiment, the subject is a human.

[0017] In one embodiment, the kidney stone disease is a recurrent kidney stone disease.

[0018] In another embodiment, the kidney stone disease is a non-recurrent kidney stone disease

[0019] In one embodiment, the subject suffering from the kidney stone disease has had a surgery to remove a kidney stone.

[0020] In one embodiment, the kidney stone disease is a calcium oxalate kidney stone disease or a non-calcium oxalate kidney stone disease.

[0021] In one embodiment, the nucleic acid inhibitor is a double stranded ribonucleic acid (dsRNA) agent that inhibits the expression of LDHA.

[0022] In one embodiment, the dsRNA agent comprises a sense strand and an antisense strand forming a double stranded region, wherein the sense strand comprises a nucleotide sequence comprising at least 15 contiguous nucleotides differing by no more than 3 nucleotides from a portion of the nucleotide sequence of SEQ ID NO: 1 and the antisense strand comprises a nucleotide sequence comprising at least 15 contiguous nucleotides differing by no more than 3 nucleotides from the corresponding portion of nucleotide sequence of SEQ ID NO: 2 such that the sense strand is complementary to the at least 15 contiguous nucleotides in the antisense strand.

[0023] In one embodiment, the dsRNA agent comprises a sense strand and an antisense strand forming a double stranded region, wherein the antisense strand comprises at least 15 contiguous nucleotides differing by no more than 3 nucleotides from any one of the antisense sequences listed in any one of Tables 2-3.

[0024] In one embodiment, the dsRNA agent comprises a sense strand and an antisense strand forming a double stranded region, wherein the sense strand comprises a nucleotide sequence comprising at least 15 contiguous nucleotides differing by no more than 3 nucleotides from the nucleotide sequence of 5′-AUGUUGUCCUUUUUAUCUGAGCAGCCGAAAGGCUGC-3′ (SEQ ID NO:31), and the antisense strand comprises a nucleotide sequence comprising at least 15 contiguous nucleotides differing by no more than 3 nucleotides from the nucleotide sequence 5′-UCAGAUAAAAAGGACAACAUGG-3′ (SEQ ID NO: 32).

[0025] In one embodiment, the nucleic acid inhibitor is a double stranded ribonucleic acid (dsRNA) agent that inhibits the expression of HAO1.

[0026] In one embodiment, the dsRNA agent comprises a sense strand and an antisense strand forming a double stranded region, wherein the sense strand comprises a nucleotide sequence comprising at least 15 contiguous nucleotides differing by no more than 3 nucleotides from a portion of the nucleotide sequence of SEQ ID NO: 21 and the antisense strand comprises a nucleotide sequence comprising at least 15 contiguous nucleotides differing by no more than 3 nucleotides from the corresponding portion of nucleotide sequence of SEQ ID NO: 22 such that the sense strand is complementary to the at least 15 contiguous nucleotides in the antisense strand.

[0027] In one embodiment, the dsRNA agent comprises a sense strand and an antisense strand forming a double stranded region, wherein the antisense strand comprises at least 15 contiguous nucleotides differing by no more than 3 nucleotides from any one of the antisense sequences listed in any one of Tables 4-12.

[0028] In one embodiment, the dsRNA agent comprises a sense strand and an antisense strand forming a double-stranded region, wherein the sense strand comprises the nucleotide sequence 5′-GACUUUCAUCCUGGAAAUAUA-3′ (SEQ ID NO:33) and the antisense strand comprises the nucleotide sequence 5′-UAUAUUUCCAGGAUGAAAGUCCA-3′ (SEQ ID NO:34).

[0029] In one embodiment, the nucleic acid inhibitor is a dual targeting double stranded ribonucleic acid (dsRNA) agent that inhibits the expression of LDHA and HAO1.

[0030] In one embodiment, the dual targeting dsRNA agent comprises a first double stranded ribonucleic acid (dsRNA) agent that inhibits expression of lactic dehydrogenase A (LDHA) comprising a sense strand and an antisense strand; and a second double stranded ribonucleic acid (dsRNA) agent that inhibits expression of hydroxyacid oxidase 1 (glycolate oxidase) (HAO1) comprising a sense strand and an antisense strand, wherein the first dsRNA agent and the second dsRNA agent are covalently attached, wherein the sense strand of the first dsRNA agent comprises at least 15 contiguous nucleotides differing by no more than 3 nucleotides from the nucleotide sequence of SEQ ID NO:1, and the antisense strand of the first dsRNA agent comprises at least 15 contiguous nucleotides differing by no more than 3 nucleotides from the nucleotide sequence of SEQ ID NO:2, wherein the sense strand of the second dsRNA agent comprises at least 15 contiguous nucleotides differing by no more than 3 nucleotides from the nucleotide sequence of SEQ ID NO:21, and said antisense strand of the second dsRNA agent comprises at least 15 contiguous nucleotides differing by no more than 3 nucleotides from the nucleotide sequence of SEQ ID NO:22.

[0031] In one embodiment, the dual targeting dsRNA agent comprises a first double stranded ribonucleic acid (dsRNA) agent that inhibits expression of lactic dehydrogenase A (LDHA) comprising a sense strand and an antisense strand; and a second double stranded ribonucleic acid (dsRNA) agent that inhibits expression of hydroxyacid oxidase 1 (glycolate oxidase) (HAO1) comprising a sense strand and an antisense strand, wherein the first dsRNA agent and the second dsRNA agent are covalently attached, wherein the antisense strand of the first dsRNA agent comprises at least 15 contiguous nucleotides differing by no more than 3 nucleotides from any one of the antisense sequences listed in any one of Tables 2-3, and wherein the antisense strand of the second dsRNA agent comprises at least 15 contiguous nucleotides differing by no more than 3 nucleotides from any one of the antisense sequences listed in any one of Tables 4-12.

[0032] In one embodiment, the dsRNA agent comprises at least one modified nucleotide.

[0033] In one embodiment, no more than five of the sense strand nucleotides and no more than five of the nucleotides of the antisense strand are unmodified nucleotides.

[0034] In one embodiment, all of the nucleotides of the sense strand and all of the nucleotides of the antisense strand are modified nucleotides.

[0035] In one embodiment, at least one of the modified nucleotides is selected from the group a deoxy-nucleotide, a 3′-terminal deoxy-thymine (dT) nucleotide, a 2′-O-methyl modified nucleotide, a 2′-fluoro modified nucleotide, a 2′-deoxy-modified nucleotide, a locked nucleotide, an unlocked nucleotide, a conformationally restricted nucleotide, a constrained ethyl nucleotide, an abasic nucleotide, a 2′-amino-modified nucleotide, a 2′-O-allyl-modified nucleotide, 2′-C-alkyl-modified nucleotide, 2′-hydroxly-modified nucleotide, a 2′-methoxyethyl modified nucleotide, a 2′-O-alkyl-modified nucleotide, a morpholino nucleotide, a phosphoramidate, a non-natural base comprising nucleotide, a tetrahydropyran modified nucleotide, a 1,5-anhydrohexitol modified nucleotide, a cyclohexenyl modified nucleotide, a nucleotide comprising a 5′-phosphorothioate group, a nucleotide comprising a 5′-methylphosphonate group, a nucleotide comprising a 5′ phosphate or 5′ phosphate mimic, a nucleotide comprising vinyl phosphonate, a nucleotide comprising adenosine-glycol nucleic acid (GNA), a nucleotide comprising thymidine-glycol nucleic acid (GNA) S-Isomer, a nucleotide comprising 2-hydroxymethyl-tetrahydrofurane-5-phosphate, a nucleotide comprising 2′-deoxythymidine-3′phosphate, a nucleotide comprising 2′-deoxyguanosine-3′-phosphate, and a terminal nucleotide linked to a cholesteryl derivative and a dodecanoic acid bisdecylamide group; and combinations thereof.

[0036] In one embodiment, the dsRNA agent further comprises at least one phosphorothioate internucleotide linkage.

[0037] In one embodiment, the dsRNA agent comprises 6-8 phosphorothioate internucleotide linkages.

[0038] In one embodiment, at least one strand of the dsRNA agent further comprises a ligand.

[0039] In one embodiment, the ligand is attached to the 3′ end of the sense strand.

[0040] In one embodiment, the ligand is one or more N-acetylgalactosamine (GalNAc) derivatives.

[0041] In one embodiment, the one or more GalNAc derivatives is attached through a monovalent, bivalent, or trivalent branched linker.

[0042] In one embodiment, the ligand is

[chemical structure]

[0043] In one embodiment, the dsRNA agent is conjugated to the ligand as shown in the following schematic

[chemical structure]

[0044] wherein X is O or S.

[0045] In one embodiment, the X is O.

[0046] In one embodiment, the dsRNA agent comprises at least one modified nucleotide.

[0047] In one embodiment, all of the nucleotides of the dsRNA agent are modified nucleotides.

[0048] In one embodiment, the modified nucleotide comprises a 2′-modification.

[0049] In one embodiment, the 2 ‘-modification is a 2’-fluoro or 2′-O— methyl modification.

[0050] In one embodiment, one or more of the following positions are modified with a 2′-O-methyl: positions 1, 2, 4, 6, 7, 12, 14, 16, 18-26, or 31-36 of the sense strand and/or positions 1, 6, 8, 11-13, 15, 17, or 19-22 of the antisense strand.

[0051] In one embodiment, all of positions 1, 2, 4, 6, 7, 12, 14, 16, 18-26, and 31-36 of the sense strand and all of the positions 1, 6, 8, 11-13, 15, 17, and 19-22 of the antisense strand are modified with a 2′-O-methyl.

[0052] In one embodiment, one or more of the following positions are modified with a 2′-fluoro: positions 3, 5, 8-11, 13, 15, or 17 of the sense strand and/or positions 2-5, 7, 9, 10, 14, 16, or 18 of the antisense strand.

[0053] In one embodiment, all of positions 3, 5, 8-11, 13, 15, or 17 of the sense strand and all of positions 2-5, 7, 9, 10, 14, 16, and 18 of the antisense strand are modified with a 2′-fluoro.

[0054] In one embodiment, the dsRNA agent comprises at least one modified internucleotide linkage.

[0055] In one embodiment, the at least one modified internucleotide linkage is a phosphorothioate linkage.

[0056] In one embodiment, the dsRNA agent has a phosphorothioate linkage between one or more of: positions 1 and 2 of the sense strand, positions 1 and 2 of the antisense strand, positions 2 and 3 of the antisense strand, positions 3 and 4 of the antisense strand, positions 20 and 21 of the antisense strand, and positions 21 and 22 of the antisense strand.

[0057] In one embodiment, the dsRNA agent has a phosphorothioate linkage between each of: positions 1 and 2 of the sense strand, positions 1 and 2 of the antisense strand, positions 2 and 3 of the antisense strand, positions 3 and 4 of the antisense strand, positions 20 and 21 of the antisense strand, and positions 21 and 22 of the antisense strand.

[0058] In one embodiment, the uridine at the first position of the antisense strand comprises a phosphate analog.

[0059] In one embodiment, the dsRNA comprises the following structure at position 1 of the antisense strand:

[chemical structure]

[0060] In one embodiment, one or more of the nucleotides of the -GAAA- sequence on the sense strand is conjugated to a monovalent GalNac moiety.

[0061] In one embodiment, each of the nucleotides of the -GAAA- sequence on the sense strand is conjugated to a monovalent GalNac moiety.

[0062] In one embodiment, the -GAAA- motif comprises the structure:

[chemical structure]

wherein: L represents a bond, click chemistry handle, or a linker of 1 to 20, inclusive, consecutive, covalently bonded atoms in length, selected from the group consisting of substituted and unsubstituted alkylene, substituted and unsubstituted alkenylene, substituted and unsubstituted alkynylene, substituted and unsubstituted heteroalkylene, substituted and unsubstituted heteroalkenylene, substituted and unsubstituted heteroalkynylene, and combinations thereof; and

### X is a O, S, or N.

[0063] In one embodiment, L is an acetal linker.

[0064] In one embodiment, X is O.

[0065] In one embodiment, the -G AAA- sequence comprises the structure:

[chemical structure]

[0066] In one embodiment, the dsRNA comprises an antisense strand having a sequence set forth as UCAGAUAAAAAGGACAACAUGG (SEQ ID NO: 32) and a sense strand having a sequence set forth as AUGUUGUCCUUUUUAUCUGAGCAGCCGAAAGGCUGC (SEQ ID NO: 31), wherein all of positions 1, 2, 4, 6, 7, 12, 14, 16, 18-26, and 31-36 of the sense strand and all of positions 1, 6, 8, 11-13, 15, 17, and 19-22 of the antisense strand are modified with a 2′-O— methyl, and all of positions 3, 5, 8-11, 13, 15, or 17 of the sense strand and all of positions 2-5, 7, 9, 10, 14, 16, and 18 of the antisense strand are modified with a 2′-fluoro; wherein the oligonucleotide has a phosphorothioate linkage between each of: positions 1 and 2 of the sense strand, positions 1 and 2 of the antisense strand, positions 2 and 3 of the antisense strand, positions 3 and 4 of the antisense strand, positions 20 and 21 of the antisense strand, and positions 21 and 22 of the antisense strand;

[0067] wherein the dsRNA agent comprises the following structure at position 1 of the antisense strand:

[chemical structure]

[0068] wherein each of the nucleotides of the -GAAA- sequence on the sense strand is conjugated to a monovalent GalNac moiety comprising the structure:

[chemical structure]

[0069] In one embodiment, the sense strand comprises the nucleotide sequence 5′-gsascuuuCfaUfCfCfuggaaauaua-3′ (SEQ ID NO:35) and the antisense strand comprises the nucleotide sequence 5′-usAfsuauUfuCfCfaggaUfgAfaagucscsa-3′ (SEQ ID NO:36), wherein Af is a 2′-fluoroadenosine-3′-phosphate; Afs is 2′-fluoroadenosine-3′-phosphorothioate; Cf is a 2′-fluorocytidine-3′-phosphate; U is a Uridine-3′-phosphate; Uf is a 2′-fluorouridine-3′-phosphate; a is a 2′-O-methyladenosine-3′-phosphate; as is a 2′-O-methyladenosine-3′-phosphorothioate; c is a 2′-O-methylcytidine-3′-phosphate; cs is a 2′-O-methylcytidine-3′-phosphorothioate; g is a 2′-O-methylguanosine-3′-phosphate; gs is a 2′-O-methylguanosine-3′-phosphorothioate; uis a 2′-O-methyluridine-3′-phosphate; us is a 2′-O-methyluridine-3′-phosphorothioate; and s is a phosphorothioate linkage.

[0070] In one embodiment, the dsRNA agent is conjugated to the ligand as shown in the following schematic

[chemical structure]

[0071] wherein X is O or S.

[0072] In one embodiment, the dsRNA agent is present in a composition comprising the dsRNA agent and Na+ counterions.

[0073] In one embodiment, the nucleic acid inhibitor is a single stranded antisense polynucleotide agent that inhibits the expression of LDHA.

[0074] In one embodiment, the single stranded antisense polynucleotide agent comprises at least 15 contiguous nucleotide differing by no more than 3 nucleotides from any one of the antisense nucleotide sequences in any one of Tables 2-3.

[0075] In one embodiment, the nucleic acid inhibitor is a single stranded antisense polynucleotide agent that inhibits the expression of HAO1.

[0076] In one embodiment, the single stranded antisense polynucleotide agent comprises at least 15 contiguous nucleotide differing by no more than 3 nucleotides from any one of the antisense nucleotide sequences in any one of Tables 4-14.

[0077] In one embodiment, the single stranded antisense polynucleotide agent is about 8 to about 50 nucleotides in length.

[0078] In one embodiment, substantially all of the nucleotides of the single stranded antisense polynucleotide agent are modified nucleotides.

[0079] In one embodiment, all of the nucleotides of the single stranded antisense polynucleotide agent are modified nucleotides.

[0080] In one embodiment, the modified nucleotide comprises a modified sugar moiety selected from the group consisting of: a 2′-O-methoxyethyl modified sugar moiety, a 2′-O-alkyl modified sugar moiety, and a bicyclic sugar moiety.

[0081] In one embodiment, the bicyclic sugar moiety has a (—CRH—)n group forming a bridge between the 2′ oxygen and the 4′ carbon atoms of the sugar ring, wherein n is 1 or 2 and wherein R is H, CH₃ or CH₃OCH₃.

[0082] In one embodiment, n is 1 and R is CH₃.

[0083] In one embodiment, the modified nucleotide is a 5-methylcytosine.

[0084] In one embodiment, the single stranded antisense polynucleotide agent comprises a modified internucleoside linkage.

[0085] In one embodiment, the modified internucleoside linkage is a phosphorothioate internucleoside linkage.

[0086] In one embodiment, the single stranded antisense polynucleotide agent comprises a plurality of 2′-deoxynucleotides flanked on each side by at least one nucleotide having a modified sugar moiety.

[0087] In one embodiment, the single stranded antisense polynucleotide agent is a gapmer comprising a gap segment comprised of linked 2′-deoxynucleotides positioned between a 5′ and a 3′ wing segment.

[0088] In one embodiment, the modified sugar moiety is selected from the group consisting of a 2′-O-methoxyethyl modified sugar moiety, a 2′-methoxy modified sugar moiety, a 2′-O-alkyl modified sugar moiety, and a bicyclic sugar moiety.

[0089] In one embodiment, the nucleic acid inhibitor is present in a pharmaceutical formulation.

[0090] In some embodiments, the methods of the invention further comprise administering an additional therapeutic to the subject.

[0091] In one embodiment, the nucleic acid inhibitor is administered to the subject at a dose of about 0.01 mg/kg to about 10 mg/kg or about 0.5 mg/kg to about 50 mg/kg.

[0092] In one embodiment, the nucleic acid inihibitor is administered to the subject subcutaneously.

[0093] In one aspect, the present invention provides a method for preventing a kidney stone disease in a subject prone to suffering from a kidney stone disease. The method include determining the presence or absence of a heterozygous alanine-glyoxylate amino transferase (AGXT) gene variant in a sample obtained from the subject; and administering to the subject a prohylactically effective amount of a nucleic acid inhibitor of lactate dehydrogenase A (LDHA) and/or a nucleic acid inhibitor of hydroxyacid oxidase (HAO1), if a heterozygous AGXT gene variant is present in the sample obtained from the subject, thereby preventing a kidney stone disease in the subject prone to suffering from a kidney stone disease.

[0094] In another aspect, the present invention provides a method of diagnosing and preventing a kidney stone disease in a subject prone to suffering from a kidney stone disease. The method includes detecting the presence or absence of a heterozygous alanine-glyoxylate amino transferase (AGXT) gene variant in a sample obtained from the subject; diagnosing the subject with a kidney stone disease if a heterozygous AGXT gene variant is present in the sample obtained from the subject; and administering to the subject a prophylactically effective amount of a nucleic acid inhibitor of lactate dehydrogenase A (LDHA) and/or a nucleic acid inhibitor of hydroxyacid oxidase (HAO1), thereby diagnosing and preventing a kidney stone disease in a subject prone to suffering from a kidney stone disease.

### BRIEF DESCRIPTION OF THE DRAWINGS

[0095] FIG. 1A is a schematic of the endogenous pathways for oxalate synthesis.

[0096] FIG. 1B is a schematic of the metabolic pathways associated with LDHA.

### DETAILED DESCRIPTION OF THE INVENTION

[0097] The present invention is based, at least in part, on the discovery of a population of subjects that would benefit from treatment with an agent that reduces oxalate, such as a nucleic acid inhibitor of lactate dehydrogenase A (LDHA) and/or a nucleic acid inhibitor of hydroxyacid oxidase (HAO1). Specifically, it has been discovered that the presence of a heterozygous alanine-glyoxylate aminotransferase (AGXT) gene variant, e.g., a loss-of-function AGXT gene variant or a variant annotated in Clinvar as being pathogenic or pathogenic/likely pathogenic, is associated with kidney stone disease, e.g., non-recurrent or recurrent kidney stone disease, in a subject, such as a human subject. Accordingly, the present invention provides methods for treating subjects suffering from a kidney stone disease carrying a heterozygous AGXT gene variant, methods for identifying such subjects, and compositions comprising nucleic acid inhibitors, e.g., double stranded ribonucleic acid (dsRNA) agents or single stranded antisense polynucleotide agents targeting lactate dehydrogenase A (LDHA) and/or hydroxyacid oxidase (HAO1), for treating such subjects.

[0098] The following detailed description discloses how to make and use compositions containing iRNAs to inhibit the expression of an LDHA gene, an HAO1gene, and/or both an LDHA gene and an HAO1 gene, as well as compositions and methods for treating subjects having diseases and disorders that would benefit from inhibition and/or reduction of the expression of these genes.

### I. Definitions

[0099] In order that the present invention may be more readily understood, certain terms are first defined. In addition, it should be noted that whenever a value or range of values of a parameter are recited, it is intended that values and ranges intermediate to the recited values are also intended to be part of this invention.

[0100] The articles “a” and “an” are used herein to refer to one or to more than one (i.e., to at least one) of the grammatical object of the article. By way of example, “an element” means one element or more than one element, e.g., a plurality of elements.

[0101] The term “including” is used herein to mean, and is used interchangeably with, the phrase “including but not limited to”. The term “or” is used herein to mean, and is used interchangeably with, the term “and/or,” unless context clearly indicates otherwise.

[0102] The term “about” is used herein to mean within the typical ranges of tolerances in the art. For example, “about” can be understood as about 2 standard deviations from the mean. In certain embodiments, about means±10%. In certain embodiments, about means±5%. When about is present before a series of numbers or a range, it is understood that “about” can modify each of the numbers in the series or range.

[0103] The term “at least” prior to a number or series of numbers is understood to include the number adjacent to the term “at least”, and all subsequent numbers or integers that could logically be included, as clear from context. For example, the number of nucleotides in a nucleic acid molecule must be an integer. For example, “at least 18 nucleotides of a 21 nucleotide nucleic acid molecule” means that 18, 19, 20, or 21 nucleotides have the indicated property. When at least is present before a series of numbers or a range, it is understood that “at least” can modify each of the numbers in the series or range.

[0104] As used herein, “no more than” or “less than” is understood as the value adjacent to the phrase and logical lower values or intergers, as logical from context, to zero. For example, a duplex with an overhang of “no more than 2 nucleotides” has a 2, 1, or 0 nucleotide overhang. When “no more than” is present before a series of numbers or a range, it is understood that “no more than” can modify each of the numbers in the series or range.

[0105] In the event of a conflict between an indicated target site and the nucleotide sequence for a sense or antisense strand, the indicated sequence takes precedence.

[0106] In the event of a conflict between a chemical structure and a chemical name, the chemical structure takes precedence.

[0107] As used herein, the term “kidney stone disease” refers to a disease in which kidney stones (also called renal stones or urinary stones) form in one or both kidneys of the subject. Kidney stones are small, hard deposits which are made up of minerals or other compounds found in urine. Kidney stones vary in size, shape, and color. To be cleared from the body (or “passed”), the stones need to travel through ducts that carry urine from the kidneys to the bladder (ureters) and be excreted. Depending on their size, kidney stones generally take days to weeks to pass out of the body. There are four main types of kidney stones which are classified by the material they are made of. Up to 75 percent of all kidney stones are composed primarily of calcium. Stones can also be made up of uric acid (a normal waste product), cystine (a protein building block), or struvite (a phosphate mineral). Stones form when there is more of the compound in the urine than can be dissolved. This imbalance can occur when there is an increased amount of the material in the urine, a reduced amount of liquid urine, or a combination of both. People are most likely to develop kidney stones between ages 40 and 60, though the stones can appear at any age. Research shows that 35 to 50 percent of people who have one kidney stone will develop additional stones, usually within 10 years of the first stone.

[0108] In one embodiment, the kidney stone disease is a calcium oxalate kidney stone disease. In another embodiment, the kidney stone disease is a non-calcium oxalate kidney stone disease.

[0109] In some embodiments, the kidney stone disease (either calcium oxalate kidney stone disease or non-calcium oxalate kidney stone disease) is non-recurrent kidney stone disease. In other embodiments, the kidney stone disease (either calcium oxalate kidney stone disease or non-calcium oxalate kidney stone disease) is recurrent kidney stone disease.

[0110] As used herein, the term “non-recurrent kidney stone disease” refers to kidney stone disease newly diagnosed in a subject, i.e., the subject was not previously diagnosed as having had kidney stone disease.

[0111] As used herein, the term “recurrent kidney stone disease” refers to kidney stone disease that returns in a subject that previously had kidney stone disease and was successfully treated for the disease (e.g., surgically treated to remove the kidney stone) or passed a kidney stone. Recurrent kidney stone disease may return at any time interval following treatment of the subject for kidney stone disease. In one embodiment, a subject having recurrent kidney stone disease is a subject that had at least two hospital admissions for kidney stone disease that were at least 90 days apart.

[0112] The term kidney stone disease, as used herein, does not include primary hyperoxaluria 1 (PH1), primary hyperoxaluria 2 (PH2), or primary hyperoxaluria 3 (PH3).

[0113] The term “alanine-glyoxylate aminotransferase” or “AGXT”, also known as “SPAT,” “AGXT1,” “L-Alanine: Glyoxylate Aminotransferase 1,” “PH1,” “Primary Hyperoxaluria Type 1,” “Serine: Pyruvate Aminotransferase,” “TLH6,” “Alanine-Glyoxylate Aminotransferase,” “Hepatic Peroxisomal Alanine: Glyoxylate Aminotransferase,” “AGT,” “Serine-Pyruvate Aminotransferase,” “AGT1,” “Serine-Pyruvate Aminotransferase,” “SPT,” “glycolicaciduria,” and “Oxalosis I” refers to the well-known gene that encodes the protein, AGXT, involved in oxalate synthesis (see, e.g., FIG. 1A).

[0114] Nucleotide and amino acid sequences of AGXT may be found, for example, at GenBank Accession No. NM_000030.2 (Homo sapiens AGXT mRNA, SEQ ID NO: 29) and NP_000021.1 (Homo sapiens AGXT protein, SEQ ID NO: 30), the entire contents of each of which are incorporated herein by reference.

[0115] Additional examples of AGXT sequences may be found in publically available databases, for example, GenBank, OMIM, and UniProt. Additional information on AGXT can be found, for example, at www.ncbi.nlm.nih.gov/gene/189/.

[0116] Numerous variants of AGXT have been identified and may be found in publically available databases, for example, Clinvar at, for example, www.ncbi.nlm.nib.gov/clinvar/) and the genome aggregation database (gnomAD) at, for example, gnomad.broadinstitute.org/.

[0117] Exemplary AGXT variants for use in the present invention are provided in Tables 16, 18, and 20-23. Any one or more of the variants provided in any of Tables 16, 18, and 20-23 may be used in the methods of the present invention.

[0118] In one embodiment, an AGXT variant for use in the present invention is any one or more of the variants annotated in the ClinVar database as being “pathogenic” or “pathogenic/likely pathogenic” for PH1 found at, for example, www.ncbi.nlm.nib.gov/clinvar/?term=AGXT[gene]. Exemplary AGXT variants annotated in the ClinVar database as being “pathogenic” or “pathogenic/likely pathogenic” for PH1 are provided in Tables 18, 20, and 23.

[0119] In one embodiment, an AGXT variant for use in the present invention is any one or more of a loss of function (LOF) AGXT variant, such as an LOF variant annotated by VEP (Variant Effect Predictor /www.ensembl.org/info/docs/tools/vep/index.html) and LOFTEE (Loss-Of-Function Transcript Effect Estimator https://github.com/konradjk/loftee). Exemplary AGXT LOF variants suitable for use in the methods of the present invention include any one or more of the LOF variants in any one of Tables 16 and 20.

[0120] Additional exemplary AGXT varinats for use in the present invention include any one or more of the AGXT variants in gnomAD, e.g., gnomeAD v3 or gnomAD v2.1.1, including those AGXT variants annotated as “predicted loss-of-function” or “pLOF” with or without a pLOF quality flag. GnomAD employs a program (LOFTEE) that flags pLOF variants where the variant annotation or quality is questionable or dubious. Thus, a pLOF with a quality flag indicates that the variant annotation or quality is dubious. Exemplary AGXT variants annotated in the gnomAD v3 database as being pLOF without a pLOF quality flag are provided in Table 22 and Exemplary AGXT variants annotated in the gnomAD v2.1.1 database as being pLOF without a pLOF quality flag are provided in Table 23.

[0121] As used herein, a “loss of function,” “LOF,” “predicted loss of function” or “pLOF” variant is a nucleotide change within the coding sequence of the AGXT gene that, based on translation of the nucleotide sequence or an effect on transcript splicing, is predicted to result in a truncated protein and/or a transcript likely to undergo nonsense mediated decay. LOF variants may be identified using VEP (Variant Effect Predictor www.ensembl.org/info/docs/tools/vep/index.html) and LOFTEE (Loss-Of-Function Transcript Effect Estimator https://github.com/konradjk/loftee).

[0122] As used herein, a “Clinvar” variant is a variant in the coding sequence of the AGXT gene that is annotated as pathogenic or pathogenic/likely pathogenic for PH1 in the ClinVar database, a public archive of reports of relationships among human variants and phenotypes having supporting evidence (see, e.g., www.ncbi.nlm.nih.gov/clinvar/).

[0123] As used herein, a “subject” is an animal, such as a mammal, including a primate (such as a human, a non-human primate, e.g., a monkey, and a chimpanzee), a non-primate (such as a cow, a pig, a camel, a llama, a horse, a goat, a rabbit, a sheep, a hamster, a guinea pig, a cat, a dog, a rat, a mouse, a horse, and a whale), or a bird (e.g., a duck or a goose). In one embodiment, a subject is a human subject

[0124] As used herein, the terms “treating” or “treatment” refer to a beneficial or desired result, such as decreasing recurrence of stones formed and/or inhibiting oxalate accumulation in a subject. The terms “treating” or “treatment” also include, but are not limited to, alleviation or amelioration of one or more symptoms of a kidney stone disease, such as, e.g., slowing the course of the disease; reducing the severity of later-developing disease; nonpruritic rash, nausea, vomiting, and/or abdominal pain; stabilizing current stone burden; and/or preventing further oxalate tissue deposition. “Treatment” can also mean prolonging survival as compared to expected survival in the absence of treatment.

[0125] The term “lower” in the context of a disease marker or symptom refers to a statistically significant decrease in such level. The decrease can be, for example, at least 10%, at least 15%, at least 20%, at least 25%, at least 30%, at least 35%, at least 40%, at least 45%, at least 50%, at least 55%, at least 60%, at least 65%, at least 70%, at least 75%, at least 80%, at least 85%, at least 90%, at least 95%, or more and is preferably down to a level accepted as within the range of normal for an individual without such disorder.

[0126] As used herein, “prevention” or “preventing,” when used in reference to a disease refers to a reduction in the likelihood that a subject will develop a symptom associated with such disease, disorder, or condition, e.g., stone formation. The likelihood of, e.g., stone formation, is reduced, for example, when an individual having one or more risk factors for stone formation either fails to develop stones or develops stones with less severity relative to a population having the same risk factors and not receiving treatment as described herein. The failure to develop a disease, or the reduction in the development of a symptom associated with such a disease, disorder or condition (e.g., by at least about 10% on a clinically accepted scale for that disease or disorder), or the exhibition of delayed symptoms delayed (e.g., by days, weeks, months or years) is considered effective prevention.

[0127] “Therapeutically effective amount,” as used herein, is intended to include the amount of an inhibitor that, when administered to a subject having a kidney stone disease, is sufficient to effect treatment of the disease (e.g., by diminishing, ameliorating or maintaining the existing disease or one or more symptoms of disease). The “therapeutically effective amount” may vary depending on the inhibitor, how the inhibitor is administered, the disease and its severity and the history, age, weight, family history, genetic makeup, the types of preceding or concomitant treatments, if any, and other individual characteristics of the subject to be treated.

[0128] “Prophylactically effective amount,” as used herein, is intended to include the amount of an inhibitor that, when administered to a subject having a kidney stone disease, is sufficient to prevent or ameliorate the disease or one or more symptoms of the disease. Ameliorating the disease includes slowing the course of the disease or reducing the severity of later-developing disease. The “prophylactically effective amount” may vary depending on the inhibitor, how the inhibitor is administered, the degree of risk of disease, and the history, age, weight, family history, genetic makeup, the types of preceding or concomitant treatments, if any, and other individual characteristics of the patient to be treated.

[0129] A “therapeutically-effective amount” or “prophylacticaly effective amount” also includes an amount of an inhibitor that produces some desired local or systemic effect at a reasonable benefit/risk ratio applicable to any treatment. Inhibitors employed in the methods of the present invention may be administered in a sufficient amount to produce a reasonable benefit/risk ratio applicable to such treatment.

[0130] In the methods of the invention which include administering to a subject a pharmaceutical composition comprising a first dsRNA agent targeting LDHA and a second dsRNA agent targeting HAO1, the therapeutically effective amount of the first dsRNA agent may be the same or different than the therapeutically effective amount of the second dsRNA agent. Similarly, in the methods of the invention which include administering to a subject a pharmaceutical composition comprising a first dsRNA agent targeting LDHA and a second dsRNA agent targeting HAO1, the prophylacticly effective amount of the first dsRNA agent may be the same or different than the prophylacticaly effective amount of the second dsRNA agent.

[0131] In addition, in the methods of the invention which include administering to a subject a pharmaceutical composition comprising a first single stranded antisense polynucleotide agent targeting LDHA and a second single stranded antisense polynucleotide agent targeting HAO1, the therapeutically effective amount of the first single stranded antisense polynucleotide agent may be the same or different than the therapeutically effective amount of the second single stranded antisense polynucleotide agent. Similarly, in the methods of the invention which include administering to a subject a pharmaceutical composition comprising a first single stranded antisense polynucleotide agent targeting LDHA and a second single stranded antisense polynucleotide agent targeting HAO1, the prophylacticly effective amount of the first single stranded antisense polynucleotide agent may be the same or different than the prophylacticaly effective amount of the second single stranded antisense polynucleotide agent.

[0132] As used herein, the term a “nucleic acid inhibitor” includes iRNA agents and antisense polynucleotide agents.

[0133] The terms “iRNA”, “RNAi agent,” “iRNA agent,” “RNA interference agent” as used interchangeably herein, refer to an agent that contains RNA as that term is defined herein, and which mediates the targeted cleavage of an RNA transcript via an RNA-induced silencing complex (RISC) pathway. RNA interference (RNAi) is a process that directs the sequence-specific degradation of mRNA. RNAi modulates, e.g., inhibits, the expression of LDHA and/or HAO1 in a cell, e.g., a cell within a subject, such as a subject suffering from a kidney stone disease.

[0134] In one embodiment, an RNAi agent of the disclosure includes a single stranded RNAi that interacts with a target RNA sequence, e.g., an LDHA and/or HAO1 target mRNA sequence, to direct the cleavage of the target RNA. Without wishing to be bound by theory it is believed that long double stranded RNA introduced into cells is broken down into double-stranded short interfering RNAs (siRNAs) comprising a sense strand and an antisense strand by a Type III endonuclease known as Dicer (Sharp et al. (2001) Genes Dev. 15:485). Dicer, a ribonuclease-III-like enzyme, processes these dsRNA into 19-23 base pair short interfering RNAs with characteristic two base 3′ overhangs (Bernstein, et al., (2001) Nature 409:363). These siRNAs are then incorporated into an RNA-induced silencing complex (RISC) where one or more helicases unwind the siRNA duplex, enabling the complementary antisense strand to guide target recognition (Nykanen, et al., (2001) Cell 107:309). Upon binding to the appropriate target mRNA, one or more endonucleases within the RISC cleave the target to induce silencing (Elbashir, et al., (2001) Genes Dev. 15:188). Thus, in one aspect the disclosure relates to a single stranded RNA (ssRNA) (the antisense strand of a siRNA duplex) generated within a cell and which promotes the formation of a RISC complex to effect silencing of the target gene, i.e., an LDHA and.or HAO1 gene. Accordingly, the term “siRNA” is also used herein to refer to an RNAi as described above.

[0135] In another embodiment, the RNAi agent may be a single-stranded RNA that is introduced into a cell or organism to inhibit a target mRNA. Single-stranded RNAi agents bind to the RISC endonuclease, Argonaute 2, which then cleaves the target mRNA. The single-stranded siRNAs are generally 15-30 nucleotides and are chemically modified. The design and testing of single-stranded RNAs are described in U.S. Pat. No. 8,101,348 and in Lima et al., (2012) Cell 150:883-894, the entire contents of each of which are hereby incorporated herein by reference. Any of the antisense nucleotide sequences described herein may be used as a single-stranded siRNA as described herein or as chemically modified by the methods described in Lima et al., (2012) Cell 150:883-894.

[0136] In another embodiment, a “RNAi agent” for use in the compositions and methods of the disclosure is a double stranded RNA and is referred to herein as a “double stranded RNAi agent,” “double stranded RNA (dsRNA) molecule,” “dsRNA agent,” or “dsRNA”. The term “dsRNA” refers to a complex of ribonucleic acid molecules, having a duplex structure comprising two anti-parallel and substantially complementary nucleic acid strands, referred to as having “sense” and “antisense” orientations with respect to a target RNA, i.e., an LDHA and/or HAO1 gene. In some embodiments of the disclosure, a double stranded RNA (dsRNA) triggers the degradation of a target RNA, e.g., an mRNA, through a post-transcriptional gene-silencing mechanism referred to herein as RNA interference or RNAi.

[0137] In yet another embodiment, an “iRNA” for use in the compositions and methods of the invention is a “dual targeting RNAi agent.” The term “dual targeting RNAi agent” refers to a molecule comprising a first dsRNA agent comprising a complex of ribonucleic acid molecules, having a duplex structure comprising two anti-parallel and substantially complementary nucleic acid strands, referred to as having “sense” and “antisense” orientations with respect to a first target RNA, i.e., an LDHA gene, covalently attached to a molecule comprising a second dsRNA agent comprising a complex of ribonucleic acid molecules, having a duplex structure comprising two anti-parallel and substantially complementary nucleic acid strands, referred to as having “sense” and “antisense” orientations with respect to a second target RNA, i.e., an HAO1 gene. In some embodiments of the invention, a dual targeting RNAi agent triggers the degradation of the first and the second target RNAs, e.g., mRNAs, through a post-transcriptional gene-silencing mechanism referred to herein as RNA interference or RNAi.

[0138] The terms “polynucleotide agent,” “antisense polynucleotide agent” “antisense compound”, and “agent” as used interchangeably herein, refer to an agent comprising a single-stranded oligonucleotide that contains RNA as that term is defined herein, and which targets nucleic acid molecules encoding LDHA and/or HAO1 (e.g., mRNA encoding LDHA and/or HAO1). The antisense polynucleotide agents specifically bind to the target nucleic acid molecules via hydrogen bonding (e.g., Watson-Crick, Hoogsteen, or reversed Hoogsteen hydrogen bonding) and interfere with the normal function of the targeted nucleic acid (e.g., by an antisense mechanism of action). This interference with or modulation of the function of a target nucleic acid by the polynucleotide agents of the present invention is referred to as “antisense inhibition.” The functions of the target nucleic acid molecule to be interfered with may include functions such as, for example, translocation of the RNA to the site of protein translation, translation of protein from the RNA, splicing of the RNA to yield one or more mRNA species, and catalytic activity which may be engaged in or facilitated by the RNA.

[0139] As used herein, “target sequence” refers to a contiguous portion of the nucleotide sequence of an mRNA molecule formed during the transcription of an LDHA gene or an HAO1 gene, including mRNA that is a product of RNA processing of a primary transcription product.

[0140] In one embodiment, the target portion of the sequence will be at least long enough to serve as a substrate for iRNA-directed cleavage at or near that portion of the nucleotide sequence of an mRNA molecule formed during the transcription of an LDHA gene. In another embodiment, the target portion of the sequence will be at least long enough to serve as a substrate for iRNA-directed cleavage at or near that portion of the nucleotide sequence of an mRNA molecule formed during the transcription of an HAO1 gene.

[0141] The target sequence of an LDHA gene may be from about 9-36 nucleotides in length, e.g., about 15-30 nucleotides in length. For example, the target sequence can be from about 15-30 nucleotides, 15-29, 15-28, 15-27, 15-26, 15-25, 15-24, 15-23, 15-22, 15-21, 15-20, 15-19, 15-18, 15-17, 18-30, 18-29, 18-28, 18-27, 18-26, 18-25, 18-24, 18-23, 18-22, 18-21, 18-20, 19-30, 19-29, 19-28, 19-27, 19-26, 19-25, 19-24, 19-23, 19-22, 19-21, 19-20, 20-30, 20-29, 20-28, 20-27, 20-26, 20-25, 20-24,20-23, 20-22, 20-21, 21-30, 21-29, 21-28, 21-27, 21-26, 21-25, 21-24, 21-23, or 21-22 nucleotides in length. Ranges and lengths intermediate to the above recited ranges and lengths are also contemplated to be part of the invention.

[0142] In aspects in which a first dsRNA agent targeting LDHA and a second dsRNA agent targeting HAO1 are covalently attached (i.e., a dual targeting RNAi agent), the length of the LDHA target sequence may be the same as the HAO1 target sequence or different.

[0143] A target sequence may be from about 4-50 nucleotides in length, e.g., 8-45, 10-45, 10-40, 10-35, 10-30, 10-20, 11-45, 11-40, 11-35, 11-30, 11-20, 12-45, 12-40, 12-35, 12-30, 12-25, 12-20, 13-45, 13-40, 13-35, 13-30, 13-25, 13-20, 14-45, 14-40, 14-35, 14-30, 14-25, 14-20, 15-45, 15-40, 15-35, 15-30, 15-25, 15-20, 16-45, 16-40, 16-35, 16-30, 16-25, 16-20, 17-45, 17-40, 17-35, 17-30, 17-25, 17-20, 18-45, 18-40, 18-35, 18-30, 18-25, 18-20, 19-45, 19-40, 19-35, 19-30, 19-25, 19-20, e.g., 4, 5, 6, 7, 8, 9, 10, 11, 12, 13, 14, 15, 16, 17, 18, 19, 20, 21, 22, 23, 24, 25, 26, 27, 28, 29, 30, 31, 32, 33, 34, 35, 36, 37, 38, 39, 40, 41, 42, 43, 44, 45, 46, 47, 48, 49, or 50 contiguous nucleotides of the nucleotide sequence of an mRNA molecule formed during the transcription of an LDHA gene and/or an HAO1 gene. Ranges and lengths intermediate to the above recited ranges and lengths are also contemplated to be part of the invention.

[0144] The terms “complementary,” “fully complementary” and “substantially complementary” are used herein with respect to the base matching between a nucleic acid inhibitor and a target sequence. The term“complementarity” refers to the capacity for pairing between nucleobases of a first nucleic acid and a second nucleic acid.

[0145] As used herein, a nucleic acid inhibitor that is “substantially complementary to at least part of” a messenger RNA (mRNA) refers to a nucleic acid inhibitor that is substantially complementary to a contiguous portion of the mRNA of interest (e.g., an mRNA encoding LDHA and/or an mRNA encoding HAO1). For example, a polynucleotide is complementary to at least a part of an HAO1 mRNA if the sequence is substantially complementary to a non-interrupted portion of an mRNA encoding HAO1.

[0146] As used herein, the term “region of complementarity” refers to the region of the nucleic acid inhibito that is substantially complementary to a sequence, for example a target sequence, e.g., an LDHA nucleotide sequence and/or an HAO1 nucleotide sequence, as defined herein. Where the region of complementarity is not fully complementary to the target sequence, the mismatches can be in the internal or terminal regions of the molecule. Generally, the most tolerated mismatches are in the terminal regions, e.g., within 5, 4, 3, or 2 nucleotides of the 5′- and/or 3′-terminus of the polynucleotide.

[0147] As used herein, and unless otherwise indicated, the term “complementary,” when used to describe a first nucleotide sequence in relation to a second nucleotide sequence, refers to the ability of a polynucleotide comprising the first nucleotide sequence to hybridize and form a duplex structure under certain conditions with the second nucleotide sequence, as will be understood by the skilled person. Such conditions can, for example, be stringent conditions, where stringent conditions can include: 400 mM NaCl, 40 mM PIPES pH 6.4, 1 mM EDTA, 50° C. or 70° C. for 12-16 hours followed by washing (see, e.g., “Molecular Cloning: A Laboratory Manual, Sambrook, et al. (1989) Cold Spring Harbor Laboratory Press). Other conditions, such as physiologically relevant conditions as can be encountered inside an organism, can apply. The skilled person will be able to determine the set of conditions most appropriate for a test of complementarity of two sequences in accordance with the ultimate application of the nucleotides.

[0148] Complementary sequences include those nucleotide sequences of a nucleic acid inhibitor of the invention that base-pair to a second nucleotide sequence over the entire length of one or both nucleotide sequences. Such sequences can be referred to as “fully complementary” with respect to each other herein. However, where a first sequence is referred to as “substantially complementary” with respect to a second sequence herein, the two sequences can be fully complementary, or they can form one or more, but generally not more than 5, 4, 3 or 2 mismatched base pairs upon hybridization for a duplex up to 30 base pairs, while retaining the ability to hybridize under the conditions most relevant to their ultimate application, e.g., inhibition of target gene expression.

[0149] “Complementary” sequences, as used herein, can also include, or be formed entirely from, non-Watson-Crick base pairs and/or base pairs formed from non-natural and modified nucleotides, in so far as the above requirements with respect to their ability to hybridize are fulfilled. Such non-Watson-Crick base pairs include, but are not limited to, G:U Wobble or Hoogstein base pairing.

[0150] As used herein, the term “strand comprising a sequence” refers to an oligonucleotide comprising a chain of nucleotides that is described by the sequence referred to using the standard nucleotide nomenclature.

[0151] “G,” “C,” “A,” “T” and “U” each generally stand for a nucleotide that contains guanine, cytosine, adenine, thymidine and uracil as a base, respectively. However, it will be understood that the terms “deoxyribonucleotide”, “ribonucleotide” and “nucleotide” can also refer to a modified nucleotide, as further detailed below, or a surrogate replacement moiety (see, e.g., Table 1). The skilled person is well aware that guanine, cytosine, adenine, and uracil can be replaced by other moieties without substantially altering the base pairing properties of an oligonucleotide comprising a nucleotide bearing such replacement moiety. For example, without limitation, a nucleotide comprising inosine as its base can base pair with nucleotides containing adenine, cytosine, or uracil. Hence, nucleotides containing uracil, guanine, or adenine can be replaced in the nucleotide sequences of the agents featured in the invention by a nucleotide containing, for example, inosine. In another example, adenine and cytosine anywhere in the oligonucleotide can be replaced with guanine and uracil, respectively to form G-U Wobble base pairing with the target mRNA. Sequences containing such replacement moieties are suitable for the compositions and methods featured in the invention.

[0152] A “nucleoside” is a base-sugar combination. The “nucleobase” (also known as “base”) portion of the nucleoside is normally a heterocyclic base moiety. “Nucleotides” are nucleosides that further include a phosphate group covalently linked to the sugar portion of the nucleoside. For those nucleosides that include a pentofuranosyl sugar, the phosphate group can be linked to the 2′, 3′ or 5′ hydroxyl moiety of the sugar. “Polynucleotides,” also referred to as “oligonucleotides,” are formed through the covalent linkage of adjacent nucleosides to one another, to form a linear polymeric oligonucleotide. Within the polynucleotide structure, the phosphate groups are commonly referred to as forming the internucleoside linkages of the polynucleotide.

[0153] In general, the majority of nucleotides of the nucleic acid inhibitors are ribonucleotides, but as described in detail herein, the inhibitors may also include one or more non-ribonucleotides, e.g., a deoxyribonucleotide. In addition, as used in this specification, a “nucleic acid inhibitor” may include nucleotides (e.g., ribonucleotides or deoxyribonucleotides) with chemical modifications; a nucleic acid inhibitor may include substantial modifications at multiple nucleotides.

[0154] As used herein, the term “modified nucleotide” refers to a nucleotide having, independently, a modified sugar moiety, a modified internucleotide linkage, and/or modified nucleobase. Thus, the term modified nucleotide encompasses substitutions, additions or removal of, e.g., a functional group or atom, to internucleoside linkages, sugar moieties, or nucleobases. The modifications suitable for use in the nucleic acid inhibitors of the invention include all types of modifications disclosed herein or known in the art. Any such modifications, as used in nucleotides, are encompassed by “nucleic acid inhibitor” for the purposes of this specification and claims.

[0155] The term “LDHA” (used interchangeable herein with the term “Ldha”), also known as Cell Proliferation-Inducing Gene 19 Protein, Renal Carcinoma Antigen NY-REN-59, LDH Muscle Subunit, EC 1.1.1.27 4 61, LDH-A, LDH-M, Epididymis Secretory Sperm Binding Protein Li 133P, L-Lactate Dehydrogenase A Chain, Proliferation-Inducing Gene 19, Lactate Dehydrogenase M, HEL-S-133P, EC 1.1.1, GSD11, PIG19, and LDHM, refers to the well known gene encoding a lactate dehydrogenase A from any vertebrate or mammalian source, including, but not limited to, human, bovine, chicken, rodent, mouse, rat, porcine, ovine, primate, monkey, and guinea pig, unless specified otherwise.

[0156] The term also refers to fragments and variants of native LDHA that maintain at least one in vivo or in vitro activity of a native LDHA. The term encompasses full-length unprocessed precursor forms of LDHA as well as mature forms resulting from post-translational cleavage of the signal peptide and forms resulting from proteolytic processing.

[0157] The sequence of a human LDHA mRNA transcript can be found at, for example, GenBank Accession No. GI: 207028493 (NM_001135239.1; SEQ ID NO:1), GenBank Accession No. GI: 260099722 (NM_001165414.1; SEQ ID NO:3), GenBank Accession No. GI: 260099724 (NM_001165415.1; SEQ ID NO:5), GenBank Accession No. GI: 260099726 (NM_001165416.1; SEQ ID NO:7), GenBank Accession No. GI: 207028465 (NM_005566.3; SEQ ID NO:9); the sequence of a mouse LDHA mRNA transcript can be found at, for example, GenBank Accession No. GI: 257743038 (NM_001136069.2; SEQ ID NO:11), GenBank Accession No. GI: 257743036(NM_010699.2; SEQ ID NO:13); the sequence of a rat LDHA mRNA transcript can be found at, for example, GenBank Accession No. GI: 8393705 (NM_017025.1; SEQ ID NO:15); and the sequence of a monkey LDHA mRNA transcript can be found at, for example, GenBank Accession No. GI: 402766306 (NM_001257735.2; SEQ ID NO:17), GenBank Accession No. GI: 545687102 (NM_001283551.1; SEQ ID NO:19).

[0158] Additional examples of LDHA mRNA sequences are readily available using publicly available databases, e.g., GenBank, UniProt, and OMIM.

[0159] The term“LDHA” as used herein also refers to a particular polypeptide expressed in a cell by naturally occurring DNA sequence variations of the LDHA gene, such as a single nucleotide polymorphism in the LDHA gene. Numerous SNPs within the LDHA gene have been identified and may be found at, for example, NCBI dbSNP (see, e.g., www.ncbi.nlm.nih.gov/snp).

[0160] As used herein, the term “HAO1” refers to the well known gene encoding the enzyme hydroxyacid oxidase 1 from any vertebrate or mammalian source, including, but not limited to, human, bovine, chicken, rodent, mouse, rat, porcine, ovine, primate, monkey, and guinea pig, unless specified otherwise. Other gene names include GO, GOX, GOX1, HAO, and HAOX1. The protein is also known as glycolate oxidase and (S)-2-hydroxy-acid oxidase.

[0161] The term also refers to fragments and variants of native HAO1 that maintain at least one in vivo or in vitro activity of a native HAO1. The term encompasses full-length unprocessed precursor forms of HAO1 as well as mature forms resulting from post-translational cleavage of the signal peptide and forms resulting from proteolytic processing. The sequence of a human HAO1 mRNA transcript can be found at, for example, GenBank Accession No. GI:11184232 (NM_017545.2; SEQ ID NO:21); the sequence of a monkey HAO1 mRNA transcript can be found at, for example, GenBank Accession No. GI:544464345 (XM_005568381.1; SEQ I DNO:23); the sequence of a mouse HAO1 mRNA transcript can be found at, for example, GenBank Accession No. GI:133893166 (NM_010403.2; SEQ ID NO:25); and the sequence of a rat HAO1 mRNA transcript can be found at, for example, GenBank Accession No. GI: 166157785 (NM_001107780.2; SEQ ID NO:27).

[0162] The term“HAO1,” as used herein, also refers to naturally occurring DNA sequence variations of the HAO1 gene, such as a single nucleotide polymorphism (SNP) in the HAO1 gene. Exemplary SNPs may be found in the NCBI dbSNP Short Genetic Variations database available at www.ncbi.nih.gov/projects/SNP.

### II. Methods of the Invention

[0163] The present invention provides methods for treating a subject suffering from a kidney stone disease. In one embodiment, the kidney stone disease is non-recurrent kidney stone disease. In another embodiment, the kidney stone disease is recurrent kidney stone disease. The methods include determining the presence or absence of a heterozygous alanine-glyoxylate amino transferase (AGXT) gene variant in a sample obtained from the subject; and administering to the subject a therapeutically effective amount of a nucleic acid inhibitor of lactate dehydrogenase A (LDHA) and/or a nucleic acid inhibitor of hydroxyacid oxidase (HAO1), if a heterozygous AGXT gene variant is present in the sample obtained from the subject, thereby treating the subject suffering from a kidney stone formation disease.

[0164] The present invention also provides methods for diagnosing and treating a kidney stone disease in a subject. In one embodiment, the kidney stone disease is non-recurrent kidney stone disease. In another embodiment, the kidney stone disease is recurrent kidney stone disease. The methods include detecting the presence or absence of a heterozygous alanine-glyoxylate amino transferase (AGXT) gene variant in a sample obtained from the subject; diagnosing the subject with a kidney stone disease if a heterozygous AGXT gene variant is present in the sample obtained from the subject; and administering to the subject a therapeutically effective amount of a nucleic acid inhibitor of lactate dehydrogenase A (LDHA) and/or a nucleic acid inhibitor of hydroxyacid oxidase (HAO1), thereby treating the subject suffering from a kidney stone disease.

[0165] In addition, the present invention provides methods for preventing a kidney stone disease in a subject prone to suffering from a kidney stone disease. In one embodiment, the kidney stone disease is non-recurrent kidney stone disease. In another embodiment, the kidney stone disease is recurrent kidney stone disease. The methods include determining the presence or absence of a heterozygous alanine-glyoxylate amino transferase (AGXT) gene variant in a sample obtained from the subject; and administering to the subject a prophylactically effective amount of a nucleic acid inhibitor of lactate dehydrogenase A (LDHA) and/or a nucleic acid inhibitor of hydroxyacid oxidase (HAO1), if a heterozygous AGXT gene variant is present in the sample obtained from the subject, thereby preventing a kidney stone disease in the subject prone to suffering from a kidney stone disease.

[0166] The present invention provides methods for diagnosing and preventing a kidney stone disease in a subject prone to uffering from a kidney stone disease. In one embodiment, the kidney stone disease is non-recurrent kidney stone disease. In another embodiment, the kidney stone disease is recurrent kidney stone disease. The methods include detecting the presence or absence of a heterozygous alanine-glyoxylate amino transferase (AGXT) gene variant in a sample obtained from the subject; diagnosing the subject with a kidney stone disease if a heterozygous AGXT gene variant is present in the sample obtained from the subject; and administering to the subject a prohylactically effective amount of a nucleic acid inhibitor of lactate dehydrogenase A (LDHA) and/or a nucleic acid inhibitor of hydroxyacid oxidase (HAO1), thereby diagnosing and preventing a kidney stone disease in a subject prone to suffering from a kidney stone disease.

[0167] As used herein, the term “determining” means methods which include detecting the presence or absence of marker(s) in the sample. Determining the presence or absence of a heterozygous AGXT variant and detecting the presence or absence of a heterozygous AGXT variant can be accomplished by methods known in the art and those further described herein.

[0168] The methods of the present invention can be practiced in conjunction with any other method(s) used by the skilled practitioner to diagnose, prognose, and/or monitor kidney stone disease. For example, the methods of the invention may be performed in conjunction with any clinical measurement of kidney stone disease known in the art including serological, cytological and/or detection (and quantification, if appropriate) of other molecular markers.

[0169] In any of the methods (and kits) of the invention, the presence or absence of a heterozygous AGXT variant in a sample, such as a sample obtained from a subject (e.g., blood, saliva, cheek swab), may be determined or detected by any of a wide variety of well-known techniques and methods, which transform a heterozygous AGXT variant within the sample into a moiety that can be detected. Non-limiting examples of such methods include analyzing the sample by sequencing methods, nucleic acid hybridization methods, nucleic acid reverse transcription methods, nucleic acid amplification methods, e.g, PCR, immunoblotting, Western blotting, Northern blotting, electron microscopy, mass spectrometry, e.g., MALDI-TOF and SELDI-TOF, immunoprecipitations, immunofluorescence, immunohistochemistry, enzyme linked immunosorbent assays (ELISAs), e.g., amplified ELISA, quantitative blood based assays, e.g., serum ELISA, quantitative urine based assays, flow cytometry, Southern hybridizations, array analysis, using immunological methods for detection of proteins, protein purification methods, protein function or activity assays, and the like, and combinations or sub-combinations thereof.

[0170] For example, an mRNA sample may be obtained from a sample from the subject (e.g., blood, serum, bronchial lavage, mouth swab, saliva, biopsy, or peripheral blood mononuclear cells, by standard methods) and the nucleotide sequence of the AGXT gene in the sample may be detected and/or determined using standard molecular biology techniques, such as by sequence analysis or array-based genotyping.

[0171] It will be readily understood by the ordinarily skilled artisan that essentially any technical means established in the art for detecting the the presence or absence of a heterozygous AGXT variant at either the nucleic acid or protein level, can be used to determine the presence or absence of a heterozygous AGXT variant as discussed herein.

[0172] In one embodiment, the presence or absence of a heterozygous AGXT variant in a sample is determined by detecting a transcribed polynucleotide, or portion thereof, e.g., mRNA, or cDNA, of the AGXT gene. RNA may be extracted from cells using RNA extraction techniques including, for example, using acid phenol/guanidine isothiocyanate extraction (RNAzol B; Biogenesis), RNeasy RNA preparation kits (Qiagen) or PAXgene (PreAnalytix, Switzerland). Typical assay formats utilizing ribonucleic acid hybridization include nuclear run-on assays, RT-PCR, RNase protection assays (Melton et al., Nuc. Acids Res. 12:7035), Northern blotting, in situ hybridization, and microarray analysis.

[0173] In one embodiment, the presence or absence of a heterozygous AGXT variant is determined using a nucleic acid probe. The term “probe”, as used herein, refers to any molecule that is capable of selectively binding to an AGXT variant. Probes can be synthesized by one of skill in the art, or derived from appropriate biological preparations. Probes may be specifically designed to be labeled. Examples of molecules that can be utilized as probes include, but are not limited to, RNA, DNA, proteins, antibodies, and organic molecules.

[0174] Isolated mRNA can be used in hybridization or amplification assays that include, but are not limited to, Southern or Northern analyses, polymerase chain reaction (PCR) analyses and probe arrays. One method for the determination of mRNA levels involves contacting the isolated mRNA with a nucleic acid molecule (probe) that can hybridize to n AGXT variant mRNA. The nucleic acid probe can be, for example, a full-length cDNA, or a portion thereof, such as an oligonucleotide of at least about 7, 10, 15, 20, 25, 30, 35, 40, 45, 50, 100, 250 or about 500 nucleotides in length and sufficient to specifically hybridize under stringent conditions to genomic DNA.

[0175] In one embodiment, the mRNA is immobilized on a solid surface and contacted with a probe, for example by running the isolated mRNA on an agarose gel and transferring the mRNA from the gel to a membrane, such as nitrocellulose. In an alternative embodiment, the probe(s) are immobilized on a solid surface and the mRNA is contacted with the probe(s), for example, in an Affymetrix gene chip array. A skilled artisan can readily adapt known mRNA detection methods for use in determining the presence or absence of a heterozygous AGXT variant mRNA.

[0176] An alternative method for determining the presence or absence of a heterozygous AGXT variant in a sample involves the process of nucleic acid amplification and/or reverse transcriptase (to prepare cDNA) of for example mRNA in the sample, e.g., by RT-PCR (the experimental embodiment set forth in Mullis, 1987, U.S. Pat. No. 4,683,202), ligase chain reaction (Barany (1991) Proc. Natl. Acad. Sci. USA 88:189-193), self-sustained sequence replication (Guatelli et al. (1990) Proc. Natl. Acad. Sci. USA 87:1874-1878), transcriptional amplification system (Kwoh et al. (1989) Proc. Natl. Acad. Sci. USA 86:1173-1177), Q-Beta Replicase (Lizardi et al. (1988) Bio/Technology 6:1197), rolling circle replication (Lizardi et al., U.S. Pat. No. 5,854,033) or any other nucleic acid amplification method, followed by the detection of the amplified molecules using techniques well known to those of skill in the art. These detection schemes are especially useful for the detection of nucleic acid molecules if such molecules are present in very low numbers. In particular aspects of the invention, the presence or absence of a heterozygous AGXT variant is determined by quantitative fluorogenic RT-PCR (i.e., the TaqMan™ System). Such methods typically utilize pairs of oligonucleotide primers that are specific for an AGXT variant. Methods for designing oligonucleotide primers specific for a known sequence are well known in the art.

[0177] The presence or absence of a heterozygous AGXT variant mRNA may be monitored using a membrane blot (such as used in hybridization analysis such as Northern, Southern, dot, and the like), or microwells, sample tubes, gels, beads or fibers (or any solid support comprising bound nucleic acids). See U.S. Pat. Nos. 5,770,722, 5,874,219, 5,744,305, 5,677,195 and 5,445,934, which are incorporated herein by reference. The determination of the presence or absence of a heterozygous AGXT variant may also comprise using nucleic acid probes in solution.

[0178] In one embodiment of the invention, microarrays are used to detect the presence or absence of a heterozygous AGXT variant. Microarrays are particularly well suited for this purpose because of the reproducibility between different experiments. DNA microarrays provide one method for the simultaneous measurement of the levels of large numbers of variants. Each array consists of a reproducible pattern of capture probes attached to a solid support. Labeled RNA or DNA is hybridized to complementary probes on the array and then detected by laser scanning Hybridization intensities for each probe on the array are determined and converted to a quantitative value representing relative gene expression levels. See, e.g., U.S. Pat. Nos. 6,040,138, 5,800,992 and 6,020,135, 6,033,860, and 6,344,316, which are incorporated herein by reference. High-density oligonucleotide arrays are particularly useful for determining the gene expression profile for a large number of RNAs in a sample.

[0179] In certain situations it may be possible to assay for the presence or absence of a heterozygous AGXT variant at the protein level, using a detection reagent that detects the protein product encoded by the mRNA of an AGXT variant. For example, if an antibody reagent is available that binds specifically to an AGXT variant protein product to be detected, and not to other proteins, then such an antibody reagent can be used to detect the presence or absence of a heterozygous AGXT variant in a cellular sample from the subject, or a preparation derived from the cellular sample, using standard antibody-based techniques known in the art, such as FACS analysis, and the like.

[0180] Other known methods for detecting the presence or absence of a heterozygous AGXT variant at the protein level include methods such as electrophoresis, capillary electrophoresis, high performance liquid chromatography (HPLC), thin layer chromatography (TLC), hyperdiffusion chromatography, and the like, or various immunological methods such as fluid or gel precipitin reactions, immunodiffusion (single or double), immunoelectrophoresis, radioimmunoassay (RIA), enzyme-linked immunosorbent assays (ELISAs), immunofluorescent assays, and Western blotting.

[0181] Proteins from samples can be isolated using techniques that are well known to those of skill in the art. The protein isolation methods employed can, for example, be those described in Harlow and Lane (IIarlow and Lane, 1988, Antibodies: A Laboratory Manual, Cold Spring Harbor Laboratory Press, Cold Spring Harbor, New York).

[0182] In one embodiment of the invention, proteomic methods, e.g., mass spectrometry, are used to determine the presence or absence of a heterozygous AGXT variant. Mass spectrometry is an analytical technique that consists of ionizing chemical compounds to generate charged molecules (or fragments thereof) and measuring their mass-to-charge ratios. In a typical mass spectrometry procedure, a sample is obtained from a subject, loaded onto the mass spectrometry, and its components (e.g., an AGXT variant) are ionized by different methods (e.g., by impacting it with an electron beam), resulting in the formation of charged particles (ions). The mass-to-charge ratio of the particles is then calculated from the motion of the ions as they transit through electromagnetic fields.

[0183] For example, matrix-associated laser desorption/ionization time-of-flight mass spectrometry (MALDI-TOF MS) or surface-enhanced laser desorption/ionization time-of-flight mass spectrometry (SELDI-TOF MS) which involves the application of a biological sample, such as serum, to a protein-binding chip (Wright, G. L., Jr., et al. (2002) Expert Rev Mol Diagn 2:549; Li, J., et al. (2002) Clin Chem 48:1296; Laronga, C., et al. (2003) Dis Markers 19:229; Petricoin, E. F., et al. (2002) 359:572; Adam, B. L., et al. (2002) Cancer Res 62:3609; Tolson, J., et al. (2004) Lab Invest 84:845; Xiao, Z., et al. (2001) Cancer Res 61:6029) can be used to determine the level of a marker of the invention. When the subject to be treated is a mammal such as a human, the nucleic acid inhibitor can be administered by any means known in the art including, but not limited to oral, intraperitoneal, or parenteral routes, including intracranial (e.g., intraventricular, intraparenchymal and intrathecal), intravenous, intramuscular, subcutaneous, transdermal, airway (aerosol), nasal, rectal, and topical (including buccal and sublingual) administration. In certain embodiments, the compositions are administered by intravenous infusion or injection. In certain embodiments, the compositions are administered by subcutaneous injection.

[0184] In some embodiments, the administration is via a depot injection. A depot injection may release the nucleic acid inhibitor in a consistent way over a prolonged time period. Thus, a depot injection may reduce the frequency of dosing needed to obtain a desired effect, e.g., a desired inhibition of LDHA, or a desired inhibition of both LDHA and HAO1, or a therapeutic or prophylactic effect. A depot injection may also provide more consistent serum concentrations. Depot injections may include subcutaneous injections or intramuscular injections. In preferred embodiments, the depot injection is a subcutaneous injection.

[0185] In some embodiments, the administration is via a pump. The pump may be an external pump or a surgically implanted pump. In certain embodiments, the pump is a subcutaneously implanted osmotic pump. In other embodiments, the pump is an infusion pump. An infusion pump may be used for intravenous, subcutaneous, arterial, or epidural infusions. In preferred embodiments, the infusion pump is a subcutaneous infusion pump. In other embodiments, the pump is a surgically implanted pump that delivers the nucleic acid inhibitor to the liver.

[0186] A nucleic acid inhibitor of the invention may be present in a pharmaceutical composition, such as in a suitable buffer solution. The buffer solution may comprise acetate, citrate, prolamine, carbonate, or phosphate, or any combination thereof. In one embodiment, the buffer solution is phosphate buffered saline (PBS). The pH and osmolarity of the buffer solution containing the iRNA can be adjusted such that it is suitable for administering to a subject.

[0187] Alternatively, a nucleic acid inhibitor of the invention may be administered as a pharmaceutical composition, such as a dsRNA liposomal formulation.

[0188] The mode of administration may be chosen based upon whether local or systemic treatment is desired and based upon the area to be treated. The route and site of administration may be chosen to enhance targeting.

[0189] The methods (and uses) of the invention include administering to the subject, e.g., a human, a therapeutically effective amount of a nucleic acid inhibitor, e.g., a dsRNA agent, a dual targeting iRNA agent, a single stranded antisense polynucleotide agent, or a pharmaceutical composition comprising a nucleic acid inhibitor, e.g., a dsRNA, a pharmaceutical composition comprising a dual targeting RNAi agent, a pharmaceutical composition of the invention comprising a first dsRNA agent that inhibits expression of LDHA and a second dsRNA agent that inhibits expression of HAO1, or a pharmaceutical composition of the invention comprising a single stranded antisense polynucleotide agent.

[0190] Subjects that would benefit from the methods of the invention include subjects carrying a heterozygous AGXT variant and suffering, or prone to suffering, from a kidney stone disease, such as non-recurrent or recurrent kidney stone disease.

[0191] In some embodiments, a subject that would benefit from the methods of the invention carries a heterozygous AGXT variant, suffers from a kidney stone disease and has normal urinary oxalate excretion levels, e.g., less than about 40 mg (440 μmol) in 24 hours (e.g., men have a normal urinary oxalate excretion level of less than about 43 mg/day and women have a normal urinary oxalate excretion level of less than about 32 mg/day). In another embodiment, a subject that would benefit from the methods of the invention carries a heterozygous AGXT variant, suffers from a kidney stone disease and has mild hyperoxaluria (a urinary oxalate excretion level of about 40 to about 60 mg/day).

[0192] In another embodiment, a subject that would benefit from the methods of the invention carries a heterozygous AGXT variant, suffers from a kidney stone disease and has high hyperoxaluria (a urinary oxalate excretion level of greater than about 60 mg/day).

[0193] In one embodiment, a subject that would benefit from the methods of the invention carries a heterozygous AGXT variant and is a human at risk of developing a kidney stone disease. In one embodiment, a subject that would benefit from the methods of the invention carries a heterozygous AGXT variant and is a human suffering from a kidney stone diease. In yet another embodiment, a subject that would benefit from the methods of the invention carries a heterozygous AGXT variant is a human being treated for a kidney stone disease. In yet another embodiment, a subject that would benefit from the methods of the invention carries a heterozygous AGXT variant is a human being previously treated for a kidney stone disease, e.g., the subject passed a kidney stone and/or had surgery to remove a kidney stone.

[0194] In some embodiment, the methods of the invention further include altering the diet of the subject (e.g., decreasing protein intake, decreasing sodium intake, decreasing ascorbic acid intake, moderatating calcium intake, supplementing phosphate, supplementing magnesium, or pyridoxine treatment; or a combination of any of the foregoing) and/or transplanting a kidney in the subject

[0195] In the methods (and uses) of the invention which comprise administering to a subject a first nucleic acid inhibitor, such as a dsRNA agent targeting LDHA and a second dsRNA agent targeting HAO1, the first and second nucleic acid inhibitor may be formulated in the same composition or different compositions and may administered to the subject in the same composition or in separate compositions.

[0196] The nucleic acid inhibitor may be administered to the subject at a dose of about 0.1 mg/kg to about 50 mg/kg. Typically, a suitable dose will be in the range of about 0.1 mg/kg to about 5.0 mg/kg, preferably about 0.3 mg/kg and about 3.0 mg/kg.

[0197] In the methods (and uses) of the invention which comprise administering to a subject a first nucleic acid inhibitor, e.g., dsRNA agent targeting LDHA and a second dsRNA agent targeting HAO1, the first and second nucleic acid inhibitor may be administered to a subject at the same dose or different doses.

[0198] The nucleic acid inhibitor can be administered by intravenous infusion over a period of time, on a regular basis. In certain embodiments, after an initial treatment regimen, the treatments can be administered on a less frequent basis.

[0199] Administration of a nucleic acid inhibitor can reduce LDHA levels, e.g., in a cell, tissue, blood, urine or other compartment of the patient by at least about 5%, 6, 7, 8, 9, 10, 11, 12, 13, 14, 15, 16, 17, 18, 19, 20, 21, 22, 23, 24, 25, 26, 27, 28, 29, 30, 31, 32, 33, 34, 35, 36, 37, 38, 39, 40, 41, 42, 43, 44, 45, 46, 47, 48, 39, 50, 51, 52, 53, 54, 55, 56, 57, 58, 59, 60, 61, 62, 63, 64, 65, 66, 67, 68, 69, 70, 71, 72, 73, 74, 75, 76, 77, 78, 79, 80, 81, 82, 83, 84, 85, 86, 87, 88, 89, 90, 91, 92, 93, 94, 95, 96, 97, 98, or at least about 99% or more. In a preferred embodiment, administration of the nucleic acid inhibitor can reduce LDHA levels, e.g., in a cell, tissue, blood, urine or other compartment of the patient by at least 20%.

[0200] Administration of a nucleic acid inhibitor can reduce HAO1 levels, e.g., in a cell, tissue, blood, urine or other compartment of the patient by at least about 5%, 6, 7, 8, 9, 10, 11, 12, 13, 14, 15, 16, 17, 18, 19, 20, 21, 22, 23, 24, 25, 26, 27, 28, 29, 30, 31, 32, 33, 34, 35, 36, 37, 38, 39, 40, 41, 42, 43, 44, 45, 46, 47, 48, 39, 50, 51, 52, 53, 54, 55, 56, 57, 58, 59, 60, 61, 62, 63, 64, 65, 66, 67, 68, 69, 70, 71, 72, 73, 74, 75, 76, 77, 78, 79, 80, 81, 82, 83, 84, 85, 86, 87, 88, 89, 90, 91, 92, 93, 94, 95, 96, 97, 98, or at least about 99% or more. In a preferred embodiment, administration of the nucleic acid inhibitor can reduce HAO1 levels, e.g., in a cell, tissue, blood, urine or other compartment of the patient by at least 20%.

[0201] In the methods (and uses) of the invention which comprise administering to a subject a first nucleic acid inhibitor, e.g., a dsRNA agent targeting LDHA and a second nucleic acid inhibitor, e.g., a dsRNA agent targeting HAO1, the level of inhibition of LDHA may be the same or different that the level of inhibition of HAO1.

[0202] In the methods (and uses) of the invention which comprise administering to a subject a dual targeting RNAi agent, the dual targeting RNAi agent may inhibit expression of the LDHA gene and the HAO1 gene to a level substantially the same as the level of inhibition of expression obtained by the contacting of a cell with both dsRNA agents individually, or the dual targeting RNAi agent may inhibit expression of the LDHA gene and the HAO1 gene to a level higher than the level of inhibition of expression obtained by the contacting of a cell with both dsRNA agents individually.

[0203] Before administration of a full dose of the nucleic acid inhibitor, patients can be administered a smaller dose, such as a 5% infusion reaction, and monitored for adverse effects, such as an allergic reaction. In another example, the patient can be monitored for unwanted immunostimulatory effects, such as increased cytokine (e.g., TNF-alpha or INF-alpha) levels.

[0204] Alternatively, the nucleic acid inhibitor can be administered subcutaneously, i.e., by subcutaneous injection. One or more injections may be used to deliver the desired dose of nucleic acid inhibitor to a subject. The injections may be repeated over a period of time. The administration may be repeated on a regular basis. In certain embodiments, after an initial treatment regimen, the treatments can be administered on a less frequent basis. A repeat-dose regimine may include administration of a therapeutic amount of nucleic acid inhibitor on a regular basis, such as every other day, on a monthly basis, or once a year. In certain embodiments, the nucleic acid inhibitor is administered about once per month to about once per quarter (i.e., about once every three months).

[0205] In one embodiment, the method includes administering a composition featured herein such that expression of the target LDHA gene and/or the target HAO1 gene is decreased, such as for about 1, 2, 3, 4, 5, 6, 7, 8, 12, 16, 18, 24 hours, 28, 32, or about 36 hours. In one embodiment, expression of the target LDHA gene and the HAO1 gene is decreased for an extended duration, e.g., at least about two, three, four days or more, e.g., about one week, two weeks, three weeks, or four weeks or longer. Preferably, the nucleic acid inhibitors useful for the methods and compositions featured herein specifically target RNAs (primary or processed) of the target LDHA and HAO1 genes. Compositions and methods for inhibiting the expression of these genes using iRNAs can be prepared and performed as described herein.

[0206] Administration of the nucleic acid inhibitors according to the methods of the invention may result in a reduction of the severity, signs, symptoms, and/or markers of such diseases or disorders in a patient with a kidney stone disease. By “reduction” in this context is meant a statistically significant decrease in such level. The reduction can be, for example, at least about 5%, 10%, 15%, 20%, 25%, 30%, 35%, 40%, 45%, 50%, 55%, 60%, 65%, 70%, 75%, 80%, 85%, 90%, 95%, or about 100%.

[0207] Efficacy of treatment or prevention of kidney stone disease can be assessed, for example by measuring disease progression, disease remission, symptom severity, reduction in pain, quality of life, dose of a medication required to sustain a treatment effect, level of a disease marker or any other measurable parameter appropriate for a given disease being treated or targeted for prevention. It is well within the ability of one skilled in the art to monitor efficacy of treatment or prevention by measuring any one of such parameters, or any combination of parameters. Comparisons of the later readings with the initial readings provide a physician an indication of whether the treatment is effective. It is well within the ability of one skilled in the art to monitor efficacy of treatment or prevention by measuring any one of such parameters, or any combination of parameters. In connection with the administration of a nucleic acid inhibitor or pharmaceutical composition thereof, “effective against” indicates that administration in a clinically appropriate manner results in a beneficial effect for at least a statistically significant fraction of patients, such as a improvement of symptoms, a cure, a reduction in disease, extension of life, improvement in quality of life, or other effect generally recognized as positive by medical doctors familiar with treating a kidney stone disease and the related causes.

[0208] A treatment or preventive effect is evident when there is a statistically significant improvement in one or more parameters of disease status, or by a failure to worsen or to develop symptoms where they would otherwise be anticipated. As an example, a favorable change of at least 10% in a measurable parameter of disease, and preferably at least 20%, 30%, 40%, 50% or more can be indicative of effective treatment. Efficacy for a given nucleic acid inhibitor or formulation of that nucleic acid inhibitor can also be judged using an experimental animal model for the given disease as known in the art, such as alanine-glyoxylate amino trasferase deficient (Agxt knockout) mice (see, e.g., Salido, et al. (2006) Proc Natl Acad Sci USA 103:18249) and/or glyoxylate reductase/hydroxypyruvate reductase deficient (Grhpr knockout) mice (see, e.g., Knight, et al. (2011) Am J Physiol Renal Physiol 302:F688).

[0209] The invention further provides methods for the use of a nucleic acid inhibitor or a pharmaceutical composition of the invention, e.g., for treating a subject suffering from a kidney stone disease and carrying a heterozygous AGXT variant, in combination with other pharmaceuticals and/or other therapeutic methods, e.g., with known pharmaceuticals and/or known therapeutic methods, such as, for example, those which are currently employed for treating these disorders. For example, in certain embodiments, a nucleic acid inhibitor or pharmaceutical composition of the invention is administered in combination with, e.g., pyridoxine, an ACE inhibitor (angiotensin converting enzyme inhibitors), e.g., benazepril (Lotensin); an angiotensin II receptor antagonist (ARB) (e.g., losartan potassium, such as Merck & Co. 's Cozaar®), e.g., Candesartan (Atacand); an HMG-CoA reductase inhibitor (e.g., a statin); dietary oxalate degrading compounds, e.g., Oxalate decarboxylase (Oxazyme); calcium binding agents, e.g., Sodium cellulose phosphate (Calcibind); diuretics, e.g., thiazide diuretics, such as hydrochlorothiazide (Microzide); phosphate binders, e.g., Sevelamer (Renagel); magnesium and Vitamin B6 supplements; potassium citrate; orthophosphates, bisphosphonates; oral phosphate and citrate solutions; high fluid intake, urinary tract endoscopy; extracorporeal shock wave lithotripsy; kidney dialysis; kidney stone removal (e.g., surgery); and kidney/liver transplant; or a combination of any of the foregoing.

### III. Nucleic Acid Inhibitors for Use in the Methods of the Invention

[0210] A. Double Stranded Ribonucleic Acid Agents of the Invention

[0211] In one embodiment, a nucleic acid inhibitor for use in the methods of the invention is a dsRNA agent. In one embodiment, the dsRNA agent targets an LDHA gene. In another embodiment, the dsRNA agent targets an HAO1 gene. In one embodiment, the dsRNA agent is a dual targeting dsRNA agent targeting an LDHA agen and an HAO1 gene.

[0212] Suitable dsRNA agents for use in the methods of the invention are known in the art and described in, for example, U.S. patent application Ser. No. 16/716,705 (Attorney Docket No.: 121301-07503); U.S. Patent Publication Nos. 2017/0304446 (Lumasiran) (Alnylam Pharmaceuticals, Inc.), 2017/0306332 (Dicerna Pharmaceuticals), and 2019/0323014 (Dicerna Pharmaceuticals); U.S. Pat. No. 10,478,500 (Lumasiran) (Alnylam Pharmaceuticals, Inc.) and 10,351,854 (Dicerna Pharmaceuticals); and PCT Publication Nos. WO 2019/014530 (Attorney Docket No.: 121301-07520) and WO 2019/075419 (Dicerna Pharmaceuticals), the entire contents of each of which are incorporated herein by reference. Any of these agents may further comprise a ligand. In one embodiment, a suitable dsRNA agent is nedosiran (formerly referred to as DCR-PHXC) (Dicerna Pharmaceuticals).

[0213] In certain specific embodiments, a nucleic acid inhibitor of the present invention is a dsRNA agent which inhibits the expression of an LDHA gene and is selected from the group of agents listed in any one of Tables 2-3. In other embodiments, a nucleic acid inhibitor of the present invention is a dsRNA agent which inhibits the expression of an HAO1 gene and is selected from the group of agents listed in any one of Tables 4-10. In yet other embodiments, nucleic acid inhibitor of the present invention is an dual targeting iRNA agent that inhibits the expression of an LDHA gene and an HAO1 gene, wherein the first dsRNA inhibits expression of an LDHA gene and is selected from the group of agents listed in any one of Tables 2-3, and the first dsRNA inhibits expression of an HAO1 gene and is selected from the group of agents listed in any one of Tables 4-10.

[0214] The dsRNAs of the invention targeting LDHA may include an RNA strand (the antisense strand) having a region which is about 30 nucleotides or less in length, e.g., 15-30, 15-29, 15-28, 15-27, 15-26, 15-25, 15-24, 15-23, 15-22, 15-21, 15-20, 15-19, 15-18, 15-17, 18-30, 18-29, 18-28, 18-27, 18-26, 18-25, 18-24, 18-23, 18-22, 18-21, 18-20, 19-30, 19-29, 19-28, 19-27, 19-26, 19-25, 19-24, 19-23, 19-22, 19-21, 19-20, 20-30, 20-29, 20-28, 20-27, 20-26, 20-25, 20-24,20-23, 20-22, 20-21, 21-30, 21-29, 21-28, 21-27, 21-26, 21-25, 21-24, 21-23, or 21-22 nucleotides in length, which region is substantially complementary to at least part of an mRNA transcript of an LDHA gene.

[0215] The dsRNAs of the invention targeting HAO1 may include an RNA strand (the antisense strand) having a region which is about 30 nucleotides or less in length, e.g., 15-30, 15-29, 15-28, 15-27, 15-26, 15-25, 15-24, 15-23, 15-22, 15-21, 15-20, 15-19, 15-18, 15-17, 18-30, 18-29, 18-28, 18-27, 18-26, 18-25, 18-24, 18-23, 18-22, 18-21, 18-20, 19-30, 19-29, 19-28, 19-27, 19-26, 19-25, 19-24, 19-23, 19-22, 19-21, 19-20, 20-30, 20-29, 20-28, 20-27, 20-26, 20-25, 20-24,20-23, 20-22, 20-21, 21-30, 21-29, 21-28, 21-27, 21-26, 21-25, 21-24, 21-23, or 21-22 nucleotides in length, which region is substantially complementary to at least part of an mRNA transcript of an HAO1 gene.

[0216] When the dsRNA agent is a dual targeting agent, as described herein, the agent targeting LDHA may include an antisense strand comprising a region of complementarity to LDHA which is the same length or a different length from the region of complementarity of the antisense strand of the agent targeting HAO1.

[0217] In some embodiments, one or both of the strands of the double stranded RNAi agents of the invention is up to 66 nucleotides in length, e.g., 36-66, 26-36, 25-36, 31-60, 22-43, 27-53 nucleotides in length, with a region of at least 19 contiguous nucleotides that is substantially complementary to at least a part of an mRNA transcript of an LDHA gene. In some embodiments, such dsRNA agents having longer length antisense strands may include a second RNA strand (the sense strand) of 20-60 nucleotides in length wherein the sense and antisense strands form a duplex of 18-30 contiguous nucleotides.

[0218] In other embodiments, one or both of the strands of the double stranded RNAi agents of the invention is up to 66 nucleotides in length, e.g., 36-66, 26-36, 25-36, 31-60, 22-43, 27-53 nucleotides in length, with a region of at least 19 contiguous nucleotides that is substantially complementary to at least a part of an mRNA transcript of an HAO1 gene. In some embodiments, such dsRNA agents having longer length antisense strands may include a second RNA strand (the sense strand) of 20-60 nucleotides in length wherein the sense and antisense strands form a duplex of 18-30 contiguous nucleotides.

[0219] In embodiments in which a first dsRNA agent targeting LDHA and a second dsRNA agent targeting HAO1 are covalently attached, the duplex lengths of the first agent and the second agent may be the same or different.

[0220] The use of these dsRNA agents described herein enables the targeted degradation of mRNAs of an LDHA gene in mammals and/or the targeted degradation of an HAO1 gene in mammals.

[0221] The dsRNA includes an antisense strand having a region of complementarity which is complementary to at least a part of an mRNA formed in the expression of an LDHA gene or an HAO1 gene. The region of complementarity is about 30 nucleotides or less in length (e.g., about 30, 29, 28, 27, 26, 25, 24, 23, 22, 21, 20, 19, or 18 nucleotides or less in length). Upon contact with a cell expressing the target gene, the iRNA inhibits the expression of the target gene (e.g., a human, a primate, a non-primate, or a bird target gene) by at least about 10% as assayed by, for example, a PCR or branched DNA (bDNA)-based method, or by a protein-based method, such as by immunofluorescence analysis, using, for example, Western Blotting or flowcytometric techniques.

[0222] A dsRNA includes two RNA strands that are complementary and hybridize to form a duplex structure under conditions in which the dsRNA will be used. One strand of a dsRNA (the antisense strand) includes a region of complementarity that is substantially complementary, and generally fully complementary, to a target sequence. The target sequence can be derived from the sequence of an mRNA formed during the expression of an LDHA gene or an HAO1 gene. The other strand (the sense strand) includes a region that is complementary to the antisense strand, such that the two strands hybridize and form a duplex structure when combined under suitable conditions. As described elsewhere herein and as known in the art, the complementary sequences of a dsRNA can also be contained as self-complementary regions of a single nucleic acid molecule, as opposed to being on separate oligonucleotides.

[0223] Generally, the duplex structure is between 15 and 30 base pairs in length, e.g., between, 15-29, 15-28, 15-27, 15-26, 15-25, 15-24, 15-23, 15-22, 15-21, 15-20, 15-19, 15-18, 15-17, 18-30, 18-29, 18-28, 18-27, 18-26, 18-25, 18-24, 18-23, 18-22, 18-21, 18-20, 19-30, 19-29, 19-28, 19-27, 19-26, 19-25, 19-24, 19-23, 19-22, 19-21, 19-20, 20-30, 20-29, 20-28, 20-27, 20-26, 20-25, 20-24,20-23, 20-22, 20-21, 21-30, 21-29, 21-28, 21-27, 21-26, 21-25, 21-24, 21-23, or 21-22 base pairs in length. Ranges and lengths intermediate to the above recited ranges and lengths are also contemplated to be part of the invention.

[0224] Similarly, the region of complementarity to the target sequence is between 15 and 30 nucleotides in length, e.g., between 15-29, 15-28, 15-27, 15-26, 15-25, 15-24, 15-23, 15-22, 15-21, 15-20, 15-19, 15-18, 15-17, 18-30, 18-29, 18-28, 18-27, 18-26, 18-25, 18-24, 18-23, 18-22, 18-21, 18-20, 19-30, 19-29, 19-28, 19-27, 19-26, 19-25, 19-24, 19-23, 19-22, 19-21, 19-20, 20-30, 20-29, 20-28, 20-27, 20-26, 20-25, 20-24,20-23, 20-22, 20-21, 21-30, 21-29, 21-28, 21-27, 21-26, 21-25, 21-24, 21-23, or 21-22 nucleotides in length. Ranges and lengths intermediate to the above recited ranges and lengths are also contemplated to be part of the invention.

[0225] In some embodiments, the dsRNA is between about 15 and about 23 nucleotides in length, or between about 25 and about 30 nucleotides in length. In general, the dsRNA is long enough to serve as a substrate for the Dicer enzyme. For example, it is well known in the art that dsRNAs longer than about 21-23 nucleotides can serve as substrates for Dicer. As the ordinarily skilled person will also recognize, the region of an RNA targeted for cleavage will most often be part of a larger RNA molecule, often an mRNA molecule. Where relevant, a “part” of an mRNA target is a contiguous sequence of an mRNA target of sufficient length to allow it to be a substrate for RNAi-directed cleavage (i.e., cleavage through a RISC pathway).

[0226] One of skill in the art will also recognize that the duplex region is a primary functional portion of a dsRNA, e.g., a duplex region of about 9 to 36 base pairs, e.g., about 10-36, 11-36, 12-36, 13-36, 14-36, 15-36, 9-35, 10-35, 11-35, 12-35, 13-35, 14-35, 15-35, 9-34, 10-34, 11-34, 12-34, 13-34, 14-34, 15-34, 9-33, 10-33, 11-33, 12-33, 13-33, 14-33, 15-33, 9-32, 10-32, 11-32, 12-32, 13-32, 14-32, 15-32, 9-31, 10-31, 11-31, 12-31, 13-32, 14-31, 15-31, 15-30, 15-29, 15-28, 15-27, 15-26, 15-25, 15-24, 15-23, 15-22, 15-21, 15-20, 15-19, 15-18, 15-17, 18-30, 18-29, 18-28, 18-27, 18-26, 18-25, 18-24, 18-23, 18-22, 18-21, 18-20, 19-30, 19-29, 19-28, 19-27, 19-26, 19-25, 19-24, 19-23, 19-22, 19-21, 19-20, 20-30, 20-29, 20-28, 20-27, 20-26, 20-25, 20-24,20-23, 20-22, 20-21, 21-30, 21-29, 21-28, 21-27, 21-26, 21-25, 21-24, 21-23, or 21-22 base pairs. Thus, in one embodiment, to the extent that it becomes processed to a functional duplex, of e.g., 15-30 base pairs, that targets a desired RNA for cleavage, an RNA molecule or complex of RNA molecules having a duplex region greater than 30 base pairs is a dsRNA. Thus, an ordinarily skilled artisan will recognize that in one embodiment, a miRNA is a dsRNA. In another embodiment, a dsRNA is not a naturally occurring miRNA. In another embodiment, an iRNA agent useful to target LDHA expression or LDHA and HAO1 expression is not generated in the target cell by cleavage of a larger dsRNA.

[0227] A dsRNA as described herein can further include one or more single-stranded nucleotide overhangs e.g., 1, 2, 3, or 4 nucleotides. dsRNAs having at least one nucleotide overhang can have unexpectedly superior inhibitory properties relative to their blunt-ended counterparts. A nucleotide overhang can comprise or consist of a nucleotide/nucleoside analog, including a deoxynucleotide/nucleoside. The overhang(s) can be on the sense strand, the antisense strand or any combination thereof. Furthermore, the nucleotide(s) of an overhang can be present on the 5′-end, 3′-end or both ends of either an antisense or sense strand of a dsRNA.

[0228] A dsRNA can be synthesized by standard methods known in the art as further discussed below, e.g., by use of an automated DNA synthesizer, such as are commercially available from, for example, Biosearch, Applied Biosystems, Inc.

[0229] A dsRNA of the invention may be prepared using a two-step procedure. First, the individual strands of the double-stranded RNA molecule are prepared separately. Then, the component strands are annealed. The individual strands of the siRNA compound can be prepared using solution-phase or solid-phase organic synthesis or both. Organic synthesis offers the advantage that the oligonucleotide strands comprising unnatural or modified nucleotides can be easily prepared. Single-stranded oligonucleotides of the invention can be prepared using solution-phase or solid-phase organic synthesis or both.

[0230] In one aspect, a dsRNA of the invention includes at least two nucleotide sequences, a sense sequence and an anti-sense sequence. The sense strand sequence is selected from the group of sequences provided in any one of Tables 2-10 and the corresponding nucleotide sequence of the antisense strand is selected from the group of sequences of any one of Tables 2-14. In this aspect, one of the two sequences is complementary to the other of the two sequences, with one of the sequences being substantially complementary to a sequence of an mRNA generated in the expression of an LDHA gene. As such, in this aspect, a dsRNA will include two oligonucleotides, where one oligonucleotide is described as the sense strand (passenger strand) in any one of Tables 2-3 and the second oligonucleotide is described as the corresponding antisense strand (guide strand) of the sense strand in any one of Tables 2-3. In one embodiment, the substantially complementary sequences of the dsRNA are contained on separate oligonucleotides. In another embodiment, the substantially complementary sequences of the dsRNA are contained on a single oligonucleotide.

[0231] In another aspect, a dsRNA of the invention targets an HAO1 gene and includes at least two nucleotide sequences, a sense sequence and an anti-sense sequence. The sense strand sequence is selected from the group of sequences provided in any one of Tables 4-10 and the corresponding nucleotide sequence of the antisense strand of the sense strand is selected from the group of sequences of any one of Tables 4-14. In this aspect, one of the two sequences is complementary to the other of the two sequences, with one of the sequences being substantially complementary to a sequence of an mRNA generated in the expression of an HAO1 gene. As such, in this aspect, a dsRNA will include two oligonucleotides, where one oligonucleotide is described as the sense strand (passenger strand) in any one of Tables 4-14 and the second oligonucleotide is described as the corresponding antisense strand (guide strand) of the sense strand in any one of Tables 4-14. In one embodiment, the substantially complementary sequences of the dsRNA are contained on separate oligonucleotides. In another embodiment, the substantially complementary sequences of the dsRNA are contained on a single oligonucleotide.

[0232] It will be understood that, although the sequences in Tables 2-14 are described as modified, unmodified, unconjugated. and/or conjugated sequences, the RNA of the dsRNA of the invention e.g., a dsRNA of the invention, may comprise any one of the sequences set forth in any one of Table 2-14 that is un-modified, un-conjugated, and/or modified and/or conjugated differently than described therein.

[0233] The skilled person is well aware that dsRNAs having a duplex structure of between about 20 and 23 base pairs, e.g., 21, base pairs have been hailed as particularly effective in inducing RNA interference (Elbashir et al., (2001) EMBO J., 20:6877-6888). However, others have found that shorter or longer RNA duplex structures can also be effective (Chu and Rana (2007) RNA 14:1714-1719; Kim et al. (2005) Nat Biotech 23:222-226). In the embodiments described above, by virtue of the nature of the oligonucleotide sequences provided herein, dsRNAs described herein can include at least one strand of a length of minimally 21 nucleotides. It can be reasonably expected that shorter duplexes minus only a few nucleotides on one or both ends can be similarly effective as compared to the dsRNAs described above. Hence, dsRNAs having a sequence of at least 15, 16, 17, 18, 19, 20, or more contiguous nucleotides derived from one of the sequences provided herein, and differing in their ability to inhibit the expression of an LDHA gene or an HAO1 gene by not more than about 5, 10, 15, 20, 25, or 30% inhibition from a dsRNA comprising the full sequence, are contemplated to be within the scope of the present invention.

[0234] In addition, the RNAs described in any one of Tables 2-3 identify a site(s) in an LDHA transcript that is susceptible to RISC-mediated cleavage and those RNAs described in any one of Tables 4-14 identify a site(s) in an HAO1 transcript that is susceptible to RISC-mediated cleavage. As such, the present invention further features iRNAs that target within this site(s). As used herein, an iRNA is said to target within a particular site of an RNA transcript if the iRNA promotes cleavage of the transcript anywhere within that particular site. Such an iRNA will generally include at least about 15 contiguous nucleotides from one of the sequences provided herein coupled to additional nucleotide sequences taken from the region contiguous to the selected sequence in the gene.

[0235] While a target sequence is generally about 15-30 nucleotides in length, there is wide variation in the suitability of particular sequences in this range for directing cleavage of any given target RNA. Various software packages and the guidelines set out herein provide guidance for the identification of optimal target sequences for any given gene target, but an empirical approach can also be taken in which a “window” or “mask” of a given size (as a non-limiting example, 21 nucleotides) is literally or figuratively (including, e.g., in silico) placed on the target RNA sequence to identify sequences in the size range that can serve as target sequences. By moving the sequence “window” progressively one nucleotide upstream or downstream of an initial target sequence location, the next potential target sequence can be identified, until the complete set of possible sequences is identified for any given target size selected. This process, coupled with systematic synthesis and testing of the identified sequences (using assays as described herein or as known in the art) to identify those sequences that perform optimally can identify those RNA sequences that, when targeted with an iRNA agent, mediate the best inhibition of target gene expression. Thus, while the sequences identified herein represent effective target sequences, it is contemplated that further optimization of inhibition efficiency can be achieved by progressively “walking the window” one nucleotide upstream or downstream of the given sequences to identify sequences with equal or better inhibition characteristics.

[0236] Further, it is contemplated that for any sequence identified herein, further optimization could be achieved by systematically either adding or removing nucleotides to generate longer or shorter sequences and testing those sequences generated by walking a window of the longer or shorter size up or down the target RNA from that point. Again, coupling this approach to generating new candidate targets with testing for effectiveness of iRNAs based on those target sequences in an inhibition assay as known in the art and/or as described herein can lead to further improvements in the efficiency of inhibition. Further still, such optimized sequences can be adjusted by, e.g., the introduction of modified nucleotides as described herein or as known in the art, addition or changes in overhang, or other modifications as known in the art and/or discussed herein to further optimize the molecule (e.g., increasing serum stability or circulating half-life, increasing thermal stability, enhancing transmembrane delivery, targeting to a particular location or cell type, increasing interaction with silencing pathway enzymes, increasing release from endosomes) as an expression inhibitor.

[0237] A dsRNA agent as described herein can contain one or more mismatches to the target sequence. In one embodiment, an iRNA as described herein contains no more than 3 mismatches. If the antisense strand of the iRNA contains mismatches to a target sequence, it is preferable that the area of mismatch is not located in the center of the region of complementarity. If the antisense strand of the iRNA contains mismatches to the target sequence, it is preferable that the mismatch be restricted to be within the last 5 nucleotides from either the 5′- or 3′-end of the region of complementarity. For example, for a 23 nucleotide iRNA agent the strand which is complementary to a region of an LDHA gene or an HAO1 gene, generally does not contain any mismatch within the central 13 nucleotides. The methods described herein or methods known in the art can be used to determine whether an iRNA containing a mismatch to a target sequence is effective in inhibiting the expression of an LDHA gene and/or an HAO1 gene. Consideration of the efficacy of iRNAs with mismatches in inhibiting expression of an LDHA gene and/or an HAO1 gene is important, especially if the particular region of complementarity in an LDHA gene and/or HAO1 gene is known to have polymorphic sequence variation within the population.

[0238] The dual targeting RNAi agents of the invention, which include two dsRNA agents, are covalently attached via, e.g., a covalent linker. Covalent linkers are well known in the art and include, e.g., nucleic acid linkers, peptide linkers, carbohydrate linkers, and the like. The covalent linker can include RNA and/or DNA and/or a peptide. The linker can be single stranded, double stranded, partially single strands, or partially double stranded. Modified nucleotides or a mixture of nucleotides can also be present in a nucleic acid linker.

[0239] Suitable linkers for use in the dual targeting agent of the invention include those described in U.S. Pat. No. 9,187,746, the entire contents of which are incorporated herein by reference. In some embodiments the linker includes a disulfide bond. The linker can be cleavable or non-cleavable.

[0240] The linker can be, e.g., dTsdTuu=(5′-2′deoxythymidyl-3′-thiophosphate-5′-2′deoxythymidyl-3′-phosphate-5′-uridyl-3′-phosphate-5′-uridyl-3′-phosphate); rUsrU (a thiophosphate linker: 5′-uridyl-3′-thiophosphate-5′-uridyl-3′-phosphate); an rUrU linker; dTsdTaa (aadTsdT, 5′-2′deoxythymidyl-3′-thiophosphate-5′-2′deoxythymidyl-3′-phosphate-5′-adenyl-3′-phosphate-5′-adenyl-3′-phosphate); dTsdT (5′-2′deoxythymidyl-3′-thiophosphate-5′-2′ deoxythymidyl-3′-phosphate); dTsdTuu=uudTsdT=5′-2′deoxythymidyl-3′-thiophosphate-5′-2′deoxythymidyl-3′-phosphate-5′-uridyl-3′-phosphate-5′-uridyl-3′-phosphate.

[0241] The linker can be a polyRNA, such as poly(5′-adenyl-3′-phosphate-AAAAAAAA) or poly(5′-cytidyl-3′-phosphate-5′-uridyl-3′-phosphate-CUCUCUCU)), e.g., Xn single stranded poly RNA linker wherein n is an integer from 2-50 inclusive, preferable 4-15 inclusive, most preferably 7-8 inclusive. Modified nucleotides or a mixture of nucleotides can also be present in said polyRNA linker. The covalent linker can be a polyDNA, such as poly(5′-2′deoxythymidyl-3′-phosphate-TTTTTTTT), e.g., wherein n is an integer from 2-50 inclusive, preferable 4-15 inclusive, most preferably 7-8 inclusive. Modified nucleotides or a mixture of nucleotides can also be present in said polyDNA linker, a single stranded polyDNA linker wherein n is an integer from 2-50 inclusive, preferable 4-inclusive, most preferably 7-8 inclusive. Modified nucleotides or a mixture of nucleotides can also be present in said polyDNA linker.

[0242] The linker can include a disulfide bond, optionally a bis-hexyl-disulfide linker. In one embodiment, the disulfide linker is

[chemical structure]

[0243] The linker can include a peptide bond, e.g., include amino acids. In one embodiment, the covalent linker is a 1-10 amino acid long linker, preferably comprising 4-5 amino acids, optionally X-Gly-Phe-Gly-Y wherein X and Y represent any amino acid.

[0244] The linker can include HEG, a hexaethylenglycol linker.

[0245] The covalent linker can attach the sense strand of the first dsRNA agent to the sense strand of the second dsRNA agent; the antisense strand of the first dsRNA agent to the antisense strand of the second dsRNA agent; the sense strand of the first dsRNA agent to the antisense strand of the second dsRNA agent; or the antisense strand of the first dsRNA agent to the sense strand of the second dsRNA agent.

[0246] In some embodiments, the covalent linker further comprises at least one ligand, described below.

[0247] i. Modified dsRNA Agent of the Invention

[0248] In one embodiment, the nucleic acid, e.g., RNA, of a nucleic acid inhibitor of the invention is un-modified, and does not comprise, e.g., chemical modifications and/or conjugations known in the art and described herein. In another embodiment, the nucleic acid, e.g., RNA, of a nucleic acid inhibitor of the invention is chemically modified to enhance stability or other beneficial characteristics. In certain embodiments of the invention, substantially all of the nucleotides of a nucleic acid inhibitor of the invention are modified. In other embodiments of the invention, all of the nucleotides of a nucleic acid inhibitor of the invention are modified. Nucleic acid inhibitors of the invention in which “substantially all of the nucleotides are modified” are largely but not wholly modified and can include not more than 5, 4, 3, 2, or 1 unmodified nucleotides.

[0249] In embodiments in which a first nucleic acid inhibitor, e.g., dsRNA agent targeting LDHA, and a second nucleic acid inhibitor, e.g., dsRNA agent targeting HAO1, are covalently attached (i.e., a dual targeting RNAi agent), substantially all of the nucleotides of the first agent and substantially all of the nucleotides of the second agent may be independently modified; all of the nucleotides of the first agent may be modified and all of the nucleotides of the second agent may be independently modified; substantially all of the nucleotides of the first agent and all of the nucleotides of the second agent may be independently modified; or all of the nucleotides of the first agent may be modified and substantially all of the nucleotides of the second agent may be independently modified.

[0250] In some aspects of the invention, substantially all of the nucleotides of a nucleic acid inhibitor of the invention are modified and the nucleic acid inhibitors comprise no more than 10 nucleotides comprising 2′-fluoro modifications (e.g., no more than 9 2′-fluoro modifications, no more than 8 2′-fluoro modifications, no more than 7 2′-fluoro modifications, no more than 6 2′-fluoro modifications, no more than 5 2′-fluoro modifications, no more than 4 2′-fluoro modifications, no more than 5 2′-fluoro modifications, no more than 4 2′-fluoro modifications, no more than 3 2′-fluoro modifications, or no more than 2 2′-fluoro modifications). For example, in some embodiments, the sense strand comprises no more than 4 nucleotides comprising 2′-fluoro modifications (e.g., no more than 3 2′-fluoro modifications, or no more than 2 2′-fluoro modifications). In other embodiments, the antisense strand comprises no more than 6 nucleotides comprising 2′-fluoro modifications (e.g., no more than 5 2′-fluoro modifications, no more than 4 2′-fluoro modifications, no more than 4 2′-fluoro modifications, or no more than 2 2′-fluoro modifications).

[0251] In embodiments in which a first nucleic acid inhibitor, e.g., dsRNA agent targeting LDHA, and a second nucleic acid inhibitor, e.g., dsRNA agent targeting HAO1, are covalently attached (i.e., a dual targeting RNAi agent), substantially all of the nucleotides of the first agent and/or substantially all of the nucleotides of the second agent may be independently modified and the first and second agents may independently comprise no more than 10 nucleotides comprising 2′-fluoro modifications.

[0252] In other aspects of the invention, all of the nucleotides of a nucleic acid inhibitor of the invention are modified and the nucleic acid inhibitors comprise no more than 10 nucleotides comprising 2′-fluoro modifications (e.g., no more than 9 2′-fluoro modifications, no more than 8 2′-fluoro modifications, no more than 7 2′-fluoro modifications, no more than 6 2′-fluoro modifications, no more than 5 2′-fluoro modifications, no more than 4 2′-fluoro modifications, no more than 5 2′-fluoro modifications, no more than 4 2′-fluoro modifications, no more than 3 2′-fluoro modifications, or no more than 2 2′-fluoro modifications).

[0253] In embodiments in which a first nucleic acid inhibitor, e.g., dsRNA agent targeting LDHA, and a second nucleic acid inhibitor, e.g., dsRNA agent targeting HAO1, are covalently attached (i.e., a dual targeting RNAi agent), all of the nucleotides of the first agent and/or all of the nucleotides of the second agent may be independently modified and the first and second agents may independently comprise no more than 10 nucleotides comprising 2′-fluoro modifications.

[0254] In one embodiment, a nucleic acid inhibitor of the invention further comprises a 5′-phosphate or a 5′-phosphate mimic at the 5′ nucleotide of the antisense strand. In another embodiment, the double stranded RNAi agent further comprises a 5′-phosphate mimic at the 5′ nucleotide of the antisense strand. In a specific embodiment, the 5′-phosphate mimic is a 5′-vinyl phosphate (5′-VP).

[0255] In embodiments in which a first nucleic acid inhibitor, e.g., dsRNA agent targeting LDHA, and a second nucleic acid inhibitor, e.g., dsRNA agent targeting HAO1, are covalently attached (i.e., a dual targeting RNAi agent), the first agent may further comprise a 5′-phosphate or a 5′-phosphate mimic at the 5′ nucleotide of the antisense strand; the second agent may further comprise a 5′-phosphate or a 5′-phosphate mimic at the 5′ nucleotide of the antisense strand; or the first agent and the second agent may further independently comprise a 5′-phosphate or a 5′-phosphate mimic at the 5′ nucleotide of the antisense strand.

[0256] The nucleic acids featured in the invention can be synthesized and/or modified by methods well established in the art, such as those described in “Current protocols in nucleic acid chemistry,” Beaucage, S. L. et al. (Edrs.), John Wiley & Sons, Inc., New York, N.Y., USA, which is hereby incorporated herein by reference. Modifications include, for example, end modifications, e.g., 5′-end modifications (phosphorylation, conjugation, inverted linkages) or 3′-end modifications (conjugation, DNA nucleotides, inverted linkages, etc.); base modifications, e.g., replacement with stabilizing bases, destabilizing bases, or bases that base pair with an expanded repertoire of partners, removal of bases (abasic nucleotides), or conjugated bases; sugar modifications (e.g., at the 2′-position or 4′-position) or replacement of the sugar; and/or backbone modifications, including modification or replacement of the phosphodiester linkages. Specific examples of nucleic acid inhibitor compounds useful in the embodiments described herein include, but are not limited to nucleic acid inhibitors containing modified backbones or no natural internucleoside linkages. Nucleic acid inhibitors having modified backbones include, among others, those that do not have a phosphorus atom in the backbone. For the purposes of this specification, and as sometimes referenced in the art, modified nucleic acid inhibitors that do not have a phosphorus atom in their internucleoside backbone can also be considered to be oligonucleosides. In some embodiments, a modified nucleic acid inhibitor will have a phosphorus atom in its internucleoside backbone.

[0257] Modified nucleic acid inhibitor backbones include, for example, phosphorothioates, chiral phosphorothioates, phosphorodithioates, phosphotriesters, aminoalkylphosphotriesters, methyl and other alkyl phosphonates including 3′-alkylene phosphonates and chiral phosphonates, phosphinates, phosphoramidates including 3′-amino phosphoramidate and aminoalkylphosphoramidates, thionophosphoramidates, thionoalkylphosphonates, thionoalkylphosphotriesters, and boranophosphates having normal 3′-5′ linkages, 2′-5′-linked analogs of these, and those having inverted polarity wherein the adjacent pairs of nucleoside units are linked 3′-5′ to 5′-3′ or 2′-5′ to 5′-2′. Various salts, mixed salts and free acid forms are also included.

[0258] Representative U.S. patents that teach the preparation of the above phosphorus-containing linkages include, but are not limited to, U.S. Pat. Nos. 3,687,808; 4,469,863; 4,476,301; 5,023,243; 5,177,195; 5,188,897; 5,264,423; 5,276,019; 5,278,302; 5,286,717; 5,321,131; 5,399,676; 5,405,939; 5,453,496; 5,455,233; 5,466,677; 5,476,925; 5,519,126; 5,536,821; 5,541,316; 5,550,111; 5,563,253; 5,571,799; 5,587,361; 5,625,050; 6,028,188; 6,124,445; 6,160,109; 6,169,170; 6,172,209; 6,239,265; 6,277,603; 6,326,199; 6,346,614; 6,444,423; 6,531,590; 6,534,639; 6,608,035; 6,683,167; 6,858,715; 6,867,294; 6,878,805; 7,015,315; 7,041,816; 7,273,933; 7,321,029; and U.S. Pat. RE39464, the entire contents of each of which are hereby incorporated herein by reference.

[0259] Modified nucleic acid inhibitor backbones that do not include a phosphorus atom therein have backbones that are formed by short chain alkyl or cycloalkyl internucleoside linkages, mixed heteroatoms and alkyl or cycloalkyl internucleoside linkages, or one or more short chain heteroatomic or heterocyclic internucleoside linkages. These include those having morpholino linkages (formed in part from the sugar portion of a nucleoside); siloxane backbones; sulfide, sulfoxide and sulfone backbones; formacetyl and thioformacetyl backbones; methylene formacetyl and thioformacetyl backbones; alkene containing backbones; sulfamate backbones; methyleneimino and methylenehydrazino backbones; sulfonate and sulfonamide backbones; amide backbones; and others having mixed N, O, S and CH₂ component parts.

[0260] Representative U.S. patents that teach the preparation of the above oligonucleosides include, but are not limited to, U.S. Pat. Nos. 5,034,506; 5,166,315; 5,185,444; 5,214,134; 5,216,141; 5,235,033; 5,64,562; 5,264,564; 5,405,938; 5,434,257; 5,466,677; 5,470,967; 5,489,677; 5,541,307; 5,561,225; 5,596,086; 5,602,240; 5,608,046; 5,610,289; 5,618,704; 5,623,070; 5,663,312; 5,633,360; 5,677,437; and, 5,677,439, the entire contents of each of which are hereby incorporated herein by reference.

[0261] In other embodiments, suitable RNA mimetics are contemplated for use in nucleic acid inhibitors, in which both the sugar and the internucleoside linkage, i.e., the backbone, of the nucleotide units are replaced with novel groups. The base units are maintained for hybridization with an appropriate nucleic acid target compound. One such oligomeric compound, an RNA mimetic that has been shown to have excellent hybridization properties, is referred to as a peptide nucleic acid (PNA). In PNA compounds, the sugar backbone of an RNA is replaced with an amide containing backbone, in particular an aminoethylglycine backbone. The nucleobases are retained and are bound directly or indirectly to aza nitrogen atoms of the amide portion of the backbone. Representative U.S. patents that teach the preparation of PNA compounds include, but are not limited to, U.S. Pat. Nos. 5,539,082; 5,714,331; and 5,719,262, the entire contents of each of which are hereby incorporated herein by reference. Additional PNA compounds suitable for use in the iRNAs of the invention are described in, for example, in Nielsen et al., Science, 1991, 254, 1497-1500.

[0262] Some embodiments featured in the invention include nucleic acid inhibitors, e.g., RNAs, with phosphorothioate backbones and oligonucleosides with heteroatom backbones, and in particular —CH₂—NH—CH₂—, —CH₂—N(CH₃)—O—CH₂-[known as a methylene (methylimino) or MMI backbone], —CH₂—O—N(CH₃)—CH₂—, —CH₂—N(CH₃)—N(CH₃)—CH₂— and —N(CH₃)—CH₂—CH₂₋₄ wherein the native phosphodiester backbone is represented as —O—P—O—CH₂—] of the above-referenced U.S. Pat. No. 5,489,677, and the amide backbones of the above-referenced U.S. Pat. No. 5,602,240. In some embodiments, the RNAs featured herein have morpholino backbone structures of the above-referenced U.S. Pat. No. 5,034,506.

[0263] Modified nucleic acid inhibitors can also contain one or more substituted sugar moieties. The nucleic acid inhibitors, e.g., dsRNAs, featured herein can include one of the following at the 2′-position: OH; F; O-, S-, or N-alkyl; O-, S-, or N-alkenyl; O-, S- or N-alkynyl; or O-alkyl-O-alkyl, wherein the alkyl, alkenyl and alkynyl can be substituted or unsubstituted C₁ to C₁₀ alkyl or C₂ to C₁₀alkenyl and alkynyl. Exemplary suitable modifications include O[(CH₂)ₙO]ₘCH₃, O(CH₂)·ₙOCH₃, O(CH₂)ₙNH₂, O(CH₂)ₙCH₃, O(CH₂)ₙONH₂, and O(CH₂)ₙON[(CH₂)ₙCH₃)]₂, where n and m are from 1 to about 10. In other embodiments, dsRNAs include one of the following at the 2′ position: C₁ to C₁₀ lower alkyl, substituted lower alkyl, alkaryl, aralkyl, O-alkaryl or O-aralkyl, SH, SCH₃, OCN, Cl, Br, CN, CF₃, OCF₃, SOCH₃, SO₂CH₃, ONO₂, NO₂, N₃, NH₂, heterocycloalkyl, heterocycloalkaryl, aminoalkylamino, polyalkylamino, substituted silyl, an RNA cleaving group, a reporter group, an intercalator, a group for improving the pharmacokinetic properties of an iRNA, or a group for improving the pharmacodynamic properties of a nucleic acid inhibitor, and other substituents having similar properties. In some embodiments, the modification includes a 2′-methoxyethoxy (2′-O—CH₂CH₂OCH₃, also known as 2′-O-(2-methoxyethyl) or 2′-MOE) (Martin et al., Helv. Chim. Acta, 1995, 78:486-504) i.e., an alkoxy-alkoxy group. Another exemplary modification is 2′-dimethylaminooxyethoxy, i.e., a O(CH₂)₂ON(CH₃)₂ group, also known as 2′-DMAOE, as described in examples herein below, and 2′-dimethylaminoethoxyethoxy (also known in the art as 2′-O-dimethylaminoethoxyethyl or 2′-DMAEOE), i.e., 2′-O—CH₂—O—CH₂—N(CH₂)₂. Further exemplary modifications include: 5′-Me-2′-F nucleotides, 5′-Me-2′-OMe nucleotides, 5′-Me-2′-deoxynucleotides, (both R and S isomers in these three families); 2′-alkoxyalkyl; and 2′-NMA (N-methylacetamide).

[0264] Other modifications include 2′-methoxy (2′-OCH₃), 2′-aminopropoxy (2′-OCH₂CH₂CH₂NH₂) and 2′-fluoro (2′-F). Similar modifications can also be made at other positions on the RNA of a nucleic acid inhibitor, particularly the 3′ position of the sugar on the 3′ terminal nucleotide or in 2′-5′ linked dsRNAs and the 5′ position of 5′ terminal nucleotide. Nucleic acid inhibitors can also have sugar mimetics such as cyclobutyl moieties in place of the pentofuranosyl sugar. Representative U.S. patents that teach the preparation of such modified sugar structures include, but are not limited to, U.S. Pat. Nos. 4,981,957; 5,118,800; 5,319,080; 5,359,044; 5,393,878; 5,446,137; 5,466,786; 5,514,785; 5,519,134; 5,567,811; 5,576,427; 5,591,722; 5,597,909; 5,610,300; 5,627,053; 5,639,873; 5,646,265; 5,658,873; 5,670,633; and 5,700,920, certain of which are commonly owned with the instant application. The entire contents of each of the foregoing are hereby incorporated herein by reference.

[0265] Additional nucleotides having modified or substituted sugar moieties for use in the nucleic acid inhibitors of the invention include nucleotides comprising a bicyclic sugar. A “bicyclic sugar” is a furanosyl ring modified by the bridging of two atoms. A“bicyclic nucleoside” (“BNA”) is a nucleoside having a sugar moiety comprising a bridge connecting two carbon atoms of the sugar ring, thereby forming a bicyclic ring system. In certain embodiments, the bridge connects the 4′-carbon and the 2′-carbon of the sugar ring. Thus, in some embodiments a nucleic acid inhibitor may include one or more locked nucleic acids. A “locked nucleic acid” (“LNA”) is a nucleotide having a modified ribose moiety in which the ribose moiety comprises an extra bridge connecting the 2′ and 4′ carbons. In other words, an LNA is a nucleotide comprising a bicyclic sugar moiety comprising a 4′-CH₂—O-2′ bridge. This structure effectively “locks” the ribose in the 3′-endo structural conformation. The addition of locked nucleic acids to polynucleotide agents has been shown to increase polynucleotide agent stability in serum, and to reduce off-target effects (Elmen, J. et al., (2005) Nucleic Acids Research 33(1):439-447; Mook, O R. et al., (2007) Mol Canc Ther 6(3):833-843; Grunweller, A. et al., (2003) Nucleic Acids Research 31(12):3185-3193).

[0266] Examples of bicyclic nucleosides for use in the nucleic acid inhibitors of the invention include without limitation nucleosides comprising a bridge between the 4′ and the 2′ ribosyl ring atoms. In certain embodiments, the nucleic acid inhibitors of the invention include one or more bicyclic nucleosides comprising a 4′ to 2′ bridge. Examples of such 4′ to 2′ bridged bicyclic nucleosides, include but are not limited to 4′-(CH2)-O-2′ (LNA); 4′-(CH2)-S-2′; 4′-(CH2)2-O-2′ (ENA); 4′-CH(CH3)-O-2′ (also referred to as “constrained ethyl” or “cEt”) and 4′-CH(CH2OCH3)-O-2′ (and analogs thereof; see, e.g., U.S. Pat. No. 7,399,845); 4′-C(CH3)(CH3)-O-2′ (and analogs thereof; see e.g., U.S. Pat. No. 8,278,283); 4′-CH2-N(OCH3)-2′ (and analogs thereof; see e.g., U.S. Pat. No. 8,278,425); 4′-CH2-O—N(CH3)-2′ (see, e.g., U.S. Patent Publication No. 2004/0171570); 4′-CH2-N(R)—O-2′, wherein R is H, C₁-C₁₂ alkyl, or a protecting group (see, e.g., U.S. Pat. No. 7,427,672); 4′-CH2-C(H)(CH3)-2′ (see, e.g., Chattopadhyaya et al., J. Org. Chem., 2009, 74, 118-134); and 4′-CH2-C(═CH2)-2′ (and analogs thereof; see, e.g., U.S. Pat. No. 8,278,426). The entire contents of each of the foregoing are hereby incorporated herein by reference.

[0267] Additional representative U.S. patents and US patent Publications that teach the preparation of locked nucleic acid nucleotides include, but are not limited to, the following: U.S. Pat. Nos. 6,268,490; 6,525,191; 6,670,461; 6,770,748; 6,794,499; 6,998,484; 7,053,207; 7,034,133; 7,084,125; 7,399,845; 7,427,672; 7,569,686; 7,741,457; 8,022,193; 8,030,467; 8,278,425; 8,278,426; 8,278,283; US 2008/0039618; and US 2009/0012281, the entire contents of each of which are hereby incorporated herein by reference.

[0268] Any of the foregoing bicyclic nucleosides can be prepared having one or more stereochemical sugar configurations including for example α-L-ribofuranose and β-D-ribofuranose (see WO 99/14226).

[0269] In one particular embodiment of the invention, a nucleic acid inhibitor can include one or more constrained ethyl nucleotides. As used herein, a “constrained ethyl nucleotide” or “cEt” is a locked nucleic acid comprising a bicyclic sugar moiety comprising a 4′-CH(CH₃)—O-2′ bridge. In one embodiment, a constrained ethyl nucleotide is in an S conformation and is referred to as an “S-constrained ethyl nucleotide” or “S-cEt.”

[0270] Modified nucleotides included in the nucleic acid inhibitors of the invention can also contain one or more sugar mimetics. For example, the nucleic acid inhibitor may include a “modified tetrahydropyran nucleotide” or “modified THP nucleotide.” A “modified tetrahydropyran nucleotide” has a six-membered tetrahydropyran “sugar” substituted in for the pentofuranosyl residue in normal nucleotides (a sugar surrogate). Modified THP nucleotides include, but are not limited to, what is referred to in the art as hexitol nucleic acid (HNA), anitol nucleic acid (ANA), manitol nucleic acid (MNA) (see, e.g., Leumann, Bioorg. Med. Chem., 2002, 10, 841-854), or fluoro HNA (F-HNA). In some embodiments of the invention, sugar surrogates comprise rings having more than 5 atoms and more than one heteroatom. For example nucleotides comprising morpholino sugar moieties and their use in oligomeric compounds has been reported (see for example: Braasch et al., Biochemistry, 2002, 41, 4503-4510; and U.S. Pat. Nos. 5,698,685; 5,166,315; 5,185,444; and 5,034,506). Morpholinos may be modified, for example by adding or altering various substituent groups from the above morpholino structure. Such sugar surrogates are referred to herein as “modified morpholinos.”

[0271] Combinations of modifications are also provided without limitation, such as 2′-F-5′-methyl substituted nucleosides (see PCT International Application WO 2008/101157 published on Aug. 21, 2008 for other disclosed 5′, 2′-bis substituted nucleosides) and replacement of the ribosyl ring oxygen atom with S and further substitution at the 2′-position (see published U.S. Patent Application US2005-0130923, published on Jun. 16, 2005) or alternatively 5′-substitution of a bicyclic nucleic acid (see PCT International Application WO 2007/134181, published on Nov. 22, 2007 wherein a 4′-CH₂—O-2′ bicyclic nucleoside is further substituted at the 5′ position with a 5′-methyl or a 5′-vinyl group). The synthesis and preparation of carbocyclic bicyclic nucleosides along with their oligomerization and biochemical studies have also been described (see, e.g., Srivastava et al., J. Am. Chem. Soc. 2007, 129(26), 8362-8379).

[0272] In certain embodiments, a nucleic acid inhibitor comprises one or more modified cyclohexenyl nucleosides, which is a nucleoside having a six-membered cyclohexenyl in place of the pentofuranosyl residue in naturally occurring nucleosides. Modified cyclohexenyl nucleosides include, but are not limited to those described in the art (see for example commonly owned, published PCT Application WO 2010/036696, published on Apr. 10, 2010, Robeyns et al., J. Am. Chem. Soc., 2008, 130(6), 1979-1984; Horvath et al., Tetrahedron Letters, 2007, 48, 3621-3623; Nauwelaerts et al., J. Am. Chem. Soc., 2007, 129(30), 9340-9348; Gu et al., Nucleosides, Nucleotides & Nucleic Acids, 2005, 24(5-7), 993-998; Nauwelaerts et al., Nucleic Acids Research, 2005, 33(8), 2452-2463; Robeyns et al., Acta Crystallographica, Section F: Structural Biology and Crystallization Communications, 2005, F61(6), 585-586; Gu et al., Tetrahedron, 2004, 60(9), 2111-2123; Gu et al., Oligonucleotides, 2003, 13(6), 479-489; Wang et al., J. Org. Chem., 2003, 68, 4499-4505; Verbeure et al., Nucleic Acids Research, 2001, 29(24), 4941-4947; Wang et al., J. Org. Chem., 2001, 66, 8478-82; Wang et al., Nucleosides, Nucleotides & Nucleic Acids, 2001, 20(4-7), 785-788; Wang et al., J. Am. Chem., 2000, 122, 8595-8602; Published PCT application, WO 06/047842; and Published PCT Application WO 01/049687; the text of each is incorporated by reference herein, in their entirety).

[0273] A nucleic acid inhibitor of the invention can also include nucleobase (often referred to in the art simply as “base”) modifications or substitutions. As used herein, “unmodified” or “natural” nucleobases include the purine bases adenine (A) and guanine (G), and the pyrimidine bases thymine (T), cytosine (C) and uracil (U). Modified nucleobases include other synthetic and natural nucleobases such as 5-methylcytosine (5-me-C), 5-hydroxymethyl cytosine, xanthine, hypoxanthine, 2-aminoadenine, 6-methyl and other alkyl derivatives of adenine and guanine, 2-propyl and other alkyl derivatives of adenine and guanine, 2-thiouracil, 2-thiothymine and 2-thiocytosine, 5-halouracil and cytosine, 5-propynyl uracil and cytosine, 6-azo uracil, cytosine and thymine, 5-uracil (pseudouracil), 4-thiouracil, 8-halo, 8-amino, 8-thiol, 8-thioalkyl, 8-hydroxyl anal other 8-substituted adenines and guanines, 5-halo, particularly 5-bromo, 5-trifluoromethyl and other 5-substituted uracils and cytosines, 7-methylguanine and 7-methyladenine, 8-azaguanine and 8-azaadenine, 7-deazaguanine and 7-daazaadenine and 3-deazaguanine and 3-deazaadenine. Further nucleobases include those disclosed in U.S. Pat. No. 3,687,808, those disclosed in Modified Nucleosides in Biochemistry, Biotechnology and Medicine, Herdewijn, P. ed. Wiley-VCH, 2008; those disclosed in The Concise Encyclopedia Of Polymer Science And Engineering, pages 858-859, Kroschwitz, J. L, ed. John Wiley & Sons, 1990, these disclosed by Englisch et al., (1991) Angewandte Chemie, International Edition, 30:613, and those disclosed by Sanghvi, Y S., Chapter 15, dsRNA Research and Applications, pages 289-302, Crooke, S. T. and Lebleu, B., Ed., CRC Press, 1993. Certain of these nucleobases are particularly useful for increasing the binding affinity of the oligomeric compounds featured in the invention. These include 5-substituted pyrimidines, 6-azapyrimidines and N-2, N-6 and O-6 substituted purines, including 2-aminopropyladenine, 5-propynyluracil and 5-propynylcytosine. 5-methylcytosine substitutions have been shown to increase nucleic acid duplex stability by 0.6-1.2° C. (Sanghvi, Y. S., Crooke, S. T. and Lebleu, B., Eds., dsRNA Research and Applications, CRC Press, Boca Raton, 1993, pp. 276-278) and are exemplary base substitutions, even more particularly when combined with 2′-O-methoxyethyl sugar modifications.

[0274] Representative U.S. patents that teach the preparation of certain of the above noted modified nucleobases as well as other modified nucleobases include, but are not limited to, the above noted U.S. Pat. Nos. 3,687,808, 4,845,205; 5,130,30; 5,134,066; 5,175,273; 5,367,066; 5,432,272; 5,457,187; 5,459,255; 5,484,908; 5,502,177; 5,525,711; 5,552,540; 5,587,469; 5,594,121, 5,596,091; 5,614,617; 5,681,941; 5,750,692; 6,015,886; 6,147,200; 6,166,197; 6,222,025; 6,235,887; 6,380,368; 6,528,640; 6,639,062; 6,617,438; 7,045,610; 7,427,672; and 7,495,088, the entire contents of each of which are hereby incorporated herein by reference.

[0275] A nucleic acid inhibitor of the invention can also be modified to include one or more locked nucleic acids (LNA). A locked nucleic acid is a nucleotide having a modified ribose moiety in which the ribose moiety comprises an extra bridge connecting the 2′ and 4′ carbons. This structure effectively “locks” the ribose in the 3′-endo structural conformation. The addition of locked nucleic acids to siRNAs has been shown to increase siRNA stability in serum, and to reduce off-target effects (Elmen, J. et al., (2005) Nucleic Acids Research 33(1):439-447; Mook, O R. et al., (2007) Mol Canc Ther 6(3):833-843; Grunweller, A. et al., (2003) Nucleic Acids Research 31(12):3185-3193).

[0276] A nucleic acid inhibitor of the invention can also be modified to include one or more bicyclic sugar moities. A “bicyclic sugar” is a furanosyl ring modified by the bridging of two atoms. A “bicyclic nucleoside” (“BNA”) is a nucleoside having a sugar moiety comprising a bridge connecting two carbon atoms of the sugar ring, thereby forming a bicyclic ring system. In certain embodiments, the bridge connects the 4′-carbon and the 2′-carbon of the sugar ring. Thus, in some embodiments an agent of the invention may include one or more locked nucleic acids (LNA). A locked nucleic acid is a nucleotide having a modified ribose moiety in which the ribose moiety comprises an extra bridge connecting the 2′ and 4′ carbons. In other words, an LNA is a nucleotide comprising a bicyclic sugar moiety comprising a 4′-CH2-O-2′ bridge. This structure effectively “locks” the ribose in the 3′-endo structural conformation. The addition of locked nucleic acids to siRNAs has been shown to increase siRNA stability in serum, and to reduce off-target effects (Elmen, J. et al., (2005) Nucleic Acids Research 33(1):439-447; Mook, O R. et al., (2007) Mol Canc Ther 6(3):833-843; Grunweller, A. et al., (2003) Nucleic Acids Research 31(12):3185-3193). Examples of bicyclic nucleosides for use in the polynucleotides of the invention include without limitation nucleosides comprising a bridge between the 4′ and the 2′ ribosyl ring atoms. In certain embodiments, the antisense polynucleotide agents of the invention include one or more bicyclic nucleosides comprising a 4′ to 2′ bridge. Examples of such 4′ to 2′ bridged bicyclic nucleosides, include but are not limited to 4′-(CH2)-O-2′ (LNA); 4′-(CH2)-S-2′; 4′-(CH2)₂-O-2′ (ENA); 4′-CH(CH3)-O-2′ (also referred to as “constrained ethyl” or “cEt”) and 4′-CH(CH2OCH3)-O-2′ (and analogs thereof; see, e.g., U.S. Pat. No. 7,399,845); 4′-C(CH3)(CH3)-O-2′ (and analogs thereof; see e.g., U.S. Pat. No. 8,278,283); 4′-CH2-N(OCH3)-2′ (and analogs thereof; see e.g., U.S. Pat. No. 8,278,425); 4′-CH2-O—N(CH3)-2′ (see, e.g., U.S. Patent Publication No. 2004/0171570); 4′-CH2-N(R)—O-2′, wherein R is H, C1-C12 alkyl, or a protecting group (see, e.g., U.S. Pat. No. 7,427,672); 4′-CH2-C(H)(CH3)-2′ (see, e.g., Chattopadhyaya et al., J. Org. Chem., 2009, 74, 118-134); and 4′-CH2-C(═CH2)-2′ (and analogs thereof; see, e.g., U.S. Pat. No. 8,278,426). The entire contents of each of the foregoing are hereby incorporated herein by reference.

[0277] Additional representative U.S. patents and US patent Publications that teach the preparation of locked nucleic acid nucleotides include, but are not limited to, the following: U.S. Pat. Nos. 6,268,490; 6,525,191; 6,670,461; 6,770,748; 6,794,499; 6,998,484; 7,053,207; 7,034,133; 7,084,125; 7,399,845; 7,427,672; 7,569,686; 7,741,457; 8,022,193; 8,030,467; 8,278,425; 8,278,426; 8,278,283; US 2008/0039618; and US 2009/0012281, the entire contents of each of which are hereby incorporated herein by reference.

[0278] Any of the foregoing bicyclic nucleosides can be prepared having one or more stereochemical sugar configurations including for example α-L-ribofuranose and β-D-ribofuranose (see WO 99/14226).

[0279] A nucleic acid inhibitor of the invention can also be modified to include one or more constrained ethyl nucleotides. As used herein, a “constrained ethyl nucleotide” or “cEt” is a locked nucleic acid comprising a bicyclic sugar moiety comprising a 4′-CH(CH₃)-0-2′ bridge. In one embodiment, a constrained ethyl nucleotide is in the S conformation referred to herein as “S-cEt.”

[0280] A nucleic acid inhibitor of the invention may also include one or more “conformationally restricted nucleotides” (“CRN”). CRN are nucleotide analogs with a linker connecting the C2′ and C4′ carbons of ribose or the C3 and —C5′ carbons of ribose. CRN lock the ribose ring into a stable conformation and increase the hybridization affinity to mRNA. The linker is of sufficient length to place the oxygen in an optimal position for stability and affinity resulting in less ribose ring puckering.

[0281] Representative publications that teach the preparation of certain of the above noted CRN include, but are not limited to, US Patent Publication No. 2013/0190383; and PCT publication WO 2013/036868, the entire contents of each of which are hereby incorporated herein by reference.

[0282] In some embodiments, a nucleic acid inhibitor of the invention comprises one or more monomers that are UNA (unlocked nucleic acid) nucleotides. UNA is unlocked acyclic nucleic acid, wherein any of the bonds of the sugar has been removed, forming an unlocked “sugar” residue. In one example, UNA also encompasses monomer with bonds between C1′-C4′ have been removed (i.e. the covalent carbon-oxygen-carbon bond between the C1′ and C4′ carbons). In another example, the C2′-C3′ bond (i.e. the covalent carbon-carbon bond between the C2′ and C3′ carbons) of the sugar has been removed (see Nuc. Acids Symp. Series, 52, 133-134 (2008) and Fluiter et al., Mol. Biosyst., 2009, 10, 1039 hereby incorporated by reference).

[0283] Representative U.S. publications that teach the preparation of UNA include, but are not limited to, U.S. Pat. No. 8,314,227; and US Patent Publication Nos. 2013/0096289; 2013/0011922; and 2011/0313020, the entire contents of each of which are hereby incorporated herein by reference.

[0284] Potentially stabilizing modifications to the ends of nucleic acid inhibitors can include N-(acetylaminocaproyl)-4-hydroxyprolinol (Hyp-C6-NHAc), N-(caproyl-4-hydroxyprolinol (Hyp-C6), N-(acetyl-4-hydroxyprolinol (Hyp-NHAc), thymidine-2′-O-deoxythymidine (ether), N-(aminocaproyl)-4-hydroxyprolinol (Hyp-C6-amino), 2-docosanoyl-uridine-3″-phosphate, inverted base dT(idT) and others. Disclosure of this modification can be found in PCT Publication No. WO 2011/005861.

[0285] Other modifications of a nucleic acid inhibitor of the invention include a 5′ phosphate or 5′ phosphate mimic, e.g., a 5′-terminal phosphate or phosphate mimic on the antisense strand of an a nucleic acid inhibitor. Suitable phosphate mimics are disclosed in, for example US Patent Publication No. 2012/0157511, the entire contents of which are incorporated herein by reference.

[0286] Any of the nucleic acid inhibitors of the invention may be optionally conjugated with a ligand, such as a GalNAc derivative ligand, as described below.

[0287] As described in more detail below, a nucleic acid inhibitor that contains conjugations of one or more carbohydrate moieties to a nucleic acid inhibitor can optimize one or more properties of the inhibitor. In many cases, the carbohydrate moiety will be attached to a modified subunit of the nucleic acid inhibitor. For example, the ribose sugar of one or more ribonucleotide subunits of an inhibitor can be replaced with another moiety, e.g., a non-carbohydrate (preferably cyclic) carrier to which is attached a carbohydrate ligand. A ribonucleotide subunit in which the ribose sugar of the subunit has been so replaced is referred to herein as a ribose replacement modification subunit (RRMS). A cyclic carrier may be a carbocyclic ring system, i.e., all ring atoms are carbon atoms, or a heterocyclic ring system, i.e., one or more ring atoms may be a heteroatom, e.g., nitrogen, oxygen, sulfur. The cyclic carrier may be a monocyclic ring system, or may contain two or more rings, e.g. fused rings. The cyclic carrier may be a fully saturated ring system, or it may contain one or more double bonds.

[0288] The ligand may be attached to the nucleic acid inhibitor via a carrier. The carriers include (i) at least one “backbone attachment point,” preferably two “backbone attachment points” and (ii) at least one “tethering attachment point.” A “backbone attachment point” as used herein refers to a functional group, e.g. a hydroxyl group, or generally, a bond available for, and that is suitable for incorporation of the carrier into the backbone, e.g., the phosphate, or modified phosphate, e.g., sulfur containing, backbone, of a ribonucleic acid. A “tethering attachment point” (TAP) in some embodiments refers to a constituent ring atom of the cyclic carrier, e.g., a carbon atom or a heteroatom (distinct from an atom which provides a backbone attachment point), that connects a selected moiety. The moiety can be, e.g., a carbohydrate, e.g. monosaccharide, disaccharide, trisaccharide, tetrasaccharide, oligosaccharide and polysaccharide. Optionally, the selected moiety is connected by an intervening tether to the cyclic carrier. Thus, the cyclic carrier will often include a functional group, e.g., an amino group, or generally, provide a bond, that is suitable for incorporation or tethering of another chemical entity, e.g., a ligand to the constituent ring.

[0289] The nucleic acid inhibitors may be conjugated to a ligand via a carrier, wherein the carrier can be cyclic group or acyclic group; preferably, the cyclic group is selected from pyrrolidinyl, pyrazolinyl, pyrazolidinyl, imidazolinyl, imidazolidinyl, piperidinyl, piperazinyl, [1,3]dioxolane, oxazolidinyl, isoxazolidinyl, morpholinyl, thiazolidinyl, isothiazolidinyl, quinoxalinyl, pyridazinonyl, tetrahydrofuryl and and decalin; preferably, the acyclic group is selected from serinol backbone or diethanolamine backbone.

[0290] ii. Modified dsRNA Agents Comprising Motifs of the Invention

[0291] In certain aspects of the invention, the double stranded RNAi agents of the invention include agents with chemical modifications as disclosed, for example, in WO 2013/075035, filed on Nov. 16, 2012, the entire contents of which are incorporated herein by reference.

[0292] It is to be understood that, in embodiments in which a first dsRNA agent targeting LDHA and a second dsRNA agent targeting HAO1 are covalently attached (i.e., a dual targeting RNAi agent), the first agent may comprise any one or more of the motifs described below, the second agent may comprise any one or more of the motifs described below, or both the first agent and the second agent may independently comprise any one or more of the motifs described below.

[0293] Accordingly, the invention provides double stranded RNAi agents capable of inhibiting the expression of a target gene (i.e., an LDHA gene, an HAO1 gene, or both an LDHA gene and an HAO1 gene) in vivo. The RNAi agent comprises a sense strand and an antisense strand. Each strand of the RNAi agent may range from 12-30 nucleotides in length. For example, each strand may be between 14-30 nucleotides in length, 17-30 nucleotides in length, 25-30 nucleotides in length, 27-30 nucleotides in length, 17-23 nucleotides in length, 17-21 nucleotides in length, 17-19 nucleotides in length, 19-25 nucleotides in length, 19-23 nucleotides in length, 19-21 nucleotides in length, 21-25 nucleotides in length, or 21-23 nucleotides in length.

[0294] The sense strand and antisense strand typically form a duplex double stranded RNA (“dsRNA”), also referred to herein as an “RNAi agent.” The duplex region of an RNAi agent may be 12-30 nucleotide pairs in length. For example, the duplex region can be between 14-30 nucleotide pairs in length, 17-30 nucleotide pairs in length, 27-30 nucleotide pairs in length, 17-23 nucleotide pairs in length, 17-21 nucleotide pairs in length, 17-19 nucleotide pairs in length, 19-25 nucleotide pairs in length, 19-23 nucleotide pairs in length, 19-21 nucleotide pairs in length, 21-25 nucleotide pairs in length, or 21-23 nucleotide pairs in length. In another example, the duplex region is selected from 15, 16, 17, 18, 19, 20, 21, 22, 23, 24, 25, 26, and 27 nucleotides in length.

[0295] In one embodiment, the RNAi agent may contain one or more overhang regions and/or capping groups at the 3′-end, 5′-end, or both ends of one or both strands. The overhang can be 1-6 nucleotides in length, for instance 2-6 nucleotides in length, 1-5 nucleotides in length, 2-5 nucleotides in length, 1-4 nucleotides in length, 2-4 nucleotides in length, 1-3 nucleotides in length, 2-3 nucleotides in length, or 1-2 nucleotides in length. The overhangs can be the result of one strand being longer than the other, or the result of two strands of the same length being staggered. The overhang can form a mismatch with the target mRNA or it can be complementary to the gene sequences being targeted or can be another sequence. The first and second strands can also be joined, e.g., by additional bases to form a hairpin, or by other non-base linkers.

[0296] In one embodiment, the nucleotides in the overhang region of the RNAi agent can each independently be a modified or unmodified nucleotide including, but no limited to 2′-sugar modified, such as, 2-F, 2′-Omethyl, thymidine (T), 2′-O-methoxyethyl-5-methyluridine (Teo), 2′-O-methoxyethyladenosine (Aeo), 2′-O-methoxyethyl-5-methylcytidine (m5Ceo), and any combinations thereof. For example, TT can be an overhang sequence for either end on either strand. The overhang can form a mismatch with the target mRNA or it can be complementary to the gene sequences being targeted or can be another sequence.

[0297] The 5′- or 3′-overhangs at the sense strand, antisense strand or both strands of the RNAi agent may be phosphorylated. In some embodiments, the overhang region(s) contains two nucleotides having a phosphorothioate between the two nucleotides, where the two nucleotides can be the same or different. In one embodiment, the overhang is present at the 3′-end of the sense strand, antisense strand, or both strands. In one embodiment, this 3′-overhang is present in the antisense strand. In one embodiment, this 3′-overhang is present in the sense strand.

[0298] The RNAi agent may contain only a single overhang, which can strengthen the interference activity of the RNAi, without affecting its overall stability. For example, the single-stranded overhang may be located at the 3′-terminal end of the sense strand or, alternatively, at the 3′-terminal end of the antisense strand. The RNAi may also have a blunt end, located at the 5′-end of the antisense strand (or the 3′-end of the sense strand) or vice versa. Generally, the antisense strand of the RNAi has a nucleotide overhang at the 3′-end, and the 5′-end is blunt. While not wishing to be bound by theory, the asymmetric blunt end at the 5′-end of the antisense strand and 3′-end overhang of the antisense strand favor the guide strand loading into RISC process.

[0299] In one embodiment, the RNAi agent is a double ended bluntmer of 19 nucleotides in length, wherein the sense strand contains at least one motif of three 2′-F modifications on three consecutive nucleotides at positions 7, 8, 9 from the 5′end. The antisense strand contains at least one motif of three 2′-O-methyl modifications on three consecutive nucleotides at positions 11, 12, 13 from the 5′end.

[0300] In another embodiment, the RNAi agent is a double ended bluntmer of 20 nucleotides in length, wherein the sense strand contains at least one motif of three 2′-F modifications on three consecutive nucleotides at positions 8, 9, 10 from the 5′end. The antisense strand contains at least one motif of three 2′-O-methyl modifications on three consecutive nucleotides at positions 11, 12, 13 from the 5′end.

[0301] In yet another embodiment, the RNAi agent is a double ended bluntmer of 21 nucleotides in length, wherein the sense strand contains at least one motif of three 2′-F modifications on three consecutive nucleotides at positions 9, 10, 11 from the 5′end. The antisense strand contains at least one motif of three 2′-O-methyl modifications on three consecutive nucleotides at positions 11, 12, 13 from the 5′end.

[0302] In one embodiment, the RNAi agent comprises a 21 nucleotide sense strand and a 23 nucleotide antisense strand, wherein the sense strand contains at least one motif of three 2′-F modifications on three consecutive nucleotides at positions 9, 10, 11 from the 5′ end; the antisense strand contains at least one motif of three 2′-O-methyl modifications on three consecutive nucleotides at positions 11, 12, 13 from the 5′end, wherein one end of the RNAi agent is blunt, while the other end comprises a 2 nucleotide overhang. Preferably, the 2 nucleotide overhang is at the 3′-end of the antisense strand.

[0303] When the 2 nucleotide overhang is at the 3′-end of the antisense strand, there may be two phosphorothioate internucleotide linkages between the terminal three nucleotides, wherein two of the three nucleotides are the overhang nucleotides, and the third nucleotide is a paired nucleotide next to the overhang nucleotide. In one embodiment, the RNAi agent additionally has two phosphorothioate internucleotide linkages between the terminal three nucleotides at both the 5′-end of the sense strand and at the 5′-end of the antisense strand. In one embodiment, every nucleotide in the sense strand and the antisense strand of the RNAi agent, including the nucleotides that are part of the motifs are modified nucleotides. In one embodiment each residue is independently modified with a 2′-O-methyl or 3′-fluoro, e.g., in an alternating motif. Optionally, the RNAi agent further comprises a ligand (preferably GalNAc₃).

[0304] In one embodiment, the RNAi agent comprises a sense and an antisense strand, wherein the sense strand is 25-30 nucleotide residues in length, wherein starting from the 5′ terminal nucleotide (position 1) positions 1 to 23 of the first strand comprise at least 8 ribonucleotides; the antisense strand is 36-66 nucleotide residues in length and, starting from the 3′ terminal nucleotide, comprises at least 8 ribonucleotides in the positions paired with positions 1-23 of sense strand to form a duplex; wherein at least the 3 ‘ terminal nucleotide of antisense strand is unpaired with sense strand, and up to 6 consecutive 3’ terminal nucleotides are unpaired with sense strand, thereby forming a 3′ single stranded overhang of 1-6 nucleotides; wherein the 5′ terminus of antisense strand comprises from 10-30 consecutive nucleotides which are unpaired with sense strand, thereby forming a 10-30 nucleotide single stranded 5′ overhang; wherein at least the sense strand 5′ terminal and 3′ terminal nucleotides are base paired with nucleotides of antisense strand when sense and antisense strands are aligned for maximum complementarity, thereby forming a substantially duplexed region between sense and antisense strands; and antisense strand is sufficiently complementary to a target RNA along at least 19 ribonucleotides of antisense strand length to reduce target gene expression when the double stranded nucleic acid is introduced into a mammalian cell; and wherein the sense strand contains at least one motif of three 2′-F modifications on three consecutive nucleotides, where at least one of the motifs occurs at or near the cleavage site. The antisense strand contains at least one motif of three 2′-O-methyl modifications on three consecutive nucleotides at or near the cleavage site.

[0305] In one embodiment, the RNAi agent comprises sense and antisense strands, wherein the RNAi agent comprises a first strand having a length which is at least 25 and at most 29 nucleotides and a second strand having a length which is at most 30 nucleotides with at least one motif of three 2′-O-methyl modifications on three consecutive nucleotides at position 11, 12, 13 from the 5′ end; wherein the 3′ end of the first strand and the 5′ end of the second strand form a blunt end and the second strand is 1˜4 nucleotides longer at its 3′ end than the first strand, wherein the duplex region region which is at least 25 nucleotides in length, and the second strand is sufficiently complemenatary to a target mRNA along at least 19 nucleotide of the second strand length to reduce target gene expression when the RNAi agent is introduced into a mammalian cell, and wherein dicer cleavage of the RNAi agent preferentially results in an siRNA comprising the 3′ end of the second strand, thereby reducing expression of the target gene in the mammal. Optionally, the RNAi agent further comprises a ligand.

[0306] In one embodiment, the sense strand of the RNAi agent contains at least one motif of three identical modifications on three consecutive nucleotides, where one of the motifs occurs at the cleavage site in the sense strand.

[0307] In one embodiment, the antisense strand of the RNAi agent can also contain at least one motif of three identical modifications on three consecutive nucleotides, where one of the motifs occurs at or near the cleavage site in the antisense strand.

[0308] For an RNAi agent having a duplex region of 17-23 nucleotide in length, the cleavage site of the antisense strand is typically around the 10, 11 and 12 positions from the 5′-end. Thus the motifs of three identical modifications may occur at the 9, 10, 11 positions; 10, 11, 12 positions; 11, 12, 13 positions; 12, 13, 14 positions; or 13, 14, 15 positions of the antisense strand, the count starting from the 1st nucleotide from the 5′-end of the antisense strand, or, the count starting from the 1st paired nucleotide within the duplex region from the 5′-end of the antisense strand. The cleavage site in the antisense strand may also change according to the length of the duplex region of the RNAi from the 5′-end.

[0309] The sense strand of the RNAi agent may contain at least one motif of three identical modifications on three consecutive nucleotides at the cleavage site of the strand; and the antisense strand may have at least one motif of three identical modifications on three consecutive nucleotides at or near the cleavage site of the strand. When the sense strand and the antisense strand form a dsRNA duplex, the sense strand and the antisense strand can be so aligned that one motif of the three nucleotides on the sense strand and one motif of the three nucleotides on the antisense strand have at least one nucleotide overlap, i.e., at least one of the three nucleotides of the motif in the sense strand forms a base pair with at least one of the three nucleotides of the motif in the antisense strand. Alternatively, at least two nucleotides may overlap, or all three nucleotides may overlap.

[0310] In one embodiment, the sense strand of the RNAi agent may contain more than one motif of three identical modifications on three consecutive nucleotides. The first motif may occur at or near the cleavage site of the strand and the other motifs may be a wing modification. The term “wing modification” herein refers to a motif occurring at another portion of the strand that is separated from the motif at or near the cleavage site of the same strand. The wing modification is either adajacent to the first motif or is separated by at least one or more nucleotides. When the motifs are immediately adjacent to each other then the chemistry of the motifs are distinct from each other and when the motifs are separated by one or more nucleotide than the chemistries can be the same or different. Two or more wing modifications may be present. For instance, when two wing modifications are present, each wing modification may occur at one end relative to the first motif which is at or near cleavage site or on either side of the lead motif.

[0311] Like the sense strand, the antisense strand of the RNAi agent may contain more than one motifs of three identical modifications on three consecutive nucleotides, with at least one of the motifs occurring at or near the cleavage site of the strand. This antisense strand may also contain one or more wing modifications in an alignment similar to the wing modifications that may be present on the sense strand.

[0312] In one embodiment, the wing modification on the sense strand or antisense strand of the RNAi agent typically does not include the first one or two terminal nucleotides at the 3′-end, 5′-end or both ends of the strand.

[0313] In another embodiment, the wing modification on the sense strand or antisense strand of the RNAi agent typically does not include the first one or two paired nucleotides within the duplex region at the 3′-end, 5′-end or both ends of the strand.

[0314] When the sense strand and the antisense strand of the RNAi agent each contain at least one wing modification, the wing modifications may fall on the same end of the duplex region, and have an overlap of one, two or three nucleotides.

[0315] When the sense strand and the antisense strand of the RNAi agent each contain at least two wing modifications, the sense strand and the antisense strand can be so aligned that two modifications each from one strand fall on one end of the duplex region, having an overlap of one, two or three nucleotides; two modifications each from one strand fall on the other end of the duplex region, having an overlap of one, two or three nucleotides; two modifications one strand fall on each side of the lead motif, having an overlap of one, two or three nucleotides in the duplex region.

[0316] In one embodiment, every nucleotide in the sense strand and antisense strand of the RNAi agent, including the nucleotides that are part of the motifs, may be modified. Each nucleotide may be modified with the same or different modification which can include one or more alteration of one or both of the non-linking phosphate oxygens and/or of one or more of the linking phosphate oxygens; alteration of a constituent of the ribose sugar, e.g., of the 2′ hydroxyl on the ribose sugar; wholesale replacement of the phosphate moiety with “dephospho” linkers; modification or replacement of a naturally occurring base; and replacement or modification of the ribose-phosphate backbone.

[0317] As nucleic acids are polymers of subunits, many of the modifications occur at a position which is repeated within a nucleic acid, e.g., a modification of a base, or a phosphate moiety, or a non-linking 0 of a phosphate moiety. In some cases the modification will occur at all of the subject positions in the nucleic acid but in many cases it will not. By way of example, a modification may only occur at a 3′ or 5′ terminal position, may only occur in a terminal region, e.g., at a position on a terminal nucleotide or in the last 2, 3, 4, 5, or 10 nucleotides of a strand. A modification may occur in a double strand region, a single strand region, or in both. A modification may occur only in the double strand region of a RNA or may only occur in a single strand region of a RNA. For example, a phosphorothioate modification at a non-linking 0 position may only occur at one or both termini, may only occur in a terminal region, e.g., at a position on a terminal nucleotide or in the last 2, 3, 4, 5, or 10 nucleotides of a strand, or may occur in double strand and single strand regions, particularly at termini. The 5′ end or ends can be phosphorylated.

[0318] It may be possible, e.g., to enhance stability, to include particular bases in overhangs, or to include modified nucleotides or nucleotide surrogates, in single strand overhangs, e.g., in a 5′ or 3′ overhang, or in both. For example, it can be desirable to include purine nucleotides in overhangs. In some embodiments all or some of the bases in a 3′ or 5′ overhang may be modified, e.g., with a modification described herein. Modifications can include, e.g., the use of modifications at the 2′ position of the ribose sugar with modifications that are known in the art, e.g., the use of deoxyribonucleotides, 2′-deoxy-2′-fluoro (2′-F) or 2′-O-methyl modified instead of the ribosugar of the nucleobase, and modifications in the phosphate group, e.g., phosphorothioate modifications. Overhangs need not be homologous with the target sequence.

[0319] In one embodiment, each residue of the sense strand and antisense strand is independently modified with LNA, CRN, cET, UNA, HNA, CeNA, 2′-methoxyethyl, 2′-O-methyl, 2′-O-allyl, 2′-C-allyl, 2′-deoxy, 2′-hydroxyl, or 2′-fluoro. The strands can contain more than one modification. In one embodiment, each residue of the sense strand and antisense strand is independently modified with 2′-O-methyl or 2′-fluoro.

[0320] At least two different modifications are typically present on the sense strand and antisense strand. Those two modifications may be the 2′-O-methyl or 2′-fluoro modifications, or others. In one embodiment, the Nₐ and/or N_{b} comprise modifications of an alternating pattern. The term “alternating motif” as used herein refers to a motif having one or more modifications, each modification occurring on alternating nucleotides of one strand. The alternating nucleotide may refer to one per every other nucleotide or one per every three nucleotides, or a similar pattern. For example, if A, B and C each represent one type of modification to the nucleotide, the alternating motif can be “ABABABABABAB . . . ,” “AABBAABBAABB . . . ,” “AABAABAABAAB . . . ,” “AAABAAABAAAB . . . ,” “AAABBBAAABBB . . . ,” or “ABCABCABCABC . . . ,” etc. The type of modifications contained in the alternating motif may be the same or different. For example, if A, B, C, D each represent one type of modification on the nucleotide, the alternating pattern, i.e., modifications on every other nucleotide, may be the same, but each of the sense strand or antisense strand can be selected from several possibilities of modifications within the alternating motif such as “ABABAB . . . ”, “ACACAC . . . ” “BDBDBD . . . ” or “CDCDCD . . . ,” etc.

[0321] In one embodiment, the RNAi agent of the invention comprises the modification pattern for the alternating motif on the sense strand relative to the modification pattern for the alternating motif on the antisense strand is shifted. The shift may be such that the modified group of nucleotides of the sense strand corresponds to a differently modified group of nucleotides of the antisense strand and vice versa. For example, the sense strand when paired with the antisense strand in the dsRNA duplex, the alternating motif in the sense strand may start with “ABABAB” from 5′-3′ of the strand and the alternating motif in the antisense strand may start with “BABABA” from 5′-3′ of the strand within the duplex region. As another example, the alternating motif in the sense strand may start with “AABBAABB” from 5′-3′ of the strand and the alternating motif in the antisenese strand may start with “BBAABBAA” from 5′-3′ of the strand within the duplex region, so that there is a complete or partial shift of the modification patterns between the sense strand and the antisense strand. In one embodiment, the RNAi agent comprises the pattern of the alternating motif of 2′-O-methyl modification and 2′-F modification on the sense strand initially has a shift relative to the pattern of the alternating motif of 2′-O-methyl modification and 2′-F modification on the antisense strand initially, i.e., the 2′-O-methyl modified nucleotide on the sense strand base pairs with a 2′-F modified nucleotide on the antisense strand and vice versa. The 1 position of the sense strand may start with the 2′-F modification, and the 1 position of the antisense strand may start with the 2′-O-methyl modification.

[0322] The introduction of one or more motifs of three identical modifications on three consecutive nucleotides to the sense strand and/or antisense strand interrupts the initial modification pattern present in the sense strand and/or antisense strand. This interruption of the modification pattern of the sense and/or antisense strand by introducing one or more motifs of three identical modifications on three consecutive nucleotides to the sense and/or antisense strand surprisingly enhances the gene silencing activity to the target gene.

[0323] In one embodiment, when the motif of three identical modifications on three consecutive nucleotides is introduced to any of the strands, the modification of the nucleotide next to the motif is a different modification than the modification of the motif. For example, the portion of the sequence containing the motif is “ . . . NₐYYN_{b} . . . ,” where “Y” represents the modification of the motif of three identical modifications on three consecutive nucleotide, and “Nₐ” and “N_{b}” represent a modification to the nucleotide next to the motif “YYY” that is different than the modification of Y, and where Nₐ and N_{b} can be the same or different modifications. Alternatively, Nₐ and/or N_{b} may be present or absent when there is a wing modification present.

[0324] The RNAi agent may further comprise at least one phosphorothioate or methylphosphonate internucleotide linkage. The phosphorothioate or methylphosphonate internucleotide linkage modification may occur on any nucleotide of the sense strand or antisense strand or both strands in any position of the strand. For instance, the internucleotide linkage modification may occur on every nucleotide on the sense strand and/or antisense strand; each internucleotide linkage modification may occur in an alternating pattern on the sense strand and/or antisense strand; or the sense strand or antisense strand may contain both internucleotide linkage modifications in an alternating pattern. The alternating pattern of the internucleotide linkage modification on the sense strand may be the same or different from the antisense strand, and the alternating pattern of the internucleotide linkage modification on the sense strand may have a shift relative to the alternating pattern of the internucleotide linkage modification on the antisense strand. In one embodiment, a double-stranded RNAi agent comprises 6-8phosphorothioate internucleotide linkages. In one embodiment, the antisense strand comprises two phosphorothioate internucleotide linkages at the 5′-terminus and two phosphorothioate internucleotide linkages at the 3′-terminus, and the sense strand comprises at least two phosphorothioate internucleotide linkages at either the 5′-terminus or the 3′-terminus.

[0325] In one embodiment, the RNAi comprises a phosphorothioate or methylphosphonate internucleotide linkage modification in the overhang region. For example, the overhang region may contain two nucleotides having a phosphorothioate or methylphosphonate internucleotide linkage between the two nucleotides. Internucleotide linkage modifications also may be made to link the overhang nucleotides with the terminal paired nucleotides within the duplex region. For example, at least 2, 3, 4, or all the overhang nucleotides may be linked through phosphorothioate or methylphosphonate internucleotide linkage, and optionally, there may be additional phosphorothioate or methylphosphonate internucleotide linkages linking the overhang nucleotide with a paired nucleotide that is next to the overhang nucleotide. For instance, there may be at least two phosphorothioate internucleotide linkages between the terminal three nucleotides, in which two of the three nucleotides are overhang nucleotides, and the third is a paired nucleotide next to the overhang nucleotide. These terminal three nucleotides may be at the 3′-end of the antisense strand, the 3′-end of the sense strand, the 5′-end of the antisense strand, and/or the 5′end of the antisense strand.

[0326] In one embodiment, the 2 nucleotide overhang is at the 3′-end of the antisense strand, and there are two phosphorothioate internucleotide linkages between the terminal three nucleotides, wherein two of the three nucleotides are the overhang nucleotides, and the third nucleotide is a paired nucleotide next to the overhang nucleotide. Optionally, the RNAi agent may additionally have two phosphorothioate internucleotide linkages between the terminal three nucleotides at both the 5′-end of the sense strand and at the 5′-end of the antisense strand.

[0327] In one embodiment, the RNAi agent comprises mismatch(es) with the target, within the duplex, or combinations thereof. The mistmatch may occur in the overhang region or the duplex region. The base pair may be ranked on the basis of their propensity to promote dissociation or melting (e.g., on the free energy of association or dissociation of a particular pairing, the simplest approach is to examine the pairs on an individual pair basis, though next neighbor or similar analysis can also be used). In terms of promoting dissociation: A:U is preferred over G:C; G:U is preferred over G:C; and I:C is preferred over G:C (I=inosine). Mismatches, e.g., non-canonical or other than canonical pairings (as described elsewhere herein) are preferred over canonical (A:T, A:U, G:C) pairings; and pairings which include a universal base are preferred over canonical pairings. In one embodiment, the RNAi agent comprises at least one of the first 1, 2, 3, 4, or 5 base pairs within the duplex regions from the 5′-end of the antisense strand independently selected from the group of:

[0328] A:U, G:U, I:C, and mismatched pairs, e.g., non-canonical or other than canonical pairings or pairings which include a universal base, to promote the dissociation of the antisense strand at the 5′-end of the duplex.

[0329] In one embodiment, the nucleotide at the 1 position within the duplex region from the 5′-end in the antisense strand is selected from the group consisting of A, dA, dU, U, and dT. Alternatively, at least one of the first 1, 2 or 3 base pair within the duplex region from the 5′-end of the antisense strand is an AU base pair. For example, the first base pair within the duplex region from the 5′-end of the antisense strand is an AU base pair.

[0330] In another embodiment, the nucleotide at the 3′-end of the sense strand is deoxy-thymine (dT). In another embodiment, the nucleotide at the 3′-end of the antisense strand is deoxy-thymine (dT). In one embodiment, there is a short sequence of deoxy-thymine nucleotides, for example, two dT nucleotides on the 3′-end of the sense and/or antisense strand.

[0331] In one embodiment, the sense strand sequence may be represented by formula (I):

(I)
5′ nₚ-Nₐ-(X X X )ᵢ-N_{b}-Y Y Y-N_{b}-(Z Z Z)ⱼ-Nₐ-n_{q} 3′

[0332] wherein:

[0333] i and j are each independently 0 or 1;

[0334] p and q are each independently 0-6;

[0335] each Nₐ independently represents an oligonucleotide sequence comprising 0-25 modified nucleotides, each sequence comprising at least two differently modified nucleotides;

[0336] each N_{b} independently represents an oligonucleotide sequence comprising 0-10 modified nucleotides;

[0337] each nₚ and n_{q} independently represent an overhang nucleotide;

[0338] wherein N_{b} and Y do not have the same modification; and

[0339] XXX, YYY and ZZZ each independently represent one motif of three identical modifications on three consecutive nucleotides. Preferably YYY is all 2′-F modified nucleotides. In one embodiment, the Nₐ and/or N_{b} comprise modifications of alternating pattern.

[0340] In one embodiment, the YYY motif occurs at or near the cleavage site of the sense strand. For example, when the RNAi agent has a duplex region of 17-23 nucleotides in length, the YYY motif can occur at or the vicinity of the cleavage site (e.g.: can occur at positions 6, 7, 8, 7, 8, 9, 8, 9, 10, 9, 10, 11, 10, 11, 12 or 11, 12, 13) of - the sense strand, the count starting from the 1^{st} nucleotide, from the 5′-end; or optionally, the count starting at the 1^{st} paired nucleotide within the duplex region, from the 5′-end.

[0341] In one embodiment, i is 1 and j is 0, or i is 0 and j is 1, or both i and j are 1. The sense strand can therefore be represented by the following formulas:

(Ib)
5′ nₚ-Nₐ-YYY-N_{b}-ZZZ-Nₐ-n_{q} 3′;
(Ic)
5′ nₚ-Nₐ-XXX-N_{b}-YYY-Nₐ-n_{q} 3′;
or
(Id)
5′ nₚ-Nₐ-XXX-N_{b}-YYY-N_{b}-ZZZ-Nₐ-n_{q} 3′

[0342] When the sense strand is represented by formula (Ib), N_{b} represents an oligonucleotide sequence comprising 0-10, 0-7, 0-5, 0-4, 0-2 or 0 modified nucleotides. Each Nₐ independently can represent an oligonucleotide sequence comprising 2-20, 2-15, or 2-10 modified nucleotides.

[0343] When the sense strand is represented as formula (Ic), N_{b} represents an oligonucleotide sequence comprising 0-10, 0-7, 0-10, 0-7, 0-5, 0-4, 0-2 or 0 modified nucleotides. Each Nₐ can independently represent an oligonucleotide sequence comprising 2-20, 2-15, or 2-10 modified nucleotides.

[0344] When the sense strand is represented as formula (Id), each N_{b} independently represents an oligonucleotide sequence comprising 0-10, 0-7, 0-5, 0-4, 0-2 or 0 modified nucleotides. Preferably, N_{b} is 0, 1, 2, 3, 4, 5 or 6. Each Nₐ can independently represent an oligonucleotide sequence comprising 2-20, 2-15, or 2-10 modified nucleotides. Each of X, Y and Z may be the same or different from each other.

[0345] In other embodiments, i is 0 and j is 0, and the sense strand may be represented by the formula:

(Ia)
5′ nₚ-Nₐ-YYY-Nₐ-n_{q} 3′.

When the sense strand is represented by formula (Ia), each Nₐ independently can represent an oligonucleotide sequence comprising 2-20, 2-15, or 2-10 modified nucleotides.

[0346] In one embodiment, the antisense strand sequence of the RNAi may be represented by formula (II):

(II)
5′ n_{q}′-Nₐ′-(Z′Z′Z)ₖ-N_{b}′-Y′Y′Y′-N_{b}′-
(X′X′X′)ₗ-N′a-nₚ′ 3′

[0347] wherein:

[0348] k and 1 are each independently 0 or 1;

[0349] p′ and q′ are each independently 0-6;

[0350] each Nₐ′ independently represents an oligonucleotide sequence comprising 0-25 modified nucleotides, each sequence comprising at least two differently modified nucleotides;

[0351] each N_{b}′ independently represents an oligonucleotide sequence comprising 0-10 modified nucleotides;

[0352] each nₚ′ and n_{q}′ independently represent an overhang nucleotide;

[0353] wherein N_{b}′ and Y′ do not have the same modification; and

[0354] X′X′X′, Y′Y′Y′ and Z′Z′Z′ each independently represent one motif of three identical modifications on three consecutive nucleotides.

[0355] In one embodiment, the Nₐ′ and/or N_{b}′ comprise modifications of alternating pattern.

[0356] The Y′Y′Y′ motif occurs at or near the cleavage site of the antisense strand. For example, when the RNAi agent has a duplex region of 17-23nucleotidein length, the Y′Y′Y′ motif can occur at positions 9, 10, 11; 10, 11, 12; 11, 12, 13; 12, 13, 14; or 13, 14, 15 of the antisense strand, with the count starting from the 1st nucleotide, from the 5′-end; or optionally, the count starting at the 1st paired nucleotide within the duplex region, from the 5′-end. Preferably, the Y′Y′Y′ motif occurs at positions 11, 12, 13.

[0357] In one embodiment, Y′Y′Y′ motif is all 2′-OMe modified nucleotides.

[0358] In one embodiment, k is 1 and 1 is 0, or k is 0 and 1 is 1, or both k and 1 are 1.

[0359] The antisense strand can therefore be represented by the following formulas:

(IIb)
5′ n_{q}′-Nₐ′-Z′Z′Z′-N_{b}′-Y′Y′Y′-Nₐ′-n_{p′} 3′;
(IIc)
5′ nₐ-Nₐ′-Y′Y′Y′-N_{b}′-X′X′X′-n_{p′} 3′;
or
(IId)
5′ n_{q}-Nₐ′-Z′Z′Z′-N_{b}′-Y′Y′Y′-N_{b}′-X′X′X′-Nₐ′-n_{p′} 3′.

[0360] When the antisense strand is represented by formula (IIb), N_{b}′ represents an oligonucleotide sequence comprising 0-10, 0-7, 0-10, 0-7, 0-5, 0-4, 0-2 or 0 modified nucleotides. Each Nₐ′ independently represents an oligonucleotide sequence comprising 2-20, 2-15, or 2-10 modified nucleotides.

[0361] When the antisense strand is represented as formula (IIC), N_{b}′ represents an oligonucleotide sequence comprising 0-10, 0-7, 0-10, 0-7, 0-5, 0-4, 0-2 or 0 modified nucleotides. Each Nₐ′ independently represents an oligonucleotide sequence comprising 2-20, 2-15, or 2-10 modified nucleotides.

[0362] When the antisense strand is represented as formula (IId), each N_{b}′ independently represents an oligonucleotide sequence comprising 0-10, 0-7, 0-10, 0-7, 0-5, 0-4, 0-2 or 0 modified nucleotides. Each Nₐ′ independently represents an oligonucleotide sequence comprising 2-20, 2-15, or 2-10 modified nucleotides. Preferably, N_{b} is 0, 1, 2, 3, 4, 5 or 6.

[0363] In other embodiments, k is 0 and 1 is 0 and the antisense strand may be represented by the formula:

(Ia)
5′ n_{p′}-N_{a′}-Y′Y′Y′-N_{a′}-n_{q} 3′.

[0364] When the antisense strand is represented as formula (IIa), each Nₐ′ independently represents an oligonucleotide sequence comprising 2-20, 2-15, or 2-10 modified nucleotides.

Each of X′, Y′ and Z′ may be the same or different from each other.
Each nucleotide of the sense strand and antisense strand may be independently modified with LNA, CRN, UNA, cEt, HNA, CeNA, 2′-methoxyethyl, 2′-O-methyl, 2′-O-allyl, 2′-C-allyl, 2′-hydroxyl, or 2′-fluoro. For example, each nucleotide of the sense strand and antisense strand is independently modified with 2′-O-methyl or 2′-fluoro. Each X, Y, Z, X′, Y′ and Z′, in particular, may represent a 2′-O-methyl modification or a 2′-fluoro modification.

[0365] In one embodiment, the sense strand of the RNAi agent may contain YYY motif occurring at 9, 10 and 11 positions of the strand when the duplex region is 21 nt, the count starting from the 1st nucleotide from the 5′-end, or optionally, the count starting at the 1^{st} paired nucleotide within the duplex region, from the 5′-end; and Y represents 2′-F modification. The sense strand may additionally contain XXX motif or ZZZ motifs as wing modifications at the opposite end of the duplex region; and XXX and ZZZ each independently represents a 2′-OMe modification or 2′-F modification.

[0366] In one embodiment the antisense strand may contain Y′Y′Y′ motif occurring at positions 11, 12, 13 of the strand, the count starting from the 1^{st} nucleotide from the 5′ end, or optionally, the count starting at the 1^{st} paired nucleotide within the duplex region, from the 5′-end; and Y′ represents 2′-O-methyl modification. The antisense strand may additionally contain X′X′X′ motif or Z′Z′Z′ motifs as wing modifications at the opposite end of the duplex region; and X′X′X′ and Z′Z′Z′ each independently represents a 2′-OMe modification or 2′-F modification.

[0367] The sense strand represented by any one of the above formulas (Ia), (Ib), (Ic), and (Id) forms a duplex with a antisense strand being represented by any one of formulas (IIa), (IIb), (IIc), and (IId), respectively.

[0368] Accordingly, the RNAi agents for use in the methods of the invention may comprise a sense strand and an antisense strand, each strand having 14 to 30 nucleotides, the RNAi duplex represented by formula (III):

(III)
sense:
5′ np-Na-(X X X)i-Nb-Y Y Y-Nb-(Z Z Z)j-Na-nq 3′
antisense:
3′ np′-Na′-(X′X′X′)k-Nb′-Y′Y′Y′-Nb′-
(Z′Z′Z′)l-Na′-nq′ 5′

[0369] wherein:

[0370] j, k, and 1 are each independently 0 or 1;

[0371] p, p′, q, and q′ are each independently 0-6;
[0372] each Na and Na′ independently represents an oligonucleotide sequence comprising 0-25 modified nucleotides, each sequence comprising at least two differently modified nucleotides;
[0373] each N_{b} and N_{b}′ independently represents an oligonucleotide sequence comprising 0-10 modified nucleotides;
[0374] wherein each np′, np, nq′, and nq, each of which may or may not be present, independently represents an overhang nucleotide; and
[0375] XXX, YYY, ZZZ, X′X′X′, Y′Y′Y′, and Z′Z′Z′ each independently represent one motif of three identical modifications on three consecutive nucleotides.

[0376] In one embodiment, i is 0 and j is 0; or i is 1 and j is 0; or i is 0 and j is 1; or both i and j are 0; or both i and j are 1. In another embodiment, k is 0 and l is 0; or k is 1 and l is 0; k is 0 and l is 1; or both k and l are 0; or both k and l are 1.

[0377] Exemplary combinations of the sense strand and antisense strand forming a RNAi duplex include the formulas below:

(IIIa)
5′ np- Na-Y Y Y-Na-nq 3′
3′ np′-Na′-Y′Y′Y′-Na′nq′ 5′
(IIIb)
5′ np-Na-Y Y Y-Nb-Z Z Z-Na-nq 3′
3′ np′-Na′-Y′Y′Y′-Nb′-Z′Z′Z′-Na′nq′ 5′
(IIIc)
5′ np-Na- X X X-Nb-Y Y Y- Na-nq 3′
3′ np′-Na′-X′X′X′-Nb′-Y′Y′Y′-Na′-nq′ 5′
(IIId)
5′ np-Na-XXX-Nb-Y Y Y-Nb- Z Z Z-Na-nq 3′
3′ np′-Na′-X′X′X′-Nb′-Y′Y′Y′-Nb′-Z′Z′Z′-Na-nq′ 5′

[0378] When the RNAi agent is represented by formula (IIIa), each Na independently represents an oligonucleotide sequence comprising 2-20, 2-15, or 2-10 modified nucleotides.

[0379] When the RNAi agent is represented by formula (IIIb), each N_{b} independently represents an oligonucleotide sequence comprising 1-10, 1-7, 1-5 or 1-4 modified nucleotides. Each Na independently represents an oligonucleotide sequence comprising 2-20, 2-15, or 2-10 modified nucleotides.

[0380] When the RNAi agent is represented as formula (IIIc), each N_{b}, N_{b}′ independently represents an oligonucleotide sequence comprising 0-10, 0-7, 0-10, 0-7, 0-5, 0-4, 0-2 or 0 modified nucleotides. Each Na independently represents an oligonucleotide sequence comprising 2-20, 2-15, or 2-10 modified nucleotides.

[0381] When the RNAi agent is represented as formula (IIId), each N_{b}, N_{b}′ independently represents an oligonucleotide sequence comprising 0-10, 0-7, 0-10, 0-7, 0-5, 0-4, 0-2 or 0modified nucleotides. Each Na, Na′ independently represents an oligonucleotide sequence comprising 2-20, 2-15, or 2-10 modified nucleotides. Each of Na, Na′, Nb and Nb′ independently comprises modifications of alternating pattern.

[0382] Each of X, Y and Z in formulas (III), (IIIa), (IIIb), (Mc), and (IIId) may be the same or different from each other.

[0383] When the RNAi agent is represented by formula (III), (IIIa), (IIIb), (IIIc), and (IIId), at least one of the Y nucleotides may form a base pair with one of the Y′ nucleotides. Alternatively, at least two of the Y nucleotides form base pairs with the corresponding Y′ nucleotides; or all three of the Y nucleotides all form base pairs with the corresponding Y′ nucleotides.

[0384] When the RNAi agent is represented by formula (IIIb) or (IIId), at least one of the Z nucleotides may form a base pair with one of the Z′ nucleotides. Alternatively, at least two of the Z nucleotides form base pairs with the corresponding Z′ nucleotides; or all three of the Z nucleotides all form base pairs with the corresponding Z′ nucleotides.

[0385] When the RNAi agent is represented as formula (IIIc) or (IIId), at least one of the X nucleotides may form a base pair with one of the X′ nucleotides. Alternatively, at least two of the X nucleotides form base pairs with the corresponding X′ nucleotides; or all three of the X nucleotides all form base pairs with the corresponding X′ nucleotides.

[0386] In one embodiment, the modification on the Y nucleotide is different than the modification on the Y′ nucleotide, the modification on the Z nucleotide is different than the modification on the Z′ nucleotide, and/or the modification on the X nucleotide is different than the modification on the X′ nucleotide.

[0387] In one embodiment, when the RNAi agent is represented by formula (IIId), the Na modifications are 2′-O-methyl or 2′-fluoro modifications. In another embodiment, when the RNAi agent is represented by formula (IIId), the Na modifications are 2′-O-methyl or 2′-fluoro modifications and np′>0 and at least one np′ is linked to a neighboring nucleotide a via phosphorothioate linkage. In yet another embodiment, when the RNAi agent is represented by formula (IIId), the Na modifications are 2′-O-methyl or 2′-fluoro modifications, np′>0 and at least one np′ is linked to a neighboring nucleotide via phosphorothioate linkage, and the sense strand is conjugated to one or more GalNAc derivatives attached through a bivalent or trivalent branched linker (described below). In another embodiment, when the RNAi agent is represented by formula (IIId), the Na modifications are 2′-O-methyl or 2′-fluoro modifications, np′>0 and at least one np′ is linked to a neighboring nucleotide via phosphorothioate linkage, the sense strand comprises at least one phosphorothioate linkage, and the sense strand is conjugated to one or more GalNAc derivatives attached through a bivalent or trivalent branched linker.

[0388] In one embodiment, when the RNAi agent is represented by formula (IIIa), the Na modifications are 2′-O-methyl or 2′-fluoro modifications, np′>0 and at least one np′ is linked to a neighboring nucleotide via phosphorothioate linkage, the sense strand comprises at least one phosphorothioate linkage, and the sense strand is conjugated to one or more GalNAc derivatives attached through a bivalent or trivalent branched linker.

[0389] In one embodiment, the RNAi agent is a multimer containing at least two duplexes represented by formula (III), (IIIa), (IIIb), (IIIc), and (IIId), wherein the duplexes are connected by a linker. The linker can be cleavable or non-cleavable. Optionally, the multimer further comprises a ligand. Each of the duplexes can target the same gene or two different genes; or each of the duplexes can target same gene at two different target sites.

[0390] In one embodiment, the RNAi agent is a multimer containing three, four, five, six or more duplexes represented by formula (III), (IIIa), (IIIb), (IIIc), and (IIId), wherein the duplexes are connected by a linker. The linker can be cleavable or non-cleavable. Optionally, the multimer further comprises a ligand. Each of the duplexes can target the same gene or two different genes; or each of the duplexes can target same gene at two different target sites.

[0391] In one embodiment, two RNAi agents represented by formula (III), (IIIa), (IIIb), (IIIc), and (IIId) are linked to each other at the 5′ end, and one or both of the 3′ ends and are optionally conjugated to to a ligand. Each of the agents can target the same gene or two different genes; or each of the agents can target same gene at two different target sites.

[0392] In certain embodiments, an RNAi agent of the invention may contain a low number of nucleotides containing a 2′-fluoro modification, e.g., 10 or fewer nucleotides with 2′-fluoro modification. For example, the RNAi agent may contain 10, 9, 8, 7, 6, 5, 4, 3, 2, 1 or 0 nucleotides with a 2′-fluoro modification. In a specific embodiment, the RNAi agent of the invention contains 10 nucleotides with a 2′-fluoro modification, e.g., 4 nucleotides with a 2′-fluoro modification in the sense strand and 6 nucleotides with a 2′-fluoro modification in the antisense strand. In another specific embodiment, the RNAi agent of the invention contains 6 nucleotides with a 2′-fluoro modification, e.g., 4 nucleotides with a 2′-fluoro modification in the sense strand and 2 nucleotides with a 2′-fluoro modification in the antisense strand.

[0393] In other embodiments, an RNAi agent of the invention may contain an ultra low number of nucleotides containing a 2′-fluoro modification, e.g., 2 or fewer nucleotides containing a 2′-fluoro modification. For example, the RNAi agent may contain 2, 1 of 0 nucleotides with a 2′-fluoro modification. In a specific embodiment, the RNAi agent may contain 2 nucleotides with a 2′-fluoro modification, e.g., 0 nucleotides with a 2-fluoro modification in the sense strand and 2 nucleotides with a 2′-fluoro modification in the antisense strand.

[0394] Various publications describe multimeric RNAi agents that can be used in the methods of the invention. Such publications include WO2007/091269, U.S. Pat. No. 7,858,769, WO2010/141511, WO2007/117686, WO2009/014887 and WO2011/031520 the entire contents of each of which are hereby incorporated herein by reference.

[0395] As described in more detail below, the RNAi agent that contains conjugations of one or more carbohydrate moieties to a RNAi agent can optimize one or more properties of the RNAi agent. In many cases, the carbohydrate moiety will be attached to a modified subunit of the RNAi agent. For example, the ribose sugar of one or more ribonucleotide subunits of a dsRNA agent can be replaced with another moiety, e.g., a non-carbohydrate (preferably cyclic) carrier to which is attached a carbohydrate ligand. A ribonucleotide subunit in which the ribose sugar of the subunit has been so replaced is referred to herein as a ribose replacement modification subunit (RRMS). A cyclic carrier may be a carbocyclic ring system, i.e., all ring atoms are carbon atoms, or a heterocyclic ring system, i.e., one or more ring atoms may be a heteroatom, e.g., nitrogen, oxygen, sulfur. The cyclic carrier may be a monocyclic ring system, or may contain two or more rings, e.g. fused rings. The cyclic carrier may be a fully saturated ring system, or it may contain one or more double bonds.

[0396] The ligand may be attached to the polynucleotide via a carrier. The carriers include (i) at least one “backbone attachment point,” preferably two “backbone attachment points” and (ii) at least one “tethering attachment point.” A “backbone attachment point” as used herein refers to a functional group, e.g. a hydroxyl group, or generally, a bond available for, and that is suitable for incorporation of the carrier into the backbone, e.g., the phosphate, or modified phosphate, e.g., sulfur containing, backbone, of a ribonucleic acid. A “tethering attachment point” (TAP) in some embodiments refers to a constituent ring atom of the cyclic carrier, e.g., a carbon atom or a heteroatom (distinct from an atom which provides a backbone attachment point), that connects a selected moiety. The moiety can be, e.g., a carbohydrate, e.g. monosaccharide, disaccharide, trisaccharide, tetrasaccharide, oligosaccharide and polysaccharide. Optionally, the selected moiety is connected by an intervening tether to the cyclic carrier. Thus, the cyclic carrier will often include a functional group, e.g., an amino group, or generally, provide a bond, that is suitable for incorporation or tethering of another chemical entity, e.g., a ligand to the constituent ring.

[0397] The RNAi agents may be conjugated to a ligand via a carrier, wherein the carrier can be cyclic group or acyclic group; preferably, the cyclic group is selected from pyrrolidinyl, pyrazolinyl, pyrazolidinyl, imidazolinyl, imidazolidinyl, piperidinyl, piperazinyl, [1,3]dioxolane, oxazolidinyl, isoxazolidinyl, morpholinyl, thiazolidinyl, isothiazolidinyl, quinoxalinyl, pyridazinonyl, tetrahydrofuryl and and decalin; preferably, the acyclic group is selected from serinol backbone or diethanolamine backbone.

[0398] In another embodiment of the invention, an iRNA agent comprises a sense strand and an antisense strand, each strand having 14 to 40 nucleotides. The RNAi agent may be represented by formula (L):

[chemical structure]

In formula (L), B1, B2, B3, B1′, B2′, B3′, and B4′ each are independently a nucleotide containing a modification selected from the group consisting of 2′-O-alkyl, 2′-substituted alkoxy, 2′-substituted alkyl, 2′-halo, ENA, and BNA/LNA. In one embodiment, B1, B2, B3, B1′, B2′, B3′, and B4′ each contain 2′-OMe modifications. In one embodiment, B1, B2, B3, B1′, B2′, B3′, and B4′ each contain 2′-OMe or 2′-F modifications. In one embodiment, at least one of B1, B2, B3, B1′, B2′, B3′, and B4′ contain 2′-O—N-methylacetamido (2′-O-NMA) modification.
C1 is a thermally destabilizing nucleotide placed at a site opposite to the seed region of the antisense strand (i.e., at positions 2-8 of the 5′-end of the antisense strand). For example, C1 is at a position of the sense strand that pairs with a nucleotide at positions 2-8 of the 5′-end of the antisense strand. In one example, C1 is at position 15 from the 5′-end of the sense strand. C1 nucleotide bears the thermally destabilizing modification which can include abasic modification; mismatch with the opposing nucleotide in the duplex; and sugar modification such as 2′-deoxy modification or acyclic nucleotide e.g., unlocked nucleic acids (UNA) or glycerol nucleic acid (GNA). In one embodiment, C1 has thermally destabilizing modification selected from the group consisting of: i) mismatch with the opposing nucleotide in the antisense strand; ii) abasic modification selected from the group consisting of:

[chemical structure]

and iii) sugar modification selected from the group consisting of:

[chemical structure]

wherein B is a modified or unmodified nucleobase, R¹ and R² independently are H, halogen, OR₃, or alkyl; and R₃ is H, alkyl, cycloalkyl, aryl, aralkyl, heteroaryl or sugar. In one embodiment, the thermally destabilizing modification in C1 is a mismatch selected from the group consisting of G:G, G:A, G:U, G:T, A:A, A:C, C:C, C:U, C:T, U:U, T:T, and U:T; and optionally, at least one nucleobase in the mismatch pair is a 2′-deoxy nucleobase. In one example, the thermally destabilizing modification in C1 is GNA or

[chemical structure]

T1, T1′, T2′, and T3′ each independently represent a nucleotide comprising a modification providing the nucleotide a steric bulk that is less or equal to the steric bulk of a 2′-OMe modification. A steric bulk refers to the sum of steric effects of a modification. Methods for determining steric effects of a modification of a nucleotide are known to one skilled in the art. The modification can be at the 2′ position of a ribose sugar of the nucleotide, or a modification to a non-ribose nucleotide, acyclic nucleotide, or the backbone of the nucleotide that is similar or equivalent to the 2′ position of the ribose sugar, and provides the nucleotide a steric bulk that is less than or equal to the steric bulk of a 2′-OMe modification. For example, T1, T1′, T2′, and T3′ are each independently selected from DNA, RNA, LNA, 2′-F, and 2′-F-5′-methyl. In one embodiment, T1 is DNA. In one embodiment, T1′ is DNA, RNA or LNA. In one embodiment, T2′ is DNA or RNA. In one embodiment, T3′ is DNA or RNA.
n¹, n³, and q¹ are independently 4 to 15 nucleotides in length.
n⁵, q³, and q⁷ are independently 1-6 nucleotide(s) in length.
n⁴, q², and q⁶ are independently 1-3 nucleotide(s) in length; alternatively, n⁴ is 0.
q⁵ is independently 0-10 nucleotide(s) in length.
n² and q⁴ are independently 0-3 nucleotide(s) in length.

[0399] Alternatively, n⁴ is 0-3 nucleotide(s) in length.

[0400] In one embodiment, n⁴ can be 0. In one example, n⁴ is 0, and q² and q⁶ are 1. In another example, n⁴ is 0, and q² and q⁶ are 1, with two phosphorothioate internucleotide linkage modifications within position 1-5 of the sense strand (counting from the 5′-end of the sense strand), and two phosphorothioate internucleotide linkage modifications at positions 1 and 2 and two phosphorothioate internucleotide linkage modifications within positions 18-23 of the antisense strand (counting from the 5′-end of the antisense strand).

[0401] In one embodiment, n⁴, q², and q⁶ are each 1.

[0402] In one embodiment, n², n⁴, q², q⁴, and q⁶ are each 1.

[0403] In one embodiment, C1 is at position 14-17 of the 5′-end of the sense strand, when the sense strand is 19-22 nucleotides in length, and n⁴ is 1. In one embodiment, C1 is at position 15 of the 5′-end of the sense strand

[0404] In one embodiment, T3′ starts at position 2 from the 5′ end of the antisense strand. In one example, T3′ is at position 2 from the 5′ end of the antisense strand and q⁶ is equal to 1.

[0405] In one embodiment, T1′ starts at position 14 from the 5′ end of the antisense strand. In one example, T1′ is at position 14 from the 5′ end of the antisense strand and q² is equal to 1.

[0406] In an exemplary embodiment, T3′ starts from position 2 from the 5′ end of the antisense strand and T1′ starts from position 14 from the 5′ end of the antisense strand. In one example, T3′ starts from position 2 from the 5′ end of the antisense strand and q⁶ is equal to 1 and T1′ starts from position 14 from the 5′ end of the antisense strand and q² is equal to 1.

[0407] In one embodiment, T1′ and T3′ are separated by 11 nucleotides in length (i.e. not counting the T1′ and T3′ nucleotides).

[0408] In one embodiment, T1′ is at position 14 from the 5′ end of the antisense strand. In one example, T1′ is at position 14 from the 5′ end of the antisense strand and q² is equal to 1, and the modification at the 2′ position or positions in a non-ribose, acyclic or backbone that provide less steric bulk than a 2′-OMe ribose.

[0409] In one embodiment, T3′ is at position 2 from the 5′ end of the antisense strand. In one example, T3′ is at position 2 from the 5′ end of the antisense strand and q⁶ is equal to 1, and the modification at the 2′ position or positions in a non-ribose, acyclic or backbone that provide less than or equal to steric bulk than a 2′-OMe ribose.

[0410] In one embodiment, T1 is at the cleavage site of the sense strand. In one example, T1 is at position 11 from the 5′ end of the sense strand, when the sense strand is 19-22 nucleotides in length, and n² is 1. In an exemplary embodiment, T1 is at the cleavage site of the sense strand at position 11 from the 5′ end of the sense strand, when the sense strand is 19-22 nucleotides in length, and n² is 1,

[0411] In one embodiment, T2′ starts at position 6 from the 5′ end of the antisense strand. In one example, T2′ is at positions 6-10 from the 5′ end of the antisense strand, and q⁴ is 1.

[0412] In an exemplary embodiment, T1 is at the cleavage site of the sense strand, for instance, at position 11 from the 5′ end of the sense strand, when the sense strand is 19-22 nucleotides in length, and n² is 1; T1′ is at position 14 from the 5′ end of the antisense strand, and q² is equal to 1, and the modification to T1′ is at the 2′ position of a ribose sugar or at positions in a non-ribose, acyclic or backbone that provide less steric bulk than a 2′-OMe ribose; T2′ is at positions 6-10 from the 5′ end of the antisense strand, and q⁴ is 1; and T3′ is at position 2 from the 5′ end of the antisense strand, and q⁶ is equal to 1, and the modification to T3′ is at the 2′ position or at positions in a non-ribose, acyclic or backbone that provide less than or equal to steric bulk than a 2′-OMe ribose.

[0413] In one embodiment, T2′ starts at position 8 from the 5′ end of the antisense strand. In one example, T2′ starts at position 8 from the 5′ end of the antisense strand, and q⁴ is 2.

[0414] In one embodiment, T2′ starts at position 9 from the 5′ end of the antisense strand. In one example, T2′ is at position 9 from the 5′ end of the antisense strand, and q⁴ is 1.

[0415] In one embodiment, B1′ is 2′-OMe or 2′-F, q¹ is 9, T1′ is 2′-F, q² is 1, B2′ is 2′-OMe or 2′-F, q³ is 4, T2′ is 2′-F, q⁴ is 1, B3′ is 2′-OMe or 2′-F, q⁵ is 6, T3′ is 2′-F, q⁶ is 1, B4′ is 2′-OMe, and q⁷ is 1; with two phosphorothioate internucleotide linkage modifications within positions 1-5 of the sense strand (counting from the 5′-end of the sense strand), and two phosphorothioate internucleotide linkage modifications at positions 1 and 2 and two phosphorothioate internucleotide linkage modifications within positions 18-23 of the antisense strand (counting from the 5′-end of the antisense strand).

[0416] In one embodiment, n⁴ is 0, B3 is 2′-OMe, n⁵ is 3, BF is 2′-OMe or 2′-F, q¹ is 9, T1′ is 2′-F, q² is 1, B2′ is 2′-OMe or 2′-F, q³ is 4, T2′ is 2′-F, q⁴ is 1, B3′ is 2′-OMe or 2′-F, q⁵ is 6, T3′ is 2′-F, q⁶ is 1, B4′ is 2′-OMe, and q⁷ is 1; with two phosphorothioate internucleotide linkage modifications within positions 1-5 of the sense strand (counting from the 5′-end of the sense strand), and two phosphorothioate internucleotide linkage modifications at positions 1 and 2 and two phosphorothioate internucleotide linkage modifications within positions 18-23 of the antisense strand (counting from the 5′-end of the antisense strand).

[0417] In one embodiment, B1 is 2′-OMe or 2′-F, n¹ is 8, T1 is 2′F, n² is 3, B2 is 2′-OMe, n³ is 7, n⁴ is 0, B3 is 2′OMe, n⁵ is 3, BF is 2′-OMe or 2′-F, q¹ is 9, T1′ is 2′-F, q² is 1, B2′ is 2′-OMe or 2′- F, q³ is 4, T2′ is 2′-F, q⁴ is 2, B3′ is 2′-OMe or 2′-F, q⁵ is 5, T3′ is 2′-F, q⁶ is 1, B4′ is 2′-OMe, and q⁷ is 1.

[0418] In one embodiment, B1 is 2′-OMe or 2′-F, n¹ is 8, T1 is 2′F, n² is 3, B2 is 2′-OMe, n³ is 7, n⁴ is 0, B3 is 2′-OMe, n⁵ is 3, BF is 2′-OMe or 2′-F, q¹ is 9, T1′ is 2′-F, q² is 1, B2′ is 2′-OMe or 2′- F, q³ is 4, T2′ is 2′-F, q⁴ is 2, B3′ is 2′-OMe or 2′-F, q⁵ is 5, T3′ is 2′-F, q⁶ is 1, B4′ is 2′-OMe, and q⁷ is 1; with two phosphorothioate internucleotide linkage modifications within positions 1-5 of the sense strand (counting from the 5′-end of the sense strand), and two phosphorothioate internucleotide linkage modifications at positions 1 and 2 and two phosphorothioate internucleotide linkage modifications within positions 18-23 of the antisense strand (counting from the 5′-end of the antisense strand).

[0419] In one embodiment, B1 is 2′-OMe or 2′-F, n¹ is 6, T1 is 2′F, n² is 3, B2 is 2′-OMe, n³ is 7, n⁴ is 0, B3 is 2′OMe, n⁵ is 3, BF is 2′-OMe or 2′-F, q¹ is 7, T1′ is 2′-F, q² is 1, B2′ is 2′-OMe or 2′- F, q³ is 4, T2′ is 2′-F, q⁴ is 2, B3′ is 2′-OMe or 2′-F, q⁵ is 5, T3′ is 2′-F, q⁶ is 1, B4′ is 2′-OMe, and q⁷ is 1.

[0420] In one embodiment, B1 is 2′-OMe or 2′-F, n¹ is 6, T1 is 2′F, n² is 3, B2 is 2′-OMe, n³ is 7, n⁴ is 0, B3 is 2′-OMe, n⁵ is 3, BF is 2′-OMe or 2′-F, q¹ is 7, T1′ is 2′-F, q² is 1, B2′ is 2′-OMe or 2′- F, q³ is 4, T2′ is 2′-F, q⁴ is 2, B3′ is 2′-OMe or 2′-F, q⁵ is 5, T3′ is 2′-F, q⁶ is 1, B4′ is 2′-OMe, and q⁷ is 1; with two phosphorothioate internucleotide linkage modifications within positions 1-5 of the sense strand (counting from the 5′-end of the sense strand), and two phosphorothioate internucleotide linkage modifications at positions 1 and 2 and two phosphorothioate internucleotide linkage modifications within positions 18-23 of the antisense strand (counting from the 5′-end of the antisense strand).

[0421] In one embodiment, B1 is 2′-OMe or 2′-F, n¹ is 8, T1 is 2′F, n² is 3, B2 is 2′-OMe, n³ is 7, n⁴ is 0, B3 is 2′OMe, n⁵ is 3, BF is 2′-OMe or 2′-F, q¹ is 9, T1′ is 2′-F, q² is 1, B2′ is 2′-OMe or 2′- F, q³ is 4, T2′ is 2′-F, q⁴ is 1, B3′ is 2′-OMe or 2′-F, q⁵ is 6, T3′ is 2′-F, q⁶ is 1, B4′ is 2′-OMe, and q⁷ is 1.

[0422] In one embodiment, B1 is 2′-OMe or 2′-F, n¹ is 8, T1 is 2′F, n² is 3, B2 is 2′-OMe, n³ is 7, n⁴ is 0, B3 is 2′-OMe, n⁵ is 3, BF is 2′-OMe or 2′-F, q¹ is 9, T1′ is 2′-F, q² is 1, B2′ is 2′-OMe or 2′- F, q³ is 4, T2′ is 2′-F, q⁴ is 1, B3′ is 2′-OMe or 2′-F, q⁵ is 6, T3′ is 2′-F, q⁶ is 1, B4′ is 2′-OMe, and q⁷ is 1; with two phosphorothioate internucleotide linkage modifications within positions 1-5 of the sense strand (counting from the 5′-end of the sense strand), and two phosphorothioate internucleotide linkage modifications at positions 1 and 2 and two phosphorothioate internucleotide linkage modifications within positions 18-23 of the antisense strand (counting from the 5′-end of the antisense strand).

[0423] In one embodiment, B1 is 2′-OMe or 2′-F, n¹ is 8, T1 is 2′F, n² is 3, B2 is 2′-OMe, n³ is 7, n⁴ is 0, B3 is 2′OMe, n⁵ is 3, BF is 2′-OMe or 2′-F, q¹ is 9, T1′ is 2′-F, q² is 1, B2′ is 2′-OMe or 2′- F, q³ is 5, T2′ is 2′-F, q⁴ is 1, B3′ is 2′-OMe or 2′-F, q⁵ is 5, T3′ is 2′-F, q⁶ is 1, B4′ is 2′-OMe, and q⁷ is 1; optionally with at least 2 additional TT at the 3′-end of the antisense strand.

[0424] In one embodiment, B1 is 2′-OMe or 2′-F, n¹ is 8, T1 is 2′F, n² is 3, B2 is 2′-OMe, n³ is 7, n⁴ is 0, B3 is 2′-OMe, n⁵ is 3, BF is 2′-OMe or 2′-F, q¹ is 9, T1′ is 2′-F, q² is 1, B2′ is 2′-OMe or 2′- F, q³ is 5, T2′ is 2′-F, q⁴ is 1, B3′ is 2′-OMe or 2′-F, q⁵ is 5, T3′ is 2′-F, q⁶ is 1, B4′ is 2′-OMe, and q⁷ is 1; optionally with at least 2 additional TT at the 3′-end of the antisense strand; with two phosphorothioate internucleotide linkage modifications within positions 1-5 of the sense strand (counting from the 5′-end of the sense strand), and two phosphorothioate internucleotide linkage modifications at positions 1 and 2 and two phosphorothioate internucleotide linkage modifications within positions 18-23 of the antisense strand (counting from the 5′-end of the antisense strand).

[0425] In one embodiment, B1 is 2′-OMe or 2′-F, n¹ is 8, T1 is 2′F, n² is 3, B2 is 2′-OMe, n³ is 7, n⁴ is 0, B3 is 2′-OMe, n⁵ is 3, BF is 2′-OMe or 2′-F, q¹ is 9, T1′ is 2′-F, q² is 1, B2′ is 2′-OMe or 2′- F, q³ is 4, q⁴ is 0, B3′ is 2′-OMe or 2′-F, q⁵ is 7, T3′ is 2′-F, q⁶ is 1, B4′ is 2′-OMe, and q⁷ is 1. In one embodiment, B1 is 2′-OMe or 2′-F, n¹ is 8, T1 is 2′F, n² is 3, B2 is 2′-OMe, n³ is 7, n⁴ is 0, B3 is 2′-OMe, n⁵ is 3, BF is 2′-OMe or 2′-F, q¹ is 9, T1′ is 2′-F, q² is 1, B2′ is 2′-OMe or 2′-F, q³ is 4, q⁴ is 0, B3′ is 2′-OMe or 2′-F, q⁵ is 7, T3′ is 2′-F, q⁶ is 1, B4′ is 2′-OMe, and q⁷ is 1; with two phosphorothioate internucleotide linkage modifications within positions 1-5 of the sense strand (counting from the 5′-end), and two phosphorothioate internucleotide linkage modifications at positions 1 and 2 and two phosphorothioate internucleotide linkage modifications within positions 18-23 of the antisense strand (counting from the 5′-end).

[0426] In one embodiment, B1 is 2′-OMe or 2′-F, n¹ is 8, T1 is 2′F, n² is 3, B2 is 2′-OMe, n³ is 7, n⁴ is 0, B3 is 2′OMe, n⁵ is 3, BF is 2′-OMe or 2′-F, q¹ is 9, T1′ is 2′-F, q² is 1, B2′ is 2′-OMe or 2′- F, q³ is 4, T2′ is 2′-F, q⁴ is 2, B3′ is 2′-OMe or 2′-F, q⁵ is 5, T3′ is 2′-F, q⁶ is 1, B4′ is 2′-F, and q⁷ is 1.

[0427] In one embodiment, B1 is 2′-OMe or 2′-F, n¹ is 8, T1 is 2′F, n² is 3, B2 is 2′-OMe, n³ is 7, n⁴ is 0, B3 is 2′-OMe, n⁵ is 3, BF is 2′-OMe or 2′-F, q¹ is 9, T1′ is 2′-F, q² is 1, B2′ is 2′-OMe or 2′-F, q³ is 4, T2′ is 2′-F, q⁴ is 2, B3′ is 2′-OMe or 2′-F, q⁵ is 5, T3′ is 2′-F, q⁶ is 1, B4′ is 2′-F, and q⁷ is 1; with two phosphorothioate internucleotide linkage modifications within positions 1-5 of the sense strand (counting from the 5′-end of the sense strand), and two phosphorothioate internucleotide linkage modifications at positions 1 and 2 and two phosphorothioate internucleotide linkage modifications within positions 18-23 of the antisense strand (counting from the 5′-end of the antisense strand). In one embodiment, B1 is 2′-OMe or 2′-F, n¹ is 8, T1 is 2′F, n² is 3, B2 is 2′-OMe, n³ is 7, n⁴ is 0, B3 is 2′-OMe, n⁵ is 3, BF is 2′-OMe or 2′-F, q¹ is 9, T1′ is 2′-F, q² is 1, B2′ is 2′-OMe or 2′-F, q³ is 4, q⁴ is 0, B3′ is 2′-OMe or 2′-F, q⁵ is 7, T3′ is 2′-F, q⁶ is 1, B4′ is 2′-F, and q⁷ is 1.

[0428] In one embodiment, B1 is 2′-OMe or 2′-F, n¹ is 8, T1 is 2′F, n² is 3, B2 is 2′-OMe, n³ is 7, n⁴ is 0, B3 is 2′-OMe, n⁵ is 3, B1′ is 2′-OMe or 2′-F, q¹ is 9, T1′ is 2′-F, q² is 1, B2′ is 2′-OMe or 2′-F, q³ is 4, q⁴ is 0, B3′ is 2′-OMe or 2′-F, q⁵ is 7, T3′ is 2′-F, q⁶ is 1, B4′ is 2′-F, and q⁷ is 1; with two phosphorothioate internucleotide linkage modifications within positions 1-5 of the sense strand (counting from the 5′-end of the sense strand), and two phosphorothioate internucleotide linkage modifications at positions 1 and 2 and two phosphorothioate internucleotide linkage modifications within positions 18-23 of the antisense strand (counting from the 5′-end of the antisense strand).

[0429] The dsRNA agent can comprise a phosphorus-containing group at the 5′-end of the sense strand or antisense strand. The 5′-end phosphorus-containing group can be 5′-end phosphate (5′-P), 5′-end phosphorothioate (5′-PS), 5′-end phosphorodithioate (5′-PS₂), 5′-end vinylphosphonate (5′-VP), 5′-end methylphosphonate (MePhos), or 5′-deoxy-5′-C-malonyl

[chemical structure]

When the 5′-end phosphorus-containing group is 5′-end vinylphosphonate (5′-VP), the 5′-VP can be either 5′-E-VP isomer (i.e., trans-vinylphosphate,

[chemical structure]

5′-Z-VP isomer (i.e., cis-vinylphosphate,

[chemical structure]

or mixtures thereof.

[0430] In one embodiment, the RNAi agent comprises a phosphorus-containing group at the 5′-end of the sense strand. In one embodiment, the RNAi agent comprises a phosphorus-containing group at the 5′-end of the antisense strand.

[0431] In one embodiment, the RNAi agent comprises a 5′-P. In one embodiment, the RNAi agent comprises a 5′-P in the antisense strand.

[0432] In one embodiment, the RNAi agent comprises a 5′-PS. In one embodiment, the RNAi agent comprises a 5′-PS in the antisense strand.

[0433] In one embodiment, the RNAi agent comprises a 5′-VP. In one embodiment, the RNAi agent comprises a 5′-VP in the antisense strand. In one embodiment, the RNAi agent comprises a 5′-E-VP in the antisense strand. In one embodiment, the RNAi agent comprises a 5′-Z-VP in the antisense strand.

[0434] In one embodiment, the RNAi agent comprises a 5′-PS₂. In one embodiment, the RNAi agent comprises a 5′-PS₂ in the antisense strand.

[0435] In one embodiment, the RNAi agent comprises a 5′-PS₂. In one embodiment, the RNAi agent comprises a 5′-deoxy-5′-C-malonyl in the antisense strand.

[0436] In one embodiment, B1 is 2′-OMe or 2′-F, n¹ is 8, T1 is 2′F, n² is 3, B2 is 2′-OMe, n³ is 7, n⁴ is 0, B3 is 2′OMe, n⁵ is 3, BF is 2′-OMe or 2′-F, q¹ is 9, T1′ is 2′-F, q² is 1, B2′ is 2′-OMe or 2′- F, q³ is 4, T2′ is 2′-F, q⁴ is 2, B3′ is 2′-OMe or 2′-F, q⁵ is 5, T3′ is 2′-F, q⁶ is 1, B4′ is 2′-OMe, and q⁷ is 1. The RNAi agent also comprises a 5′-PS.

[0437] In one embodiment, B1 is 2′-OMe or 2′-F, n¹ is 8, T1 is 2′F, n² is 3, B2 is 2′-OMe, n³ is 7, n⁴ is 0, B3 is 2′OMe, n⁵ is 3, BF is 2′-OMe or 2′-F, q¹ is 9, T1′ is 2′-F, q² is 1, B2′ is 2′-OMe or 2′- F, q³ is 4, T2′ is 2′-F, q⁴ is 2, B3′ is 2′-OMe or 2′-F, q⁵ is 5, T3′ is 2′-F, q⁶ is 1, B4′ is 2′-OMe, and q⁷ is 1. The RNAi agent also comprises a 5′-P.

[0438] In one embodiment, B1 is 2′-OMe or 2′-F, n¹ is 8, T1 is 2′F, n² is 3, B2 is 2′-OMe, n³ is 7, n⁴ is 0, B3 is 2′OMe, n⁵ is 3, BF is 2′-OMe or 2′-F, q¹ is 9, T1′ is 2′-F, q² is 1, B2′ is 2′-OMe or 2′- F, q³ is 4, T2′ is 2′-F, q⁴ is 2, B3′ is 2′-OMe or 2′-F, q⁵ is 5, T3′ is 2′-F, q⁶ is 1, B4′ is 2′-OMe, and q⁷ is 1. The RNAi agent also comprises a 5′-VP. The 5′-VP may be 5′-E-VP, 5′-Z-VP, or combination thereof.

[0439] In one embodiment, B1 is 2′-OMe or 2′-F, n¹ is 8, T1 is 2′F, n² is 3, B2 is 2′-OMe, n³ is 7, n⁴ is 0, B3 is 2′OMe, n⁵ is 3, BF is 2′-OMe or 2′-F, q¹ is 9, T1′ is 2′-F, q² is 1, B2′ is 2′-OMe or 2′- F, q³ is 4, T2′ is 2′-F, q⁴ is 2, B3′ is 2′-OMe or 2′-F, q⁵ is 5, T3′ is 2′-F, q⁶ is 1, B4′ is 2′-OMe, and q⁷ is 1. The RNAi agent also comprises a 5′-PS₂.

[0440] In one embodiment, B1 is 2′-OMe or 2′-F, n¹ is 8, T1 is 2′F, n² is 3, B2 is 2′-OMe, n³ is 7, n⁴ is 0, B3 is 2′OMe, n⁵ is 3, BF is 2′-OMe or 2′-F, q¹ is 9, T1′ is 2′-F, q² is 1, B2′ is 2′-OMe or 2′- F, q³ is 4, T2′ is 2′-F, q⁴ is 2, B3′ is 2′-OMe or 2′-F, q⁵ is 5, T3′ is 2′-F, q⁶ is 1, B4′ is 2′-OMe, and q⁷ is 1. The RNAi agent also comprises a 5′-deoxy-5′-C-malonyl.

[0441] In one embodiment, B1 is 2′-OMe or 2′-F, n¹ is 8, T1 is 2′F, n² is 3, B2 is 2′-OMe, n³ is 7, n⁴ is 0, B3 is 2′-OMe, n⁵ is 3, BF is 2′-OMe or 2′-F, q¹ is 9, T1′ is 2′-F, q² is 1, B2′ is 2′-OMe or 2′- F, q³ is 4, T2′ is 2′-F, q⁴ is 2, B3′ is 2′-OMe or 2′-F, q⁵ is 5, T3′ is 2′-F, q⁶ is 1, B4′ is 2′-OMe, and q⁷ is 1; with two phosphorothioate internucleotide linkage modifications within position 1-5 of the sense strand (counting from the 5′-end of the sense strand), and two phosphorothioate internucleotide linkage modifications at positions 1 and 2 and two phosphorothioate internucleotide linkage modifications within positions 18-23 of the antisense strand (counting from the 5′-end of the antisense strand). The RNAi agent also comprises a 5′-P.

[0442] In one embodiment, B1 is 2′-OMe or 2′-F, n¹ is 8, T1 is 2′F, n² is 3, B2 is 2′-OMe, n³ is 7, n⁴ is 0, B3 is 2′-OMe, n⁵ is 3, BF is 2′-OMe or 2′-F, q¹ is 9, T1′ is 2′-F, q² is 1, B2′ is 2′-OMe or 2′- F, q³ is 4, T2′ is 2′-F, q⁴ is 2, B3′ is 2′-OMe or 2′-F, q⁵ is 5, T3′ is 2′-F, q⁶ is 1, B4′ is 2′-OMe, and q⁷ is 1; with two phosphorothioate internucleotide linkage modifications within position 1-5 of the sense strand (counting from the 5′-end of the sense strand), and two phosphorothioate internucleotide linkage modifications at positions 1 and 2 and two phosphorothioate internucleotide linkage modifications within positions 18-23 of the antisense strand (counting from the 5′-end of the antisense strand). The RNAi agent also comprises a 5′-PS.

[0443] In one embodiment, B1 is 2′-OMe or 2′-F, n¹ is 8, T1 is 2′F, n² is 3, B2 is 2′-OMe, n³ is 7, n⁴ is 0, B3 is 2′-OMe, n⁵ is 3, BF is 2′-OMe or 2′-F, q¹ is 9, T1′ is 2′-F, q² is 1, B2′ is 2′-OMe or 2′- F, q³ is 4, T2′ is 2′-F, q⁴ is 2, B3′ is 2′-OMe or 2′-F, q⁵ is 5, T3′ is 2′-F, q⁶ is 1, B4′ is 2′-OMe, and q⁷ is 1; with two phosphorothioate internucleotide linkage modifications within position 1-5 of the sense strand (counting from the 5′-end of the sense strand), and two phosphorothioate internucleotide linkage modifications at positions 1 and 2 and two phosphorothioate internucleotide linkage modifications within positions 18-23 of the antisense strand (counting from the 5′-end of the antisense strand). The RNAi agent also comprises a 5′-VP. The 5′-VP may be 5′-E-VP, 5′-Z-VP, or combination thereof.

[0444] In one embodiment, B1 is 2′-OMe or 2′-F, n¹ is 8, T1 is 2′F, n² is 3, B2 is 2′-OMe, n³ is 7, n⁴ is 0, B3 is 2′-OMe, n⁵ is 3, BF is 2′-OMe or 2′-F, q¹ is 9, T1′ is 2′-F, q² is 1, B2′ is 2′-OMe or 2′- F, q³ is 4, T2′ is 2′-F, q⁴ is 2, B3′ is 2′-OMe or 2′-F, q⁵ is 5, T3′ is 2′-F, q⁶ is 1, B4′ is 2′-OMe, and q⁷ is 1; with two phosphorothioate internucleotide linkage modifications within position 1-5 of the sense strand (counting from the 5′-end of the sense strand), and two phosphorothioate internucleotide linkage modifications at positions 1 and 2 and two phosphorothioate internucleotide linkage modifications within positions 18-23 of the antisense strand (counting from the 5′-end of the antisense strand). The RNAi agent also comprises a 5′-PS₂.

[0445] In one embodiment, B1 is 2′-OMe or 2′-F, n¹ is 8, T1 is 2′F, n² is 3, B2 is 2′-OMe, n³ is 7, n⁴ is 0, B3 is 2′-OMe, n⁵ is 3, BF is 2′-OMe or 2′-F, q¹ is 9, T1′ is 2′-F, q² is 1, B2′ is 2′-OMe or 2′- F, q³ is 4, T2′ is 2′-F, q⁴ is 2, B3′ is 2′-OMe or 2′-F, q⁵ is 5, T3′ is 2′-F, q⁶ is 1, B4′ is 2′-OMe, and q⁷ is 1; with two phosphorothioate internucleotide linkage modifications within position 1-5 of the sense strand (counting from the 5′-end of the sense strand), and two phosphorothioate internucleotide linkage modifications at positions 1 and 2 and two phosphorothioate internucleotide linkage modifications within positions 18-23 of the antisense strand (counting from the 5′-end of the antisense strand). The RNAi agent also comprises a 5′-deoxy-5′-C-malonyl.

[0446] In one embodiment, B1 is 2′-OMe or 2′-F, n¹ is 8, T1 is 2′F, n² is 3, B2 is 2′-OMe, n³ is 7, n⁴ is 0, B3 is 2′-OMe, n⁵ is 3, BF is 2′-OMe or 2′-F, q¹ is 9, T1′ is 2′-F, q² is 1, B2′ is 2′-OMe or 2′- F, q³ is 4, q⁴ is 0, B3′ is 2′-OMe or 2′-F, q⁵ is 7, T3′ is 2′-F, q⁶ is 1, B4′ is 2′-OMe, and q⁷ is 1. The RNAi agent also comprises a 5′-P.

[0447] In one embodiment, B1 is 2′-OMe or 2′-F, n¹ is 8, T1 is 2′F, n² is 3, B2 is 2′-OMe, n³ is 7, n⁴ is 0, B3 is 2′-OMe, n⁵ is 3, BF is 2′-OMe or 2′-F, q¹ is 9, T1′ is 2′-F, q² is 1, B2′ is 2′-OMe or 2′- F, q³ is 4, q⁴ is 0, B3′ is 2′-OMe or 2′-F, q⁵ is 7, T3′ is 2′-F, q⁶ is 1, B4′ is 2′-OMe, and q⁷ is 1. The dsRNA agent also comprises a 5′-PS.

[0448] In one embodiment, B1 is 2′-OMe or 2′-F, n¹ is 8, T1 is 2′F, n² is 3, B2 is 2′-OMe, n³ is 7, n⁴ is 0, B3 is 2′-OMe, n⁵ is 3, BF is 2′-OMe or 2′-F, q¹ is 9, T1′ is 2′-F, q² is 1, B2′ is 2′-OMe or 2′- F, q³ is 4, q⁴ is 0, B3′ is 2′-OMe or 2′-F, q⁵ is 7, T3′ is 2′-F, q⁶ is 1, B4′ is 2′-OMe, and q⁷ is 1. The RNAi agent also comprises a 5′-VP. The 5′-VP may be 5′-E-VP, 5′-Z-VP, or combination thereof.

[0449] In one embodiment, B1 is 2′-OMe or 2′-F, n¹ is 8, T1 is 2′F, n² is 3, B2 is 2′-OMe, n³ is 7, n⁴ is 0, B3 is 2′-OMe, n⁵ is 3, BF is 2′-OMe or 2′-F, q¹ is 9, T1′ is 2′-F, q² is 1, B2′ is 2′-OMe or 2′- F, q³ is 4, q⁴ is 0, B3′ is 2′-OMe or 2′-F, q⁵ is 7, T3′ is 2′-F, q⁶ is 1, B4′ is 2′-OMe, and q⁷ is 1. The RNAi agent also comprises a 5′-PS₂.

[0450] In one embodiment, B1 is 2′-OMe or 2′-F, n¹ is 8, T1 is 2′F, n² is 3, B2 is 2′-OMe, n³ is 7, n⁴ is 0, B3 is 2′-OMe, n⁵ is 3, BF is 2′-OMe or 2′-F, q¹ is 9, T1′ is 2′-F, q² is 1, B2′ is 2′-OMe or 2′- F, q³ is 4, q⁴ is 0, B3′ is 2′-OMe or 2′-F, q⁵ is 7, T3′ is 2′-F, q⁶ is 1, B4′ is 2′-OMe, and q⁷ is 1. The RNAi agent also comprises a 5′-deoxy-5′-C-malonyl.

[0451] In one embodiment, B1 is 2′-OMe or 2′-F, n¹ is 8, T1 is 2′F, n² is 3, B2 is 2′-OMe, n³ is 7, n⁴ is 0, B3 is 2′-OMe, n⁵ is 3, BF is 2′-OMe or 2′-F, q¹ is 9, T1′ is 2′-F, q² is 1, B2′ is 2′-OMe or 2′- F, q³ is 4, q⁴ is 0, B3′ is 2′-OMe or 2′-F, q⁵ is 7, T3′ is 2′-F, q⁶ is 1, B4′ is 2′-OMe, and q⁷ is 1; with two phosphorothioate internucleotide linkage modifications within position 1-5 of the sense strand (counting from the 5′-end), and two phosphorothioate internucleotide linkage modifications at positions 1 and 2 and two phosphorothioate internucleotide linkage modifications within positions 18-23 of the antisense strand (counting from the 5′-end). The RNAi agent also comprises a 5′-P.

[0452] In one embodiment, B1 is 2′-OMe or 2′-F, n¹ is 8, T1 is 2′F, n² is 3, B2 is 2′-OMe, n³ is 7, n⁴ is 0, B3 is 2′-OMe, n⁵ is 3, BF is 2′-OMe or 2′-F, q¹ is 9, T1′ is 2′-F, q² is 1, B2′ is 2′-OMe or 2′- F, q³ is 4, q⁴ is 0, B3′ is 2′-OMe or 2′-F, q⁵ is 7, T3′ is 2′-F, q⁶ is 1, B4′ is 2′-OMe, and q⁷ is 1; with two phosphorothioate internucleotide linkage modifications within position 1-5 of the sense strand (counting from the 5′-end), and two phosphorothioate internucleotide linkage modifications at positions 1 and 2 and two phosphorothioate internucleotide linkage modifications within positions 18-23 of the antisense strand (counting from the 5′-end). The RNAi agent also comprises a 5′-PS. In one embodiment, B1 is 2′-OMe or 2′-F, n¹ is 8, T1 is 2′F, n² is 3, B2 is 2′-OMe, n³ is 7, n⁴ is 0, B3 is 2′-OMe, n⁵ is 3, BF is 2′-OMe or 2′-F, q¹ is 9, T1′ is 2′-F, q² is 1, B2′ is 2′-OMe or 2′- F, q³ is 4, q⁴ is 0, B3′ is 2′-OMe or 2′-F, q⁵ is 7, T3′ is 2′-F, q⁶ is 1, B4′ is 2′-OMe, and q⁷ is 1; with two phosphorothioate internucleotide linkage modifications within position 1-5 of the sense strand (counting from the 5′-end), and two phosphorothioate internucleotide linkage modifications at positions 1 and 2 and two phosphorothioate internucleotide linkage modifications within positions 18-23 of the antisense strand (counting from the 5′-end). The RNAi agent also comprises a 5′-VP. The 5′-VP may be 5′-E-VP, 5′-Z-VP, or combination thereof.

[0453] In one embodiment, B1 is 2′-OMe or 2′-F, n¹ is 8, T1 is 2′F, n² is 3, B2 is 2′-OMe, n³ is 7, n⁴ is 0, B3 is 2′-OMe, n⁵ is 3, BF is 2′-OMe or 2′-F, q¹ is 9, T1′ is 2′-F, q² is 1, B2′ is 2′-OMe or 2′- F, q³ is 4, q⁴ is 0, B3′ is 2′-OMe or 2′-F, q⁵ is 7, T3′ is 2′-F, q⁶ is 1, B4′ is 2′-OMe, and q⁷ is 1; with two phosphorothioate internucleotide linkage modifications within position 1-5 of the sense strand (counting from the 5′-end), and two phosphorothioate internucleotide linkage modifications at positions 1 and 2 and two phosphorothioate internucleotide linkage modifications within positions 18-23 of the antisense strand (counting from the 5′-end). The RNAi agent also comprises a 5′-PS₂.

[0454] In one embodiment, B1 is 2′-OMe or 2′-F, n¹ is 8, T1 is 2′F, n² is 3, B2 is 2′-OMe, n³ is 7, n⁴ is 0, B3 is 2′-OMe, n⁵ is 3, BF is 2′-OMe or 2′-F, q¹ is 9, T1′ is 2′-F, q² is 1, B2′ is 2′-OMe or 2′- F, q³ is 4, q⁴ is 0, B3′ is 2′-OMe or 2′-F, q⁵ is 7, T3′ is 2′-F, q⁶ is 1, B4′ is 2′-OMe, and q⁷ is 1; with two phosphorothioate internucleotide linkage modifications within position 1-5 of the sense strand (counting from the 5′-end), and two phosphorothioate internucleotide linkage modifications at positions 1 and 2 and two phosphorothioate internucleotide linkage modifications within positions 18-23 of the antisense strand (counting from the 5′-end). The RNAi agent also comprises a 5′-deoxy-5′-C-malonyl.

[0455] In one embodiment, B1 is 2′-OMe or 2′-F, n¹ is 8, T1 is 2′F, n² is 3, B2 is 2′-OMe, n³ is 7, n⁴ is 0, B3 is 2′OMe, n⁵ is 3, BF is 2′-OMe or 2′-F, q¹ is 9, T1′ is 2′-F, q² is 1, B2′ is 2′-OMe or 2′- F, q³ is 4, T2′ is 2′-F, q⁴ is 2, B3′ is 2′-OMe or 2′-F, q⁵ is 5, T3′ is 2′-F, q⁶ is 1, B4′ is 2′-F, and q⁷ is 1. The RNAi agent also comprises a 5′-P.

[0456] In one embodiment, B1 is 2′-OMe or 2′-F, n¹ is 8, T1 is 2′F, n² is 3, B2 is 2′-OMe, n³ is 7, n⁴ is 0, B3 is 2′OMe, n⁵ is 3, BF is 2′-OMe or 2′-F, q¹ is 9, T1′ is 2′-F, q² is 1, B2′ is 2′-OMe or 2′- F, q³ is 4, T2′ is 2′-F, q⁴ is 2, B3′ is 2′-OMe or 2′-F, q⁵ is 5, T3′ is 2′-F, q⁶ is 1, B4′ is 2′-F, and q⁷ is 1. The RNAi agent also comprises a 5′-PS.

[0457] In one embodiment, B1 is 2′-OMe or 2′-F, n¹ is 8, T1 is 2′F, n² is 3, B2 is 2′-OMe, n³ is 7, n⁴ is 0, B3 is 2′OMe, n⁵ is 3, BF is 2′-OMe or 2′-F, q¹ is 9, T1′ is 2′-F, q² is 1, B2′ is 2′-OMe or 2′- F, q³ is 4, T2′ is 2′-F, q⁴ is 2, B3′ is 2′-OMe or 2′-F, q⁵ is 5, T3′ is 2′-F, q⁶ is 1, B4′ is 2′-F, and q⁷ is 1. The RNAi agent also comprises a 5′-VP. The 5′-VP may be 5′-E-VP, 5′-Z-VP, or combination thereof.

[0458] In one embodiment, B1 is 2′-OMe or 2′-F, n¹ is 8, T1 is 2′F, n² is 3, B2 is 2′-OMe, n³ is 7, n⁴ is 0, B3 is 2′OMe, n⁵ is 3, BF is 2′-OMe or 2′-F, q¹ is 9, T1′ is 2′-F, q² is 1, B2′ is 2′-OMe or 2′- F, q³ is 4, T2′ is 2′-F, q⁴ is 2, B3′ is 2′-OMe or 2′-F, q⁵ is 5, T3′ is 2′-F, q⁶ is 1, B4′ is 2′-F, and q⁷ is 1. The dsRNAi RNA agent also comprises a 5′-PS₂.

[0459] In one embodiment, B1 is 2′-OMe or 2′-F, n¹ is 8, T1 is 2′F, n² is 3, B2 is 2′-OMe, n³ is 7, n⁴ is 0, B3 is 2′OMe, n⁵ is 3, BF is 2′-OMe or 2′-F, q¹ is 9, T1′ is 2′-F, q² is 1, B2′ is 2′-OMe or 2′- F, q³ is 4, T2′ is 2′-F, q⁴ is 2, B3′ is 2′-OMe or 2′-F, q⁵ is 5, T3′ is 2′-F, q⁶ is 1, B4′ is 2′-F, and q⁷ is 1. The RNAi agent also comprises a 5′-deoxy-5′-C-malonyl.

[0460] In one embodiment, B1 is 2′-OMe or 2′-F, n¹ is 8, T1 is 2′F, n² is 3, B2 is 2′-OMe, n³ is 7, n⁴ is 0, B3 is 2′-OMe, n⁵ is 3, BF is 2′-OMe or 2′-F, q¹ is 9, T1′ is 2′-F, q² is 1, B2′ is 2′-OMe or 2′- F, q³ is 4, T2′ is 2′-F, q⁴ is 2, B3′ is 2′-OMe or 2′-F, q⁵ is 5, T3′ is 2′-F, q⁶ is 1, B4′ is 2′-F, and q⁷ is 1; with two phosphorothioate internucleotide linkage modifications within position 1-5 of the sense strand (counting from the 5′-end of the sense strand), and two phosphorothioate internucleotide linkage modifications at positions 1 and 2 and two phosphorothioate internucleotide linkage modifications within positions 18-23 of the antisense strand (counting from the 5′-end of the antisense strand). The RNAi agent also comprises a 5′-P.

[0461] In one embodiment, B1 is 2′-OMe or 2′-F, n¹ is 8, T1 is 2′F, n² is 3, B2 is 2′-OMe, n³ is 7, n⁴ is 0, B3 is 2′-OMe, n⁵ is 3, BF is 2′-OMe or 2′-F, q¹ is 9, T1′ is 2′-F, q² is 1, B2′ is 2′-OMe or 2′- F, q³ is 4, T2′ is 2′-F, q⁴ is 2, B3′ is 2′-OMe or 2′-F, q⁵ is 5, T3′ is 2′-F, q⁶ is 1, B4′ is 2′-F, and q⁷ is 1; with two phosphorothioate internucleotide linkage modifications within position 1-5 of the sense strand (counting from the 5′-end of the sense strand), and two phosphorothioate internucleotide linkage modifications at positions 1 and 2 and two phosphorothioate internucleotide linkage modifications within positions 18-23 of the antisense strand (counting from the 5′-end of the antisense strand). The RNAi agent also comprises a 5′-PS.

[0462] In one embodiment, B1 is 2′-OMe or 2′-F, n¹ is 8, T1 is 2′F, n² is 3, B2 is 2′-OMe, n³ is 7, n⁴ is 0, B3 is 2′-OMe, n⁵ is 3, BF is 2′-OMe or 2′-F, q¹ is 9, T1′ is 2′-F, q² is 1, B2′ is 2′-OMe or 2′- F, q³ is 4, T2′ is 2′-F, q⁴ is 2, B3′ is 2′-OMe or 2′-F, q⁵ is 5, T3′ is 2′-F, q⁶ is 1, B4′ is 2′-F, and q⁷ is 1; with two phosphorothioate internucleotide linkage modifications within position 1-5 of the sense strand (counting from the 5′-end of the sense strand), and two phosphorothioate internucleotide linkage modifications at positions 1 and 2 and two phosphorothioate internucleotide linkage modifications within positions 18-23 of the antisense strand (counting from the 5′-end of the antisense strand). The RNAi agent also comprises a 5′-VP. The 5′-VP may be 5′-E-VP, 5′-Z-VP, or combination thereof.

[0463] In one embodiment, B1 is 2′-OMe or 2′-F, n¹ is 8, T1 is 2′F, n² is 3, B2 is 2′-OMe, n³ is 7, n⁴ is 0, B3 is 2′-OMe, n⁵ is 3, BF is 2′-OMe or 2′-F, q¹ is 9, T1′ is 2′-F, q² is 1, B2′ is 2′-OMe or 2′- F, q³ is 4, T2′ is 2′-F, q⁴ is 2, B3′ is 2′-OMe or 2′-F, q⁵ is 5, T3′ is 2′-F, q⁶ is 1, B4′ is 2′-F, and q⁷ is 1; with two phosphorothioate internucleotide linkage modifications within position 1-5 of the sense strand (counting from the 5′-end of the sense strand), and two phosphorothioate internucleotide linkage modifications at positions 1 and 2 and two phosphorothioate internucleotide linkage modifications within positions 18-23 of the antisense strand (counting from the 5′-end of the antisense strand). The RNAi agent also comprises a 5′-PS₂.

[0464] In one embodiment, B1 is 2′-OMe or 2′-F, n¹ is 8, T1 is 2′F, n² is 3, B2 is 2′-OMe, n³ is 7, n⁴ is 0, B3 is 2′-OMe, n⁵ is 3, BF is 2′-OMe or 2′-F, q¹ is 9, T1′ is 2′-F, q² is 1, B2′ is 2′-OMe or 2′- F, q³ is 4, T2′ is 2′-F, q⁴ is 2, B3′ is 2′-OMe or 2′-F, q⁵ is 5, T3′ is 2′-F, q⁶ is 1, B4′ is 2′-F, and q⁷ is 1; with two phosphorothioate internucleotide linkage modifications within position 1-5 of the sense strand (counting from the 5′-end of the sense strand), and two phosphorothioate internucleotide linkage modifications at positions 1 and 2 and two phosphorothioate internucleotide linkage modifications within positions 18-23 of the antisense strand (counting from the 5′-end of the antisense strand). The RNAi agent also comprises a 5′-deoxy-5′-C-malonyl.

[0465] In one embodiment, B1 is 2′-OMe or 2′-F, n¹ is 8, T1 is 2′F, n² is 3, B2 is 2′-OMe, n³ is 7, n⁴ is 0, B3 is 2′-OMe, n⁵ is 3, BF is 2′-OMe or 2′-F, q¹ is 9, T1′ is 2′-F, q² is 1, B2′ is 2′-OMe or 2′- F, q³ is 4, q⁴ is 0, B3′ is 2′-OMe or 2′-F, q⁵ is 7, T3′ is 2′-F, q⁶ is 1, B4′ is 2′-F, and q⁷ is 1. The RNAi agent also comprises a 5′-P.

[0466] In one embodiment, B1 is 2′-OMe or 2′-F, n¹ is 8, T1 is 2′F, n² is 3, B2 is 2′-OMe, n³ is 7, n⁴ is 0, B3 is 2′-OMe, n⁵ is 3, BF is 2′-OMe or 2′-F, q¹ is 9, T1′ is 2′-F, q² is 1, B2′ is 2′-OMe or 2′- F, q³ is 4, q⁴ is 0, B3′ is 2′-OMe or 2′-F, q⁵ is 7, T3′ is 2′-F, q⁶ is 1, B4′ is 2′-F, and q⁷ is 1. The RNAi agent also comprises a 5′-PS.

[0467] In one embodiment, B1 is 2′-OMe or 2′-F, n¹ is 8, T1 is 2′F, n² is 3, B2 is 2′-OMe, n³ is 7, n⁴ is 0, B3 is 2′-OMe, n⁵ is 3, BF is 2′-OMe or 2′-F, q¹ is 9, T1′ is 2′-F, q² is 1, B2′ is 2′-OMe or 2′- F, q³ is 4, q⁴ is 0, B3′ is 2′-OMe or 2′-F, q⁵ is 7, T3′ is 2′-F, q⁶ is 1, B4′ is 2′-F, and q⁷ is 1. The RNAi agent also comprises a 5′-VP. The 5′-VP may be 5′-E-VP, 5′-Z-VP, or combination thereof.

[0468] In one embodiment, B1 is 2′-OMe or 2′-F, n¹ is 8, T1 is 2′F, n² is 3, B2 is 2′-OMe, n³ is 7, n⁴ is 0, B3 is 2′-OMe, n⁵ is 3, BF is 2′-OMe or 2′-F, q¹ is 9, T1′ is 2′-F, q² is 1, B2′ is 2′-OMe or 2′-F, q³ is 4, q⁴ is 0, B3′ is 2′-OMe or 2′-F, q⁵ is 7, T3′ is 2′-F, q⁶ is 1, B4′ is 2′-F, and q⁷ is 1. The RNAi agent also comprises a 5′-PS₂.

[0469] In one embodiment, B1 is 2′-OMe or 2′-F, n¹ is 8, T1 is 2′F, n² is 3, B2 is 2′-OMe, n³ is 7, n⁴ is 0, B3 is 2′-OMe, n⁵ is 3, BF is 2′-OMe or 2′-F, q¹ is 9, T1′ is 2′-F, q² is 1, B2′ is 2′-OMe or 2′- F, q³ is 4, q⁴ is 0, B3′ is 2′-OMe or 2′-F, q⁵ is 7, T3′ is 2′-F, q⁶ is 1, B4′ is 2′-F, and q⁷ is 1. The RNAi agent also comprises a 5′-deoxy-5′-C-malonyl.

[0470] In one embodiment, B1 is 2′-OMe or 2′-F, n¹ is 8, T1 is 2′F, n² is 3, B2 is 2′-OMe, n³ is 7, n⁴ is 0, B3 is 2′-OMe, n⁵ is 3, BF is 2′-OMe or 2′-F, q¹ is 9, T1′ is 2′-F, q² is 1, B2′ is 2′-OMe or 2′- F, q³ is 4, q⁴ is 0, B3′ is 2′-OMe or 2′-F, q⁵ is 7, T3′ is 2′-F, q⁶ is 1, B4′ is 2′-F, and q⁷ is 1; with two phosphorothioate internucleotide linkage modifications within position 1-5 of the sense strand (counting from the 5′-end of the sense strand), and two phosphorothioate internucleotide linkage modifications at positions 1 and 2 and two phosphorothioate internucleotide linkage modifications within positions 18-23 of the antisense strand (counting from the 5′-end of the antisense strand). The RNAi agent also comprises a 5′-P.

[0471] In one embodiment, B1 is 2′-OMe or 2′-F, n¹ is 8, T1 is 2′F, n² is 3, B2 is 2′-OMe, n³ is 7, n⁴ is 0, B3 is 2′-OMe, n⁵ is 3, BF is 2′-OMe or 2′-F, q¹ is 9, T1′ is 2′-F, q² is 1, B2′ is 2′-OMe or 2′- F, q³ is 4, q⁴ is 0, B3′ is 2′-OMe or 2′-F, q⁵ is 7, T3′ is 2′-F, q⁶ is 1, B4′ is 2′-F, and q⁷ is 1; with two phosphorothioate internucleotide linkage modifications within position 1-5 of the sense strand (counting from the 5′-end of the sense strand), and two phosphorothioate internucleotide linkage modifications at positions 1 and 2 and two phosphorothioate internucleotide linkage modifications within positions 18-23 of the antisense strand (counting from the 5′-end of the antisense strand). The RNAi agent also comprises a 5′-PS.

[0472] In one embodiment, B1 is 2′-OMe or 2′-F, n¹ is 8, T1 is 2′F, n² is 3, B2 is 2′-OMe, n³ is 7, n⁴ is 0, B3 is 2′-OMe, n⁵ is 3, BF is 2′-OMe or 2′-F, q¹ is 9, T1′ is 2′-F, q² is 1, B2′ is 2′-OMe or 2′- F, q³ is 4, q⁴ is 0, B3′ is 2′-OMe or 2′-F, q⁵ is 7, T3′ is 2′-F, q⁶ is 1, B4′ is 2′-F, and q⁷ is 1; with two phosphorothioate internucleotide linkage modifications within position 1-5 of the sense strand (counting from the 5′-end of the sense strand), and two phosphorothioate internucleotide linkage modifications at positions 1 and 2 and two phosphorothioate internucleotide linkage modifications within positions 18-23 of the antisense strand (counting from the 5′-end of the antisense strand). The RNAi agent also comprises a 5′-VP. The 5′-VP may be 5′-E-VP, 5′-Z-VP, or combination thereof.

[0473] In one embodiment, B1 is 2′-OMe or 2′-F, n¹ is 8, T1 is 2′F, n² is 3, B2 is 2′-OMe, n³ is 7, n⁴ is 0, B3 is 2′-OMe, n⁵ is 3, B1′ is 2′-OMe or 2′-F, q¹ is 9, T1′ is 2′-F, q² is 1, B2′ is 2′-OMe or 2′-F, q³ is 4, q⁴ is 0, B3′ is 2′-OMe or 2′-F, q⁵ is 7, T3′ is 2′-F, q⁶ is 1, B4′ is 2′-F, and q⁷ is 1; with two phosphorothioate internucleotide linkage modifications within position 1-5 of the sense strand (counting from the 5′-end of the sense strand), and two phosphorothioate internucleotide linkage modifications at positions 1 and 2 and two phosphorothioate internucleotide linkage modifications within positions 18-23 of the antisense strand (counting from the 5′-end of the antisense strand). The RNAi agent also comprises a 5′-PS₂.

[0474] In one embodiment, B1 is 2′-OMe or 2′-F, n¹ is 8, T1 is 2′F, n² is 3, B2 is 2′-OMe, n³ is 7, n⁴ is 0, B3 is 2′-OMe, n⁵ is 3, B1′ is 2′-OMe or 2′-F, q¹ is 9, T1′ is 2′-F, q² is 1, B2′ is 2′-OMe or 2′-F, q³ is 4, q⁴ is 0, B3′ is 2′-OMe or 2′-F, q⁵ is 7, T3′ is 2′-F, q⁶ is 1, B4′ is 2′-F, and q⁷ is 1; with two phosphorothioate internucleotide linkage modifications within position 1-5 of the sense strand (counting from the 5′-end of the sense strand), and two phosphorothioate internucleotide linkage modifications at positions 1 and 2 and two phosphorothioate internucleotide linkage modifications within positions 18-23 of the antisense strand (counting from the 5′-end of the antisense strand). The RNAi agent also comprises a 5′-deoxy-5′-C-malonyl.

[0475] In one embodiment, B1 is 2′-OMe or 2′-F, n¹ is 8, T1 is 2′F, n² is 3, B2 is 2′-OMe, n³ is 7, n⁴ is 0, B3 is 2′-OMe, n⁵ is 3, B1′ is 2′-OMe or 2′-F, q¹ is 9, T1′ is 2′-F, q² is 1, B2′ is 2′-OMe or 2′-F, q³ is 4, T2′ is 2′-F, q⁴ is 2, B3′ is 2′-OMe or 2′-F, q⁵ is 5, T3′ is 2′-F, q⁶ is 1, B4′ is 2′-OMe, and q⁷ is 1; with two phosphorothioate internucleotide linkage modifications within position 1-5 of the sense strand (counting from the 5′-end of the sense strand), and two phosphorothioate internucleotide linkage modifications at positions 1 and 2 and two phosphorothioate internucleotide linkage modifications within positions 18-23 of the antisense strand (counting from the 5′-end of the antisense strand). The RNAi agent also comprises a 5′-P and a targeting ligand. In one embodiment, the 5′-P is at the 5′-end of the antisense strand, and the targeting ligand is at the 3′-end of the sense strand.

[0476] In one embodiment, B1 is 2′-OMe or 2′-F, n¹ is 8, T1 is 2′F, n² is 3, B2 is 2′-OMe, n³ is 7, n⁴ is 0, B3 is 2′-OMe, n⁵ is 3, B1′ is 2′-OMe or 2′-F, q¹ is 9, T1′ is 2′-F, q² is 1, B2′ is 2′-OMe or 2′-F, q³ is 4, T2′ is 2′-F, q⁴ is 2, B3′ is 2′-OMe or 2′-F, q⁵ is 5, T3′ is 2′-F, q⁶ is 1, B4′ is 2′-OMe, and q⁷ is 1; with two phosphorothioate internucleotide linkage modifications within position 1-5 of the sense strand (counting from the 5′-end of the sense strand), and two phosphorothioate internucleotide linkage modifications at positions 1 and 2 and two phosphorothioate internucleotide linkage modifications within positions 18-23 of the antisense strand (counting from the 5′-end of the antisense strand). The RNAi agent also comprises a 5′-PS and a targeting ligand. In one embodiment, the 5′-PS is at the 5′-end of the antisense strand, and the targeting ligand is at the 3′-end of the sense strand.

[0477] In one embodiment, B1 is 2′-OMe or 2′-F, n¹ is 8, T1 is 2′F, n² is 3, B2 is 2′-OMe, n³ is 7, n⁴ is 0, B3 is 2′-OMe, n⁵ is 3, B1′ is 2′-OMe or 2′-F, q¹ is 9, T1′ is 2′-F, q² is 1, B2′ is 2′-OMe or 2′-F, q³ is 4, T2′ is 2′-F, q⁴ is 2, B3′ is 2′-OMe or 2′-F, q⁵ is 5, T3′ is 2′-F, q⁶ is 1, B4′ is 2′-OMe, and q⁷ is 1; with two phosphorothioate internucleotide linkage modifications within position 1-5 of the sense strand (counting from the 5′-end of the sense strand), and two phosphorothioate internucleotide linkage modifications at positions 1 and 2 and two phosphorothioate internucleotide linkage modifications within positions 18-23 of the antisense strand (counting from the 5′-end of the antisense strand). The RNAi agent also comprises a 5′-VP (e.g., a 5′-E-VP, 5′-Z-VP, or combination thereof), and a targeting ligand. In one embodiment, the 5′-VP is at the 5′-end of the antisense strand, and the targeting ligand is at the 3′-end of the sense strand.

[0478] In one embodiment, B1 is 2′-OMe or 2′-F, n¹ is 8, T1 is 2′F, n² is 3, B2 is 2′-OMe, n³ is 7, n⁴ is 0, B3 is 2′-OMe, n⁵ is 3, B1′ is 2′-OMe or 2′-F, q¹ is 9, T1′ is 2′-F, q² is 1, B2′ is 2′-OMe or 2′-F, q³ is 4, T2′ is 2′-F, q⁴ is 2, B3′ is 2′-OMe or 2′-F, q⁵ is 5, T3′ is 2′-F, q⁶ is 1, B4′ is 2′-OMe, and q⁷ is 1; with two phosphorothioate internucleotide linkage modifications within position 1-5 of the sense strand (counting from the 5′-end of the sense strand), and two phosphorothioate internucleotide linkage modifications at positions 1 and 2 and two phosphorothioate internucleotide linkage modifications within positions 18-23 of the antisense strand (counting from the 5′-end of the antisense strand). The RNAi agent also comprises a 5′-PS₂ and a targeting ligand. In one embodiment, the 5′-PS₂ is at the 5′-end of the antisense strand, and the targeting ligand is at the 3′-end of the sense strand.

[0479] In one embodiment, B1 is 2′-OMe or 2′-F, n¹ is 8, T1 is 2′F, n² is 3, B2 is 2′-OMe, n³ is 7, n⁴ is 0, B3 is 2′-OMe, n⁵ is 3, B1′ is 2′-OMe or 2′-F, q¹ is 9, T1′ is 2′-F, q² is 1, B2′ is 2′-OMe or 2′-F, q³ is 4, T2′ is 2′-F, q⁴ is 2, B3′ is 2′-OMe or 2′-F, q⁵ is 5, T3′ is 2′-F, q⁶ is 1, B4′ is 2′-OMe, and q⁷ is 1; with two phosphorothioate internucleotide linkage modifications within position 1-5 of the sense strand (counting from the 5′-end of the sense strand), and two phosphorothioate internucleotide linkage modifications at positions 1 and 2 and two phosphorothioate internucleotide linkage modifications within positions 18-23 of the antisense strand (counting from the 5′-end of the antisense strand). The RNAi agent also comprises a 5′-deoxy-5′-C-malonyl and a targeting ligand. In one embodiment, the 5′-deoxy-5′-C-malonyl is at the 5′-end of the antisense strand, and the targeting ligand is at the 3′-end of the sense strand.

[0480] In one embodiment, B1 is 2′-OMe or 2′-F, n¹ is 8, T1 is 2′F, n² is 3, B2 is 2′-OMe, n³ is 7, n⁴ is 0, B3 is 2′-OMe, n⁵ is 3, B1′ is 2′-OMe or 2′-F, q¹ is 9, T1′ is 2′-F, q² is 1, B2′ is 2′-OMe or 2′-F, q³ is 4, q⁴ is 0, B3′ is 2′-OMe or 2′-F, q⁵ is 7, T3′ is 2′-F, q⁶ is 1, B4′ is 2′-OMe, and q⁷ is 1; with two phosphorothioate internucleotide linkage modifications within position 1-5 of the sense strand (counting from the 5′-end), and two phosphorothioate internucleotide linkage modifications at positions 1 and 2 and two phosphorothioate internucleotide linkage modifications within positions 18-23 of the antisense strand (counting from the 5′-end). The RNAi agent also comprises a 5′-P and a targeting ligand. In one embodiment, the 5′-P is at the 5′-end of the antisense strand, and the targeting ligand is at the 3′-end of the sense strand.

[0481] In one embodiment, B1 is 2′-OMe or 2′-F, n¹ is 8, T1 is 2′F, n² is 3, B2 is 2′-OMe, n³ is 7, n⁴ is 0, B3 is 2′-OMe, n⁵ is 3, BF is 2′-OMe or 2′-F, q¹ is 9, T1′ is 2′-F, q² is 1, B2′ is 2′-OMe or 2′- F, q³ is 4, q⁴ is 0, B3′ is 2′-OMe or 2′-F, q⁵ is 7, T3′ is 2′-F, q⁶ is 1, B4′ is 2′-OMe, and q⁷ is 1; with two phosphorothioate internucleotide linkage modifications within position 1-5 of the sense strand (counting from the 5′-end), and two phosphorothioate internucleotide linkage modifications at positions 1 and 2 and two phosphorothioate internucleotide linkage modifications within positions 18-23 of the antisense strand (counting from the 5′-end). The RNAi agent also comprises a 5′-PS and a targeting ligand. In one embodiment, the 5′-PS is at the 5′-end of the antisense strand, and the targeting ligand is at the 3′-end of the sense strand.

[0482] In one embodiment, B1 is 2′-OMe or 2′-F, n¹ is 8, T1 is 2′F, n² is 3, B2 is 2′-OMe, n³ is 7, n⁴ is 0, B3 is 2′-OMe, n⁵ is 3, BF is 2′-OMe or 2′-F, q¹ is 9, T1′ is 2′-F, q² is 1, B2′ is 2′-OMe or 2′- F, q³ is 4, q⁴ is 0, B3′ is 2′-OMe or 2′-F, q⁵ is 7, T3′ is 2′-F, q⁶ is 1, B4′ is 2′-OMe, and q⁷ is 1; with two phosphorothioate internucleotide linkage modifications within position 1-5 of the sense strand (counting from the 5′-end), and two phosphorothioate internucleotide linkage modifications at positions 1 and 2 and two phosphorothioate internucleotide linkage modifications within positions 18-23 of the antisense strand (counting from the 5′-end). The RNAi agent also comprises a 5′-VP (e.g., a 5′-E-VP, 5′-Z-VP, or combination thereof) and a targeting ligand. In one embodiment, the 5′-VP is at the 5′-end of the antisense strand, and the targeting ligand is at the 3′-end of the sense strand.

[0483] In one embodiment, B1 is 2′-OMe or 2′-F, n¹ is 8, T1 is 2′F, n² is 3, B2 is 2′-OMe, n³ is 7, n⁴ is 0, B3 is 2′-OMe, n⁵ is 3, BF is 2′-OMe or 2′-F, q¹ is 9, T1′ is 2′-F, q² is 1, B2′ is 2′-OMe or 2′-F, q³ is 4, q⁴ is 0, B3′ is 2′-OMe or 2′-F, q⁵ is 7, T3′ is 2′-F, q⁶ is 1, B4′ is 2′-OMe, and q⁷ is 1; with two phosphorothioate internucleotide linkage modifications within position 1-5 of the sense strand (counting from the 5′-end), and two phosphorothioate internucleotide linkage modifications at positions 1 and 2 and two phosphorothioate internucleotide linkage modifications within positions 18-23 of the antisense strand (counting from the 5′-end). The RNAi agent also comprises a 5′-PS₂ and a targeting ligand. In one embodiment, the 5′-PS₂ is at the 5′-end of the antisense strand, and the targeting ligand is at the 3′-end of the sense strand.

[0484] In one embodiment, B1 is 2′-OMe or 2′-F, n¹ is 8, T1 is 2′F, n² is 3, B2 is 2′-OMe, n³ is 7, n⁴ is 0, B3 is 2′-OMe, n⁵ is 3, BF is 2′-OMe or 2′-F, q¹ is 9, T1′ is 2′-F, q² is 1, B2′ is 2′-OMe or 2′- F, q³ is 4, q⁴ is 0, B3′ is 2′-OMe or 2′-F, q⁵ is 7, T3′ is 2′-F, q⁶ is 1, B4′ is 2′-OMe, and q⁷ is 1; with two phosphorothioate internucleotide linkage modifications within position 1-5 of the sense strand (counting from the 5′-end), and two phosphorothioate internucleotide linkage modifications at positions 1 and 2 and two phosphorothioate internucleotide linkage modifications within positions 18-23 of the antisense strand (counting from the 5′-end). The RNAi agent also comprises a 5′-deoxy-5′-C-malonyl and a targeting ligand. In one embodiment, the 5′-deoxy-5′-C-malonyl is at the 5′-end of the antisense strand, and the targeting ligand is at the 3′-end of the sense strand.

In one embodiment, B1 is 2′-OMe or 2′-F, n¹ is 8, T1 is 2′F, n² is 3, B2 is 2′-OMe, n³ is 7, n⁴ is 0, B3 is 2′-OMe, n⁵ is 3, BF is 2′-OMe or 2′-F, q¹ is 9, T1′ is 2′-F, q² is 1, B2′ is 2′-OMe or 2′-F, q³ is 4, T2′ is 2′-F, q⁴ is 2, B3′ is 2′-OMe or 2′-F, q⁵ is 5, T3′ is 2′-F, q⁶ is 1, B4′ is 2′-F, and q⁷ is 1; with two phosphorothioate internucleotide linkage modifications within position 1-5 of the sense strand (counting from the 5′-end of the sense strand), and two phosphorothioate internucleotide linkage modifications at positions 1 and 2 and two phosphorothioate internucleotide linkage modifications within positions 18-23 of the antisense strand (counting from the 5′-end of the antisense strand). The RNAi agent also comprises a 5′-P and a targeting ligand. In one embodiment, the 5′-P is at the 5′-end of the antisense strand, and the targeting ligand is at the 3′-end of the sense strand.

[0485] In one embodiment, B1 is 2′-OMe or 2′-F, n¹ is 8, T1 is 2′F, n² is 3, B2 is 2′-OMe, n³ is 7, n⁴ is 0, B3 is 2′-OMe, n⁵ is 3, B1′ is 2′-OMe or 2′-F, q¹ is 9, T1′ is 2′-F, q² is 1, B2′ is 2′-OMe or 2′-F, q³ is 4, T2′ is 2′-F, q⁴ is 2, B3′ is 2′-OMe or 2′-F, q⁵ is 5, T3′ is 2′-F, q⁶ is 1, B4′ is 2′-F, and q⁷ is 1; with two phosphorothioate internucleotide linkage modifications within position 1-5 of the sense strand (counting from the 5′-end of the sense strand), and two phosphorothioate internucleotide linkage modifications at positions 1 and 2 and two phosphorothioate internucleotide linkage modifications within positions 18-23 of the antisense strand (counting from the 5′-end of the antisense strand). The RNAi agent also comprises a 5′-PS and a targeting ligand. In one embodiment, the 5′-PS is at the 5′-end of the antisense strand, and the targeting ligand is at the 3′-end of the sense strand.

[0486] In one embodiment, B1 is 2′-OMe or 2′-F, n¹ is 8, T1 is 2′F, n² is 3, B2 is 2′-OMe, n³ is 7, n⁴ is 0, B3 is 2′-OMe, n⁵ is 3, B1′ is 2′-OMe or 2′-F, q¹ is 9, T1′ is 2′-F, q² is 1, B2′ is 2′-OMe or 2′-F, q³ is 4, T2′ is 2′-F, q⁴ is 2, B3′ is 2′-OMe or 2′-F, q⁵ is 5, T3′ is 2′-F, q⁶ is 1, B4′ is 2′-F, and q⁷ is 1; with two phosphorothioate internucleotide linkage modifications within position 1-5 of the sense strand (counting from the 5′-end of the sense strand), and two phosphorothioate internucleotide linkage modifications at positions 1 and 2 and two phosphorothioate internucleotide linkage modifications within positions 18-23 of the antisense strand (counting from the 5′-end of the antisense strand). The RNAi agent also comprises a 5′-VP (e.g., a 5′-E-VP, 5′-Z-VP, or combination thereof) and a targeting ligand. In one embodiment, the 5′-VP is at the 5′-end of the antisense strand, and the targeting ligand is at the 3′-end of the sense strand.

[0487] In one embodiment, B1 is 2′-OMe or 2′-F, n¹ is 8, T1 is 2′F, n² is 3, B2 is 2′-OMe, n³ is 7, n⁴ is 0, B3 is 2′-OMe, n⁵ is 3, B1′ is 2′-OMe or 2′-F, q¹ is 9, T1′ is 2′-F, q² is 1, B2′ is 2′-OMe or 2′-F, q³ is 4, T2′ is 2′-F, q⁴ is 2, B3′ is 2′-OMe or 2′-F, q⁵ is 5, T3′ is 2′-F, q⁶ is 1, B4′ is 2′-F, and q⁷ is 1; with two phosphorothioate internucleotide linkage modifications within position 1-5 of the sense strand (counting from the 5′-end of the sense strand), and two phosphorothioate internucleotide linkage modifications at positions 1 and 2 and two phosphorothioate internucleotide linkage modifications within positions 18-23 of the antisense strand (counting from the 5′-end of the antisense strand). The RNAi agent also comprises a 5′-PS₂ and a targeting ligand. In one embodiment, the 5′-PS₂ is at the 5′-end of the antisense strand, and the targeting ligand is at the 3′-end of the sense strand.

[0488] In one embodiment, B1 is 2′-OMe or 2′-F, n¹ is 8, T1 is 2′F, n² is 3, B2 is 2′-OMe, n³ is 7, n⁴ is 0, B3 is 2′-OMe, n⁵ is 3, B1′ is 2′-OMe or 2′-F, q¹ is 9, T1′ is 2′-F, q² is 1, B2′ is 2′-OMe or 2′-F, q³ is 4, T2′ is 2′-F, q⁴ is 2, B3′ is 2′-OMe or 2′-F, q⁵ is 5, T3′ is 2′-F, q⁶ is 1, B4′ is 2′-F, and q⁷ is 1; with two phosphorothioate internucleotide linkage modifications within position 1-5 of the sense strand (counting from the 5′-end of the sense strand), and two phosphorothioate internucleotide linkage modifications at positions 1 and 2 and two phosphorothioate internucleotide linkage modifications within positions 18-23 of the antisense strand (counting from the 5′-end of the antisense strand). The RNAi agent also comprises a 5′-deoxy-5′-C-malonyl and a targeting ligand. In one embodiment, the 5′-deoxy-5′-C-malonyl is at the 5′-end of the antisense strand, and the targeting ligand is at the 3′-end of the sense strand.

[0489] In one embodiment, B1 is 2′-OMe or 2′-F, n¹ is 8, T1 is 2′F, n² is 3, B2 is 2′-OMe, n³ is 7, n⁴ is 0, B3 is 2′-OMe, n⁵ is 3, B1′ is 2′-OMe or 2′-F, q¹ is 9, T1′ is 2′-F, q² is 1, B2′ is 2′-OMe or 2′-F, q³ is 4, q⁴ is 0, B3′ is 2′-OMe or 2′-F, q⁵ is 7, T3′ is 2′-F, q⁶ is 1, B4′ is 2′-F, and q⁷ is 1; with two phosphorothioate internucleotide linkage modifications within position 1-5 of the sense strand (counting from the 5′-end of the sense strand), and two phosphorothioate internucleotide linkage modifications at positions 1 and 2 and two phosphorothioate internucleotide linkage modifications within positions 18-23 of the antisense strand (counting from the 5′-end of the antisense strand). The RNAi agent also comprises a 5′-P and a targeting ligand. In one embodiment, the 5′-P is at the 5′-end of the antisense strand, and the targeting ligand is at the 3′-end of the sense strand.

[0490] In one embodiment, B1 is 2′-OMe or 2′-F, n¹ is 8, T1 is 2′F, n² is 3, B2 is 2′-OMe, n³ is 7, n⁴ is 0, B3 is 2′-OMe, n⁵ is 3, B1′ is 2′-OMe or 2′-F, q¹ is 9, T1′ is 2′-F, q² is 1, B2′ is 2′-OMe or 2′-F, q³ is 4, q⁴ is 0, B3′ is 2′-OMe or 2′-F, q⁵ is 7, T3′ is 2′-F, q⁶ is 1, B4′ is 2′-F, and q⁷ is 1; with two phosphorothioate internucleotide linkage modifications within position 1-5 of the sense strand (counting from the 5′-end of the sense strand), and two phosphorothioate internucleotide linkage modifications at positions 1 and 2 and two phosphorothioate internucleotide linkage modifications within positions 18-23 of the antisense strand (counting from the 5′-end of the antisense strand). The RNAi agent also comprises a 5′-PS and a targeting ligand. In one embodiment, the 5′-PS is at the 5′-end of the antisense strand, and the targeting ligand is at the 3′-end of the sense strand.

[0491] In one embodiment, B1 is 2′-OMe or 2′-F, n¹ is 8, T1 is 2′F, n² is 3, B2 is 2′-OMe, n³ is 7, n⁴ is 0, B3 is 2′-OMe, n⁵ is 3, B1′ is 2′-OMe or 2′-F, q¹ is 9, T1′ is 2′-F, q² is 1, B2′ is 2′-OMe or 2′-F, q³ is 4, q⁴ is 0, B3′ is 2′-OMe or 2′-F, q⁵ is 7, T3′ is 2′-F, q⁶ is 1, B4′ is 2′-F, and q⁷ is 1; with two phosphorothioate internucleotide linkage modifications within position 1-5 of the sense strand (counting from the 5′-end of the sense strand), and two phosphorothioate internucleotide linkage modifications at positions 1 and 2 and two phosphorothioate internucleotide linkage modifications within positions 18-23 of the antisense strand (counting from the 5′-end of the antisense strand). The RNAi agent also comprises a 5′-VP (e.g., a 5′-E-VP, 5′-Z-VP, or combination thereof) and a targeting ligand. In one embodiment, the 5′-VP is at the 5′-end of the antisense strand, and the targeting ligand is at the 3′-end of the sense strand.

[0492] In one embodiment, B1 is 2′-OMe or 2′-F, n¹ is 8, T1 is 2′F, n² is 3, B2 is 2′-OMe, n³ is 7, n⁴ is 0, B3 is 2′-OMe, n⁵ is 3, B1′ is 2′-OMe or 2′-F, q¹ is 9, T1′ is 2′-F, q² is 1, B2′ is 2′-OMe or 2′-F, q³ is 4, q⁴ is 0, B3′ is 2′-OMe or 2′-F, q⁵ is 7, T3′ is 2′-F, q⁶ is 1, B4′ is 2′-F, and q⁷ is 1; with two phosphorothioate internucleotide linkage modifications within position 1-5 of the sense strand (counting from the 5′-end of the sense strand), and two phosphorothioate internucleotide linkage modifications at positions 1 and 2 and two phosphorothioate internucleotide linkage modifications within positions 18-23 of the antisense strand (counting from the 5′-end of the antisense strand). The RNAi agent also comprises a 5′-PS₂ and a targeting ligand. In one embodiment, the 5′-PS₂ is at the 5′-end of the antisense strand, and the targeting ligand is at the 3′-end of the sense strand.

[0493] In one embodiment, B1 is 2′-OMe or 2′-F, n¹ is 8, T1 is 2′F, n² is 3, B2 is 2′-OMe, n³ is 7, n⁴ is 0, B3 is 2′-OMe, n⁵ is 3, B1′ is 2′-OMe or 2′-F, q¹ is 9, T1′ is 2′-F, q² is 1, B2′ is 2′-OMe or 2′-F, q³ is 4, q⁴ is 0, B3′ is 2′-OMe or 2′-F, q⁵ is 7, T3′ is 2′-F, q⁶ is 1, B4′ is 2′-F, and q⁷ is 1; with two phosphorothioate internucleotide linkage modifications within position 1-5 of the sense strand (counting from the 5′-end of the sense strand), and two phosphorothioate internucleotide linkage modifications at positions 1 and 2 and two phosphorothioate internucleotide linkage modifications within positions 18-23 of the antisense strand (counting from the 5′-end of the antisense strand). The RNAi agent also comprises a 5′-deoxy-5′-C-malonyl and a targeting ligand. In one embodiment, the 5′-deoxy-5′-C-malonyl is at the 5′-end of the antisense strand, and the targeting ligand is at the 3′-end of the sense strand.

[0494] In a particular embodiment, an RNAi agent of the present invention comprises:

(a) a sense strand having:
[0495] (i) a length of 21 nucleotides;
[0496] (ii) an ASGPR ligand attached to the 3′-end, wherein said ASGPR ligand comprises three GalNAc derivatives attached through a trivalent branched linker; and
[0497] (iii) 2′-F modifications at positions 1, 3, 5, 7, 9 to 11, 13, 17, 19, and 21, and 2′-OMe modifications at positions 2, 4, 6, 8, 12, 14 to 16, 18, and 20 (counting from the 5′ end);
[0498] and
   (b) an antisense strand having:
[0499] (i) a length of 23 nucleotides;
[0500] (ii) 2′-OMe modifications at positions 1, 3, 5, 9, 11 to 13, 15, 17, 19, 21, and 23, and 2′F modifications at positions 2, 4, 6 to 8, 10, 14, 16, 18, 20, and 22 (counting from the 5′ end); and
[0501] (iii) phosphorothioate internucleotide linkages between nucleotide positions 21 and 22, and between nucleotide positions 22 and 23 (counting from the 5′ end);
   [0502] wherein the dsRNA agents have a two nucleotide overhang at the 3′-end of the antisense strand, and a blunt end at the 5′-end of the antisense strand.

[0503] In another particular embodiment, an RNAi agent of the present invention comprises:

(a) a sense strand having:
[0504] (i) a length of 21 nucleotides;
[0505] (ii) an ASGPR ligand attached to the 3′-end, wherein said ASGPR ligand comprises three GalNAc derivatives attached through a trivalent branched linker;
[0506] (iii) 2′-F modifications at positions 1, 3, 5, 7, 9 to 11, 13, 15, 17, 19, and 21, and 2′-OMe modifications at positions 2, 4, 6, 8, 12, 14, 16, 18, and 20 (counting from the 5′ end); and
[0507] (iv) phosphorothioate internucleotide linkages between nucleotide positions 1 and 2, and between nucleotide positions 2 and 3 (counting from the 5′ end);
[0508] and
   (b) an antisense strand having:
[0509] (i) a length of 23 nucleotides;
[0510] (ii) 2′-OMe modifications at positions 1, 3, 5, 7, 9, 11 to 13, 15, 17, 19, and 21 to 23, and 2′F modifications at positions 2, 4, 6, 8, 10, 14, 16, 18, and 20 (counting from the 5′ end); and
[0511] (iii) phosphorothioate internucleotide linkages between nucleotide positions 1 and 2, between nucleotide positions 2 and 3, between nucleotide positions 21 and 22, and between nucleotide positions 22 and 23 (counting from the 5′ end);
   wherein the RNAi agents have a two nucleotide overhang at the 3′-end of the antisense strand, and a blunt end at the 5′-end of the antisense strand.

[0512] In another particular embodiment, a RNAi agent of the present invention comprises:

(a) a sense strand having:
[0513] (i) a length of 21 nucleotides;
[0514] (ii) an ASGPR ligand attached to the 3′-end, wherein said ASGPR ligand comprises three GalNAc derivatives attached through a trivalent branched linker;
[0515] (iii) 2′-OMe modifications at positions 1 to 6, 8, 10, and 12 to 21, 2′-F modifications at positions 7, and 9, and a desoxy-nucleotide (e.g. dT) at position 11 (counting from the 5′ end); and
[0516] (iv) phosphorothioate internucleotide linkages between nucleotide positions 1 and 2, and between nucleotide positions 2 and 3 (counting from the 5′ end);
[0517] and
   (b) an antisense strand having:
[0518] (i) a length of 23 nucleotides;
[0519] (ii) 2′-OMe modifications at positions 1, 3, 7, 9, 11, 13, 15, 17, and 19 to 23, and 2′-F modifications at positions 2, 4 to 6, 8, 10, 12, 14, 16, and 18 (counting from the 5′ end); and
[0520] (iii) phosphorothioate internucleotide linkages between nucleotide positions 1 and 2, between nucleotide positions 2 and 3, between nucleotide positions 21 and 22, and between nucleotide positions 22 and 23 (counting from the 5′ end);
   wherein the RNAi agents have a two nucleotide overhang at the 3′-end of the antisense strand, and a blunt end at the 5′-end of the antisense strand.

[0521] In another particular embodiment, aRNAi agent of the present invention comprises:

(a) a sense strand having:
[0522] (i) a length of 21 nucleotides;
[0523] (ii) an ASGPR ligand attached to the 3′-end, wherein said ASGPR ligand comprises three GalNAc derivatives attached through a trivalent branched linker;
[0524] (iii) 2′-OMe modifications at positions 1 to 6, 8, 10, 12, 14, and 16 to 21, and 2′-F modifications at positions 7, 9, 11, 13, and 15; and
[0525] (iv) phosphorothioate internucleotide linkages between nucleotide positions 1 and 2, and between nucleotide positions 2 and 3 (counting from the 5′ end);
[0526] and
   (b) an antisense strand having:
[0527] (i) a length of 23 nucleotides;
[0528] (ii) 2′-OMe modifications at positions 1, 5, 7, 9, 11, 13, 15, 17, 19, and 21 to 23, and 2′-F modifications at positions 2 to 4, 6, 8, 10, 12, 14, 16, 18, and 20 (counting from the 5′ end); and
[0529] (iii) phosphorothioate internucleotide linkages between nucleotide positions 1 and 2, between nucleotide positions 2 and 3, between nucleotide positions 21 and 22, and between nucleotide positions 22 and 23 (counting from the 5′ end);
   wherein the RNAi agents have a two nucleotide overhang at the 3′-end of the antisense strand, and a blunt end at the 5′-end of the antisense strand.

[0530] In another particular embodiment, a RNAi agent of the present invention comprises:

(a) a sense strand having:
[0531] (i) a length of 21 nucleotides;
[0532] (ii) an ASGPR ligand attached to the 3′-end, wherein said ASGPR ligand comprises three GalNAc derivatives attached through a trivalent branched linker;
[0533] (iii) 2′-OMe modifications at positions 1 to 9, and 12 to 21, and 2′-F modifications at positions 10, and 11; and
[0534] (iv) phosphorothioate internucleotide linkages between nucleotide positions 1 and 2, and between nucleotide positions 2 and 3 (counting from the 5′ end);
[0535] and
   (b) an antisense strand having:
[0536] (i) a length of 23 nucleotides;
[0537] (ii) 2′-OMe modifications at positions 1, 3, 5, 7, 9, 11 to 13, 15, 17, 19, and 21 to 23, and 2′-F modifications at positions 2, 4, 6, 8, 10, 14, 16, 18, and 20 (counting from the 5′ end); and
[0538] (iii) phosphorothioate internucleotide linkages between nucleotide positions 1 and 2, between nucleotide positions 2 and 3, between nucleotide positions 21 and 22, and between nucleotide positions 22 and 23 (counting from the 5′ end);
   wherein the RNAi agents have a two nucleotide overhang at the 3′-end of the antisense strand, and a blunt end at the 5′-end of the antisense strand.

[0539] In another particular embodiment, a RNAi agent of the present invention comprises:

(a) a sense strand having:
[0540] (i) a length of 21 nucleotides;
[0541] (ii) an ASGPR ligand attached to the 3′-end, wherein said ASGPR ligand comprises three GalNAc derivatives attached through a trivalent branched linker;
[0542] (iii) 2′-F modifications at positions 1, 3, 5, 7, 9 to 11, and 13, and 2′-OMe modifications at positions 2, 4, 6, 8, 12, and 14 to 21; and
[0543] (iv) phosphorothioate internucleotide linkages between nucleotide positions 1 and 2, and between nucleotide positions 2 and 3 (counting from the 5′ end);
[0544] and
   (b) an antisense strand having:
[0545] (i) a length of 23 nucleotides;
[0546] (ii) 2′-OMe modifications at positions 1, 3, 5 to 7, 9, 11 to 13, 15, 17 to 19, and 21 to 23, and 2′-F modifications at positions 2, 4, 8, 10, 14, 16, and 20 (counting from the 5′ end); and
[0547] (iii) phosphorothioate internucleotide linkages between nucleotide positions 1 and 2, between nucleotide positions 2 and 3, between nucleotide positions 21 and 22, and between nucleotide positions 22 and 23 (counting from the 5′ end);
   wherein the RNAi agents have a two nucleotide overhang at the 3′-end of the antisense strand, and a blunt end at the 5′-end of the antisense strand.

[0548] In another particular embodiment, a RNAi agentsof the present invention comprises:

(a) a sense strand having:
[0549] (i) a length of 21 nucleotides;
[0550] (ii) an ASGPR ligand attached to the 3′-end, wherein said ASGPR ligand comprises three GalNAc derivatives attached through a trivalent branched linker;
[0551] (iii) 2′-OMe modifications at positions 1, 2, 4, 6, 8, 12, 14, 15, 17, and 19 to 21, and 2′-F modifications at positions 3, 5, 7, 9 to 11, 13, 16, and 18; and
[0552] (iv) phosphorothioate internucleotide linkages between nucleotide positions 1 and 2, and between nucleotide positions 2 and 3 (counting from the 5′ end);
[0553] and
   (b) an antisense strand having:
[0554] (i) a length of 25 nucleotides;
[0555] (ii) 2′-OMe modifications at positions 1, 4, 6, 7, 9, 11 to 13, 15, 17, and 19 to 23, 2′-F modifications at positions 2, 3, 5, 8, 10, 14, 16, and 18, and desoxy-nucleotides (e.g. dT) at positions 24 and 25 (counting from the 5′ end); and
[0556] (iii) phosphorothioate internucleotide linkages between nucleotide positions 1 and 2, between nucleotide positions 2 and 3, between nucleotide positions 21 and 22, and between nucleotide positions 22 and 23 (counting from the 5′ end);
   wherein the RNAi agents have a four nucleotide overhang at the 3′-end of the antisense strand, and a blunt end at the 5′-end of the antisense strand.

[0557] In another particular embodiment, a RNAi agent of the present invention comprises:

(a) a sense strand having:
[0558] (i) a length of 21 nucleotides;
[0559] (ii) an ASGPR ligand attached to the 3′-end, wherein said ASGPR ligand comprises three GalNAc derivatives attached through a trivalent branched linker;
[0560] (iii) 2′-OMe modifications at positions 1 to 6, 8, and 12 to 21, and 2′-F modifications at positions 7, and 9 to 11; and
[0561] (iv) phosphorothioate internucleotide linkages between nucleotide positions 1 and 2, and between nucleotide positions 2 and 3 (counting from the 5′ end);
[0562] and
   (b) an antisense strand having:
[0563] (i) a length of 23 nucleotides;
[0564] (ii) 2′-OMe modifications at positions 1, 3 to 5, 7, 8, 10 to 13, 15, and 17 to 23, and 2′-F modifications at positions 2, 6, 9, 14, and 16 (counting from the 5′ end); and
[0565] (iii) phosphorothioate internucleotide linkages between nucleotide positions 1 and 2, between nucleotide positions 2 and 3, between nucleotide positions 21 and 22, and between nucleotide positions 22 and 23 (counting from the 5′ end);
   wherein the RNAi agents have a two nucleotide overhang at the 3′-end of the antisense strand, and a blunt end at the 5′-end of the antisense strand.

[0566] In another particular embodiment, a RNAi agent of the present invention comprises:

(a) a sense strand having:
[0567] (i) a length of 21 nucleotides;
[0568] (ii) an ASGPR ligand attached to the 3′-end, wherein said ASGPR ligand comprises three GalNAc derivatives attached through a trivalent branched linker;
[0569] (iii) 2′-OMe modifications at positions 1 to 6, 8, and 12 to 21, and 2′-F modifications at positions 7, and 9 to 11; and
[0570] (iv) phosphorothioate internucleotide linkages between nucleotide positions 1 and 2, and between nucleotide positions 2 and 3 (counting from the 5′ end);
[0571] and
   (b) an antisense strand having:
[0572] (i) a length of 23 nucleotides;
[0573] (ii) 2′-OMe modifications at positions 1, 3 to 5, 7, 10 to 13, 15, and 17 to 23, and 2′-F modifications at positions 2, 6, 8, 9, 14, and 16 (counting from the 5′ end); and
[0574] (iii) phosphorothioate internucleotide linkages between nucleotide positions 1 and 2, between nucleotide positions 2 and 3, between nucleotide positions 21 and 22, and between nucleotide positions 22 and 23 (counting from the 5′ end);
   wherein the RNAi agents have a two nucleotide overhang at the 3′-end of the antisense strand, and a blunt end at the 5′-end of the antisense strand.

[0575] In another particular embodiment, a RNAi agent of the present invention comprises:

(a) a sense strand having:
[0576] (i) a length of 19 nucleotides;
[0577] (ii) an ASGPR ligand attached to the 3′-end, wherein said ASGPR ligand comprises three GalNAc derivatives attached through a trivalent branched linker;
[0578] (iii) 2′-OMe modifications at positions 1 to 4, 6, and 10 to 19, and 2′-F modifications at positions 5, and 7 to 9; and
[0579] (iv) phosphorothioate internucleotide linkages between nucleotide positions 1 and 2, and between nucleotide positions 2 and 3 (counting from the 5′ end);
[0580] and
   (b) an antisense strand having:
[0581] (i) a length of 21 nucleotides;
[0582] (ii) 2′-OMe modifications at positions 1, 3 to 5, 7, 10 to 13, 15, and 17 to 21, and 2′-F modifications at positions 2, 6, 8, 9, 14, and 16 (counting from the 5′ end); and
[0583] (iii) phosphorothioate internucleotide linkages between nucleotide positions 1 and 2, between nucleotide positions 2 and 3, between nucleotide positions 19 and 20, and between nucleotide positions 20 and 21 (counting from the 5′ end);
   wherein the RNAi agents have a two nucleotide overhang at the 3′-end of the antisense strand, and a blunt end at the 5′-end of the antisense strand.

[0584] B. Single Stranded Antisense Polynucleotide Agents of the Invention

[0585] In one embodiment, a nucleic acid inhibitor for use in the methods of the invention is a single stranded antisense polynucleotide agent that targets LDHA and/or a single stranded antisense polynucleotide agent that targets HAO1.

[0586] Suitable antisense polynucleotide agent for use in the methods of the invention are known in the art and described in, for example, U.S. Patent Publication No. 2018/0092990 (Attorney Docket No. 121301-03602), the entire contents of which are incorporated herein by reference.

[0587] In certain specific embodiments, a nucleic acid inhibitor of the present invention is a single stranded antisense polynucleotide agent which inhibits the expression of an LDHA gene and is selected from the group of antisense sequence listed in any one of Tables 2-3. In some embodiments, a nucleic acid inhibitor of the present invention is a single stranded antisense polynucleotide agent which inhibits the expression of an HAO1 gene and is selected from the group of antisense sequence listed in any one of Tables 4-10. Any of these agents may further comprise a ligand.

[0588] The polynucleotide agents of the invention include a nucleotide sequence which is about 4 to about 50 nucleotides or less in length and which is about 80% complementary to at least part of an mRNA transcript of an LDHA gene and/or HAO1 gene. The use of these polynucleotide agents enables the targeted inhibition of RNA expression and/or activity of a corresponding gene in subjects, such as human subjects.

[0589] The polynucleotide agents, e.g., antisense polynucleotide agents, and compositions comprising such agents, of the invention target an LDHA gene and/or an HAO1 gene and inhibit the expression of the gene. In one embodiment, the polynucleotide agents inhibit the expression of the gene in a cell, such as a cell within a subject, e.g., a mammal, such as a human suffering from a kidney stone disease and carrying a heterozygous AGXT variant.

[0590] The polynucleotide agents of the invention include a region of complementarity which is complementary to at least a part of an mRNA formed in the expression of an LDHA gene and/or an HAO1 gene. The region of complementarity may be about 50 nucleotides or less in length (e.g., about 50, 49, 48, 47, 46, 45, 44, 43, 42, 41, 40, 39, 38, 37, 36, 35, 34, 33, 32, 31, 30, 29, 28, 27, 26, 25, 24, 23, 22, 21, 20, 19, 18, 17, 16, 15, 14, 13, 12, 11, 10, 9, 8, 7, 6, 5, or 4 nucleotides or less in length). Upon contact with a cell expressing the gene, the polynucleotide agent inhibits the expression of the gene (e.g., a human, a primate, a non-primate, or a bird LDHA gene and/or HAO1 gene) by at least about 10% as assayed by, for example, a PCR or branched DNA (bDNA)-based method, or by a protein-based method, such as by immunofluorescence analysis, using, for example, western Blotting or flow cytometric techniques.

[0591] The region of complementarity between a polynucleotide agent and a target sequence may be substantially complementary (e.g., there is a sufficient degree of complementarity between the polynucleotide agent and a target nucleic acid to so that they specifically hybridize and induce a desired effect), but is generally fully complementary to the target sequence. The target sequence can be derived from the sequence of an mRNA formed during the expression of an LDHA gene and/or an HAO1 gene.

[0592] In one aspect, an antisense polynucleotide agent, specifically hybridizes to a target nucleic acid molecule, such as the mRNA encoding LDHA, and comprises a contiguous nucleotide sequence which corresponds to the reverse complement of a nucleotide sequence of SEQ ID NOs:1, 3, 5, 7, or 9, or a fragment of SEQ ID NOs:1, 3, 5, 7, or 9.

[0593] In one aspect, an antisense polynucleotide agent, specifically hybridizes to a target nucleic acid molecule, such as the mRNA encoding HAO1, and comprises a contiguous nucleotide sequence which corresponds to the reverse complement of a nucleotide sequence of SEQ ID NO:21, or a fragment of SEQ ID NO:21.

[0594] In some embodiments, the polynucleotide agents of the invention may be substantially complementary to the target sequence. For example, a polynucleotide agent that is substantially complementary to the target sequence may include a contiguous nucleotide sequence comprising no more than 5 mismatches (e.g., no more than 1, no more than 2, no more than 3, no more than 4, or no more than 5 mismatches) when hybridizing to a target sequence, such as to the corresponding region of a nucleic acid which encodes a mammalian LDHA mRNA and/or a mammalian HAO1 mRNA. In some embodiments, the contiguous nucleotide sequence comprises no more than a single mismatch when hybridizing to the target sequence, such as the corresponding region of a nucleic acid which encodes a mammalian LDHA mRNA and/or a mammalian HAO1 mRNA.

[0595] In some embodiments, the polynucleotide agents of the invention that are substantially complementary to the target sequence comprise a contiguous nucleotide sequence which is at least about 80% complementary over its entire length to the equivalent region of the nucleotide sequence of SEQ ID NOs:1, 3, 5, 7, or 9, or a fragment of SEQ ID NOs:1, 3, 5, 7, or 9, such as about 85%, about 86%, about 87%, about 88%, about 89%, about 90%, about % 91%, about 92%, about 93%, about 94%, about 95%, about 96%, about 97%, about 98%, or about 99% complementary.

[0596] In some embodiments, a polynucleotide agent comprises a contiguous nucleotide sequence which is fully complementary over its entire length to the equivalent region of the nucleotide sequence of SEQ ID NOs:1, 3, 5, 7, or 9 (or a fragment of SEQ ID NOs:1, 3, 5, 7, or 9).

[0597] In some embodiments, the polynucleotide agents of the invention that are substantially complementary to the target sequence comprise a contiguous nucleotide sequence which is at least about 80% complementary over its entire length to the equivalent region of the nucleotide sequence of SEQ ID NO:21, or a fragment of SEQ ID NO:21, such as about 85%, about 86%, about 87%, about 88%, about 89%, about 90%, about % 91%, about 92%, about 93%, about 94%, about 95%, about 96%, about 97%, about 98%, or about 99% complementary.

[0598] In some embodiments, a polynucleotide agent comprises a contiguous nucleotide sequence which is fully complementary over its entire length to the equivalent region of the nucleotide sequence of SEQ ID NO:21 (or a fragment of SEQ ID NO:21).

[0599] A polynucleotide agent may comprise a contiguous nucleotide sequence of about 4 to about 50 nucleotides in length, e.g., 4, 5, 6, 7, 8, 9, 10, 11, 12, 13, 14, 15, 16, 17, 18, 19, 20, 21, 22, 23, 24, 25, 26, 27, 28, 29, 30, 31, 32, 33, 34, 35, 36, 37, 38, 39, 40, 41, 42, 43, 44, 45, 46, 47, 48, 49, or 50 nucleotides in length.

[0600] In some embodiments, a polynucleotide agent may comprise a contiguous nucleotide sequence of no more than 22 nucleotides, such as no more than 21 nucleotides, 20 nucleotides, 19 nucleotides, or no more than 18 nucleotides. In some embodiments the polynucleotide agenst of the invention comprises less than 20 nucleotides. In other embodiments, the polynucleotide agents of the invention comprise 20 nucleotides.

[0601] In certain aspects, a polynucleotide agent of the invention targeting LDHA includes a sequence selected from the group of antisense sequences provided in any one of Tables 2-3.

[0602] In certain aspects, a polynucleotide agent of the invention targeting HAO1 includes a sequence selected from the group of antisense sequences provided in any one of Tables 4-14.

[0603] It will be understood that, although some of the antisense sequences in Tables 2-14 are described as modified and/or conjugated sequences, a polynucleotide agent of the invention, may also comprise any one of the sequences set forth in Tables 2-14 that is un-modified, un-conjugated, and/or modified and/or conjugated differently than described therein.

[0604] By virtue of the nature of the nucleotide sequences provided in Tables 2-14, polynucleotide agents of the invention may include one of the sequences of Tables 2-14 minus only a few nucleotides on one or both ends and yet remain similarly effective as compared to the polynucleotide agents described above. Hence, polynucleotide agents having a sequence of at least 4, 5, 6, 7, 8, 9, 10, 11, 12, 13, 14, 15, 16, 17, 18, 19, 20, or more contiguous nucleotides derived from one of the sequences of Tables 2-14 and differing in their ability to inhibit the expression of the corresponding gene by not more than about 5, 10, 15, 20, 25, or 30% inhibition from an polynucleotide agent comprising the full sequence, are contemplated to be within the scope of the present invention.

[0605] In addition, the polynucleotide agents provided in Tables 2-14 identify a region(s) in an LDHA transcript and/or an HAO1 transcript that is susceptible to antisense inhibition (e.g., the regions in SEQ ID NO: 1 or SEQ ID NO:21 which the polynucleitde agents may target). As such, the present invention further features polynucleotide agents that target within one of these sites. As used herein, a polynucleotide agent is said to target within a particular site of an RNA transcript if the polynucleotide agent promotes antisense inhibition of the target at that site. Such a polynucleotide agent will generally include at least about 15 contiguous nucleotides from one of the sequences provided in Tables 2-14 coupled to additional nucleotide sequences taken from the region contiguous to the selected sequence in the HAO1 gene.

[0606] While a target sequence is generally about 4-50 nucleotides in length, there is wide variation in the suitability of particular sequences in this range for directing antisense inhibition of any given target RNA. Various software packages and the guidelines set out herein provide guidance for the identification of optimal target sequences for any given gene target, but an empirical approach can also be taken in which a “window” or “mask” of a given size (as a non-limiting example, 20 nucleotides) is literally or figuratively (including, e.g., in silico) placed on the target RNA sequence to identify sequences in the size range that can serve as target sequences. By moving the sequence “window” progressively one nucleotide upstream or downstream of an initial target sequence location, the next potential target sequence can be identified, until the complete set of possible sequences is identified for any given target size selected. This process, coupled with systematic synthesis and testing of the identified sequences (using assays as described herein or as known in the art) to identify those sequences that perform optimally can identify those RNA sequences that, when targeted with a polynucleotide agent, mediate the best inhibition of target gene expression. Thus, while the sequences identified, for example, in Tables 2-14, represent effective target sequences, it is contemplated that further optimization of antisense inhibition efficiency can be achieved by progressively “walking the window” one nucleotide upstream or downstream of the given sequences to identify sequences with equal or better inhibition characteristics.

[0607] Further, it is contemplated that for any sequence identified, e.g., in Tables 2-14, further optimization could be achieved by systematically either adding or removing nucleotides to generate longer or shorter sequences and testing those sequences generated by walking a window of the longer or shorter size up or down the target RNA from that point. Again, coupling this approach to generating new candidate targets with testing for effectiveness of polynucleotide agents based on those target sequences in an inhibition assay as known in the art and/or as described herein can lead to further improvements in the efficiency of inhibition. Further still, such optimized sequences can be adjusted by, e.g., the introduction of modified nucleotides as described herein or as known in the art, addition or changes in length, or other modifications as known in the art and/or discussed herein to further optimize the molecule (e.g., increasing serum stability or circulating half-life, increasing thermal stability, enhancing transmembrane delivery, targeting to a particular location or cell type, increasing interaction with silencing pathway enzymes, increasing release from endosomes) as an expression inhibitor.

[0608] i. Single Stranded Polynucleotide Agents Comprising Motifs

[0609] In certain embodiments of the invention, at least one of the contiguous nucleotides of the antisense polynucleotide agents of the invention may be a modified nucleotide. Suitable nucleotide modifications for use in the single stranded antisense polynucletiude agents of the invention are described in Section A(ii), above. In one embodiment, the modified nucleotide comprises one or more modified sugars. In other embodiments, the modified nucleotide comprises one or more modified nucleobases. In yet other embodiments, the modified nucleotide comprises one or more modified internucleoside linkages. In some embodiments, the modifications (sugar modifications, nucleobase modifications, and/or linkage modifications) define a pattern or motif. In one embodiment, the patterns of modifications of sugar moieties, internucleoside linkages, and nucleobases are each independent of one another.

[0610] Polynucleotide agents having modified oligonucleotides arranged in patterns, or motifs may, for example, confer to the agents properties such as enhanced inhibitory activity, increased binding affinity for a target nucleic acid, or resistance to degradation by in vivo nucleases. For example, such agents may contain at least one region modified so as to confer increased resistance to nuclease degradation, increased cellular uptake, increased binding affinity for the target nucleic acid, and/or increased inhibitory activity. A second region of such agents may optionally serve as a substrate for the cellular endonuclease RNase H, which cleaves the RNA strand of an RNA:DNA duplex.

[0611] An exemplary polynucleotide agent having modified oligonucleotides arranged in patterns, or motifs is a gapmer. In a “gapmer”, an internal region or “gap” having a plurality of linked nucleotides that supports RNaseH cleavage is positioned between two external flanking regions or “wings” having a plurality of linked nucleotides that are chemically distinct from the linked nucleotides of the internal region. The gap segment generally serves as the substrate for endonuclease cleavage, while the wing segments comprise modified nucleotides.

[0612] The three regions of a gapmer motif (the 5′-wing, the gap, and the 3′-wing) form a contiguous sequence of nucleotides and may be described as “-X-Y-Z”, wherein “X” represents the length of the 5-wing, “Y” represents the length of the gap, and “Z” represents the length of the 3′-wing. In one embodiment, a gapmer described as “X-Y-Z” has a configuration such that the gap segment is positioned immediately adjacent to each of the 5′ wing segment and the 3′ wing segment. Thus, no intervening nucleotides exist between the 5′ wing segment and gap segment, or the gap segment and the 3′ wing segment. Any of the compounds, e.g., antisense compounds, described herein can have a gapmer motif. In some embodiments, X and Z are the same, in other embodiments they are different.

[0613] In certain embodiments, the regions of a gapmer are differentiated by the types of modified nucleotides in the region. The types of modified nucleotides that may be used to differentiate the regions of a gapmer, in some embodiments, include β-D-ribonucleotides, β-D-deoxyribonucleotides, 2′-modified nucleotides, e.g., 2′-modified nucleotides (e.g., 2′-MOE, and 2′-O—CH₃), and bicyclic sugar modified nucleotides (e.g., those having a 4′-(CH2)n-O-2′ bridge, where n=1 or n=2). In one embodiment, at least some of the modified nucleotides of each of the wings may differ from at least some of the modified nucleotides of the gap. For example, at least some of the modified nucleotides of each wing that are closest to the gap (the 3′-most nucleotide of the 5′-wing and the 5′-most nucleotide of the 3-wing) differ from the modified nucleotides of the neighboring gap nucleotides, thus defining the boundary between the wings and the gap. In certain embodiments, the modified nucleotides within the gap are the same as one another. In certain embodiments, the gap includes one or more modified nucleotides that differ from the modified nucleotides of one or more other nucleotides of the gap.

[0614] The length of the 5′-wing (X) of a gapmer may be 1 to 6 nucleotides in length, e.g., 2 to 6, 2 to 5, 3 to 6, 3 to 5, 1 to 5, 1 to 4, 1 to 3, 2 to 4 nucleotides in length, e.g., 1, 2, 3, 4, 5, or 6 nucleotides in length.

[0615] The length of the 3′-wing (Z) of a gapmer may be 1 to 6 nucleotides in length, e.g., 2 to 6, 2-5, 3 to 6, 3 to 5, 1 to 5, 1 to 4, 1 to 3, 2 to 4 nucleotides in length, e.g., 1, 2, 3, 4, 5, or 6 nucleotides in length.

[0616] The length of the gap (Y) of a gapmer may be 5 to 14 nucleotides in length, e.g., 5 to 13, 5 to 12, 5 to 11, 5 to 10, 5 to 9, 5 to 8, 5 to 7, 5 to 6, 6 to 14, 6 to 13, 6 to 12, 6 to 11, 6 to 10, 6 to 9, 6 to 8, 6 to 7, 7 to 14, 7 to 13, 7 to 12, 7 to 11, 7 to 10, 7 to 9, 7 to 8, 8 to 14, 8 to 13, 8 to 12, 8 to 11, 8 to 10, 8 to 9, 9 to 14, 9 to 13, 9 to 12, 9 to 11, 9 to 10, 10 to 14, 10 to 13, 10 to 12, 10 to 11, 11 to 14, 11 to 13, 11 to 12, 12 to 14, 12 to 13, or 13 to 14 nucleotides in length, e.g., 5, 6, 7, 8, 9, 10, 11, 12, 13, or 14 nucleotides in length.

[0617] In some embodiments of the invention X consists of 2, 3, 4, 5 or 6 nucleotides, Y consists of 7, 8, 9, 10, 11, or 12 nucleotides, and Z consists of 2, 3, 4, 5 or 6 nucleotides. Such gapmers include (X-Y-Z) 2-7-2, 2-7-3, 2-7-4, 2-7-5, 2-7-6, 3-7-2, 3-7-3, 3-7-4, 3-7-5, 3-7-6, 4-7-3, 4-7-4, 4-7-5, 4-7-6, 5-7-3, 5-7-4, 5-7-5, 5-7-6, 6-7-3, 6-7-4, 6-7-5, 6-7-6, 3-7-3, 3-7-4, 3-7-5, 3-7-6, 4-7-3, 4-7-4, 4-7-5, 4-7-6, 5-7-3, 5-7-4, 5-7-5, 5-7-6, 6-7-3, 6-7-4, 6-7-5, 6-7-6, 2-8-2, 2-8-3, 2-8-4, 2-8-5, 2-8-6, 3-8-2, 3 3, 3-8-4, 3-8-5, 3-8-6, 4-8-3, 4-8-4, 4-8-5, 4-8-6, 5-8-3, 5-8-4, 5-8-5, 5-8-6, 6-8-3, 6-8-4, 6-8-5, 6-8-6, 2-9-2, 2-9-3, 2-9-4, 2-9-5, 2-9-6, 3-9-2, 3-9-3, 3-9-4, 3-9-5, 3-9-6, 4-9-3, 4-9-4, 4-9-5, 4-9-6, 5-9-3, 5-9-4, 5-9-5, 5-9-6, 6-9-3, 6-9-4, 6-9-5, 6-9-6, 2-10-2, 2-10-3, 2-10-4, 2-10-5, 2-10-6, 3-10-2, 3-10-3, 3-10-4, 3-10-5, 3-10-6, 4-10-3, 4-10-4, 4-10-5, 4-10-6, 5-10-3, 5-10-4, 5-10-5, 5-10-6, 6-10-3, 6-10-4, 6-10-5, 6-10-6, 2-11-2, 2-11-3, 2-11-4, 2-11-5, 2-11-6, 3-11-2, 3-11-3, 3-11-4, 3-11-5, 3-11-6, 4-11-3, 4-11-4, 4-11-5, 4-11-6, 5-11-3, 5-11-4, 5-11-5, 5-11-6, 6-11-3, 6-11-4, 6-11-5, 6-11-6, 2-12-2, 2-12-3, 2-12-4, 2-12-5, 2-12-6, 3-12-2, 3-12-3, 3-12-4, 3-12-5, 3-12-6, 4-12-3, 4-12-4, 4-12-5, 4-12-6, 5-12-3, 5-12-4, 5-12-5, 5-12-6, 6-12-3, 6-12-4, 6-12-5, or 6-12-6.

[0618] In some embodiments of the invention, polynucleotide agents of the invention include a 5-10-5 gapmer motif. In other embodiments of the invention, polynucleotide agents of the invention include a 4-10-4 gapmer motif. In another embodiment of the invention, polynucleotide agents of the invention include a 3-10-3 gapmer motif. In yet other embodiments of the invention, polynucleotide agents of the invention include a 2-10-2 gapmer motif.

[0619] The 5′-wing and/or 3′-wing of a gapmer may independently include 1-6 modified nucleotides, e.g., 1, 2, 3, 4, 5, or 6 modified nucleotides.

[0620] In some embodiment, the 5′-wing of a gapmer includes at least one modified nucleotide. In one embodiment, the 5′-wing of a gapmer comprises at least two modified nucleotides. In another embodiment, the 5′-wing of a gapmer comprises at least three modified nucleotides. In yet another embodiment, the 5′-wing of a gapmer comprises at least four modified nucleotides. In another embodiment, the 5′-wing of a gapmer comprises at least five modified nucleotides. In certain embodiments, each nucleotide of the 5′-wing of a gapmer is a modified nucleotide.

[0621] In some embodiments, the 3′-wing of a gapmer includes at least one modified nucleotide. In one embodiment, the 3′-wing of a gapmer comprises at least two modified nucleotides. In another embodiment, the 3′-wing of a gapmer comprises at least three modified nucleotides. In yet another embodiment, the 3′-wing of a gapmer comprises at least four modified nucleotides. In another embodiment, the 3′-wing of a gapmer comprises at least five modified nucleotides. In certain embodiments, each nucleotide of the 3′-wing of a gapmer is a modified nucleotide.

[0622] In certain embodiments, the regions of a gapmer are differentiated by the types of sugar moieties of the nucleotides. In one embodiment, the nucleotides of each distinct region comprise uniform sugar moieties. In other embodiments, the nucleotides of each distinct region comprise different sugar moieties. In certain embodiments, the sugar nucleotide modification motifs of the two wings are the same as one another. In certain embodiments, the sugar nucleotide modification motifs of the 5′-wing differs from the sugar nucleotide modification motif of the 3′-wing.

[0623] The 5′-wing of a gapmer may include 1-6 modified nucleotides, e.g., 1, 2, 3, 4, 5, or 6 modified nucleotides.

[0624] In one embodiment, at least one modified nucleotide of the 5′-wing of a gapmer is a bicyclic nucleotide, such as a constrained ethyl nucleotide, or an LNA. In another embodiment, the 5′-wing of a gapmer includes 2, 3, 4, or 5 bicyclic nucleotides. In some embodiments, each nucleotide of the 5′-wing of a gapmer is a bicyclic nucleotide.

[0625] In one embodiment, the 5′-wing of a gapmer includes at least 1, 2, 3, 4, or 5 constrained ethyl nucleotides. In some embodiments, each nucleotide of the 5′-wing of a gapmer is a constrained ethyl nucleotide.

[0626] In one embodiment, the 5′-wing of a gapmer comprises at least one LNA nucleotide. In another embodiment, the 5′-wing of a gapmer includes 2, 3, 4, or 5 LNA nucleotides. In other embodiments, each nucleotide of the 5′-wing of a gapmer is an LNA nucleotide.

In certain embodiments, at least one modified nucleotide of the 5′-wing of a gapmer is a non-bicyclic modified nucleotide, e.g., a 2 ‘-substituted nucleotide. A “2’-substituted nucleotide” is a nucleotide comprising a modification at the 2′-position which is other than H or OH, such as a 2′-OMe nucleotide, or a 2′-MOE nucleotide. In one embodiment, the 5′-wing of a gapmer comprises 2, 3, 4, or 5 2 ‘-substituted nucleotides. In one embodiment, each nucleotide of the 5’-wing of a gapmer is a 2′-substituted nucleotide.

[0627] In one embodiment, the 5′-wing of a gapmer comprises at least one 2′-OMe nucleotide. In one embodiment, the 5′-wing of a gapmer comprises at least 2, 3, 4, or 5 2′-OMe nucleotides. In one embodiment, each of the nucleotides of the 5′-wing of a gapmer comprises a 2′-OMe nucleotide.

[0628] In one embodiment, the 5′-wing of a gapmer comprises at least one 2′-MOE nucleotide. In one embodiment, the 5′-wing of a gapmer comprises at least 2, 3, 4, or 5 2′-MOE nucleotides. In one embodiment, each of the nucleotides of the 5′-wing of a gapmer comprises a 2′-MOE nucleotide. In certain embodiments, the 5′-wing of a gapmer comprises at least one 2′-deoxynucleotide. In certain embodiments, each nucleotide of the 5′-wing of a gapmer is a 2′-deoxynucleotide. In a certain embodiments, the 5′-wing of a gapmer comprises at least one ribonucleotide. In certain embodiments, each nucleotide of the 5′-wing of a gapmer is a ribonucleotide.

[0629] The 3′-wing of a gapmer may include 1-6 modified nucleotides, e.g., 1, 2, 3, 4, 5, or 6 modified nucleotides.

[0630] In one embodiment, at least one modified nucleotide of the 3′-wing of a gapmer is a bicyclic nucleotide, such as a constrained ethyl nucleotide, or an LNA. In another embodiment, the 3′-wing of a gapmer includes 2, 3, 4, or 5 bicyclic nucleotides. In some embodiments, each nucleotide of the 3′-wing of a gapmer is a bicyclic nucleotide.

[0631] In one embodiment, the 3′-wing of a gapmer includes at least one constrained ethyl nucleotide. In another embodiment, the 3′-wing of a gapmer includes 2, 3, 4, or 5 constrained ethyl nucleotides. In some embodiments, each nucleotide of the 3′-wing of a gapmer is a constrained ethyl nucleotide.

[0632] In one embodiment, the 3′-wing of a gapmer comprises at least one LNA nucleotide. In another embodiment, the 3′-wing of a gapmer includes 2, 3, 4, or 5 LNA nucleotides. In other embodiments, each nucleotide of the 3′-wing of a gapmer is an LNA nucleotide.

[0633] In certain embodiments, at least one modified nucleotide of the 3′-wing of a gapmer is a non-bicyclic modified nucleotide, e.g., a 2 ‘-substituted nucleotide. In one embodiment, the 3’-wing of a gapmer comprises 2, 3, 4, or 5 2 ‘-substituted nucleotides. In one embodiment, each nucleotide of the 3’-wing of a gapmer is a 2 ‘-substituted nucleotide.

[0634] In one embodiment, the 3’-wing of a gapmer comprises at least one 2′-OMe nucleotide. In one embodiment, the 3′-wing of a gapmer comprises at least 2, 3, 4, or 5 2′-OMe nucleotides. In one embodiment, each of the nucleotides of the 3′-wing of a gapmer comprises a 2′-OMe nucleotide. In one embodiment, the 3′-wing of a gapmer comprises at least one 2′-MOE nucleotide. In one embodiment, the 3′-wing of a gapmer comprises at least 2, 3, 4, or 5 2′-MOE nucleotides. In one embodiment, each of the nucleotides of the 3′-wing of a gapmer comprises a 2′-MOE nucleotide. In certain embodiments, the 3′-wing of a gapmer comprises at least one 2′-deoxynucleotide. In certain embodiments, each nucleotide of the 3′-wing of a gapmer is a 2′-deoxynucleotide. In a certain embodiments, the 3′-wing of a gapmer comprises at least one ribonucleotide. In certain embodiments, each nucleotide of the 3′-wing of a gapmer is a ribonucleotide.

[0635] The gap of a gapmer may include 5-14 modified nucleotides, e.g., 5, 6, 7, 8, 9, 10, 11, 12, 13, or 14 modified nucleotides.

[0636] In one embodiment, the gap of a gapmer comprises at least one 5-methylcytosine. In one embodiment, the gap of a gapmer comprises at least 2, 3, 4, 5, 6, 7, 8, 9, 10, 11, 12, or 13 5-methylcytosines. In one embodiment, all of the nucleotides of the the gap of a gapmer are 5-methylcytosines.

[0637] In one embodiment, the gap of a gapmer comprises at least one 2′-deoxynucleotide. In one embodiment, the gap of a gapmer comprises at least 2, 3, 4, 5, 6, 7, 8, 9, 10, 11, 12, or 13 2′-deoxynucleotides. In one embodiment, all of the nucleotides of the the gap of a gapmer are 2′-deoxynucleotides.

[0638] A gapmer may include one or more modified internucleotide linkages. In some embodiments, a gapmer includes one or more phosphodiester internucleotide linkages. In other embodiments, a gapmer includes one or more phosphorothioate internucleotide linkages.

[0639] In one embodiment, each nucleotide of a 5′-wing of a gapmer are linked via a phosphorothioate internucleotide linkage. In another embodiment, each nucleotide of a 3′-wing of a gapmer are linked via a phosphorothioate internucleotide linkage. In yet another embodiment, each nucleotide of a gap segment of a gapmer is linked via a phosphorothioate internucleotide linkage. In one embodiment, all of the nucleotides in a gapmer are linked via phosphorothioate internucleotide linkages.

[0640] In one embodiment, a polynucleotide agent comprises a gap segment of ten 2′-deoxyribonucleotides positioned immediately adjacent to and between a 5′-wing segment comprising five nucleotides and a 3′-wing segment comprising 5 nucleotides.

[0641] In another embodiment, a polynucleotide agent comprises a gap segment of ten 2′-deoxyribonucleotides positioned immediately adjacent to and between a 5′-wing segment comprising four nucleotides and a 3′-wing segment comprising four nucleotides.

[0642] In another embodiment, a polynucleotide agent comprises a gap segment of ten 2′-deoxyribonucleotides positioned immediately adjacent to and between a 5′-wing segment comprising three nucleotides and a 3′-wing segment comprising three nucleotides.

[0643] In another embodiment, a polynucleotide agent comprises a gap segment of ten 2′-deoxyribonucleotides positioned immediately adjacent to and between a 5′-wing segment comprising two nucleotides and a 3′-wing segment comprising two nucleotides.

[0644] In one embodiment, each nucleotide of a 5-wing flanking a gap segment of 10 2′-deoxyribonucleotides comprises a modified nucleotide. In another embodiment, each nucleotide of a 3-wing flanking a gap segment of 10 2′-deoxyribonucleotides comprises a modified nucleotide. In one embodiment, each of the modified 5′-wing nucleotides and each of the modified 3′-wing nucleotides comprise a 2′-sugar modification. In one embodiment, the 2′-sugar modification is a 2′-OMe modification. In another embodiment, the 2′-sugar modification is a 2′-MOE modification. In one embodiment, each of the modified 5′-wing nucleotides and each of the modified 3′-wing nucleotides comprise a bicyclic nucleotide. In one embodiment, the bicyclic nucleotide is a constrained ethyl nucleotide. In another embodiment, the bicyclic nucleotide is an LNA nucleotide.

[0645] In one embodiment, each cytosine in a polynucleotide agent is a 5-methylcytosine.

[0646] In one embodiment, a polynucleotide agent comprises a gap segment of ten 2′-deoxyribonucleotides positioned immediately adjacent to and between a 5′-wing segment comprising five nucleotides comprising a 2′OMe modification and a 3′-wing segment comprising five nucleotides comprising a 2′OMe modification, wherein each internucleotide linkage of the agent is a phosphorothioate linkage. In one embodiment, each cytosine of the agent is a 5-methylcytosine. In one embodiment, the agent further comprises a ligand.

[0647] In one embodiment, a polynucleotide agent of the invention comprises a gap segment of ten 2′-deoxyribonucleotides positioned immediately adjacent to and between a 5′-wing segment comprising five nucleotides comprising a 2′MOE modification and a 3′-wing segment comprising five nucleotides comprising a 2′MOE modification, wherein each internucleotide linkage of the agent is a phosphorothioate linkage. In one embodiment, each cytosine of the agent is a 5-methylcytosine. In one embodiment, the agent further comprises a ligand.

[0648] In one embodiment, a polynucleotide agent of the invention comprises a gap segment of ten 2′-deoxyribonucleotides positioned immediately adjacent to and between a 5′-wing segment comprising five constrained ethyl nucleotides and a 3′-wing segment comprising five constrained ethyl nucleotides, wherein each internucleotide linkage of the agent is a phosphorothioate linkage. In one embodiment, each cytosine of the agent is a 5-methylcytosine.

[0649] In one embodiment, a polynucleotide agent of the invention comprises a gap segment of ten 2′-deoxyribonucleotides positioned immediately adjacent to and between a 5′-wing segment comprising five LNA nucleotides and a 3′-wing segment comprising five LNA nucleotides, wherein each internucleotide linkage of the agent is a phosphorothioate linkage. In one embodiment, each cytosine of the agent is a 5-methylcytosine.

[0650] In one embodiment, a polynucleotide agent of the invention comprises a gap segment of ten 2′-deoxyribonucleotides positioned immediately adjacent to and between a 5′-wing segment comprising four nucleotides comprising a 2′OMe modification and a 3′-wing segment comprising four nucleotides comprising a 2′OMe modification, wherein each internucleotide linkage of the agent is a phosphorothioate linkage. In one embodiment, each cytosine of the agent is a 5-methylcytosine. In one embodiment, a polynucleotide agent tof the invention comprises a gap segment of ten 2′-deoxyribonucleotides positioned immediately adjacent to and between a 5′-wing segment comprising four nucleotides comprising a 2′MOE modification and a 3′-wing segment comprising four nucleotides comprising a 2′MOE modification, wherein each internucleotide linkage of the agent is a phosphorothioate linkage. In one embodiment, each cytosine of the agent is a 5-methylcytosine. In one embodiment, a polynucleotide agent of the invention comprises a gap segment of ten 2′-deoxyribonucleotides positioned immediately adjacent to and between a 5′-wing segment comprising four constrained ethyl nucleotides and a 3′-wing segment comprising four constrained ethyl nucleotides, wherein each internucleotide linkage of the agent is a phosphorothioate linkage. In one embodiment, each cytosine of the agent is a 5-methylcytosine.

[0651] In one embodiment, a polynucleotide agent of the invention comprises a gap segment of ten 2′-deoxyribonucleotides positioned immediately adjacent to and between a 5′-wing segment comprising four LNA nucleotides and a 3′-wing segment comprising four LNA nucleotides, wherein each internucleotide linkage of the agent is a phosphorothioate linkage. In one embodiment, each cytosine of the agent is a 5-methylcytosine.

[0652] In one embodiment, a polynucleotide agent of the invention comprises a gap segment of ten 2′-deoxyribonucleotides positioned immediately adjacent to and between a 5′-wing segment comprising three nucleotides comprising a 2′OMe modification and a 3′-wing segment comprising three nucleotides comprising a 2′OMe modification, wherein each internucleotide linkage of the agent is a phosphorothioate linkage. In one embodiment, each cytosine of the agent is a 5-methylcytosine.

[0653] In one embodiment, a polynucleotide agent of the invention comprises a gap segment of ten 2′-deoxyribonucleotides positioned immediately adjacent to and between a 5′-wing segment comprising three nucleotides comprising a 2′MOE modification and a 3′-wing segment comprising three nucleotides comprising a 2′MOE modification, wherein each internucleotide linkage of the agent is a phosphorothioate linkage. In one embodiment, each cytosine of the agent is a 5-methylcytosine.

[0654] In one embodiment, a polynucleotide agent of the invention comprises a gap segment of ten 2′-deoxyribonucleotides positioned immediately adjacent to and between a 5′-wing segment comprising three constrained ethyl nucleotides and a 3′-wing segment comprising three constrained ethyl nucleotides, wherein each internucleotide linkage of the agent is a phosphorothioate linkage. In one embodiment, each cytosine of the agent is a 5-methylcytosine.

[0655] In one embodiment, a polynucleotide agent of the invention comprises a gap segment of ten 2′-deoxyribonucleotides positioned immediately adjacent to and between a 5′-wing segment comprising three LNA nucleotides and a 3′-wing segment comprising three LNA nucleotides, wherein each internucleotide linkage of the agent is a phosphorothioate linkage. In one embodiment, each cytosine of the agent is a 5-methylcytosine.

[0656] In one embodiment, a polynucleotide agent of the invention comprises a gap segment of ten 2′-deoxyribonucleotides positioned immediately adjacent to and between a 5′-wing segment comprising two nucleotides comprising a 2′OMe modification and a 3′-wing segment comprising two nucleotides comprising a 2′OMe modification, wherein each internucleotide linkage of the agent is a phosphorothioate linkage. In one embodiment, each cytosine of the agent is a 5-methylcytosine.

[0657] In one embodiment, a polynucleotide agent of the invention comprises a gap segment of ten 2′-deoxyribonucleotides positioned immediately adjacent to and between a 5′-wing segment comprising two nucleotides comprising a 2′MOE modification and a 3′-wing segment comprising two nucleotides comprising a 2′MOE modification, wherein each internucleotide linkage of the agent is a phosphorothioate linkage. In one embodiment, each cytosine of the agent is a 5-methylcytosine.

[0658] In one embodiment, a polynucleotide agent of the invention comprises a gap segment of ten 2′-deoxyribonucleotides positioned immediately adjacent to and between a 5′-wing segment comprising two constrained ethyl nucleotides and a 3′-wing segment comprising two constrained ethyl nucleotides, wherein each internucleotide linkage of the agent is a phosphorothioate linkage. In one embodiment, each cytosine of the agent is a 5-methylcytosine.

[0659] In one embodiment, a polynucleotide agent of the invention comprises a gap segment of ten 2′-deoxyribonucleotides positioned immediately adjacent to and between a 5′-wing segment comprising two LNA nucleotides and a 3′-wing segment comprising two LNA nucleotides, wherein each internucleotide linkage of the agent is a phosphorothioate linkage. In one embodiment, each cytosine of the agent is a 5-methylcytosine.

[0660] Further gapmer designs suitable for use in the agents, compositions, and methods of the invention are disclosed in, for example, U.S. Pat. Nos. 7,687,617 and 8,580,756; U.S. Patent Publication Nos. 20060128646, 20090209748, 20140128586, 20140128591, 20100210712, and 20080015162A1; and International Publication No. WO 2013/159108, the entire content of each of which are incorporated herein by reference.

[0661] C. Nucleic Acid Inhibitors Conjugated to Ligands

[0662] Another modification of a nucleic acid inhibitor of the invention involves chemically linking to the nucleic acid inhibitor one or more ligands, moieties or conjugates that enhance the activity, cellular distribution or cellular uptake of the nucleic acid inhibitor. Such moieties include but are not limited to lipid moieties such as a cholesterol moiety (Letsinger et al., (1989) Proc. Natl. Acid. Sci. USA, 86: 6553-6556), cholic acid (Manoharan et al., (1994) Biorg. Med. Chem. Let., 4:1053-1060), a thioether, e.g., beryl-S-tritylthiol (Manoharan et al., (1992) Ann. N.Y. Acad. Sci., 660:306-309; Manoharan et al., (1993) Biorg. Med. Chem. Let., 3:2765-2770), a thiocholesterol (Oberhauser et al., (1992) Nucl. Acids Res., 20:533-538), an aliphatic chain, e.g., dodecandiol or undecyl residues (Saison-Behmoaras et al., (1991) EMBO J, 10:1111-1118; Kabanov et al., (1990) FEBS Lett., 259:327-330; Svinarchuk et al., (1993) Biochimie, 75:49-54), a phospholipid, e.g., di-hexadecyl-rac-glycerol or triethyl-ammonium 1,2-di-O-hexadecyl-rac-glycero-3-phosphonate (Manoharan et al., (1995) Tetrahedron Lett., 36:3651-3654; Shea et al., (1990) Nucl. Acids Res., 18:3777-3783), a polyamine or a polyethylene glycol chain (Manoharan et al., (1995) Nucleosides & Nucleotides, 14:969-973), or adamantane acetic acid (Manoharan et al., (1995) Tetrahedron Lett., 36:3651-3654), a palmityl moiety (Mishra et al., (1995) Biochim. Biophys. Acta,1264:229-237), or an octadecylamine or hexylamino-carbonyloxycholesterol moiety (Crooke et al., (1996) J. Pharmacol. Exp. Ther., 277:923-937).

[0663] In embodiments in which a first dsRNA agent targeting LDHA and a second dsRNA agent targeting HAO1 are covalently attached (i.e., a dual targeting RNAi agent described herein), one or both of the dsRNA agents may independently comprise one or more ligands.

[0664] In one embodiment, a ligand alters the distribution, targeting or lifetime of a nucleic acid inhibitor into which it is incorporated. In preferred embodiments a ligand provides an enhanced affinity for a selected target, e.g., molecule, cell or cell type, compartment, e.g., a cellular or organ compartment, tissue, organ or region of the body, as, e.g., compared to a species absent such a ligand. Preferred ligands will not take part in duplex pairing in a duplexed nucleic acid.

[0665] Ligands can include a naturally occurring substance, such as a protein (e.g., human serum albumin (HSA), low-density lipoprotein (LDL), or globulin); carbohydrate (e.g., a dextran, pullulan, chitin, chitosan, inulin, cyclodextrin, N-acetylglucosamine, N-acetylgalactosamine or hyaluronic acid); or a lipid. The ligand can also be a recombinant or synthetic molecule, such as a synthetic polymer, e.g., a synthetic polyamino acid. Examples of polyamino acids include polyamino acid is a polylysine (PLL), poly L-aspartic acid, poly L-glutamic acid, styrene-maleic acid anhydride copolymer, poly(L-lactide-co-glycolied) copolymer, divinyl ether-maleic anhydride copolymer, N-(2-hydroxypropyl)methacrylamide copolymer (HMPA), polyethylene glycol (PEG), polyvinyl alcohol (PVA), polyurethane, poly(2-ethylacryllic acid), N-isopropylacrylamide polymers, or polyphosphazine. Example of polyamines include: polyethylenimine, polylysine (PLL), spermine, spermidine, polyamine, pseudopeptide-polyamine, peptidomimetic polyamine, dendrimer polyamine, arginine, amidine, protamine, cationic lipid, cationic porphyrin, quaternary salt of a polyamine, or an alpha helical peptide.

[0666] Ligands can also include targeting groups, e.g., a cell or tissue targeting agent, e.g., a lectin, glycoprotein, lipid or protein, e.g., an antibody, that binds to a specified cell type such as a kidney cell. A targeting group can be a thyrotropin, melanotropin, lectin, glycoprotein, surfactant protein A, Mucin carbohydrate, multivalent lactose, multivalent galactose, N-acetyl-galactosamine, N-acetyl-gulucosamine multivalent mannose, multivalent fucose, glycosylated polyaminoacids, multivalent galactose, transferrin, bisphosphonate, polyglutamate, polyaspartate, a lipid, cholesterol, a steroid, bile acid, folate, vitamin B12, vitamin A, biotin, or an RGD peptide or RGD peptide mimetic.

[0667] Other examples of ligands include dyes, intercalating agents (e.g. acridines), cross-linkers (e.g. psoralene, mitomycin C), porphyrins (TPPC4, texaphyrin, Sapphyrin), polycyclic aromatic hydrocarbons (e.g., phenazine, dihydrophenazine), artificial endonucleases (e.g. EDTA), lipophilic molecules, e.g., cholesterol, cholic acid, adamantane acetic acid, 1-pyrene butyric acid, dihydrotestosterone, 1,3-Bis-O(hexadecyl)glycerol, geranyloxyhexyl group, hexadecylglycerol, borneol, menthol, 1,3-propanediol, heptadecyl group, palmitic acid, myristic acid,O3-(oleoyl)lithocholic acid, O3-(oleoyl)cholenic acid, dimethoxytrityl, or phenoxazine) and peptide conjugates (e.g., antennapedia peptide, Tat peptide), alkylating agents, phosphate, amino, mercapto, PEG (e.g., PEG-40K), MPEG, [MPEG]₂, polyamino, alkyl, substituted alkyl, radiolabeled markers, enzymes, haptens (e.g. biotin), transport/absorption facilitators (e.g., aspirin, vitamin E, folic acid), synthetic ribonucleases (e.g., imidazole, bisimidazole, histamine, imidazole clusters, acridine-imidazole conjugates, Eu3+ complexes of tetraazamacrocycles), dinitrophenyl, HRP, or AP.

[0668] Ligands can be proteins, e.g., glycoproteins, or peptides, e.g., molecules having a specific affinity for a co-ligand, or antibodies e.g., an antibody, that binds to a specified cell type such as a hepatic cell. Ligands can also include hormones and hormone receptors. They can also include non-peptidic species, such as lipids, lectins, carbohydrates, vitamins, cofactors, multivalent lactose, multivalent galactose, N-acetyl-galactosamine, N-acetyl-gulucosamine multivalent mannose, or multivalent fucose. The ligand can be, for example, a lipopolysaccharide, an activator of p38 MAP kinase, or an activator of NF-κB.

[0669] The ligand can be a substance, e.g., a drug, which can increase the uptake of the nucleic acid inhibitor into the cell, for example, by disrupting the cell's cytoskeleton, e.g., by disrupting the cell's microtubules, microfilaments, and/or intermediate filaments. The drug can be, for example, taxon, vincristine, vinblastine, cytochalasin, nocodazole, japlakinolide, latrunculin A, phalloidin, swinholide A, indanocine, or myoservin.

[0670] In some embodiments, a ligand attached to a nucleic acid inhibitor as described herein acts as a pharmacokinetic modulator (PK modulator). PK modulators include lipophiles, bile acids, steroids, phospholipid analogues, peptides, protein binding agents, PEG, vitamins etc. Exemplary PK modulators include, but are not limited to, cholesterol, fatty acids, cholic acid, lithocholic acid, dialkylglycerides, diacylglyceride, phospholipids, sphingolipids, naproxen, ibuprofen, vitamin E, biotin etc. Oligonucleotides that comprise a number of phosphorothioate linkages are also known to bind to serum protein, thus short oligonucleotides, e.g., oligonucleotides of about 5 bases, 10 bases, 15 bases or 20 bases, comprising multiple of phosphorothioate linkages in the backbone are also amenable to the present invention as ligands (e.g. as PK modulating ligands). In addition, aptamers that bind serum components (e.g. serum proteins) are also suitable for use as PK modulating ligands in the embodiments described herein.

[0671] Ligand-conjugated nucleic acid inhibitors of the invention may be synthesized by the use of an oligonucleotide that bears a pendant reactive functionality, such as that derived from the attachment of a linking molecule onto the oligonucleotide (described below). This reactive oligonucleotide may be reacted directly with commercially-available ligands, ligands that are synthesized bearing any of a variety of protecting groups, or ligands that have a linking moiety attached thereto.

[0672] The oligonucleotides used in the conjugates of the present invention may be conveniently and routinely made through the well-known technique of solid-phase synthesis. Equipment for such synthesis is sold by several vendors including, for example, Applied Biosystems (Foster City, Calif.). Any other means for such synthesis known in the art may additionally or alternatively be employed. It is also known to use similar techniques to prepare other oligonucleotides, such as the phosphorothioates and alkylated derivatives.

[0673] In the ligand-conjugated oligonucleotides and ligand-molecule bearing sequence-specific linked nucleosides of the present invention, the oligonucleotides and oligonucleosides may be assembled on a suitable DNA synthesizer utilizing standard nucleotide or nucleoside precursors, or nucleotide or nucleoside conjugate precursors that already bear the linking moiety, ligand-nucleotide or nucleoside-conjugate precursors that already bear the ligand molecule, or non-nucleoside ligand-bearing building blocks.

[0674] When using nucleotide-conjugate precursors that already bear a linking moiety, the synthesis of the sequence-specific linked nucleosides is typically completed, and the ligand molecule is then reacted with the linking moiety to form the ligand-conjugated oligonucleotide. In some embodiments, the oligonucleotides or linked nucleosides of the present invention are synthesized by an automated synthesizer using phosphoramidites derived from ligand-nucleoside conjugates in addition to the standard phosphoramidites and non-standard phosphoramidites that are commercially available and routinely used in oligonucleotide synthesis.

[0675] i. Lipid Conjugates

[0676] In one embodiment, the ligand or conjugate is a lipid or lipid-based molecule. Such a lipid or lipid-based molecule preferably binds a serum protein, e.g., human serum albumin (HSA). An HSA binding ligand allows for distribution of the conjugate to a target tissue, e.g., a non-kidney target tissue of the body. For example, the target tissue can be the liver, including parenchymal cells of the liver. Other molecules that can bind HSA can also be used as ligands. For example, neproxin or aspirin can be used. A lipid or lipid-based ligand can (a) increase resistance to degradation of the conjugate, (b) increase targeting or transport into a target cell or cell membrane, and/or (c) can be used to adjust binding to a serum protein, e.g., HSA.

[0677] A lipid based ligand can be used to inhibit, e.g., control the binding of the conjugate to a target tissue. For example, a lipid or lipid-based ligand that binds to HSA more strongly will be less likely to be targeted to the kidney and therefore less likely to be cleared from the body. A lipid or lipid-based ligand that binds to HSA less strongly can be used to target the conjugate to the kidney.

[0678] In a preferred embodiment, the lipid based ligand binds HSA. Preferably, it binds HSA with a sufficient affinity such that the conjugate will be preferably distributed to a non-kidney tissue. However, it is preferred that the affinity not be so strong that the HSA-ligand binding cannot be reversed.

[0679] In another preferred embodiment, the lipid based ligand binds HSA weakly or not at all, such that the conjugate will be preferably distributed to the kidney. Other moieties that target to kidney cells can also be used in place of or in addition to the lipid based ligand.

[0680] In another aspect, the ligand is a moiety, e.g., a vitamin, which is taken up by a target cell, e.g., a proliferating cell. These are particularly useful for treating disorders characterized by unwanted cell proliferation, e.g., of the malignant or non-malignant type, e.g., cancer cells. Exemplary vitamins include vitamin A, E, and K. Other exemplary vitamins include are B vitamin, e.g., folic acid, B12, riboflavin, biotin, pyridoxal or other vitamins or nutrients taken up by target cells such as liver cells. Also included are HSA and low density lipoprotein (LDL).

[0681] ii. Cell Permeation Agents

[0682] In another aspect, the ligand is a cell-permeation agent, preferably a helical cell-permeation agent. Preferably, the agent is amphipathic. An exemplary agent is a peptide such as tat or antennopedia. If the agent is a peptide, it can be modified, including a peptidylmimetic, invertomers, non-peptide or pseudo-peptide linkages, and use of D-amino acids. The helical agent is preferably an alpha-helical agent, which preferably has a lipophilic and a lipophobic phase.

[0683] The ligand can be a peptide or peptidomimetic. A peptidomimetic (also referred to herein as an oligopeptidomimetic) is a molecule capable of folding into a defined three-dimensional structure similar to a natural peptide. The attachment of peptide and peptidomimetics to nucleic acid inhibitors can affect pharmacokinetic distribution of the nucleic acid inhibitor, such as by enhancing cellular recognition and absorption. The peptide or peptidomimetic moiety can be about 5-50 amino acids long, e.g., about 5, 10, 15, 20, 25, 30, 35, 40, 45, or 50 amino acids long.

[0684] A peptide or peptidomimetic can be, for example, a cell permeation peptide, cationic peptide, amphipathic peptide, or hydrophobic peptide (e.g., consisting primarily of Tyr, Trp or Phe). The peptide moiety can be a dendrimer peptide, constrained peptide or crosslinked peptide. In another alternative, the peptide moiety can include a hydrophobic membrane translocation sequence (MTS). An exemplary hydrophobic MTS-containing peptide is RFGF having the amino acid sequence AAVALLPAVLLALLAP (SEQ ID NO: 4154). An RFGF analogue (e.g., amino acid sequence AALLPVLLAAP (SEQ ID NO: 4151) containing a hydrophobic MTS can also be a targeting moiety. The peptide moiety can be a “delivery” peptide, which can carry large polar molecules including peptides, oligonucleotides, and protein across cell membranes. For example, sequences from the HIV Tat protein (GRKKRRQRRRPPQ (SEQ ID NO: 4152) and the Drosophila Antennapedia protein (RQIKIWFQNRRMKWKK (SEQ ID NO: 4153) have been found to be capable of functioning as delivery peptides. A peptide or peptidomimetic can be encoded by a random sequence of DNA, such as a peptide identified from a phage-display library, or one-bead-one-compound (OBOC) combinatorial library (Lam et al., Nature, 354:82-84, 1991). Examples of a peptide or peptidomimetic tethered to a nucleic acid inhibitor via an incorporated monomer unit for cell targeting purposes is an arginine-glycine-aspartic acid (RGD)-peptide, or RGD mimic. A peptide moiety can range in length from about 5 amino acids to about 40 amino acids. The peptide moieties can have a structural modification, such as to increase stability or direct conformational properties. Any of the structural modifications described below can be utilized.

[0685] An RGD peptide for use in the compositions and methods of the invention may be linear or cyclic, and may be modified, e.g., glyciosylated or methylated, to facilitate targeting to a specific tissue(s). RGD-containing peptides and peptidiomimemtics may include D-amino acids, as well as synthetic RGD mimics. In addition to RGD, one can use other moieties that target the integrin ligand. Preferred conjugates of this ligand target PECAM-1 or VEGF.

[0686] A “cell permeation peptide” is capable of permeating a cell, e.g., a microbial cell, such as a bacterial or fungal cell, or a mammalian cell, such as a human cell. A microbial cell-permeating peptide can be, for example, a α-helical linear peptide (e.g., LL-37 or Ceropin P1), a disulfide bond-containing peptide (e.g., α-defensin, β-defensin or bactenecin), or a peptide containing only one or two dominating amino acids (e.g., PR-39 or indolicidin). A cell permeation peptide can also include a nuclear localization signal (NLS). For example, a cell permeation peptide can be a bipartite amphipathic peptide, such as MPG, which is derived from the fusion peptide domain of HIV-1 gp41 and the NLS of SV40 large T antigen (Simeoni et al., Nucl. Acids Res. 31:2717-2724, 2003).

[0687] iii. Carbohydrate Conjugates

[0688] In some embodiments of the compositions and methods of the invention, a nucleic acid inhibitor further comprises a carbohydrate. The carbohydrate conjugated nucleic acid inhibitors are advantageous for the in vivo delivery of nucleic acids, as well as compositions suitable for in vivo therapeutic use, as described herein. As used herein, “carbohydrate” refers to a compound which is either a carbohydrate per se made up of one or more monosaccharide units having at least 6 carbon atoms (which can be linear, branched or cyclic) with an oxygen, nitrogen or sulfur atom bonded to each carbon atom; or a compound having as a part thereof a carbohydrate moiety made up of one or more monosaccharide units each having at least six carbon atoms (which can be linear, branched or cyclic), with an oxygen, nitrogen or sulfur atom bonded to each carbon atom. Representative carbohydrates include the sugars (mono-, di-, tri- and oligosaccharides containing from about 4, 5, 6, 7, 8, or 9 monosaccharide units), and polysaccharides such as starches, glycogen, cellulose and polysaccharide gums. Specific monosaccharides include C5 and above (e.g., C5, C6, C7, or C8) sugars; di- and trisaccharides include sugars having two or three monosaccharide units (e.g., C5, C6, C7, or C8).

[0689] In embodiments in which a first dsRNA agent targeting LDHA and a second dsRNA agent targeting HAO1 are covalently attached (i.e., a dual targeting RNAi agent), one or both of the dsRNA agents may independently comprise one or more carbohydrate ligands.

[0690] In one embodiment, a carbohydrate conjugate for use in the compositions and In certain embodiments, a carbohydrate conjugate comprises a monosaccharide.

[0691] In certain embodiments, the monosaccharide is an N-acetylgalactosamine (GalNAc). GalNAc conjugates, which comprise one or more N-acetylgalactosamine (GalNAc) derivatives, are described, for example, in U.S. Pat. No. 8,106,022, the entire content of which is hereby incorporated herein by reference. In some embodiments, the GalNAc conjugate serves as a ligand that targets the nucleic acid inhibitor to particular cells. In some embodiments, the GalNAc conjugate targets the nucleic acid inhibitor to liver cells, e.g., by serving as a ligand for the asialoglycoprotein receptor of liver cells (e.g., hepatocytes).

[0692] In some embodiments, the carbohydrate conjugate comprises one or more GalNAc derivatives. The GalNAc derivatives may be attached via a linker, e.g., a bivalent or trivalent branched linker. In some embodiments the GalNAc conjugate is conjugated to the 3′ end of the sense strand. In some embodiments, the GalNAc conjugate is conjugated to the nucleic acid inhibitor (e.g., to the 3′ end of the sense strand) via a linker, e.g., a linker as described herein. In some embodiments the GalNAc conjugate is conjugated to the 5′ end of the sense strand. In some embodiments, the GalNAc conjugate is conjugated to the nucleic acid inhibitor (e.g., to the 5′ end of the sense strand) via a linker, e.g., a linker as described herein.

[0693] In certain embodiments of the invention, the GalNAc or GalNAc derivative is attached to a nucleic acid inhibitor of the invention via a monovalent linker. In some embodiments, the GalNAc or GalNAc derivative is attached to a nucleic acid inhibitor of the invention via a bivalent linker. In yet other embodiments of the invention, the GalNAc or GalNAc derivative is attached to a nucleic acid inhibitor of the invention via a trivalent linker. In other embodiments of the invention, the GalNAc or GalNAc derivative is attached to a nucleic acid inhibitor of the invention via a tetravalent linker.

[0694] In certain embodiments, the nucleic acid inhibitors of the invention comprise one GalNAc or GalNAc derivative attached to the nucleic acid inhibitor. In certain embodiments, the nucleic acid inhibitors of the invention comprise a plurality (e.g., 2, 3, 4, 5, or 6) GalNAc or GalNAc derivatives, each independently attached to a plurality of nucleotides of the nucleic acid inhibitor through a plurality of monovalent linkers.

[0695] In some embodiments, for example, when two strands of a nucleic acid inhibitor of the invention are part of one larger molecule connected by an uninterrupted chain of nucleotides between the 3′-end of one strand and the 5′-end of the respective other strand forming a hairpin loop comprising, a plurality of unpaired nucleotides, each unpaired nucleotide within the hairpin loop may independently comprise a GalNAc or GalNAc derivative attached via a monovalent linker. The hairpin loop may also be formed by an extended overhang in one strand of the duplex.

[0696] In some embodiments, for example, when the two strands of a nucleic acid inhibitor of the invention are part of one larger molecule connected by an uninterrupted chain of nucleotides between the 3′-end of one strand and the 5′-end of the respective other strand forming a hairpin loop comprising, a plurality of unpaired nucleotides, each unpaired nucleotide within the hairpin loop may independently comprise a GalNAc or GalNAc derivative attached via a monovalent linker. The hairpin loop may also be formed by an extended overhang in one strand of the duplex.

[0697] In some embodiments, the GalNAc conjugate is

[chemical structure]

[0698] In some embodiments, the RNAi agent is attached to the carbohydrate conjugate via a linker as shown in the following schematic, wherein X is O or S

[chemical structure]

[0699] In some embodiments, the RNAi agent is conjugated to L96 as defined in Table 1 and shown below:

[chemical structure]

[0700] In certain embodiments, a carbohydrate conjugate for use in the compositions and methods of the invention is selected from the group consisting of:

[chemical structure]

[chemical structure]

[chemical structure]

[chemical structure]

[chemical structure]

[chemical structure]

[chemical structure]

[0701] In certain embodiments, a carbohydrate conjugate for use in the compositions and methods of the invention is a monosaccharide. In certain embodiments, the monosaccharide is an N-acetylgalactosamine, such as

[chemical structure]

[0702] Another representative carbohydrate conjugate for use in the embodiments described herein includes, but is not limited to,

[chemical structure]

[0703] when one of X or Y is an oligonucleotide, the other is a hydrogen.

[0704] In some embodiments, a suitable ligand is a ligand disclosed in WO 2019/055633, the entire contents of which are incorporated herein by reference. In one embodiment the ligand comprises the structure below:

[chemical structure]

[0705] In certain embodiments, the nucleic acid inhibitors of the disclosure may include GalNAc ligands, even if such GalNAc ligands are currently projected to be of limited value for the preferred intrathecal/CNS delivery route(s) of the instant disclosure.

[0706] In some embodiments, the carbohydrate conjugate further comprises one or more additional ligands as described above, such as, but not limited to, a PK modulator or a cell permeation peptide.

[0707] Additional carbohydrate conjugates and linkers suitable for use in the present invention include those described in WO 2014/179620 and WO 2014/179627, the entire contents of each of which are incorporated herein by reference.

[0708] In embodiments in which a first dsRNA agent targeting LDHA and a second dsRNA agent targeting HAO1 are covalently attached (i.e., a dual targetingRNAi agent), one or both of the dsRNA agents may independently comprise a GalNAc or GalNAc derivative ligand.

[0709] iv. Linkers

[0710] In some embodiments, the conjugate or ligand described herein can be attached to a nucleic acid inhibitor with various linkers that can be cleavable or non cleavable.

[0711] The term “linker” or “linking group” means an organic moiety that connects two parts of a compound, e.g., covalently attaches two parts of a compound. Linkers typically comprise a direct bond or an atom such as oxygen or sulfur, a unit such as NRB, C(O), C(O)NH, SO, SO₂, SO₂NH or a chain of atoms, such as, but not limited to, substituted or unsubstituted alkyl, substituted or unsubstituted alkenyl, substituted or unsubstituted alkynyl, arylalkyl, arylalkenyl, arylalkynyl, heteroarylalkyl, heteroarylalkenyl, heteroarylalkynyl, heterocyclylalkyl, heterocyclylalkenyl, heterocyclylalkynyl, aryl, heteroaryl, heterocyclyl, cycloalkyl, cycloalkenyl, alkylarylalkyl, alkylarylalkenyl, alkylarylalkynyl, alkenylarylalkyl, alkenylarylalkenyl, alkenylarylalkynyl, alkynylarylalkyl, alkynylarylalkenyl, alkynylarylalkynyl, alkylheteroarylalkyl, alkylheteroarylalkenyl, alkylheteroarylalkynyl, alkenylheteroarylalkyl, alkenylheteroarylalkenyl, alkenylheteroarylalkynyl, alkynylheteroarylalkyl, alkynylheteroarylalkenyl, alkynylheteroarylalkynyl, alkylheterocyclylalkyl, alkylheterocyclylalkenyl, alkylhererocyclylalkynyl, alkenylheterocyclylalkyl, alkenylheterocyclylalkenyl, alkenylheterocyclylalkynyl, alkynylheterocyclylalkyl, alkynylheterocyclylalkenyl, alkynylheterocyclylalkynyl, alkylaryl, alkenylaryl, alkynylaryl, alkylheteroaryl, alkenylheteroaryl, alkynylhereroaryl, which one or more methylenes can be interrupted or terminated by O, S, S(O), SO₂, N(R8), C(O), substituted or unsubstituted aryl, substituted or unsubstituted heteroaryl, substituted or unsubstituted heterocyclic; where R8 is hydrogen, acyl, aliphatic or substituted aliphatic. In one embodiment, the linker is between about 1-24 atoms, 2-24, 3-24, 4-24, 5-24, 6-24, 6-18, 7-18, 8-18 atoms, 7-17, 8-17, 6-16, 7-17, or 8-16 atoms.

[0712] A cleavable linking group is one which is sufficiently stable outside the cell, but which upon entry into a target cell is cleaved to release the two parts the linker is holding together. In a preferred embodiment, the cleavable linking group is cleaved at least about 10 times, 20, times, 30 times, 40 times, 50 times, 60 times, 70 times, 80 times, 90 times or more, or at least about 100 times faster in a target cell or under a first reference condition (which can, e.g., be selected to mimic or represent intracellular conditions) than in the blood of a subject, or under a second reference condition (which can, e.g., be selected to mimic or represent conditions found in the blood or serum).

[0713] Cleavable linking groups are susceptible to cleavage agents, e.g., pH, redox potential or the presence of degradative molecules. Generally, cleavage agents are more prevalent or found at higher levels or activities inside cells than in serum or blood. Examples of such degradative agents include: redox agents which are selected for particular substrates or which have no substrate specificity, including, e.g., oxidative or reductive enzymes or reductive agents such as mercaptans, present in cells, that can degrade a redox cleavable linking group by reduction; esterases; endosomes or agents that can create an acidic environment, e.g., those that result in a pH of five or lower; enzymes that can hydrolyze or degrade an acid cleavable linking group by acting as a general acid, peptidases (which can be substrate specific), and phosphatases.

[0714] A cleavable linkage group, such as a disulfide bond can be susceptible to pH. The pH of human serum is 7.4, while the average intracellular pH is slightly lower, ranging from about 7.1-7.3. Endosomes have a more acidic pH, in the range of 5.5-6.0, and lysosomes have an even more acidic pH at around 5.0. Some linkers will have a cleavable linking group that is cleaved at a preferred pH, thereby releasing a cationic lipid from the ligand inside the cell, or into the desired compartment of the cell.

[0715] A linker can include a cleavable linking group that is cleavable by a particular enzyme. The type of cleavable linking group incorporated into a linker can depend on the cell to be targeted. For example, a liver-targeting ligand can be linked to a cationic lipid through a linker that includes an ester group. Liver cells are rich in esterases, and therefore the linker will be cleaved more efficiently in liver cells than in cell types that are not esterase-rich. Other cell-types rich in esterases include cells of the lung, renal cortex, and testis.

[0716] Linkers that contain peptide bonds can be used when targeting cell types rich in peptidases, such as liver cells and synoviocytes.

[0717] In general, the suitability of a candidate cleavable linking group can be evaluated by testing the ability of a degradative agent (or condition) to cleave the candidate linking group. It will also be desirable to also test the candidate cleavable linking group for the ability to resist cleavage in the blood or when in contact with other non-target tissue. Thus, one can determine the relative susceptibility to cleavage between a first and a second condition, where the first is selected to be indicative of cleavage in a target cell and the second is selected to be indicative of cleavage in other tissues or biological fluids, e.g., blood or serum. The evaluations can be carried out in cell free systems, in cells, in cell culture, in organ or tissue culture, or in whole animals. It can be useful to make initial evaluations in cell-free or culture conditions and to confirm by further evaluations in whole animals. In preferred embodiments, useful candidate compounds are cleaved at least about 2, 4, 10, 20, 30, 40, 50, 60, 70, 80, 90, or about 100 times faster in the cell (or under in vitro conditions selected to mimic intracellular conditions) as compared to blood or serum (or under in vitro conditions selected to mimic extracellular conditions).

[0718] a. Redox Cleavable Linking Groups

[0719] In one embodiment, a cleavable linking group is a redox cleavable linking group that is cleaved upon reduction or oxidation. An example of reductively cleavable linking group is a disulphide linking group (—S—S—). To determine if a candidate cleavable linking group is a suitable “reductively cleavable linking group,” or for example is suitable for use with a particular nucleic acid inhibitor and particular targeting agent one can look to methods described herein. For example, a candidate can be evaluated by incubation with dithiothreitol (DTT), or other reducing agent using reagents know in the art, which mimic the rate of cleavage which would be observed in a cell, e.g., a target cell. The candidates can also be evaluated under conditions which are selected to mimic blood or serum conditions. In one, candidate compounds are cleaved by at most about 10% in the blood. In other embodiments, useful candidate compounds are degraded at least about 2, 4, 10, 20, 30, 40, 50, 60, 70, 80, 90, or about 100 times faster in the cell (or under in vitro conditions selected to mimic intracellular conditions) as compared to blood (or under in vitro conditions selected to mimic extracellular conditions). The rate of cleavage of candidate compounds can be determined using standard enzyme kinetics assays under conditions chosen to mimic intracellular media and compared to conditions chosen to mimic extracellular media.

[0720] b. Phosphate-Based Cleavable Linking Groups

[0721] In another embodiment, a cleavable linker comprises a phosphate-based cleavable linking group. A phosphate-based cleavable linking group is cleaved by agents that degrade or hydrolyze the phosphate group. An example of an agent that cleaves phosphate groups in cells are enzymes such as phosphatases in cells. Examples of phosphate-based linking groups are —O—P(O)(ORk)-O—, —O—P(S)(ORk)-O—, —O—P(S)(SRk)-O—, —S—P(O)(ORk)-O—, —O—P(O)(ORk)-S—, —S—P(O)(ORk)-S—, —O—P(S)(ORk)-S—, —S—P(S)(ORk)-O—, —O—P(O)(Rk)-O—, —O—P(S)(Rk)-O—, —S—P(O)(Rk)-O—, —S—P(S)(Rk)-O—, —S—P(O)(Rk)-S—, —O—P(S)(Rk)-S—. Preferred embodiments are —O—P(O)(OH)—O—, —O—P(S)(OH)—O—, —O—P(S)(SH)—O—, —S—P(O)(OH)—O—, —O—P(O)(OH)—S—, —S—P(O)(OH)—S—, —O—P(S)(OH)—S—, —S—P(S)(OH)—O—, —O—P(O)(H)—O—, —O—P(S)(H)—O—, —S—P(O)(H)—O—, —S—P(S)(H)—O—, —S—P(O)(H)—S—, —O—P(S)(H)—S—. A preferred embodiment is —O—P(O)(OH)—O—. These candidates can be evaluated using methods analogous to those described above.

[0722] c. Acid Cleavable Linking Groups

[0723] In another embodiment, a cleavable linker comprises an acid cleavable linking group. An acid cleavable linking group is a linking group that is cleaved under acidic conditions. In preferred embodiments acid cleavable linking groups are cleaved in an acidic environment with a pH of about 6.5 or lower (e.g., about 6.0, 5.75, 5.5, 5.25, 5.0, or lower), or by agents such as enzymes that can act as a general acid. In a cell, specific low pH organelles, such as endosomes and lysosomes can provide a cleaving environment for acid cleavable linking groups. Examples of acid cleavable linking groups include but are not limited to hydrazones, esters, and esters of amino acids. Acid cleavable groups can have the general formula —C═NN—, C(O)O, or —OC(O). A preferred embodiment is when the carbon attached to the oxygen of the ester (the alkoxy group) is an aryl group, substituted alkyl group, or tertiary alkyl group such as dimethyl pentyl or t-butyl. These candidates can be evaluated using methods analogous to those described above.

[0724] d. Ester-Based Linking Groups

[0725] In another embodiment, a cleavable linker comprises an ester-based cleavable linking group. An ester-based cleavable linking group is cleaved by enzymes such as esterases and amidases in cells. Examples of ester-based cleavable linking groups include but are not limited to esters of alkylene, alkenylene and alkynylene groups. Ester cleavable linking groups have the general formula —C(O)O—, or —OC(O)—. These candidates can be evaluated using methods analogous to those described above.

[0726] e. Peptide-Based Cleaving Groups

[0727] In yet another embodiment, a cleavable linker comprises a peptide-based cleavable linking group. A peptide-based cleavable linking group is cleaved by enzymes such as peptidases and proteases in cells. Peptide-based cleavable linking groups are peptide bonds formed between amino acids to yield oligopeptides (e.g., dipeptides, tripeptides etc.) and polypeptides. Peptide-based cleavable groups do not include the amide group (—C(O)NH—). The amide group can be formed between any alkylene, alkenylene or alkynelene. A peptide bond is a special type of amide bond formed between amino acids to yield peptides and proteins. The peptide based cleavage group is generally limited to the peptide bond (i.e., the amide bond) formed between amino acids yielding peptides and proteins and does not include the entire amide functional group. Peptide-based cleavable linking groups have the general formula —NHCHRAC(O)NHCHRBC(O)—, where RA and RB are the R groups of the two adjacent amino acids. These candidates can be evaluated using methods analogous to those described above.

[0728] In one embodiment, a nucleic acid inhibitor of the invention is conjugated to a carbohydrate through a linker. Non-limiting examples of carbohydrate conjugates with linkers of the compositions and methods of the invention include, but are not limited to.

[chemical structure]

[chemical structure]

[chemical structure]

when one of X or Y is an oligonucleotide, the other is a hydrogen.

[0729] In certain embodiments of the compositions and methods of the invention, a ligand is one or more GalNAc (N-acetylgalactosamine) derivatives attached through a bivalent or trivalent branched linker.

[0730] In embodiments in which a first dsRNA agent targeting LDHA and a second dsRNA agent targeting HAO1 are covalently attached (i.e., a dual targetingRNAi agent), one or both of the dsRNA agents may independently a ligand comprising one or more GalNAc (N-acetylgalactosamine) derivatives attached through a bivalent or trivalent branched linker.

[0731] In one embodiment, a nucleic acid inhibitor of the invention is conjugated to a bivalent or trivalent branched linker selected from the group of structures shown in any of formula (XLV)-(XLVI):

[chemical structure]

wherein:
q2A, q2B, q3A, q3B, q4A, q4B, q5A, q5B and q5C represent independently for each occurrence 0-20 and wherein the repeating unit can be the same or different;
p^{2A}, p^{2B}, p^{3A}, p^{3B}, p^{4A}, p^{4B}, p^{5A}, p^{5B}, p^{5C}, T^{2A}, T^{2B}, T^{3A}, T^{3B}, T^{4A}, T^{4B}, T^{4A}, T^{5B}, T^{5C} are each independently for each occurrence absent, CO, NH, O, S, OC(O), NHC(O), CH₂, CH₂NH or CH₂O; Q^{2A}, Q^{2B}, Q^{3A}, Q^{3B}, Q^{4A}, Q^{4B}, Q^{5A}, Q^{5B}, Q^{5C} are independently for each occurrence absent, alkylene, substituted alkylene wherin one or more methylenes can be interrupted or terminated by one or more of O, S, S(O), SO₂, N(R^{N}), C(R′)═C(R″), C≡C or C(O); R^{2A}, R^{2B}, R^{3A}, R^{3B}, R^{4A}, R^{4B}, R^{5A}, R^{5B}, R^{5C} are each independently for each occurrence absent, NH, O, S, CH₂, C(O)O, C(O)NH, NHCH(R^{a})C(O), —C(O)—CH(R^{a})—NH—, CO, CH═N—O,

[chemical structure]

or heterocyclyl;

[0732] L^{2A}, L^{2B}, L^{3A}, L^{3B}, L^{4A}, L^{4B}, L^{5A}, L^{5B} and L^{5C} represent the ligand; i.e. each independently for each occurrence a monosaccharide (such as GalNAc), disaccharide, trisaccharide, tetrasaccharide, oligosaccharide, or polysaccharide; and R^{a} is H or amino acid side chain. Trivalent conjugating GalNAc derivatives are particularly useful for use with RNAi agents for inhibiting the expression of a target gene, such as those of formula (XLIX):

[chemical structure]

[0733] wherein L^{5A}, L^{5B} and L^{5C} represent a monosaccharide, such as GalNAc derivative.

[0734] Examples of suitable bivalent and trivalent branched linker groups conjugating GalNAc derivatives include, but are not limited to, the structures recited above as formulas II, VII, XI, X, and XIII.

[0735] Representative U.S. patents that teach the preparation of conjugates include, but are not limited to, U.S. Pat. Nos. 4,828,979; 4,948,882; 5,218,105; 5,525,465; 5,541,313; 5,545,730; 5,552,538; 5,578,717, 5,580,731; 5,591,584; 5,109,124; 5,118,802; 5,138,045; 5,414,077; 5,486,603; 5,512,439; 5,578,718; 5,608,046; 4,587,044; 4,605,735; 4,667,025; 4,762,779; 4,789,737; 4,824,941; 4,835,263; 4,876,335; 4,904,582; 4,958,013; 5,082,830; 5,112,963; 5,214,136; 5,082,830; 5,112,963; 5,214,136; 5,245,022; 5,254,469; 5,258,506; 5,262,536; 5,272,250; 5,292,873; 5,317,098; 5,371,241, 5,391,723; 5,416,203, 5,451,463; 5,510,475; 5,512,667; 5,514,785; 5,565,552; 5,567,810; 5,574,142; 5,585,481; 5,587,371; 5,595,726; 5,597,696; 5,599,923; 5,599,928 and 5,688,941; 6,294,664; 6,320,017; 6,576,752; 6,783,931; 6,900,297; 7,037,646; 8,106,022, the entire contents of each of which are hereby incorporated herein by reference.

[0736] It is not necessary for all positions in a given compound to be uniformly modified, and in fact more than one of the aforementioned modifications can be incorporated in a single compound or even at a single nucleoside within a nucleic acid inhibitor. The present invention also includes nucleic acid inhibitors that are chimeric compounds.

[0737] “Chimeric” iRNA compounds or “chimeras,” in the context of this invention, are nucleic acid inhibitors which contain two or more chemically distinct regions, each made up of at least one monomer unit, i.e., a nucleotide in the case of a dsRNA compound. These nucleic acid inhibitors typically contain at least one region wherein the RNA is modified so as to confer upon the nucleic acid inhibitor increased resistance to nuclease degradation, increased cellular uptake, and/or increased binding affinity for the target nucleic acid. An additional region of the nucleic acid inhibitor can serve as a substrate for enzymes capable of cleaving RNA:DNA or RNA:RNA hybrids. By way of example, RNase H is a cellular endonuclease which cleaves the RNA strand of an RNA:DNA duplex. Activation of RNase H, therefore, results in cleavage of the RNA target, thereby greatly enhancing the efficiency of iRNA inhibition of gene expression. Consequently, comparable results can often be obtained with shorter iRNAs when chimeric dsRNAs are used, compared to phosphorothioate deoxy dsRNAs hybridizing to the same target region. Cleavage of the RNA target can be routinely detected by gel electrophoresis and, if necessary, associated nucleic acid hybridization techniques known in the art.

[0738] In certain instances, the RNA of a nucleic acid inhibitor can be modified by a non-ligand group. A number of non-ligand molecules have been conjugated to iRNAs in order to enhance the activity, cellular distribution or cellular uptake of the iRNA, and procedures for performing such conjugations are available in the scientific literature. Such non-ligand moieties have included lipid moieties, such as cholesterol (Kubo, T. et al., Biochem. Biophys. Res. Comm., 2007, 365(1):54-61; Letsinger et al., Proc. Natl. Acad. Sci. USA, 1989, 86:6553), cholic acid (Manoharan et al., Bioorg. Med. Chem. Lett., 1994, 4:1053), a thioether, e.g., hexyl-S-tritylthiol (Manoharan et al., Ann. N.Y. Acad. Sci., 1992, 660:306; Manoharan et al., Bioorg. Med. Chem. Let., 1993, 3:2765), a thiocholesterol (Oberhauser et al., Nucl. Acids Res., 1992, 20:533), an aliphatic chain, e.g., dodecandiol or undecyl residues (Saison-Behmoaras et al., EMBO J., 1991, 10:111; Kabanov et al., FEBS Lett., 1990, 259:327; Svinarchuk et al., Biochimie, 1993, 75:49), a phospholipid, e.g., di-hexadecyl-rac-glycerol or triethylammonium 1,2-di-O-hexadecyl-rac-glycero-3-H-phosphonate (Manoharan et al., Tetrahedron Lett., 1995, 36:3651; Shea et al., Nucl. Acids Res., 1990, 18:3777), a polyamine or a polyethylene glycol chain (Manoharan et al., Nucleosides & Nucleotides, 1995, 14:969), or adamantane acetic acid (Manoharan et al., Tetrahedron Lett., 1995, 36:3651), a palmityl moiety (Mishra et al., Biochim. Biophys. Acta, 1995, 1264:229), or an octadecylamine or hexylamino-carbonyl-oxycholesterol moiety (Crooke et al., J. Pharmacol. Exp. Ther., 1996, 277:923). Representative United States patents that teach the preparation of such RNA conjugates have been listed above. Typical conjugation protocols involve the synthesis of an RNAs bearing an aminolinker at one or more positions of the sequence. The amino group is then reacted with the molecule being conjugated using appropriate coupling or activating reagents. The conjugation reaction can be performed either with the RNA still bound to the solid support or following cleavage of the RNA, in solution phase. Purification of the RNA conjugate by HPLC typically affords the pure conjugate.

### III. Delivery of a Nucleic Acid Inhibitor of the Invention

[0739] The delivery of a nucleic acid inhibitor of the invention to a cell e.g., a cell within a subject, such as a human subject (e.g., a subject in need thereof, such as a subject suffering from a kidney stone disease and carrying a heterozygous AGXT variant) can be achieved in a number of different ways. For example, delivery may be performed by contacting a cell with a nucleic acid inhibitor of the invention either in vitro or in vivo. In vivo delivery may also be performed directly by administering a composition comprising a nucleic acid inhibitor, e.g., a dsRNA, to a subject.

[0740] Alternatively, in vivo delivery may be performed indirectly by administering one or more vectors that encode and direct the expression of the nucleic acid inhibitor. These alternatives are discussed further below.

[0741] In the methods of the invention which include a first dsRNA agent targeting LDHA and a second dsRNA agent targeting HAO1 which are covalently attached (i.e., a dual targeting RNAi agent), the delivery of the first agent may be the same or different than the delivery of the second agent.

[0742] In general, any method of delivering a nucleic acid molecule (in vitro or in vivo) can be adapted for use with a nucleic acid inhibitor of the invention (see e.g., Akhtar S. and Julian R L., (1992) Trends Cell. Biol. 2(5):139-144 and WO94/02595, which are incorporated herein by reference in their entireties). For in vivo delivery, factors to consider in order to deliver a nucleic acid inhibitor include, for example, biological stability of the delivered molecule, prevention of non-specific effects, and accumulation of the delivered molecule in the target tissue. The non-specific effects of a nucleic acid inhibitor can be minimized by local administration, for example, by direct injection or implantation into a tissue or topically administering the preparation. Local administration to a treatment site maximizes local concentration of the agent, limits the exposure of the agent to systemic tissues that can otherwise be harmed by the agent or that can degrade the agent, and permits a lower total dose of then ucleic acid inhibitor to be administered. Several studies have shown successful knockdown of gene products when a nucleic acid inhibitor is administered locally. For example, intraocular delivery of a VEGF dsRNA by intravitreal injection in cynomolgus monkeys (Tolentino, Mi. et al., (2004) Retina 24:132-138) and subretinal injections in mice (Reich, S J. et al. (2003) Mol. Vis. 9:210-216) were both shown to prevent neovascularization in an experimental model of age-related macular degeneration. In addition, direct intratumoral injection of a dsRNA in mice reduces tumor volume (Pille, J. et al. (2005) Mol. Ther. 11:267-274) and can prolong survival of tumor-bearing mice (Kim, W J. et al., (2006) Mol. Ther. 14:343-350; Li, S. et al., (2007) Mol. Ther. 15:515-523). RNA interference has also shown success with local delivery to the CNS by direct injection (Dorn, G. et al., (2004) Nucleic Acids 32:e49; Tan, P H. et al. (2005) Gene Ther. 12:59-66; Makimura, H. et a.l (2002) BMC Neurosci. 3:18; Shishkina, G T., et al. (2004) Neuroscience 129:521-528; Thakker, E R., et al. (2004) Proc. Natl. Acad. Sci. U.S.A. 101:17270-17275; Akaneya, Y., et al. (2005) J. Neurophysiol. 93:594-602) and to the lungs by intranasal administration (Howard, K A. et al., (2006) Mol. Ther. 14:476-484; Zhang, X. et al., (2004) J. Biol. Chem. 279:10677-10684; Bitko, V. et al., (2005) Nat. Med. 11:50-55). For administering a nucleic acid inhibitor systemically for the treatment of a disease, the nucleic acid inhibitor can be modified or alternatively delivered using a drug delivery system; both methods act to prevent the rapid degradation of the nucleic acid inhibitor by endo- and exo-nucleases in vivo. Modification of the nucleic acid inhibitor or the pharmaceutical carrier can also permit targeting of the nucleic acid inhibitor to the target tissue and avoid undesirable off-target effects. Nucleic acid inhibitors can be modified by chemical conjugation to lipophilic groups such as cholesterol to enhance cellular uptake and prevent degradation. For example, a nucleic acid inhibitor directed against ApoB conjugated to a lipophilic cholesterol moiety was injected systemically into mice and resulted in knockdown of apoB mRNA in both the liver and jejunum (Soutschek, J. et al., (2004) Nature 432:173-178). Conjugation of an nucleic acid inhibitor to an aptamer has been shown to inhibit tumor growth and mediate tumor regression in a mouse model of prostate cancer (McNamara, J O. et al., (2006) Nat. Biotechnol. 24:1005-1015). In an alternative embodiment, the nucleic acid inhibitor can be delivered using drug delivery systems such as a nanoparticle, a dendrimer, a polymer, liposomes, or a cationic delivery system. Positively charged cationic delivery systems facilitate binding of a nucleic acid inhibitor (negatively charged) and also enhance interactions at the negatively charged cell membrane to permit efficient uptake of a nucleic acid inhibitor by the cell. Cationic lipids, dendrimers, or polymers can either be bound to a nucleic acid inhibitor, or induced to form a vesicle or micelle (see e.g., Kim S H. et al., (2008) Journal of Controlled Release 129(2):107-116) that encases a nucleic acid inhibitor. The formation of vesicles or micelles further prevents degradation of the iRNA when administered systemically. Methods for making and administering cationic-nucleic acid inhibitor complexes are well within the abilities of one skilled in the art (see e.g., Sorensen, D R., et al. (2003) J. Mol. Biol 327:761-766; Verma, U N. et al., (2003) Clin. Cancer Res. 9:1291-1300; Arnold, A S et al., (2007) J. Hypertens. 25:197-205, which are incorporated herein by reference in their entirety). Some non-limiting examples of drug delivery systems useful for systemic delivery of nucleic acid inhibitors include DOTAP (Sorensen, D R., et al (2003), supra; Verma, U N. et al., (2003), supra), Oligofectamine, “solid nucleic acid lipid particles” (Zimmermann, T S. et al., (2006) Nature 441:111-114), cardiolipin (Chien, P Y. et al., (2005) Cancer Gene Ther. 12:321-328; Pal, A. et al., (2005) Int J. Oncol. 26:1087-1091), polyethyleneimine (Bonnet M E. et al., (2008) Pharm. Res. August 16 Epub ahead of print; Aigner, A. (2006) J. Biomed. Biotechnol. 71659), Arg-Gly-Asp (RGD) peptides (Liu, S. (2006) Mol. Pharm. 3:472-487), and polyamidoamines (Tomalia, D A. et al., (2007) Biochem. Soc. Trans. 35:61-67; Yoo, H. et al., (1999) Pharm. Res. 16:1799-1804). In some embodiments, a nucleic acid inhibitor forms a complex with cyclodextrin for systemic administration. Methods for administration and pharmaceutical compositions of nucleic acid inhibitors and cyclodextrins can be found in U.S. Pat. No. 7,427,605, which is herein incorporated by reference in its entirety.

[0743] A. Vector encoded iRNAs of the Invention

[0744] Nucleic acid inhibitors targeting the LDHA gene, nucleic acid inhibitor targeting the HAO1 gene, and nucleic acid inhibitors targeting LDHA and HAO1 can be expressed from transcription units inserted into DNA or RNA vectors (see, e.g., Couture, A, et al., TIG. (1996), 12:5-10; Skillern, A., et al., International PCT Publication No. WO 00/22113, Conrad, International PCT Publication No. WO 00/22114, and Conrad, U.S. Pat. No. 6,054,299). Expression can be transient (on the order of hours to weeks) or sustained (weeks to months or longer), depending upon the specific construct used and the target tissue or cell type. These transgenes can be introduced as a linear construct, a circular plasmid, or a viral vector, which can be an integrating or non-integrating vector. The transgene can also be constructed to permit it to be inherited as an extrachromosomal plasmid (Gassmann, et al., (1995) Proc. Natl. Acad. Sci. USA 92:1292).

[0745] The individual strand or strands of a nucleic acid inhibitor can be transcribed from a promoter on an expression vector. Where two separate strands are to be expressed to generate, for example, a dsRNA, two separate expression vectors can be co-introduced (e.g., by transfection or infection) into a target cell. Alternatively each individual strand of a nucleic acid inhibitor can be transcribed by promoters both of which are located on the same expression plasmid. In one embodiment, a dsRNA is expressed as inverted repeat polynucleotides joined by a linker polynucleotide sequence such that the dsRNA has a stem and loop structure.

[0746] Nucleic acid inhibitor expression vectors are generally DNA plasmids or viral vectors. Expression vectors compatible with eukaryotic cells, preferably those compatible with vertebrate cells, can be used to produce recombinant constructs for the expression of a nucleic acid inhibitor as described herein. Eukaryotic cell expression vectors are well known in the art and are available from a number of commercial sources. Typically, such vectors are provided containing convenient restriction sites for insertion of the desired nucleic acid segment. Delivery of nucleic acid inhibitor expressing vectors can be systemic, such as by intravenous or intramuscular administration, by administration to target cells ex-planted from the patient followed by reintroduction into the patient, or by any other means that allows for introduction into a desired target cell.

[0747] Viral vector systems which can be utilized with the methods and compositions described herein include, but are not limited to, (a) adenovirus vectors; (b) retrovirus vectors, including but not limited to lentiviral vectors, moloney murine leukemia virus, etc.; (c) adeno-associated virus vectors; (d) herpes simplex virus vectors; (e) SV 40 vectors; (f) polyoma virus vectors; (g) papilloma virus vectors; (h) picornavirus vectors; (i) pox virus vectors such as an orthopox, e.g., vaccinia virus vectors or avipox, e.g. canary pox or fowl pox; and (j) a helper-dependent or gutless adenovirus. Replication-defective viruses can also be advantageous. Different vectors will or will not become incorporated into the cells' genome. The constructs can include viral sequences for transfection, if desired. Alternatively, the construct can be incorporated into vectors capable of episomal replication, e.g. EPV and EBV vectors. Constructs for the recombinant expression of an iRNA will generally require regulatory elements, e.g., promoters, enhancers, etc., to ensure the expression of the iRNA in target cells. Other aspects to consider for vectors and constructs are known in the art.

### IV. Pharmaceutical Compositions of the Invention

[0748] The present invention also includes pharmaceutical compositions and formulations which include the nucleic acid inhibitors of the invention. Accordingly, in one embodiment, provided herein are pharmaceutical compositions comprising a nucleic acid inhibitor, such as a double stranded ribonucleic acid (dsRNA) agent or a single stranded antisense polynucleotide agent that inhibits expression of lactic acid dehydrogenase A (LDHA) in a cell, such as a liver cell; and a pharmaceutically acceptable carrier.

[0749] In another embodiment, provided herein are pharmaceutical compositions comprising a nucleic acid inhibitor, such as a double stranded ribonucleic acid (dsRNA) agent or a single stranded antisense polynucleotide agent that inhibits expression of HAO1 in a cell, such as a liver cell; and a pharmaceutically acceptable carrier.

[0750] In one embodiment, provided herein are pharmaceutical compositions comprising a first nucleic acid inhibitor, such as a double stranded ribonucleic acid (dsRNA) agent or a single stranded antisense polynucleotide agent, that inhibits expression of lactic acid dehydrogenase A (LDHA) in a cell, such as a liver cell, and a second nucleic acid inhibitor, such as a double stranded ribonucleic acid (dsRNA) agent or a single stranded antisense polynucleotide agent, that inhibits expression of hydroxyacid oxidase 1 (glycolate oxidase) (HAO1) in a cell, such as a liver cell; and a pharmaceutically acceptable carrier.

[0751] In yet another embodiment, the present invention provides pharmaceutical compositions and formulations comprising a nucleic acid inhibitor, such as a dual targeting RNAi agent of the invention, and a pharmaceutically acceptable carrier.

[0752] The pharmaceutical compositions containing the iRNA of the invention are useful for treating a subject suffering from a kidney stone disease and carrying a heterozygous AGXT variant.

[0753] Such pharmaceutical compositions are formulated based on the mode of delivery. One example is compositions that are formulated for systemic administration via parenteral delivery, e.g., by intravenous (IV) or for subcutaneous delivery. Another example is compositions that are formulated for direct delivery into the liver, e.g., by infusion into the liver, such as by continuous pump infusion.

[0754] The pharmaceutical compositions of the invention may be administered in dosages sufficient to inhibit expression of an LDHA gene, an HAO1 gene, or both an LDHA gene and an HAO1 gene. In general, a suitable dose of a nucleic acid inhibitor of the invention will be in the range of about 0.001 to about 200 0 milligrams per kilogram body weight of the recipient per day, generally in the range of about 1 to 50 mg per kilogram body weight per day. Typically, a suitable dose of a nucleic acid inhibitor of the invention will be in the range of about 0.1 mg/kg to about 5.0 mg/kg, preferably about 0.3 mg/kg and about 3.0 mg/kg.

[0755] In the methods of the invention which include a first nucleic acid inhibitor targeting LDHA and a second nucleic acid inhibitor targeting HAO1, the first inhibitor and the second inhibitor may be present in the same pharmaceutical formulation or separate pharmaceutical formulations.

[0756] A repeat-dose regimine may include administration of a therapeutic amount of nucleic acid inhibitor on a regular basis, such as every other day to once a year. In certain embodiments, the nucleic acid inhibitor is administered about once per month to about once per quarter (i.e., about once every three months).

[0757] After an initial treatment regimen, the treatments can be administered on a less frequent basis. The skilled artisan will appreciate that certain factors can influence the dosage and timing required to effectively treat a subject, including but not limited to the severity of the disease or disorder, previous treatments, the general health and/or age of the subject, and other diseases present. Moreover, treatment of a subject with a therapeutically effective amount of a composition can include a single treatment or a series of treatments. Estimates of effective dosages and in vivo half-lives for the individual nucleic acid inhibitors encompassed by the invention can be made using conventional methodologies or on the basis of in vivo testing using an appropriate animal model.

[0758] The pharmaceutical compositions of the present invention can be administered in a number of ways depending upon whether local or systemic treatment is desired and upon the area to be treated. Administration can be topical (e.g., by a transdermal patch), pulmonary, e.g., by inhalation or insufflation of powders or aerosols, including by nebulizer; intratracheal, intranasal, epidermal and transdermal, oral or parenteral. Parenteral administration includes intravenous, intraarterial, subcutaneous, intraperitoneal or intramuscular injection or infusion; subdermal, e.g., via an implanted device; or intracranial, e.g., by intraparenchymal, intrathecal or intraventricular, administration. The nucleic acid inhibitor can be delivered in a manner to target a particular cell or tissue, such as the liver (e.g., the hepatocytes of the liver).

[0759] Pharmaceutical compositions and formulations for topical administration can include transdermal patches, ointments, lotions, creams, gels, drops, suppositories, sprays, liquids and powders. Conventional pharmaceutical carriers, aqueous, powder or oily bases, thickeners and the like can be necessary or desirable. Coated condoms, gloves and the like can also be useful. Suitable topical formulations include those in which the iRNAs featured in the invention are in admixture with a topical delivery agent such as lipids, liposomes, fatty acids, fatty acid esters, steroids, chelating agents and surfactants. Suitable lipids and liposomes include neutral (e.g., dioleoylphosphatidyl DOPE ethanolamine, dimyristoylphosphatidyl choline DMPC, distearolyphosphatidyl choline) negative (e.g., dimyristoylphosphatidyl glycerol DMPG) and cationic (e.g., dioleoyltetramethylaminopropyl DOTAP and dioleoylphosphatidyl ethanolamine DOTMA). Nucleic acid inhibitors featured in the invention can be encapsulated within liposomes or can form complexes thereto, in particular to cationic liposomes. Alternatively, nucleic acid inhibitors can be complexed to lipids, in particular to cationic lipids. Suitable fatty acids and esters include but are not limited to arachidonic acid, oleic acid, eicosanoic acid, lauric acid, caprylic acid, capric acid, myristic acid, palmitic acid, stearic acid, linoleic acid, linolenic acid, dicaprate, tricaprate, monoolein, dilaurin, glyceryl 1-monocaprate, 1-dodecylazacycloheptan-2-one, an acylcarnitine, an acylcholine, or a C120 alkyl ester (e.g., isopropylmyristate IPM), monoglyceride, diglyceride or pharmaceutically acceptable salt thereof. Topical formulations are described in detail in U.S. Pat. No. 6,747,014, which is incorporated herein by reference.

[0760] Compositions and formulations for oral administration include powders or granules, microparticulates, nanoparticulates, suspensions or solutions in water or non-aqueous media, capsules, gel capsules, sachets, tablets or minitablets. Thickeners, flavoring agents, diluents, emulsifiers, dispersing aids or binders can be desirable. In some embodiments, oral formulations are those in which nucleic acid inhibitors featured in the invention are administered in conjunction with one or more penetration enhancer surfactants and chelators. Suitable surfactants include fatty acids and/or esters or salts thereof, bile acids and/or salts thereof. Suitable bile acids/salts include chenodeoxycholic acid (CDCA) and ursodeoxychenodeoxycholic acid (UDCA), cholic acid, dehydrocholic acid, deoxycholic acid, glucholic acid, glycholic acid, glycodeoxycholic acid, taurocholic acid, taurodeoxycholic acid, sodium tauro-24,25-dihydro-fusidate and sodium glycodihydrofusidate. Suitable fatty acids include arachidonic acid, undecanoic acid, oleic acid, lauric acid, caprylic acid, capric acid, myristic acid, palmitic acid, stearic acid, linoleic acid, linolenic acid, dicaprate, tricaprate, monoolein, dilaurin, glyceryl 1-monocaprate, 1-dodecylazacycloheptan-2-one, an acylcarnitine, an acylcholine, or a monoglyceride, a diglyceride or a pharmaceutically acceptable salt thereof (e.g., sodium). In some embodiments, combinations of penetration enhancers are used, for example, fatty acids/salts in combination with bile acids/salts. One exemplary combination is the sodium salt of lauric acid, capric acid and UDCA. Further penetration enhancers include polyoxyethylene-9-lauryl ether, polyoxyethylene-20-cetyl ether. DsRNAs featured in the invention can be delivered orally, in granular form including sprayed dried particles, or complexed to form micro or nanoparticles. DsRNA complexing agents include poly-amino acids; polyimines; polyacrylates; polyalkylacrylates, polyoxethanes, polyalkylcyanoacrylates; cationized gelatins, albumins, starches, acrylates, polyethyleneglycols (PEG) and starches; polyalkylcyanoacrylates; DEAE-derivatized polyimines, pollulans, celluloses and starches. Suitable complexing agents include chitosan, N-trimethylchitosan, poly-L-lysine, polyhistidine, polyornithine, polyspermines, protamine, polyvinylpyridine, polythiodiethylaminomethylethylene P(TDAE), polyaminostyrene (e.g., p-amino), poly(methylcyanoacrylate), poly(ethylcyanoacrylate), poly(butylcyanoacrylate), poly(isobutylcyanoacrylate), poly(isohexylcynaoacrylate), DEAE-methacrylate, DEAE-hexylacrylate, DEAE-acrylamide, DEAE-albumin and DEAE-dextran, polymethylacrylate, polyhexylacrylate, poly(D,L-lactic acid), poly(DL-lactic-co-glycolic acid (PLGA), alginate, and polyethyleneglycol (PEG). Oral formulations for dsRNAs and their preparation are described in detail in U.S. Pat. No. 6,887,906, US Publn. No. 20030027780, and U.S. Pat. No. 6,747,014, each of which is incorporated herein by reference.

[0761] Compositions and formulations for parenteral, intraparenchymal (into the brain), intrathecal, intraventricular or intrahepatic administration can include sterile aqueous solutions which can also contain buffers, diluents and other suitable additives such as, but not limited to, penetration enhancers, carrier compounds and other pharmaceutically acceptable carriers or excipients.

[0762] Pharmaceutical compositions of the present invention include, but are not limited to, solutions, emulsions, and liposome-containing formulations. These compositions can be generated from a variety of components that include, but are not limited to, preformed liquids, self-emulsifying solids and self-emulsifying semisolids.

[0763] The pharmaceutical formulations of the present invention, which can conveniently be presented in unit dosage form, can be prepared according to conventional techniques well known in the pharmaceutical industry. Such techniques include the step of bringing into association the active ingredients with the pharmaceutical carrier(s) or excipient(s). In general, the formulations are prepared by uniformly and intimately bringing into association the active ingredients with liquid carriers or finely divided solid carriers or both, and then, if necessary, shaping the product.

[0764] The compositions of the present invention can be formulated into any of many possible dosage forms such as, but not limited to, tablets, capsules, gel capsules, liquid syrups, soft gels, suppositories, and enemas. The compositions of the present invention can also be formulated as suspensions in aqueous, non-aqueous or mixed media. Aqueous suspensions can further contain substances which increase the viscosity of the suspension including, for example, sodium carboxymethylcellulose, sorbitol and/or dextran. The suspension can also contain stabilizers.

[0765] A. Additional Formulations

[0766] i. Emulsions

[0767] The compositions of the present invention can be prepared and formulated as emulsions. Emulsions are typically heterogeneous systems of one liquid dispersed in another in the form of droplets usually exceeding 0.1 μm in diameter (see e.g., Ansel's Pharmaceutical Dosage Forms and Drug Delivery Systems, Allen, L V., Popovich N G., and Ansel H C., 2004, Lippincott Williams & Wilkins (8th ed.), New York, N.Y.; Idson, in Pharmaceutical Dosage Forms, Lieberman, Rieger and Banker (Eds.), 1988, Marcel Dekker, Inc., New York, N.Y., volume 1, p. 199; Rosoff, in Pharmaceutical Dosage Forms, Lieberman, Rieger and Banker (Eds.), 1988, Marcel Dekker, Inc., New York, N.Y., Volume 1, p. 245; Block in Pharmaceutical Dosage Forms, Lieberman, Rieger and Banker (Eds.), 1988, Marcel Dekker, Inc., New York, N.Y., volume 2, p. 335; Higuchi et al., in Remington's Pharmaceutical Sciences, Mack Publishing Co., Easton, Pa., 1985, p. 301). Emulsions are often biphasic systems comprising two immiscible liquid phases intimately mixed and dispersed with each other. In general, emulsions can be of either the water-in-oil (w/o) or the oil-in-water (o/w) variety. When an aqueous phase is finely divided into and dispersed as minute droplets into a bulk oily phase, the resulting composition is called a water-in-oil (w/o) emulsion. Alternatively, when an oily phase is finely divided into and dispersed as minute droplets into a bulk aqueous phase, the resulting composition is called an oil-in-water (o/w) emulsion. Emulsions can contain additional components in addition to the dispersed phases, and the active drug which can be present as a solution in either aqueous phase, oily phase or itself as a separate phase. Pharmaceutical excipients such as emulsifiers, stabilizers, dyes, and anti-oxidants can also be present in emulsions as needed.

[0768] Pharmaceutical emulsions can also be multiple emulsions that are comprised of more than two phases such as, for example, in the case of oil-in-water-in-oil (o/w/o) and water-in-oil-in-water (w/o/w) emulsions. Such complex formulations often provide certain advantages that simple binary emulsions do not. Multiple emulsions in which individual oil droplets of an o/w emulsion enclose small water droplets constitute a w/o/w emulsion. Likewise a system of oil droplets enclosed in globules of water stabilized in an oily continuous phase provides an o/w/o emulsion.

[0769] Emulsions are characterized by little or no thermodynamic stability. Often, the dispersed or discontinuous phase of the emulsion is well dispersed into the external or continuous phase and maintained in this form through the means of emulsifiers or the viscosity of the formulation. Either of the phases of the emulsion can be a semisolid or a solid, as is the case of emulsion-style ointment bases and creams Other means of stabilizing emulsions entail the use of emulsifiers that can be incorporated into either phase of the emulsion. Emulsifiers can broadly be classified into four categories: synthetic surfactants, naturally occurring emulsifiers, absorption bases, and finely dispersed solids (see e.g., Ansel's Pharmaceutical Dosage Forms and Drug Delivery Systems, Allen, L V., Popovich N G., and Ansel H C., 2004, Lippincott Williams & Wilkins (8th ed.), New York, N.Y.; Idson, in Pharmaceutical Dosage Forms, Lieberman, Rieger and Banker (Eds.), 1988, Marcel Dekker, Inc., New York, N.Y., volume 1, p. 199).

[0770] Synthetic surfactants, also known as surface active agents, have found wide applicability in the formulation of emulsions and have been reviewed in the literature (see e.g., Ansel's Pharmaceutical Dosage Forms and Drug Delivery Systems, Allen, L V., Popovich N G., and Ansel H C., 2004, Lippincott Williams & Wilkins (8th ed.), New York, N.Y.; Rieger, in Pharmaceutical Dosage Forms, Lieberman, Rieger and Banker (Eds.), 1988, Marcel Dekker, Inc., New York, N.Y., volume 1, p. 285; Idson, in Pharmaceutical Dosage Forms, Lieberman, Rieger and Banker (Eds.), Marcel Dekker, Inc., New York, N.Y., 1988, volume 1, p. 199). Surfactants are typically amphiphilic and comprise a hydrophilic and a hydrophobic portion. The ratio of the hydrophilic to the hydrophobic nature of the surfactant has been termed the hydrophile/lipophile balance (HLB) and is a valuable tool in categorizing and selecting surfactants in the preparation of formulations. Surfactants can be classified into different classes based on the nature of the hydrophilic group: nonionic, anionic, cationic and amphoteric (see e.g., Ansel's Pharmaceutical Dosage Forms and Drug Delivery Systems, Allen, L V., Popovich N G., and Ansel H C., 2004, Lippincott Williams & Wilkins (8th ed.), New York, N.Y. Rieger, in Pharmaceutical Dosage Forms, Lieberman, Rieger and Banker (Eds.), 1988, Marcel Dekker, Inc., New York, N.Y., volume 1, p. 285).

[0771] Naturally occurring emulsifiers used in emulsion formulations include lanolin, beeswax, phosphatides, lecithin and acacia. Absorption bases possess hydrophilic properties such that they can soak up water to form w/o emulsions yet retain their semisolid consistencies, such as anhydrous lanolin and hydrophilic petrolatum. Finely divided solids have also been used as good emulsifiers especially in combination with surfactants and in viscous preparations. These include polar inorganic solids, such as heavy metal hydroxides, nonswelling clays such as bentonite, attapulgite, hectorite, kaolin, montmorillonite, colloidal aluminum silicate and colloidal magnesium aluminum silicate, pigments and nonpolar solids such as carbon or glyceryl tristearate.

[0772] A large variety of non-emulsifying materials are also included in emulsion formulations and contribute to the properties of emulsions. These include fats, oils, waxes, fatty acids, fatty alcohols, fatty esters, humectants, hydrophilic colloids, preservatives and antioxidants (Block, in Pharmaceutical Dosage Forms, Lieberman, Rieger and Banker (Eds.), 1988, Marcel Dekker, Inc., New York, N.Y., volume 1, p. 335; Idson, in Pharmaceutical Dosage Forms, Lieberman, Rieger and Banker (Eds.), 1988, Marcel Dekker, Inc., New York, N.Y., volume 1, p. 199).

[0773] Hydrophilic colloids or hydrocolloids include naturally occurring gums and synthetic polymers such as polysaccharides (for example, acacia, agar, alginic acid, carrageenan, guar gum, karaya gum, and tragacanth), cellulose derivatives (for example, carboxymethylcellulose and carboxypropylcellulose), and synthetic polymers (for example, carbomers, cellulose ethers, and carboxyvinyl polymers). These disperse or swell in water to form colloidal solutions that stabilize emulsions by forming strong interfacial films around the dispersed-phase droplets and by increasing the viscosity of the external phase.

[0774] Since emulsions often contain a number of ingredients such as carbohydrates, proteins, sterols and phosphatides that can readily support the growth of microbes, these formulations often incorporate preservatives. Commonly used preservatives included in emulsion formulations include methyl paraben, propyl paraben, quaternary ammonium salts, benzalkonium chloride, esters of p-hydroxybenzoic acid, and boric acid. Antioxidants are also commonly added to emulsion formulations to prevent deterioration of the formulation. Antioxidants used can be free radical scavengers such as tocopherols, alkyl gallates, butylated hydroxyanisole, butylated hydroxytoluene, or reducing agents such as ascorbic acid and sodium metabisulfite, and antioxidant synergists such as citric acid, tartaric acid, and lecithin.

[0775] The application of emulsion formulations via dermatological, oral and parenteral routes and methods for their manufacture have been reviewed in the literature (see e.g., Ansel's Pharmaceutical Dosage Forms and Drug Delivery Systems, Allen, L V., Popovich N G., and Ansel H C., 2004, Lippincott Williams & Wilkins (8th ed.), New York, N.Y.; Idson, in Pharmaceutical Dosage Forms, Lieberman, Rieger and Banker (Eds.), 1988, Marcel Dekker, Inc., New York, N.Y., volume 1, p. 199). Emulsion formulations for oral delivery have been very widely used because of ease of formulation, as well as efficacy from an absorption and bioavailability standpoint (see e.g., Ansel's Pharmaceutical Dosage Forms and Drug Delivery Systems, Allen, L V., Popovich N G., and Ansel H C., 2004, Lippincott Williams & Wilkins (8th ed.), New York, N.Y.; Rosoff, in Pharmaceutical Dosage Forms, Lieberman, Rieger and Banker (Eds.), 1988, Marcel Dekker, Inc., New York, N.Y., volume 1, p. 245; Idson, in Pharmaceutical Dosage Forms, Lieberman, Rieger and Banker (Eds.), 1988, Marcel Dekker, Inc., New York, N.Y., volume 1, p. 199). Mineral-oil base laxatives, oil-soluble vitamins and high fat nutritive preparations are among the materials that have commonly been administered orally as o/w emulsions.

[0776] ii. Microemulsions

[0777] In one embodiment of the present invention, the compositions of iRNAs and nucleic acids are formulated as microemulsions. A microemulsion can be defined as a system of water, oil and amphiphile which is a single optically isotropic and thermodynamically stable liquid solution (see e.g., Ansel's Pharmaceutical Dosage Forms and Drug Delivery Systems, Allen, L V., Popovich N G., and Ansel H C., 2004, Lippincott Williams & Wilkins (8th ed.), New York, N.Y.; Rosoff, in Pharmaceutical Dosage Forms, Lieberman, Rieger and Banker (Eds.), 1988, Marcel Dekker, Inc., New York, N.Y., volume 1, p. 245). Typically microemulsions are systems that are prepared by first dispersing an oil in an aqueous surfactant solution and then adding a sufficient amount of a fourth component, generally an intermediate chain-length alcohol to form a transparent system. Therefore, microemulsions have also been described as thermodynamically stable, isotropically clear dispersions of two immiscible liquids that are stabilized by interfacial films of surface-active molecules (Leung and Shah, in: Controlled Release of Drugs: Polymers and Aggregate Systems, Rosoff, M., Ed., 1989, VCH Publishers, New York, pages 185-215). Microemulsions commonly are prepared via a combination of three to five components that include oil, water, surfactant, cosurfactant and electrolyte. Whether the microemulsion is of the water-in-oil (w/o) or an oil-in-water (o/w) type is dependent on the properties of the oil and surfactant used and on the structure and geometric packing of the polar heads and hydrocarbon tails of the surfactant molecules (Schott, in Remington's Pharmaceutical Sciences, Mack Publishing Co., Easton, Pa., 1985, p. 271).

[0778] The phenomenological approach utilizing phase diagrams has been extensively studied and has yielded a comprehensive knowledge, to one skilled in the art, of how to formulate microemulsions (see e.g., Ansel's Pharmaceutical Dosage Forms and Drug Delivery Systems, Allen, L V., Popovich N G., and Ansel H C., 2004, Lippincott Williams & Wilkins (8th ed.), New York, N.Y.; Rosoff, in Pharmaceutical Dosage Forms, Lieberman, Rieger and Banker (Eds.), 1988, Marcel Dekker, Inc., New York, N.Y., volume 1, p. 245; Block, in Pharmaceutical Dosage Forms, Lieberman, Rieger and Banker (Eds.), 1988, Marcel Dekker, Inc., New York, N.Y., volume 1, p. 335). Compared to conventional emulsions, microemulsions offer the advantage of solubilizing water-insoluble drugs in a formulation of thermodynamically stable droplets that are formed spontaneously.

[0779] Surfactants used in the preparation of microemulsions include, but are not limited to, ionic surfactants, non-ionic surfactants, Brij 96, polyoxyethylene oleyl ethers, polyglycerol fatty acid esters, tetraglycerol monolaurate (ML310), tetraglycerol monooleate (MO310), hexaglycerol monooleate (PO310), hexaglycerol pentaoleate (PO500), decaglycerol monocaprate (MCA750), decaglycerol monooleate (MO750), decaglycerol sequioleate (SO750), decaglycerol decaoleate (DAO750), alone or in combination with cosurfactants. The cosurfactant, usually a short-chain alcohol such as ethanol, 1-propanol, and 1-butanol, serves to increase the interfacial fluidity by penetrating into the surfactant film and consequently creating a disordered film because of the void space generated among surfactant molecules. Microemulsions can, however, be prepared without the use of cosurfactants and alcohol-free self-emulsifying microemulsion systems are known in the art. The aqueous phase can typically be, but is not limited to, water, an aqueous solution of the drug, glycerol, PEG300, PEG400, polyglycerols, propylene glycols, and derivatives of ethylene glycol. The oil phase can include, but is not limited to, materials such as Captex 300, Captex 355, Capmul MCM, fatty acid esters, medium chain (C8-C12) mono, di, and tri-glycerides, polyoxyethylated glyceryl fatty acid esters, fatty alcohols, polyglycolized glycerides, saturated polyglycolized C8-C10 glycerides, vegetable oils and silicone oil.

[0780] Microemulsions are particularly of interest from the standpoint of drug solubilization and the enhanced absorption of drugs. Lipid based microemulsions (both o/w and w/o) have been proposed to enhance the oral bioavailability of drugs, including peptides (see e.g., U.S. Pat. Nos. 6,191,105; 7,063,860; 7,070,802; 7,157,099; Constantinides et al., Pharmaceutical Research, 1994, 11, 1385-1390; Ritschel, Meth. Find. Exp. Clin. Pharmacol., 1993, 13, 205). Microemulsions afford advantages of improved drug solubilization, protection of drug from enzymatic hydrolysis, possible enhancement of drug absorption due to surfactant-induced alterations in membrane fluidity and permeability, ease of preparation, ease of oral administration over solid dosage forms, improved clinical potency, and decreased toxicity (see e.g., U.S. Pat. Nos. 6,191,105; 7,063,860; 7,070,802; 7,157,099; Constantinides et al., Pharmaceutical Research, 1994, 11, 1385; Ho et al., J. Pharm. Sci., 1996, 85, 138-143). Often microemulsions can form spontaneously when their components are brought together at ambient temperature. This can be particularly advantageous when formulating thermolabile drugs, peptides or iRNAs. Microemulsions have also been effective in the transdermal delivery of active components in both cosmetic and pharmaceutical applications. It is expected that the microemulsion compositions and formulations of the present invention will facilitate the increased systemic absorption of iRNAs and nucleic acids from the gastrointestinal tract, as well as improve the local cellular uptake of iRNAs and nucleic acids.

[0781] Microemulsions of the present invention can also contain additional components and additives such as sorbitan monostearate (Grill 3), Labrasol, and penetration enhancers to improve the properties of the formulation and to enhance the absorption of the iRNAs and nucleic acids of the present invention. Penetration enhancers used in the microemulsions of the present invention can be classified as belonging to one of five broad categories—surfactants, fatty acids, bile salts, chelating agents, and non-chelating non-surfactants (Lee et al., Critical Reviews in Therapeutic Drug Carrier Systems, 1991, p. 92). Each of these classes has been discussed above.

[0782] iii. Microparticles

[0783] A nucleic acid inhibitor of the invention may be incorporated into a particle, e.g., a microparticle. Microparticles can be produced by spray-drying, but may also be produced by other methods including lyophilization, evaporation, fluid bed drying, vacuum drying, or a combination of these techniques.

[0784] iv. Penetration Enhancers

[0785] In one embodiment, the present invention employs various penetration enhancers to effect the efficient delivery of nucleic acids, particularly iRNAs, to the skin of animals Most drugs are present in solution in both ionized and nonionized forms. However, usually only lipid soluble or lipophilic drugs readily cross cell membranes. It has been discovered that even non-lipophilic drugs can cross cell membranes if the membrane to be crossed is treated with a penetration enhancer. In addition to aiding the diffusion of non-lipophilic drugs across cell membranes, penetration enhancers also enhance the permeability of lipophilic drugs.

[0786] Penetration enhancers can be classified as belonging to one of five broad categories, i.e., surfactants, fatty acids, bile salts, chelating agents, and non-chelating non-surfactants (see e.g., Malmsten, M. Surfactants and polymers in drug delivery, Informa Health Care, New York, N.Y., 2002; Lee et al., Critical Reviews in Therapeutic Drug Carrier Systems, 1991, p. 92). Each of the above mentioned classes of penetration enhancers are described below in greater detail.

[0787] Surfactants (or “surface-active agents”) are chemical entities which, when dissolved in an aqueous solution, reduce the surface tension of the solution or the interfacial tension between the aqueous solution and another liquid, with the result that absorption of iRNAs through the mucosa is enhanced. In addition to bile salts and fatty acids, these penetration enhancers include, for example, sodium lauryl sulfate, polyoxyethylene-9-lauryl ether and polyoxyethylene-20-cetyl ether) (see e.g., Malmsten, M. Surfactants and polymers in drug delivery, Informa Health Care, New York, N.Y., 2002; Lee et al., Critical Reviews in Therapeutic Drug Carrier Systems, 1991, p. 92); and perfluorochemical emulsions, such as FC-43. Takahashi et al., J. Pharm. Pharmacol., 1988, 40, 252).

[0788] Various fatty acids and their derivatives which act as penetration enhancers include, for example, oleic acid, lauric acid, capric acid (n-decanoic acid), myristic acid, palmitic acid, stearic acid, linoleic acid, linolenic acid, dicaprate, tricaprate, monoolein (1-monooleoyl-rac-glycerol), dilaurin, caprylic acid, arachidonic acid, glycerol 1-monocaprate, 1-dodecylazacycloheptan-2-one, acylcarnitines, acylcholines, C₁₋₂₀ alkyl esters thereof (e.g., methyl, isopropyl and t-butyl), and mono- and di-glycerides thereof (i.e., oleate, laurate, caprate, myristate, palmitate, stearate, linoleate, etc.) (see e.g., Touitou, E., et al. Enhancement in Drug Delivery, CRC Press, Danvers, Mass., 2006; Lee et al., Critical Reviews in Therapeutic Drug Carrier Systems, 1991, p. 92; Muranishi, Critical Reviews in Therapeutic Drug Carrier Systems, 1990, 7, 1-33; El Hariri et al., J. Pharm. Pharmacol., 1992, 44, 651-654).

[0789] The physiological role of bile includes the facilitation of dispersion and absorption of lipids and fat-soluble vitamins (see e.g., Malmsten, M. Surfactants and polymers in drug delivery, Informa Health Care, New York, N.Y., 2002; Brunton, Chapter 38 in: Goodman & Gilman's The Pharmacological Basis of Therapeutics, 9th Ed., Hardman et al. Eds., McGraw-Hill, New York, 1996, pp. 934-935). Various natural bile salts, and their synthetic derivatives, act as penetration enhancers. Thus the term “bile salts” includes any of the naturally occurring components of bile as well as any of their synthetic derivatives. Suitable bile salts include, for example, cholic acid (or its pharmaceutically acceptable sodium salt, sodium cholate), dehydrocholic acid (sodium dehydrocholate), deoxycholic acid (sodium deoxycholate), glucholic acid (sodium glucholate), glycholic acid (sodium glycocholate), glycodeoxycholic acid (sodium glycodeoxycholate), taurocholic acid (sodium taurocholate), taurodeoxycholic acid (sodium taurodeoxycholate), chenodeoxycholic acid (sodium chenodeoxycholate), ursodeoxycholic acid (UDCA), sodium tauro-24,25-dihydro-fusidate (STDHF), sodium glycodihydrofusidate and polyoxyethylene-9-lauryl ether (POE) (see e.g., Malmsten, M. Surfactants and polymers in drug delivery, Informa Health Care, New York, N Y, 2002; Lee et al., Critical Reviews in Therapeutic Drug Carrier Systems, 1991, page 92; Swinyard, Chapter 39 In: Remington's Pharmaceutical Sciences, 18th Ed., Gennaro, ed., Mack Publishing Co., Easton, Pa., 1990, pages 782-783; Muranishi, Critical Reviews in Therapeutic Drug Carrier Systems, 1990, 7, 1-33; Yamamoto et al., J. Pharm. Exp. Ther., 1992, 263, 25; Yamashita et al., J. Pharm. Sci., 1990, 79, 579-583).

[0790] Chelating agents, as used in connection with the present invention, can be defined as compounds that remove metallic ions from solution by forming complexes therewith, with the result that absorption of nucleic acid inhibitors s through the mucosa is enhanced. With regards to their use as penetration enhancers in the present invention, chelating agents have the added advantage of also serving as DNase inhibitors, as most characterized DNA nucleases require a divalent metal ion for catalysis and are thus inhibited by chelating agents (Jarrett, J. Chromatogr., 1993, 618, 315-339). Suitable chelating agents include but are not limited to disodium ethylenediaminetetraacetate (EDTA), citric acid, salicylates (e.g., sodium salicylate, 5-methoxysalicylate and homovanilate), N-acyl derivatives of collagen, laureth-9 and N-amino acyl derivatives of beta-diketones (enamines)(see e.g., Katdare, A. et al., Excipient development for pharmaceutical, biotechnology, and drug delivery, CRC Press, Danvers, Mass., 2006; Lee et al., Critical Reviews in Therapeutic Drug Carrier Systems, 1991, page 92; Muranishi, Critical Reviews in Therapeutic Drug Carrier Systems, 1990, 7, 1-33; Buur et al., J. Control Rd., 1990, 14, 43-51).

[0791] As used herein, non-chelating non-surfactant penetration enhancing compounds can be defined as compounds that demonstrate insignificant activity as chelating agents or as surfactants but that nonetheless enhance absorption of iRNAs through the alimentary mucosa (see e.g., Muranishi, Critical Reviews in Therapeutic Drug Carrier Systems, 1990, 7, 1-33). This class of penetration enhancers includes, for example, unsaturated cyclic ureas, 1-alkyl- and 1-alkenylazacyclo-alkanone derivatives (Lee et al., Critical Reviews in Therapeutic Drug Carrier Systems, 1991, page 92); and non-steroidal anti-inflammatory agents such as diclofenac sodium, indomethacin and phenylbutazone (Yamashita et al., J. Pharm. Pharmacol., 1987, 39, 621-626).

[0792] Agents that enhance uptake of nucleic acid inhibitors at the cellular level can also be added to the pharmaceutical and other compositions of the present invention. For example, cationic lipids, such as lipofectin (Junichi et al, U.S. Pat. No. 5,705,188), cationic glycerol derivatives, and polycationic molecules, such as polylysine (Lollo et al., PCT Application WO 97/30731), are also known to enhance the cellular uptake of dsRNAs. Examples of commercially available transfection reagents include, for example Lipofectamine™ (Invitrogen; Carlsbad, Calif.), Lipofectamine 2000™ (Invitrogen; Carlsbad, Calif.), 293fectin™ (Invitrogen; Carlsbad, Calif.), Cellfectin™ (Invitrogen; Carlsbad, Calif.), DMRIE-C™ (Invitrogen; Carlsbad, Calif.), FreeStyle™ MAX (Invitrogen; Carlsbad, Calif.), Lipofectamine™ 2000 CD (Invitrogen; Carlsbad, Calif.), Lipofectamine™ (Invitrogen; Carlsbad, Calif.), RNAiMAX (Invitrogen; Carlsbad, Calif.), Oligofectamine™ (Invitrogen; Carlsbad, Calif.), Optifect™ (Invitrogen; Carlsbad, Calif.), X-tremeGENE Q2 Transfection Reagent (Roche; Grenzacherstrasse, Switzerland), DOTAP Liposomal Transfection Reagent (Grenzacherstrasse, Switzerland), DOSPER Liposomal Transfection Reagent (Grenzacherstrasse, Switzerland), or Fugene (Grenzacherstrasse, Switzerland), Transfectam® Reagent (Promega; Madison, Wis.), TransFast™ Transfection Reagent (Promega; Madison, Wis.), Tfx™-20 Reagent (Promega; Madison, Wis.), Tfx™-50 Reagent (Promega; Madison, Wis.), DreamFect™ (OZ Biosciences; Marseille, France), EcoTransfect (OZ Biosciences; Marseille, France), TransPass^{a} D1 Transfection Reagent (New England Biolabs; Ipswich, Mass., USA), LyoVec™/LipoGen™ (Invitrogen; San Diego, Calif., USA), PerFectin Transfection Reagent (Genlantis; San Diego, Calif., USA), NeuroPORTER Transfection Reagent (Genlantis; San Diego, Calif., USA), GenePORTER Transfection reagent (Genlantis; San Diego, Calif., USA), GenePORTER 2 Transfection reagent (Genlantis; San Diego, Calif., USA), Cytofectin Transfection Reagent (Genlantis; San Diego, Calif., USA), BaculoPORTER Transfection Reagent (Genlantis; San Diego, Calif., USA), TroganPORTER™ transfection Reagent (Genlantis; San Diego, Calif., USA), RiboFect (Bioline; Taunton, Mass., USA), PlasFect (Bioline; Taunton, Mass., USA), UniFECTOR (B-Bridge International; Mountain View, Calif., USA), SureFECTOR (B-Bridge International; Mountain View, Calif., USA), or HiFect™ (B-Bridge International, Mountain View, Calif., USA), among others.

[0793] Other agents can be utilized to enhance the penetration of the administered nucleic acids, including glycols such as ethylene glycol and propylene glycol, pyrrols such as 2-pyrrol, azones, and terpenes such as limonene and menthone.

[0794] v. Carriers

[0795] Certain compositions of the present invention also incorporate carrier compounds in the formulation. As used herein, “carrier compound” or “carrier” can refer to a nucleic acid, or analog thereof, which is inert (i.e., does not possess biological activity per se) but is recognized as a nucleic acid by in vivo processes that reduce the bioavailability of a nucleic acid having biological activity by, for example, degrading the biologically active nucleic acid or promoting its removal from circulation. The coadministration of a nucleic acid and a carrier compound, typically with an excess of the latter substance, can result in a substantial reduction of the amount of nucleic acid recovered in the liver, kidney or other extracirculatory reservoirs, presumably due to competition between the carrier compound and the nucleic acid for a common receptor. For example, the recovery of a partially phosphorothioate dsRNA in hepatic tissue can be reduced when it is coadministered with polyinosinic acid, dextran sulfate, polycytidic acid or 4-acetamido-4′isothiocyano-stilbene-2,2′-disulfonic acid (Miyao et al., DsRNA Res. Dev., 1995, 5, 115-121; Takakura et al., DsRNA & Nucl. Acid Drug Dev., 1996, 6, 177-183.

[0796] vi. Excipients

[0797] In contrast to a carrier compound, a “pharmaceutical carrier” or “excipient” is a pharmaceutically acceptable solvent, suspending agent or any other pharmacologically inert vehicle for delivering one or more nucleic acids to an animal. The excipient can be liquid or solid and is selected, with the planned manner of administration in mind, so as to provide for the desired bulk, consistency, etc., when combined with a nucleic acid and the other components of a given pharmaceutical composition. Typical pharmaceutical carriers include, but are not limited to, binding agents (e.g., pregelatinized maize starch, polyvinylpyrrolidone or hydroxypropyl methylcellulose, etc.); fillers (e.g., lactose and other sugars, microcrystalline cellulose, pectin, gelatin, calcium sulfate, ethyl cellulose, polyacrylates or calcium hydrogen phosphate, etc.); lubricants (e.g., magnesium stearate, talc, silica, colloidal silicon dioxide, stearic acid, metallic stearates, hydrogenated vegetable oils, corn starch, polyethylene glycols, sodium benzoate, sodium acetate, etc.); disintegrants (e.g., starch, sodium starch glycolate, etc.); and wetting agents (e.g., sodium lauryl sulphate, etc). Pharmaceutically acceptable organic or inorganic excipients suitable for non-parenteral administration which do not deleteriously react with nucleic acids can also be used to formulate the compositions of the present invention. Suitable pharmaceutically acceptable carriers include, but are not limited to, water, salt solutions, alcohols, polyethylene glycols, gelatin, lactose, amylose, magnesium stearate, talc, silicic acid, viscous paraffin, hydroxymethylcellulose, polyvinylpyrrolidone and the like.

[0798] Formulations for topical administration of nucleic acid inhibitors can include sterile and non-sterile aqueous solutions, non-aqueous solutions in common solvents such as alcohols, or solutions of the nucleic acids in liquid or solid oil bases. The solutions can also contain buffers, diluents and other suitable additives. Pharmaceutically acceptable organic or inorganic excipients suitable for non-parenteral administration which do not deleteriously react with nucleic acids can be used. Suitable pharmaceutically acceptable excipients include, but are not limited to, water, salt solutions, alcohol, polyethylene glycols, gelatin, lactose, amylose, magnesium stearate, talc, silicic acid, viscous paraffin, hydroxymethylcellulose, polyvinylpyrrolidone and the like.

[0799] vii. Other Components

[0800] The compositions of the present invention can additionally contain other adjunct components conventionally found in pharmaceutical compositions, at their art-established usage levels. Thus, for example, the compositions can contain additional, compatible, pharmaceutically-active materials such as, for example, antipruritics, astringents, local anesthetics or anti-inflammatory agents, or can contain additional materials useful in physically formulating various dosage forms of the compositions of the present invention, such as dyes, flavoring agents, preservatives, antioxidants, opacifiers, thickening agents and stabilizers. However, such materials, when added, should not unduly interfere with the biological activities of the components of the compositions of the present invention. The formulations can be sterilized and, if desired, mixed with auxiliary agents, e.g., lubricants, preservatives, stabilizers, wetting agents, emulsifiers, salts for influencing osmotic pressure, buffers, colorings, flavorings and/or aromatic substances and the like which do not deleteriously interact with the nucleic acid(s) of the formulation.

[0801] Aqueous suspensions can contain substances which increase the viscosity of the suspension including, for example, sodium carboxymethylcellulose, sorbitol and/or dextran. The suspension can also contain stabilizers.

[0802] In some embodiments, pharmaceutical compositions featured in the invention include (a) one or more nucleic acid inhibitors and (b) one or more agents which function by a non-RNAi mechanism and which are useful in treating a kidney stone disease. Examples of such agents include, but are not limited to pyridoxine, an ACE inhibitor (angiotensin converting enzyme inhibitors), e.g., benazepril (Lotensin); an angiotensin II receptor antagonist (ARB) (e.g., losartan potassium, such as Merck & Co. 's Cozaar®), e.g., Candesartan (Atacand); an HMG-CoA reductase inhibitor (e.g., a statin); dietary oxalate degrading compounds, e.g., Oxalate decarboxylase (Oxazyme); calcium binding agents, e.g., Sodium cellulose phosphate (Calcibind); diuretics, e.g., thiazide diuretics, such as hydrochlorothiazide (Microzide); phosphate binders, e.g., Sevelamer (Renagel); magnesium and Vitamin B6 supplements; potassium citrate; orthophosphates, bisphosphonates; oral phosphate and citrate solutions; high fluid intake, urinary tract endoscopy; extracorporeal shock wave lithotripsy; kidney dialysis; kidney stone removal (e.g., surgery); and kidney/liver transplant; or a combination of any of the foregoing.

[0803] Toxicity and therapeutic efficacy of such compounds can be determined by standard pharmaceutical procedures in cell cultures or experimental animals, e.g., for determining the LD₅₀ (the dose lethal to 50% of the population) and the ED₅₀ (the dose therapeutically effective in 50% of the population). The dose ratio between toxic and therapeutic effects is the therapeutic index and it can be expressed as the ratio LD₅₀/ED₅₀. Compounds that exhibit high therapeutic indices are preferred. The data obtained from cell culture assays and animal studies can be used in formulating a range of dosage for use in humans. The dosage of compositions featured herein in the invention lies generally within a range of circulating concentrations that include the ED₅₀ with little or no toxicity. The dosage can vary within this range depending upon the dosage form employed and the route of administration utilized. For any compound used in the methods featured in the invention, the therapeutically effective dose can be estimated initially from cell culture assays. A dose can be formulated in animal models to achieve a circulating plasma concentration range of the compound or, when appropriate, of the polypeptide product of a target sequence (e.g., achieving a decreased concentration of the polypeptide) that includes the IC₅₀ (i.e., the concentration of the test compound which achieves a half-maximal inhibition of symptoms) as determined in cell culture. Such information can be used to more accurately determine useful doses in humans. Levels in plasma can be measured, for example, by high performance liquid chromatography.

### VII. Kits of the Invention

[0804] In certain aspects, the instant disclosure provides kits that include a suitable container containing a pharmaceutical formulation of a nucleic acid inhibitor. In certain embodiments the individual components of the pharmaceutical formulation may be provided in one container. Alternatively, it may be desirable to provide the components of the pharmaceutical formulation separately in two or more containers, e.g., one container for a nucleic acid inhibitor preparation, and at least another for a carrier compound. The kit may be packaged in a number of different configurations such as one or more containers in a single box. The different components can be combined, e.g., according to instructions provided with the kit. The components can be combined according to a method described herein, e.g., to prepare and administer a pharmaceutical composition. The kit can also include a delivery device.

[0805] Unless otherwise defined, all technical and scientific terms used herein have the same meaning as commonly understood by one of ordinary skill in the art to which this invention belongs. Although methods and materials similar or equivalent to those described herein can be used in the practice or testing of the RNAi agents and methods featured in the invention, suitable methods and materials are described below. All publications, patent applications, patents, and other references mentioned herein are incorporated by reference in their entirety. In case of conflict, the present specification, including definitions, will control. In addition, the materials, methods, and examples are illustrative only and not intended to be limiting.

[0806] An Sequence Listing is filed herewith and forms part of the specification as filed.

### EXAMPLES

### Example 1. Identification of a Population of Subjects that Would Benefit from Treatment with a Nucleic Acid Inhibitor of LDHA and/or aNucleic Acid Inhibitor of HAO1

[0807] Kidney stone disease often occurs in subjects having no other health issues and, in many, cases, even when the stones are passed and/or removed, kidney stone formation with recur. Indeed, kidney stone disease prevalence and recurrence rates are increasing (Knoll T. (2010) European Urology Supplements. 9(12):802-806). It is estimated that kidney stone disease affects about 12% of the world population at some stage in their lifetime (Chauhan C. K., et al. (2008) Journal of Materials Science. 20(1):85-92). It affects all ages, sexes, and races (Moe O. W. (2006) The Lancet. 367(9507):333-344; Romero V., et al. (2010) Reviews in Urology. 12(2-3):e86-e96) but occurs more frequently in men than in women within the age of 20-49 years (Edvardsson V. O., et al. (2013) Kidney International. 83(1):146-152). If patients do not comply with significant lifestyle changes, the relapsing rate of secondary stone formations is estimated to be 10-23% per year, 50% in 5-10 years, and 75% in 20 years of the patient (Moe O. W. (2006) The Lancet. 367(9507):333-344).

[0808] The UK Biobank, a large long-term biobank study in the United Kingdom (UK) is investigating the respective contributions of genetic predisposition and environmental exposure (including nutrition, lifestyle, medications etc.) to the development of disease (see, e.g., www.ukbiobank.ac.uk). The study is following about 500,000 volunteers in the UK, enrolled at ages from 40 to 69. Initial enrollment took place over four years from 2006, and the volunteers will be followed for at least 30 years thereafter. A plethora of phenotypic data is and has been collected and recently, the exome data (or the portion of the genomes composed of exons) from about 450,000 participants in the study has been obtained.

[0809] As described below, this wealth of UK Biobank data has been analyzed and a population of subjects that would benefit from treatment with a nucleic acid inhibitor of lactate dehydrogenase A (LDHA) and/or a nucleic acid inhibitor of hydroxyacid oxidase (HAO1) has been discovered. Specifically, it has been discovered that the presence of a heterozygous alanine-glyoxylate aminotransferase (AGXT) gene variant, e.g., a loss-of-function AGXT gene variant and/or a Clinvar pathogenic or pathogenic/likely pathogenic variant in PH1, is associated with kidney stone disease, e.g., non-recurrent or recurrent kidney stone disease.

[0810] More specifically, data from the UK Biobank, including exome data from 246,732 white British subjects, was interrogated and subjects carrying the heterozygous variants provided in Table 20 were identified. Of the subjects carrying those AGXT variants identified, subjects having a heterozygous AGXT loss of function (LOF) gene variant and subjects having a Clinvar AGXT variant were identified.

[0811] The subjects identified as carrying LOF heterozygous AGXT variants were aggregated together and tested as a set (i.e., a burden test) in order to determine if the presence of a LOF AGXT variant associated with an increased risk of kidney stone disease. Kidney stone disease was defined as the presence of an ICD-10 (10th revision of the International Statistical Classification of Diseases and Related Health Problems) diagnosis of kidney stones (N20.0) or kidney stone disease defined using Phecode 594.1 (https://phewascatalog.org/pheocodes_icd10). ICD-10 diagnosis codes were obtained from inpatient hospital diagnoses (UKBB Field 41270), causes of death (UKBB Field 40001 and 40002) and the cancer registry (UKBB Field 40006). Diagnoses also included additional hospital episode statistics (HESIN) and death registry data made available by UKBB in July 2020. Burden testing was performed using glm in R, using a binomial model. The data was adjusted for age, sex and genetic ancestry in the regression as well as country of recruitment to UKBB. As shown in Table 15, there was a significant association of the presence of a heterozygous LOF AGXT variant with kidney stone disease.

TABLE 15
Association of AGXT LOF variants with kidney stone disease.

| | | | | N | | |
|---|---|---|---|---|---|---|
| | | | N | carrier | N | |
| phenotype | Variant set | pvalue | carrier | cases | expected | OR (95% CI) |
| phecode_594_1_Calculus_of_kidney | AGXT LOF | 0.0003 | 203 | 8 | 2.31 | 3.74 (1.84-7.62) |
| (Hospital) | | | | | | |
| N20_calculus_of_kidney_and_ureter | AGXT LOF | 0.007 | 203 | 8 | 3.19 | 2.67 (1.31-5.43) |
| (Hospital) | | | | | | |

[0812] The heterozygous LOF AGXT variants carried by the eight identified subjects having kidney stone disease is provided in the Table 16. Six different variants were identified in these subjects, four of which are classified as “pathogenic” (i.e., pathogenic in the homozygous state) in Clinvar, 1 of which is classified as “likely pathogenic” (i.e., likely pathogenic in the homozygous state), and 1 of which was novel (not present in Clinvar) (see, e.g., Richards S, et al. “Standards and guidelines for the interpretation of sequence variants: a joint consensus recommendation of the American College of Medical Genetics and Genomics and the Association for Molecular Pathology” (2015) Genet Med. 17(5):405-24).

[0813] The same analysis was performed with the subjects identified as carrying Clinvar pathogenic or pathogenic/likely pathogenic heterozygous AGXT variants; the subjects were aggregated together and tested as a set (i.e., a burden test) in order to determine if the presence of a Clinvar AGXT variant associated with an increased risk of kidney stone disease. As shown in the Table 17, there was a significant association of the presence of a heterozygous Clinvar pathogenic AGXT variant with kidney stone disease from hospital and primary care combined diagnoses.

TABLE 17
Association of AGXT Clinvar pathogenic or pathogenic/likely pathogenic variants
with kidney stone disease

| | N cases | | | | Odds Ratio |
|---|---|---|---|---|---|
| | (in 246,732 | | | | (95% |
| | white British | P- | N | N | confidence |
| Phenotype | subjects) | value | observed | expected | interval) |
| phecode_594.1_Calculus.of.kidney | 2,257 | 0.103 | 14 | 9.31 | 1.56 |
| (hospital) | | | | | (0.92-2.64) |
| ICD10 N20.0 Calculus of kidney | 2,153 | 0.141 | 13 | 8.88 | 1.51 |
| (hospital) | | | | | (0.87-2.62) |
| phecode_594.1_Calculus.of.kidney | 3,505 | 0.011 | 24 | 14.46 | 1.70 |
| (hospital or primary care) | | | | | (1.13-2.56) |
| ICD10 N20.0 Calculus of kidney | 3,134 | 0.041 | 20 | 12.93 | 1.59 |
| (hospital or primary care) | | | | | (1.02-2.48) |

[0814] The heterozygous Clinvar AGXT variants carried by the 24 identified subjects having kidney stone disease is provided in the Table 18, all of which are classified as “pathogenic” (i.e., pathogenic in the homozygous state) or “pathogenic/likely pathogenic” (i.e., pathogenic/likely pathogenic in the homozygous state) (Richards S, et al., supra). Variants classified as “likely pathogenic” were not included. Ten different variants were identified in these subjects, four of which were predicted to be LOF variants.

[0815] In Tables 16, 18, and 20-23 below, the columns are as follows:

[0816] “Chrom” or “Chromosome” is the human chromosome containing the AGXT gene (human chromosome 2);

[0817] “Pos (hg38)” or “Position (hg38) is the nucleotide position of the variant in the nucleotide sequence of the hg38 assembly of the human reference genome released in December of 2013 (see, GenBank Reference No. NC_000002.12, the entire contents of which are incorporated herein by reference). “hg38” is also referred to as “GRCh38.”

[0818] “Position (hg19)” is the nucleotide position of the variant in the nucleotide sequence of the hg19 assembly of the human reference genome released in February, 2013 (see, GenBank assembly accession: GCA_000001405.1, the entire contents of which are incorporated herein by reference). “hg19” is also referred to as “GRCh37.”

[0819] “Ref” or “Reference” is the reference nucleotide at position “Pos (hg38),” “Position (hg38)” or “Position (hg19)” of the corresponding reference genome sequence.

[0820] “Alt” or “Alternate” is the variant nucleotide(s) present at the same position as the reference nucleotide. The variant nucleotides are found in the nucleotide sequence of the exomes of the subjects identified herein in the UK Biobank or in the exomes or genomes of the subjects identified herein in the gnomAD v2.1.1 and gnomAD v3 dataset.

[0821] “rsid” is the Reference SNP cluster ID (“rs” followed by a number) assigned to a specific SNP (Single Nucleotide Polymorphism) (see, e.g., www.ncbi.nlm.nih.gov/snp/).

[0822] “Gene” is the gene in which the variant was identified, i.e., AGXT.

[0823] “Source” is the sample, exome or genome, where the variants are found.

[0824] “Consequence” or “Annotation” is the effect on the protein or mRNA sequence that results from the presence of the “Alt” or “Alternate” nucleotide in the AGXT gene, e.g., frameshift, an insertion or deletion of a nucleotide(s) which disrupts the triplet reading frame of a DNA sequence; a missense variant, a single base pair substitution that produces an amino acid that is different from the reference amino acid at that position; a splice donor variant, or a splice acceptor variant, or a a splice region variant, a genetic alteration in the nucleotide sequence that occurs at the boundary of an exon and an intron (splice site) which disrupts RNA splicing resulting in the loss of exons or the inclusion of introns and an altered protein-coding sequence.

[0825] “Protein Consequence” is the amino acid change in the protein sequence that results from the presence of the “Alternate” nucleotide in the AGXT gene.

[0826] “Transcript Consequence” is the nucleotide change in the transcript sequence that results from the presence of the “Alternate” nucleotide in the AGXT gene.

[0827] “Clinvar_clnsig” is an annotation of the variant in the Clinvar database and refers to the clinical significance (e.g., pathogenic which, for AGXT, refers to pathogenic in the homozygous state; or likely pathogenic which refers to likely pathogenic in the homozygous state) and “clinvar_trait” is the trait/disease the clinvar_clnsig is referring to. dbNSFP is a database developed for functional prediction and annotation of all potential non-synonymous single-nucleotide variants (nsSNVs) in the human genome. Its current version is based on the Gencode release 29/Ensembl version 94 and includes a total of 84,013,490 nsSNVs and ssSNVs (splicing-site SNVs) (see, sites.google.com/site/jpopgen/dbNSFP).

[0828] “hgvsp_refseq” is the amino acid alteration in the reference amino acid sequence (GenBank Reference No. NP_000021.1) that occurs when the variant nucleotide(s) is present.

[0829] “maf_white” is the minor allele frequency in the white British subjects in UK biobank for whom exome sequencing data is available.

TABLE 16
AGXT LOF variants carried by individuals with kidney stones.

| chrom | Pos (hg38) | ref | alt | rsid | gene | consequence | clinvar_clnsig |
|---|---|---|---|---|---|---|---|
| 2 | 240868890 | A | AC | rs398122322; | AGXT | frameshift variant | Pathogenic |
| | | | | rs777193616 | | | |
| 2 | 240870646 | GC | G | na | AGXT | frameshift variant | na |
| 2 | 240873025 | A | AC | rs180177242 | AGXT | frameshift variant | Pathogenic |
| 2 | 240875934 | G | C | rs180177267 | AGXT | splice acceptor variant | Likely_pathogenic |
| 2 | 240876005 | G | A | na | AGXT | splice donor variant | Pathogenic |
| 2 | 240878035 | CCA | C | na | AGXT | frameshift variant | Pathogenic |

| chrom | Pos (hg38) | clinvar_trait | hgvsp_refseq | MAF |
|---|---|---|---|---|
| 2 | 240868890 | Primary_hyperoxaluria,_type_I | NP_000021.1: | 0.000135 |
| | | | p.Lys12GlnfsTer156 | |
| 2 | 240870646 | na | NP_000021.1: | 2.75E−06 |
| | | | p.Arg122GlufsTer5 | |
| 2 | 240873025 | Primary_hyperoxaluria,_type_I | NP_000021.1: | 1.37E−06 |
| | | | p.Leu193ProfsTer32 | |
| 2 | 240875934 | Primary_hyperoxaluria,_type_I | na | 4.12E−05 |
| 2 | 240876005 | Primary_hyperoxaluria,_type_I | na | 9.62E−06 |
| 2 | 240878035 | Primary_hyperoxaluria,_type_I | NP_000021.1: | 1.37E−06 |
| | | | p.Thr320SerfsTer11 | |

TABLE 18
AGXT Clinvar variants carried by individuals with kidney stones.

| chrom | Pos (hg38) | ref | alt | rsid | gene | consequence | clinvar_rs | clinvar_clnsig |
|---|---|---|---|---|---|---|---|---|
| 2 | 240868890 | A | AC | rs398122322; | AGXT | frameshift_variant | 140583 | Pathogenic |
| | | | | rs777193616 | | | | |
| 2 | 240868986 | G | A | rs121908523 | AGXT | missense_variant | 5644 | Pathogenic/ |
| | | | | | | | | Likely_pathogenic |
| 2 | 240869357 | G | A | | AGXT | missense_variant | 204096 | Pathogenic |
| 2 | 240871379 | T | A | rs121908524 | AGXT | missense_variant | 5645 | Pathogenic |
| 2 | 240871391 | G | A | rs121908530 | AGXT | missense_variant | 5650 | Pathogenic |
| 2 | 240871433 | G | A | | AGXT | missense_variant | 40166 | Pathogenic/ |
| | | | | | | | | Likely_pathogenic |
| 2 | 240873025 | A | AC | rs180177242 | AGXT | frameshift_variant | 204192 | Pathogenic |
| 2 | 240876005 | G | A | | AGXT | splice_donor_variant | 204160 | Pathogenic |
| 2 | 240877534 | C | G | | AGXT | splice_region_variant | 204169 | Pathogenic |
| 2 | 240878035 | CCA | C | | AGXT | frameshift_variant | 204208 | Pathogenic |

| chrom | Pos (hg38) | clinvar_trait | hgvsp_refseq | maf_white |
|---|---|---|---|---|
| 2 | 240868890 | Primary_hyperoxaluria,_type_I | NP_000021.1: p.Lys12GlnfsTer156 | 0.00014 |
| 2 | 240868986 | Nephrocalcinosis\|Nephrolithiasis\| | NP_000021.1: p.Gly41Arg | 0.00015 |
| | | Primary_hyperoxaluria,_type_I | | |
| 2 | 240869357 | Primary_hyperoxaluria,_type_I | NP_000021.1: p.Arg118His | 3.85E−05 |
| 2 | 240871379 | Primary_hyperoxaluria,_type_I\| | NP_000021.1: p.Phe152Ile | 0.00013 |
| | | not_provided | | |
| 2 | 240871391 | Primary_hyperoxaluria,_type_I | NP_000021.1: p.Gly156Arg | 1.42E−05 |
| 2 | 240871433 | Primary_hyperoxaluria,_type_I\| | NP-000021.1: p.Gly170Arg | 0.00129 |
| | | not_provided | | |
| 2 | 240873025 | Primary_hyperoxaluria,_type_I | NP_000021.1: p.Leu193ProfsTer32 | 2.03E−06 |
| 2 | 240876005 | Primary_hyperoxaluria,_type_I | NA | 1.22E−05 |
| 2 | 240877534 | Primary_hyperoxaluria,_type_I | NA | 0.00011 |
| 2 | 240878035 | Primary_hyperoxaluria,_type_I | NP_000021.1: p.Thr320SerfsTer11 | 2.03E−06 |

[0830] Further analyses were performed and subjects having multiple incidences of kidney stones using record-level inpatient hospital data from UK biobank (see https://biobank.ndph.ox.ac.uk/showcase/label.cgi?id=2006) were selected as follows:

[0831] 1. Per hospital admission, take first occurrence of kidney stones (ICD10 code N20);

[0832] 2. Define date of diagnosis as “episode start date” (or “admission date”/“episode end date” if not recorded); and

[0833] 3. Require at least 90 days between episodes to count as recurrence.

[0834] Using these criteria, 1099 (at least 90 days apart) or 1627 (at least 1 year apart) white British individuals out of 363,977 were identified as having recurrent stones.

[0835] Of those subjects with recurrent kidney stone disease, four subjects carried a heterozygous AGXT LOF variant (N carrier cases) as shown in Table 19, whereas based on AGXT LOF frequency and disease prevalence, fewer than one individual would be expected to have disease (N expected). Thus, there is an association of the presence of a heterozygous AGXT LOF variant with kidney stone disease recurrence.

TABLE 19

| | | | N carrier | | N | | |
|---|---|---|---|---|---|---|---|
| | Variant | | AGXT | N | carrier | N | |
| phenotype | set | pvalue | LOF | cases | cases | expected | OR (95% CI) |
| Recurrence 1 year | AGXT LOF | 7.78E−05 | 203 | 1099 | 4 | 0.61 | 7.46 (2.75-20.22) |
| Recurrence 90 days | AGXT LOF | 0.0014 | 203 | 1627 | 4 | 0.91 | 5.08 (1.88-13.76) |

[0836] Further interrogation of the UK Biobank data revealed that there were 1,181 subjects having kidney stones disease (phecode 594.1 CDHP) (with associated exome data) that have had a surgical procedure to treat kidney stones (34% of all kidney stone patients). Within these 1,181 subjects, four subjects carrying heterozygous AGXT LOF variants were identified, Thus, 4 out of 7 or 57% of kidney stone patients with an AGXT LOF variant have had a surgical procedure for kidney stones (Fisher's exact test, p=0.18). In addition, within these 1,181 subjects, 8 subjects carrying heterozygous AGXT Clinvar variants were identified. Thus, 33% of kidney stone patientys wityh an AGXT Clinvar variant have had a surgical procedure for kidney stones.

[0837] In summary, there is a significant association of the presence of a heterozygous AGXT LOF or pathogenic variant with kidney stone disease, such as recurrent kidney stone disease in that heterozygous AGXT LOF variant carriers have recurrent kidney stone disease, and the percentage of heterozygous AGXT variant carriers who have had surgery for kidney stone disease is higher than for subjects that do not carry a heterozygous AGXT variant.

TABLE 1
Abbreviations of nucleotide monomers used in nucleic
acid sequence representation.
It will be understood that these monomers,
when present in an oligonucleotide,
are mutually linked by 5′-3′-phosphodiester bonds.

| Abbreviation | Nucleotide(s) |
|---|---|
| A | Adenosine-3′-phosphate |
| Ab | beta-L-adenosine-3′-phosphate |
| Abs | beta-L-adenosine-3′-phosphorothioate |
| Af | 2′-fluoroadenosine-3′-phosphate |
| Afs | 2′-fluoroadenosine-3′-phosphorothioate |
| As | adenosine-3′-phosphorothioate |
| C | cytidine-3′-phosphate |
| Cb | beta-L-cytidine-3′-phosphate |
| Cbs | beta-L-cytidine-3'-phosphorothioate |
| Cf | 2′-fluorocytidine-3′-phosphate |
| Cfs | 2′-fluorocytidine-3′-phosphorothioate |
| Cs | cytidine-3′-phosphorothioate |
| G | guanosine-3′-phosphate |
| Gb | beta-L-guanosine-3′-phosphate |
| Gbs | beta-L-guanosine-3′-phosphorothioate |
| Gf | 2′-fluoroguanosine-3′-phosphate |
| Gfs | 2′-fluoroguanosine-3′-phosphorothioate |
| Gs | guanosine-3′-phosphorothioate |
| T | 5′-methyluridine-3′-phosphate |
| Tf | 2′-fluoro-5-methyluridine-3′-phosphate |
| Tfs | 2′-fluoro-5-methyluridine-3′-phosphorothioate |
| Ts | 5-methyluridine-3′-phosphorothioate |
| u | Uridine-3′-phosphate |
| Uf | 2′-fluorouridine-3′-phosphate |
| Ufs | 2′-fluorouridine-3′-phosphorothioate |
| Us | uridine-3′-phosphorothioate |
| N | anynucleotide(G, A, C, T or U) |
| a | 2′-O-methyladenosine-3′-phosphate |
| as | 2′-O-methyladenosine-3′-phosphorothioate |
| c | 2′-O-methylcytidine-3′-phosphate |
| cs | 2′-O-methylcytidine-3′-phosphorothioate |
| g | 2′-O-methylguanosine-3′-phosphate |
| gs | 2′-O-methylguanosine-3′-phosphorothioate |
| t | 2′-O-methyl-5-methyluridine-3′-phosphate |
| ts | 2′-O-methyl-5-methyluridine-3′-phosphorothioate |
| u | 2′-O-methyluridine-3′-phosphate |
| US | 2′-O-methyluridine-3′-phosphorothioate |
| s | phosphorothioate linkage |
| L96 | N-[tris(GalNAc-alkyl)-amidodecanoyl)]- |
| | 4-hydroxyprolinol Hyp-(GalNAc-alkyl)3 |
| Y34 | 2-hydroxymethyl-tetrahydrofurane-4-methoxy- |
| | 3-phosphate (abasic 2′-OMe furanose) |
| Y44 | inverted abasic DNA |
| | (2-hydroxymethyl-tetrahydrofurane-5-phosphate) |
| (Agn) | Adenosine-glycol nucleic acid (GNA) |
| (Cgn) | Cytidine-glycol nucleic acid (GNA) |
| (Ggn) | Guanosine-glycol nucleic acid (GNA) |
| (Tgn) | Thymidine-glycol nucleic acid (GNA) S-Isomer |
| P | Phosphate |
| VP | Vinyl-phosphate |
| (Aam) | 2′-O-(N-methylacetamide)adenosine- |
| | 3′-phosphate |
| (Aams) | 2′-O-(N-methylacetamide)adenosine- |
| | 3′-phosphorothioate |
| (Gam) | 2′-O-(N-methylacetamide)guanosine- |
| | 3′-phosphate |
| (Gams) | 2′-O-(N-methylacetamide)guanosine- |
| | 3′-phosphorothioate |
| (Tam) | 2′-O-(N-methylacetamide)thymidine- |
| | 3′-phosphate |
| (Tams) | 2′-O-(N-methylacetamide)thymidine- |
| | 3′-phosphorothioate |
| dA | 2′-deoxyadenosine-3′-phosphate |
| dAs | 2′-deoxyadenosine-3′-phosphorothioate |
| dC | 2′-deoxycytidine-3′-phosphate |
| dCs | 2′-deoxycytidine-3′-phosphorothioate |
| dG | 2′-deoxyguanosine-3′-phosphate |
| dGs | 2′-deoxyguanosine-3′-phosphorothioate |
| dT | 2′-deoxythymidine-3′-phosphate |
| dTs | 2′-deoxythymidine-3′-phosphorothioate |
| dU | 2′-deoxyuridine |
| dUs | 2′-deoxyuridine-3′-phosphorothioate |
| (Aeo) | 2′-O-methoxyethyladenosine-3′-phosphate |
| (Aeos) | 2′-O-methoxyethyladenosine-3′-phosphorothioate |
| (Geo) | 2′-O-methoxyethylguanosine-3′-phosphate |
| (Geos) | 2′-O-methoxyethylguanosine-3′-phosphorothioate |
| (Teo) | 2′-O-methoxyethyl-5-methyluridine-3′-phosphate |
| (Teos) | 2′-O-methoxyethyl-5-methyluridine-3′- |
| | phosphorothioate |
| (m5Ceo) | 2′-O-methoxyethyl-5-methylcytidine-3′-phosphate |
| (m5Ceos) | 2′-O-methoxyethyl-5-methylcytidine-3′- |
| | phosphorothioate |
| (A3m) | 3′-O-methyladenosine-2′-phosphate |
| (A3mx) | 3′-O-methyl-xylofuranosyladenosine-2′-phosphate |
| (G3m) | 3′-O-methylguanosine-2′-phosphate |
| (G3mx) | 3′-O-methyl-xylofuranosylguanosine-2′-phosphate |
| (C3m) | 3′-O-methylcytidine-2′-phosphate |
| (C3mx) | 3′-O-methyl-xylofuranosylcytidine-2′-phosphate |
| (U3m) | 3′-O-methyluridine-2′-phosphate |
| U3mx) | 3′-O-methyl-xylofuranosyluridine-2′-phosphate |
| (m5Cam) | 2′-O-(N-methylacetamide)-5-methylcytidine-3′- |
| | phosphate |
| (m5Cams) | 2′-O-(N-methylacetamide)-5-methylcytidine-3′- |
| | phosphorothioate |
| (Chd) | 2′-O-hexadecyl-cytidine-3′-phosphate |
| (Chds) | 2′-O-hexadecyl-cytidine-3′-phosphorothioate |
| (Uhd) | 2′-O-hexadecyl-uridine-3′-phosphate |
| (Uhds) | 2′-O-hexadecyl-uridine-3′-phosphorothioate |
| (pshe) | Hydroxyethylphosphorothioate |
| (dt) | deoxy-thymine |
| (5MdC) | 5′-methyl-deoxycytidine-3′-phosphate |
| (5MdC)s | 5′-methyl-deoxycytidine-3′-phosphorothioate |

TABLE 2
UNMODIFIED HUMAN/CYNOMOLGUS CROSS-REACTIVE LDHA iRNA SEQUENCES

| | Sense | Sense | SEQ | Position | Antisense | Antisense | SEQ | Position |
|---|---|---|---|---|---|---|---|---|
| Duplex | Oligo | Sequence | ID | in | Oligo | Sequence | ID | in |
| Name | Name | 5′ to 3′ | NO | NM_005566.3 | Name | 5′ to 3′ | NO | NM_005566.3 |
| AD- | A- | UUUAUCUGAU | 3210 | 1347-1367 | A- | UUUAAUCACA | 3396 | 1345-1367 |
| 159469 | 314810 | CUGUGAUUAA | | | 314811 | GAUCAGAUAA | | |
| | | A | | | | AAA | | |
| AD- | A- | ACUGGUUAGU | 3211 | 1489-1509 | A- | AACUAUUUCA | 3397 | 1487-1509 |
| 159607 | 315086 | GUGAAAUAGU | | | 315087 | CACUAACCAG | | |
| | | U | | | | UUG | | |
| AD- | A- | AACAUGCCUA | 3212 | 1615-1635 | A- | AAAUGUUGGA | 3398 | 1613-1635 |
| 159713 | 315298 | GUCCAACAUU | | | 315299 | CUAGGCAUGU | | |
| | | U | | | | UCA | | |
| AD- | A- | CAAGUCCAAU | 3213 | 263-283 | A- | AGAGUUGCCA | 3399 | 261-283 |
| 158504 | 312881 | AUGGCAACUC | | | 312882 | UAUUGGACUU | | |
| | | U | | | | GGA | | |
| AD- | A- | UCCACCAUGA | 3214 | 1092-1112 | A- | AAGACCCUUA | 3400 | 1090-1112 |
| 159233 | 314338 | UUAAGGGUCU | | | 314339 | AUCAUGGUGG | | |
| | | U | | | | AAA | | |
| AD- | A- | UCAUUUCACU | 3215 | 1289-1309 | A- | UUAGCCUAGA | 3401 | 1287-1309 |
| 159411 | 314694 | GUCUAGGCUA | | | 314695 | CAGUGAAAUG | | |
| | | A | | | | AUA | | |
| AD- | A- | UGUCCUUUUU | 3216 | 1340-1360 | A- | ACAGAUCAGA | 3402 | 1338-1360 |
| 159462 | 314796 | AUCUGAUCUG | | | 314797 | UAAAAAGGAC | | |
| | | U | | | | AAC | | |
| AD- | A- | CCAGUGUAUA | 3217 | 1662-1682 | A- | UAUAUUGGAU | 3403 | 1660-1682 |
| 159742 | 315356 | AAUCCAAUAU | | | 315357 | UUAUACACUG | | |
| | | A | | | | GAU | | |
| AD- | A- | UCCAAGUGUU | 3218 | 1791-1811 | A- | UUAGUUGGUA | 3404 | 1789-1811 |
| 159863 | 315598 | AUACCAACUA | | | 315599 | UAACACUUGG | | |
| | | A | | | | AUA | | |
| AD- | A- | GUCAUCGAAG | 3219 | 429-449 | A- | UUUCAAUUUG | 3405 | 427-449 |
| 158626 | 313124 | ACAAAUUGAA | | | 313125 | UCUUCGAUGA | | |
| | | A | | | | CAU | | |
| AD- | A- | GAACACCAAA | 3220 | 490-510 | A- | UAGAGACAAU | 3406 | 488-510 |
| 158687 | 313246 | GAUUGUCUCU | | | 313247 | CUUUGGUGUU | | |
| | | A | | | | CUA | | |
| AD- | A- | AACACCAAAG | 3221 | 491-511 | A- | UCAGAGACAA | 3407 | 489-511 |
| 158688 | 313248 | AUUGUCUCUG | | | 313249 | UCUUUGGUGU | | |
| | | A | | | | UCU | | |
| AD- | A- | AUGUUGUCCU | 3222 | 1336-1356 | A- | AUCAGAUAAA | 3408 | 1334-1356 |
| 159458 | 314788 | UUUUAUCUGA | | | 314789 | AAGGACAACA | | |
| | | U | | | | UGC | | |
| AD- | A- | UCAACUCCUG | 3223 | 1401-1421 | A- | AUUUCUAACU | 3409 | 1399-1421 |
| 159519 | 314910 | AAGUUAGAAA | | | 314911 | UCAGGAGUUG | | |
| | | U | | | | AUG | | |
| AD- | A- | AACUAUCCAA | 3224 | 1786-1806 | A- | UGGUAUAACA | 3410 | 1784-1806 |
| 159858 | 315588 | GUGUUAUACC | | | 315589 | CUUGGAUAGU | | |
| | | A | | | | UGG | | |
| AD- | A- | UCCUUAGAAC | 3225 | 484-504 | A- | UAAUCUUUGG | 3411 | 482-504 |
| 158681 | 313234 | ACCAAAGAUU | | | 313235 | UGUUCUAAGG | | |
| | | A | | | | AAA | | |
| AD- | A- | GGUAUUAAUC | 3226 | 1465-1485 | A- | AGACUACACA | 3412 | 1463-1485 |
| 159583 | 315038 | UUGUGUAGUC | | | 315039 | AGAUUAAUAC | | |
| | | U | | | | CAU | | |
| AD- | A- | GGCUCCUUCA | 3227 | 1602-1622 | A- | UGCAUGUUCA | 3413 | 1600-1622 |
| 159700 | 315272 | CUGAACAUGC | | | 315273 | GUGAAGGAGC | | |
| | | A | | | | CAG | | |
| AD- | A- | UAUCAGUAGU | 3228 | 1728-1748 | A- | UGGUAAUGUA | 3414 | 1726-1748 |
| 159807 | 315486 | GUACAUUACC | | | 315487 | CACUACUGAU | | |
| | | A | | | | AUA | | |
| AD- | A- | CAGCCUUUUC | 3229 | 476-496 | A- | UGUGUUCUAA | 3415 | 474-496 |
| 158673 | 313218 | CUUAGAACAC | | | 313219 | GGAAAAGGCU | | |
| | | A | | | | GCC | | |
| AD- | A- | CUGGUUAGUG | 3230 | 1490-1510 | A- | UAACUAUUUC | 3416 | 1488-1510 |
| 159608 | 315088 | UGAAAUAGUU | | | 315089 | ACACUAACCA | | |
| | | A | | | | GUU | | |
| AD- | A- | ACUAUAUCAG | 3231 | 1724-1744 | A- | AAUGUACACU | 3417 | 1722-1744 |
| 159803 | 315478 | UAGUGUACAU | | | 315479 | ACUGAUAUAG | | |
| | | U | | | | UUC | | |
| AD- | A- | UAUAUCAGUA | 3232 | 1726-1746 | A- | UUAAUGUACA | 3418 | 1724-1746 |
| 159805 | 315482 | GUGUACAUUA | | | 315483 | CUACUGAUAU | | |
| | | A | | | | AGU | | |
| AD- | A- | GUAAUAUUUU | 3233 | 1371-1391 | A- | UAGUCCAUCU | 3419 | 1369-1391 |
| 159489 | 314850 | AAGAUGGACU | | | 314851 | UAAAAUAUUA | | |
| | | A | | | | CUG | | |
| AD- | A- | UUUUAAGAUG | 3234 | 1377-1397 | A- | UUUUCCCAGU | 3420 | 1375-1397 |
| 159495 | 314862 | GACUGGGAAA | | | 314863 | CCAUCUUAAA | | |
| | | A | | | | AUA | | |
| AD- | A- | UGGUUAGUGU | 3235 | 1491-1511 | A- | AGAACUAUUU | 3421 | 1489-1511 |
| 159609 | 315090 | GAAAUAGUUC | | | 315091 | CACACUAACC | | |
| | | U | | | | AGU | | |
| AD- | A- | UUCACUGAAC | 3236 | 1608-1628 | A- | UGACUAGGCA | 3422 | 1606-1628 |
| 159706 | 315284 | AUGCCUAGUC | | | 315285 | UGUUCAGUGA | | |
| | | A | | | | AGG | | |
| AD- | A- | ACCAACUAUC | 3237 | 1783-1803 | A- | UAUAACACUU | 3423 | 1781-1803 |
| 159855 | 315582 | CAAGUGUUAU | | | 315583 | GGAUAGUUGG | | |
| | | A | | | | UUG | | |
| AD- | A- | CCAAGUGUUA | 3238 | 1792-1812 | A- | UUUAGUUGGU | 3424 | 1790-1812 |
| 159864 | 315600 | UACCAACUAA | | | 315601 | AUAACACUUG | | |
| | | A | | | | GAU | | |
| AD- | A- | UUCCUUUUGG | 3239 | 250-270 | A- | UGGACUUGGA | 3425 | 248-270 |
| 158491 | 312855 | UUCCAAGUCC | | | 312856 | ACCAAAAGGA | | |
| | | A | | | | AUC | | |
| AD- | A- | GCAGCCUUUU | 3240 | 475-495 | A- | UUGUUCUAAG | 3426 | 473-495 |
| 158672 | 313216 | CCUUAGAACA | | | 313217 | GAAAAGGCUG | | |
| | | A | | | | CCA | | |
| AD- | A- | AGUAAUAUUU | 3241 | 1370-1390 | A- | AGUCCAUCUU | 3427 | 1368-1390 |
| 159488 | 314848 | UAAGAUGGAC | | | 314849 | AAAAUAUUAC | | |
| | | U | | | | UGC | | |
| AD- | A- | AAAAUCCACA | 3242 | 1435-1455 | A- | UAGGAUAUAG | 3428 | 1433-1455 |
| 159553 | 314978 | GCUAUAUCCU | | | 314979 | CUGUGGAUUU | | |
| | | A | | | | UAC | | |
| AD- | A- | UCCUUCACUG | 3243 | 1605-1625 | A- | UUAGGCAUGU | 3429 | 1603-1625 |
| 159703 | 315278 | AACAUGCCUA | | | 315279 | UCAGUGAAGG | | |
| | | A | | | | AGC | | |
| AD- | A- | CACUGAACAU | 3244 | 1610-1630 | A- | UUGGACUAGG | 3430 | 1608-1630 |
| 159708 | 315288 | GCCUAGUCCA | | | 315289 | CAUGUUCAGU | | |
| | | A | | | | GAA | | |
| AD- | A- | AAGUGUUAUA | 3245 | 1794-1814 | A- | GUUUUAGUUG | 3431 | 1792-1814 |
| 159866 | 315604 | CCAACUAAAA | | | 315605 | GUAUAACACU | | |
| | | C | | | | UGG | | |
| AD- | A- | UUCCACCAUG | 3246 | 1091-1111 | A- | AGACCCUUAA | 3432 | 1089-1111 |
| 159232 | 314336 | AUUAAGGGUC | | | 314337 | UCAUGGUGGA | | |
| | | U | | | | AAC | | |
| AD- | A- | GAACAUGCCU | 3247 | 1614-1634 | A- | AAUGUUGGAC | 3433 | 1612-1634 |
| 159712 | 315296 | AGUCCAACAU | | | 315297 | UAGGCAUGUU | | |
| | | U | | | | CAG | | |
| AD- | A- | AUCAGUAGUG | 3248 | 1729-1749 | A- | AUGGUAAUGU | 3434 | 1727-1749 |
| 159808 | 315488 | UACAUUACCA | | | 315489 | ACACUACUGA | | |
| | | U | | | | UAU | | |
| AD- | A- | AUCCAAGUGU | 3249 | 1790-1810 | A- | UAGUUGGUAU | 3435 | 1788-1810 |
| 159862 | 315596 | UAUACCAACU | | | 315597 | AACACUUGGA | | |
| | | A | | | | UAG | | |
| AD- | A- | CCAAGUCCAA | 3250 | 262-282 | A- | UAGUUGCCAU | 3436 | 260-282 |
| 158503 | 312879 | UAUGGCAACU | | | 312880 | AUUGGACUUG | | |
| | | A | | | | GAA | | |
| AD- | A- | AUCUCAGACC | 3251 | 1170-1190 | A- | UACCUUCACA | 3437 | 1168-1190 |
| 159311 | 314494 | UUGUGAAGGU | | | 314495 | AGGUCUGAGA | | |
| | | A | | | | UUC | | |
| AD- | A- | CAUUUCACUG | 3252 | 1290-1310 | A- | UGUAGCCUAG | 3438 | 1288-1310 |
| 159412 | 314696 | UCUAGGCUAC | | | 314697 | ACAGUGAAAU | | |
| | | A | | | | GAU | | |
| AD- | A- | CCACAGCUAU | 3253 | 1440-1460 | A- | AGCAUCAGGA | 3439 | 1438-1460 |
| 159558 | 314988 | AUCCUGAUGC | | | 314989 | UAUAGCUGUG | | |
| | | U | | | | GAU | | |
| AD- | A- | CUUCACUGAA | 3254 | 1607-1627 | A- | UACUAGGCAU | 3440 | 1605-1627 |
| 159705 | 315282 | CAUGCCUAGU | | | 315283 | GUUCAGUGAA | | |
| | | A | | | | GGA | | |
| AD- | A- | GUGGUUGAGA | 3255 | 972-992 | A- | UUCAUAAGCA | 3441 | 970-992 |
| 159113 | 314098 | GUGCUUAUGA | | | 314099 | CUCUCAACCA | | |
| | | A | | | | CCU | | |
| AD- | A- | CAAACUCAAA | 3256 | 998-1018 | A- | UAUGUGUAGC | 3442 | 996-1018 |
| 159139 | 314150 | GGCUACACAU | | | 314151 | CUUUGAGUUU | | |
| | | A | | | | GAU | | |
| AD- | A- | AUAUCAGUAG | 3257 | 1727-1747 | A- | UGUAAUGUAC | 3443 | 1725-1747 |
| 159806 | 315484 | UGUACAUUAC | | | 315485 | ACUACUGAUA | | |
| | | A | | | | UAG | | |
| AD- | A- | CAACCAACUA | 3258 | 1781-1801 | A- | UAACACUUGG | 3444 | 1779-1801 |
| 159853 | 315578 | UCCAAGUGUU | | | 315579 | AUAGUUGGUU | | |
| | | A | | | | GCA | | |
| AD- | A- | UCAUCGAAGA | 3259 | 430-450 | A- | UCUUCAAUUU | 3445 | 428-450 |
| 158627 | 313126 | CAAAUUGAAG | | | 313127 | GUCUUCGAUG | | |
| | | A | | | | ACA | | |
| AD- | A- | GCAGAUUUGG | 3260 | 1041-1061 | A- | UAUACUCUCU | 3446 | 1039-1061 |
| 159182 | 314236 | CAGAGAGUAU | | | 314237 | GCCAAAUCUG | | |
| | | A | | | | CUA | | |
| AD- | A- | CUCCUUCACU | 3261 | 1604-1624 | A- | UAGGCAUGUU | 3447 | 1602-1624 |
| 159702 | 315276 | GAACAUGCCU | | | 315277 | CAGUGAAGGA | | |
| | | A | | | | GCC | | |
| AD- | A- | CAUGCCUAGU | 3262 | 1617-1637 | A- | AAAAAUGUUG | 3448 | 1615-1637 |
| 159715 | 315302 | CCAACAUUUU | | | 315303 | GACUAGGCAU | | |
| | | U | | | | GUU | | |
| AD- | A- | UGCCAUCAGU | 3263 | 377-397 | A- | UUCAUUAAGA | 3449 | 375-397 |
| 158575 | 313022 | AUCUUAAUGA | | | 313023 | UACUGAUGGC | | |
| | | A | | | | ACA | | |
| AD- | A- | GCCAUCAGUA | 3264 | 378-398 | A- | UUUCAUUAAG | 3450 | 376-398 |
| 158576 | 313024 | UCUUAAUGAA | | | 313025 | AUACUGAUGG | | |
| | | A | | | | CAC | | |
| AD- | A- | UUAGAACACC | 3265 | 487-507 | A- | AGACAAUCUU | 3451 | 485-507 |
| 158684 | 313240 | AAAGAUUGUC | | | 313241 | UGGUGUUCUA | | |
| | | U | | | | AGG | | |
| AD- | A- | AUCAUUUCAC | 3266 | 1288-1308 | A- | UAGCCUAGAC | 3452 | 1286-1308 |
| 159410 | 314692 | UGUCUAGGCU | | | 314693 | AGUGAAAUGA | | |
| | | A | | | | UAU | | |
| AD- | A- | UCACUGUCUA | 3267 | 1294-1314 | A- | UUGUUGUAGC | 3453 | 1292-1314 |
| 159416 | 314704 | GGCUACAACA | | | 314705 | CUAGACAGUG | | |
| | | A | | | | AAA | | |
| AD- | A- | GGAUCCAGUG | 3268 | 1658-1678 | A- | UUGGAUUUAU | 3454 | 1656-1678 |
| 159738 | 315348 | UAUAAAUCCA | | | 315349 | ACACUGGAUC | | |
| | | A | | | | CCA | | |
| AD- | A- | CAACUAUCCA | 3269 | 1785-1805 | A- | UGUAUAACAC | 3455 | 1783-1805 |
| 159857 | 315586 | AGUGUUAUAC | | | 315587 | UUGGAUAGUU | | |
| | | A | | | | GGU | | |
| AD- | A- | UUGGUUCCAA | 3270 | 256-276 | A- | UCAUAUUGGA | 3456 | 254-276 |
| 158497 | 312867 | GUCCAAUAUG | | | 312868 | CUUGGAACCA | | |
| | | A | | | | AAA | | |
| AD- | A- | UGCUUAUGAG | 3271 | 983-1003 | A- | AGUUUGAUCA | 3457 | 981-1003 |
| 159124 | 314120 | GUGAUCAAAC | | | 314121 | CCUCAUAAGC | | |
| | | U | | | | ACU | | |
| AD- | A- | AAACUCAAAG | 3272 | 999-1019 | A- | UGAUGUGUAG | 3458 | 997-1019 |
| 159140 | 314152 | GCUACACAUC | | | 314153 | CCUUUGAGUU | | |
| | | A | | | | UGA | | |
| AD- | A- | UCUCAGACCU | 3273 | 1171-1191 | A- | UCACCUUCAC | 3459 | 1169-1191 |
| 159312 | 314496 | UGUGAAGGUG | | | 314497 | AAGGUCUGAG | | |
| | | A | | | | AUU | | |
| AD- | A- | UAAAAUCCAC | 3274 | 1434-1454 | A- | AGGAUAUAGC | 3460 | 1432-1454 |
| 159552 | 314976 | AGCUAUAUCC | | | 314977 | UGUGGAUUUU | | |
| | | U | | | | ACA | | |
| AD- | A- | CCUUCACUGA | 3275 | 1606-1626 | A- | ACUAGGCAUG | 3461 | 1604-1626 |
| 159704 | 315280 | ACAUGCCUAG | | | 315281 | UUCAGUGAAG | | |
| | | U | | | | GAG | | |
| AD- | A- | GGGAUCCAGU | 3276 | 1657-1677 | A- | UGGAUUUAUA | 3462 | 1655-1677 |
| 159737 | 315346 | GUAUAAAUCC | | | 315347 | CACUGGAUCC | | |
| | | A | | | | CAG | | |
| AD- | A- | CAAUAAACCU | 3277 | 1818-1838 | A- | UUCACUGUUC | 3463 | 1816-1838 |
| 159869 | 315610 | UGAACAGUGA | | | 315611 | AAGGUUUAUU | | |
| | | A | | | | GGG | | |
| AD- | A- | GGCCUGUGCC | 3278 | 371-391 | A- | AAGAUACUGA | 3464 | 369-391 |
| 158570 | 313012 | AUCAGUAUCU | | | 313013 | UGGCACAGGC | | |
| | | U | | | | CAU | | |
| AD- | A- | UUGUUGAUGU | 3279 | 421-441 | A- | UGUCUUCGAU | 3465 | 419-441 |
| 158618 | 313108 | CAUCGAAGAC | | | 313109 | GACAUCAACA | | |
| | | A | | | | AGA | | |
| AD- | A- | GGAUCUUAUU | 3280 | 1708-1728 | A- | AUAGUUCACA | 3466 | 1706-1728 |
| 159788 | 315448 | UUGUGAACUA | | | 315449 | AAAUAAGAUC | | |
| | | U | | | | CUU | | |
| AD- | A- | AAGGAUCUUA | 3281 | 1706-1726 | A- | AGUUCACAAA | 3467 | 1704-1726 |
| 159786 | 315444 | UUUUGUGAAC | | | 315445 | AUAAGAUCCU | | |
| | | U | | | | UUG | | |
| AD- | A- | AUCAUGUCUU | 3282 | 1680-1700 | A- | UAAUUAUGCA | 3468 | 1678-1700 |
| 159760 | 315392 | GUGCAUAAUU | | | 315393 | CAAGACAUGA | | |
| | | A | | | | UAU | | |
| AD- | A- | UGUCAUAUCA | 3283 | 1282-1302 | A- | AGACAGUGAA | 3469 | 1280-1302 |
| 159404 | 314680 | UUUCACUGUC | | | 314681 | AUGAUAUGAC | | |
| | | U | | | | AUC | | |
| AD- | A- | UCAUAUCAUU | 3284 | 1284-1304 | A- | UUAGACAGUG | 3470 | 1282-1304 |
| 159406 | 314684 | UCACUGUCUA | | | 314685 | AAAUGAUAUG | | |
| | | A | | | | ACA | | |
| AD- | A- | AUUUAUAAUC | 3285 | 297-317 | A- | UUCCUUUAGA | 3471 | 295-317 |
| 158536 | 312944 | UUCUAAAGGA | | | 312945 | AGAUUAUAAA | | |
| | | A | | | | UCA | | |
| AD- | A- | UGGUUUGUAA | 3286 | 1427-1447 | A- | AGCUGUGGAU | 3472 | 1425-1447 |
| 159545 | 314962 | AAUCCACAGC | | | 314963 | UUUACAAACC | | |
| | | U | | | | AUU | | |
| AD- | A- | AUGCUGGAUG | 3287 | 1456-1476 | A- | AAGAUUAAUA | 3473 | 1454-1476 |
| 159574 | 315020 | GUAUUAAUCU | | | 315021 | CCAUCCAGCA | | |
| | | U | | | | UCA | | |
| AD- | A- | AACUAUAUCA | 3288 | 1723-1743 | A- | AUGUACACUA | 3474 | 1721-1743 |
| 159802 | 315476 | GUAGUGUACA | | | 315477 | CUGAUAUAGU | | |
| | | U | | | | UCA | | |
| AD- | A- | AUCAACUCCU | 3289 | 1400-1420 | A- | UUUCUAACUU | 3475 | 1398-1420 |
| 159518 | 314908 | GAAGUUAGAA | | | 314909 | CAGGAGUUGA | | |
| | | A | | | | UGU | | |
| AD- | A- | CUGGAUGGUA | 3290 | 1459-1479 | A- | UACAAGAUUA | 3476 | 1457-1479 |
| 159577 | 315026 | UUAAUCUUGU | | | 315027 | AUACCAUCCA | | |
| | | A | | | | GCA | | |
| AD- | A- | UAUCAUUUCA | 3291 | 1287-1307 | A- | AGCCUAGACA | 3477 | 1285-1307 |
| 159409 | 314690 | CUGUCUAGGC | | | 314691 | GUGAAAUGAU | | |
| | | U | | | | AUG | | |
| AD- | A- | GUAAAAUCCA | 3292 | 1433-1453 | A- | UGAUAUAGCU | 3478 | 1431-1453 |
| 159551 | 314974 | CAGCUAUAUC | | | 314975 | GUGGAUUUUA | | |
| | | A | | | | CAA | | |
| AD- | A- | UCCUUAGUGU | 3293 | 1135-1155 | A- | AAAUGCAAGG | 3479 | 1133-1155 |
| 159276 | 314424 | UCCUUGCAUU | | | 314425 | AACACUAAGG | | |
| | | U | | | | AAG | | |
| AD- | A- | CAUAUCAUUU | 3294 | 1285-1305 | A- | UCUAGACAGU | 3480 | 1283-1305 |
| 159407 | 314686 | CACUGUCUAG | | | 314687 | GAAAUGAUAU | | |
| | | A | | | | GAC | | |
| AD- | A- | AACAUCAACU | 3295 | 1397-1417 | A- | UUAACUUCAG | 3481 | 1395-1417 |
| 159515 | 314902 | CCUGAAGUUA | | | 314903 | GAGUUGAUGU | | |
| | | A | | | | UUU | | |
| AD- | A- | CCUGAUGCUG | 3296 | 1452-1472 | A- | UUAAUACCAU | 3482 | 1450-1472 |
| 159570 | 315012 | GAUGGUAUUA | | | 315013 | CCAGCAUCAG | | |
| | | A | | | | GAU | | |
| AD- | A- | AAUGCAACCA | 3297 | 1777-1797 | A- | ACUUGGAUAG | 3483 | 1775-1797 |
| 159849 | 315570 | ACUAUCCAAG | | | 315571 | UUGGUUGCAU | | |
| | | U | | | | UGU | | |
| AD- | A- | UUUACGGAAU | 3298 | 1111-1131 | A- | UAUCAUCCUU | 3484 | 1109-1131 |
| 159252 | 314376 | AAAGGAUGAU | | | 314377 | UAUUCCGUAA | | |
| | | A | | | | AGA | | |
| AD- | A- | UUCCUUAGUG | 3299 | 1134-1154 | A- | AAUGCAAGGA | 3485 | 1132-1154 |
| 159275 | 314422 | UUCCUUGCAU | | | 314423 | ACACUAAGGA | | |
| | | U | | | | AGA | | |
| AD- | A- | CAAUGCAACC | 3300 | 1776-1796 | A- | UUUGGAUAGU | 3486 | 1774-1796 |
| 159848 | 315568 | AACUAUCCAA | | | 315569 | UGGUUGCAUU | | |
| | | A | | | | GUU | | |
| AD- | A- | AGAUUUGGCA | 3301 | 1043-1063 | A- | AUUAUACUCU | 3487 | 1041-1063 |
| 159184 | 314240 | GAGAGUAUAA | | | 314241 | CUGCCAAAUC | | |
| | | U | | | | UGC | | |
| AD- | A- | UUUCCACCAU | 3302 | 1090-1110 | A- | UACCCUUAAU | 3488 | 1088-1110 |
| 159231 | 314334 | GAUUAAGGGU | | | 314335 | CAUGGUGGAA | | |
| | | A | | | | ACU | | |
| AD- | A- | ACUGGUUAGU | 3303 | 1489-1509 | A- | AACUAUUUCA | 3489 | 1487-1509 |
| 159607 | 315086 | GUGAAAUAGU | | | 315087 | CACUAACCAG | | |
| | | U | | | | UUG | | |
| AD- | A- | CAAGUCCAAU | 3304 | 263-283 | A- | AGAGUUGCCA | 3490 | 261-283 |
| 158504 | 312881 | AUGGCAACUC | | | 312882 | UAUUGGACUU | | |
| | | U | | | | GGA | | |
| AD- | A- | UCCACCAUGA | 3305 | 1092-1112 | A- | AAGACCCUUA | 3491 | 1090-1112 |
| 159233 | 314338 | UUAAGGGUCU | | | 314339 | AUCAUGGUGG | | |
| | | U | | | | AAA | | |
| AD- | A- | UCAUUUCACU | 3306 | 1289-1309 | A- | UUAGCCUAGA | 3492 | 1287-1309 |
| 159411 | 314694 | GUCUAGGCUA | | | 314695 | CAGUGAAAUG | | |
| | | A | | | | AUA | | |
| AD- | A- | UGUCCUUUUU | 3307 | 1340-1360 | A- | ACAGAUCAGA | 3493 | 1338-1360 |
| 159462 | 314796 | AUCUGAUCUG | | | 314797 | UAAAAAGGAC | | |
| | | U | | | | AAC | | |
| AD- | A- | CCAGUGUAUA | 3308 | 1662-1682 | A- | UAUAUUGGAU | 3494 | 1660-1682 |
| 159742 | 315356 | AAUCCAAUAU | | | 315357 | UUAUACACUG | | |
| | | A | | | | GAU | | |
| AD- | A- | UCCAAGUGUU | 3309 | 1791-1811 | A- | UUAGUUGGUA | 3495 | 1789-1811 |
| 159863 | 315598 | AUACCAACUA | | | 315599 | UAACACUUGG | | |
| | | A | | | | AUA | | |
| AD- | A- | GAACACCAAA | 3310 | 490-510 | A- | UAGAGACAAU | 3496 | 488-510 |
| 158687 | 313246 | GAUUGUCUCU | | | 313247 | CUUUGGUGUU | | |
| | | A | | | | CUA | | |
| AD- | A- | AACACCAAAG | 3311 | 491-511 | A- | UCAGAGACAA | 3497 | 489-511 |
| 158688 | 313248 | AUUGUCUCUG | | | 313249 | UCUUUGGUGU | | |
| | | A | | | | UCU | | |
| AD- | A- | AUGUUGUCCU | 3312 | 1336-1356 | A- | AUCAGAUAAA | 3498 | 1334-1356 |
| 159458 | 314788 | UUUUAUCUGA | | | 314789 | AAGGACAACA | | |
| | | U | | | | UGC | | |
| AD- | A- | UCAACUCCUG | 3313 | 1401-1421 | A- | AUUUCUAACU | 3499 | 1399-1421 |
| 159519 | 314910 | AAGUUAGAAA | | | 314911 | UCAGGAGUUG | | |
| | | U | | | | AUG | | |
| AD- | A- | AACUAUCCAA | 3314 | 1786-1806 | A- | UGGUAUAACA | 3500 | 1784-1806 |
| 159858 | 315588 | GUGUUAUACC | | | 315589 | CUUGGAUAGU | | |
| | | A | | | | UGG | | |
| AD- | A- | GGUAUUAAUC | 3315 | 1465-1485 | A- | AGACUACACA | 3501 | 1463-1485 |
| 159583 | 315038 | UUGUGUAGUC | | | 315039 | AGAUUAAUAC | | |
| | | U | | | | CAU | | |
| AD- | A- | GGCUCCUUCA | 3316 | 1602-1622 | A- | UGCAUGUUCA | 3502 | 1600-1622 |
| 159700 | 315272 | CUGAACAUGC | | | 315273 | GUGAAGGAGC | | |
| | | A | | | | CAG | | |
| AD- | A- | UAUCAGUAGU | 3317 | 1728-1748 | A- | UGGUAAUGUA | 3503 | 1726-1748 |
| 159807 | 315486 | GUACAUUACC | | | 315487 | CACUACUGAU | | |
| | | A | | | | AUA | | |
| AD- | A- | CAGCCUUUUC | 3318 | 476-496 | A- | UGUGUUCUAA | 3504 | 474-496 |
| 158673 | 313218 | CUUAGAACAC | | | 313219 | GGAAAAGGCU | | |
| | | A | | | | GCC | | |
| AD- | A- | CUGGUUAGUG | 3319 | 1490-1510 | A- | UAACUAUUUC | 3505 | 1488-1510 |
| 159608 | 315088 | UGAAAUAGUU | | | 315089 | ACACUAACCA | | |
| | | A | | | | GUU | | |
| AD- | A- | ACUAUAUCAG | 3320 | 1724-1744 | A- | AAUGUACACU | 3506 | 1722-1744 |
| 159803 | 315478 | UAGUGUACAU | | | 315479 | ACUGAUAUAG | | |
| | | U | | | | UUC | | |
| AD- | A- | UAUAUCAGUA | 3321 | 1726-1746 | A- | UUAAUGUACA | 3507 | 1724-1746 |
| 159805 | 315482 | GUGUACAUUA | | | 315483 | CUACUGAUAU | | |
| | | A | | | | AGU | | |
| AD- | A- | GUAAUAUUUU | 3322 | 1371-1391 | A- | UAGUCCAUCU | 3508 | 1369-1391 |
| 159489 | 314850 | AAGAUGGACU | | | 314851 | UAAAAUAUUA | | |
| | | A | | | | CUG | | |
| AD- | A- | UUUUAAGAUG | 3323 | 1377-1397 | A- | UUUUCCCAGU | 3509 | 1375-1397 |
| 159495 | 314862 | GACUGGGAAA | | | 314863 | CCAUCUUAAA | | |
| | | A | | | | AUA | | |
| AD- | A- | UUCACUGAAC | 3324 | 1608-1628 | A- | UGACUAGGCA | 3510 | 1606-1628 |
| 159706 | 315284 | AUGCCUAGUC | | | 315285 | UGUUCAGUGA | | |
| | | A | | | | AGG | | |
| AD- | A- | ACCAACUAUC | 3325 | 1783-1803 | A- | UAUAACACUU | 3511 | 1781-1803 |
| 159855 | 315582 | CAAGUGUUAU | | | 315583 | GGAUAGUUGG | | |
| | | A | | | | UUG | | |
| AD- | A- | CCAAGUGUUA | 3326 | 1792-1812 | A- | UUUAGUUGGU | 3512 | 1790-1812 |
| 159864 | 315600 | UACCAACUAA | | | 315601 | AUAACACUUG | | |
| | | A | | | | GAU | | |
| AD- | A- | AGUAAUAUUU | 3327 | 1370-1390 | A- | AGUCCAUCUU | 3513 | 1368-1390 |
| 159488 | 314848 | UAAGAUGGAC | | | 314849 | AAAAUAUUAC | | |
| | | U | | | | UGC | | |
| AD- | A- | AAAAUCCACA | 3328 | 1435-1455 | A- | UAGGAUAUAG | 3514 | 1433-1455 |
| 159553 | 314978 | GCUAUAUCCU | | | 314979 | CUGUGGAUUU | | |
| | | A | | | | UAC | | |
| AD- | A- | UCCUUCACUG | 3329 | 1605-1625 | A- | UUAGGCAUGU | 3515 | 1603-1625 |
| 159703 | 315278 | AACAUGCCUA | | | 315279 | UCAGUGAAGG | | |
| | | A | | | | AGC | | |
| AD- | A- | CACUGAACAU | 3330 | 1610-1630 | A- | UUGGACUAGG | 3516 | 1608-1630 |
| 159708 | 315288 | GCCUAGUCCA | | | 315289 | CAUGUUCAGU | | |
| | | A | | | | GAA | | |
| AD- | A- | AAGUGUUAUA | 3331 | 1794-1814 | A- | GUUUUAGUUG | 3517 | 1792-1814 |
| 159866 | 315604 | CCAACUAAAA | | | 315605 | GUAUAACACU | | |
| | | C | | | | UGG | | |
| AD- | A- | UUCCACCAUG | 3332 | 1091-1111 | A- | AGACCCUUAA | 3518 | 1089-1111 |
| 159232 | 314336 | AUUAAGGGUC | | | 314337 | UCAUGGUGGA | | |
| | | U | | | | AAC | | |
| AD- | A- | GAACAUGCCU | 3333 | 1614-1634 | A- | AAUGUUGGAC | 3519 | 1612-1634 |
| 159712 | 315296 | AGUCCAACAU | | | 315297 | UAGGCAUGUU | | |
| | | U | | | | CAG | | |
| AD- | A- | AUCAGUAGUG | 3334 | 1729-1749 | A- | AUGGUAAUGU | 3520 | 1727-1749 |
| 159808 | 315488 | UACAUUACCA | | | 315489 | ACACUACUGA | | |
| | | U | | | | UAU | | |
| AD- | A- | AUCCAAGUGU | 3335 | 1790-1810 | A- | UAGUUGGUAU | 3521 | 1788-1810 |
| 159862 | 315596 | UAUACCAACU | | | 315597 | AACACUUGGA | | |
| | | A | | | | UAG | | |
| AD- | A- | CCAAGUCCAA | 3336 | 262-282 | A- | UAGUUGCCAU | 3522 | 260-282 |
| 158503 | 312879 | UAUGGCAACU | | | 312880 | AUUGGACUUG | | |
| | | A | | | | GAA | | |
| AD- | A- | CAUUUCACUG | 3337 | 1290-1310 | A- | UGUAGCCUAG | 3523 | 1288-1310 |
| 159412 | 314696 | UCUAGGCUAC | | | 314697 | ACAGUGAAAU | | |
| | | A | | | | GAU | | |
| AD- | A- | CCACAGCUAU | 3338 | 1440-1460 | A- | AGCAUCAGGA | 3524 | 1438-1460 |
| 159558 | 314988 | AUCCUGAUGC | | | 314989 | UAUAGCUGUG | | |
| | | U | | | | GAU | | |
| AD- | A- | CUUCACUGAA | 3339 | 1607-1627 | A- | UACUAGGCAU | 3525 | 1605-1627 |
| 159705 | 315282 | CAUGCCUAGU | | | 315283 | GUUCAGUGAA | | |
| | | A | | | | GGA | | |
| AD- | A- | GUGGUUGAGA | 3340 | 972-992 | A- | UUCAUAAGCA | 3526 | 970-992 |
| 159113 | 314098 | GUGCUUAUGA | | | 314099 | CUCUCAACCA | | |
| | | A | | | | CCU | | |
| AD- | A- | AUAUCAGUAG | 3341 | 1727-1747 | A- | UGUAAUGUAC | 3527 | 1725-1747 |
| 159806 | 315484 | UGUACAUUAC | | | 315485 | ACUACUGAUA | | |
| | | A | | | | UAG | | |
| AD- | A- | CAACCAACUA | 3342 | 1781-1801 | A- | UAACACUUGG | 3528 | 1779-1801 |
| 159853 | 315578 | UCCAAGUGUU | | | 315579 | AUAGUUGGUU | | |
| | | A | | | | GCA | | |
| AD- | A- | GCAGAUUUGG | 3343 | 1041-1061 | A- | UAUACUCUCU | 3529 | 1039-1061 |
| 159182 | 314236 | CAGAGAGUAU | | | 314237 | GCCAAAUCUG | | |
| | | A | | | | CUA | | |
| AD- | A- | CUCCUUCACU | 3344 | 1604-1624 | A- | UAGGCAUGUU | 3530 | 1602-1624 |
| 159702 | 315276 | GAACAUGCCU | | | 315277 | CAGUGAAGGA | | |
| | | A | | | | GCC | | |
| AD- | A- | CAUGCCUAGU | 3345 | 1617-1637 | A- | AAAAAUGUUG | 3531 | 1615-1637 |
| 159715 | 315302 | CCAACAUUUU | | | 315303 | GACUAGGCAU | | |
| | | U | | | | GUU | | |
| AD- | A- | UGCCAUCAGU | 3346 | 377-397 | A- | UUCAUUAAGA | 3532 | 375-397 |
| 158575 | 313022 | AUCUUAAUGA | | | 313023 | UACUGAUGGC | | |
| | | A | | | | ACA | | |
| AD- | A- | GCCAUCAGUA | 3347 | 378-398 | A- | UUUCAUUAAG | 3533 | 376-398 |
| 158576 | 313024 | UCUUAAUGAA | | | 313025 | AUACUGAUGG | | |
| | | A | | | | CAC | | |
| AD- | A- | UUAGAACACC | 3348 | 487-507 | A- | AGACAAUCUU | 3534 | 485-507 |
| 158684 | 313240 | AAAGAUUGUC | | | 313241 | UGGUGUUCUA | | |
| | | U | | | | AGG | | |
| AD- | A- | AUCAUUUCAC | 3349 | 1288-1308 | A- | UAGCCUAGAC | 3535 | 1286-1308 |
| 159410 | 314692 | UGUCUAGGCU | | | 314693 | AGUGAAAUGA | | |
| | | A | | | | UAU | | |
| AD- | A- | UCACUGUCUA | 3350 | 1294-1314 | A- | UUGUUGUAGC | 3536 | 1292-1314 |
| 159416 | 314704 | GGCUACAACA | | | 314705 | CUAGACAGUG | | |
| | | A | | | | AAA | | |
| AD- | A- | CAACUAUCCA | 3351 | 1785-1805 | A- | UGUAUAACAC | 3537 | 1783-1805 |
| 159857 | 315586 | AGUGUUAUAC | | | 315587 | UUGGAUAGUU | | |
| | | A | | | | GGU | | |
| AD- | A- | UUGGUUCCAA | 3352 | 256-276 | A- | UCAUAUUGGA | 3538 | 254-276 |
| 158497 | 312867 | GUCCAAUAUG | | | 312868 | CUUGGAACCA | | |
| | | A | | | | AAA | | |
| AD- | A- | UGCUUAUGAG | 3353 | 983-1003 | A- | AGUUUGAUCA | 3539 | 981-1003 |
| 159124 | 314120 | GUGAUCAAAC | | | 314121 | CCUCAUAAGC | | |
| | | U | | | | ACU | | |
| AD- | A- | UCUCAGACCU | 3354 | 1171-1191 | A- | UCACCUUCAC | 3540 | 1169-1191 |
| 159312 | 314496 | UGUGAAGGUG | | | 314497 | AAGGUCUGAG | | |
| | | A | | | | AUU | | |
| AD- | A- | UAAAAUCCAC | 3355 | 1434-1454 | A- | AGGAUAUAGC | 3541 | 1432-1454 |
| 159552 | 314976 | AGCUAUAUCC | | | 314977 | UGUGGAUUUU | | |
| | | U | | | | ACA | | |
| AD- | A- | CCUUCACUGA | 3356 | 1606-1626 | A- | ACUAGGCAUG | 3542 | 1604-1626 |
| 159704 | 315280 | ACAUGCCUAG | | | 315281 | UUCAGUGAAG | | |
| | | U | | | | GAG | | |
| AD- | A- | GGGAUCCAGU | 3357 | 1657-1677 | A- | UGGAUUUAUA | 3543 | 1655-1677 |
| 159737 | 315346 | GUAUAAAUCC | | | 315347 | CACUGGAUCC | | |
| | | A | | | | CAG | | |
| AD- | A- | CAAUAAACCU | 3358 | 1818-1838 | A- | UUCACUGUUC | 3544 | 1816-1838 |
| 159869 | 315610 | UGAACAGUGA | | | 315611 | AAGGUUUAUU | | |
| | | A | | | | GGG | | |
| AD- | A- | GGCCUGUGCC | 3359 | 371-391 | A- | AAGAUACUGA | 3545 | 369-391 |
| 158570 | 313012 | AUCAGUAUCU | | | 313013 | UGGCACAGGC | | |
| | | U | | | | CAU | | |
| AD- | A- | UUGUUGAUGU | 3360 | 421-441 | A- | UGUCUUCGAU | 3546 | 419-441 |
| 158618 | 313108 | CAUCGAAGAC | | | 313109 | GACAUCAACA | | |
| | | A | | | | AGA | | |
| AD- | A- | AGAUUUGGCA | 3361 | 1043-1063 | A- | AUUAUACUCU | 3547 | 1041-1063 |
| 159184 | 314240 | GAGAGUAUAA | | | 314241 | CUGCCAAAUC | | |
| | | U | | | | UGC | | |
| AD- | A- | UUUCCACCAU | 3362 | 1090-1110 | A- | UACCCUUAAU | 3548 | 1088-1110 |
| 159231 | 314334 | GAUUAAGGGU | | | 314335 | CAUGGUGGAA | | |
| | | A | | | | ACU | | |
| AD- | A- | CUAGGCUACA | 3363 | 1301-1321 | A- | UAGAAUCCUG | 3549 | 1299-1321 |
| 159423 | 314718 | ACAGGAUUCU | | | 314719 | UUGUAGCCUA | | |
| | | A | | | | GAC | | |
| AD- | A- | UGGAGGUUGU | 3364 | 1324-1344 | A- | UGACAACAUG | 3550 | 1322-1344 |
| 159446 | 314764 | GCAUGUUGUC | | | 314765 | CACAACCUCC | | |
| | | A | | | | ACC | | |
| AD- | A- | GCUCCUUCAC | 3365 | 1603-1623 | A- | AGGCAUGUUC | 3551 | 1601-1623 |
| 159701 | 315274 | UGAACAUGCC | | | 315275 | AGUGAAGGAG | | |
| | | U | | | | CCA | | |
| AD- | A- | CUUUUGGUUC | 3366 | 253-273 | A- | UAUUGGACUU | 3552 | 251-273 |
| 158494 | 312861 | CAAGUCCAAU | | | 312862 | GGAACCAAAA | | |
| | | A | | | | GGA | | |
| AD- | A- | GCCUGUGCCA | 3367 | 372-392 | A- | UAAGAUACUG | 3553 | 370-392 |
| 158571 | 313014 | UCAGUAUCUU | | | 313015 | AUGGCACAGG | | |
| | | A | | | | CCA | | |
| AD- | A- | GCUUAUGAGG | 3368 | 984-1004 | A- | UAGUUUGAUC | 3554 | 982-1004 |
| 159125 | 314122 | UGAUCAAACU | | | 314123 | ACCUCAUAAG | | |
| | | A | | | | CAC | | |
| AD- | A- | CUUAUGAGGU | 3369 | 985-1005 | A- | UGAGUUUGAU | 3555 | 983-1005 |
| 159126 | 314124 | GAUCAAACUC | | | 314125 | CACCUCAUAA | | |
| | | A | | | | GCA | | |
| AD- | A- | CCUUGCAUUU | 3370 | 1146-1166 | A- | AUUCUGUCCC | 3556 | 1144-1166 |
| 159287 | 314446 | UGGGACAGAA | | | 314447 | AAAAUGCAAG | | |
| | | U | | | | GAA | | |
| AD- | A- | GGUUCCAAGU | 3371 | 258-278 | A- | UGCCAUAUUG | 3557 | 256-278 |
| 158499 | 312871 | CCAAUAUGGC | | | 312872 | GACUUGGAAC | | |
| | | A | | | | CAA | | |
| AD- | A- | CACUGUCUAG | 3372 | 1295-1315 | A- | UCUGUUGUAG | 3558 | 1293-1315 |
| 159417 | 314706 | GCUACAACAG | | | 314707 | CCUAGACAGU | | |
| | | A | | | | GAA | | |
| AD- | A- | ACUGUCUAGG | 3373 | 1296-1316 | A- | UCCUGUUGUA | 3559 | 1294-1316 |
| 159418 | 314708 | CUACAACAGG | | | 314709 | GCCUAGACAG | | |
| | | A | | | | UGA | | |
| AD- | A- | AAUAAGAUUA | 3374 | 333-353 | A- | UCCAACAACU | 3560 | 331-353 |
| 158550 | 312972 | CAGUUGUUGG | | | 312973 | GUAAUCUUAU | | |
| | | A | | | | UCU | | |
| AD- | A- | GUUGAGAGUG | 3375 | 975-995 | A- | UACCUCAUAA | 3561 | 973-995 |
| 159116 | 314104 | CUUAUGAGGU | | | 314105 | GCACUCUCAA | | |
| | | A | | | | CCA | | |
| AD- | A- | GUCUAGGCUA | 3376 | 1299-1319 | A- | UAAUCCUGUU | 3562 | 1297-1319 |
| 159421 | 314714 | CAACAGGAUU | | | 314715 | GUAGCCUAGA | | |
| | | A | | | | CAG | | |
| AD- | A- | UCUAGGCUAC | 3377 | 1300-1320 | A- | AGAAUCCUGU | 3563 | 1298-1320 |
| 159422 | 314716 | AACAGGAUUC | | | 314717 | UGUAGCCUAG | | |
| | | U | | | | ACA | | |
| AD- | A- | GUGGAGGUUG | 3378 | 1323-1343 | A- | UACAACAUGC | 3564 | 1321-1343 |
| 159445 | 314762 | UGCAUGUUGU | | | 314763 | ACAACCUCCA | | |
| | | A | | | | CCU | | |
| AD- | A- | UGAGGUGAUC | 3379 | 989-1009 | A- | UCUUUGAGUU | 3565 | 987-1009 |
| 159130 | 314132 | AAACUCAAAG | | | 314133 | UGAUCACCUC | | |
| | | A | | | | AUA | | |
| AD- | A- | GUGAUCAAAC | 3380 | 993-1013 | A- | UUAGCCUUUG | 3566 | 991-1013 |
| 159134 | 314140 | UCAAAGGCUA | | | 314141 | AGUUUGAUCA | | |
| | | A | | | | CCU | | |
| AD- | A- | UGAGGAAGAG | 3381 | 1202-1222 | A- | UUCAAACGGG | 3567 | 1200-1222 |
| 159343 | 314558 | GCCCGUUUGA | | | 314559 | CCUCUUCCUC | | |
| | | A | | | | AGA | | |
| AD- | A- | ACAAGCAGGU | 3382 | 964-984 | A- | UACUCUCAAC | 3568 | 962-984 |
| 159105 | 314082 | GGUUGAGAGU | | | 314083 | CACCUGCUUG | | |
| | | A | | | | UGA | | |
| AD- | A- | CAGAUUUGGC | 3383 | 1042-1062 | A- | UUAUACUCUC | 3569 | 1040-1062 |
| 159183 | 314238 | AGAGAGUAUA | | | 314239 | UGCCAAAUCU | | |
| | | A | | | | GCU | | |
| AD- | A- | GUGCUUAUGA | 3384 | 982-1002 | A- | GUUUGAUCAC | 3570 | 980-1002 |
| 159123 | 314118 | GGUGAUCAAA | | | 314119 | CUCAUAAGCA | | |
| | | C | | | | CUC | | |
| AD- | A- | AGCAGAUUUG | 3385 | 1040-1060 | A- | AUACUCUCUG | 3571 | 1038-1060 |
| 159181 | 314234 | GCAGAGAGUA | | | 314235 | CCAAAUCUGC | | |
| | | U | | | | UAC | | |
| AD- | A- | AUUUGGCAGA | 3386 | 1045-1065 | A- | UCAUUAUACU | 3572 | 1043-1065 |
| 159186 | 314244 | GAGUAUAAUG | | | 314245 | CUCUGCCAAA | | |
| | | A | | | | UCU | | |
| AD- | A- | UUUGGCAGAG | 3387 | 1046-1066 | A- | UUCAUUAUAC | 3573 | 1044-1066 |
| 159187 | 314246 | AGUAUAAUGA | | | 314247 | UCUCUGCCAA | | |
| | | A | | | | AUC | | |
| AD- | A- | CUUGCAUUUU | 3388 | 1147-1167 | A- | UAUUCUGUCC | 3574 | 1145-1167 |
| 159288 | 314448 | GGGACAGAAU | | | 314449 | CAAAAUGCAA | | |
| | | A | | | | GGA | | |
| AD- | A- | AUGGAAUCUC | 3389 | 1165-1185 | A- | UCACAAGGUC | 3575 | 1163-1185 |
| 159306 | 314484 | AGACCUUGUG | | | 314485 | UGAGAUUCCA | | |
| | | A | | | | UUC | | |
| AD- | A- | CACAGCUAUA | 3390 | 1441-1461 | A- | UAGCAUCAGG | 3576 | 1439-1461 |
| 159559 | 314990 | UCCUGAUGCU | | | 314991 | AUAUAGCUGU | | |
| | | A | | | | GGA | | |
| AD- | A- | GAGGAAGAGG | 3391 | 1203-1223 | A- | UUUCAAACGG | 3577 | 1201-1223 |
| 159344 | 314560 | CCCGUUUGAA | | | 314561 | GCCUCUUCCU | | |
| | | A | | | | CAG | | |
| AD- | A- | UCUGAGGAAG | 3392 | 1200-1220 | A- | UAAACGGGCC | 3578 | 1198-1220 |
| 159341 | 314554 | AGGCCCGUUU | | | 314555 | UCUUCCUCAG | | |
| | | A | | | | AAG | | |
| AD- | A- | CACAUCCUGG | 3393 | 1649-1669 | A- | UACACUGGAU | 3579 | 1647-1669 |
| 159729 | 315330 | GAUCCAGUGU | | | 315331 | CCCAGGAUGU | | |
| | | A | | | | GAC | | |
| AD- | A- | AGCCUUUUCC | 3394 | 477-497 | A- | UGGUGUUCUA | 3580 | 475-497 |
| 158674 | 313220 | UUAGAACACC | | | 313221 | AGGAAAAGGC | | |
| | | A | | | | UGC | | |
| AD- | A- | UCAACUGGUU | 3395 | 1486-1506 | A- | UAUUUCACAC | 3581 | 1484-1506 |
| 159604 | 315080 | AGUGUGAAAU | | | 315081 | UAACCAGUUG | | |
| | | A | | | | AAG | | |

TABLE 3
MODIFIED HUMAN/CYNOMOLGUS CROSS-REACTIVE LDHA
iRNA SEQUENCES

| | Sense | SEQ | Antisense | SEQ | mRNA | SEQ |
|---|---|---|---|---|---|---|
| Duplex | Sequence | ID | Sequence | ID | target | ID |
| Name | 5′ to 3′ | NO | 5′ to 3′ | NO | sequence | NO |
| AD- | ususuaucUf | 3582 | usUfsuaaUf | 3768 | UUUUUAUCUG | 3954 |
| 159469 | gAfUfCfugu | | cAfCfagauC | | AUCUGUGAUU | |
| | gauuaaaL96 | | faGfauaaas | | AAA | |
| | | | asa | | | |
| AD- | ascsugguUf | 3583 | asAfscuaUf | 3769 | CAACUGGUUA | 3955 |
| 159607 | aGfUfGfuga | | uUfCfacacU | | GUGUGAAAUA | |
| | aauaguuL96 | | faAfccagus | | GUU | |
| | | | usg | | | |
| AD- | asascaugCf | 3584 | asAfsaugUf | 3770 | UGAACAUGCC | 3956 |
| 159713 | cUfAfGfucc | | uGfGfacuaG | | UAGUCCAACA | |
| | aacauuuL96 | | fgCfauguus | | UUU | |
| | | | csa | | | |
| AD- | csasagucCf | 3585 | asGfsaguUf | 3771 | UCCAAGUCCA | 3957 |
| 158504 | aAfUfAfugg | | gCfCfauauU | | AUAUGGCAAC | |
| | caacucuL96 | | fgGfacuugs | | UCU | |
| | | | gsa | | | |
| AD- | uscscaccAf | 3586 | asAfsgacCf | 3772 | UUUCCACCAU | 3958 |
| 159233 | uGfAfUfuaa | | cUfUfaaucA | | GAUUAAGGGU | |
| | gggucuuL96 | | fuGfguggas | | CUU | |
| | | | asa | | | |
| AD- | uscsauuuCf | 3587 | usUfsagcCf | 3773 | UAUCAUUUCA | 3959 |
| 159411 | aCfUfGfucu | | uAfGfacagU | | CUGUCUAGGC | |
| | aggcuaaL96 | | fgAfaaugas | | UAC | |
| | | | usa | | | |
| AD- | usgsuccuUf | 3588 | asCfsagaUf | 3774 | GUUGUCCUUU | 3960 |
| 159462 | uUfUfAfucu | | cAfGfauaaA | | UUAUCUGAUC | |
| | gaucuguL96 | | faAfggacas | | UGU | |
| | | | asc | | | |
| AD- | cscsagugUf | 3589 | usAfsuauUf | 3775 | AUCCAGUGUA | 3961 |
| 159742 | aUfAfAfauc | | gGfAfuuuaU | | UAAAUCCAAU | |
| | caauauaL96 | | faCfacuggs | | AUC | |
| | | | asu | | | |
| AD- | uscscaagUf | 3590 | usUfsaguUf | 3776 | UAUCCAAGUG | 3962 |
| 159863 | gUfUfAfuac | | gGfUfauaaC | | UUAUACCAAC | |
| | caaciiaaL9 | | faCfuuggas | | UAA | |
| | 6 | | usa | | | |
| AD- | gsuscaucGf | 3591 | usUfsucaAf | 3777 | AUGUCAUCGA | 3963 |
| 158626 | aAfGfAfcaa | | uUfUfgucuU | | AGACAAAUUG | |
| | auugaaaL96 | | fcGfaugacs | | AAG | |
| | | | asu | | | |
| AD- | gsasacacCf | 3592 | usAfsgagAf | 3778 | UAGAACACCA | 3964 |
| 158687 | aAfAfGfauu | | cAfAfucuuU | | AAGAUUGUCU | |
| | gucucuaL96 | | fgGfuguucs | | CUG | |
| | | | usa | | | |
| AD- | asascaccAf | 3593 | usCfsagaGf | 3779 | AGAACACCAA | 3965 |
| 158688 | aAfGfAfuug | | aCfAfaucuU | | AGAUUGUCUC | |
| | ucucugaL96 | | fuGfguguus | | UGG | |
| | | | csu | | | |
| AD- | asusguugUf | 3594 | asUfscagAf | 3780 | GCAUGUUGUC | 3966 |
| 159458 | cCfUfUfuuu | | uAfAfaaagG | | CUUUUUAUCU | |
| | aucugauL96 | | faCfaacaus | | GAU | |
| | | | gsc | | | |
| AD- | uscsaacuCf | 3595 | asUfsuucUf | 3781 | CAUCAACUCC | 3967 |
| 159519 | cUfGfAfagu | | aAfCfuucaG | | UGAAGUUAGA | |
| | uagaaauL96 | | fgAfguugas | | AAU | |
| | | | usg | | | |
| AD- | asascuauCf | 3596 | usGfsguaUf | 3782 | CCAACUAUCC | 3968 |
| 159858 | cAfAfGfugu | | aAfCfacuuG | | AAGUGUUAUA | |
| | uauaccaL96 | | fgAfuaguus | | CCA | |
| | | | gsg | | | |
| AD- | uscscuuaGf | 3597 | usAfsaucUf | 3783 | UUUCCUUAGA | 3969 |
| 158681 | aAfCfAfcca | | uUfGfguguU | | ACACCAAAGA | |
| | aagauuaL96 | | fcUfaaggas | | UUG | |
| | | | asa | | | |
| AD- | gsgsuauuAf | 3598 | asGfsacuAf | 3784 | AUGGUAUUAA | 3970 |
| 159583 | aUfCfUfugu | | cAfCfaagaU | | UCUUGUGUAG | |
| | guagucuL96 | | fuAfauaccs | | UCU | |
| | | | asu | | | |
| AD- | gsgscuccUf | 3599 | usGfscauGf | 3785 | CUGGCUCCUU | 3971 |
| 159700 | uCfAfCfuga | | uUfCfagugA | | CACUGAACAU | |
| | acaugcaL96 | | faGfgagccs | | GCC | |
| | | | asg | | | |
| AD- | usasucagUf | 3600 | usGfsguaAf | 3786 | UAUAUCAGUA | 3972 |
| 159807 | aGfUfGfuac | | uGfUfacacU | | GUGUACAUUA | |
| | auuaccaL96 | | faCfugauas | | CCA | |
| | | | usa | | | |
| AD- | csasgccuUf | 3601 | usGfsuguUf | 3787 | GGCAGCCUUU | 3973 |
| 158673 | uUfCfCfuua | | cUfAfaggaA | | UCCUUAGAAC | |
| | gaacacaL96 | | faAfggcugs | | ACC | |
| | | | csc | | | |
| AD- | csusgguuAf | 3602 | usAfsacuAf | 3788 | AACUGGUUAG | 3974 |
| 159608 | gUfGfUfgaa | | uUfUfcacaC | | UGUGAAAUAG | |
| | auaguuaL96 | | fuAfaccags | | UUC | |
| | | | usu | | | |
| AD- | ascsuauaUf | 3603 | asAfsuguAf | 3789 | GAACUAUAUC | 3975 |
| 159803 | cAfGfUfagu | | cAfCfuacuG | | AGUAGUGUAC | |
| | guacauuL96 | | faUfauagus | | AUU | |
| | | | usc | | | |
| AD- | usasuaucAf | 3604 | usUfsaauGf | 3790 | ACUAUAUCAG | 3976 |
| 159805 | gUfAfGfugu | | uAfCfacuaC | | UAGUGUACAU | |
| | acauuaaL96 | | fuGfauauas | | UAC | |
| | | | gsu | | | |
| AD- | gsusaauaUf | 3605 | usAfsgucCf | 3791 | CAGUAAUAUU | 3977 |
| 159489 | uUfUfAfaga | | aUfCfuuaaA | | UUAAGAUGGA | |
| | uggacuaL96 | | faUfauuacs | | CUG | |
| | | | usg | | | |
| AD- | ususuuaaGf | 3606 | usUfsuucCf | 3792 | UAUUUUAAGA | 3978 |
| 159495 | aUfGfGfacu | | cAfGfuccaU | | UGGACUGGGA | |
| | gggaaaaL96 | | fcUfuaaaas | | AAA | |
| | | | usa | | | |
| AD- | usgsguuaGf | 3607 | asGfsaacUf | 3793 | ACUGGUUAGU | 3979 |
| 159609 | uGfUfGfaaa | | aUfUfucacA | | GUGAAAUAGU | |
| | uaguucuL96 | | fcUfaaccas | | UCU | |
| | | | gsu | | | |
| AD- | ususcacuGf | 3608 | usGfsacuAf | 3794 | CCUUCACUGA | 3980 |
| 159706 | aAfCfAfugc | | gGfCfauguU | | ACAUGCCUAG | |
| | cuagucaL96 | | fcAfgugaas | | UCC | |
| | | | gsg | | | |
| AD- | ascscaacUf | 3609 | usAfsuaaCf | 3795 | CAACCAACUA | 3981 |
| 159855 | aUfCfCfaag | | aCfUfuggaU | | UCCAAGUGUU | |
| | uguuauaL96 | | faGfuuggus | | AUA | |
| | | | usg | | | |
| AD- | cscsaaguGf | 3610 | usUfsuagUf | 3796 | AUCCAAGUGU | 3982 |
| 159864 | uUfAfUfacc | | uGfGfuauaA | | UAUACCAACU | |
| | aacuaaaL96 | | fcAfcuuggs | | AAA | |
| | | | asu | | | |
| AD- | ususccuuUf | 3611 | usGfsgacUf | 3797 | GAUUCCUUUU | 3983 |
| 158491 | uGfGfUfucc | | uGfGfaaccA | | GGUUCCAAGU | |
| | aaguccaL96 | | faAfaggaas | | CCA | |
| | | | usc | | | |
| AD- | gscsagccUf | 3612 | usUfsguuCf | 3798 | UGGCAGCCUU | 3984 |
| 158672 | uUfUfCfcuu | | uAfAfggaaA | | UUCCUUAGAA | |
| | agaacaaL96 | | faGfgcugcs | | CAC | |
| | | | csa | | | |
| AD- | asgsuaauAf | 3613 | asGfsuccAf | 3799 | GCAGUAAUAU | 3985 |
| 159488 | uUfUfUfaag | | uCfUfuaaaA | | UUUAAGAUGG | |
| | auggacuL96 | | fuAfuuacus | | ACU | |
| | | | gsc | | | |
| AD- | asasaaucCf | 3614 | usAfsggaUf | 3800 | GUAAAAUCCA | 3986 |
| 159553 | aCfAfGfcua | | aUfAfgcugU | | CAGCUAUAUC | |
| | uauccuaL96 | | fgGfauuuus | | CUG | |
| | | | asc | | | |
| AD- | uscscuucAf | 3615 | usUfsaggCf | 3801 | GCUCCUUCAC | 3987 |
| 159703 | cUfGfAfaca | | aUfGfuucaG | | UGAACAUGCC | |
| | ugccuaaL96 | | fuGfaaggas | | UAG | |
| | | | gsc | | | |
| AD- | csascugaAf | 3616 | usUfsggaCf | 3802 | UUCACUGAAC | 3988 |
| 159708 | cAfUfGfccu | | uAfGfgcauG | | AUGCCUAGUC | |
| | aguccaaL96 | | fuUfcagugs | | CAA | |
| | | | asa | | | |
| AD- | asasguguUf | 3617 | gsUfsuuuAf | 3803 | CCAAGUGUUA | 3989 |
| 159866 | aUfAfCfcaa | | gUfUfgguaU | | UACCAACUAA | |
| | cuaaaacL96 | | faAfcacuus | | AAC | |
| | | | gsg | | | |
| AD- | ususccacCf | 3618 | asGfsaccCf | 3804 | GUUUCCACCA | 3990 |
| 159232 | aUfGfAfuua | | uUfAfaucaU | | UGAUUAAGGG | |
| | agggucuL96 | | fgGfuggaas | | UCU | |
| | | | asc | | | |
| AD- | gsasacauGf | 3619 | asAfsuguUf | 3805 | CUGAACAUGC | 3991 |
| 159712 | cCfUfAfguc | | gGfAfcuagG | | CUAGUCCAAC | |
| | caacauuL96 | | fcAfuguucs | | AUU | |
| | | | asg | | | |
| AD- | asuscaguAf | 3620 | asUfsgguAf | 3806 | AUAUCAGUAG | 3992 |
| 159808 | gUfGfUfaca | | aUfGfuacaC | | UGUACAUUAC | |
| | uuaccauL96 | | fuAfcugaus | | CAU | |
| | | | asu | | | |
| AD- | asusccaaGf | 3621 | usAfsguuGf | 3807 | CUAUCCAAGU | 3993 |
| 159862 | uGfUfUfaua | | gUfAfuaacA | | GUUAUACCAA | |
| | ccaacuaL96 | | fcUfuggaus | | CUA | |
| | | | asg | | | |
| AD- | cscsaaguCf | 3622 | usAfsguuGf | 3808 | UUCCAAGUCC | 3994 |
| 158503 | cAfAfUfaug | | cCfAfuauuG | | AAUAUGGCAA | |
| | gcaacuaL96 | | fgAfcuuggs | | CUC | |
| | | | asa | | | |
| AD- | asuscucaGf | 3623 | usAfsccuUf | 3809 | GAAUCUCAGA | 3995 |
| 159311 | aCfCfUfugu | | cAfCfaaggU | | CCUUGUGAAG | |
| | gaagguaL96 | | fcUfgagaus | | GUG | |
| | | | usc | | | |
| AD- | csasuuucAf | 3624 | usGfsuagCf | 3810 | AUCAUUUCAC | 3996 |
| 159412 | cUfGfUfcua | | cUfAfgacaG | | UGUCUAGGCU | |
| | ggcuacaL96 | | fuGfaaaugs | | ACA | |
| | | | asu | | | |
| AD- | cscsacagCf | 3625 | asGfscauCf | 3811 | AUCCACAGCU | 3997 |
| 159558 | uAfUfAfucc | | aGfGfauauA | | AUAUCCUGAU | |
| | ugaugcuL96 | | fgCfuguggs | | GCU | |
| | | | asu | | | |
| AD- | csusucacUf | 3626 | usAfscuaGf | 3812 | UCCUUCACUG | 3998 |
| 159705 | gAfAfCfaug | | gCfAfuguuC | | AACAUGCCUA | |
| | ccuaguaL96 | | faGfugaags | | GUC | |
| | | | gsa | | | |
| AD- | gsusgguuGf | 3627 | usUfscauAf | 3813 | AGGUGGUUGA | 3999 |
| 159113 | aGfAfGfugc | | aGfCfacucU | | GAGUGCUUAU | |
| | uuaugaaL96 | | fcAfaccacs | | GAG | |
| | | | csu | | | |
| AD- | csasaacuCf | 3628 | usAfsuguGf | 3814 | AUCAAACUCA | 4000 |
| 159139 | aAfAfGfgcu | | uAfGfccuuU | | AAGGCUACAC | |
| | acacauaL96 | | fgAfguuugs | | AUC | |
| | | | asu | | | |
| AD- | asusaucaGf | 3629 | usGfsuaaUf | 3815 | CUAUAUCAGU | 4001 |
| 159806 | uAfGfUfgua | | gUfAfcacuA | | AGUGUACAUU | |
| | cauuacaL96 | | fcUfgauaus | | ACC | |
| | | | asg | | | |
| AD- | csasaccaAf | 3630 | usAfsacaCf | 3816 | UGCAACCAAC | 4002 |
| 159853 | cUfAfUfcca | | uUfGfgauaG | | UAUCCAAGUG | |
| | aguguuaL96 | | fuUfgguugs | | UUA | |
| | | | csa | | | |
| AD- | uscsaucgAf | 3631 | usCfsuucAf | 3817 | UGUCAUCGAA | 4003 |
| 158627 | aGfAfCfaaa | | aUfUfugucU | | GACAAAUUGA | |
| | uugaagaL96 | | fuCfgaugas | | AGG | |
| | | | csa | | | |
| AD- | gscsagauUf | 3632 | usAfsuacUf | 3818 | UAGCAGAUUU | 4004 |
| 159182 | uGfGfCfaga | | cUfCfugccA | | GGCAGAGAGU | |
| | gaguauaL96 | | faAfucugcs | | AUA | |
| | | | usa | | | |
| AD- | csusccuuCf | 3633 | usAfsggcAf | 3819 | GGCUCCUUCA | 4005 |
| 159702 | aCfUfGfaac | | uGfUfucagU | | CUGAACAUGC | |
| | augccuaL96 | | fgAfaggags | | CUA | |
| | | | csc | | | |
| AD- | csasugccUf | 3634 | asAfsaaaUf | 3820 | AACAUGCCUA | 4006 |
| 159715 | aGfUfCfcaa | | gUfUfggacU | | GUCCAACAUU | |
| | cauuuuuL96 | | faGfgcaugs | | UUU | |
| | | | usu | | | |
| AD- | usgsccauCf | 3635 | usUfscauUf | 3821 | UGUGCCAUCA | 4007 |
| 158575 | aGfUfAfucu | | aAfGfauacU | | GUAUCUUAAU | |
| | uaaugaaL96 | | fgAfuggcas | | GAA | |
| | | | csa | | | |
| AD- | gscscaucAf | 3636 | usUfsucaUf | 3822 | GUGCCAUCAG | 4008 |
| 158576 | gUfAfUfcuu | | uAfAfgauaC | | UAUCUUAAUG | |
| | aaugaaaL96 | | fuGfauggcs | | AAG | |
| | | | asc | | | |
| AD- | ususagaaCf | 3637 | asGfsacaAf | 3823 | CCUUAGAACA | 4009 |
| 158684 | aCfCfAfaag | | uCfUfuuggU | | CCAAAGAUUG | |
| | auugucuL96 | | fgUfucuaas | | UCU | |
| | | | gsg | | | |
| AD- | asuscauuUf | 3638 | usAfsgccUf | 3824 | AUAUCAUUUC | 4010 |
| 159410 | cAfCfUfguc | | aGfAfcaguG | | ACUGUCUAGG | |
| | uaggcuaL96 | | faAfaugaus | | CUA | |
| | | | asu | | | |
| AD- | uscsacugUf | 3639 | usUfsguuGf | 3825 | UUUCACUGUC | 4011 |
| 159416 | cUfAfGfgcu | | uAfGfccuaG | | UAGGCUACAA | |
| | acaacaaL96 | | faCfagugas | | CAG | |
| | | | asa | | | |
| AD- | gsgsauccAf | 3640 | usUfsggaUf | 3826 | UGGGAUCCAG | 4012 |
| 159738 | gUfGfUfaua | | uUfAfuacaC | | UGUAUAAAUC | |
| | aauccaaL96 | | fuGfgauccs | | CAA | |
| | | | csa | | | |
| AD- | csasacuaUf | 3641 | usGfsuauAf | 3827 | ACCAACUAUC | 4013 |
| 159857 | cCfAfAfgug | | aCfAfcuugG | | CAAGUGUUAU | |
| | uuauacaL96 | | faUfaguugs | | ACC | |
| | | | gsu | | | |
| AD- | ususgguuCf | 3642 | usCfsauaUf | 3828 | UUUUGGUUCC | 4014 |
| 158497 | cAfAfGfucc | | uGfGfacuuG | | AAGUCCAAUA | |
| | aauaugaL96 | | fgAfaccaas | | UGG | |
| | | | asa | | | |
| AD- | usgscuuaUf | 3643 | asGfsuuuGf | 3829 | AGUGCUUAUG | 4015 |
| 159124 | gAfGfGfuga | | aUfCfaccuC | | AGGUGAUCAA | |
| | ucaaacuL96 | | faUfaagcas | | ACU | |
| | | | csu | | | |
| AD- | asasacucAf | 3644 | usGfsaugUf | 3830 | UCAAACUCAA | 4016 |
| 159140 | aAfGfGfcua | | gUfAfgccuU | | AGGCUACACA | |
| | cacaucaL96 | | fuGfaguuus | | UCC | |
| | | | gsa | | | |
| AD- | uscsucagAf | 3645 | usCfsaccUf | 3831 | AAUCUCAGAC | 4017 |
| 159312 | cCfUfUfgug | | uCfAfcaagG | | CUUGUGAAGG | |
| | aaggugaL96 | | fuCfugagas | | UGA | |
| | | | usu | | | |
| AD- | usasaaauCf | 3646 | asGfsgauAf | 3832 | UGUAAAAUCC | 4018 |
| 159552 | cAfCfAfgcu | | uAfGfcuguG | | ACAGCUAUAU | |
| | auauccuL96 | | fgAfuuuuas | | CCU | |
| | | | csa | | | |
| AD- | cscsuucaCf | 3647 | asCfsuagGf | 3833 | CUCCUUCACU | 4019 |
| 159704 | uGfAfAfcau | | cAfUfguucA | | GAACAUGCCU | |
| | gccuaguL96 | | fgUfgaaggs | | AGU | |
| | | | asg | | | |
| AD- | gsgsgaucCf | 3648 | usGfsgauUf | 3834 | CUGGGAUCCA | 4020 |
| 159737 | aGfUfGfuau | | uAfUfacacU | | GUGUAUAAAU | |
| | aaauccaL96 | | fgGfaucccs | | CCA | |
| | | | asg | | | |
| AD- | csasauaaAf | 3649 | usUfscacUf | 3835 | CCCAAUAAAC | 4021 |
| 159869 | cCfUfUfgaa | | gUfUfcaagG | | CUUGAACAGU | |
| | cagugaaL96 | | fuUfuauugs | | GAC | |
| | | | gsg | | | |
| AD- | gsgsccugUf | 3650 | asAfsgauAf | 3836 | AUGGCCUGUG | 4022 |
| 158570 | gCfCfAfuca | | cUfGfauggC | | CCAUCAGUAU | |
| | guaucuuL96 | | faCfaggccs | | CUU | |
| | | | asu | | | |
| AD- | ususguugAf | 3651 | usGfsucuUf | 3837 | UCUUGUUGAU | 4023 |
| 158618 | uGfUfCfauc | | cGfAfugacA | | GUCAUCGAAG | |
| | gaagacaL96 | | fuCfaacaas | | ACA | |
| | | | gsa | | | |
| AD- | gsgsaucuUf | 3652 | asUfsaguUf | 3838 | AAGGAUCUUA | 4024 |
| 159788 | aUfUfUfugu | | cAfCfaaaaU | | UUUUGUGAAC | |
| | gaacuauL96 | | faAfgauccs | | UAU | |
| | | | usu | | | |
| AD- | asasggauCf | 3653 | asGfsuucAf | 3839 | CAAAGGAUCU | 4025 |
| 159786 | uUfAfUfuuu | | cAfAfaauaA | | UAUUUUGUGA | |
| | gugaacuL96 | | fgAfuccuus | | ACU | |
| | | | usg | | | |
| AD- | asuscaugUf | 3654 | usAfsauuAf | 3840 | AUAUCAUGUC | 4026 |
| 159760 | cUfUfGfugc | | uGfCfacaaG | | UUGUGCAUAA | |
| | auaauuaL96 | | faCfaugaus | | UUC | |
| | | | asu | | | |
| AD- | usgsucauAf | 3655 | asGfsacaGf | 3841 | GAUGUCAUAU | 4027 |
| 159404 | uCfAfUfuuc | | uGfAfaaugA | | CAUUUCACUG | |
| | acugucuL96 | | fuAfugacas | | UCU | |
| | | | usc | | | |
| AD- | uscsauauCf | 3656 | usUfsagaCf | 3842 | UGUCAUAUCA | 4028 |
| 159406 | aUfUfUfcac | | aGfUfgaaaU | | UUUCACUGUC | |
| | ugucuaaL96 | | fgAfuaugas | | UAG | |
| | | | csa | | | |
| AD- | asusuuauAf | 3657 | usUfsccuUf | 3843 | UGAUUUAUAA | 4029 |
| 158536 | aUfCfUfucu | | uAfGfaagaU | | UCUUCUAAAG | |
| | aaaggaaL96 | | fuAfuaaaus | | GAA | |
| | | | csa | | | |
| AD- | usgsguuuGf | 3658 | asGfscugUf | 3844 | AAUGGUUUGU | 4030 |
| 159545 | uAfAfAfauc | | gGfAfuuuuA | | AAAAUCCACA | |
| | cacagcuL96 | | fcAfaaccas | | GCU | |
| | | | usu | | | |
| AD- | asusgcugGf | 3659 | asAfsgauUf | 3845 | UGAUGCUGGA | 4031 |
| 159574 | aUfGfGfuau | | aAfUfaccaU | | UGGUAUUAAU | |
| | uaaucuuL96 | | fcCfagcaus | | CUU | |
| | | | csa | | | |
| AD- | asascuauAf | 3660 | asUfsguaCf | 3846 | UGAACUAUAU | 4032 |
| 159802 | uCfAfGfuag | | aCfUfacugA | | CAGUAGUGUA | |
| | uguacauL96 | | fuAfuaguus | | CAU | |
| | | | csa | | | |
| AD- | asuscaacUf | 3661 | usUfsucuAf | 3847 | ACAUCAACUC | 4033 |
| 159518 | cCfUfGfaag | | aCfUfucagG | | CUGAAGUUAG | |
| | uuagaaaL96 | | faGfuugaus | | AAA | |
| | | | gsu | | | |
| AD- | csusggauGf | 3662 | usAfscaaGf | 3848 | UGCUGGAUGG | 4034 |
| 159577 | gUfAfUfuaa | | aUfUfaauaC | | UAUUAAUCUU | |
| | ucuuguaL96 | | fcAfuccags | | GUG | |
| | | | csa | | | |
| AD- | usasucauUf | 3663 | asGfsccuAf | 3849 | CAUAUCAUUU | 4035 |
| 159409 | uCfAfCfugu | | gAfCfagugA | | CACUGUCUAG | |
| | cuaggcuL96 | | faAfugauas | | GCU | |
| | | | usg | | | |
| AD- | gsusaaaaUf | 3664 | usGfsauaUf | 3850 | UUGUAAAAUC | 4036 |
| 159551 | cCfAfCfagc | | aGfCfugugG | | CACAGCUAUA | |
| | uauaucaL96 | | faUfuuuacs | | UCC | |
| | | | asa | | | |
| AD- | uscscuuaGf | 3665 | asAfsaugCf | 3851 | CUUCCUUAGU | 4037 |
| 159276 | uGfUfUfccu | | aAfGfgaacA | | GUUCCUUGCA | |
| | ugcauuuL96 | | fcUfaaggas | | UUU | |
| | | | asg | | | |
| AD- | csasuaucAf | 3666 | usCfsuagAf | 3852 | GUCAUAUCAU | 4038 |
| 159407 | uUfUfCfacu | | cAfGfugaaA | | UUCACUGUCU | |
| | gucuagaL96 | | fuGfauaugs | | AGG | |
| | | | asc | | | |
| AD- | asascaucAf | 3667 | usUfsaacUf | 3853 | AAAACAUCAA | 4039 |
| 159515 | aCfUfCfcug | | uCfAfggagU | | CUCCUGAAGU | |
| | aaguuaaL96 | | fuGfauguus | | UAG | |
| | | | usu | | | |
| AD- | cscsugauGf | 3668 | usUfsaauAf | 3854 | AUCCUGAUGC | 4040 |
| 159570 | cUfGfGfaug | | cCfAfuccaG | | UGGAUGGUAU | |
| | guauuaaL96 | | fcAfucaggs | | UAA | |
| | | | asu | | | |
| AD- | asasugcaAf | 3669 | asCfsuugGf | 3855 | ACAAUGCAAC | 4041 |
| 159849 | cCfAfAfcua | | aUfAfguugG | | CAACUAUCCA | |
| | uccaaguL96 | | fuUfgcauus | | AGU | |
| | | | gsu | | | |
| AD- | ususuacgGf | 3670 | usAfsucaUf | 3856 | UCUUUACGGA | 4042 |
| 159252 | aAfUfAfaag | | cCfUfuuauU | | AUAAAGGAUG | |
| | gaugauaL96 | | fcCfguaaas | | AUG | |
| | | | gsa | | | |
| AD- | ususccuuAf | 3671 | asAfsugcAf | 3857 | UCUUCCUUAG | 4043 |
| 159275 | gUfGfUfucc | | aGfGfaacaC | | UGUUCCUUGC | |
| | uugcauuL96 | | fuAfaggaas | | AUU | |
| | | | gsa | | | |
| AD- | csasaugcAf | 3672 | usUfsuggAf | 3858 | AACAAUGCAA | 4044 |
| 159848 | aCfCfAfacu | | uAfGfuuggU | | CCAACUAUCC | |
| | auccaaaL96 | | fuGfcauugs | | AAG | |
| | | | usu | | | |
| AD- | asgsauuuGf | 3673 | asUfsuauAf | 3859 | GCAGAUUUGG | 4045 |
| 159184 | gCfAfGfaga | | cUfCfucugC | | CAGAGAGUAU | |
| | guauaauL96 | | fcAfaaucus | | AAU | |
| | | | gsc | | | |
| AD- | ususuccaCf | 3674 | usAfscccUf | 3860 | AGUUUCCACC | 4046 |
| 159231 | cAfUfGfauu | | uAfAfucauG | | AUGAUUAAGG | |
| | aaggguaL96 | | fgUfggaaas | | GUC | |
| | | | csu | | | |
| AD- | ascsugguUf | 3675 | asAfscuaUf | 3861 | CAACUGGUUA | 4047 |
| 159607 | aGfUfGfuga | | uUfCfacacU | | GUGUGAAAUA | |
| | aauaguuL96 | | faAfccagus | | GUU | |
| | | | usg | | | |
| AD- | csasagucCf | 3676 | asGfsaguUf | 3862 | UCCAAGUCCA | 4048 |
| 158504 | aAfUfAfugg | | gCfCfauauU | | AUAUGGCAAC | |
| | caacucuL96 | | fgGfacuugs | | UCU | |
| | | | gsa | | | |
| AD- | uscscaccAf | 3677 | asAfsgacCf | 3863 | UUUCCACCAU | 4049 |
| 159233 | uGfAfUfuaa | | cUfUfaaucA | | GAUUAAGGGU | |
| | gggucuuL96 | | fuGfguggas | | CUU | |
| | | | asa | | | |
| AD- | uscsauuuCf | 3678 | usUfsagcCf | 3864 | UAUCAUUUCA | 4050 |
| 159411 | aCfUfGfucu | | uAfGfacagU | | CUGUCUAGGC | |
| | aggcuaaL96 | | fgAfaaugas | | UAC | |
| | | | usa | | | |
| AD- | usgsuccuUf | 3679 | asCfsagaUf | 3865 | GUUGUCCUUU | 4051 |
| 159462 | uUfUfAfucu | | cAfGfauaaA | | UUAUCUGAUC | |
| | gaucuguL96 | | faAfggacas | | UGU | |
| | | | asc | | | |
| AD- | cscsagugUf | 3680 | usAfsuauUf | 3866 | AUCCAGUGUA | 4052 |
| 159742 | aUfAfAfauc | | gGfAfuuuaU | | UAAAUCCAAU | |
| | caauauaL96 | | faCfacuggs | | AUC | |
| | | | asu | | | |
| AD- | uscscaagUf | 3681 | usUfsaguUf | 3867 | UAUCCAAGUG | 4053 |
| 159863 | gUfUfAfuac | | gGfUfauaaC | | UUAUACCAAC | |
| | caacuaaL96 | | faCfuuggas | | UAA | |
| | | | usa | | | |
| AD- | gsasacacCf | 3682 | usAfsgagAf | 3868 | UAGAACACCA | 4054 |
| 158687 | aAfAfGfauu | | cAfAfucuuU | | AAGAUUGUCU | |
| | gucucuaL96 | | fgGfuguucs | | CUG | |
| | | | usa | | | |
| AD- | asascaccAf | 3683 | usCfsagaGf | 3869 | AGAACACCAA | 4055 |
| 158688 | aAfGfAfuug | | aCfAfaucuU | | AGAUUGUCUC | |
| | ucucugaL96 | | fuGfguguus | | UGG | |
| | | | csu | | | |
| AD- | asusguugUf | 3684 | asUfscagAf | 3870 | GCAUGUUGUC | 4056 |
| 159458 | cCfUfUfuuu | | uAfAfaaagG | | CUUUUUAUCU | |
| | aucugauL96 | | faCfaacaus | | GAU | |
| | | | gsc | | | |
| AD- | uscsaacuCf | 3685 | asUfsuucUf | 3871 | CAUCAACUCC | 4057 |
| 159519 | cUfGfAfagu | | aAfCfuucaG | | UGAAGUUAGA | |
| | uagaaauL96 | | fgAfguugas | | AAU | |
| | | | usg | | | |
| AD- | asascuauCf | 3686 | usGfsguaUf | 3872 | CCAACUAUCC | 4058 |
| 159858 | cAfAfGfugu | | aAfCfacuuG | | AAGUGUUAUA | |
| | uauaccaL96 | | fgAfuaguus | | CCA | |
| | | | gsg | | | |
| AD- | gsgsuauuAf | 3687 | asGfsacuAf | 3873 | AUGGUAUUAA | 4059 |
| 159583 | aUfCfUfugu | | cAfCfaagaU | | UCUUGUGUAG | |
| | guagucuL96 | | fuAfauaccs | | UCU | |
| | | | asu | | | |
| AD- | gsgscuccUf | 3688 | usGfscauGf | 3874 | CUGGCUCCUU | 4060 |
| 159700 | uCfAfCfuga | | uUfCfagugA | | CACUGAACAU | |
| | acaugcaL96 | | faGfgagccs | | GCC | |
| | | | asg | | | |
| AD- | usasucagUf | 3689 | usGfsguaAf | 3875 | UAUAUCAGUA | 4061 |
| 159807 | aGfUfGfuac | | uGfUfacacU | | GUGUACAUUA | |
| | auuaccaL96 | | faCfugauas | | CCA | |
| | | | usa | | | |
| AD- | csasgccuUf | 3690 | usGfsuguUf | 3876 | GGCAGCCUUU | 4062 |
| 158673 | uUfCfCfuua | | cUfAfaggaA | | UCCUUAGAAC | |
| | gaacacaL96 | | faAfggcugs | | ACC | |
| | | | csc | | | |
| AD- | csusgguuAf | 3691 | usAfsacuAf | 3877 | AACUGGUUAG | 4063 |
| 159608 | gUfGfUfgaa | | uUfUfcacaC | | UGUGAAAUAG | |
| | auaguuaL96 | | fuAfaccags | | UUC | |
| | | | usu | | | |
| AD- | ascsuauaUf | 3692 | asAfsuguAf | 3878 | GAACUAUAUC | 4064 |
| 159803 | cAfGfUfagu | | cAfCfuacuG | | AGUAGUGUAC | |
| | guacauuL96 | | faUfauagus | | AUU | |
| | | | usc | | | |
| AD- | usasuaucAf | 3693 | usUfsaauGf | 3879 | ACUAUAUCAG | 4065 |
| 159805 | gUfAfGfugu | | uAfCfacuaC | | UAGUGUACAU | |
| | acauuaaL96 | | fuGfauauas | | UAC | |
| | | | gsu | | | |
| AD- | gsusaauaUf | 3694 | usAfsgucCf | 3880 | CAGUAAUAUU | 4066 |
| 159489 | uUfUfAfaga | | aUfCfuuaaA | | UUAAGAUGGA | |
| | uggacuaL96 | | faUfauuacs | | CUG | |
| | | | usg | | | |
| AD- | ususuuaaGf | 3695 | usUfsuucCf | 3881 | UAUUUUAAGA | 4067 |
| 159495 | aUfGfGfacu | | cAfGfuccaU | | UGGACUGGGA | |
| | gggaaaaL96 | | fcUfuaaaas | | AAA | |
| | | | usa | | | |
| AD- | ususcacuGf | 3696 | usGfsacuAf | 3882 | CCUUCACUGA | 4068 |
| 159706 | aAfCfAfugc | | gGfCfauguU | | ACAUGCCUAG | |
| | cuagucaL96 | | fcAfgugaas | | UCC | |
| | | | gsg | | | |
| AD- | ascscaacUf | 3697 | usAfsuaaCf | 3883 | CAACCAACUA | 4069 |
| 159855 | aUfCfCfaag | | aCfUfuggaU | | UCCAAGUGUU | |
| | uguuauaL96 | | faGfuuggus | | AUA | |
| | | | usg | | | |
| AD- | cscsaaguGf | 3698 | usUfsuagUf | 3884 | AUCCAAGUGU | 4070 |
| 159864 | uUfAfUfacc | | uGfGfuauaA | | UAUACCAACU | |
| | aacuaaaL96 | | fcAfcuuggs | | AAA | |
| | | | asu | | | |
| AD- | asgsuaauAf | 3699 | asGfsuccAf | 3885 | GCAGUAAUAU | 4071 |
| 159488 | uUfUfUfaag | | uCfUfuaaaA | | UUUAAGAUGG | |
| | auggacuL96 | | fuAfuuacus | | ACU | |
| | | | gsc | | | |
| AD- | asasaaucCf | 3700 | usAfsggaUf | 3886 | GUAAAAUCCA | 4072 |
| 159553 | aCfAfGfcua | | aUfAfgcugU | | CAGCUAUAUC | |
| | uauccuaL96 | | fgGfauuuus | | CUG | |
| | | | asc | | | |
| AD- | uscscuucAf | 3701 | usUfsaggCf | 3887 | GCUCCUUCAC | 4073 |
| 159703 | cUfGfAfaca | | aUfGfuucaG | | UGAACAUGCC | |
| | ugccuaaL96 | | fuGfaaggas | | UAG | |
| | | | gsc | | | |
| AD- | csascugaAf | 3702 | usUfsggaCf | 3888 | UUCACUGAAC | 4074 |
| 159708 | cAfUfGfccu | | uAfGfgcauG | | AUGCCUAGUC | |
| | aguccaaL96 | | fuUfcagugs | | CAA | |
| | | | asa | | | |
| AD- | asasguguUf | 3703 | gsUfsuuuAf | 3889 | CCAAGUGUUA | 4075 |
| 159866 | aUfAfCfcaa | | gUfUfgguaU | | UACCAACUAA | |
| | cuaaaacL96 | | faAfcacuus | | AAC | |
| | | | gsg | | | |
| AD- | ususccacCf | 3704 | asGfsaccCf | 3890 | GUUUCCACCA | 4076 |
| 159232 | aUfGfAfuua | | uUfAfaucaU | | UGAUUAAGGG | |
| | agggucuL96 | | fgGfuggaas | | UCU | |
| | | | asc | | | |
| AD- | gsasacauGf | 3705 | asAfsuguUf | 3891 | CUGAACAUGC | 4077 |
| 159712 | cCfUfAfguc | | gGfAfcuagG | | CUAGUCCAAC | |
| | caacauuL96 | | fcAfuguucs | | AUU | |
| | | | asg | | | |
| AD- | asuscaguAf | 3706 | asUfsgguAf | 3892 | AUAUCAGUAG | 4078 |
| 159808 | gUfGfUfaca | | aUfGfuacaC | | UGUACAUUAC | |
| | uuaccauL96 | | fuAfcugaus | | CAU | |
| | | | asu | | | |
| AD- | asusccaaGf | 3707 | usAfsguuGf | 3893 | CUAUCCAAGU | 4079 |
| 159862 | uGfUfUfaua | | gUfAfuaacA | | GUUAUACCAA | |
| | ccaacuaL96 | | fcUfuggaus | | CUA | |
| | | | asg | | | |
| AD- | cscsaaguCf | 3708 | usAfsguuGf | 3894 | UUCCAAGUCC | 4080 |
| 158503 | cAfAfUfaug | | cCfAfuauuG | | AAUAUGGCAA | |
| | gcaacuaL96 | | fgAfcuuggs | | CUC | |
| | | | asa | | | |
| AD- | csasuuucAf | 3709 | usGfsuagCf | 3895 | AUCAUUUCAC | 4081 |
| 159412 | cUfGfUfcua | | cUfAfgacaG | | UGUCUAGGCU | |
| | ggcuacaL96 | | fuGfaaaugs | | ACA | |
| | | | asu | | | |
| AD- | cscsacagCf | 3710 | asGfscauCf | 3896 | AUCCACAGCU | 4082 |
| 159558 | uAfUfAfucc | | aGfGfauauA | | AUAUCCUGAU | |
| | ugaugcuL96 | | fgCfuguggs | | GCU | |
| | | | asu | | | |
| AD- | csusucacUf | 3711 | usAfscuaGf | 3897 | UCCUUCACUG | 4083 |
| 159705 | gAfAfCfaug | | gCfAfuguuC | | AACAUGCCUA | |
| | ccuaguaL96 | | faGfugaags | | GUC | |
| | | | gsa | | | |
| AD- | gsusgguuGf | 3712 | usUfscauAf | 3898 | AGGUGGUUGA | 4084 |
| 159113 | aGfAfGfugc | | aGfCfacucU | | GAGUGCUUAU | |
| | uuaugaaL96 | | fcAfaccacs | | GAG | |
| | | | csu | | | |
| AD- | asusaucaGf | 3713 | usGfsuaaUf | 3899 | CUAUAUCAGU | 4085 |
| 159806 | uAfGfUfgua | | gUfAfcacuA | | AGUGUACAUU | |
| | cauuacaL96 | | fcUfgauaus | | ACC | |
| | | | asg | | | |
| AD- | csasaccaAf | 3714 | usAfsacaCf | 3900 | UGCAACCAAC | 4086 |
| 159853 | cUfAfUfcca | | uUfGfgauaG | | UAUCCAAGUG | |
| | aguguuaL96 | | fuUfgguugs | | UUA | |
| | | | csa | | | |
| AD- | gscsagauUf | 3715 | usAfsuacUf | 3901 | UAGCAGAUUU | 4087 |
| 159182 | uGfGfCfaga | | cUfCfugccA | | GGCAGAGAGU | |
| | gaguauaL96 | | faAfucugcs | | AUA | |
| | | | usa | | | |
| AD- | csusccuuCf | 3716 | usAfsggcAf | 3902 | GGCUCCUUCA | 4088 |
| 159702 | aCfUfGfaac | | uGfUfucagU | | CUGAACAUGC | |
| | augccuaL96 | | fgAfaggags | | CUA | |
| | | | csc | | | |
| AD- | csasugccUf | 3717 | asAfsaaaUf | 3903 | AACAUGCCUA | 4089 |
| 159715 | aGfUfCfcaa | | gUfUfggacU | | GUCCAACAUU | |
| | cauuuuuL96 | | faGfgcaugs | | UUU | |
| | | | usu | | | |
| AD- | usgsccauCf | 3718 | usUfscauUf | 3904 | UGUGCCAUCA | 4090 |
| 158575 | aGfUfAfucu | | aAfGfauacU | | GUAUCUUAAU | |
| | uaaugaaL96 | | fgAfuggcas | | GAA | |
| | | | csa | | | |
| AD- | gscscaucAf | 3719 | usUfsucaUf | 3905 | GUGCCAUCAG | 4091 |
| 158576 | gUfAfUfcuu | | uAfAfgauaC | | UAUCUUAAUG | |
| | aaugaaaL96 | | fuGfauggcs | | AAG | |
| | | | asc | | | |
| AD- | ususagaaCf | 3720 | asGfsacaAf | 3906 | CCUUAGAACA | 4092 |
| 158684 | aCfCfAfaag | | uCfUfuuggU | | CCAAAGAUUG | |
| | auugucuL96 | | fgUfucuaas | | UCU | |
| | | | gsg | | | |
| AD- | asuscauuUf | 3721 | usAfsgccUf | 3907 | AUAUCAUUUC | 4093 |
| 159410 | cAfCfUfguc | | aGfAfcaguG | | ACUGUCUAGG | |
| | uaggcuaL96 | | faAfaugaus | | CUA | |
| | | | asu | | | |
| AD- | uscsacugUf | 3722 | usUfsguuGf | 3908 | UUUCACUGUC | 4094 |
| 159416 | cUfAfGfgcu | | uAfGfccuaG | | UAGGCUACAA | |
| | acaacaaL96 | | faCfagugas | | CAG | |
| | | | asa | | | |
| AD- | csasacuaUf | 3723 | usGfsuauAf | 3909 | ACCAACUAUC | 4095 |
| 159857 | cCfAfAfgug | | aCfAfcuugG | | CAAGUGUUAU | |
| | uuauacaL96 | | faUfaguugs | | ACC | |
| | | | gsu | | | |
| AD- | ususgguuCf | 3724 | usCfsauaUf | 3910 | UUUUGGUUCC | 4096 |
| 158497 | cAfAfGfucc | | uGfGfacuuG | | AAGUCCAAUA | |
| | aauaugaL96 | | fgAfaccaas | | UGG | |
| | | | asa | | | |
| AD- | usgscuuaUf | 3725 | asGfsuuuGf | 3911 | AGUGCUUAUG | 4097 |
| 159124 | gAfGfGfuga | | aUfCfaccuC | | AGGUGAUCAA | |
| | ucaaacuL96 | | faUfaagcas | | ACU | |
| | | | csu | | | |
| AD- | uscsucagAf | 3726 | usCfsaccUf | 3912 | AAUCUCAGAC | 4098 |
| 159312 | cCfUfUfgug | | uCfAfcaagG | | CUUGUGAAGG | |
| | aaggugaL96 | | fuCfugagas | | UGA | |
| | | | usu | | | |
| AD- | usasaaauCf | 3727 | asGfsgauAf | 3913 | UGUAAAAUCC | 4099 |
| 159552 | AfCfAfgcua | | uAfGfcuguG | | ACAGCUAUAU | |
| | uauccuL96 | | fgAfuuuuas | | CCU | |
| | | | csa | | | |
| AD- | cscsuucaCf | 3728 | asCfsuagGf | 3914 | CUCCUUCACU | 4100 |
| 159704 | uGfAfAfcau | | cAfUfguucA | | GAACAUGCCU | |
| | gccuaguL96 | | fgUfgaaggs | | AGU | |
| | | | asg | | | |
| AD- | gsgsgaucCf | 3729 | usGfsgauUf | 3915 | CUGGGAUCCA | 4101 |
| 159737 | aGfUfGfuau | | uAfUfacacU | | GUGUAUAAAU | |
| | aaauccaL96 | | fgGfaucccs | | CCA | |
| | | | asg | | | |
| AD- | csasauaaAf | 3730 | usUfscacUf | 3916 | CCCAAUAAAC | 4102 |
| 159869 | cCfUfUfgaa | | gUfUfcaagG | | CUUGAACAGU | |
| | cagugaaL96 | | fuUfuauugs | | GAC | |
| | | | gsg | | | |
| AD- | gsgsccugUf | 3731 | asAfsgauAf | 3917 | AUGGCCUGUG | 4103 |
| 158570 | gCfCfAfuca | | cUfGfauggC | | CCAUCAGUAU | |
| | guaucuuL96 | | faCfaggccs | | CUU | |
| | | | asu | | | |
| AD- | ususguugAf | 3732 | usGfsucuUf | 3918 | UCUUGUUGAU | 4104 |
| 158618 | uGfUfCfauc | | cGfAfugacA | | GUCAUCGAAG | |
| | gaagacaL96 | | fuCfaacaas | | ACA | |
| | | | gsa | | | |
| AD- | asgsauuuGf | 3733 | asUfsuauAf | 3919 | GCAGAUUUGG | 4105 |
| 159184 | gCfAfGfaga | | cUfCfucugC | | CAGAGAGUAU | |
| | guauaauL96 | | fcAfaaucus | | AAU | |
| | | | gsc | | | |
| AD- | ususuccaCf | 3734 | usAfscccUf | 3920 | AGUUUCCACC | 4106 |
| 159231 | AfUfGfauua | | uAfAfucauG | | AUGAUUAAGG | |
| | aggguaL96 | | fgUfggaaas | | GUC | |
| | | | csu | | | |
| AD- | csusaggcUf | 3735 | usAfsgaaUf | 3921 | GUCUAGGCUA | 4107 |
| 159423 | aCfAfAfcag | | cCfUfguugU | | CAACAGGAUU | |
| | gauucuaL96 | | faGfccuags | | CUA | |
| | | | asc | | | |
| AD- | usgsgaggUf | 3736 | usGfsacaAf | 3922 | GGUGGAGGUU | 4108 |
| 159446 | uGfUfGfcau | | cAfUfgcacA | | GUGCAUGUUG | |
| | guugucaL96 | | faCfcuccas | | UCC | |
| | | | csc | | | |
| AD- | gscsuccuUf | 3737 | asGfsgcaUf | 3923 | UGGCUCCUUC | 4109 |
| 159701 | cAfCfUfgaa | | gUfUfcaguG | | ACUGAACAUG | |
| | caugccuL96 | | faAfggagcs | | CCU | |
| | | | csa | | | |
| AD- | esusuuugGf | 3738 | usAfsuugGf | 3924 | UCCUUUUGGU | 4110 |
| 158494 | uUfCfCfaag | | aCfUfuggaA | | UCCAAGUCCA | |
| | uccaauaL96 | | fcCfaaaags | | AUA | |
| | | | gsa | | | |
| AD- | gscscuguGf | 3739 | usAfsagaUf | 3925 | UGGCCUGUGC | 4111 |
| 158571 | cCfAfUfcag | | aCfUfgaugG | | CAUCAGUAUC | |
| | uaucuuaL96 | | fcAfcaggcs | | UUA | |
| | | | csa | | | |
| AD- | gscsuuauGf | 3740 | usAfsguuUf | 3926 | GUGCUUAUGA | 4112 |
| 159125 | aGfGfUfgau | | gAfUfcaccU | | GGUGAUCAAA | |
| | caaacuaL96 | | fcAfuaagcs | | CUC | |
| | | | asc | | | |
| AD- | csusuaugAf | 3741 | usGfsaguUf | 3927 | UGCUUAUGAG | 4113 |
| 159126 | gGfUfGfauc | | uGfAfucacC | | GUGAUCAAAC | |
| | aaacucaL96 | | fuCfauaags | | UCA | |
| | | | csa | | | |
| AD- | cscsuugcAf | 3742 | asUfsucuGf | 3928 | UUCCUUGCAU | 4114 |
| 159287 | uUfUfUfggg | | uCfCfcaaaA | | UUUGGGACAG | |
| | acagaauL96 | | fuGfcaaggs | | AAU | |
| | | | asa | | | |
| AD- | gsgsuuccAf | 3743 | usGfsccaUf | 3929 | UUGGUUCCAA | 4115 |
| 158499 | aGfUfCfcaa | | aUfUfggacU | | GUCCAAUAUG | |
| | uauggcaL96 | | fuGfgaaccs | | GCA | |
| | | | asa | | | |
| AD- | csascuguCf | 3744 | usCfsuguUf | 3930 | UUCACUGUCU | 4116 |
| 159417 | uAfGfGfcua | | gUfAfgccuA | | AGGCUACAAC | |
| | caacagaL96 | | fgAfcagugs | | AGG | |
| | | | asa | | | |
| AD- | ascsugucUf | 3745 | usCfscugUf | 3931 | UCACUGUCUA | 4117 |
| 159418 | aGfGfCfuac | | uGfUfagccU | | GGCUACAACA | |
| | aacaggaL96 | | faGfacagus | | GGA | |
| | | | gsa | | | |
| AD- | asasuaagAf | 3746 | usCfscaaCf | 3932 | AGAAUAAGAU | 4118 |
| 158550 | uUfAfCfagu | | aAfCfuguaA | | UACAGUUGUU | |
| | uguuggaL96 | | fuCfuuauus | | GGG | |
| | | | csu | | | |
| AD- | gsusugagAf | 3747 | usAfsccuCf | 3933 | UGGUUGAGAG | 4119 |
| 159116 | gUfGfCfuua | | aUfAfagcaC | | UGCUUAUGAG | |
| | ugagguaL96 | | fuCfucaacs | | GUG | |
| | | | csa | | | |
| AD- | gsuscuagGf | 3748 | usAfsaucCf | 3934 | CUGUCUAGGC | 4120 |
| 159421 | cUfAfCfaac | | uGfUfuguaG | | UACAACAGGA | |
| | aggauuaL96 | | fcCfuagacs | | UUC | |
| | | | asg | | | |
| AD- | uscsuaggCf | 3749 | asGfsaauCf | 3935 | UGUCUAGGCU | 4121 |
| 159422 | uAfCfAfaca | | cUfGfuuguA | | ACAACAGGAU | |
| | ggauucuL96 | | fgCfcuagas | | UCU | |
| | | | csa | | | |
| AD- | gsusggagGf | 3750 | usAfscaaCf | 3936 | AGGUGGAGGU | 4122 |
| 159445 | uUfGfUfgca | | aUfGfcacaA | | UGUGCAUGUU | |
| | uguuguaL96 | | fcCfuccacs | | GUC | |
| | | | csu | | | |
| AD- | usgsagguGf | 3751 | usCfsuuuGf | 3937 | UAUGAGGUGA | 4123 |
| 159130 | aUfCfAfaac | | aGfUfuugaU | | UCAAACUCAA | |
| | ucaaagaL96 | | fcAfccucas | | AGG | |
| | | | usa | | | |
| AD- | gsusgaucAf | 3752 | usUfsagcCf | 3938 | AGGUGAUCAA | 4124 |
| 159134 | aAfCfUfcaa | | uUfUfgaguU | | ACUCAAAGGC | |
| | aggcuaaL96 | | fuGfaucacs | | UAC | |
| | | | csu | | | |
| AD- | usgsaggaAf | 3753 | usUfscaaAf | 3939 | UCUGAGGAAG | 4125 |
| 159343 | gAfGfGfccc | | cGfGfgccuC | | AGGCCCGUUU | |
| | guuugaaL96 | | fuUfccucas | | GAA | |
| | | | gsa | | | |
| AD- | ascsaagcAf | 3754 | usAfscucUf | 3940 | UCACAAGCAG | 4126 |
| 159105 | gGfUfGfguu | | cAfAfccacC | | GUGGUUGAGA | |
| | gagaguaL96 | | fuGfcuugus | | GUG | |
| | | | gsa | | | |
| AD- | csasgauuUf | 3755 | usUfsauaCf | 3941 | AGCAGAUUUG | 4127 |
| 159183 | gGfCfAfgag | | uCfUfcugcC | | GCAGAGAGUA | |
| | aguauaaL96 | | faAfaucugs | | UAA | |
| | | | csu | | | |
| AD- | gsusgcuuAf | 3756 | gsUfsuugAf | 3942 | GAGUGCUUAU | 4128 |
| 159123 | uGfAfGfgug | | uCfAfccucA | | GAGGUGAUCA | |
| | aucaaacL96 | | fuAfagcacs | | AAC | |
| | | | usc | | | |
| AD- | asgscagaUf | 3757 | asUfsacuCf | 3943 | GUAGCAGAUU | 4129 |
| 159181 | uUfGfGfcag | | uCfUfgccaA | | UGGCAGAGAG | |
| | agaguauL96 | | faUfcugcus | | UAU | |
| | | | asc | | | |
| AD- | asusuuggCf | 3758 | usCfsauuAf | 3944 | AGAUUUGGCA | 4130 |
| 159186 | aGfAfGfagu | | uAfCfucucU | | GAGAGUAUAA | |
| | auaaugaL96 | | fgCfcaaaus | | UGA | |
| | | | csu | | | |
| AD- | ususuggcAf | 3759 | usUfscauUf | 3945 | GAUUUGGCAG | 4131 |
| 159187 | gAfGfAfgua | | aUfAfcucuC | | AGAGUAUAAU | |
| | uaaugaaL96 | | fuGfccaaas | | GAA | |
| | | | usc | | | |
| AD- | csusugcaUf | 3760 | usAfsuucUf | 3946 | UCCUUGCAUU | 4132 |
| 159288 | uUfUfGfgga | | gUfCfccaaA | | UUGGGACAGA | |
| | cagaauaL96 | | faUfgcaags | | AUG | |
| | | | gsa | | | |
| AD- | asusggaaUf | 3761 | usCfsacaAf | 3947 | GAAUGGAAUC | 4133 |
| 159306 | cUfCfAfgac | | gGfUfcugaG | | UCAGACCUUG | |
| | cuugugaL96 | | faUfuccaus | | UGA | |
| | | | usc | | | |
| AD- | csascagcUf | 3762 | usAfsgcaUf | 3948 | UCCACAGCUA | 4134 |
| 159559 | aUfAfUfccu | | cAfGfgauaU | | UAUCCUGAUG | |
| | gaugcuaL96 | | faGfcugugs | | CUG | |
| | | | gsa | | | |
| AD- | gsasggaaGf | 3763 | usUfsucaAf | 3949 | CUGAGGAAGA | 4135 |
| 159344 | aGfGfCfccg | | aCfGfggccU | | GGCCCGUUUG | |
| | uuugaaaL96 | | fcUfuccucs | | AAG | |
| | | | asg | | | |
| AD- | uscsugagGf | 3764 | usAfsaacGf | 3950 | CUUCUGAGGA | 4136 |
| 159341 | aAfGfAfggc | | gGfCfcucuU | | AGAGGCCCGU | |
| | ccguuuaL96 | | fcCfucagas | | UUG | |
| | | | asg | | | |
| AD- | csascaucCf | 3765 | usAfscacUf | 3951 | GUCACAUCCU | 4137 |
| 159729 | uGfGfGfauc | | gGfAfucccA | | GGGAUCCAGU | |
| | caguguaL96 | | fgGfaugugs | | GUA | |
| | | | asc | | | |
| AD- | asgsccuuUf | 3766 | usGfsgugUf | 3952 | GCAGCCUUUU | 4138 |
| 158674 | uCfCfUfuag | | uCfUfaaggA | | CCUUAGAACA | |
| | aacaccaL96 | | faAfaggcus | | CCA | |
| | | | gsc | | | |
| AD- | uscsaacuGf | 3767 | usAfsuuuCf | 3953 | CUUCAACUGG | 4139 |
| 159604 | gUfUfAfgug | | aCfAfcuaaC | | UUAGUGUGAA | |
| | ugaaauaL96 | | fcAfguugas | | AUA | |
| | | | asg | | | |

TABLE 4
Modified Human/Mouse/Cyno/Rat, Mouse,
Mouse/Rat, and Human/Cyno Cross-
Reactive HAO1 iRNA Sequences

| | Sense | | Antisense | | |
|---|---|---|---|---|---|
| | Strand | SEQ | Strand | SEQ | |
| Duplex | Sequence | ID | Sequence | ID | |
| Name | 5′ to 3′ | NO: | 5′ to 3′ | NO: | Species |
| AD-62933 | GfsasAfuGf | 4140 | usUfsgUfcG | 89 | Hs/Mm |
| | uGfaAfAfGf | | faUfgAfcuu | | |
| | uCfaUfcGfa | | UfcAfcAfuU | | |
| | CfaAfL96 | | fcsusg | | |
| AD-62939 | UfsusUfuCf | 4141 | usCfscUfaG | 90 | Hs/Mm |
| | aAfuGfGfGf | | fgAfcAfccc | | |
| | uGfuCfcUfa | | AfuUfgAfaA | | |
| | GfgAfL96 | | fasgsu | | |
| AD-62944 | GfsasAfaGf | 4142 | asAfsuGfuC | 91 | Hs/Mm |
| | uCfaUfCfGf | | fuUfgUfcga | | |
| | aCfaAfgAfc | | UfgAfcUfuU | | |
| | AfuUfL96 | | fcsasc | | |
| AD-62949 | UfscsAfuCf | 4143 | usCfsaCfcA | 92 | Hs/Mm |
| | gAfcAfAfGf | | faUfgUfcuu | | |
| | aCfaUfuGfg | | GfuCfgAfuG | | |
| | UfgAfL96 | | fascsu | | |
| AD-62954 | UfsusUfcAf | 4144 | usUfscCfuA | 93 | Hs/Mm |
| | aUfgGfGfUf | | fgGfaCfacc | | |
| | gUfcCfuAfg | | CfaUfuGfaA | | |
| | GfaAfL96 | | fasasg | | |
| AD-62959 | AfsasUfgGf | 4145 | asAfsgGfuU | 94 | Hs/Mm |
| | gUfgUfCfCf | | fcCfuAfgga | | |
| | uAfgGfaAfc | | CfaCfcCfaU | | |
| | CfuUfL96 | | fusgsa | | |
| AD-62964 | GfsasCfaGf | 4146 | usGfsgAfaA | 95 | Hs/Mm |
| | uGfcAfCfAf | | faUfaUfugu | | |
| | aUfaUfuUfu | | GfcAfcUfgU | | |
| | CfcAfL96 | | fcsasg | | |
| AD-62969 | AfscsUfuUf | 4147 | usUfsaGfgA | 96 | Hs/Mm |
| | uCfaAfUfGf | | fcAfcCfcau | | |
| | gGfuGfuCfc | | UfgAfaAfaG | | |
| | UfaAfL96 | | fuscsa | | |
| AD-62934 | AfsasGfuCf | 4148 | usCfsaAfuG | 97 | Hs/Mm |
| | aUfcGfAfCf | | fuCfuUfguc | | |
| | aAfgAfcAfu | | GfaUfgAfcU | | |
| | UfgAfL96 | | fususc | | |
| AD-62940 | AfsusCfgAf | 4149 | usCfsuCfaC | 98 | Hs/Mm |
| | cAfaGfAfCf | | fcAfaUfguc | | |
| | aUfuGfgUfg | | UfuGfuCfgA | | |
| | AfgAfL96 | | fusgsa | | |
| AD-62945 | GfsgsGfaGf | 4150 | usAfsuCfuU | 99 | Hs/Mm |
| | aAfaGfGfUf | | fgAfaCfacc | | |
| | gUfuCfaAfg | | UfuUfcUfcC | | |
| | AfuAfL96 | | fcscsc | | |
| AD-62950 | CfsusUfuUf | 4311 | usCfsuAfgG | 100 | Hs/Mm |
| | cAfaUfGfGf | | faCfaCfcca | | |
| | gUfgUfcCfu | | UfuGfaAfaA | | |
| | AfgAfL96 | | fgsusc | | |
| AD-62955 | UfscsAfaUf | 4312 | usGfsuUfcC | 101 | Hs/Mm |
| | gGfgUfGfUf | | fuAfgGfaca | | |
| | cCfuAfgGfa | | CfcCfaUfuG | | |
| | AfcAfL96 | | fasasa | | |
| AD-62960 | UfsusGfaCf | 4313 | usGfsaCfaC | 102 | Hs/Mm |
| | uUfuUfCfAf | | fcCfaUfuga | | |
| | aUfgGfgUfg | | AfaAfgUfcA | | |
| | UfcAfL96 | | fasasa | | |
| AD-62965 | AfsasAfgUf | 4314 | usAfsaUfgU | 103 | Hs/Mm |
| | cAfuCfGfAf | | fcUfuGfucg | | |
| | cAfaGfaCfa | | AfuGfaCfuU | | |
| | UfuAfL96 | | fuscsa | | |
| AD-62970 | CfsasGfgGf | 4315 | usUfsgAfaC | 104 | Hs/Mm |
| | gGfaGfAfAf | | faCfcUfuuc | | |
| | aGfgUfgUfu | | UfcCfcCfcU | | |
| | CfaAfL96 | | fgsgsa | | |
| AD-62935 | CfsasUfuGf | 4316 | asAfsgGfaU | 105 | Hs/Mm |
| | gUfgAfGfGf | | fuUfuUfccu | | |
| | aAfaAfaUfc | | CfaCfcAfaU | | |
| | CfuUfL96 | | fgsusc | | |
| AD-62941 | AfscsAfuUf | 4317 | asGfsgAfuU | 106 | Hs/Mm |
| | gGfuGfAfGf | | fuUfuCfcuc | | |
| | gAfaAfaAfu | | AfcCfaAfuG | | |
| | CfcUfL96 | | fuscsu | | |
| AD-62946 | AfsgsGfgGf | 4318 | usUfsuGfaA | 107 | Hs/Mm |
| | gAfgAfAfAf | | fcAfcCfuuu | | |
| | gGfuGfuUfc | | CfuCfcCfcC | | |
| | AfaAfL96 | | fusgsg | | |
| AD-62951 | AfsusGfgUf | 37 | asAfsaAfuC | 108 | Hs |
| | gGfuAfAfUf | | faCfaAfauu | | |
| | uUfgUfgAfu | | AfcCfaCfcA | | |
| | UfuUfL96 | | fuscsc | | |
| AD-62956 | GfsasCfuUf | 38 | usAfsuAfuU | 109 | Hs |
| | gCfaUfCfCf | | fuCfcAfgga | | |
| | uGfgAfaAfu | | UfgCfaAfgU | | |
| | AfuAfL96 | | fcscsa | | |
| AD-62961 | GfsgsAfaGf | 39 | asAfsgAfcU | 110 | Hs |
| | gGfaAfGfGf | | fuCfuAfccu | | |
| | uAfgAfaGfu | | UfcCfcUfuC | | |
| | CfuUfL96 | | fcsasc | | |
| AD-62966 | UfsgsUfcUf | 40 | asGfsgAfaA | ill | Hs |
| | uCfuGfUfUf | | fuCfuAfaac | | |
| | uAfgAfuUfu | | AfgAfaGfaC | | |
| | CfcUfL96 | | fasgsg | | |
| AD-62971 | CfsusUfuGf | 41 | asGfsaUfcU | 112 | Hs |
| | gCfuGfUfUf | | fuGfgAfaac | | |
| | uCfcAfaGfa | | AfgCfcAfaA | | |
| | UfcUfL96 | | fgsgsa | | |
| AD-62936 | AfsasUfgUf | 42 | asUfsgAfcG | 113 | Hs |
| | gUfuUfGfGf | | fuUfgCfcca | | |
| | gCfaAfcGfu | | AfaCfaCfaU | | |
| | CfaUfL96 | | fususu | | |
| AD-62942 | UfsgsUfgAf | 43 | usAfsaGfgG | 114 | Hs |
| | cUfgUfGfGf | | fgUfgUfcca | | |
| | aCfaCfcCfc | | CfaGfuCfaC | | |
| | UfuAfL96 | | fasasa | | |
| AD-62947 | GfsasUfgGf | 44 | asAfsuAfgU | 115 | Hs |
| | gGfuGfCfCf | | faGfcUfggc | | |
| | aGfcUfaCfu | | AfcCfcCfaU | | |
| | AfuUfL96 | | fcscsa | | |
| AD-62952 | GfsasAfaAf | 45 | asCfsgUfuG | 116 | Hs |
| | uGfuGfUfUf | | fcCfcAfaac | | |
| | uGfgGfcAfa | | AfcAfuUfuU | | |
| | CfgUfL96 | | fcsasa | | |
| AD-62957 | GfsgsCfuGf | 46 | usGfsuCfaG | 117 | Hs |
| | uUfuCfCfAf | | faUfcUfugg | | |
| | aGfaUfcUfg | | AfaAfcAfgC | | |
| | AfcAfL96 | | fcsasa | | |
| AD-62962 | UfscsCfaAf | 47 | asGfsgGfgU | 118 | Hs |
| | cAfaAfAfUf | | fgGfcUfauu | | |
| | aGfcCfaCfc | | UfuGfuUfgG | | |
| | CfcUfL96 | | fasasa | | |
| AD-62967 | GfsusCfuUf | 48 | asAfsgGfaA | 119 | Hs |
| | cUfgUfUfUf | | faUfcUfaaa | | |
| | aGfaUfuUfc | | CfaGfaAfgA | | |
| | CfuUfL96 | | fcsasg | | |
| AD-62972 | UfsgsGfaAf | 49 | asGfsaCfuU | 120 | Hs |
| | gGfgAfAfGf | | fcUfaCfcuu | | |
| | gUfaGfaAfg | | CfcCfuUfcC | | |
| | UfcUfL96 | | fascsa | | |
| AD-62937 | UfscsCfuUf | 50 | asUfscUfuG | 121 | Hs |
| | uGfgCfUfGf | | fgAfaAfcag | | |
| | uUfuCfcAfa | | CfcAfaAfgG | | |
| | GfaUfL96 | | fasusu | | |
| AD-62943 | CfsasUfcUf | 51 | usAfsuCfaU | 122 | Hs |
| | cUfcAfGfCf | | fcCfcAfgcu | | |
| | uGfgGfaUfg | | GfaGfaGfaU | | |
| | AfuAfL96 | | fgsgsg | | |
| AD-62948 | GfsgsGfgUf | 52 | asUfscAfaU | 123 | Hs |
| | gCfcAfGfCf | | faGfuAfgcu | | |
| | uAfcUfaUfu | | GfgCfaCfcC | | |
| | GfaUfL96 | | fcsasu | | |
| AD-62953 | AfsusGfuGf | 53 | usAfsuGfaC | 124 | Hs |
| | uUfuGfGfGf | | fgUfuGfccc | | |
| | cAfaCfgUfc | | AfaAfcAfcA | | |
| | AfuAfL96 | | fususu | | |
| AD-62958 | CfsusGfuUf | 54 | usUfscUfuA | 125 | Hs |
| | uAfgAfUfUf | | faGfgAfaau | | |
| | uCfcUfuAfa | | CfuAfaAfcA | | |
| | GfaAfL96 | | fgsasa | | |
| AD-62963 | AfsgsAfaAf | 55 | usAfsuGfcA | 126 | Hs |
| | gAfaAfUfGf | | faGfuCfcau | | |
| | gAfcUfuGfc | | UfuCfuUfuC | | |
| | AfuAfL96 | | fusasg | | |
| AD-62968 | GfscsAfuCf | 56 | usUfsuAfaU | 127 | Hs |
| | cUfgGfAfAf | | faUfaUfuuc | | |
| | aUfaUfaUfu | | CfaGfgAfuG | | |
| | AfaAfL96 | | fcsasa | | |
| AD-62973 | CfscsUfgUf | 57 | usAfsgUfuC | 128 | Hs |
| | cAfgAfCfCf | | fcCfaUfggu | | |
| | aUfgGfgAfa | | CfuGfaCfaG | | |
| | CfuAfL96 | | fgscsu | | |
| AD-62938 | AfsasAfcAf | 58 | usAfsuCfcC | 129 | Hs |
| | uGfgUfGfUf | | faUfcCfaca | | |
| | gGfaUfgGfg | | CfcAfuGfuU | | |
| | AfuAfL96 | | fusasa | | |
| AD-62974 | CfsusCfaGf | 59 | usUfscAfaA | 130 | Hs |
| | gAfuGfAfAf | | faUfuUfuuc | | |
| | aAfaUfuUfu | | AfuCfcUfgA | | |
| | GfaAfL96 | | fgsusu | | |
| AD-62978 | CfsasGfcAf | 60 | usUfsuGfuC | 131 | Hs |
| | uGfuAfUfUf | | faAfgUfaau | | |
| | aCfuUfgAfc | | AfcAfuGfcU | | |
| | AfaAfL96 | | fgsasa | | |
| AD-62982 | UfsasUfgAf | 61 | usGfsaUfuU | 132 | Hs |
| | aCfaAfCfAf | | faGfcAfugu | | |
| | uGfcUfaAfa | | UfgUfuCfaU | | |
| | UfcAfL96 | | fasasu | | |
| AD-62986 | AfsusAfuAf | 62 | usCfscUfaA | 133 | Hs |
| | uCfcAfAfAf | | faAfcAfuuu | | |
| | uGfuUfuUfa | | GfgAfuAfuA | | |
| | GfgAfL96 | | fususc | | |
| AD-62990 | CfscsAfgAf | 63 | usUfsgGfaU | 134 | Hs |
| | uGfgAfAfGf | | faCfaGfcuu | | |
| | cUfgUfaUfc | | CfcAfuCfuG | | |
| | CfaAfL96 | | fgsasa | | |
| AD-62994 | GfsasCfuUf | 64 | usAfsuAfuU | 135 | Hs |
| | uCfaUfCfCf | | fuCfcAfgga | | |
| | uGfgAfaAfu | | UfgAfaAfgU | | |
| | AfuAfL96 | | fcscsa | | |
| AD-62998 | CfscsCfcGf | 65 | asUfsuGfaU | 136 | Hs |
| | gCfuAfAfUf | | faCfaAfauu | | |
| | uUfgUfaUfc | | AfgCfcGfgG | | |
| | AfaUfL96 | | fgsgsa | | |
| AD-63002 | UfsusAfaAf | 66 | usCfscCfaU | 137 | Hs |
| | cAfuGfGfCf | | fuCfaAfgcc | | |
| | uUfgAfaUfg | | AfuGfuUfuA | | |
| | GfgAfL96 | | fascsa | | |
| AD-62975 | AfsasUfgUf | 67 | asUfsgAfcG | 138 | Mm |
| | gUfuUfAfGf | | fuUfgUfcua | | |
| | aCfaAfcGfu | | AfaCfaCfaU | | |
| | CfaUfL96 | | fususu | | |
| AD-62979 | AfscsUfaAf | 68 | asAfscCfgG | 139 | Mm |
| | aGfgAfAfGf | | faAfuUfcuu | | |
| | aAfuUfcCfg | | CfcUfuUfaG | | |
| | GfuUfL96 | | fusasu | | |
| AD-62983 | UfsasUfaUf | 69 | asUfscCfuA | 140 | Mm |
| | cCfaAfAfUf | | faAfaCfauu | | |
| | gUfuUfuAfg | | UfgGfaUfaU | | |
| | GfaUfL96 | | fasusu | | |
| AD-62987 | GfsusGfcGf | 70 | asAfscAfuC | 141 | Mm |
| | gAfaAfGfGf | | faGfuGfccu | | |
| | cAfcUfgAfu | | UfuCfcGfcA | | |
| | GfuUfL96 | | fcsasc | | |
| AD-62991 | UfsasAfaAf | 71 | asAfsuUfuA | 142 | Mm |
| | cAfgUfGfGf | | faGfaAfcca | | |
| | uUfcUfuAfa | | CfuGfuUfuU | | |
| | AfuUfL96 | | fasasa | | |
| AD-62995 | AfsusGfaAf | 72 | asCfsuGfgU | 143 | Mm |
| | aAfaUfUfUf | | fuUfcAfaaa | | |
| | uGfaAfaCfc | | UfuUfuUfcA | | |
| | AfgUfL96 | | fuscsc | | |
| AD-62999 | AfsasCfaAf | 73 | asAfsaAfgG | 144 | Mm |
| | aAfuAfGfCf | | fgAfuUfgcu | | |
| | aAfuCfcCfu | | AfuUfuUfgU | | |
| | UfuUfL96 | | fusgsg | | |
| AD-63003 | CfsusGfaAf | 74 | asAfsgUfcG | 145 | Mm |
| | aCfaGfAfUf | | faCfaGfauc | | |
| | cUfgUfcGfa | | UfgUfuUfcA | | |
| | CfuUfL96 | | fgscsa | | |
| AD-62976 | UfsusGfuUf | 75 | usCfsaAfaA | 146 | Mm |
| | gCfaAfAfGf | | fuGfcCfcuu | | |
| | gGfcAfuUfu | | UfgCfaAfcA | | |
| | UfgAfL96 | | fasusu | | |
| AD-62980 | CfsusCfaUf | 76 | usAfscAfgG | 147 | Mm |
| | uGfuUfUfAf | | fuUfaAfuaa | | |
| | uUfaAfcCfu | | AfcAfaUfgA | | |
| | GfuAfL96 | | fgsasu | | |
| AD-62984 | CfsasAfcAf | 77 | asAfsaGfgG | 148 | Mm |
| | aAfaUfAfGf | | faUfuGfcua | | |
| | cAfaUfcCfc | | UfuUfuGfuU | | |
| | UfuUfL96 | | fgsgsa | | |
| AD-62992 | CfsasUfuGf | 78 | asAfsuAfcA | 149 | Mm |
| | uUfuAfUfUf | | fgGfuUfaau | | |
| | aAfcCfuGfu | | AfaAfcAfaU | | |
| | AfuUfL96 | | fgsasg | | |
| AD-62996 | UfsasUfcAf | 79 | usUfsgAfuA | 150 | Mm |
| | gCfuGfGfGf | | fuCfuUfccc | | |
| | aAfgAfuAfu | | AfgCfuGfaU | | |
| | CfaAfL96 | | fasgsa | | |
| AD-63000 | UfsgsUfcCf | 80 | usUfscUfaA | 151 | Mm |
| | uAfgGfAfAf | | faAfgGfuuc | | |
| | cCfuUfuUfa | | CfuAfgGfaC | | |
| | GfaAfL96 | | fascsc | | |
| AD-63004 | UfscsCfaAf | 81 | asGfsgGfaU | 152 | Mm |
| | cAfaAfAfUf | | fuGfcUfauu | | |
| | aGfcAfaUfc | | UfuGfuUfgG | | |
| | CfcUfL96 | | fasasa | | |
| AD-62977 | GfsgsUfgUf | 82 | asUfscAfgU | 153 | Mm |
| | gCfgGfAfAf | | fgCfcUfuuc | | |
| | aGfgCfaCfu | | CfgCfaCfaC | | |
| | GfaUfL96 | | fcscsc | | |
| AD-62981 | UfsusGfaAf | 83 | asUfsgAfuA | 154 | Mm |
| | aCfcAfGfUf | | faAfgUfacu | | |
| | aCfuUfuAfu | | GfgUfuUfcA | | |
| | CfaUfL96 | | fasasa | | |
| AD-62985 | UfsasCfuUf | 84 | usAfsuAfuA | 155 | Mm |
| | cCfaAfAfGf | | fuAfgAfcuu | | |
| | uCfuAfuAfu | | UfgGfaAfgU | | |
| | AfuAfL96 | | fascsu | | |
| AD-62989 | UfscsCfuAf | 85 | asUfsuUfcU | 156 | Mm |
| | gGfaAfCfCf | | faAfaAfggu | | |
| | uUfuUfaGfa | | UfcCfuAfgG | | |
| | AfaUfL96 | | fascsa | | |
| AD-62993 | CfsusCfcUf | 86 | usUfscCfaA | 157 | Mm |
| | gAfgGfAfAf | | faAfuUfuuc | | |
| | aAfuUfuUfg | | CfuCfaGfgA | | |
| | GfaAfL96 | | fgsasa | | |
| AD-62997 | GfscsUfcCf | 87 | asUfsuUfcA | 158 | Mm |
| | gGfaAfUfGf | | fgCfaAfcau | | |
| | uUfgCfuGfa | | UfcCfgGfaG | | |
| | AfaUfL96 | | fcsasu | | |
| AD-63001 | GfsusGfuUf | 88 | usAfsuUfgG | 159 | Mm |
| | uGfuGfGfGf | | fuCfuCfccc | | |
| | gAfgAfcCfa | | AfcAfaAfcA | | |
| | AfuAfL96 | | fcsasg | | |

TABLE 5
Additional Modified Human/Mouse/Cyno/Rat, Human/Mouse/Rat, Human/Mouse/Cyno, Mouse, Mouse/Rat, and
Human/Cyno Cross-Reactive HAO1 iRNA Sequences

| | | SEQ | | SEQ | |
|---|---|---|---|---|---|
| Duplex | | ID | | ID | |
| Name | Sense Strand Sequence 5′ to 3′ | NO: | Antisense Strand Sequence 5′ to 3′ | NO: | Species |
| AD-62933.2 | GfsasAfuGfuGfaAfAfGfuCfaUfcGfaCfaAfL96 | 4140 | usUfsgUfcGfaUfgAfcuuUfcAfcAfuUfcsusg | 89 | Hs/Mm |
| AD-62939.2 | UfsusUfuCfaAfuGfGfGfuGfuCfcUfaGfgAfL96 | 4141 | usCfscUfaGfgAfcAfcccAfuUfgAfaAfasgsu | 90 | Hs/Mm |
| AD-62944.2 | GfsasAfaGfuCfaUfCfGfaCfaAfgAfcAfuUfL96 | 4142 | asAfsuGfuCfuUfgUfcgaUfgAfcUfuUfcsasc | 91 | Hs/Mm |
| AD-62949.2 | UfscsAfuCfgAfcAfAfGfaCfaUfuGfgUfgAfL96 | 4143 | usCfsaCfcAfaUfgUfcuuGfuCfgAfuGfascsu | 92 | Hs/Mm |
| AD-62954.2 | UfsusUfcAfaUfgGfGfUfgUfcCfuAfgGfaAfL96 | 4144 | usUfscCfuAfgGfaCfaccCfaUfuGfaAfasasg | 93 | Hs/Mm |
| AD-62959.2 | AfsasUfgGfgUfgUfCfCfuAfgGfaAfcCfuUfL96 | 4145 | asAfsgGfuUfcCfuAfggaCfaCfcCfaUfusgsa | 94 | Hs/Mm |
| AD-62964.2 | GfsasCfaGfuGfcAfCfAfaUfaUfuUfuCfcAfL96 | 4146 | usGfsgAfaAfaUfaUfuguGfcAfcUfgUfcsasg | 95 | Hs/Mm |
| AD-62969.2 | AfscsUfuUfuCfaAfUfGfgGfuGfuCfcUfaAfL96 | 4147 | usUfsaGfgAfcAfcCfcauUfgAfaAfaGfuscsa | 96 | Hs/Mm |
| AD-62934.2 | AfsasGfuCfaUfcGfAfCfaAfgAfcAfuUfgAfL96 | 4148 | usCfsaAfuGfuCfuUfgucGfaUfgAfcUfususc | 97 | Hs/Mm |
| AD-62940.2 | AfsusCfgAfcAfaGfAfCfaUfuGfgUfgAfgAfL96 | 4149 | usCfsuCfaCfcAfaUfgucUfuGfuCfgAfusgsa | 98 | Hs/Mm |
| AD-62945.2 | GfsgsGfaGfaAfaGfGfUfgUfuCfaAfgAfuAfL96 | 4150 | usAfsuCfuUfgAfaCfaccUfuUfcUfcCfcscsc | 99 | Hs/Mm |
| AD-62950.2 | CfsusUfuUfcAfaUfGfGfgUfgUfcCfuAfgAfL96 | 4311 | usCfsuAfgGfaCfaCfccaUfuGfaAfaAfgsusc | 100 | Hs/Mm |
| AD-62955.2 | UfscsAfaUfgGfgUfGfUfcCfuAfgGfaAfcAfL96 | 4312 | usGfsuUfcCfuAfgGfacaCfcCfaUfuGfasasa | 101 | Hs/Mm |
| AD-62960.2 | UfsusGfaCfuUfuUfCfAfaUfgGfgUfgUfcAfL96 | 4313 | usGfsaCfaCfcCfaUfugaAfaAfgUfcAfasasa | 102 | Hs/Mm |
| AD-62965.2 | AfsasAfgUfcAfuCfGfAfcAfaGfaCfaUfuAfL96 | 4314 | usAfsaUfgUfcUfuGfucgAfuGfaCfuUfuscsa | 103 | Hs/Mm |
| AD-62970.2 | CfsasGfgGfgGfaGfAfAfaGfgUfgUfuCfaAfL96 | 4315 | usUfsgAfaCfaCfcUfuucUfcCfcCfcUfgsgsa | 104 | Hs/Mm |
| AD-62935.2 | CfsasUfuGfgUfgAfGfGfaAfaAfaUfcCfuUfL96 | 4316 | asAfsgGfaUfuUfuUfccuCfaCfcAfaUfgsusc | 105 | Hs/Mm |
| AD-62941.2 | AfscsAfuUfgGfuGfAfGfgAfaAfaAfuCfcUfL96 | 4317 | asGfsgAfuUfuUfuCfcucAfcCfaAfuGfuscsu | 106 | Hs/Mm |
| AD-62946.2 | AfsgsGfgGfgAfgAfAfAfgGfuGfuUfcAfaAfL96 | 4318 | usUfsuGfaAfcAfcCfuuuCfuCfcCfcCfusgsg | 107 | Hs/Mm |
| AD-62951.2 | AfsusGfgUfgGfuAfAfUfuUfgUfgAfuUfuUfL96 | 37 | asAfsaAfuCfaCfaAfauuAfcCfaCfcAfuscsc | 108 | Hs |
| AD-62956.2 | GfsasCfuUfgCfaUfCfCfuGfgAfaAfuAfuAfL96 | 38 | usAfsuAfuUfuCfcAfggaUfgCfaAfgUfcscsa | 109 | Hs |
| AD-62961.2 | GfsgsAfaGfgGfaAfGfGfuAfgAfaGfuCfuUfL96 | 39 | asAfsgAfcUfuCfuAfccuUfcCfcUfuCfcsasc | 110 | Hs |
| AD-62966.2 | UfsgsUfcUfuCfuGfUfUfuAfgAfuUfuCfcUfL96 | 40 | asGfsgAfaAfuCfuAfaacAfgAfaGfaCfasgsg | 111 | Hs |
| AD-62971.2 | CfsusUfuGfgCfuGfUfUfuCfcAfaGfaUfcUfL96 | 41 | asGfsaUfcUfuGfgAfaacAfgCfcAfaAfgsgsa | 112 | Hs |
| AD-62936.2 | AfsasUfgUfgUfuUfGfGfgCfaAfcGfuCfaUfL96 | 42 | asUfsgAfcGfuUfgCfccaAfaCfaCfaUfususu | 113 | Hs |
| AD-62942.2 | UfsgsUfgAfcUfgUfGfGfaCfaCfcCfcUfuAfL96 | 43 | usAfsaGfgGfgUfgUfccaCfaGfuCfaCfasasa | 114 | Hs |
| AD-62947.2 | GfsasUfgGfgGfuGfCfCfaGfcUfaCfuAfuUfL96 | 44 | asAfsuAfgUfaGfcUfggcAfcCfcCfaUfcscsa | 115 | Hs |
| AD-62952.2 | GfsasAfaAfuGfuGfUfUfuGfgGfcAfaCfgUfL96 | 45 | asCfsgUfuGfcCfcAfaacAfcAfuUfuUfcsasa | 116 | Hs |
| AD-62957.2 | GfsgsCfuGfuUfuCfCfAfaGfaUfcUfgAfcAfL96 | 46 | usGfsuCfaGfaUfcUfuggAfaAfcAfgCfcsasa | 117 | Hs |
| AD-62962.2 | UfscsCfaAfcAfaAfAfUfaGfcCfaCfcCfcUfL96 | 47 | asGfsgGfgUfgGfcUfauuUfuGfuUfgGfasasa | 118 | Hs |
| AD-62967.2 | GfsusCfuUfcUfgUfUfUfaGfaUfuUfcCfuUfL96 | 48 | asAfsgGfaAfaUfcUfaaaCfaGfaAfgAfcsasg | 119 | Hs |
| AD-62972.2 | UfsgsGfaAfgGfgAfAfGfgUfaGfaAfgUfcUfL96 | 49 | asGfsaCfuUfcUfaCfcuuCfcCfuUfcCfascsa | 120 | Hs |
| AD-62937.2 | UfscsCfuUfuGfgCfUfGfuUfuCfcAfaGfaUfL96 | 50 | asUfscUfuGfgAfaAfcagCfcAfaAfgGfasusu | 121 | Hs |
| AD-62943.2 | CfsasUfcUfcUfcAfGfCfuGfgGfaUfgAfuAfL96 | 51 | usAfsuCfaUfcCfcAfgcuGfaGfaGfaUfgsgsg | 122 | Hs |
| AD-62948.2 | GfsgsGfgUfgCfcAfGfCfuAfcUfaUfuGfaUfL96 | 52 | asUfscAfaUfaGfuAfgcuGfgCfaCfcCfcsasu | 123 | Hs |
| AD-62953.2 | AfsusGfuGfuUfuGfGfGfcAfaCfgUfcAfuAfL96 | 53 | usAfsuGfaCfgUfuGfcccAfaAfcAfcAfususu | 124 | Hs |
| AD-62958.2 | CfsusGfuUfuAfgAfUfUfuCfcUfuAfaGfaAfL96 | 54 | usUfscUfuAfaGfgAfaauCfuAfaAfcAfgsasa | 125 | Hs |
| AD-62963.2 | AfsgsAfaAfgAfaAfUfGfgAfcUfuGfcAfuAfL96 | 55 | usAfsuGfcAfaGfuCfcauUfuCfuUfuCfusasg | 126 | Hs |
| AD-62968.2 | GfscsAfuCfcUfgGfAfAfaUfaUfaUfuAfaAfL96 | 56 | usUfsuAfaUfaUfaUfuucCfaGfgAfuGfcsasa | 127 | Hs |
| AD-62973.2 | CfscsUfgUfcAfgAfCfCfaUfgGfgAfaCfuAfL96 | 57 | usAfsgUfuCfcCfaUfgguCfuGfaCfaGfgscsu | 128 | Hs |
| AD-62938.2 | AfsasAfcAfuGfgUfGfUfgGfaUfgGfgAfuAfL96 | 58 | usAfsuCfcCfaUfcCfacaCfcAfuGfuUfusasa | 129 | Hs |
| AD-62974.2 | CfsusCfaGfgAfuGfAfAfaAfaUfuUfuGfaAfL96 | 59 | usUfscAfaAfaUfuUfuucAfuCfcUfgAfgsusu | 130 | Hs |
| AD-62978.2 | CfsasGfcAfuGfuAfUfUfaCfuUfgAfcAfaAfL96 | 60 | usUfsuGfuCfaAfgUfaauAfcAfuGfcUfgsasa | 131 | Hs |
| AD-62982.2 | UfsasUfgAfaCfaAfCfAfuGfcUfaAfaUfcAfL96 | 61 | usGfsaUfuUfaGfcAfuguUfgUfuCfaUfasasu | 132 | Hs |
| AD-62986.2 | AfsusAfuAfuCfcAfAfAfuGfuUfuUfaGfgAfL96 | 62 | usCfscUfaAfaAfcAfuuuGfgAfuAfuAfususc | 133 | Hs |
| AD-62990.2 | CfscsAfgAfuGfgAfAfGfcUfgUfaUfcCfaAfL96 | 63 | usUfsgGfaUfaCfaGfcuuCfcAfuCfuGfgsasa | 134 | Hs |
| AD-62994.2 | GfsasCfuUfuCfaUfCfCfuGfgAfaAfuAfuAfL96 | 64 | usAfsuAfuUfuCfcAfggaUfgAfaAfgUfcscsa | 135 | Hs |
| AD-62998.2 | CfscsCfcGfgCfuAfAfUfuUfgUfaUfcAfaUfL96 | 65 | asUfsuGfaUfaCfaAfauuAfgCfcGfgGfgsgsa | 136 | Hs |
| AD-63002.2 | UfsusAfaAfcAfuGfGfCfuUfgAfaUfgGfgAfL96 | 66 | usCfscCfaUfuCfaAfgccAfuGfuUfuAfascsa | 137 | Hs |
| AD-62975.2 | AfsasUfgUfgUfuUfAfGfaCfaAfcGfuCfaUfL96 | 67 | asUfsgAfcGfuUfgUfcuaAfaCfaCfaUfususu | 138 | Mm |
| AD-62979.2 | AfscsUfaAfaGfgAfAfGfaAfuUfcCfgGfuUfL96 | 68 | asAfscCfgGfaAfuUfcuuCfcUfuUfaGfusasu | 139 | Mm |
| AD-62983.2 | UfsasUfaUfcCfaAfAfUfgUfuUfuAfgGfaUfL96 | 69 | asUfscCfuAfaAfaCfauuUfgGfaUfaUfasusu | 140 | Mm |
| AD-62987.2 | GfsusGfcGfgAfaAfGfGfcAfcUfgAfuGfuUfL96 | 70 | asAfscAfuCfaGfuGfccuUfuCfcGfcAfcsasc | 141 | Mm |
| AD-62991.2 | UfsasAfaAfcAfgUfGfGfuUfcUfuAfaAfuUfL96 | 71 | asAfsuUfuAfaGfaAfccaCfuGfuUfuUfasasa | 142 | Mm |
| AD-62995.2 | AfsusGfaAfaAfaUfUfUfuGfaAfaCfcAfgUfL96 | 72 | asCfsuGfgUfuUfcAfaaaUfuUfuUfcAfuscsc | 143 | Mm |
| AD-62999.2 | AfsasCfaAfaAfuAfGfCfaAfuCfcCfuUfuUfL96 | 73 | asAfsaAfgGfgAfuUfgcuAfuUfuUfgUfusgsg | 144 | Mm |
| AD-63003.2 | CfsusGfaAfaCfaGfAfUfcUfgUfcGfaCfuUfL96 | 74 | asAfsgUfcGfaCfaGfaucUfgUfuUfcAfgscsa | 145 | Mm |
| AD-62976.2 | UfsusGfuUfgCfaAfAfGfgGfcAfuUfuUfgAfL96 | 75 | usCfsaAfaAfuGfcCfcuuUfgCfaAfcAfasusu | 146 | Mm |
| AD-62980.2 | CfsusCfaUfuGfuUfUfAfuUfaAfcCfuGfuAfL96 | 76 | usAfscAfgGfuUfaAfuaaAfcAfaUfgAfgsasu | 147 | Mm |
| AD-62984.2 | CfsasAfcAfaAfaUfAfGfcAfaUfcCfcUfuUfL96 | 77 | asAfsaGfgGfaUfuGfcuaUfuUfuGfuUfgsgsa | 148 | Mm |
| AD-62992.2 | CfsasUfuGfuUfuAfUfUfaAfcCfuGfuAfuUfL96 | 78 | asAfsuAfcAfgGfuUfaauAfaAfcAfaUfgsasg | 149 | Mm |
| AD-62996.2 | UfsasUfcAfgCfuGfGfGfaAfgAfuAfuCfaAfL96 | 79 | usUfsgAfuAfuCfuUfcccAfgCfuGfaUfasgsa | 150 | Mm |
| AD-63000.2 | UfsgsUfcCfuAfgGfAfAfcCfuUfuUfaGfaAfL96 | 80 | usUfscUfaAfaAfgGfuucCfuAfgGfaCfascsc | 151 | Mm |
| AD-63004.2 | UfscsCfaAfcAfaAfAfUfaGfcAfaUfcCfcUfL96 | 81 | asGfsgGfaUfuGfcUfauuUfuGfuUfgGfasasa | 152 | Mm |
| AD-62977.2 | GfsgsUfgUfgCfgGfAfAfaGfgCfaCfuGfaUfL96 | 82 | asUfscAfgUfgCfcUfuucCfgCfaCfaCfcscsc | 153 | Mm |
| AD-62981.2 | UfsusGfaAfaCfcAfGfUfaCfuUfuAfuCfaUfL96 | 83 | asUfsgAfuAfaAfgUfacuGfgUfuUfcAfasasa | 154 | Mm |
| AD-62985.2 | UfsasCfuUfcCfaAfAfGfuCfuAfuAfuAfuAfL96 | 84 | usAfsuAfuAfuAfgAfcuuUfgGfaAfgUfascsu | 155 | Mm |
| AD-62989.2 | UfscsCfuAfgGfaAfCfCfuUfuUfaGfaAfaUfL96 | 85 | asUfsuUfcUfaAfaAfgguUfcCfuAfgGfascsa | 156 | Mm |
| AD-62993.2 | CfsusCfcUfgAfgGfAfAfaAfuUfuUfgGfaAfL96 | 86 | usUfscCfaAfaAfuUfuucCfuCfaGfgAfgsasa | 157 | Mm |
| AD-62997.2 | GfscsUfcCfgGfaAfUfGfuUfgCfuGfaAfaUfL96 | 87 | asUfsuUfcAfgCfaAfcauUfcCfgGfaGfcsasu | 158 | Mm |
| AD-63001.2 | GfsusGfuUfuGfuGfGfGfgAfgAfcCfaAfuAfL96 | 88 | usAfsuUfgGfuCfuCfcccAfcAfaAfcAfcsasg | 159 | Mm |
| AD-62933.1 | GfsasAfuGfuGfaAfAfGfuCfaUfcGfaCfaAfL96 | 160 | usUfsgUfcGfaUfgAfcuuUfcAfcAfuUfcsusg | 277 | |
| AD-65630.1 | Y44gsasAfuGfuGfaAfAfGfuCfaUfcGfaCfaAfL96 | 161 | PusUfsgUfcGfaUfgAfcuuUfcAfcAfuUfcsusg | 278 | |
| AD-65636.1 | gsasauguGfaAfAfGfucauCfgacaaL96 | 162 | usUfsgUfcGfaUfgAfcuuUfcAfcAfuUfcsusg | 279 | |
| AD-65642.1 | gsasauguGfaAfAfGfucaucgacaaL96 | 163 | usUfsgUfcGfaUfgAfcuuUfcAfcAfuUfcsusg | 280 | |
| AD-65647.1 | gsasauguGfaaAfGfucaucgacaaL96 | 164 | usUfsgUfcGfaUfgAfcuuUfcAfcAfuUfcsusg | 281 | |
| AD-65652.1 | gsasauguGfaaaGfucaucGfacaaL96 | 165 | usUfsgUfcGfaUfgAfcuuUfcAfcAfuUfcsusg | 282 | |
| AD-65657.1 | gsasaugugaaaGfucaucGfacaaL96 | 166 | usUfsgUfcGfaUfgAfcuuUfcAfcAfuUfcsusg | 283 | |
| AD-65662.1 | gsasauguGfaaaGfucaucgacaaL96 | 167 | usUfsgUfcGfaUfgAfcuuUfcAfcAfuUfcsusg | 284 | |
| AD-65625.1 | AfsusGfuGfaAfAfGfuCfaUfcGfaCfaAfL96 | 168 | usUfsgUfcGfaUfgAfcuuUfcAfcAfususc | 285 | |
| AD-65631.1 | asusguGfaAfAfGfucaucgacaaL96 | 169 | usUfsgucGfaugacuuUfcAfcaususc | 286 | |
| AD-65637.1 | GfsasAfuGfuGfaAfAfGfuCfaUfcGfaCfaAfL96 | 170 | usUfsgucGfaUfgAfcuuUfcAfcauucsusg | 287 | |
| AD-65643.1 | GfsasAfuGfuGfaAfAfGfuCfaUfcGfaCfaAfL96 | 171 | usUfsgucGfaUfGfacuuUfcAfcauucsusg | 288 | |
| AD-65648.1 | GfsasAfuGfuGfaAfAfGfuCfaUfcGfaCfaAfL96 | 172 | usUfsgucGfaugacuuUfcAfcauucsusg | 289 | |
| AD-65653.1 | GfsasAfuGfuGfaAfAfGfuCfaUfcGfaCfaAfL96 | 173 | usUfsgucGfaugacuuUfcacauucsusg | 290 | |
| AD-65658.1 | GfsasAfuGfuGfaAfAfGfuCfaUfcGfaCfaAfL96 | 174 | usUfsgucgaugacuuUfcacauucsusg | 291 | |
| AD-65663.1 | gsasauguGfaAfAfGfucaucgacaaL96 | 175 | usUfsgucGfaUfgAfcuuUfcAfcauucsusg | 292 | |
| AD-65626.1 | gsasauguGfaAfAfGfucaucgacaaL96 | 176 | usUfsgucGfaUfGfacuuUfcAfcauucsusg | 293 | |
| AD-65638.1 | gsasauguGfaaAfGfucaucgacaaL96 | 177 | usUfsgucGfaUfgAfcuuUfcAfcauucsusg | 294 | |
| AD-65644.1 | gsasauguGfaaAfGfucaucgacaaL96 | 178 | usUfsgucGfaUfGfacuuUfcAfcauucsusg | 295 | |
| AD-65649.1 | gsasauguGfaaAfGfucaucgacaaL96 | 179 | usUfsgucGfaugacuuUfcAfcauucsusg | 296 | |
| AD-65654.1 | gsasaugugaaagucau(Cgn)gacaaL96 | 180 | usUfsgUfcGfaUfgAfcuuUfcAfcAfuUfcsusg | 297 | |
| AD-65659.1 | gsasaugdTgaaagucau(Cgn)gacaaL96 | 181 | usUfsgUfcGfaUfgAfcuuUfcAfcAfuUfcsusg | 298 | |
| AD-65627.1 | gsasaudGugaaadGucau(Cgn)gacaaL96 | 182 | usUfsgUfcGfaUfgAfcuuUfcAfcAfuUfcsusg | 299 | |
| AD-65633.1 | gsasaugdTgaaadGucau(Cgn)gacaaL96 | 183 | usUfsgUfcGfaUfgAfcuuUfcAfcAfuUfcsusg | 300 | |
| AD-65639.1 | gsasaugudGaaadGucau(Cgn)gacaaL96 | 184 | usUfsgUfcGfaUfgAfcuuUfcAfcAfuUfcsusg | 301 | |
| AD-65645.1 | gsasaugugaaadGucaucdGacaaL96 | 185 | usUfsgUfcGfaUfgAfcuuUfcAfcAfuUfcsusg | 302 | |
| AD-65650.1 | gsasaugugaaadGucaucdTacaaL96 | 186 | usUfsgUfcGfaUfgAfcuuUfcAfcAfuUfcsusg | 303 | |
| AD-65655.1 | gsasaugugaaadGucaucY34acaaL96 | 187 | usUfsgUfcGfaUfgAfcuuUfcAfcAfuUfcsusg | 304 | |
| AD-65660.1 | gsasaugugaaadGucadTcdTacaaL96 | 188 | usUfsgUfcGfaUfgAfcuuUfcAfcAfuUfcsusg | 305 | |
| AD-65665.1 | gsasaugugaaadGucaucdGadCaaL96 | 189 | usUfsgUfcGfaUfgAfcuuUfcAfcAfuUfcsusg | 306 | |
| AD-65628.1 | gsasaugugaaadGucaucdTadCaaL96 | 190 | usUfsgUfcGfaUfgAfcuuUfcAfcAfuUfcsusg | 307 | |
| AD-65634.1 | gsasaugugaaadGucaucY34adCaaL96 | 191 | usUfsgUfcGfaUfgAfcuuUfcAfcAfuUfcsusg | 308 | |
| AD-65646.1 | GfsasAfuGfuGfaAfAfGfuCfaUfcGfaCfaAfL96 | 192 | usdTsgucgaugdAcuudTcacauucsusg | 309 | |
| AD-65656.1 | GfsasAfuGfuGfaAfAfGfuCfaUfcGfaCfaAfL96 | 193 | usUsgucgaugacuudTcacauucsusg | 310 | |
| AD-65661.1 | GfsasAfuGfuGfaAfAfGfuCfaUfcGfaCfaAfL96 | 194 | usdTsgucdGaugacuudTcacauucsusg | 311 | |
| AD-65666.1 | GfsasAfuGfuGfaAfAfGfuCfaUfcGfaCfaAfL96 | 195 | usUsgucdGaugacuudTcacauucsusg | 312 | |
| AD-65629.1 | GfsasAfuGfuGfaAfAfGfuCfaUfcGfaCfaAfL96 | 196 | usdTsgucgaugacuudTcdAcauucsusg | 313 | |
| AD-65635.1 | GfsasAfuGfuGfaAfAfGfuCfaUfcGfaCfaAfL96 | 197 | usdTsgucdGaugacuudTcdAcauucsusg | 314 | |
| AD-65641.1 | gsasaugugaaadGucau(Cgn)gacaaL96 | 198 | usdTsgucgaugdAcuudTcacauucsusg | 315 | |
| AD-62994.1 | GfsasCfuUfuCfaUfCfCfuGfgAfaAfuAfuAfL96 | 199 | usAfsuAfuUfuCfcAfggaUfgAfaAfgUfcscsa | 316 | |
| AD-65595.1 | gsascuuuCfaUfCfCfuggaAfauauaL96 | 200 | usAfsuAfuUfuCfcAfggaUfgAfaAfgUfcscsa | 317 | |
| AD-65600.1 | gsascuuuCfaUfCfCfuggaaauauaL96 | 201 | usAfsuAfuUfuCfcAfggaUfgAfaAfgUfcscsa | 318 | |
| AD-65610.1 | gsascuuuCfaucCfuggaaAfuauaL96 | 202 | usAfsuAfuUfuCfcAfggaUfgAfaAfgUfcscsa | 319 | |
| AD-65615.1 | gsascuuucaucCfuggaaAfuauaL96 | 203 | usAfsuAfuUfuCfcAfggaUfgAfaAfgUfcscsa | 320 | |
| AD-65620.1 | gsascuuuCfaucCfuggaaauauaL96 | 204 | usAfsuAfuUfuCfcAfggaUfgAfaAfgUfcscsa | 321 | |
| AD-65584.1 | CfsusUfuCfaUfCfCfuGfgAfaAfuAfuAfL96 | 205 | usAfsuAfuUfuCfcAfggaUfgAfaAfgsusc | 322 | |
| AD-65590.1 | csusuuCfaUfCfCfuggaaauauaL96 | 206 | usAfsuauUfuccaggaUfgAfaagsusc | 323 | |
| AD-65596.1 | GfsasCfuUfuCfaUfCfCfuGfgAfaAfuAfuAfL96 | 207 | usAfsuauUfuCfcAfggaUfgAfaagucscsa | 324 | |
| AD-65601.1 | GfsasCfuUfuCfaUfCfCfuGfgAfaAfuAfuAfL96 | 208 | usAfsuauUfuCfCfaggaUfgAfaagucscsa | 325 | |
| AD-65606.1 | GfsasCfuUfuCfaUfCfCfuGfgAfaAfuAfuAfL96 | 209 | usAfsuauUfuccaggaUfgAfaagucscsa | 326 | |
| AD-65611.1 | GfsasCfuUfuCfaUfCfCfuGfgAfaAfuAfuAfL96 | 210 | usAfsuauUfuccaggaUfgaaagucscsa | 327 | |
| AD-65616.1 | GfsasCfuUfuCfaUfCfCfuGfgAfaAfuAfuAfL96 | 211 | usAfsuauuuccaggaUfgaaagucscsa | 328 | |
| AD-65621.1 | gsascuuuCfaUfCfCfuggaaauauaL96 | 212 | usAfsuauUfuCfcAfggaUfgAfaagucscsa | 329 | |
| AD-65585.1 | gsascuuuCfaUfCfCfuggaaauauaL96 | 213 | usAfsuauUfuCfCfaggaUfgAfaagucscsa | 330 | |
| AD-65591.1 | gsascuuuCfaUfCfCfuggaaauauaL96 | 214 | usAfsuauUfuccaggaUfgAfaagucscsa | 331 | |
| AD-65597.1 | gsascuuuCfauCfCfuggaaauauaL96 | 215 | usAfsuauUfuCfcAfggaUfgAfaagucscsa | 332 | |
| AD-65602.1 | gsascuuuCfauCfCfuggaaauauaL96 | 216 | usAfsuauUfuCfCfaggaUfgAfaagucscsa | 333 | |
| AD-65607.1 | gsascuuuCfauCfCfuggaaauauaL96 | 217 | usAfsuauUfuccaggaUfgAfaagucscsa | 334 | |
| AD-65612.1 | gsascuuucauccuggaa(Agn)uauaL96 | 218 | usAfsuAfuUfuCfcAfggaUfgAfaAfgUfcscsa | 335 | |
| AD-65622.1 | gsascuuucaucdCuggaa(Agn)uauaL96 | 219 | usAfsuAfuUfuCfcAfggaUfgAfaAfgUfcscsa | 336 | |
| AD-65586.1 | gsascudTucaucdCuggaa(Agn)uauaL96 | 220 | usAfsuAfuUfuCfcAfggaUfgAfaAfgUfcscsa | 337 | |
| AD-65592.1 | gsascuudTcaucdCuggaa(Agn)uauaL96 | 221 | usAfsuAfuUfuCfcAfggaUfgAfaAfgUfcscsa | 338 | |
| AD-65598.1 | gsascuuudCaucdCuggaa(Agn)uauaL96 | 222 | usAfsuAfuUfuCfcAfggaUfgAfaAfgUfcscsa | 339 | |
| AD-65603.1 | gsascuuucaucdCuggaadAuauaL96 | 223 | usAfsuAfuUfuCfcAfggaUfgAfaAfgUfcscsa | 340 | |
| AD-65608.1 | gsascuuucaucdCuggaadTuauaL96 | 224 | usAfsuAfuUfuCfcAfggaUfgAfaAfgUfcscsa | 341 | |
| AD-65613.1 | gsascuuucaucdCuggaaY34uauaL96 | 225 | usAfsuAfuUfuCfcAfggaUfgAfaAfgUfcscsa | 342 | |
| AD-65618.1 | gsascuuucaucdCuggdAadTuauaL96 | 226 | usAfsuAfuUfuCfcAfggaUfgAfaAfgUfcscsa | 343 | |
| AD-65623.1 | gsascuuucaucdCuggaadTudAuaL96 | 227 | usAfsuAfuUfuCfcAfggaUfgAfaAfgUfcscsa | 344 | |
| AD-65587.1 | gsascuuucaucdCuggaa(Agn)udAuaL96 | 228 | usAfsuAfuUfuCfcAfggaUfgAfaAfgUfcscsa | 345 | |
| AD-65593.1 | gsascuudTcaucdCuggaadAudAuaL96 | 229 | usAfsuAfuUfuCfcAfggaUfgAfaAfgUfcscsa | 346 | |
| AD-65599.1 | GfsasCfuUfuCfaUfCfCfuGfgAfaAfuAfuAfL96 | 230 | usdAsuauuuccdAggadTgaaagucscsa | 347 | |
| AD-65604.1 | GfsasCfuUfuCfaUfCfCfuGfgAfaAfuAfuAfL96 | 231 | usdAsuauuuccaggadTgaaagucscsa | 348 | |
| AD-65609.1 | GfsasCfuUfuCfaUfCfCfuGfgAfaAfuAfuAfL96 | 232 | usAsuauuuccaggadTgaaagucscsa | 349 | |
| AD-65614.1 | GfsasCfuUfuCfaUfCfCfuGfgAfaAfuAfuAfL96 | 233 | usdAsuaudTuccaggadTgaaagucscsa | 350 | |
| AD-65619.1 | GfsasCfuUfuCfaUfCfCfuGfgAfaAfuAfuAfL96 | 234 | usAsuaudTuccaggadTgaaagucscsa | 351 | |
| AD-65624.1 | GfsasCfuUfuCfaUfCfCfuGfgAfaAfuAfuAfL96 | 235 | usdAsuauuuccaggadTgdAaagucscsa | 352 | |
| AD-65588.1 | GfsasCfuUfuCfaUfCfCfuGfgAfaAfuAfuAfL96 | 236 | usdAsuaudTuccaggadTgdAaagucscsa | 353 | |
| AD-65594.1 | gsascuuucaucdCuggaa(Agn)uauaL96 | 237 | usdAsuauuuccdAggadTgaaagucscsa | 354 | |
| AD-68309.1 | asgsaaagGfuGfUfUfcaagaugucaL96 | 238 | usGfsacaUfcUfUfgaacAfcCfuuucuscsc | 355 | |
| AD-68303.1 | csasuccuGfgAfAfAfuauauuaacuL96 | 239 | asGfsuuaAfuAfUfauuuCfcAfggaugsasa | 356 | |
| AD-65626.5 | gsasauguGfaAfAfGfucaucgacaaL96 | 240 | usUfsgucGfaUfGfacuuUfcAfcauucsusg | 357 | |
| AD-68295.1 | asgsugcaCfaAfUfAfuuuucccauaL96 | 241 | usAfsuggGfaAfAfauauUfgUfgcacusgsu | 358 | |
| AD-68273.1 | gsasaaguCfaUfCfGfacaagacauuL96 | 242 | asAfsuguCfuUfGfucgaUfgAfcuuucsasc | 359 | |
| AD-68297.1 | asasugugAfaAfGfUfcaucgacaaaL96 | 243 | usUfsuguCfgAfUfgacuUfuCfacauuscsu | 360 | |
| AD-68287.1 | csusggaaAfuAfUfAfuuaacuguuaL96 | 244 | usAfsacaGfuUfAfauauAfuUfuccagsgsa | 361 | |
| AD-68300.1 | asusuuucCfcAfUfCfuguauuauuuL96 | 245 | asAfsauaAfuAfCfagauGfgGfaaaausasu | 362 | |
| AD-68306.1 | usgsucguUfcUfUfUfuccaacaaaaL96 | 246 | usUfsuugUfuGfGfaaaaGfaAfcgacascsc | 363 | |
| AD-68292.1 | asusccugGfaAfAfUfauauuaacuaL96 | 247 | usAfsguuAfaUfAfuauuUfcCfaggausgsa | 364 | |
| AD-68298.1 | gscsauuuUfgAfGfAfggugaugauaL96 | 248 | usAfsucaUfcAfCfcucuCfaAfaaugcscsc | 365 | |
| AD-68277.1 | csasggggGfaGfAfAfagguguucaaL96 | 249 | usUfsgaaCfaCfCfuuucUfcCfcccugsgsa | 366 | |
| AD-68289.1 | gsgsaaauAfuAfUfUfaacuguuaaaL96 | 250 | usUfsuaaCfaGfUfuaauAfuAfuuuccsasg | 367 | |
| AD-68272.1 | csasuuggUfgAfGfGfaaaaauccuuL96 | 251 | asAfsggaUfuUfUfuccuCfaCfcaaugsusc | 368 | |
| AD-68282.1 | gsgsgagaAfaGfGfUfguucaagauaL96 | 252 | usAfsucuUfgAfAfcaccUfuUfcucccscsc | 369 | |
| AD-68285.1 | gsgscauuUfuGfAfGfaggugaugauL96 | 253 | asUfscauCfaCfCfucucAfaAfaugccscsu | 370 | |
| AD-68290.1 | usascaaaGfgGfUfGfucguucuuuuL96 | 254 | asAfsaagAfaCfGfacacCfcUfuuguasusu | 371 | |
| AD-68296.1 | usgsggauCfuUfGfGfugucgaaucaL96 | 255 | usGfsauuCfgAfCfaccaAfgAfucccasusu | 372 | |
| AD-68288.1 | csusgacaGfuGfCfAfcaauauuuuaL96 | 256 | usAfsaaaUfaUfUfgugcAfcUfgucagsasu | 373 | |
| AD-68299.1 | csasgugcAfcAfAfUfauuuucccauL96 | 257 | asUfsgggAfaAfAfuauuGfuGfcacugsusc | 374 | |
| AD-68275.1 | ascsuuuuCfaAfUfGfgguguccuaaL96 | 258 | usUfsaggAfcAfCfccauUfgAfaaaguscsa | 375 | |
| AD-68274.1 | ascsauugGfuGfAfGfgaaaaauccuL96 | 259 | asGfsgauUfuUfUfccucAfcCfaauguscsu | 376 | |
| AD-68294.1 | ususgcuuUfuGfAfCfuuuucaaugaL96 | 260 | usCfsauuGfaAfAfagucAfaAfagcaasusg | 377 | |
| AD-68302.1 | csasuuuuGfaGfAfGfgugaugaugaL96 | 261 | usCfsaucAfuCfAfccucUfcAfaaaugscsc | 378 | |
| AD-68279.1 | ususgacuUfuUfCfAfaugggugucaL96 | 262 | usGfsacaCfcCfAfuugaAfaAfgucaasasa | 379 | |
| AD-68304.1 | csgsacuuCfuGfUfUfuuaggacagaL96 | 263 | usCfsuguCfcUfAfaaacAfgAfagucgsasc | 380 | |
| AD-68286.1 | csuscugaGfuGfGfGfugccagaauaL96 | 264 | usAfsuucUfgGfCfacccAfcUfcagagscsc | 381 | |
| AD-68291.1 | gsgsgugcCfaGfAfAfugugaaaguaL96 | 265 | usAfscuuUfcAfCfauucUfgGfcacccsasc | 382 | |
| AD-68283.1 | uscsaaugGfgUfGfUfccuaggaacaL96 | 266 | usGfsuucCfuAfGfgacaCfcCfauugasasa | 383 | |
| AD-68280.1 | asasagucAfuCfGfAfcaagacauuaL96 | 267 | usAfsaugUfcUfUfgucgAfuGfacuuuscsa | 384 | |
| AD-68293.1 | asusuuugAfgAfGfGfugaugaugcaL96 | 268 | usGfscauCfaUfCfaccuCfuCfaaaausgsc | 385 | |
| AD-68276.1 | asuscgacAfaGfAfCfauuggugagaL96 | 269 | usCfsucaCfcAfAfugucUfuGfucgausgsa | 386 | |
| AD-68308.1 | gsgsugccAfgAfAfUfgugaaagucaL96 | 270 | usGfsacuUfuCfAfcauuCfuGfgcaccscsa | 387 | |
| AD-68278.1 | gsascaguGfcAfCfAfauauuuuccaL96 | 271 | usGfsgaaAfaUfAfuuguGfcAfcugucsasg | 388 | |
| AD-68307.1 | ascsaaagAfgAfCfAfcugugcagaaL96 | 272 | usUfscugCfaCfAfguguCfuCfuuuguscsa | 389 | |
| AD-68284.1 | ususuucaAfuGfGfGfuguccuaggaL96 | 273 | usCfscuaGfgAfCfacccAfuUfgaaaasgsu | 390 | |
| AD-68301.1 | cscsguuuCfcAfAfGfaucugacaguL96 | 274 | asCfsuguCfaGfAfucuuGfgAfaacggscsc | 391 | |
| AD-68281.1 | asgsggggAfgAfAfAfgguguucaaaL96 | 275 | usUfsugaAfcAfCfcuuuCfuCfccccusgsg | 392 | |
| AD-68305.1 | asgsucauCfgAfCfAfagacauugguL96 | 276 | asCfscaaUfgUfCfuuguCfgAfugacususu | 393 | |

TABLE 6
Unmodified Human/Mouse/Cyno/Rat, Human/Mouse/Cyno, andHuman/Cyno Cross-Reactive HAO1 iRNA Sequences

| | SEQ | | SEQ | | |
|---|---|---|---|---|---|
| Duplex | ID | | ID | | Position in |
| Name | NO: | Sense Strand Sequence 5′ to 3′ | NO: | Antisense Strand Sequence 5′ to 3′ | NM_017545.2 |
| AD-62933 | 394 | GAAUGUGAAAGUCAUCGACAA | 443 | UUGUCGAUGACUUUCACAUUCUG | 1072-1094 |
| AD-62939 | 395 | UUUUCAAUGGGUGUCCUAGGA | 444 | UCCUAGGACACCCAUUGAAAAGU | 1302-1324 |
| AD-62944 | 396 | GAAAGUCAUCGACAAGACAUU | 445 | AAUGUCUUGUCGAUGACUUUCAC | 1078-1100 |
| AD-62949 | 397 | UCAUCGACAAGACAUUGGUGA | 446 | UCACCAAUGUCUUGUCGAUGACU | 1083-1105 |
| AD-62954 | 398 | UUUCAAUGGGUGUCCUAGGAA | 447 | UUCCUAGGACACCCAUUGAAAAG | 1303-1325 |
| AD-62959 | 399 | AAUGGGUGUCCUAGGAACCUU | 448 | AAGGUUCCUAGGACACCCAUUGA | 1307-1329 |
| AD-62964 | 400 | GACAGUGCACAAUAUUUUCCA | 449 | UGGAAAAUAUUGUGCACUGUCAG | 1134-1156_C21A |
| AD-62969 | 401 | ACUUUUCAAUGGGUGUCCUAA | 450 | UUAGGACACCCAUUGAAAAGUCA | 1300-1322_G21A |
| AD-62934 | 402 | AAGUCAUCGACAAGACAUUGA | 451 | UCAAUGUCUUGUCGAUGACUUUC | 1080-1102_G21A |
| AD-62940 | 403 | AUCGACAAGACAUUGGUGAGA | 452 | UCUCACCAAUGUCUUGUCGAUGA | 1085-1107_G21A |
| AD-62945 | 404 | GGGAGAAAGGUGUUCAAGAUA | 453 | UAUCUUGAACACCUUUCUCCCCC | 996-1018_G21A |
| AD-62950 | 405 | CUUUUCAAUGGGUGUCCUAGA | 454 | UCUAGGACACCCAUUGAAAAGUC | 1301-1323_G21A |
| AD-62955 | 406 | UCAAUGGGUGUCCUAGGAACA | 455 | UGUUCCUAGGACACCCAUUGAAA | 1305-1327_C21A |
| AD-62960 | 407 | UUGACUUUUCAAUGGGUGUCA | 456 | UGACACCCAUUGAAAAGUCAAAA | 1297-1319_C21A |
| AD-62965 | 408 | AAAGUCAUCGACAAGACAUUA | 457 | UAAUGUCUUGUCGAUGACUUUCA | 1079-1101_G21A |
| AD-62970 | 409 | CAGGGGGAGAAAGGUGUUCAA | 458 | UUGAACACCUUUCUCCCCCUGGA | 992-1014 |
| AD-62935 | 410 | CAUUGGUGAGGAAAAAUCCUU | 459 | AAGGAUUUUUCCUCACCAAUGUC | 1095-1117 |
| AD-62941 | 411 | ACAUUGGUGAGGAAAAAUCCU | 460 | AGGAUUUUUCCUCACCAAUGUCU | 1094-1116 |
| AD-62946 | 412 | AGGGGGAGAAAGGUGUUCAAA | 461 | UUUGAACACCUUUCUCCCCCUGG | 993-1015_G21A |
| AD-62974 | 413 | CUCAGGAUGAAAAAUUUUGAA | 462 | UUCAAAAUUUUUCAUCCUGAGUU | 563-585 |
| AD-62978 | 414 | CAGCAUGUAUUACUUGACAAA | 463 | UUUGUCAAGUAAUACAUGCUGAA | 1173-1195 |
| AD-62982 | 415 | UAUGAACAACAUGCUAAAUCA | 464 | UGAUUUAGCAUGUUGUUCAUAAU | 53-75 |
| AD-62986 | 416 | AUAUAUCCAAAUGUUUUAGGA | 465 | UCCUAAAACAUUUGGAUAUAUUC | 1679-1701 |
| AD-62990 | 417 | CCAGAUGGAAGCUGUAUCCAA | 466 | UUGGAUACAGCUUCCAUCUGGAA | 156-178 |
| AD-62994 | 418 | GACUUUCAUCCUGGAAAUAUA | 467 | UAUAUUUCCAGGAUGAAAGUCCA | 1341-1363 |
| AD-62998 | 419 | CCCCGGCUAAUUUGUAUCAAU | 468 | AUUGAUACAAAUUAGCCGGGGGA | 29-51 |
| AD-63002 | 420 | UUAAACAUGGCUUGAAUGGGA | 469 | UCCCAUUCAAGCCAUGUUUAACA | 765-787 |
| AD-62975 | 421 | AAUGUGUUUAGACAACGUCAU | 470 | AUGACGUUGUCUAAACACAUUUU | 1388-1410 |
| AD-62979 | 422 | ACUAAAGGAAGAAUUCCGGUU | 471 | AACCGGAAUUCUUCCUUUAGUAU | 1027-1049 |
| AD-62983 | 423 | UAUAUCCAAAUGUUUUAGGAU | 472 | AUCCUAAAACAUUUGGAUAUAUU | 1680-1702 |
| AD-62987 | 424 | GUGCGGAAAGGCACUGAUGUU | 473 | AACAUCAGUGCCUUUCCGCACAC | 902-924 |
| AD-62991 | 425 | UAAAACAGUGGUUCUUAAAUU | 474 | AAUUUAAGAACCACUGUUUUAAA | 1521-1543 |
| AD-62995 | 426 | AUGAAAAAUUUUGAAACCAGU | 475 | ACUGGUUUCAAAAUUUUUCAUCC | 569-591 |
| AD-62999 | 427 | AACAAAAUAGCAAUCCCUUUU | 476 | AAAAGGGAUUGCUAUUUUGUUGG | 1264-1286 |
| AD-63003 | 428 | CUGAAACAGAUCUGUCGACUU | 477 | AAGUCGACAGAUCUGUUUCAGCA | 195-217 |
| AD-62976 | 429 | UUGUUGCAAAGGGCAUUUUGA | 478 | UCAAAAUGCCCUUUGCAACAAUU | 720-742 |
| AD-62980 | 430 | CUCAUUGUUUAUUAACCUGUA | 479 | UACAGGUUAAUAAACAAUGAGAU | 1483-1505 |
| AD-62984 | 431 | CAACAAAAUAGCAAUCCCUUU | 480 | AAAGGGAUUGCUAUUUUGUUGGA | 1263-1285 |
| AD-62992 | 432 | CAUUGUUUAUUAACCUGUAUU | 481 | AAUACAGGUUAAUAAACAAUGAG | 1485-1507 |
| AD-62996 | 433 | UAUCAGCUGGGAAGAUAUCAA | 482 | UUGAUAUCUUCCCAGCUGAUAGA | 670-692 |
| AD-63000 | 434 | UGUCCUAGGAACCUUUUAGAA | 483 | UUCUAAAAGGUUCCUAGGACACC | 1313-1335 |
| AD-63004 | 435 | UCCAACAAAAUAGCAAUCCCU | 484 | AGGGAUUGCUAUUUUGUUGGAAA | 1261-1283 |
| AD-62977 | 436 | GGUGUGCGGAAAGGCACUGAU | 485 | AUCAGUGCCUUUCCGCACACCCC | 899-921 |
| AD-62981 | 437 | UUGAAACCAGUACUUUAUCAU | 486 | AUGAUAAAGUACUGGUUUCAAAA | 579-601 |
| AD-62985 | 438 | UACUUCCAAAGUCUAUAUAUA | 487 | UAUAUAUAGACUUUGGAAGUACU | 75-97_G21A |
| AD-62989 | 439 | UCCUAGGAACCUUUUAGAAAU | 488 | AUUUCUAAAAGGUUCCUAGGACA | 1315-1337_G21U |
| AD-62993 | 440 | CUCCUGAGGAAAAUUUUGGAA | 489 | UUCCAAAAUUUUCCUCAGGAGAA | 603-625_G21A |
| AD-62997 | 441 | GCUCCGGAAUGUUGCUGAAAU | 490 | AUUUCAGCAACAUUCCGGAGCAU | 181-203_C21U |
| AD-63001 | 442 | GUGUUUGUGGGGAGACCAAUA | 491 | UAUUGGUCUCCCCACAAACACAG | 953-975_C21A |

TABLE 7
Additional Unmodified Human/Cyno/Mouse/Rat, Human/Mouse/Cyno, Human/Cyno, and Mouse/Rat HAO1 iRNA
Sequences

| | SEQ | | SEQ | | |
|---|---|---|---|---|---|
| | ID | | ID | | Position in |
| Duplex Name | NO: | Sense strand sequence 5′ to 3′ | NO: | Antisense strand sequence 5′ to 3′ | NM_017545.2 |
| AD-62933.2 | 394 | GAAUGUGAAAGUCAUCGACAA | 443 | UUGUCGAUGACUUUCACAUUCUG | 1072-1094 |
| AD-62939.2 | 395 | UUUUCAAUGGGUGUCCUAGGA | 444 | UCCUAGGACACCCAUUGAAAAGU | 1302-1324 |
| AD-62944.2 | 396 | GAAAGUCAUCGACAAGACAUU | 445 | AAUGUCUUGUCGAUGACUUUCAC | 1078-1100 |
| AD-62949.2 | 397 | UCAUCGACAAGACAUUGGUGA | 446 | UCACCAAUGUCUUGUCGAUGACU | 1083-1105 |
| AD-62954.2 | 398 | UUUCAAUGGGUGUCCUAGGAA | 447 | UUCCUAGGACACCCAUUGAAAAG | 1303-1325 |
| AD-62959.2 | 399 | AAUGGGUGUCCUAGGAACCUU | 448 | AAGGUUCCUAGGACACCCAUUGA | 1307-1329 |
| AD-62964.2 | 400 | GACAGUGCACAAUAUUUUCCA | 449 | UGGAAAAUAUUGUGCACUGUCAG | 1134-1156_C21A |
| AD-62969.2 | 401 | ACUUUUCAAUGGGUGUCCUAA | 450 | UUAGGACACCCAUUGAAAAGUCA | 1300-1322_G21A |
| AD-62934.2 | 402 | AAGUCAUCGACAAGACAUUGA | 451 | UCAAUGUCUUGUCGAUGACUUUC | 1080-1102_G21A |
| AD-62940.2 | 403 | AUCGACAAGACAUUGGUGAGA | 452 | UCUCACCAAUGUCUUGUCGAUGA | 1085-1107_G21A |
| AD-62945.2 | 404 | GGGAGAAAGGUGUUCAAGAUA | 453 | UAUCUUGAACACCUUUCUCCCCC | 996-1018_G21A |
| AD-62950.2 | 405 | CUUUUCAAUGGGUGUCCUAGA | 454 | UCUAGGACACCCAUUGAAAAGUC | 1301-1323_G21A |
| AD-62955.2 | 406 | UCAAUGGGUGUCCUAGGAACA | 455 | UGUUCCUAGGACACCCAUUGAAA | 1305-1327_C21A |
| AD-62960.2 | 407 | UUGACUUUUCAAUGGGUGUCA | 456 | UGACACCCAUUGAAAAGUCAAAA | 1297-1319_C21A |
| AD-62965.2 | 408 | AAAGUCAUCGACAAGACAUUA | 457 | UAAUGUCUUGUCGAUGACUUUCA | 1079-1101_G21A |
| AD-62970.2 | 409 | CAGGGGGAGAAAGGUGUUCAA | 458 | UUGAACACCUUUCUCCCCCUGGA | 992-1014 |
| AD-62935.2 | 410 | CAUUGGUGAGGAAAAAUCCUU | 459 | AAGGAUUUUUCCUCACCAAUGUC | 1095-1117 |
| AD-62941.2 | 411 | ACAUUGGUGAGGAAAAAUCCU | 460 | AGGAUUUUUCCUCACCAAUGUCU | 1094-1116 |
| AD-62946.2 | 412 | AGGGGGAGAAAGGUGUUCAAA | 461 | UUUGAACACCUUUCUCCCCCUGG | 993-1015_G21A |
| AD-62974.2 | 413 | CUCAGGAUGAAAAAUUUUGAA | 462 | UUCAAAAUUUUUCAUCCUGAGUU | 563-585 |
| AD-62978.2 | 414 | CAGCAUGUAUUACUUGACAAA | 463 | UUUGUCAAGUAAUACAUGCUGAA | 1173-1195 |
| AD-62982.2 | 415 | UAUGAACAACAUGCUAAAUCA | 464 | UGAUUUAGCAUGUUGUUCAUAAU | 53-75 |
| AD-62986.2 | 416 | AUAUAUCCAAAUGUUUUAGGA | 465 | UCCUAAAACAUUUGGAUAUAUUC | 1679-1701 |
| AD-62990.2 | 417 | CCAGAUGGAAGCUGUAUCCAA | 466 | UUGGAUACAGCUUCCAUCUGGAA | 156-178 |
| AD-62994.2 | 418 | GACUUUCAUCCUGGAAAUAUA | 467 | UAUAUUUCCAGGAUGAAAGUCCA | 1341-1363 |
| AD-62998.2 | 419 | CCCCGGCUAAUUUGUAUCAAU | 468 | AUUGAUACAAAUUAGCCGGGGGA | 29-51 |
| AD-63002.2 | 420 | UUAAACAUGGCUUGAAUGGGA | 469 | UCCCAUUCAAGCCAUGUUUAACA | 765-787 |
| AD-62975.2 | 421 | AAUGUGUUUAGACAACGUCAU | 470 | AUGACGUUGUCUAAACACAUUUU | 1388-1410 |
| AD-62979.2 | 422 | ACUAAAGGAAGAAUUCCGGUU | 471 | AACCGGAAUUCUUCCUUUAGUAU | 1027-1049 |
| AD-62983.2 | 423 | UAUAUCCAAAUGUUUUAGGAU | 472 | AUCCUAAAACAUUUGGAUAUAUU | 1680-1702 |
| AD-62987.2 | 424 | GUGCGGAAAGGCACUGAUGUU | 473 | AACAUCAGUGCCUUUCCGCACAC | 902-924 |
| AD-62991.2 | 425 | UAAAACAGUGGUUCUUAAAUU | 474 | AAUUUAAGAACCACUGUUUUAAA | 1521-1543 |
| AD-62995.2 | 426 | AUGAAAAAUUUUGAAACCAGU | 475 | ACUGGUUUCAAAAUUUUUCAUCC | 569-591 |
| AD-62999.2 | 427 | AACAAAAUAGCAAUCCCUUUU | 476 | AAAAGGGAUUGCUAUUUUGUUGG | 1264-1286 |
| AD-63003.2 | 428 | CUGAAACAGAUCUGUCGACUU | 477 | AAGUCGACAGAUCUGUUUCAGCA | 195-217 |
| AD-62976.2 | 429 | UUGUUGCAAAGGGCAUUUUGA | 478 | UCAAAAUGCCCUUUGCAACAAUU | 720-742 |
| AD-62980.2 | 430 | CUCAUUGUUUAUUAACCUGUA | 479 | UACAGGUUAAUAAACAAUGAGAU | 1483-1505 |
| AD-62984.2 | 431 | CAACAAAAUAGCAAUCCCUUU | 480 | AAAGGGAUUGCUAUUUUGUUGGA | 1263-1285 |
| AD-62992.2 | 432 | CAUUGUUUAUUAACCUGUAUU | 481 | AAUACAGGUUAAUAAACAAUGAG | 1485-1507 |
| AD-62996.2 | 433 | UAUCAGCUGGGAAGAUAUCAA | 482 | UUGAUAUCUUCCCAGCUGAUAGA | 670-692 |
| AD-63000.2 | 434 | UGUCCUAGGAACCUUUUAGAA | 483 | UUCUAAAAGGUUCCUAGGACACC | 1313-1335 |
| AD-63004.2 | 435 | UCCAACAAAAUAGCAAUCCCU | 484 | AGGGAUUGCUAUUUUGUUGGAAA | 1261-1283 |
| AD-62977.2 | 436 | GGUGUGCGGAAAGGCACUGAU | 485 | AUCAGUGCCUUUCCGCACACCCC | 899-921 |
| AD-62981.2 | 437 | UUGAAACCAGUACUUUAUCAU | 486 | AUGAUAAAGUACUGGUUUCAAAA | 579-601 |
| AD-62985.2 | 438 | UACUUCCAAAGUCUAUAUAUA | 487 | UAUAUAUAGACUUUGGAAGUACU | 75-97_G21A |
| AD-62989.2 | 439 | UCCUAGGAACCUUUUAGAAAU | 488 | AUUUCUAAAAGGUUCCUAGGACA | 1315-1337_G21U |
| AD-62993.2 | 440 | CUCCUGAGGAAAAUUUUGGAA | 489 | UUCCAAAAUUUUCCUCAGGAGAA | 603-625_G21A |
| AD-62997.2 | 441 | GCUCCGGAAUGUUGCUGAAAU | 490 | AUUUCAGCAACAUUCCGGAGCAU | 181-203_C21U |
| AD-63001.2 | 442 | GUGUUUGUGGGGAGACCAAUA | 491 | UAUUGGUCUCCCCACAAACACAG | 953-975_C21A |
| AD-62951.2 | 492 | AUGGUGGUAAUUUGUGAUUUU | 514 | AAAAUCACAAAUUACCACCAUCC | 1642-1664 |
| AD-62956.2 | 493 | GACUUGCAUCCUGGAAAUAUA | 515 | UAUAUUUCCAGGAUGCAAGUCCA | 1338-1360 |
| AD-62961.2 | 494 | GGAAGGGAAGGUAGAAGUCUU | 516 | AAGACUUCUACCUUCCCUUCCAC | 864-886 |
| AD-62966.2 | 495 | UGUCUUCUGUUUAGAUUUCCU | 517 | AGGAAAUCUAAACAGAAGACAGG | 1506-1528 |
| AD-62971.2 | 496 | CUUUGGCUGUUUCCAAGAUCU | 518 | AGAUCUUGGAAACAGCCAAAGGA | 1109-1131 |
| AD-62936.2 | 497 | AAUGUGUUUGGGCAACGUCAU | 519 | AUGACGUUGCCCAAACACAUUUU | 1385-1407 |
| AD-62942.2 | 498 | UGUGACUGUGGACACCCCUUA | 520 | UAAGGGGUGUCCACAGUCACAAA | 486-508 |
| AD-62947.2 | 499 | GAUGGGGUGCCAGCUACUAUU | 521 | AAUAGUAGCUGGCACCCCAUCCA | 814-836 |
| AD-62952.2 | 500 | GAAAAUGUGUUUGGGCAACGU | 522 | ACGUUGCCCAAACACAUUUUCAA | 1382-1404 |
| AD-62957.2 | 501 | GGCUGUUUCCAAGAUCUGACA | 523 | UGUCAGAUCUUGGAAACAGCCAA | 1113-1135 |
| AD-62962.2 | 502 | UCCAACAAAAUAGCCACCCCU | 524 | AGGGGUGGCUAUUUUGUUGGAAA | 1258-1280 |
| AD-62967.2 | 503 | GUCUUCUGUUUAGAUUUCCUU | 525 | AAGGAAAUCUAAACAGAAGACAG | 1507-1529 |
| AD-62972.2 | 504 | UGGAAGGGAAGGUAGAAGUCU | 526 | AGACUUCUACCUUCCCUUCCACA | 863-885 |
| AD-62937.2 | 505 | UCCUUUGGCUGUUUCCAAGAU | 527 | AUCUUGGAAACAGCCAAAGGAUU | 1107-1129 |
| AD-62943.2 | 506 | CAUCUCUCAGCUGGGAUGAUA | 528 | UAUCAUCCCAGCUGAGAGAUGGG | 662-684 |
| AD-62948.2 | 507 | GGGGUGCCAGCUACUAUUGAU | 529 | AUCAAUAGUAGCUGGCACCCCAU | 817-839 |
| AD-62953.2 | 508 | AUGUGUUUGGGCAACGUCAUA | 530 | UAUGACGUUGCCCAAACACAUUU | 1386-1408_C21A |
| AD-62958.2 | 509 | CUGUUUAGAUUUCCUUAAGAA | 531 | UUCUUAAGGAAAUCUAAACAGAA | 1512-1534_C21A |
| AD-62963.2 | 510 | AGAAAGAAAUGGACUUGCAUA | 532 | UAUGCAAGUCCAUUUCUUUCUAG | 1327-1349_C21A |
| AD-62968.2 | 511 | GCAUCCUGGAAAUAUAUUAAA | 533 | UUUAAUAUAUUUCCAGGAUGCAA | 1343-1365_C21A |
| AD-62973.2 | 512 | CCUGUCAGACCAUGGGAACUA | 534 | UAGUUCCCAUGGUCUGACAGGCU | 308-330_G21A |
| AD-62938.2 | 513 | AAACAUGGUGUGGAUGGGAUA | 535 | UAUCCCAUCCACACCAUGUUUAA | 763-785_C21A |
| AD-62933.1 | 536 | GAAUGUGAAAGUCAUCGACAA | 653 | UUGUCGAUGACUUUCACAUUCUG | 1072-1094 |
| AD-65630.1 | 537 | GAAUGUGAAAGUCAUCGACAA | 654 | UUGUCGAUGACUUUCACAUUCUG | 1072-1094 |
| AD-65636.1 | 538 | GAAUGUGAAAGUCAUCGACAA | 655 | UUGUCGAUGACUUUCACAUUCUG | 1072-1094 |
| AD-65642.1 | 539 | GAAUGUGAAAGUCAUCGACAA | 656 | UUGUCGAUGACUUUCACAUUCUG | 1072-1094 |
| AD-65647.1 | 540 | GAAUGUGAAAGUCAUCGACAA | 657 | UUGUCGAUGACUUUCACAUUCUG | 1072-1094 |
| AD-65652.1 | 541 | GAAUGUGAAAGUCAUCGACAA | 658 | UUGUCGAUGACUUUCACAUUCUG | 1072-1094 |
| AD-65657.1 | 542 | GAAUGUGAAAGUCAUCGACAA | 659 | UUGUCGAUGACUUUCACAUUCUG | 1072-1094 |
| AD-65662.1 | 543 | GAAUGUGAAAGUCAUCGACAA | 660 | UUGUCGAUGACUUUCACAUUCUG | 1072-1094 |
| AD-65625.1 | 544 | AUGUGAAAGUCAUCGACAA | 661 | UUGUCGAUGACUUUCACAUUC | 1072-1094 |
| AD-65631.1 | 545 | AUGUGAAAGUCAUCGACAA | 662 | UUGUCGAUGACUUUCACAUUC | 1072-1094 |
| AD-65637.1 | 546 | GAAUGUGAAAGUCAUCGACAA | 663 | UUGUCGAUGACUUUCACAUUCUG | 1072-1094 |
| AD-65643.1 | 547 | GAAUGUGAAAGUCAUCGACAA | 664 | UUGUCGAUGACUUUCACAUUCUG | 1072-1094 |
| AD-65648.1 | 548 | GAAUGUGAAAGUCAUCGACAA | 665 | UUGUCGAUGACUUUCACAUUCUG | 1072-1094 |
| AD-65653.1 | 549 | GAAUGUGAAAGUCAUCGACAA | 666 | UUGUCGAUGACUUUCACAUUCUG | 1072-1094 |
| AD-65658.1 | 550 | GAAUGUGAAAGUCAUCGACAA | 667 | UUGUCGAUGACUUUCACAUUCUG | 1072-1094 |
| AD-65663.1 | 551 | GAAUGUGAAAGUCAUCGACAA | 668 | UUGUCGAUGACUUUCACAUUCUG | 1072-1094 |
| AD-65626.1 | 552 | GAAUGUGAAAGUCAUCGACAA | 669 | UUGUCGAUGACUUUCACAUUCUG | 1072-1094 |
| AD-65638.1 | 553 | GAAUGUGAAAGUCAUCGACAA | 670 | UUGUCGAUGACUUUCACAUUCUG | 1072-1094 |
| AD-65644.1 | 554 | GAAUGUGAAAGUCAUCGACAA | 671 | UUGUCGAUGACUUUCACAUUCUG | 1072-1094 |
| AD-65649.1 | 555 | GAAUGUGAAAGUCAUCGACAA | 672 | UUGUCGAUGACUUUCACAUUCUG | 1072-1094 |
| AD-65654.1 | 556 | GAAUGUGAAAGUCAUCGACAA | 673 | UUGUCGAUGACUUUCACAUUCUG | 1072-1094 |
| AD-65659.1 | 557 | GAAUGTGAAAGUCAUCGACAA | 674 | UUGUCGAUGACUUUCACAUUCUG | 1072-1094 |
| AD-65627.1 | 558 | GAAUGUGAAAGUCAUCGACAA | 675 | UUGUCGAUGACUUUCACAUUCUG | 1072-1094 |
| AD-65633.1 | 559 | GAAUGTGAAAGUCAUCGACAA | 676 | UUGUCGAUGACUUUCACAUUCUG | 1072-1094 |
| AD-65639.1 | 560 | GAAUGUGAAAGUCAUCGACAA | 677 | UUGUCGAUGACUUUCACAUUCUG | 1072-1094 |
| AD-65645.1 | 561 | GAAUGUGAAAGUCAUCGACAA | 678 | UUGUCGAUGACUUUCACAUUCUG | 1072-1094 |
| AD-65650.1 | 562 | GAAUGUGAAAGUCAUCTACAA | 679 | UUGUCGAUGACUUUCACAUUCUG | 1072-1094 |
| AD-65655.1 | 563 | GAAUGUGAAAGUCAUCACAA | 680 | UUGUCGAUGACUUUCACAUUCUG | 1072-1094 |
| AD-65660.1 | 564 | GAAUGUGAAAGUCATCTACAA | 681 | UUGUCGAUGACUUUCACAUUCUG | 1072-1094 |
| AD-65665.1 | 565 | GAAUGUGAAAGUCAUCGACAA | 682 | UUGUCGAUGACUUUCACAUUCUG | 1072-1094 |
| AD-65628.1 | 566 | GAAUGUGAAAGUCAUCTACAA | 683 | UUGUCGAUGACUUUCACAUUCUG | 1072-1094 |
| AD-65634.1 | 567 | GAAUGUGAAAGUCAUCACAA | 684 | UUGUCGAUGACUUUCACAUUCUG | 1072-1094 |
| AD-65646.1 | 568 | GAAUGUGAAAGUCAUCGACAA | 685 | UTGUCGAUGACUUTCACAUUCUG | 1072-1094 |
| AD-65656.1 | 569 | GAAUGUGAAAGUCAUCGACAA | 686 | UUGUCGAUGACUUTCACAUUCUG | 1072-1094 |
| AD-65661.1 | 570 | GAAUGUGAAAGUCAUCGACAA | 687 | UTGUCGAUGACUUTCACAUUCUG | 1072-1094 |
| AD-65666.1 | 571 | GAAUGUGAAAGUCAUCGACAA | 688 | UUGUCGAUGACUUTCACAUUCUG | 1072-1094 |
| AD-65629.1 | 572 | GAAUGUGAAAGUCAUCGACAA | 689 | UTGUCGAUGACUUTCACAUUCUG | 1072-1094 |
| AD-65635.1 | 573 | GAAUGUGAAAGUCAUCGACAA | 690 | UTGUCGAUGACUUTCACAUUCUG | 1072-1094 |
| AD-65641.1 | 574 | GAAUGUGAAAGUCAUCGACAA | 691 | UTGUCGAUGACUUTCACAUUCUG | 1072-1094 |
| AD-62994.1 | 575 | GACUUUCAUCCUGGAAAUAUA | 692 | UAUAUUUCCAGGAUGAAAGUCCA | 1341-1363 |
| AD-65595.1 | 576 | GACUUUCAUCCUGGAAAUAUA | 693 | UAUAUUUCCAGGAUGAAAGUCCA | 1341-1363 |
| AD-65600.1 | 577 | GACUUUCAUCCUGGAAAUAUA | 694 | UAUAUUUCCAGGAUGAAAGUCCA | 1341-1363 |
| AD-65610.1 | 578 | GACUUUCAUCCUGGAAAUAUA | 695 | UAUAUUUCCAGGAUGAAAGUCCA | 1341-1363 |
| AD-65615.1 | 579 | GACUUUCAUCCUGGAAAUAUA | 696 | UAUAUUUCCAGGAUGAAAGUCCA | 1341-1363 |
| AD-65620.1 | 580 | GACUUUCAUCCUGGAAAUAUA | 697 | UAUAUUUCCAGGAUGAAAGUCCA | 1341-1363 |
| AD-65584.1 | 581 | CUUUCAUCCUGGAAAUAUA | 698 | UAUAUUUCCAGGAUGAAAGUC | 1341-1361 |
| AD-65590.1 | 582 | CUUUCAUCCUGGAAAUAUA | 699 | UAUAUUUCCAGGAUGAAAGUC | 1341-1361 |
| AD-65596.1 | 583 | GACUUUCAUCCUGGAAAUAUA | 700 | UAUAUUUCCAGGAUGAAAGUCCA | 1341-1363 |
| AD-65601.1 | 584 | GACUUUCAUCCUGGAAAUAUA | 701 | UAUAUUUCCAGGAUGAAAGUCCA | 1341-1363 |
| AD-65606.1 | 585 | GACUUUCAUCCUGGAAAUAUA | 702 | UAUAUUUCCAGGAUGAAAGUCCA | 1341-1363 |
| AD-65611.1 | 586 | GACUUUCAUCCUGGAAAUAUA | 703 | UAUAUUUCCAGGAUGAAAGUCCA | 1341-1363 |
| AD-65616.1 | 587 | GACUUUCAUCCUGGAAAUAUA | 704 | UAUAUUUCCAGGAUGAAAGUCCA | 1341-1363 |
| AD-65621.1 | 588 | GACUUUCAUCCUGGAAAUAUA | 705 | UAUAUUUCCAGGAUGAAAGUCCA | 1341-1363 |
| AD-65585.1 | 589 | GACUUUCAUCCUGGAAAUAUA | 706 | UAUAUUUCCAGGAUGAAAGUCCA | 1341-1363 |
| AD-65591.1 | 590 | GACUUUCAUCCUGGAAAUAUA | 707 | UAUAUUUCCAGGAUGAAAGUCCA | 1341-1363 |
| AD-65597.1 | 591 | GACUUUCAUCCUGGAAAUAUA | 708 | UAUAUUUCCAGGAUGAAAGUCCA | 1341-1363 |
| AD-65602.1 | 592 | GACUUUCAUCCUGGAAAUAUA | 709 | UAUAUUUCCAGGAUGAAAGUCCA | 1341-1363 |
| AD-65607.1 | 593 | GACUUUCAUCCUGGAAAUAUA | 710 | UAUAUUUCCAGGAUGAAAGUCCA | 1341-1363 |
| AD-65612.1 | 594 | GACUUUCAUCCUGGAAAUAUA | 711 | UAUAUUUCCAGGAUGAAAGUCCA | 1341-1363 |
| AD-65622.1 | 595 | GACUUUCAUCCUGGAAAUAUA | 712 | UAUAUUUCCAGGAUGAAAGUCCA | 1341-1363 |
| AD-65586.1 | 596 | GACUTUCAUCCUGGAAAUAUA | 713 | UAUAUUUCCAGGAUGAAAGUCCA | 1341-1363 |
| AD-65592.1 | 597 | GACUUTCAUCCUGGAAAUAUA | 714 | UAUAUUUCCAGGAUGAAAGUCCA | 1341-1363 |
| AD-65598.1 | 598 | GACUUUCAUCCUGGAAAUAUA | 715 | UAUAUUUCCAGGAUGAAAGUCCA | 1341-1363 |
| AD-65603.1 | 599 | GACUUUCAUCCUGGAAAUAUA | 716 | UAUAUUUCCAGGAUGAAAGUCCA | 1341-1363 |
| AD-65608.1 | 600 | GACUUUCAUCCUGGAATUAUA | 717 | UAUAUUUCCAGGAUGAAAGUCCA | 1341-1363 |
| AD-65613.1 | 601 | GACUUUCAUCCUGGAAUAUA | 718 | UAUAUUUCCAGGAUGAAAGUCCA | 1341-1363 |
| AD-65618.1 | 602 | GACUUUCAUCCUGGAATUAUA | 719 | UAUAUUUCCAGGAUGAAAGUCCA | 1341-1363 |
| AD-65623.1 | 603 | GACUUUCAUCCUGGAATUAUA | 720 | UAUAUUUCCAGGAUGAAAGUCCA | 1341-1363 |
| AD-65587.1 | 604 | GACUUUCAUCCUGGAAAUAUA | 721 | UAUAUUUCCAGGAUGAAAGUCCA | 1341-1363 |
| AD-65593.1 | 605 | GACUUTCAUCCUGGAAAUAUA | 722 | UAUAUUUCCAGGAUGAAAGUCCA | 1341-1363 |
| AD-65599.1 | 606 | GACUUUCAUCCUGGAAAUAUA | 723 | UAUAUUUCCAGGATGAAAGUCCA | 1341-1363 |
| AD-65604.1 | 607 | GACUUUCAUCCUGGAAAUAUA | 724 | UAUAUUUCCAGGATGAAAGUCCA | 1341-1363 |
| AD-65609.1 | 608 | GACUUUCAUCCUGGAAAUAUA | 725 | UAUAUUUCCAGGATGAAAGUCCA | 1341-1363 |
| AD-65614.1 | 609 | GACUUUCAUCCUGGAAAUAUA | 726 | UAUAUTUCCAGGATGAAAGUCCA | 1341-1363 |
| AD-65619.1 | 610 | GACUUUCAUCCUGGAAAUAUA | 727 | UAUAUTUCCAGGATGAAAGUCCA | 1341-1363 |
| AD-65624.1 | 611 | GACUUUCAUCCUGGAAAUAUA | 728 | UAUAUUUCCAGGATGAAAGUCCA | 1341-1363 |
| AD-65588.1 | 612 | GACUUUCAUCCUGGAAAUAUA | 729 | UAUAUTUCCAGGATGAAAGUCCA | 1341-1363 |
| AD-65594.1 | 613 | GACUUUCAUCCUGGAAAUAUA | 730 | UAUAUUUCCAGGATGAAAGUCCA | 1341-1363 |
| AD-68309.1 | 614 | AGAAAGGUGUUCAAGAUGUCA | 731 | UGACAUCUUGAACACCUUUCUCC | 1001-1022_C21A |
| AD-68303.1 | 615 | CAUCCUGGAAAUAUAUUAACU | 732 | AGUUAAUAUAUUUCCAGGAUGAA | 1349-1370 |
| AD-65626.5 | 616 | GAAUGUGAAAGUCAUCGACAA | 733 | UUGUCGAUGACUUUCACAUUCUG | 1072-1094 |
| AD-68295.1 | 617 | AGUGCACAAUAUUUUCCCAUA | 734 | UAUGGGAAAAUAUUGUGCACUGU | 1139-1160_C21A |
| AD-68273.1 | 618 | GAAAGUCAUCGACAAGACAUU | 735 | AAUGUCUUGUCGAUGACUUUCAC | 1080-1100 |
| AD-68297.1 | 619 | AAUGUGAAAGUCAUCGACAAA | 736 | UUUGUCGAUGACUUUCACAUUCU | 1075-1096_G21A |
| AD-68287.1 | 620 | CUGGAAAUAUAUUAACUGUUA | 737 | UAACAGUUAAUAUAUUUCCAGGA | 1353-1374 |
| AD-68300.1 | 621 | AUUUUCCCAUCUGUAUUAUUU | 738 | AAAUAAUACAGAUGGGAAAAUAU | 1149-1170 |
| AD-68306.1 | 622 | UGUCGUUCUUUUCCAACAAAA | 739 | UUUUGUUGGAAAAGAACGACACC | 1252-1273 |
| AD-68292.1 | 623 | AUCCUGGAAAUAUAUUAACUA | 740 | UAGUUAAUAUAUUUCCAGGAUGA | 1350-1371_G21A |
| AD-68298.1 | 624 | GCAUUUUGAGAGGUGAUGAUA | 741 | UAUCAUCACCUCUCAAAAUGCCC | 734-755_G21A |
| AD-68277.1 | 625 | CAGGGGGAGAAAGGUGUUCAA | 742 | UUGAACACCUUUCUCCCCCUGGA | 994-1014 |
| AD-68289.1 | 626 | GGAAAUAUAUUAACUGUUAAA | 743 | UUUAACAGUUAAUAUAUUUCCAG | 1355-1376 |
| AD-68272.1 | 627 | CAUUGGUGAGGAAAAAUCCUU | 744 | AAGGAUUUUUCCUCACCAAUGUC | 1097-1117 |
| AD-68282.1 | 628 | GGGAGAAAGGUGUUCAAGAUA | 745 | UAUCUUGAACACCUUUCUCCCCC | 998-1018_G21A |
| AD-68285.1 | 629 | GGCAUUUUGAGAGGUGAUGAU | 746 | AUCAUCACCUCUCAAAAUGCCCU | 733-754 |
| AD-68290.1 | 630 | UACAAAGGGUGUCGUUCUUUU | 747 | AAAAGAACGACACCCUUUGUAUU | 1243-1264 |
| AD-68296.1 | 631 | UGGGAUCUUGGUGUCGAAUCA | 748 | UGAUUCGACACCAAGAUCCCAUU | 783-804 |
| AD-68288.1 | 632 | CUGACAGUGCACAAUAUUUUA | 749 | UAAAAUAUUGUGCACUGUCAGAU | 1134-1155_C21A |
| AD-68299.1 | 633 | CAGUGCACAAUAUUUUCCCAU | 750 | AUGGGAAAAUAUUGUGCACUGUC | 1138-1159 |
| AD-68275.1 | 634 | ACUUUUCAAUGGGUGUCCUAA | 751 | UUAGGACACCCAUUGAAAAGUCA | 1302-1322_G21A |
| AD-68274.1 | 635 | ACAUUGGUGAGGAAAAAUCCU | 752 | AGGAUUUUUCCUCACCAAUGUCU | 1096-1116 |
| AD-68294.1 | 636 | UUGCUUUUGACUUUUCAAUGA | 753 | UCAUUGAAAAGUCAAAAGCAAUG | 1293-1314_G21A |
| AD-68302.1 | 637 | CAUUUUGAGAGGUGAUGAUGA | 754 | UCAUCAUCACCUCUCAAAAUGCC | 735-756_C21A |
| AD-68279.1 | 638 | UUGACUUUUCAAUGGGUGUCA | 755 | UGACACCCAUUGAAAAGUCAAAA | 1299-1319_C21A |
| AD-68304.1 | 639 | CGACUUCUGUUUUAGGACAGA | 756 | UCUGUCCUAAAACAGAAGUCGAC | 212-233 |
| AD-68286.1 | 640 | CUCUGAGUGGGUGCCAGAAUA | 757 | UAUUCUGGCACCCACUCAGAGCC | 1058-1079_G21A |
| AD-68291.1 | 641 | GGGUGCCAGAAUGUGAAAGUA | 758 | UACUUUCACAUUCUGGCACCCAC | 1066-1087_C21A |
| AD-68283.1 | 642 | UCAAUGGGUGUCCUAGGAACA | 759 | UGUUCCUAGGACACCCAUUGAAA | 1307-1327_C21A |
| AD-68280.1 | 643 | AAAGUCAUCGACAAGACAUUA | 760 | UAAUGUCUUGUCGAUGACUUUCA | 1081-1101_G21A |
| AD-68293.1 | 644 | AUUUUGAGAGGUGAUGAUGCA | 761 | UGCAUCAUCACCUCUCAAAAUGC | 736-757_C21A |
| AD-68276.1 | 645 | AUCGACAAGACAUUGGUGAGA | 762 | UCUCACCAAUGUCUUGUCGAUGA | 1087-1107_G21A |
| AD-68308.1 | 646 | GGUGCCAGAAUGUGAAAGUCA | 763 | UGACUUUCACAUUCUGGCACCCA | 1067-1088 |
| AD-68278.1 | 647 | GACAGUGCACAAUAUUUUCCA | 764 | UGGAAAAUAUUGUGCACUGUCAG | 1136-1156_C21A |
| AD-68307.1 | 648 | ACAAAGAGACACUGUGCAGAA | 765 | UUCUGCACAGUGUCUCUUUGUCA | 1191-1212_G21A |
| AD-68284.1 | 649 | UUUUCAAUGGGUGUCCUAGGA | 766 | UCCUAGGACACCCAUUGAAAAGU | 1304-1324 |
| AD-68301.1 | 650 | CCGUUUCCAAGAUCUGACAGU | 767 | ACUGUCAGAUCUUGGAAACGGCC | 1121-1142 |
| AD-68281.1 | 651 | AGGGGGAGAAAGGUGUUCAAA | 768 | UUUGAACACCUUUCUCCCCCUGG | 995-1015_G21A |
| AD-68305.1 | 652 | AGUCAUCGACAAGACAUUGGU | 769 | ACCAAUGUCUUGUCGAUGACUUU | 1083-1104 |

TABLE 8
Additional Human/Mouse/Cyno HAO1 Modified and Unmodified Sense Strand iRNA Sequences

| | | Unmodified sense strand sequence | |
|---|---|---|---|
| Duplex Name | Modified sense strand sequence 5′ to 3′ | 5′to 3′ | SEQ ID NO: |
| AD-40257.1 | uucAAuGGGuGuccuAGGAdTsdT | UUCAAUGGGUGUCCUAGGA | 770 & 771 |
| AD-40257.2 | uucAAuGGGuGuccuAGGAdTsdT | UUCAAUGGGUGUCCUAGGA | 770 & 771 |
| AD-63102.1 | AcAAcuGGAGGGAcAucGudTsdT | ACAACUGGAGGGACAUCGU | 772 & 773 |
| AD-63102.2 | AcAAcuGGAGGGAcAucGudTsdT | ACAACUGGAGGGACAUCGU | 772 & 773 |
| AD-63102.3 | AcAAcuGGAGGGAcAucGudTsdT | ACAACUGGAGGGACAUCGU | 772 & 773 |

TABLE 9
Additional Human/Mouse/Cyno HAO1 Modified and Unmodified Antisense Strand iRNA Sequences

| | Modified antisense strand sequence 5′ | Unmodified antisense strand | |
|---|---|---|---|
| Duplex Name | to 3′ | sequence 5′ to 3′ | SEQ ID NO: |
| AD-40257.1 | UCCuAGGAcACCcAUUGAAdTsdT | UCCUAGGACACCCAUUGAA | 774 & 775 |
| AD-40257.2 | UCCuAGGAcACCcAUUGAAdTsdT | UCCUAGGACACCCAUUGAA | 774 & 775 |
| AD-63102.1 | ACGAUGUCCCUCcAGUUGUdTsdT | ACGAUGUCCCUCCAGUUGU | 776 & 777 |
| AD-63102.2 | ACGAUGUCCCUCcAGUUGUdTsdT | ACGAUGUCCCUCCAGUUGU | 776 & 777 |
| AD-63102.3 | ACGAUGUCCCUCcAGUUGUdTsdT | ACGAUGUCCCUCCAGUUGU | 776 & 777 |

TABLE 10
Additional Human/Cyno/Mouse/Rat and Human/Cyno/Rat HAO1 Modified Sense Strand iRNA Sequences

| Duplex Name | Modified sense strand sequence | SEQ ID NO: |
|---|---|---|
| AD-62989.2 | UfscsCfuAfgGfaAfCfCfuUfuUfaGfaAfaUfL96 | 778 |
| AD-62994.2 | GfsasCfuUfuCfaUfCfCfuGfgAfaAfuAfuAfL96 | 779 |
| AD-62933.2 | GfsasAfuGfuGfaAfAfGfuCfaUfcGfaCfaAfL96 | 780 |
| AD-62935.2 | CfsasUfuGfgUfgAfGfGfaAfaAfaUfcCfuUfL96 | 781 |
| AD-62940.2 | AfsusCfgAfcAfaGfAfCfaUfuGfgUfgAfgAfL96 | 782 |
| AD-62941.2 | AfscsAfuUfgGfuGfAfGfgAfaAfaAfuCfcUfL96 | 783 |
| AD-62944.2 | GfsasAfaGfuCfaUfCfGfaCfaAfgAfcAfuUfL96 | 784 |
| AD-62965.2 | AfsasAfgUfcAfuCfGfAfcAfaGfaCfaUfuAfL96 | 785 |

TABLE 11
Additional Human/Cyno/Mouse/Rat and Human/Cyno/Rat HAO1 Modified Antisense Strand iRNA Sequences

| Duplex Name | Modified antisense strand | SEQ ID NO: |
|---|---|---|
| AD-62989.2 | asUfsuUfcUfaAfaAfgguUfcCfuAfgGfascsa | 786 |
| AD-62994.2 | usAfsuAfuUfuCfcAfggaUfgAfaAfgUfcscsa | 787 |
| AD-62933.2 | usUfsgUfcGfaUfgAfcuuUfcAfcAfuUfcsusg | 788 |
| AD-62935.2 | asAfsgGfaUfuUfuUfccuCfaCfcAfaUfgsusc | 789 |
| AD-62940.2 | usCfsuCfaCfcAfaUfgucUfuGfuCfgAfusgsa | 790 |
| AD-62941.2 | asGfsgAfuUfuUfuCfcucAfcCfaAfuGfuscsu | 791 |
| AD-62944.2 | asAfsuGfuCfuUfgUfcgaUfgAfcUfuUfcsasc | 792 |
| AD-62965.2 | usAfsaUfgUfcUfuGfucgAfuGfaCfuUfuscsa | 793 |

TABLE 12
Additional Human Unmodified and Modifieded Sense and Antisense Strand HAO1 iRNA Sequences
Targeting NM_017545.2

| | SEQ ID | | SEQ ID | | |
|---|---|---|---|---|---|
| Unmodified sequence 5′ to 3′ | NO: | Modified sequence 5′ to 3′ | NO: | Strand | Length |
| AUGUAUGUUACUUCUUAGAGA | 794 | asusguauGfuUfAfCfuucuuagagaL96 | 1890 | sense | 21 |
| UCUCUAAGAAGUAACAUACAUCC | 795 | usCfsucuAfaGfAfaguaAfcAfuacauscsc | 1891 | antisense | 23 |
| UGUAUGUUACUUCUUAGAGAG | 796 | usgsuaugUfuAfCfUfucuuagagagL96 | 1892 | sense | 21 |
| CUCUCUAAGAAGUAACAUACAUC | 797 | csUfscucUfaAfGfaaguAfaCfauacasusc | 1893 | antisense | 23 |
| UAGGAUGUAUGUUACUUCUUA | 798 | usasggauGfuAfUfGfuuacuucuuaL96 | 1894 | sense | 21 |
| UAAGAAGUAACAUACAUCCUAAA | 799 | usAfsagaAfgUfAfacauAfcAfuccuasasa | 1895 | antisense | 23 |
| UUAGGAUGUAUGUUACUUCUU | 800 | ususaggaUfgUfAfUfguuacuucuuL96 | 1896 | sense | 21 |
| AAGAAGUAACAUACAUCCUAAAA | 801 | asAfsgaaGfuAfAfcauaCfaUfccuaasasa | 1897 | antisense | 23 |
| AGAAAGGUGUUCAAGAUGUCC | 802 | asgsaaagGfuGfUfUfcaagauguccL96 | 1898 | sense | 21 |
| GGACAUCUUGAACACCUUUCUCC | 803 | gsGfsacaUfcUfUfgaacAfcCfuuucuscsc | 1899 | antisense | 23 |
| GAAAGGUGUUCAAGAUGUCCU | 804 | gsasaaggUfgUfUfCfaagauguccuL96 | 1900 | sense | 21 |
| AGGACAUCUUGAACACCUUUCUC | 805 | asGfsgacAfuCfUfugaaCfaCfcuuucsusc | 1901 | antisense | 23 |
| GGGGAGAAAGGUGUUCAAGAU | 806 | gsgsggagAfaAfGfGfuguucaagauL96 | 1902 | sense | 21 |
| AUCUUGAACACCUUUCUCCCCCU | 807 | asUfscuuGfaAfCfaccuUfuCfuccccscsu | 1903 | antisense | 23 |
| GGGGGAGAAAGGUGUUCAAGA | 808 | gsgsgggaGfaAfAfGfguguucaagaL96 | 1904 | sense | 21 |
| UCUUGAACACCUUUCUCCCCCUG | 809 | usCfsuugAfaCfAfccuuUfcUfcccccsusg | 1905 | antisense | 23 |
| AGAAACUUUGGCUGAUAAUAU | 810 | asgsaaacUfuUfGfGfcugauaauauL96 | 1906 | sense | 21 |
| AUAUUAUCAGCCAAAGUUUCUUC | 811 | asUfsauuAfuCfAfgccaAfaGfuuucususc | 1907 | antisense | 23 |
| GAAACUUUGGCUGAUAAUAUU | 812 | gsasaacuUfuGfGfCfugauaauauuL96 | 1908 | sense | 21 |
| AAUAUUAUCAGCCAAAGUUUCUU | 813 | asAfsuauUfaUfCfagccAfaAfguuucsusu | 1909 | antisense | 23 |
| AUGAAGAAACUUUGGCUGAUA | 814 | asusgaagAfaAfCfUfuuggcugauaL96 | 1910 | sense | 21 |
| UAUCAGCCAAAGUUUCUUCAUCA | 815 | usAfsucaGfcCfAfaaguUfuCfuucauscsa | 1911 | antisense | 23 |
| GAUGAAGAAACUUUGGCUGAU | 816 | gsasugaaGfaAfAfCfuuuggcugauL96 | 1912 | sense | 21 |
| AUCAGCCAAAGUUUCUUCAUCAU | 817 | asUfscagCfcAfAfaguuUfcUfucaucsasu | 1913 | antisense | 23 |
| AAGGCACUGAUGUUCUGAAAG | 818 | asasggcaCfuGfAfUfguucugaaagL96 | 1914 | sense | 21 |
| CUUUCAGAACAUCAGUGCCUUUC | 819 | csUfsuucAfgAfAfcaucAfgUfgccuususc | 1915 | antisense | 23 |
| AGGCACUGAUGUUCUGAAAGC | 820 | asgsgcacUfgAfUfGfuucugaaagcL96 | 1916 | sense | 21 |
| GCUUUCAGAACAUCAGUGCCUUU | 821 | gsCfsuuuCfaGfAfacauCfaGfugccususu | 1917 | antisense | 23 |
| CGGAAAGGCACUGAUGUUCUG | 822 | csgsgaaaGfgCfAfCfugauguucugL96 | 1918 | sense | 21 |
| CAGAACAUCAGUGCCUUUCCGCA | 823 | csAfsgaaCfaUfCfagugCfcUfuuccgscsa | 1919 | antisense | 23 |
| GCGGAAAGGCACUGAUGUUCU | 824 | gscsggaaAfgGfCfAfcugauguucuL96 | 1920 | sense | 21 |
| AGAACAUCAGUGCCUUUCCGCAC | 825 | asGfsaacAfuCfAfgugcCfuUfuccgcsasc | 1921 | antisense | 23 |
| AGAAGACUGACAUCAUUGCCA | 826 | asgsaagaCfuGfAfCfaucauugccaL96 | 1922 | sense | 21 |
| UGGCAAUGAUGUCAGUCUUCUCA | 827 | usGfsgcaAfuGfAfugucAfgUfcuucuscsa | 1923 | antisense | 23 |
| GAAGACUGACAUCAUUGCCAA | 828 | gsasagacUfgAfCfAfucauugccaaL96 | 1924 | sense | 21 |
| UUGGCAAUGAUGUCAGUCUUCUC | 829 | usUfsggcAfaUfGfauguCfaGfucuucsusc | 1925 | antisense | 23 |
| GCUGAGAAGACUGACAUCAUU | 830 | gscsugagAfaGfAfCfugacaucauuL96 | 1926 | sense | 21 |
| AAUGAUGUCAGUCUUCUCAGCCA | 831 | asAfsugaUfgUfCfagucUfuCfucagcscsa | 1927 | antisense | 23 |
| GGCUGAGAAGACUGACAUCAU | 832 | gsgscugaGfaAfGfAfcugacaucauL96 | 1928 | sense | 21 |
| AUGAUGUCAGUCUUCUCAGCCAU | 833 | asUfsgauGfuCfAfgucuUfcUfcagccsasu | 1929 | antisense | 23 |
| UAAUGCCUGAUUCACAACUUU | 834 | usasaugcCfuGfAfUfucacaacuuuL96 | 1930 | sense | 21 |
| AAAGUUGUGAAUCAGGCAUUACC | 835 | asAfsaguUfgUfGfaaucAfgGfcauuascsc | 1931 | antisense | 23 |
| AAUGCCUGAUUCACAACUUUG | 836 | asasugccUfgAfUfUfcacaacuuugL96 | 1932 | sense | 21 |
| CAAAGUUGUGAAUCAGGCAUUAC | 837 | csAfsaagUfuGfUfgaauCfaGfgcauusasc | 1933 | antisense | 23 |
| UUGGUAAUGCCUGAUUCACAA | 838 | ususgguaAfuGfCfCfugauucacaaL96 | 1934 | sense | 21 |
| UUGUGAAUCAGGCAUUACCAACA | 839 | usUfsgugAfaUfCfaggcAfuUfaccaascsa | 1935 | antisense | 23 |
| GUUGGUAAUGCCUGAUUCACA | 840 | gsusugguAfaUfGfCfcugauucacaL96 | 1936 | sense | 21 |
| UGUGAAUCAGGCAUUACCAACAC | 841 | usGfsugaAfuCfAfggcaUfuAfccaacsasc | 1937 | antisense | 23 |
| UAUCAAAUGGCUGAGAAGACU | 842 | usasucaaAfuGfGfCfugagaagacuL96 | 1938 | sense | 21 |
| AGUCUUCUCAGCCAUUUGAUAUC | 843 | asGfsucuUfcUfCfagccAfuUfugauasusc | 1939 | antisense | 23 |
| AUCAAAUGGCUGAGAAGACUG | 844 | asuscaaaUfgGfCfUfgagaagacugL96 | 1940 | sense | 21 |
| CAGUCUUCUCAGCCAUUUGAUAU | 845 | csAfsgucUfuCfUfcagcCfaUfuugausasu | 1941 | antisense | 23 |
| AAGAUAUCAAAUGGCUGAGAA | 846 | asasgauaUfcAfAfAfuggcugagaaL96 | 1942 | sense | 21 |
| UUCUCAGCCAUUUGAUAUCUUCC | 847 | usUfscucAfgCfCfauuuGfaUfaucuuscsc | 1943 | antisense | 23 |
| GAAGAUAUCAAAUGGCUGAGA | 848 | gsasagauAfuCfAfAfauggcugagaL96 | 1944 | sense | 21 |
| UCUCAGCCAUUUGAUAUCUUCCC | 849 | usCfsucaGfcCfAfuuugAfuAfucuucscsc | 1945 | antisense | 23 |
| UCUGACAGUGCACAAUAUUUU | 850 | uscsugacAfgUfGfCfacaauauuuuL96 | 1946 | sense | 21 |
| AAAAUAUUGUGCACUGUCAGAUC | 851 | asAfsaauAfuUfGfugcaCfuGfucagasusc | 1947 | antisense | 23 |
| CUGACAGUGCACAAUAUUUUC | 852 | csusgacaGfuGfCfAfcaauauuuucL96 | 1948 | sense | 21 |
| GAAAAUAUUGUGCACUGUCAGAU | 853 | gsAfsaaaUfaUfUfgugcAfcUfgucagsasu | 1949 | antisense | 23 |
| AAGAUCUGACAGUGCACAAUA | 854 | asasgaucUfgAfCfAfgugcacaauaL96 | 1950 | sense | 21 |
| UAUUGUGCACUGUCAGAUCUUGG | 855 | usAfsuugUfgCfAfcuguCfaGfaucuusgsg | 1951 | antisense | 23 |
| CAAGAUCUGACAGUGCACAAU | 856 | csasagauCfuGfAfCfagugcacaauL96 | 1952 | sense | 21 |
| AUUGUGCACUGUCAGAUCUUGGA | 857 | asUfsuguGfcAfCfugucAfgAfucuugsgsa | 1953 | antisense | 23 |
| ACUGAUGUUCUGAAAGCUCUG | 858 | ascsugauGfuUfCfUfgaaagcucugL96 | 1954 | sense | 21 |
| CAGAGCUUUCAGAACAUCAGUGC | 859 | csAfsgagCfuUfUfcagaAfcAfucagusgsc | 1955 | antisense | 23 |
| CUGAUGUUCUGAAAGCUCUGG | 860 | csusgaugUfuCfUfGfaaagcucuggL96 | 1956 | sense | 21 |
| CCAGAGCUUUCAGAACAUCAGUG | 861 | csCfsagaGfcUfUfucagAfaCfaucagsusg | 1957 | antisense | 23 |
| AGGCACUGAUGUUCUGAAAGC | 862 | asgsgcacUfgAfUfGfuucugaaagcL96 | 1958 | sense | 21 |
| GCUUUCAGAACAUCAGUGCCUUU | 863 | gsCfsuuuCfaGfAfacauCfaGfugccususu | 1959 | antisense | 23 |
| AAGGCACUGAUGUUCUGAAAG | 864 | asasggcaCfuGfAfUfguucugaaagL96 | 1960 | sense | 21 |
| CUUUCAGAACAUCAGUGCCUUUC | 865 | csUfsuucAfgAfAfcaucAfgUfgccuususc | 1961 | antisense | 23 |
| AACAACAUGCUAAAUCAGUAC | 866 | asascaacAfuGfCfUfaaaucaguacL96 | 1962 | sense | 21 |
| GUACUGAUUUAGCAUGUUGUUCA | 867 | gsUfsacuGfaUfUfuagcAfuGfuuguuscsa | 1963 | antisense | 23 |
| ACAACAUGCUAAAUCAGUACU | 868 | ascsaacaUfgCfUfAfaaucaguacuL96 | 1964 | sense | 21 |
| AGUACUGAUUUAGCAUGUUGUUC | 869 | asGfsuacUfgAfUfuuagCfaUfguugususc | 1965 | antisense | 23 |
| UAUGAACAACAUGCUAAAUCA | 870 | usasugaaCfaAfCfAfugcuaaaucaL96 | 1966 | sense | 21 |
| UGAUUUAGCAUGUUGUUCAUAAU | 871 | usGfsauuUfaGfCfauguUfgUfucauasasu | 1967 | antisense | 23 |
| UUAUGAACAACAUGCUAAAUC | 872 | ususaugaAfcAfAfCfaugcuaaaucL96 | 1968 | sense | 21 |
| GAUUUAGCAUGUUGUUCAUAAUC | 873 | gsAfsuuuAfgCfAfuguuGfuUfcauaasusc | 1969 | antisense | 23 |
| UCUUUAGUGUCUGAAUAUAUC | 874 | uscsuuuaGfuGfUfCfugaauauaucL96 | 1970 | sense | 21 |
| GAUAUAUUCAGACACUAAAGAUG | 875 | gsAfsuauAfuUfCfagacAfcUfaaagasusg | 1971 | antisense | 23 |
| CUUUAGUGUCUGAAUAUAUCC | 876 | csusuuagUfgUfCfUfgaauauauccL96 | 1972 | sense | 21 |
| GGAUAUAUUCAGACACUAAAGAU | 877 | gsGfsauaUfaUfUfcagaCfaCfuaaagsasu | 1973 | antisense | 23 |
| CACAUCUUUAGUGUCUGAAUA | 878 | csascaucUfuUfAfGfugucugaauaL96 | 1974 | sense | 21 |
| UAUUCAGACACUAAAGAUGUGAU | 879 | usAfsuucAfgAfCfacuaAfaGfaugugsasu | 1975 | antisense | 23 |
| UCACAUCUUUAGUGUCUGAAU | 880 | uscsacauCfuUfUfAfgugucugaauL96 | 1976 | sense | 21 |
| AUUCAGACACUAAAGAUGUGAUU | 881 | asUfsucaGfaCfAfcuaaAfgAfugugasusu | 1977 | antisense | 23 |
| UGAUACUUCUUUGAAUGUAGA | 882 | usgsauacUfuCfUfUfugaauguagaL96 | 1978 | sense | 21 |
| UCUACAUUCAAAGAAGUAUCACC | 883 | usCfsuacAfuUfCfaaagAfaGfuaucascsc | 1979 | antisense | 23 |
| GAUACUUCUUUGAAUGUAGAU | 884 | gsasuacuUfcUfUfUfgaauguagauL96 | 1980 | sense | 21 |
| AUCUACAUUCAAAGAAGUAUCAC | 885 | asUfscuaCfaUfUfcaaaGfaAfguaucsasc | 1981 | antisense | 23 |
| UUGGUGAUACUUCUUUGAAUG | 886 | ususggugAfuAfCfUfucuuugaaugL96 | 1982 | sense | 21 |
| CAUUCAAAGAAGUAUCACCAAUU | 887 | csAfsuucAfaAfGfaaguAfuCfaccaasusu | 1983 | antisense | 23 |
| AUUGGUGAUACUUCUUUGAAU | 888 | asusugguGfaUfAfCfuucuuugaauL96 | 1984 | sense | 21 |
| AUUCAAAGAAGUAUCACCAAUUA | 889 | asUfsucaAfaGfAfaguaUfcAfccaaususa | 1985 | antisense | 23 |
| AAUAACCUGUGAAAAUGCUCC | 890 | asasuaacCfuGfUfGfaaaaugcuccL96 | 1986 | sense | 21 |
| GGAGCAUUUUCACAGGUUAUUGC | 891 | gsGfsagcAfuUfUfucacAfgGfuuauusgsc | 1987 | antisense | 23 |
| AUAACCUGUGAAAAUGCUCCC | 892 | asusaaccUfgUfGfAfaaaugcucccL96 | 1988 | sense | 21 |
| GGGAGCAUUUUCACAGGUUAUUG | 893 | gsGfsgagCfaUfUfuucaCfaGfguuaususg | 1989 | antisense | 23 |
| UAGCAAUAACCUGUGAAAAUG | 894 | usasgcaaUfaAfCfCfugugaaaaugL96 | 1990 | sense | 21 |
| CAUUUUCACAGGUUAUUGCUAUC | 895 | csAfsuuuUfcAfCfagguUfaUfugcuasusc | 1991 | antisense | 23 |
| AUAGCAAUAACCUGUGAAAAU | 896 | asusagcaAfuAfAfCfcugugaaaauL96 | 1992 | sense | 21 |
| AUUUUCACAGGUUAUUGCUAUCC | 897 | asUfsuuuCfaCfAfgguuAfuUfgcuauscsc | 1993 | antisense | 23 |
| AAUCACAUCUUUAGUGUCUGA | 898 | asasucacAfuCfUfUfuagugucugaL96 | 1994 | sense | 21 |
| UCAGACACUAAAGAUGUGAUUGG | 899 | usCfsagaCfaCfUfaaagAfuGfugauusgsg | 1995 | antisense | 23 |
| AUCACAUCUUUAGUGUCUGAA | 900 | asuscacaUfcUfUfUfagugucugaaL96 | 1996 | sense | 21 |
| UUCAGACACUAAAGAUGUGAUUG | 901 | usUfscagAfcAfCfuaaaGfaUfgugaususg | 1997 | antisense | 23 |
| UUCCAAUCACAUCUUUAGUGU | 902 | ususccaaUfcAfCfAfucuuuaguguL96 | 1998 | sense | 21 |
| ACACUAAAGAUGUGAUUGGAAAU | 903 | asCfsacuAfaAfGfauguGfaUfuggaasasu | 1999 | antisense | 23 |
| UUUCCAAUCACAUCUUUAGUG | 904 | ususuccaAfuCfAfCfaucuuuagugL96 | 2000 | sense | 21 |
| CACUAAAGAUGUGAUUGGAAAUC | 905 | csAfscuaAfaGfAfugugAfuUfggaaasusc | 2001 | antisense | 23 |
| ACGGGCAUGAUGUUGAGUUCC | 906 | ascsgggcAfuGfAfUfguugaguuccL96 | 2002 | sense | 21 |
| GGAACUCAACAUCAUGCCCGUUC | 907 | gsGfsaacUfcAfAfcaucAfuGfcccgususc | 2003 | antisense | 23 |
| CGGGCAUGAUGUUGAGUUCCU | 908 | csgsggcaUfgAfUfGfuugaguuccuL96 | 2004 | sense | 21 |
| AGGAACUCAACAUCAUGCCCGUU | 909 | asGfsgaaCfuCfAfacauCfaUfgcccgsusu | 2005 | antisense | 23 |
| GGGAACGGGCAUGAUGUUGAG | 910 | gsgsgaacGfgGfCfAfugauguugagL96 | 2006 | sense | 21 |
| CUCAACAUCAUGCCCGUUCCCAG | 911 | csUfscaaCfaUfCfaugcCfcGfuucccsasg | 2007 | antisense | 23 |
| UGGGAACGGGCAUGAUGUUGA | 912 | usgsggaaCfgGfGfCfaugauguugaL96 | 2008 | sense | 21 |
| UCAACAUCAUGCCCGUUCCCAGG | 913 | usCfsaacAfuCfAfugccCfgUfucccasgsg | 2009 | antisense | 23 |
| ACUAAGGUGAAAAGAUAAUGA | 914 | ascsuaagGfuGfAfAfaagauaaugaL96 | 2010 | sense | 21 |
| UCAUUAUCUUUUCACCUUAGUGU | 915 | usCfsauuAfuCfUfuuucAfcCfuuagusgsu | 2011 | antisense | 23 |
| CUAAGGUGAAAAGAUAAUGAU | 916 | csusaaggUfgAfAfAfagauaaugauL96 | 2012 | sense | 21 |
| AUCAUUAUCUUUUCACCUUAGUG | 917 | asUfscauUfaUfCfuuuuCfaCfcuuagsusg | 2013 | antisense | 23 |
| AAACACUAAGGUGAAAAGAUA | 918 | asasacacUfaAfGfGfugaaaagauaL96 | 2014 | sense | 21 |
| UAUCUUUUCACCUUAGUGUUUGC | 919 | usAfsucuUfuUfCfaccuUfaGfuguuusgsc | 2015 | antisense | 23 |
| CAAACACUAAGGUGAAAAGAU | 920 | csasaacaCfuAfAfGfgugaaaagauL96 | 2016 | sense | 21 |
| AUCUUUUCACCUUAGUGUUUGCU | 921 | asUfscuuUfuCfAfccuuAfgUfguuugscsu | 2017 | antisense | 23 |
| AGGUAGCACUGGAGAGAAUUG | 922 | asgsguagCfaCfUfGfgagagaauugL96 | 2018 | sense | 21 |
| CAAUUCUCUCCAGUGCUACCUUC | 923 | csAfsauuCfuCfUfccagUfgCfuaccususc | 2019 | antisense | 23 |
| GGUAGCACUGGAGAGAAUUGG | 924 | gsgsuagcAfcUfGfGfagagaauuggL96 | 2020 | sense | 21 |
| CCAAUUCUCUCCAGUGCUACCUU | 925 | csCfsaauUfcUfCfuccaGfuGfcuaccsusu | 2021 | antisense | 23 |
| GAGAAGGUAGCACUGGAGAGA | 926 | gsasgaagGfuAfGfCfacuggagagaL96 | 2022 | sense | 21 |
| UCUCUCCAGUGCUACCUUCUCAA | 927 | usCfsucuCfcAfGfugcuAfcCfuucucsasa | 2023 | antisense | 23 |
| UGAGAAGGUAGCACUGGAGAG | 928 | usgsagaaGfgUfAfGfcacuggagagL96 | 2024 | sense | 21 |
| CUCUCCAGUGCUACCUUCUCAAA | 929 | csUfscucCfaGfUfgcuaCfcUfucucasasa | 2025 | antisense | 23 |
| AGUGGACUUGCUGCAUAUGUG | 930 | asgsuggaCfuUfGfCfugcauaugugL96 | 2026 | sense | 21 |
| CACAUAUGCAGCAAGUCCACUGU | 931 | csAfscauAfuGfCfagcaAfgUfccacusgsu | 2027 | antisense | 23 |
| GUGGACUUGCUGCAUAUGUGG | 932 | gsusggacUfuGfCfUfgcauauguggL96 | 2028 | sense | 21 |
| CCACAUAUGCAGCAAGUCCACUG | 933 | csCfsacaUfaUfGfcagcAfaGfuccacsusg | 2029 | antisense | 23 |
| CGACAGUGGACUUGCUGCAUA | 934 | csgsacagUfgGfAfCfuugcugcauaL96 | 2030 | sense | 21 |
| UAUGCAGCAAGUCCACUGUCGUC | 935 | usAfsugcAfgCfAfagucCfaCfugucgsusc | 2031 | antisense | 23 |
| ACGACAGUGGACUUGCUGCAU | 936 | ascsgacaGfuGfGfAfcuugcugcauL96 | 2032 | sense | 21 |
| AUGCAGCAAGUCCACUGUCGUCU | 937 | asUfsgcaGfcAfAfguccAfcUfgucguscsu | 2033 | antisense | 23 |
| AAGGUGUUCAAGAUGUCCUCG | 938 | asasggugUfuCfAfAfgauguccucgL96 | 2034 | sense | 21 |
| CGAGGACAUCUUGAACACCUUUC | 939 | csGfsaggAfcAfUfcuugAfaCfaccuususc | 2035 | antisense | 23 |
| AGGUGUUCAAGAUGUCCUCGA | 940 | asgsguguUfcAfAfGfauguccucgaL96 | 2036 | sense | 21 |
| UCGAGGACAUCUUGAACACCUUU | 941 | usCfsgagGfaCfAfucuuGfaAfcaccususu | 2037 | antisense | 23 |
| GAGAAAGGUGUUCAAGAUGUC | 942 | gsasgaaaGfgUfGfUfucaagaugucL96 | 2038 | sense | 21 |
| GACAUCUUGAACACCUUUCUCCC | 943 | gsAfscauCfuUfGfaacaCfcUfuucucscsc | 2039 | antisense | 23 |
| GGAGAAAGGUGUUCAAGAUGU | 944 | gsgsagaaAfgGfUfGfuucaagauguL96 | 2040 | sense | 21 |
| ACAUCUUGAACACCUUUCUCCCC | 945 | asCfsaucUfuGfAfacacCfuUfucuccscsc | 2041 | antisense | 23 |
| AACCGUCUGGAUGAUGUGCGU | 946 | asasccguCfuGfGfAfugaugugcguL96 | 2042 | sense | 21 |
| ACGCACAUCAUCCAGACGGUUGC | 947 | asCfsgcaCfaUfCfauccAfgAfcgguusgsc | 2043 | antisense | 23 |
| ACCGUCUGGAUGAUGUGCGUA | 948 | ascscgucUfgGfAfUfgaugugcguaL96 | 2044 | sense | 21 |
| UACGCACAUCAUCCAGACGGUUG | 949 | usAfscgcAfcAfUfcaucCfaGfacggususg | 2045 | antisense | 23 |
| GGGCAACCGUCUGGAUGAUGU | 950 | gsgsgcaaCfcGfUfCfuggaugauguL96 | 2046 | sense | 21 |
| ACAUCAUCCAGACGGUUGCCCAG | 951 | asCfsaucAfuCfCfagacGfgUfugcccsasg | 2047 | antisense | 23 |
| UGGGCAACCGUCUGGAUGAUG | 952 | usgsggcaAfcCfGfUfcuggaugaugL96 | 2048 | sense | 21 |
| CAUCAUCCAGACGGUUGCCCAGG | 953 | csAfsucaUfcCfAfgacgGfuUfgcccasgsg | 2049 | antisense | 23 |
| GAAACUUUGGCUGAUAAUAUU | 954 | gsasaacuUfuGfGfCfugauaauauuL96 | 2050 | sense | 21 |
| AAUAUUAUCAGCCAAAGUUUCUU | 955 | asAfsuauUfaUfCfagccAfaAfguuucsusu | 2051 | antisense | 23 |
| AAACUUUGGCUGAUAAUAUUG | 956 | asasacuuUfgGfCfUfgauaauauugL96 | 2052 | sense | 21 |
| CAAUAUUAUCAGCCAAAGUUUCU | 957 | csAfsauaUfuAfUfcagcCfaAfaguuuscsu | 2053 | antisense | 23 |
| UGAAGAAACUUUGGCUGAUAA | 958 | usgsaagaAfaCfUfUfuggcugauaaL96 | 2054 | sense | 21 |
| UUAUCAGCCAAAGUUUCUUCAUC | 959 | usUfsaucAfgCfCfaaagUfuUfcuucasusc | 2055 | antisense | 23 |
| AUGAAGAAACUUUGGCUGAUA | 960 | asusgaagAfaAfCfUfuuggcugauaL96 | 2056 | sense | 21 |
| UAUCAGCCAAAGUUUCUUCAUCA | 961 | usAfsucaGfcCfAfaaguUfuCfuucauscsa | 2057 | antisense | 23 |
| AAAGGUGUUCAAGAUGUCCUC | 962 | asasagguGfuUfCfAfagauguccucL96 | 2058 | sense | 21 |
| GAGGACAUCUUGAACACCUUUCU | 963 | gsAfsggaCfaUfCfuugaAfcAfccuuuscsu | 2059 | antisense | 23 |
| AAGGUGUUCAAGAUGUCCUCG | 964 | asasggugUfuCfAfAfgauguccucgL96 | 2060 | sense | 21 |
| CGAGGACAUCUUGAACACCUUUC | 965 | csGfsaggAfcAfUfcuugAfaCfaccuususc | 2061 | antisense | 23 |
| GGAGAAAGGUGUUCAAGAUGU | 966 | gsgsagaaAfgGfUfGfuucaagauguL96 | 2062 | sense | 21 |
| ACAUCUUGAACACCUUUCUCCCC | 967 | asCfsaucUfuGfAfacacCfuUfucuccscsc | 2063 | antisense | 23 |
| GGGAGAAAGGUGUUCAAGAUG | 968 | gsgsgagaAfaGfGfUfguucaagaugL96 | 2064 | sense | 21 |
| CAUCUUGAACACCUUUCUCCCCC | 969 | csAfsucuUfgAfAfcaccUfuUfcucccscsc | 2065 | antisense | 23 |
| AAAUCAGUACUUCCAAAGUCU | 970 | asasaucaGfuAfCfUfuccaaagucuL96 | 2066 | sense | 21 |
| AGACUUUGGAAGUACUGAUUUAG | 971 | asGfsacuUfuGfGfaaguAfcUfgauuusasg | 2067 | antisense | 23 |
| AAUCAGUACUUCCAAAGUCUA | 972 | asasucagUfaCfUfUfccaaagucuaL96 | 2068 | sense | 21 |
| UAGACUUUGGAAGUACUGAUUUA | 973 | usAfsgacUfuUfGfgaagUfaCfugauususa | 2069 | antisense | 23 |
| UGCUAAAUCAGUACUUCCAAA | 974 | usgscuaaAfuCfAfGfuacuuccaaaL96 | 2070 | sense | 21 |
| UUUGGAAGUACUGAUUUAGCAUG | 975 | usUfsuggAfaGfUfacugAfuUfuagcasusg | 2071 | antisense | 23 |
| AUGCUAAAUCAGUACUUCCAA | 976 | asusgcuaAfaUfCfAfguacuuccaaL96 | 2072 | sense | 21 |
| UUGGAAGUACUGAUUUAGCAUGU | 977 | usUfsggaAfgUfAfcugaUfuUfagcausgsu | 2073 | antisense | 23 |
| ACAUCUUUAGUGUCUGAAUAU | 978 | ascsaucuUfuAfGfUfgucugaauauL96 | 2074 | sense | 21 |
| AUAUUCAGACACUAAAGAUGUGA | 979 | asUfsauuCfaGfAfcacuAfaAfgaugusgsa | 2075 | antisense | 23 |
| CAUCUUUAGUGUCUGAAUAUA | 980 | csasucuuUfaGfUfGfucugaauauaL96 | 2076 | sense | 21 |
| UAUAUUCAGACACUAAAGAUGUG | 981 | usAfsuauUfcAfGfacacUfaAfagaugsusg | 2077 | antisense | 23 |
| AAUCACAUCUUUAGUGUCUGA | 982 | asasucacAfuCfUfUfuagugucugaL96 | 2078 | sense | 21 |
| UCAGACACUAAAGAUGUGAUUGG | 983 | usCfsagaCfaCfUfaaagAfuGfugauusgsg | 2079 | antisense | 23 |
| CAAUCACAUCUUUAGUGUCUG | 984 | csasaucaCfaUfCfUfuuagugucugL96 | 2080 | sense | 21 |
| CAGACACUAAAGAUGUGAUUGGA | 985 | csAfsgacAfcUfAfaagaUfgUfgauugsgsa | 2081 | antisense | 23 |
| GCAUGUAUUACUUGACAAAGA | 986 | gscsauguAfuUfAfCfuugacaaagaL96 | 2082 | sense | 21 |
| UCUUUGUCAAGUAAUACAUGCUG | 987 | usCfsuuuGfuCfAfaguaAfuAfcaugcsusg | 2083 | antisense | 23 |
| CAUGUAUUACUUGACAAAGAG | 988 | csasuguaUfuAfCfUfugacaaagagL96 | 2084 | sense | 21 |
| CUCUUUGUCAAGUAAUACAUGCU | 989 | csUfscuuUfgUfCfaaguAfaUfacaugscsu | 2085 | antisense | 23 |
| UUCAGCAUGUAUUACUUGACA | 990 | ususcagcAfuGfUfAfuuacuugacaL96 | 2086 | sense | 21 |
| UGUCAAGUAAUACAUGCUGAAAA | 991 | usGfsucaAfgUfAfauacAfuGfcugaasasa | 2087 | antisense | 23 |
| UUUCAGCAUGUAUUACUUGAC | 992 | ususucagCfaUfGfUfauuacuugacL96 | 2088 | sense | 21 |
| GUCAAGUAAUACAUGCUGAAAAA | 993 | gsUfscaaGfuAfAfuacaUfgCfugaaasasa | 2089 | antisense | 23 |
| AUGUUACUUCUUAGAGAGAAA | 994 | asusguuaCfuUfCfUfuagagagaaaL96 | 2090 | sense | 21 |
| UUUCUCUCUAAGAAGUAACAUAC | 995 | usUfsucuCfuCfUfaagaAfgUfaacausasc | 2091 | antisense | 23 |
| UGUUACUUCUUAGAGAGAAAU | 996 | usgsuuacUfuCfUfUfagagagaaauL96 | 2092 | sense | 21 |
| AUUUCUCUCUAAGAAGUAACAUA | 997 | asUfsuucUfcUfCfuaagAfaGfuaacasusa | 2093 | antisense | 23 |
| AUGUAUGUUACUUCUUAGAGA | 998 | asusguauGfuUfAfCfuucuuagagaL96 | 2094 | sense | 21 |
| UCUCUAAGAAGUAACAUACAUCC | 999 | usCfsucuAfaGfAfaguaAfcAfuacauscsc | 2095 | antisense | 23 |
| GAUGUAUGUUACUUCUUAGAG | 1000 | gsasuguaUfgUfUfAfcuucuuagagL96 | 2096 | sense | 21 |
| CUCUAAGAAGUAACAUACAUCCU | 1001 | csUfscuaAfgAfAfguaaCfaUfacaucscsu | 2097 | antisense | 23 |
| ACAACUUUGAGAAGGUAGCAC | 1002 | ascsaacuUfuGfAfGfaagguagcacL96 | 2098 | sense | 21 |
| GUGCUACCUUCUCAAAGUUGUGA | 1003 | gsUfsgcuAfcCfUfucucAfaAfguugusgsa | 2099 | antisense | 23 |
| CAACUUUGAGAAGGUAGCACU | 1004 | csasacuuUfgAfGfAfagguagcacuL96 | 2100 | sense | 21 |
| AGUGCUACCUUCUCAAAGUUGUG | 1005 | asGfsugcUfaCfCfuucuCfaAfaguugsusg | 2101 | antisense | 23 |
| AUUCACAACUUUGAGAAGGUA | 1006 | asusucacAfaCfUfUfugagaagguaL96 | 2102 | sense | 21 |
| UACCUUCUCAAAGUUGUGAAUCA | 1007 | usAfsccuUfcUfCfaaagUfuGfugaauscsa | 2103 | antisense | 23 |
| GAUUCACAACUUUGAGAAGGU | 1008 | gsasuucaCfaAfCfUfuugagaagguL96 | 2104 | sense | 21 |
| ACCUUCUCAAAGUUGUGAAUCAG | 1009 | asCfscuuCfuCfAfaaguUfgUfgaaucsasg | 2105 | antisense | 23 |
| AACAUGCUAAAUCAGUACUUC | 1010 | asascaugCfuAfAfAfucaguacuucL96 | 2106 | sense | 21 |
| GAAGUACUGAUUUAGCAUGUUGU | 1011 | gsAfsaguAfcUfGfauuuAfgCfauguusgsu | 2107 | antisense | 23 |
| ACAUGCUAAAUCAGUACUUCC | 1012 | ascsaugcUfaAfAfUfcaguacuuccL96 | 2108 | sense | 21 |
| GGAAGUACUGAUUUAGCAUGUUG | 1013 | gsGfsaagUfaCfUfgauuUfaGfcaugususg | 2109 | antisense | 23 |
| GAACAACAUGCUAAAUCAGUA | 1014 | gsasacaaCfaUfGfCfuaaaucaguaL96 | 2110 | sense | 21 |
| UACUGAUUUAGCAUGUUGUUCAU | 1015 | usAfscugAfuUfUfagcaUfgUfuguucsasu | 2111 | antisense | 23 |
| UGAACAACAUGCUAAAUCAGU | 1016 | usgsaacaAfcAfUfGfcuaaaucaguL96 | 2112 | sense | 21 |
| ACUGAUUUAGCAUGUUGUUCAUA | 1017 | asCfsugaUfuUfAfgcauGfuUfguucasusa | 2113 | antisense | 23 |
| AAACCAGUACUUUAUCAUUUU | 1018 | asasaccaGfuAfCfUfuuaucauuuuL96 | 2114 | sense | 21 |
| AAAAUGAUAAAGUACUGGUUUCA | 1019 | asAfsaauGfaUfAfaaguAfcUfgguuuscsa | 2115 | antisense | 23 |
| AACCAGUACUUUAUCAUUUUC | 1020 | asasccagUfaCfUfUfuaucauuuucL96 | 2116 | sense | 21 |
| GAAAAUGAUAAAGUACUGGUUUC | 1021 | gsAfsaaaUfgAfUfaaagUfaCfugguususc | 2117 | antisense | 23 |
| UUUGAAACCAGUACUUUAUCA | 1022 | ususugaaAfcCfAfGfuacuuuaucaL96 | 2118 | sense | 21 |
| UGAUAAAGUACUGGUUUCAAAAU | 1023 | usGfsauaAfaGfUfacugGfuUfucaaasasu | 2119 | antisense | 23 |
| UUUUGAAACCAGUACUUUAUC | 1024 | ususuugaAfaCfCfAfguacuuuaucL96 | 2120 | sense | 21 |
| GAUAAAGUACUGGUUUCAAAAUU | 1025 | gsAfsuaaAfgUfAfcuggUfuUfcaaaasusu | 2121 | antisense | 23 |
| GAGAAGAUGGGCUACAAGGCC | 1026 | gsasgaagAfuGfGfGfcuacaaggccL96 | 2122 | sense | 21 |
| GGCCUUGUAGCCCAUCUUCUCUG | 1027 | gsGfsccuUfgUfAfgcccAfuCfuucucsusg | 2123 | antisense | 23 |
| AGAAGAUGGGCUACAAGGCCA | 1028 | asgsaagaUfgGfGfCfuacaaggccaL96 | 2124 | sense | 21 |
| UGGCCUUGUAGCCCAUCUUCUCU | 1029 | usGfsgccUfuGfUfagccCfaUfcuucuscsu | 2125 | antisense | 23 |
| GGCAGAGAAGAUGGGCUACAA | 1030 | gsgscagaGfaAfGfAfugggcuacaaL96 | 2126 | sense | 21 |
| UUGUAGCCCAUCUUCUCUGCCUG | 1031 | usUfsguaGfcCfCfaucuUfcUfcugccsusg | 2127 | antisense | 23 |
| AGGCAGAGAAGAUGGGCUACA | 1032 | asgsgcagAfgAfAfGfaugggcuacaL96 | 2128 | sense | 21 |
| UGUAGCCCAUCUUCUCUGCCUGC | 1033 | usGfsuagCfcCfAfucuuCfuCfugccusgsc | 2129 | antisense | 23 |
| AACGGGCAUGAUGUUGAGUUC | 1034 | asascgggCfaUfGfAfuguugaguucL96 | 2130 | sense | 21 |
| GAACUCAACAUCAUGCCCGUUCC | 1035 | gsAfsacuCfaAfCfaucaUfgCfccguuscsc | 2131 | antisense | 23 |
| ACGGGCAUGAUGUUGAGUUCC | 1036 | ascsgggcAfuGfAfUfguugaguuccL96 | 2132 | sense | 21 |
| GGAACUCAACAUCAUGCCCGUUC | 1037 | gsGfsaacUfcAfAfcaucAfuGfcccgususc | 2133 | antisense | 23 |
| UGGGAACGGGCAUGAUGUUGA | 1038 | usgsggaaCfgGfGfCfaugauguugaL96 | 2134 | sense | 21 |
| UCAACAUCAUGCCCGUUCCCAGG | 1039 | usCfsaacAfuCfAfugccCfgUfucccasgsg | 2135 | antisense | 23 |
| CUGGGAACGGGCAUGAUGUUG | 1040 | csusgggaAfcGfGfGfcaugauguugL96 | 2136 | sense | 21 |
| CAACAUCAUGCCCGUUCCCAGGG | 1041 | csAfsacaUfcAfUfgcccGfuUfcccagsgsg | 2137 | antisense | 23 |
| AUGUGGCUAAAGCAAUAGACC | 1042 | asusguggCfuAfAfAfgcaauagaccL96 | 2138 | sense | 21 |
| GGUCUAUUGCUUUAGCCACAUAU | 1043 | gsGfsucuAfuUfGfcuuuAfgCfcacausasu | 2139 | antisense | 23 |
| UGUGGCUAAAGCAAUAGACCC | 1044 | usgsuggcUfaAfAfGfcaauagacccL96 | 2140 | sense | 21 |
| GGGUCUAUUGCUUUAGCCACAUA | 1045 | gsGfsgucUfaUfUfgcuuUfaGfccacasusa | 2141 | antisense | 23 |
| GCAUAUGUGGCUAAAGCAAUA | 1046 | gscsauauGfuGfGfCfuaaagcaauaL96 | 2142 | sense | 21 |
| UAUUGCUUUAGCCACAUAUGCAG | 1047 | usAfsuugCfuUfUfagccAfcAfuaugcsasg | 2143 | antisense | 23 |
| UGCAUAUGUGGCUAAAGCAAU | 1048 | usgscauaUfgUfGfGfcuaaagcaauL96 | 2144 | sense | 21 |
| AUUGCUUUAGCCACAUAUGCAGC | 1049 | asUfsugcUfuUfAfgccaCfaUfaugcasgsc | 2145 | antisense | 23 |
| AGGAUGCUCCGGAAUGUUGCU | 1050 | asgsgaugCfuCfCfGfgaauguugcuL96 | 2146 | sense | 21 |
| AGCAACAUUCCGGAGCAUCCUUG | 1051 | asGfscaaCfaUfUfccggAfgCfauccususg | 2147 | antisense | 23 |
| GGAUGCUCCGGAAUGUUGCUG | 1052 | gsgsaugcUfcCfGfGfaauguugcugL96 | 2148 | sense | 21 |
| CAGCAACAUUCCGGAGCAUCCUU | 1053 | csAfsgcaAfcAfUfuccgGfaGfcauccsusu | 2149 | antisense | 23 |
| UCCAAGGAUGCUCCGGAAUGU | 1054 | uscscaagGfaUfGfCfuccggaauguL96 | 2150 | sense | 21 |
| ACAUUCCGGAGCAUCCUUGGAUA | 1055 | asCfsauuCfcGfGfagcaUfcCfuuggasusa | 2151 | antisense | 23 |
| AUCCAAGGAUGCUCCGGAAUG | 1056 | asusccaaGfgAfUfGfcuccggaaugL96 | 2152 | sense | 21 |
| CAUUCCGGAGCAUCCUUGGAUAC | 1057 | csAfsuucCfgGfAfgcauCfcUfuggausasc | 2153 | antisense | 23 |
| UCACAUCUUUAGUGUCUGAAU | 1058 | uscsacauCfuUfUfAfgugucugaauL96 | 2154 | sense | 21 |
| AUUCAGACACUAAAGAUGUGAUU | 1059 | asUfsucaGfaCfAfcuaaAfgAfugugasusu | 2155 | antisense | 23 |
| CACAUCUUUAGUGUCUGAAUA | 1060 | csascaucUfuUfAfGfugucugaauaL96 | 2156 | sense | 21 |
| UAUUCAGACACUAAAGAUGUGAU | 1061 | usAfsuucAfgAfCfacuaAfaGfaugugsasu | 2157 | antisense | 23 |
| CCAAUCACAUCUUUAGUGUCU | 1062 | cscsaaucAfcAfUfCfuuuagugucuL96 | 2158 | sense | 21 |
| AGACACUAAAGAUGUGAUUGGAA | 1063 | asGfsacaCfuAfAfagauGfuGfauuggsasa | 2159 | antisense | 23 |
| UCCAAUCACAUCUUUAGUGUC | 1064 | uscscaauCfaCfAfUfcuuuagugucL96 | 2160 | sense | 21 |
| GACACUAAAGAUGUGAUUGGAAA | 1065 | gsAfscacUfaAfAfgaugUfgAfuuggasasa | 2161 | antisense | 23 |
| AAAUGUGUUUAGACAACGUCA | 1066 | asasauguGfuUfUfAfgacaacgucaL96 | 2162 | sense | 21 |
| UGACGUUGUCUAAACACAUUUUC | 1067 | usGfsacgUfuGfUfcuaaAfcAfcauuususc | 2163 | antisense | 23 |
| AAUGUGUUUAGACAACGUCAU | 1068 | asasugugUfuUfAfGfacaacgucauL96 | 2164 | sense | 21 |
| AUGACGUUGUCUAAACACAUUUU | 1069 | asUfsgacGfuUfGfucuaAfaCfacauususu | 2165 | antisense | 23 |
| UUGAAAAUGUGUUUAGACAAC | 1070 | ususgaaaAfuGfUfGfuuuagacaacL96 | 2166 | sense | 21 |
| GUUGUCUAAACACAUUUUCAAUG | 1071 | gsUfsuguCfuAfAfacacAfuUfuucaasusg | 2167 | antisense | 23 |
| AUUGAAAAUGUGUUUAGACAA | 1072 | asusugaaAfaUfGfUfguuuagacaaL96 | 2168 | sense | 21 |
| UUGUCUAAACACAUUUUCAAUGU | 1073 | usUfsgucUfaAfAfcacaUfuUfucaausgsu | 2169 | antisense | 23 |
| UACUAAAGGAAGAAUUCCGGU | 1074 | usascuaaAfgGfAfAfgaauuccgguL96 | 2170 | sense | 21 |
| ACCGGAAUUCUUCCUUUAGUAUC | 1075 | asCfscggAfaUfUfcuucCfuUfuaguasusc | 2171 | antisense | 23 |
| ACUAAAGGAAGAAUUCCGGUU | 1076 | ascsuaaaGfgAfAfGfaauuccgguuL96 | 2172 | sense | 21 |
| AACCGGAAUUCUUCCUUUAGUAU | 1077 | asAfsccgGfaAfUfucuuCfcUfuuagusasu | 2173 | antisense | 23 |
| GAGAUACUAAAGGAAGAAUUC | 1078 | gsasgauaCfuAfAfAfggaagaauucL96 | 2174 | sense | 21 |
| GAAUUCUUCCUUUAGUAUCUCGA | 1079 | gsAfsauuCfuUfCfcuuuAfgUfaucucsgsa | 2175 | antisense | 23 |
| CGAGAUACUAAAGGAAGAAUU | 1080 | csgsagauAfcUfAfAfaggaagaauuL96 | 2176 | sense | 21 |
| AAUUCUUCCUUUAGUAUCUCGAG | 1081 | asAfsuucUfuCfCfuuuaGfuAfucucgsasg | 2177 | antisense | 23 |
| AACUUUGGCUGAUAAUAUUGC | 1082 | asascuuuGfgCfUfGfauaauauugcL96 | 2178 | sense | 21 |
| GCAAUAUUAUCAGCCAAAGUUUC | 1083 | gsCfsaauAfuUfAfucagCfcAfaaguususc | 2179 | antisense | 23 |
| ACUUUGGCUGAUAAUAUUGCA | 1084 | ascsuuugGfcUfGfAfuaauauugcaL96 | 2180 | sense | 21 |
| UGCAAUAUUAUCAGCCAAAGUUU | 1085 | usGfscaaUfaUfUfaucaGfcCfaaagususu | 2181 | antisense | 23 |
| AAGAAACUUUGGCUGAUAAUA | 1086 | asasgaaaCfuUfUfGfgcugauaauaL96 | 2182 | sense | 21 |
| UAUUAUCAGCCAAAGUUUCUUCA | 1087 | usAfsuuaUfcAfGfccaaAfgUfuucuuscsa | 2183 | antisense | 23 |
| GAAGAAACUUUGGCUGAUAAU | 1088 | gsasagaaAfcUfUfUfggcugauaauL96 | 2184 | sense | 21 |
| AUUAUCAGCCAAAGUUUCUUCAU | 1089 | asUfsuauCfaGfCfcaaaGfuUfucuucsasu | 2185 | antisense | 23 |
| AAAUGGCUGAGAAGACUGACA | 1090 | asasauggCfuGfAfGfaagacugacaL96 | 2186 | sense | 21 |
| UGUCAGUCUUCUCAGCCAUUUGA | 1091 | usGfsucaGfuCfUfucucAfgCfcauuusgsa | 2187 | antisense | 23 |
| AAUGGCUGAGAAGACUGACAU | 1092 | asasuggcUfgAfGfAfagacugacauL96 | 2188 | sense | 21 |
| AUGUCAGUCUUCUCAGCCAUUUG | 1093 | asUfsgucAfgUfCfuucuCfaGfccauususg | 2189 | antisense | 23 |
| UAUCAAAUGGCUGAGAAGACU | 1094 | usasucaaAfuGfGfCfugagaagacuL96 | 2190 | sense | 21 |
| AGUCUUCUCAGCCAUUUGAUAUC | 1095 | asGfsucuUfcUfCfagccAfuUfugauasusc | 2191 | antisense | 23 |
| AUAUCAAAUGGCUGAGAAGAC | 1096 | asusaucaAfaUfGfGfcugagaagacL96 | 2192 | sense | 21 |
| GUCUUCUCAGCCAUUUGAUAUCU | 1097 | gsUfscuuCfuCfAfgccaUfuUfgauauscsu | 2193 | antisense | 23 |
| GUGGUUCUUAAAUUGUAAGCU | 1098 | gsusgguuCfuUfAfAfauuguaagcuL96 | 2194 | sense | 21 |
| AGCUUACAAUUUAAGAACCACUG | 1099 | asGfscuuAfcAfAfuuuaAfgAfaccacsusg | 2195 | antisense | 23 |
| UGGUUCUUAAAUUGUAAGCUC | 1100 | usgsguucUfuAfAfAfuuguaagcucL96 | 2196 | sense | 21 |
| GAGCUUACAAUUUAAGAACCACU | 1101 | gsAfsgcuUfaCfAfauuuAfaGfaaccascsu | 2197 | antisense | 23 |
| AACAGUGGUUCUUAAAUUGUA | 1102 | asascaguGfgUfUfCfuuaaauuguaL96 | 2198 | sense | 21 |
| UACAAUUUAAGAACCACUGUUUU | 1103 | usAfscaaUfuUfAfagaaCfcAfcuguususu | 2199 | antisense | 23 |
| AAACAGUGGUUCUUAAAUUGU | 1104 | asasacagUfgGfUfUfcuuaaauuguL96 | 2200 | sense | 21 |
| ACAAUUUAAGAACCACUGUUUUA | 1105 | asCfsaauUfuAfAfgaacCfaCfuguuususa | 2201 | antisense | 23 |
| AAGUCAUCGACAAGACAUUGG | 1106 | asasgucaUfcGfAfCfaagacauuggL96 | 2202 | sense | 21 |
| CCAAUGUCUUGUCGAUGACUUUC | 1107 | csCfsaauGfuCfUfugucGfaUfgacuususc | 2203 | antisense | 23 |
| AGUCAUCGACAAGACAUUGGU | 1108 | asgsucauCfgAfCfAfagacauugguL96 | 2204 | sense | 21 |
| ACCAAUGUCUUGUCGAUGACUUU | 1109 | asCfscaaUfgUfCfuuguCfgAfugacususu | 2205 | antisense | 23 |
| GUGAAAGUCAUCGACAAGACA | 1110 | gsusgaaaGfuCfAfUfcgacaagacaL96 | 2206 | sense | 21 |
| UGUCUUGUCGAUGACUUUCACAU | 1111 | usGfsucuUfgUfCfgaugAfcUfuucacsasu | 2207 | antisense | 23 |
| UGUGAAAGUCAUCGACAAGAC | 1112 | usgsugaaAfgUfCfAfucgacaagacL96 | 2208 | sense | 21 |
| GUCUUGUCGAUGACUUUCACAUU | 1113 | gsUfscuuGfuCfGfaugaCfuUfucacasusu | 2209 | antisense | 23 |
| GAUAAUAUUGCAGCAUUUUCC | 1114 | gsasuaauAfuUfGfCfagcauuuuccL96 | 2210 | sense | 21 |
| GGAAAAUGCUGCAAUAUUAUCAG | 1115 | gsGfsaaaAfuGfCfugcaAfuAfuuaucsasg | 2211 | antisense | 23 |
| AUAAUAUUGCAGCAUUUUCCA | 1116 | asusaauaUfuGfCfAfgcauuuuccaL96 | 2212 | sense | 21 |
| UGGAAAAUGCUGCAAUAUUAUCA | 1117 | usGfsgaaAfaUfGfcugcAfaUfauuauscsa | 2213 | antisense | 23 |
| GGCUGAUAAUAUUGCAGCAUU | 1118 | gsgscugaUfaAfUfAfuugcagcauuL96 | 2214 | sense | 21 |
| AAUGCUGCAAUAUUAUCAGCCAA | 1119 | asAfsugcUfgCfAfauauUfaUfcagccsasa | 2215 | antisense | 23 |
| UGGCUGAUAAUAUUGCAGCAU | 1120 | usgsgcugAfuAfAfUfauugcagcauL96 | 2216 | sense | 21 |
| AUGCUGCAAUAUUAUCAGCCAAA | 1121 | asUfsgcuGfcAfAfuauuAfuCfagccasasa | 2217 | antisense | 23 |
| GCUAAUUUGUAUCAAUGAUUA | 1122 | gscsuaauUfuGfUfAfucaaugauuaL96 | 2218 | sense | 21 |
| UAAUCAUUGAUACAAAUUAGCCG | 1123 | usAfsaucAfuUfGfauacAfaAfuuagcscsg | 2219 | antisense | 23 |
| CUAAUUUGUAUCAAUGAUUAU | 1124 | csusaauuUfgUfAfUfcaaugauuauL96 | 2220 | sense | 21 |
| AUAAUCAUUGAUACAAAUUAGCC | 1125 | asUfsaauCfaUfUfgauaCfaAfauuagscsc | 2221 | antisense | 23 |
| CCCGGCUAAUUUGUAUCAAUG | 1126 | cscscggcUfaAfUfUfuguaucaaugL96 | 2222 | sense | 21 |
| CAUUGAUACAAAUUAGCCGGGGG | 1127 | csAfsuugAfuAfCfaaauUfaGfccgggsgsg | 2223 | antisense | 23 |
| CCCCGGCUAAUUUGUAUCAAU | 1128 | cscsccggCfuAfAfUfuuguaucaauL96 | 2224 | sense | 21 |
| AUUGAUACAAAUUAGCCGGGGGA | 1129 | asUfsugaUfaCfAfaauuAfgCfcggggsgsa | 2225 | antisense | 23 |
| UAAUUGGUGAUACUUCUUUGA | 1130 | usasauugGfuGfAfUfacuucuuugaL96 | 2226 | sense | 21 |
| UCAAAGAAGUAUCACCAAUUACC | 1131 | usCfsaaaGfaAfGfuaucAfcCfaauuascsc | 2227 | antisense | 23 |
| AAUUGGUGAUACUUCUUUGAA | 1132 | asasuuggUfgAfUfAfcuucuuugaaL96 | 2228 | sense | 21 |
| UUCAAAGAAGUAUCACCAAUUAC | 1133 | usUfscaaAfgAfAfguauCfaCfcaauusasc | 2229 | antisense | 23 |
| GCGGUAAUUGGUGAUACUUCU | 1134 | gscsgguaAfuUfGfGfugauacuucuL96 | 2230 | sense | 21 |
| AGAAGUAUCACCAAUUACCGCCA | 1135 | asGfsaagUfaUfCfaccaAfuUfaccgcscsa | 2231 | antisense | 23 |
| GGCGGUAAUUGGUGAUACUUC | 1136 | gsgscgguAfaUfUfGfgugauacuucL96 | 2232 | sense | 21 |
| GAAGUAUCACCAAUUACCGCCAC | 1137 | gsAfsaguAfuCfAfccaaUfuAfccgccsasc | 2233 | antisense | 23 |
| CAGUGGUUCUUAAAUUGUAAG | 1138 | csasguggUfuCfUfUfaaauuguaagL96 | 2234 | sense | 21 |
| CUUACAAUUUAAGAACCACUGUU | 1139 | csUfsuacAfaUfUfuaagAfaCfcacugsusu | 2235 | antisense | 23 |
| AGUGGUUCUUAAAUUGUAAGC | 1140 | asgsugguUfcUfUfAfaauuguaagcL96 | 2236 | sense | 21 |
| GCUUACAAUUUAAGAACCACUGU | 1141 | gsCfsuuaCfaAfUfuuaaGfaAfccacusgsu | 2237 | antisense | 23 |
| AAAACAGUGGUUCUUAAAUUG | 1142 | asasaacaGfuGfGfUfucuuaaauugL96 | 2238 | sense | 21 |
| CAAUUUAAGAACCACUGUUUUAA | 1143 | csAfsauuUfaAfGfaaccAfcUfguuuusasa | 2239 | antisense | 23 |
| UAAAACAGUGGUUCUUAAAUU | 1144 | usasaaacAfgUfGfGfuucuuaaauuL96 | 2240 | sense | 21 |
| AAUUUAAGAACCACUGUUUUAAA | 1145 | asAfsuuuAfaGfAfaccaCfuGfuuuuasasa | 2241 | antisense | 23 |
| ACCUGUAUUCUGUUUACAUGU | 1146 | ascscuguAfuUfCfUfguuuacauguL96 | 2242 | sense | 21 |
| ACAUGUAAACAGAAUACAGGUUA | 1147 | asCfsaugUfaAfAfcagaAfuAfcaggususa | 2243 | antisense | 23 |
| CCUGUAUUCUGUUUACAUGUC | 1148 | cscsuguaUfuCfUfGfuuuacaugucL96 | 2244 | sense | 21 |
| GACAUGUAAACAGAAUACAGGUU | 1149 | gsAfscauGfuAfAfacagAfaUfacaggsusu | 2245 | antisense | 23 |
| AUUAACCUGUAUUCUGUUUAC | 1150 | asusuaacCfuGfUfAfuucuguuuacL96 | 2246 | sense | 21 |
| GUAAACAGAAUACAGGUUAAUAA | 1151 | gsUfsaaaCfaGfAfauacAfgGfuuaausasa | 2247 | antisense | 23 |
| UAUUAACCUGUAUUCUGUUUA | 1152 | usasuuaaCfcUfGfUfauucuguuuaL96 | 2248 | sense | 21 |
| UAAACAGAAUACAGGUUAAUAAA | 1153 | usAfsaacAfgAfAfuacaGfgUfuaauasasa | 2249 | antisense | 23 |
| AAGAAACUUUGGCUGAUAAUA | 1154 | asasgaaaCfuUfUfGfgcugauaauaL96 | 2250 | sense | 21 |
| UAUUAUCAGCCAAAGUUUCUUCA | 1155 | usAfsuuaUfcAfGfccaaAfgUfuucuuscsa | 2251 | antisense | 23 |
| AGAAACUUUGGCUGAUAAUAU | 1156 | asgsaaacUfuUfGfGfcugauaauauL96 | 2252 | sense | 21 |
| AUAUUAUCAGCCAAAGUUUCUUC | 1157 | asUfsauuAfuCfAfgccaAfaGfuuucususc | 2253 | antisense | 23 |
| GAUGAAGAAACUUUGGCUGAU | 1158 | gsasugaaGfaAfAfCfuuuggcugauL96 | 2254 | sense | 21 |
| AUCAGCCAAAGUUUCUUCAUCAU | 1159 | asUfscagCfcAfAfaguuUfcUfucaucsasu | 2255 | antisense | 23 |
| UGAUGAAGAAACUUUGGCUGA | 1160 | usgsaugaAfgAfAfAfcuuuggcugaL96 | 2256 | sense | 21 |
| UCAGCCAAAGUUUCUUCAUCAUU | 1161 | usCfsagcCfaAfAfguuuCfuUfcaucasusu | 2257 | antisense | 23 |
| GAAAGGUGUUCAAGAUGUCCU | 1162 | gsasaaggUfgUfUfCfaagauguccuL96 | 2258 | sense | 21 |
| AGGACAUCUUGAACACCUUUCUC | 1163 | asGfsgacAfuCfUfugaaCfaCfcuuucsusc | 2259 | antisense | 23 |
| AAAGGUGUUCAAGAUGUCCUC | 1164 | asasagguGfuUfCfAfagauguccucL96 | 2260 | sense | 21 |
| GAGGACAUCUUGAACACCUUUCU | 1165 | gsAfsggaCfaUfCfuugaAfcAfccuuuscsu | 2261 | antisense | 23 |
| GGGAGAAAGGUGUUCAAGAUG | 1166 | gsgsgagaAfaGfGfUfguucaagaugL96 | 2262 | sense | 21 |
| CAUCUUGAACACCUUUCUCCCCC | 1167 | csAfsucuUfgAfAfcaccUfuUfcucccscsc | 2263 | antisense | 23 |
| GGGGAGAAAGGUGUUCAAGAU | 1168 | gsgsggagAfaAfGfGfuguucaagauL96 | 2264 | sense | 21 |
| AUCUUGAACACCUUUCUCCCCCU | 1169 | asUfscuuGfaAfCfaccuUfuCfuccccscsu | 2265 | antisense | 23 |
| AUCUUGGUGUCGAAUCAUGGG | 1170 | asuscuugGfuGfUfCfgaaucaugggL96 | 2266 | sense | 21 |
| CCCAUGAUUCGACACCAAGAUCC | 1171 | csCfscauGfaUfUfcgacAfcCfaagauscsc | 2267 | antisense | 23 |
| UCUUGGUGUCGAAUCAUGGGG | 1172 | uscsuuggUfgUfCfGfaaucauggggL96 | 2268 | sense | 21 |
| CCCCAUGAUUCGACACCAAGAUC | 1173 | csCfsccaUfgAfUfucgaCfaCfcaagasusc | 2269 | antisense | 23 |
| UGGGAUCUUGGUGUCGAAUCA | 1174 | usgsggauCfuUfGfGfugucgaaucaL96 | 2270 | sense | 21 |
| UGAUUCGACACCAAGAUCCCAUU | 1175 | usGfsauuCfgAfCfaccaAfgAfucccasusu | 2271 | antisense | 23 |
| AUGGGAUCUUGGUGUCGAAUC | 1176 | asusgggaUfcUfUfGfgugucgaaucL96 | 2272 | sense | 21 |
| GAUUCGACACCAAGAUCCCAUUC | 1177 | gsAfsuucGfaCfAfccaaGfaUfcccaususc | 2273 | antisense | 23 |
| GCUACAAGGCCAUAUUUGUGA | 1178 | gscsuacaAfgGfCfCfauauuugugaL96 | 2274 | sense | 21 |
| UCACAAAUAUGGCCUUGUAGCCC | 1179 | usCfsacaAfaUfAfuggcCfuUfguagcscsc | 2275 | antisense | 23 |
| CUACAAGGCCAUAUUUGUGAC | 1180 | csusacaaGfgCfCfAfuauuugugacL96 | 2276 | sense | 21 |
| GUCACAAAUAUGGCCUUGUAGCC | 1181 | gsUfscacAfaAfUfauggCfcUfuguagscsc | 2277 | antisense | 23 |
| AUGGGCUACAAGGCCAUAUUU | 1182 | asusgggcUfaCfAfAfggccauauuuL96 | 2278 | sense | 21 |
| AAAUAUGGCCUUGUAGCCCAUCU | 1183 | asAfsauaUfgGfCfcuugUfaGfcccauscsu | 2279 | antisense | 23 |
| GAUGGGCUACAAGGCCAUAUU | 1184 | gsasugggCfuAfCfAfaggccauauuL96 | 2280 | sense | 21 |
| AAUAUGGCCUUGUAGCCCAUCUU | 1185 | asAfsuauGfgCfCfuuguAfgCfccaucsusu | 2281 | antisense | 23 |
| ACUGGAGAGAAUUGGAAUGGG | 1186 | ascsuggaGfaGfAfAfuuggaaugggL96 | 2282 | sense | 21 |
| CCCAUUCCAAUUCUCUCCAGUGC | 1187 | csCfscauUfcCfAfauucUfcUfccagusgsc | 2283 | antisense | 23 |
| CUGGAGAGAAUUGGAAUGGGU | 1188 | csusggagAfgAfAfUfuggaauggguL96 | 2284 | sense | 21 |
| ACCCAUUCCAAUUCUCUCCAGUG | 1189 | asCfsccaUfuCfCfaauuCfuCfuccagsusg | 2285 | antisense | 23 |
| UAGCACUGGAGAGAAUUGGAA | 1190 | usasgcacUfgGfAfGfagaauuggaaL96 | 2286 | sense | 21 |
| UUCCAAUUCUCUCCAGUGCUACC | 1191 | usUfsccaAfuUfCfucucCfaGfugcuascsc | 2287 | antisense | 23 |
| GUAGCACUGGAGAGAAUUGGA | 1192 | gsusagcaCfuGfGfAfgagaauuggaL96 | 2288 | sense | 21 |
| UCCAAUUCUCUCCAGUGCUACCU | 1193 | usCfscaaUfuCfUfcuccAfgUfgcuacscsu | 2289 | antisense | 23 |
| ACAGUGGACACACCUUACCUG | 1194 | ascsagugGfaCfAfCfaccuuaccugL96 | 2290 | sense | 21 |
| CAGGUAAGGUGUGUCCACUGUCA | 1195 | csAfsgguAfaGfGfugugUfcCfacuguscsa | 2291 | antisense | 23 |
| CAGUGGACACACCUUACCUGG | 1196 | csasguggAfcAfCfAfccuuaccuggL96 | 2292 | sense | 21 |
| CCAGGUAAGGUGUGUCCACUGUC | 1197 | csCfsaggUfaAfGfguguGfuCfcacugsusc | 2293 | antisense | 23 |
| UGUGACAGUGGACACACCUUA | 1198 | usgsugacAfgUfGfGfacacaccuuaL96 | 2294 | sense | 21 |
| UAAGGUGUGUCCACUGUCACAAA | 1199 | usAfsaggUfgUfGfuccaCfuGfucacasasa | 2295 | antisense | 23 |
| UUGUGACAGUGGACACACCUU | 1200 | ususgugaCfaGfUfGfgacacaccuuL96 | 2296 | sense | 21 |
| AAGGUGUGUCCACUGUCACAAAU | 1201 | asAfsgguGfuGfUfccacUfgUfcacaasasu | 2297 | antisense | 23 |
| GAAGACUGACAUCAUUGCCAA | 1202 | gsasagacUfgAfCfAfucauugccaaL96 | 2298 | sense | 21 |
| UUGGCAAUGAUGUCAGUCUUCUC | 1203 | usUfsggcAfaUfGfauguCfaGfucuucsusc | 2299 | antisense | 23 |
| AAGACUGACAUCAUUGCCAAU | 1204 | asasgacuGfaCfAfUfcauugccaauL96 | 2300 | sense | 21 |
| AUUGGCAAUGAUGUCAGUCUUCU | 1205 | asUfsuggCfaAfUfgaugUfcAfgucuuscsu | 2301 | antisense | 23 |
| CUGAGAAGACUGACAUCAUUG | 1206 | csusgagaAfgAfCfUfgacaucauugL96 | 2302 | sense | 21 |
| CAAUGAUGUCAGUCUUCUCAGCC | 1207 | csAfsaugAfuGfUfcaguCfuUfcucagscsc | 2303 | antisense | 23 |
| GCUGAGAAGACUGACAUCAUU | 1208 | gscsugagAfaGfAfCfugacaucauuL96 | 2304 | sense | 21 |
| AAUGAUGUCAGUCUUCUCAGCCA | 1209 | asAfsugaUfgUfCfagucUfuCfucagcscsa | 2305 | antisense | 23 |
| GCUCAGGUUCAAAGUGUUGGU | 1210 | gscsucagGfuUfCfAfaaguguugguL96 | 2306 | sense | 21 |
| ACCAACACUUUGAACCUGAGCUU | 1211 | asCfscaaCfaCfUfuugaAfcCfugagcsusu | 2307 | antisense | 23 |
| CUCAGGUUCAAAGUGUUGGUA | 1212 | csuscaggUfuCfAfAfaguguugguaL96 | 2308 | sense | 21 |
| UACCAACACUUUGAACCUGAGCU | 1213 | usAfsccaAfcAfCfuuugAfaCfcugagscsu | 2309 | antisense | 23 |
| GUAAGCUCAGGUUCAAAGUGU | 1214 | gsusaagcUfcAfGfGfuucaaaguguL96 | 2310 | sense | 21 |
| ACACUUUGAACCUGAGCUUACAA | 1215 | asCfsacuUfuGfAfaccuGfaGfcuuacsasa | 2311 | antisense | 23 |
| UGUAAGCUCAGGUUCAAAGUG | 1216 | usgsuaagCfuCfAfGfguucaaagugL96 | 2312 | sense | 21 |
| CACUUUGAACCUGAGCUUACAAU | 1217 | csAfscuuUfgAfAfccugAfgCfuuacasasu | 2313 | antisense | 23 |
| AUGUAUUACUUGACAAAGAGA | 1218 | asusguauUfaCfUfUfgacaaagagaL96 | 2314 | sense | 21 |
| UCUCUUUGUCAAGUAAUACAUGC | 1219 | usCfsucuUfuGfUfcaagUfaAfuacausgsc | 2315 | antisense | 23 |
| UGUAUUACUUGACAAAGAGAC | 1220 | usgsuauuAfcUfUfGfacaaagagacL96 | 2316 | sense | 21 |
| GUCUCUUUGUCAAGUAAUACAUG | 1221 | gsUfscucUfuUfGfucaaGfuAfauacasusg | 2317 | antisense | 23 |
| CAGCAUGUAUUACUUGACAAA | 1222 | csasgcauGfuAfUfUfacuugacaaaL96 | 2318 | sense | 21 |
| UUUGUCAAGUAAUACAUGCUGAA | 1223 | usUfsuguCfaAfGfuaauAfcAfugcugsasa | 2319 | antisense | 23 |
| UCAGCAUGUAUUACUUGACAA | 1224 | uscsagcaUfgUfAfUfuacuugacaaL96 | 2320 | sense | 21 |
| UUGUCAAGUAAUACAUGCUGAAA | 1225 | usUfsgucAfaGfUfaauaCfaUfgcugasasa | 2321 | antisense | 23 |
| CUGCAACUGUAUAUCUACAAG | 1226 | csusgcaaCfuGfUfAfuaucuacaagL96 | 2322 | sense | 21 |
| CUUGUAGAUAUACAGUUGCAGCC | 1227 | csUfsuguAfgAfUfauacAfgUfugcagscsc | 2323 | antisense | 23 |
| UGCAACUGUAUAUCUACAAGG | 1228 | usgscaacUfgUfAfUfaucuacaaggL96 | 2324 | sense | 21 |
| CCUUGUAGAUAUACAGUUGCAGC | 1229 | csCfsuugUfaGfAfuauaCfaGfuugcasgsc | 2325 | antisense | 23 |
| UUGGCUGCAACUGUAUAUCUA | 1230 | ususggcuGfcAfAfCfuguauaucuaL96 | 2326 | sense | 21 |
| UAGAUAUACAGUUGCAGCCAACG | 1231 | usAfsgauAfuAfCfaguuGfcAfgccaascsg | 2327 | antisense | 23 |
| GUUGGCUGCAACUGUAUAUCU | 1232 | gsusuggcUfgCfAfAfcuguauaucuL96 | 2328 | sense | 21 |
| AGAUAUACAGUUGCAGCCAACGA | 1233 | asGfsauaUfaCfAfguugCfaGfccaacsgsa | 2329 | antisense | 23 |
| CAAAUGAUGAAGAAACUUUGG | 1234 | csasaaugAfuGfAfAfgaaacuuuggL96 | 2330 | sense | 21 |
| CCAAAGUUUCUUCAUCAUUUGCC | 1235 | csCfsaaaGfuUfUfcuucAfuCfauuugscsc | 2331 | antisense | 23 |
| AAAUGAUGAAGAAACUUUGGC | 1236 | asasaugaUfgAfAfGfaaacuuuggcL96 | 2332 | sense | 21 |
| GCCAAAGUUUCUUCAUCAUUUGC | 1237 | gsCfscaaAfgUfUfucuuCfaUfcauuusgsc | 2333 | antisense | 23 |
| GGGGCAAAUGAUGAAGAAACU | 1238 | gsgsggcaAfaUfGfAfugaagaaacuL96 | 2334 | sense | 21 |
| AGUUUCUUCAUCAUUUGCCCCAG | 1239 | asGfsuuuCfuUfCfaucaUfuUfgccccsasg | 2335 | antisense | 23 |
| UGGGGCAAAUGAUGAAGAAAC | 1240 | usgsgggcAfaAfUfGfaugaagaaacL96 | 2336 | sense | 21 |
| GUUUCUUCAUCAUUUGCCCCAGA | 1241 | gsUfsuucUfuCfAfucauUfuGfccccasgsa | 2337 | antisense | 23 |
| CAAAGGGUGUCGUUCUUUUCC | 1242 | csasaaggGfuGfUfCfguucuuuuccL96 | 2338 | sense | 21 |
| GGAAAAGAACGACACCCUUUGUA | 1243 | gsGfsaaaAfgAfAfcgacAfcCfcuuugsusa | 2339 | antisense | 23 |
| AAAGGGUGUCGUUCUUUUCCA | 1244 | asasagggUfgUfCfGfuucuuuuccaL96 | 2340 | sense | 21 |
| UGGAAAAGAACGACACCCUUUGU | 1245 | usGfsgaaAfaGfAfacgaCfaCfccuuusgsu | 2341 | antisense | 23 |
| AAUACAAAGGGUGUCGUUCUU | 1246 | asasuacaAfaGfGfGfugucguucuuL96 | 2342 | sense | 21 |
| AAGAACGACACCCUUUGUAUUGA | 1247 | asAfsgaaCfgAfCfacccUfuUfguauusgsa | 2343 | antisense | 23 |
| CAAUACAAAGGGUGUCGUUCU | 1248 | csasauacAfaAfGfGfgugucguucuL96 | 2344 | sense | 21 |
| AGAACGACACCCUUUGUAUUGAA | 1249 | asGfsaacGfaCfAfcccuUfuGfuauugsasa | 2345 | antisense | 23 |
| AAAGGCACUGAUGUUCUGAAA | 1250 | asasaggcAfcUfGfAfuguucugaaaL96 | 2346 | sense | 21 |
| UUUCAGAACAUCAGUGCCUUUCC | 1251 | usUfsucaGfaAfCfaucaGfuGfccuuuscsc | 2347 | antisense | 23 |
| AAGGCACUGAUGUUCUGAAAG | 1252 | asasggcaCfuGfAfUfguucugaaagL96 | 2348 | sense | 21 |
| CUUUCAGAACAUCAGUGCCUUUC | 1253 | csUfsuucAfgAfAfcaucAfgUfgccuususc | 2349 | antisense | 23 |
| GCGGAAAGGCACUGAUGUUCU | 1254 | gscsggaaAfgGfCfAfcugauguucuL96 | 2350 | sense | 21 |
| AGAACAUCAGUGCCUUUCCGCAC | 1255 | asGfsaacAfuCfAfgugcCfuUfuccgcsasc | 2351 | antisense | 23 |
| UGCGGAAAGGCACUGAUGUUC | 1256 | usgscggaAfaGfGfCfacugauguucL96 | 2352 | sense | 21 |
| GAACAUCAGUGCCUUUCCGCACA | 1257 | gsAfsacaUfcAfGfugccUfuUfccgcascsa | 2353 | antisense | 23 |
| AAGGAUGCUCCGGAAUGUUGC | 1258 | asasggauGfcUfCfCfggaauguugcL96 | 2354 | sense | 21 |
| GCAACAUUCCGGAGCAUCCUUGG | 1259 | gsCfsaacAfuUfCfcggaGfcAfuccuusgsg | 2355 | antisense | 23 |
| AGGAUGCUCCGGAAUGUUGCU | 1260 | asgsgaugCfuCfCfGfgaauguugcuL96 | 2356 | sense | 21 |
| AGCAACAUUCCGGAGCAUCCUUG | 1261 | asGfscaaCfaUfUfccggAfgCfauccususg | 2357 | antisense | 23 |
| AUCCAAGGAUGCUCCGGAAUG | 1262 | asusccaaGfgAfUfGfcuccggaaugL96 | 2358 | sense | 21 |
| CAUUCCGGAGCAUCCUUGGAUAC | 1263 | csAfsuucCfgGfAfgcauCfcUfuggausasc | 2359 | antisense | 23 |
| UAUCCAAGGAUGCUCCGGAAU | 1264 | usasuccaAfgGfAfUfgcuccggaauL96 | 2360 | sense | 21 |
| AUUCCGGAGCAUCCUUGGAUACA | 1265 | asUfsuccGfgAfGfcaucCfuUfggauascsa | 2361 | antisense | 23 |
| AAUGGGUGGCGGUAAUUGGUG | 1266 | asasugggUfgGfCfGfguaauuggugL96 | 2362 | sense | 21 |
| CACCAAUUACCGCCACCCAUUCC | 1267 | csAfsccaAfuUfAfccgcCfaCfccauuscsc | 2363 | antisense | 23 |
| AUGGGUGGCGGUAAUUGGUGA | 1268 | asusggguGfgCfGfGfuaauuggugaL96 | 2364 | sense | 21 |
| UCACCAAUUACCGCCACCCAUUC | 1269 | usCfsaccAfaUfUfaccgCfcAfcccaususc | 2365 | antisense | 23 |
| UUGGAAUGGGUGGCGGUAAUU | 1270 | ususggaaUfgGfGfUfggcgguaauuL96 | 2366 | sense | 21 |
| AAUUACCGCCACCCAUUCCAAUU | 1271 | asAfsuuaCfcGfCfcaccCfaUfuccaasusu | 2367 | antisense | 23 |
| AUUGGAAUGGGUGGCGGUAAU | 1272 | asusuggaAfuGfGfGfuggcgguaauL96 | 2368 | sense | 21 |
| AUUACCGCCACCCAUUCCAAUUC | 1273 | asUfsuacCfgCfCfacccAfuUfccaaususc | 2369 | antisense | 23 |
| GGAAAGGCACUGAUGUUCUGA | 1274 | gsgsaaagGfcAfCfUfgauguucugaL96 | 2370 | sense | 21 |
| UCAGAACAUCAGUGCCUUUCCGC | 1275 | usCfsagaAfcAfUfcaguGfcCfuuuccsgsc | 2371 | antisense | 23 |
| GAAAGGCACUGAUGUUCUGAA | 1276 | gsasaaggCfaCfUfGfauguucugaaL96 | 2372 | sense | 21 |
| UUCAGAACAUCAGUGCCUUUCCG | 1277 | usUfscagAfaCfAfucagUfgCfcuuucscsg | 2373 | antisense | 23 |
| GUGCGGAAAGGCACUGAUGUU | 1278 | gsusgcggAfaAfGfGfcacugauguuL96 | 2374 | sense | 21 |
| AACAUCAGUGCCUUUCCGCACAC | 1279 | asAfscauCfaGfUfgccuUfuCfcgcacsasc | 2375 | antisense | 23 |
| UGUGCGGAAAGGCACUGAUGU | 1280 | usgsugcgGfaAfAfGfgcacugauguL96 | 2376 | sense | 21 |
| ACAUCAGUGCCUUUCCGCACACC | 1281 | asCfsaucAfgUfGfccuuUfcCfgcacascsc | 2377 | antisense | 23 |
| AAUUGUAAGCUCAGGUUCAAA | 1282 | asasuuguAfaGfCfUfcagguucaaaL96 | 2378 | sense | 21 |
| UUUGAACCUGAGCUUACAAUUUA | 1283 | usUfsugaAfcCfUfgagcUfuAfcaauususa | 2379 | antisense | 23 |
| AUUGUAAGCUCAGGUUCAAAG | 1284 | asusuguaAfgCfUfCfagguucaaagL96 | 2380 | sense | 21 |
| CUUUGAACCUGAGCUUACAAUUU | 1285 | csUfsuugAfaCfCfugagCfuUfacaaususu | 2381 | antisense | 23 |
| CUUAAAUUGUAAGCUCAGGUU | 1286 | csusuaaaUfuGfUfAfagcucagguuL96 | 2382 | sense | 21 |
| AACCUGAGCUUACAAUUUAAGAA | 1287 | asAfsccuGfaGfCfuuacAfaUfuuaagsasa | 2383 | antisense | 23 |
| UCUUAAAUUGUAAGCUCAGGU | 1288 | uscsuuaaAfuUfGfUfaagcucagguL96 | 2384 | sense | 21 |
| ACCUGAGCUUACAAUUUAAGAAC | 1289 | asCfscugAfgCfUfuacaAfuUfuaagasasc | 2385 | antisense | 23 |
| GCAAACACUAAGGUGAAAAGA | 1290 | gscsaaacAfcUfAfAfggugaaaagaL96 | 2386 | sense | 21 |
| UCUUUUCACCUUAGUGUUUGCUA | 1291 | usCfsuuuUfcAfCfcuuaGfuGfuuugcsusa | 2387 | antisense | 23 |
| CAAACACUAAGGUGAAAAGAU | 1292 | csasaacaCfuAfAfGfgugaaaagauL96 | 2388 | sense | 21 |
| AUCUUUUCACCUUAGUGUUUGCU | 1293 | asUfscuuUfuCfAfccuuAfgUfguuugscsu | 2389 | antisense | 23 |
| GGUAGCAAACACUAAGGUGAA | 1294 | gsgsuagcAfaAfCfAfcuaaggugaaL96 | 2390 | sense | 21 |
| UUCACCUUAGUGUUUGCUACCUC | 1295 | usUfscacCfuUfAfguguUfuGfcuaccsusc | 2391 | antisense | 23 |
| AGGUAGCAAACACUAAGGUGA | 1296 | asgsguagCfaAfAfCfacuaaggugaL96 | 2392 | sense | 21 |
| UCACCUUAGUGUUUGCUACCUCC | 1297 | usCfsaccUfuAfGfuguuUfgCfuaccuscsc | 2393 | antisense | 23 |
| AGGUAGCAAACACUAAGGUGA | 1298 | asgsguagCfaAfAfCfacuaaggugaL96 | 2394 | sense | 21 |
| UCACCUUAGUGUUUGCUACCUCC | 1299 | usCfsaccUfuAfGfuguuUfgCfuaccuscsc | 2395 | antisense | 23 |
| GGUAGCAAACACUAAGGUGAA | 1300 | gsgsuagcAfaAfCfAfcuaaggugaaL96 | 2396 | sense | 21 |
| UUCACCUUAGUGUUUGCUACCUC | 1301 | usUfscacCfuUfAfguguUfuGfcuaccsusc | 2397 | antisense | 23 |
| UUGGAGGUAGCAAACACUAAG | 1302 | ususggagGfuAfGfCfaaacacuaagL96 | 2398 | sense | 21 |
| CUUAGUGUUUGCUACCUCCAAUU | 1303 | csUfsuagUfgUfUfugcuAfcCfuccaasusu | 2399 | antisense | 23 |
| AUUGGAGGUAGCAAACACUAA | 1304 | asusuggaGfgUfAfGfcaaacacuaaL96 | 2400 | sense | 21 |
| UUAGUGUUUGCUACCUCCAAUUU | 1305 | usUfsaguGfuUfUfgcuaCfcUfccaaususu | 2401 | antisense | 23 |
| UAAAGUGCUGUAUCCUUUAGU | 1306 | usasaaguGfcUfGfUfauccuuuaguL96 | 2402 | sense | 21 |
| ACUAAAGGAUACAGCACUUUAGC | 1307 | asCfsuaaAfgGfAfuacaGfcAfcuuuasgsc | 2403 | antisense | 23 |
| AAAGUGCUGUAUCCUUUAGUA | 1308 | asasagugCfuGfUfAfuccuuuaguaL96 | 2404 | sense | 21 |
| UACUAAAGGAUACAGCACUUUAG | 1309 | usAfscuaAfaGfGfauacAfgCfacuuusasg | 2405 | antisense | 23 |
| AGGCUAAAGUGCUGUAUCCUU | 1310 | asgsgcuaAfaGfUfGfcuguauccuuL96 | 2406 | sense | 21 |
| AAGGAUACAGCACUUUAGCCUGC | 1311 | asAfsggaUfaCfAfgcacUfuUfagccusgsc | 2407 | antisense | 23 |
| CAGGCUAAAGUGCUGUAUCCU | 1312 | csasggcuAfaAfGfUfgcuguauccuL96 | 2408 | sense | 21 |
| AGGAUACAGCACUUUAGCCUGCC | 1313 | asGfsgauAfcAfGfcacuUfuAfgccugscsc | 2409 | antisense | 23 |
| AAGACAUUGGUGAGGAAAAAU | 1314 | asasgacaUfuGfGfUfgaggaaaaauL96 | 2410 | sense | 21 |
| AUUUUUCCUCACCAAUGUCUUGU | 1315 | asUfsuuuUfcCfUfcaccAfaUfgucuusgsu | 2411 | antisense | 23 |
| AGACAUUGGUGAGGAAAAAUC | 1316 | asgsacauUfgGfUfGfaggaaaaaucL96 | 2412 | sense | 21 |
| GAUUUUUCCUCACCAAUGUCUUG | 1317 | gsAfsuuuUfuCfCfucacCfaAfugucususg | 2413 | antisense | 23 |
| CGACAAGACAUUGGUGAGGAA | 1318 | csgsacaaGfaCfAfUfuggugaggaaL96 | 2414 | sense | 21 |
| UUCCUCACCAAUGUCUUGUCGAU | 1319 | usUfsccuCfaCfCfaaugUfcUfugucgsasu | 2415 | antisense | 23 |
| UCGACAAGACAUUGGUGAGGA | 1320 | uscsgacaAfgAfCfAfuuggugaggaL96 | 2416 | sense | 21 |
| UCCUCACCAAUGUCUUGUCGAUG | 1321 | usCfscucAfcCfAfauguCfuUfgucgasusg | 2417 | antisense | 23 |
| AAGAUGUCCUCGAGAUACUAA | 1322 | asasgaugUfcCfUfCfgagauacuaaL96 | 2418 | sense | 21 |
| UUAGUAUCUCGAGGACAUCUUGA | 1323 | usUfsaguAfuCfUfcgagGfaCfaucuusgsa | 2419 | antisense | 23 |
| AGAUGUCCUCGAGAUACUAAA | 1324 | asgsauguCfcUfCfGfagauacuaaaL96 | 2420 | sense | 21 |
| UUUAGUAUCUCGAGGACAUCUUG | 1325 | usUfsuagUfaUfCfucgaGfgAfcaucususg | 2421 | antisense | 23 |
| GUUCAAGAUGUCCUCGAGAUA | 1326 | gsusucaaGfaUfGfUfccucgagauaL96 | 2422 | sense | 21 |
| UAUCUCGAGGACAUCUUGAACAC | 1327 | usAfsucuCfgAfGfgacaUfcUfugaacsasc | 2423 | antisense | 23 |
| UGUUCAAGAUGUCCUCGAGAU | 1328 | usgsuucaAfgAfUfGfuccucgagauL96 | 2424 | sense | 21 |
| AUCUCGAGGACAUCUUGAACACC | 1329 | asUfscucGfaGfGfacauCfuUfgaacascsc | 2425 | antisense | 23 |
| GAGAAAGGUGUUCAAGAUGUC | 1330 | gsasgaaaGfgUfGfUfucaagaugucL96 | 2426 | sense | 21 |
| GACAUCUUGAACACCUUUCUCCC | 1331 | gsAfscauCfuUfGfaacaCfcUfuucucscsc | 2427 | antisense | 23 |
| AGAAAGGUGUUCAAGAUGUCC | 1332 | asgsaaagGfuGfUfUfcaagauguccL96 | 2428 | sense | 21 |
| GGACAUCUUGAACACCUUUCUCC | 1333 | gsGfsacaUfcUfUfgaacAfcCfuuucuscsc | 2429 | antisense | 23 |
| GGGGGAGAAAGGUGUUCAAGA | 1334 | gsgsgggaGfaAfAfGfguguucaagaL96 | 2430 | sense | 21 |
| UCUUGAACACCUUUCUCCCCCUG | 1335 | usCfsuugAfaCfAfccuuUfcUfcccccsusg | 2431 | antisense | 23 |
| AGGGGGAGAAAGGUGUUCAAG | 1336 | asgsggggAfgAfAfAfgguguucaagL96 | 2432 | sense | 21 |
| CUUGAACACCUUUCUCCCCCUGG | 1337 | csUfsugaAfcAfCfcuuuCfuCfccccusgsg | 2433 | antisense | 23 |
| GCUGGGAAGAUAUCAAAUGGC | 1338 | gscsugggAfaGfAfUfaucaaauggcL96 | 2434 | sense | 21 |
| GCCAUUUGAUAUCUUCCCAGCUG | 1339 | gsCfscauUfuGfAfuaucUfuCfccagcsusg | 2435 | antisense | 23 |
| CUGGGAAGAUAUCAAAUGGCU | 1340 | csusgggaAfgAfUfAfucaaauggcuL96 | 2436 | sense | 21 |
| AGCCAUUUGAUAUCUUCCCAGCU | 1341 | asGfsccaUfuUfGfauauCfuUfcccagscsu | 2437 | antisense | 23 |
| AUCAGCUGGGAAGAUAUCAAA | 1342 | asuscagcUfgGfGfAfagauaucaaaL96 | 2438 | sense | 21 |
| UUUGAUAUCUUCCCAGCUGAUAG | 1343 | usUfsugaUfaUfCfuuccCfaGfcugausasg | 2439 | antisense | 23 |
| UAUCAGCUGGGAAGAUAUCAA | 1344 | usasucagCfuGfGfGfaagauaucaaL96 | 2440 | sense | 21 |
| UUGAUAUCUUCCCAGCUGAUAGA | 1345 | usUfsgauAfuCfUfucccAfgCfugauasgsa | 2441 | antisense | 23 |
| UCUGUCGACUUCUGUUUUAGG | 1346 | uscsugucGfaCfUfUfcuguuuuaggL96 | 2442 | sense | 21 |
| CCUAAAACAGAAGUCGACAGAUC | 1347 | csCfsuaaAfaCfAfgaagUfcGfacagasusc | 2443 | antisense | 23 |
| CUGUCGACUUCUGUUUUAGGA | 1348 | csusgucgAfcUfUfCfuguuuuaggaL96 | 2444 | sense | 21 |
| UCCUAAAACAGAAGUCGACAGAU | 1349 | usCfscuaAfaAfCfagaaGfuCfgacagsasu | 2445 | antisense | 23 |
| CAGAUCUGUCGACUUCUGUUU | 1350 | csasgaucUfgUfCfGfacuucuguuuL96 | 2446 | sense | 21 |
| AAACAGAAGUCGACAGAUCUGUU | 1351 | asAfsacaGfaAfGfucgaCfaGfaucugsusu | 2447 | antisense | 23 |
| ACAGAUCUGUCGACUUCUGUU | 1352 | ascsagauCfuGfUfCfgacuucuguuL96 | 2448 | sense | 21 |
| AACAGAAGUCGACAGAUCUGUUU | 1353 | asAfscagAfaGfUfcgacAfgAfucugususu | 2449 | antisense | 23 |
| UACUUCUUUGAAUGUAGAUUU | 1354 | usascuucUfuUfGfAfauguagauuuL96 | 2450 | sense | 21 |
| AAAUCUACAUUCAAAGAAGUAUC | 1355 | asAfsaucUfaCfAfuucaAfaGfaaguasusc | 2451 | antisense | 23 |
| ACUUCUUUGAAUGUAGAUUUC | 1356 | ascsuucuUfuGfAfAfuguagauuucL96 | 2452 | sense | 21 |
| GAAAUCUACAUUCAAAGAAGUAU | 1357 | gsAfsaauCfuAfCfauucAfaAfgaagusasu | 2453 | antisense | 23 |
| GUGAUACUUCUUUGAAUGUAG | 1358 | gsusgauaCfuUfCfUfuugaauguagL96 | 2454 | sense | 21 |
| CUACAUUCAAAGAAGUAUCACCA | 1359 | csUfsacaUfuCfAfaagaAfgUfaucacscsa | 2455 | antisense | 23 |
| GGUGAUACUUCUUUGAAUGUA | 1360 | gsgsugauAfcUfUfCfuuugaauguaL96 | 2456 | sense | 21 |
| UACAUUCAAAGAAGUAUCACCAA | 1361 | usAfscauUfcAfAfagaaGfuAfucaccsasa | 2457 | antisense | 23 |
| UGGGAAGAUAUCAAAUGGCUG | 1362 | usgsggaaGfaUfAfUfcaaauggcugL96 | 2458 | sense | 21 |
| CAGCCAUUUGAUAUCUUCCCAGC | 1363 | csAfsgccAfuUfUfgauaUfcUfucccasgsc | 2459 | antisense | 23 |
| GGGAAGAUAUCAAAUGGCUGA | 1364 | gsgsgaagAfuAfUfCfaaauggcugaL96 | 2460 | sense | 21 |
| UCAGCCAUUUGAUAUCUUCCCAG | 1365 | usCfsagcCfaUfUfugauAfuCfuucccsasg | 2461 | antisense | 23 |
| CAGCUGGGAAGAUAUCAAAUG | 1366 | csasgcugGfgAfAfGfauaucaaaugL96 | 2462 | sense | 21 |
| CAUUUGAUAUCUUCCCAGCUGAU | 1367 | csAfsuuuGfaUfAfucuuCfcCfagcugsasu | 2463 | antisense | 23 |
| UCAGCUGGGAAGAUAUCAAAU | 1368 | uscsagcuGfgGfAfAfgauaucaaauL96 | 2464 | sense | 21 |
| AUUUGAUAUCUUCCCAGCUGAUA | 1369 | asUfsuugAfuAfUfcuucCfcAfgcugasusa | 2465 | antisense | 23 |
| UCCAAAGUCUAUAUAUGACUA | 1370 | uscscaaaGfuCfUfAfuauaugacuaL96 | 2466 | sense | 21 |
| UAGUCAUAUAUAGACUUUGGAAG | 1371 | usAfsgucAfuAfUfauagAfcUfuuggasasg | 2467 | antisense | 23 |
| CCAAAGUCUAUAUAUGACUAU | 1372 | cscsaaagUfcUfAfUfauaugacuauL96 | 2468 | sense | 21 |
| AUAGUCAUAUAUAGACUUUGGAA | 1373 | asUfsaguCfaUfAfuauaGfaCfuuuggsasa | 2469 | antisense | 23 |
| UACUUCCAAAGUCUAUAUAUG | 1374 | usascuucCfaAfAfGfucuauauaugL96 | 2470 | sense | 21 |
| CAUAUAUAGACUUUGGAAGUACU | 1375 | csAfsuauAfuAfGfacuuUfgGfaaguascsu | 2471 | antisense | 23 |
| GUACUUCCAAAGUCUAUAUAU | 1376 | gsusacuuCfcAfAfAfgucuauauauL96 | 2472 | sense | 21 |
| AUAUAUAGACUUUGGAAGUACUG | 1377 | asUfsauaUfaGfAfcuuuGfgAfaguacsusg | 2473 | antisense | 23 |
| UUAUGAACAACAUGCUAAAUC | 1378 | ususaugaAfcAfAfCfaugcuaaaucL96 | 2474 | sense | 21 |
| GAUUUAGCAUGUUGUUCAUAAUC | 1379 | gsAfsuuuAfgCfAfuguuGfuUfcauaasusc | 2475 | antisense | 23 |
| UAUGAACAACAUGCUAAAUCA | 1380 | usasugaaCfaAfCfAfugcuaaaucaL96 | 2476 | sense | 21 |
| UGAUUUAGCAUGUUGUUCAUAAU | 1381 | usGfsauuUfaGfCfauguUfgUfucauasasu | 2477 | antisense | 23 |
| AUGAUUAUGAACAACAUGCUA | 1382 | asusgauuAfuGfAfAfcaacaugcuaL96 | 2478 | sense | 21 |
| UAGCAUGUUGUUCAUAAUCAUUG | 1383 | usAfsgcaUfgUfUfguucAfuAfaucaususg | 2479 | antisense | 23 |
| AAUGAUUAUGAACAACAUGCU | 1384 | asasugauUfaUfGfAfacaacaugcuL96 | 2480 | sense | 21 |
| AGCAUGUUGUUCAUAAUCAUUGA | 1385 | asGfscauGfuUfGfuucaUfaAfucauusgsa | 2481 | antisense | 23 |
| AAUUCCCCACUUCAAUACAAA | 1386 | asasuuccCfcAfCfUfucaauacaaaL96 | 2482 | sense | 21 |
| UUUGUAUUGAAGUGGGGAAUUAC | 1387 | usUfsuguAfuUfGfaaguGfgGfgaauusasc | 2483 | antisense | 23 |
| AUUCCCCACUUCAAUACAAAG | 1388 | asusucccCfaCfUfUfcaauacaaagL96 | 2484 | sense | 21 |
| CUUUGUAUUGAAGUGGGGAAUUA | 1389 | csUfsuugUfaUfUfgaagUfgGfggaaususa | 2485 | antisense | 23 |
| CUGUAAUUCCCCACUUCAAUA | 1390 | csusguaaUfuCfCfCfcacuucaauaL96 | 2486 | sense | 21 |
| UAUUGAAGUGGGGAAUUACAGAC | 1391 | usAfsuugAfaGfUfggggAfaUfuacagsasc | 2487 | antisense | 23 |
| UCUGUAAUUCCCCACUUCAAU | 1392 | uscsuguaAfuUfCfCfccacuucaauL96 | 2488 | sense | 21 |
| AUUGAAGUGGGGAAUUACAGACU | 1393 | asUfsugaAfgUfGfgggaAfuUfacagascsu | 2489 | antisense | 23 |
| UGAUGUGCGUAACAGAUUCAA | 1394 | usgsauguGfcGfUfAfacagauucaaL96 | 2490 | sense | 21 |
| UUGAAUCUGUUACGCACAUCAUC | 1395 | usUfsgaaUfcUfGfuuacGfcAfcaucasusc | 2491 | antisense | 23 |
| GAUGUGCGUAACAGAUUCAAA | 1396 | gsasugugCfgUfAfAfcagauucaaaL96 | 2492 | sense | 21 |
| UUUGAAUCUGUUACGCACAUCAU | 1397 | usUfsugaAfuCfUfguuaCfgCfacaucsasu | 2493 | antisense | 23 |
| UGGAUGAUGUGCGUAACAGAU | 1398 | usgsgaugAfuGfUfGfcguaacagauL96 | 2494 | sense | 21 |
| AUCUGUUACGCACAUCAUCCAGA | 1399 | asUfscugUfuAfCfgcacAfuCfauccasgsa | 2495 | antisense | 23 |
| CUGGAUGAUGUGCGUAACAGA | 1400 | csusggauGfaUfGfUfgcguaacagaL96 | 2496 | sense | 21 |
| UCUGUUACGCACAUCAUCCAGAC | 1401 | usCfsuguUfaCfGfcacaUfcAfuccagsasc | 2497 | antisense | 23 |
| GAAUGGGUGGCGGUAAUUGGU | 1402 | gsasauggGfuGfGfCfgguaauugguL96 | 2498 | sense | 21 |
| ACCAAUUACCGCCACCCAUUCCA | 1403 | asCfscaaUfuAfCfcgccAfcCfcauucscsa | 2499 | antisense | 23 |
| AAUGGGUGGCGGUAAUUGGUG | 1404 | asasugggUfgGfCfGfguaauuggugL96 | 2500 | sense | 21 |
| CACCAAUUACCGCCACCCAUUCC | 1405 | csAfsccaAfuUfAfccgcCfaCfccauuscsc | 2501 | antisense | 23 |
| AUUGGAAUGGGUGGCGGUAAU | 1406 | asusuggaAfuGfGfGfuggcgguaauL96 | 2502 | sense | 21 |
| AUUACCGCCACCCAUUCCAAUUC | 1407 | asUfsuacCfgCfCfacccAfuUfccaaususc | 2503 | antisense | 23 |
| AAUUGGAAUGGGUGGCGGUAA | 1408 | asasuuggAfaUfGfGfguggcgguaaL96 | 2504 | sense | 21 |
| UUACCGCCACCCAUUCCAAUUCU | 1409 | usUfsaccGfcCfAfcccaUfuCfcaauuscsu | 2505 | antisense | 23 |
| UCCGGAAUGUUGCUGAAACAG | 1410 | uscscggaAfuGfUfUfgcugaaacagL96 | 2506 | sense | 21 |
| CUGUUUCAGCAACAUUCCGGAGC | 1411 | csUfsguuUfcAfGfcaacAfuUfccggasgsc | 2507 | antisense | 23 |
| CCGGAAUGUUGCUGAAACAGA | 1412 | cscsggaaUfgUfUfGfcugaaacagaL96 | 2508 | sense | 21 |
| UCUGUUUCAGCAACAUUCCGGAG | 1413 | usCfsuguUfuCfAfgcaaCfaUfuccggsasg | 2509 | antisense | 23 |
| AUGCUCCGGAAUGUUGCUGAA | 1414 | asusgcucCfgGfAfAfuguugcugaaL96 | 2510 | sense | 21 |
| UUCAGCAACAUUCCGGAGCAUCC | 1415 | usUfscagCfaAfCfauucCfgGfagcauscsc | 2511 | antisense | 23 |
| GAUGCUCCGGAAUGUUGCUGA | 1416 | gsasugcuCfcGfGfAfauguugcugaL96 | 2512 | sense | 21 |
| UCAGCAACAUUCCGGAGCAUCCU | 1417 | usCfsagcAfaCfAfuuccGfgAfgcaucscsu | 2513 | antisense | 23 |
| UGUCCUCGAGAUACUAAAGGA | 1418 | usgsuccuCfgAfGfAfuacuaaaggaL96 | 2514 | sense | 21 |
| UCCUUUAGUAUCUCGAGGACAUC | 1419 | usCfscuuUfaGfUfaucuCfgAfggacasusc | 2515 | antisense | 23 |
| GUCCUCGAGAUACUAAAGGAA | 1420 | gsusccucGfaGfAfUfacuaaaggaaL96 | 2516 | sense | 21 |
| UUCCUUUAGUAUCUCGAGGACAU | 1421 | usUfsccuUfuAfGfuaucUfcGfaggacsasu | 2517 | antisense | 23 |
| AAGAUGUCCUCGAGAUACUAA | 1422 | asasgaugUfcCfUfCfgagauacuaaL96 | 2518 | sense | 21 |
| UUAGUAUCUCGAGGACAUCUUGA | 1423 | usUfsaguAfuCfUfcgagGfaCfaucuusgsa | 2519 | antisense | 23 |
| CAAGAUGUCCUCGAGAUACUA | 1424 | csasagauGfuCfCfUfcgagauacuaL96 | 2520 | sense | 21 |
| UAGUAUCUCGAGGACAUCUUGAA | 1425 | usAfsguaUfcUfCfgaggAfcAfucuugsasa | 2521 | antisense | 23 |
| ACAACAUGCUAAAUCAGUACU | 1426 | ascsaacaUfgCfUfAfaaucaguacuL96 | 2522 | sense | 21 |
| AGUACUGAUUUAGCAUGUUGUUC | 1427 | asGfsuacUfgAfUfuuagCfaUfguugususc | 2523 | antisense | 23 |
| CAACAUGCUAAAUCAGUACUU | 1428 | csasacauGfcUfAfAfaucaguacuuL96 | 2524 | sense | 21 |
| AAGUACUGAUUUAGCAUGUUGUU | 1429 | asAfsguaCfuGfAfuuuaGfcAfuguugsusu | 2525 | antisense | 23 |
| AUGAACAACAUGCUAAAUCAG | 1430 | asusgaacAfaCfAfUfgcuaaaucagL96 | 2526 | sense | 21 |
| CUGAUUUAGCAUGUUGUUCAUAA | 1431 | csUfsgauUfuAfGfcaugUfuGfuucausasa | 2527 | antisense | 23 |
| UAUGAACAACAUGCUAAAUCA | 1432 | usasugaaCfaAfCfAfugcuaaaucaL96 | 2528 | sense | 21 |
| UGAUUUAGCAUGUUGUUCAUAAU | 1433 | usGfsauuUfaGfCfauguUfgUfucauasasu | 2529 | antisense | 23 |
| GCCAAGGCUGUGUUUGUGGGG | 1434 | gscscaagGfcUfGfUfguuuguggggL96 | 2530 | sense | 21 |
| CCCCACAAACACAGCCUUGGCGC | 1435 | csCfsccaCfaAfAfcacaGfcCfuuggcsgsc | 2531 | antisense | 23 |
| CCAAGGCUGUGUUUGUGGGGA | 1436 | cscsaaggCfuGfUfGfuuuguggggaL96 | 2532 | sense | 21 |
| UCCCCACAAACACAGCCUUGGCG | 1437 | usCfscccAfcAfAfacacAfgCfcuuggscsg | 2533 | antisense | 23 |
| UGGCGCCAAGGCUGUGUUUGU | 1438 | usgsgcgcCfaAfGfGfcuguguuuguL96 | 2534 | sense | 21 |
| ACAAACACAGCCUUGGCGCCAAG | 1439 | asCfsaaaCfaCfAfgccuUfgGfcgccasasg | 2535 | antisense | 23 |
| UUGGCGCCAAGGCUGUGUUUG | 1440 | ususggcgCfcAfAfGfgcuguguuugL96 | 2536 | sense | 21 |
| CAAACACAGCCUUGGCGCCAAGA | 1441 | csAfsaacAfcAfGfccuuGfgCfgccaasgsa | 2537 | antisense | 23 |
| UGAAAGCUCUGGCUCUUGGCG | 1442 | usgsaaagCfuCfUfGfgcucuuggcgL96 | 2538 | sense | 21 |
| CGCCAAGAGCCAGAGCUUUCAGA | 1443 | csGfsccaAfgAfGfccagAfgCfuuucasgsa | 2539 | antisense | 23 |
| GAAAGCUCUGGCUCUUGGCGC | 1444 | gsasaagcUfcUfGfGfcucuuggcgcL96 | 2540 | sense | 21 |
| GCGCCAAGAGCCAGAGCUUUCAG | 1445 | gsCfsgccAfaGfAfgccaGfaGfcuuucsasg | 2541 | antisense | 23 |
| GUUCUGAAAGCUCUGGCUCUU | 1446 | gsusucugAfaAfGfCfucuggcucuuL96 | 2542 | sense | 21 |
| AAGAGCCAGAGCUUUCAGAACAU | 1447 | asAfsgagCfcAfGfagcuUfuCfagaacsasu | 2543 | antisense | 23 |
| UGUUCUGAAAGCUCUGGCUCU | 1448 | usgsuucuGfaAfAfGfcucuggcucuL96 | 2544 | sense | 21 |
| AGAGCCAGAGCUUUCAGAACAUC | 1449 | asGfsagcCfaGfAfgcuuUfcAfgaacasusc | 2545 | antisense | 23 |
| CAGCCACUAUUGAUGUUCUGC | 1450 | csasgccaCfuAfUfUfgauguucugcL96 | 2546 | sense | 21 |
| GCAGAACAUCAAUAGUGGCUGGC | 1451 | gsCfsagaAfcAfUfcaauAfgUfggcugsgsc | 2547 | antisense | 23 |
| AGCCACUAUUGAUGUUCUGCC | 1452 | asgsccacUfaUfUfGfauguucugccL96 | 2548 | sense | 21 |
| GGCAGAACAUCAAUAGUGGCUGG | 1453 | gsGfscagAfaCfAfucaaUfaGfuggcusgsg | 2549 | antisense | 23 |
| GUGCCAGCCACUAUUGAUGUU | 1454 | gsusgccaGfcCfAfCfuauugauguuL96 | 2550 | sense | 21 |
| AACAUCAAUAGUGGCUGGCACCC | 1455 | asAfscauCfaAfUfagugGfcUfggcacscsc | 2551 | antisense | 23 |
| GGUGCCAGCCACUAUUGAUGU | 1456 | gsgsugccAfgCfCfAfcuauugauguL96 | 2552 | sense | 21 |
| ACAUCAAUAGUGGCUGGCACCCC | 1457 | asCfsaucAfaUfAfguggCfuGfgcaccscsc | 2553 | antisense | 23 |
| ACAAGGACCGAGAAGUCACCA | 1458 | ascsaaggAfcCfGfAfgaagucaccaL96 | 2554 | sense | 21 |
| UGGUGACUUCUCGGUCCUUGUAG | 1459 | usGfsgugAfcUfUfcucgGfuCfcuugusasg | 2555 | antisense | 23 |
| CAAGGACCGAGAAGUCACCAA | 1460 | csasaggaCfcGfAfGfaagucaccaaL96 | 2556 | sense | 21 |
| UUGGUGACUUCUCGGUCCUUGUA | 1461 | usUfsgguGfaCfUfucucGfgUfccuugsusa | 2557 | antisense | 23 |
| AUCUACAAGGACCGAGAAGUC | 1462 | asuscuacAfaGfGfAfccgagaagucL96 | 2558 | sense | 21 |
| GACUUCUCGGUCCUUGUAGAUAU | 1463 | gsAfscuuCfuCfGfguccUfuGfuagausasu | 2559 | antisense | 23 |
| UAUCUACAAGGACCGAGAAGU | 1464 | usasucuaCfaAfGfGfaccgagaaguL96 | 2560 | sense | 21 |
| ACUUCUCGGUCCUUGUAGAUAUA | 1465 | asCfsuucUfcGfGfuccuUfgUfagauasusa | 2561 | antisense | 23 |
| CAGAAUGUGAAAGUCAUCGAC | 1466 | csasgaauGfuGfAfAfagucaucgacL96 | 2562 | sense | 21 |
| GUCGAUGACUUUCACAUUCUGGC | 1467 | gsUfscgaUfgAfCfuuucAfcAfuucugsgsc | 2563 | antisense | 23 |
| AGAAUGUGAAAGUCAUCGACA | 1468 | asgsaaugUfgAfAfAfgucaucgacaL96 | 2564 | sense | 21 |
| UGUCGAUGACUUUCACAUUCUGG | 1469 | usGfsucgAfuGfAfcuuuCfaCfauucusgsg | 2565 | antisense | 23 |
| GUGCCAGAAUGUGAAAGUCAU | 1470 | gsusgccaGfaAfUfGfugaaagucauL96 | 2566 | sense | 21 |
| AUGACUUUCACAUUCUGGCACCC | 1471 | asUfsgacUfuUfCfacauUfcUfggcacscsc | 2567 | antisense | 23 |
| GGUGCCAGAAUGUGAAAGUCA | 1472 | gsgsugccAfgAfAfUfgugaaagucaL96 | 2568 | sense | 21 |
| UGACUUUCACAUUCUGGCACCCA | 1473 | usGfsacuUfuCfAfcauuCfuGfgcaccscsa | 2569 | antisense | 23 |
| AGAUGUCCUCGAGAUACUAAA | 1474 | asgsauguCfcUfCfGfagauacuaaaL96 | 2570 | sense | 21 |
| UUUAGUAUCUCGAGGACAUCUUG | 1475 | usUfsuagUfaUfCfucgaGfgAfcaucususg | 2571 | antisense | 23 |
| GAUGUCCUCGAGAUACUAAAG | 1476 | gsasugucCfuCfGfAfgauacuaaagL96 | 2572 | sense | 21 |
| CUUUAGUAUCUCGAGGACAUCUU | 1477 | csUfsuuaGfuAfUfcucgAfgGfacaucsusu | 2573 | antisense | 23 |
| UUCAAGAUGUCCUCGAGAUAC | 1478 | ususcaagAfuGfUfCfcucgagauacL96 | 2574 | sense | 21 |
| GUAUCUCGAGGACAUCUUGAACA | 1479 | gsUfsaucUfcGfAfggacAfuCfuugaascsa | 2575 | antisense | 23 |
| GUUCAAGAUGUCCUCGAGAUA | 1480 | gsusucaaGfaUfGfUfccucgagauaL96 | 2576 | sense | 21 |
| UAUCUCGAGGACAUCUUGAACAC | 1481 | usAfsucuCfgAfGfgacaUfcUfugaacsasc | 2577 | antisense | 23 |
| GUGGACUUGCUGCAUAUGUGG | 1482 | gsusggacUfuGfCfUfgcauauguggL96 | 2578 | sense | 21 |
| CCACAUAUGCAGCAAGUCCACUG | 1483 | csCfsacaUfaUfGfcagcAfaGfuccacsusg | 2579 | antisense | 23 |
| UGGACUUGCUGCAUAUGUGGC | 1484 | usgsgacuUfgCfUfGfcauauguggcL96 | 2580 | sense | 21 |
| GCCACAUAUGCAGCAAGUCCACU | 1485 | gsCfscacAfuAfUfgcagCfaAfguccascsu | 2581 | antisense | 23 |
| GACAGUGGACUUGCUGCAUAU | 1486 | gsascaguGfgAfCfUfugcugcauauL96 | 2582 | sense | 21 |
| AUAUGCAGCAAGUCCACUGUCGU | 1487 | asUfsaugCfaGfCfaaguCfcAfcugucsgsu | 2583 | antisense | 23 |
| CGACAGUGGACUUGCUGCAUA | 1488 | csgsacagUfgGfAfCfuugcugcauaL96 | 2584 | sense | 21 |
| UAUGCAGCAAGUCCACUGUCGUC | 1489 | usAfsugcAfgCfAfagucCfaCfugucgsusc | 2585 | antisense | 23 |
| AACCAGUACUUUAUCAUUUUC | 1490 | asasccagUfaCfUfUfuaucauuuucL96 | 2586 | sense | 21 |
| GAAAAUGAUAAAGUACUGGUUUC | 1491 | gsAfsaaaUfgAfUfaaagUfaCfugguususc | 2587 | antisense | 23 |
| ACCAGUACUUUAUCAUUUUCU | 1492 | ascscaguAfcUfUfUfaucauuuucuL96 | 2588 | sense | 21 |
| AGAAAAUGAUAAAGUACUGGUUU | 1493 | asGfsaaaAfuGfAfuaaaGfuAfcuggususu | 2589 | antisense | 23 |
| UUGAAACCAGUACUUUAUCAU | 1494 | ususgaaaCfcAfGfUfacuuuaucauL96 | 2590 | sense | 21 |
| AUGAUAAAGUACUGGUUUCAAAA | 1495 | asUfsgauAfaAfGfuacuGfgUfuucaasasa | 2591 | antisense | 23 |
| UUUGAAACCAGUACUUUAUCA | 1496 | ususugaaAfcCfAfGfuacuuuaucaL96 | 2592 | sense | 21 |
| UGAUAAAGUACUGGUUUCAAAAU | 1497 | usGfsauaAfaGfUfacugGfuUfucaaasasu | 2593 | antisense | 23 |
| CGAGAAGUCACCAAGAAGCUA | 1498 | csgsagaaGfuCfAfCfcaagaagcuaL96 | 2594 | sense | 21 |
| UAGCUUCUUGGUGACUUCUCGGU | 1499 | usAfsgcuUfcUfUfggugAfcUfucucgsgsu | 2595 | antisense | 23 |
| GAGAAGUCACCAAGAAGCUAG | 1500 | gsasgaagUfcAfCfCfaagaagcuagL96 | 2596 | sense | 21 |
| CUAGCUUCUUGGUGACUUCUCGG | 1501 | csUfsagcUfuCfUfugguGfaCfuucucsgsg | 2597 | antisense | 23 |
| GGACCGAGAAGUCACCAAGAA | 1502 | gsgsaccgAfgAfAfGfucaccaagaaL96 | 2598 | sense | 21 |
| UUCUUGGUGACUUCUCGGUCCUU | 1503 | usUfscuuGfgUfGfacuuCfuCfgguccsusu | 2599 | antisense | 23 |
| AGGACCGAGAAGUCACCAAGA | 1504 | asgsgaccGfaGfAfAfgucaccaagaL96 | 2600 | sense | 21 |
| UCUUGGUGACUUCUCGGUCCUUG | 1505 | usCfsuugGfuGfAfcuucUfcGfguccususg | 2601 | antisense | 23 |
| UCAAAGUGUUGGUAAUGCCUG | 1506 | uscsaaagUfgUfUfGfguaaugccugL96 | 2602 | sense | 21 |
| CAGGCAUUACCAACACUUUGAAC | 1507 | csAfsggcAfuUfAfccaaCfaCfuuugasasc | 2603 | antisense | 23 |
| CAAAGUGUUGGUAAUGCCUGA | 1508 | csasaaguGfuUfGfGfuaaugccugaL96 | 2604 | sense | 21 |
| UCAGGCAUUACCAACACUUUGAA | 1509 | usCfsaggCfaUfUfaccaAfcAfcuuugsasa | 2605 | antisense | 23 |
| AGGUUCAAAGUGUUGGUAAUG | 1510 | asgsguucAfaAfGfUfguugguaaugL96 | 2606 | sense | 21 |
| CAUUACCAACACUUUGAACCUGA | 1511 | csAfsuuaCfcAfAfcacuUfuGfaaccusgsa | 2607 | antisense | 23 |
| CAGGUUCAAAGUGUUGGUAAU | 1512 | csasgguuCfaAfAfGfuguugguaauL96 | 2608 | sense | 21 |
| AUUACCAACACUUUGAACCUGAG | 1513 | asUfsuacCfaAfCfacuuUfgAfaccugsasg | 2609 | antisense | 23 |
| UAUUACUUGACAAAGAGACAC | 1514 | usasuuacUfuGfAfCfaaagagacacL96 | 2610 | sense | 21 |
| GUGUCUCUUUGUCAAGUAAUACA | 1515 | gsUfsgucUfcUfUfugucAfaGfuaauascsa | 2611 | antisense | 23 |
| AUUACUUGACAAAGAGACACU | 1516 | asusuacuUfgAfCfAfaagagacacuL96 | 2612 | sense | 21 |
| AGUGUCUCUUUGUCAAGUAAUAC | 1517 | asGfsuguCfuCfUfuuguCfaAfguaausasc | 2613 | antisense | 23 |
| CAUGUAUUACUUGACAAAGAG | 1518 | csasuguaUfuAfCfUfugacaaagagL96 | 2614 | sense | 21 |
| CUCUUUGUCAAGUAAUACAUGCU | 1519 | csUfscuuUfgUfCfaaguAfaUfacaugscsu | 2615 | antisense | 23 |
| GCAUGUAUUACUUGACAAAGA | 1520 | gscsauguAfuUfAfCfuugacaaagaL96 | 2616 | sense | 21 |
| UCUUUGUCAAGUAAUACAUGCUG | 1521 | usCfsuuuGfuCfAfaguaAfuAfcaugcsusg | 2617 | antisense | 23 |
| AAAGUCAUCGACAAGACAUUG | 1522 | asasagucAfuCfGfAfcaagacauugL96 | 2618 | sense | 21 |
| CAAUGUCUUGUCGAUGACUUUCA | 1523 | csAfsaugUfcUfUfgucgAfuGfacuuuscsa | 2619 | antisense | 23 |
| AAGUCAUCGACAAGACAUUGG | 1524 | asasgucaUfcGfAfCfaagacauuggL96 | 2620 | sense | 21 |
| CCAAUGUCUUGUCGAUGACUUUC | 1525 | csCfsaauGfuCfUfugucGfaUfgacuususc | 2621 | antisense | 23 |
| UGUGAAAGUCAUCGACAAGAC | 1526 | usgsugaaAfgUfCfAfucgacaagacL96 | 2622 | sense | 21 |
| GUCUUGUCGAUGACUUUCACAUU | 1527 | gsUfscuuGfuCfGfaugaCfuUfucacasusu | 2623 | antisense | 23 |
| AUGUGAAAGUCAUCGACAAGA | 1528 | asusgugaAfaGfUfCfaucgacaagaL96 | 2624 | sense | 21 |
| UCUUGUCGAUGACUUUCACAUUC | 1529 | usCfsuugUfcGfAfugacUfuUfcacaususc | 2625 | antisense | 23 |
| AUAUGUGGCUAAAGCAAUAGA | 1530 | asusauguGfgCfUfAfaagcaauagaL96 | 2626 | sense | 21 |
| UCUAUUGCUUUAGCCACAUAUGC | 1531 | usCfsuauUfgCfUfuuagCfcAfcauausgsc | 2627 | antisense | 23 |
| UAUGUGGCUAAAGCAAUAGAC | 1532 | usasugugGfcUfAfAfagcaauagacL96 | 2628 | sense | 21 |
| GUCUAUUGCUUUAGCCACAUAUG | 1533 | gsUfscuaUfuGfCfuuuaGfcCfacauasusg | 2629 | antisense | 23 |
| CUGCAUAUGUGGCUAAAGCAA | 1534 | csusgcauAfuGfUfGfgcuaaagcaaL96 | 2630 | sense | 21 |
| UUGCUUUAGCCACAUAUGCAGCA | 1535 | usUfsgcuUfuAfGfccacAfuAfugcagscsa | 2631 | antisense | 23 |
| GCUGCAUAUGUGGCUAAAGCA | 1536 | gscsugcaUfaUfGfUfggcuaaagcaL96 | 2632 | sense | 21 |
| UGCUUUAGCCACAUAUGCAGCAA | 1537 | usGfscuuUfaGfCfcacaUfaUfgcagcsasa | 2633 | antisense | 23 |
| AGACGACAGUGGACUUGCUGC | 1538 | asgsacgaCfaGfUfGfgacuugcugcL96 | 2634 | sense | 21 |
| GCAGCAAGUCCACUGUCGUCUCC | 1539 | gsCfsagcAfaGfUfccacUfgUfcgucuscsc | 2635 | antisense | 23 |
| GACGACAGUGGACUUGCUGCA | 1540 | gsascgacAfgUfGfGfacuugcugcaL96 | 2636 | sense | 21 |
| UGCAGCAAGUCCACUGUCGUCUC | 1541 | usGfscagCfaAfGfuccaCfuGfucgucsusc | 2637 | antisense | 23 |
| UUGGAGACGACAGUGGACUUG | 1542 | ususggagAfcGfAfCfaguggacuugL96 | 2638 | sense | 21 |
| CAAGUCCACUGUCGUCUCCAAAA | 1543 | csAfsaguCfcAfCfugucGfuCfuccaasasa | 2639 | antisense | 23 |
| UUUGGAGACGACAGUGGACUU | 1544 | ususuggaGfaCfGfAfcaguggacuuL96 | 2640 | sense | 21 |
| AAGUCCACUGUCGUCUCCAAAAU | 1545 | asAfsgucCfaCfUfgucgUfcUfccaaasasu | 2641 | antisense | 23 |
| GGCCACCUCCUCAAUUGAAGA | 1546 | gsgsccacCfuCfCfUfcaauugaagaL96 | 2642 | sense | 21 |
| UCUUCAAUUGAGGAGGUGGCCCA | 1547 | usCfsuucAfaUfUfgaggAfgGfuggccscsa | 2643 | antisense | 23 |
| GCCACCUCCUCAAUUGAAGAA | 1548 | gscscaccUfcCfUfCfaauugaagaaL96 | 2644 | sense | 21 |
| UUCUUCAAUUGAGGAGGUGGCCC | 1549 | usUfscuuCfaAfUfugagGfaGfguggcscsc | 2645 | antisense | 23 |
| CCUGGGCCACCUCCUCAAUUG | 1550 | cscsugggCfcAfCfCfuccucaauugL96 | 2646 | sense | 21 |
| CAAUUGAGGAGGUGGCCCAGGAA | 1551 | csAfsauuGfaGfGfagguGfgCfccaggsasa | 2647 | antisense | 23 |
| UCCUGGGCCACCUCCUCAAUU | 1552 | uscscuggGfcCfAfCfcuccucaauuL96 | 2648 | sense | 21 |
| AAUUGAGGAGGUGGCCCAGGAAC | 1553 | asAfsuugAfgGfAfggugGfcCfcaggasasc | 2649 | antisense | 23 |
| UGUAUGUUACUUCUUAGAGAG | 1554 | usgsuaugUfuAfCfUfucuuagagagL96 | 2650 | sense | 21 |
| CUCUCUAAGAAGUAACAUACAUC | 1555 | csUfscucUfaAfGfaaguAfaCfauacasusc | 2651 | antisense | 23 |
| GUAUGUUACUUCUUAGAGAGA | 1556 | gsusauguUfaCfUfUfcuuagagagaL96 | 2652 | sense | 21 |
| UCUCUCUAAGAAGUAACAUACAU | 1557 | usCfsucuCfuAfAfgaagUfaAfcauacsasu | 2653 | antisense | 23 |
| AGGAUGUAUGUUACUUCUUAG | 1558 | asgsgaugUfaUfGfUfuacuucuuagL96 | 2654 | sense | 21 |
| CUAAGAAGUAACAUACAUCCUAA | 1559 | csUfsaagAfaGfUfaacaUfaCfauccusasa | 2655 | antisense | 23 |
| UAGGAUGUAUGUUACUUCUUA | 1560 | usasggauGfuAfUfGfuuacuucuuaL96 | 2656 | sense | 21 |
| UAAGAAGUAACAUACAUCCUAAA | 1561 | usAfsagaAfgUfAfacauAfcAfuccuasasa | 2657 | antisense | 23 |
| AAAUGUUUUAGGAUGUAUGUU | 1562 | asasauguUfuUfAfGfgauguauguuL96 | 2658 | sense | 21 |
| AACAUACAUCCUAAAACAUUUGG | 1563 | asAfscauAfcAfUfccuaAfaAfcauuusgsg | 2659 | antisense | 23 |
| AAUGUUUUAGGAUGUAUGUUA | 1564 | asasuguuUfuAfGfGfauguauguuaL96 | 2660 | sense | 21 |
| UAACAUACAUCCUAAAACAUUUG | 1565 | usAfsacaUfaCfAfuccuAfaAfacauususg | 2661 | antisense | 23 |
| AUCCAAAUGUUUUAGGAUGUA | 1566 | asusccaaAfuGfUfUfuuaggauguaL96 | 2662 | sense | 21 |
| UACAUCCUAAAACAUUUGGAUAU | 1567 | usAfscauCfcUfAfaaacAfuUfuggausasu | 2663 | antisense | 23 |
| UAUCCAAAUGUUUUAGGAUGU | 1568 | usasuccaAfaUfGfUfuuuaggauguL96 | 2664 | sense | 21 |
| ACAUCCUAAAACAUUUGGAUAUA | 1569 | asCfsaucCfuAfAfaacaUfuUfggauasusa | 2665 | antisense | 23 |
| AUGGGUGGCGGUAAUUGGUGA | 1570 | asusggguGfgCfGfGfuaauuggugaL96 | 2666 | sense | 21 |
| UCACCAAUUACCGCCACCCAUUC | 1571 | usCfsaccAfaUfUfaccgCfcAfcccaususc | 2667 | antisense | 23 |
| UGGGUGGCGGUAAUUGGUGAU | 1572 | usgsggugGfcGfGfUfaauuggugauL96 | 2668 | sense | 21 |
| AUCACCAAUUACCGCCACCCAUU | 1573 | asUfscacCfaAfUfuaccGfcCfacccasusu | 2669 | antisense | 23 |
| UGGAAUGGGUGGCGGUAAUUG | 1574 | usgsgaauGfgGfUfGfgcgguaauugL96 | 2670 | sense | 21 |
| CAAUUACCGCCACCCAUUCCAAU | 1575 | csAfsauuAfcCfGfccacCfcAfuuccasasu | 2671 | antisense | 23 |
| UUGGAAUGGGUGGCGGUAAUU | 1576 | ususggaaUfgGfGfUfggcgguaauuL96 | 2672 | sense | 21 |
| AAUUACCGCCACCCAUUCCAAUU | 1577 | asAfsuuaCfcGfCfcaccCfaUfuccaasusu | 2673 | antisense | 23 |
| UUCAAAGUGUUGGUAAUGCCU | 1578 | ususcaaaGfuGfUfUfgguaaugccuL96 | 2674 | sense | 21 |
| AGGCAUUACCAACACUUUGAACC | 1579 | asGfsgcaUfuAfCfcaacAfcUfuugaascsc | 2675 | antisense | 23 |
| UCAAAGUGUUGGUAAUGCCUG | 1580 | uscsaaagUfgUfUfGfguaaugccugL96 | 2676 | sense | 21 |
| CAGGCAUUACCAACACUUUGAAC | 1581 | csAfsggcAfuUfAfccaaCfaCfuuugasasc | 2677 | antisense | 23 |
| CAGGUUCAAAGUGUUGGUAAU | 1582 | csasgguuCfaAfAfGfuguugguaauL96 | 2678 | sense | 21 |
| AUUACCAACACUUUGAACCUGAG | 1583 | asUfsuacCfaAfCfacuuUfgAfaccugsasg | 2679 | antisense | 23 |
| UCAGGUUCAAAGUGUUGGUAA | 1584 | uscsagguUfcAfAfAfguguugguaaL96 | 2680 | sense | 21 |
| UUACCAACACUUUGAACCUGAGC | 1585 | usUfsaccAfaCfAfcuuuGfaAfccugasgsc | 2681 | antisense | 23 |
| CCACCUCCUCAAUUGAAGAAG | 1586 | cscsaccuCfcUfCfAfauugaagaagL96 | 2682 | sense | 21 |
| CUUCUUCAAUUGAGGAGGUGGCC | 1587 | csUfsucuUfcAfAfuugaGfgAfgguggscsc | 2683 | antisense | 23 |
| CACCUCCUCAAUUGAAGAAGU | 1588 | csasccucCfuCfAfAfuugaagaaguL96 | 2684 | sense | 21 |
| ACUUCUUCAAUUGAGGAGGUGGC | 1589 | asCfsuucUfuCfAfauugAfgGfaggugsgsc | 2685 | antisense | 23 |
| UGGGCCACCUCCUCAAUUGAA | 1590 | usgsggccAfcCfUfCfcucaauugaaL96 | 2686 | sense | 21 |
| UUCAAUUGAGGAGGUGGCCCAGG | 1591 | usUfscaaUfuGfAfggagGfuGfgcccasgsg | 2687 | antisense | 23 |
| CUGGGCCACCUCCUCAAUUGA | 1592 | csusgggcCfaCfCfUfccucaauugaL96 | 2688 | sense | 21 |
| UCAAUUGAGGAGGUGGCCCAGGA | 1593 | usCfsaauUfgAfGfgaggUfgGfcccagsgsa | 2689 | antisense | 23 |
| GAGUGGGUGCCAGAAUGUGAA | 1594 | gsasguggGfuGfCfCfagaaugugaaL96 | 2690 | sense | 21 |
| UUCACAUUCUGGCACCCACUCAG | 1595 | usUfscacAfuUfCfuggcAfcCfcacucsasg | 2691 | antisense | 23 |
| AGUGGGUGCCAGAAUGUGAAA | 1596 | asgsugggUfgCfCfAfgaaugugaaaL96 | 2692 | sense | 21 |
| UUUCACAUUCUGGCACCCACUCA | 1597 | usUfsucaCfaUfUfcuggCfaCfccacuscsa | 2693 | antisense | 23 |
| CUCUGAGUGGGUGCCAGAAUG | 1598 | csuscugaGfuGfGfGfugccagaaugL96 | 2694 | sense | 21 |
| CAUUCUGGCACCCACUCAGAGCC | 1599 | csAfsuucUfgGfCfacccAfcUfcagagscsc | 2695 | antisense | 23 |
| GCUCUGAGUGGGUGCCAGAAU | 1600 | gscsucugAfgUfGfGfgugccagaauL96 | 2696 | sense | 21 |
| AUUCUGGCACCCACUCAGAGCCA | 1601 | asUfsucuGfgCfAfcccaCfuCfagagcscsa | 2697 | antisense | 23 |
| GCACUGAUGUUCUGAAAGCUC | 1602 | gscsacugAfuGfUfUfcugaaagcucL96 | 2698 | sense | 21 |
| GAGCUUUCAGAACAUCAGUGCCU | 1603 | gsAfsgcuUfuCfAfgaacAfuCfagugcscsu | 2699 | antisense | 23 |
| CACUGAUGUUCUGAAAGCUCU | 1604 | csascugaUfgUfUfCfugaaagcucuL96 | 2700 | sense | 21 |
| AGAGCUUUCAGAACAUCAGUGCC | 1605 | asGfsagcUfuUfCfagaaCfaUfcagugscsc | 2701 | antisense | 23 |
| AAAGGCACUGAUGUUCUGAAA | 1606 | asasaggcAfcUfGfAfuguucugaaaL96 | 2702 | sense | 21 |
| UUUCAGAACAUCAGUGCCUUUCC | 1607 | usUfsucaGfaAfCfaucaGfuGfccuuuscsc | 2703 | antisense | 23 |
| GAAAGGCACUGAUGUUCUGAA | 1608 | gsasaaggCfaCfUfGfauguucugaaL96 | 2704 | sense | 21 |
| UUCAGAACAUCAGUGCCUUUCCG | 1609 | usUfscagAfaCfAfucagUfgCfcuuucscsg | 2705 | antisense | 23 |
| GGGAAGGUGGAAGUCUUCCUG | 1610 | gsgsgaagGfuGfGfAfagucuuccugL96 | 2706 | sense | 21 |
| CAGGAAGACUUCCACCUUCCCUU | 1611 | csAfsggaAfgAfCfuuccAfcCfuucccsusu | 2707 | antisense | 23 |
| GGAAGGUGGAAGUCUUCCUGG | 1612 | gsgsaaggUfgGfAfAfgucuuccuggL96 | 2708 | sense | 21 |
| CCAGGAAGACUUCCACCUUCCCU | 1613 | csCfsaggAfaGfAfcuucCfaCfcuuccscsu | 2709 | antisense | 23 |
| GGAAGGGAAGGUGGAAGUCUU | 1614 | gsgsaaggGfaAfGfGfuggaagucuuL96 | 2710 | sense | 21 |
| AAGACUUCCACCUUCCCUUCCAC | 1615 | asAfsgacUfuCfCfaccuUfcCfcuuccsasc | 2711 | antisense | 23 |
| UGGAAGGGAAGGUGGAAGUCU | 1616 | usgsgaagGfgAfAfGfguggaagucuL96 | 2712 | sense | 21 |
| AGACUUCCACCUUCCCUUCCACA | 1617 | asGfsacuUfcCfAfccuuCfcCfuuccascsa | 2713 | antisense | 23 |
| UGCUAAAUCAGUACUUCCAAA | 1618 | usgscuaaAfuCfAfGfuacuuccaaaL96 | 2714 | sense | 21 |
| UUUGGAAGUACUGAUUUAGCAUG | 1619 | usUfsuggAfaGfUfacugAfuUfuagcasusg | 2715 | antisense | 23 |
| GCUAAAUCAGUACUUCCAAAG | 1620 | gscsuaaaUfcAfGfUfacuuccaaagL96 | 2716 | sense | 21 |
| CUUUGGAAGUACUGAUUUAGCAU | 1621 | csUfsuugGfaAfGfuacuGfaUfuuagcsasu | 2717 | antisense | 23 |
| AACAUGCUAAAUCAGUACUUC | 1622 | asascaugCfuAfAfAfucaguacuucL96 | 2718 | sense | 21 |
| GAAGUACUGAUUUAGCAUGUUGU | 1623 | gsAfsaguAfcUfGfauuuAfgCfauguusgsu | 2719 | antisense | 23 |
| CAACAUGCUAAAUCAGUACUU | 1624 | csasacauGfcUfAfAfaucaguacuuL96 | 2720 | sense | 21 |
| AAGUACUGAUUUAGCAUGUUGUU | 1625 | asAfsguaCfuGfAfuuuaGfcAfuguugsusu | 2721 | antisense | 23 |
| CCACAACUCAGGAUGAAAAAU | 1626 | cscsacaaCfuCfAfGfgaugaaaaauL96 | 2722 | sense | 21 |
| AUUUUUCAUCCUGAGUUGUGGCG | 1627 | asUfsuuuUfcAfUfccugAfgUfuguggscsg | 2723 | antisense | 23 |
| CACAACUCAGGAUGAAAAAUU | 1628 | csascaacUfcAfGfGfaugaaaaauuL96 | 2724 | sense | 21 |
| AAUUUUUCAUCCUGAGUUGUGGC | 1629 | asAfsuuuUfuCfAfuccuGfaGfuugugsgsc | 2725 | antisense | 23 |
| GCCGCCACAACUCAGGAUGAA | 1630 | gscscgccAfcAfAfCfucaggaugaaL96 | 2726 | sense | 21 |
| UUCAUCCUGAGUUGUGGCGGCAG | 1631 | usUfscauCfcUfGfaguuGfuGfgcggcsasg | 2727 | antisense | 23 |
| UGCCGCCACAACUCAGGAUGA | 1632 | usgsccgcCfaCfAfAfcucaggaugaL96 | 2728 | sense | 21 |
| UCAUCCUGAGUUGUGGCGGCAGU | 1633 | usCfsaucCfuGfAfguugUfgGfcggcasgsu | 2729 | antisense | 23 |
| GCAACCGUCUGGAUGAUGUGC | 1634 | gscsaaccGfuCfUfGfgaugaugugcL96 | 2730 | sense | 21 |
| GCACAUCAUCCAGACGGUUGCCC | 1635 | gsCfsacaUfcAfUfccagAfcGfguugcscsc | 2731 | antisense | 23 |
| CAACCGUCUGGAUGAUGUGCG | 1636 | csasaccgUfcUfGfGfaugaugugcgL96 | 2732 | sense | 21 |
| CGCACAUCAUCCAGACGGUUGCC | 1637 | csGfscacAfuCfAfuccaGfaCfgguugscsc | 2733 | antisense | 23 |
| CUGGGCAACCGUCUGGAUGAU | 1638 | csusgggcAfaCfCfGfucuggaugauL96 | 2734 | sense | 21 |
| AUCAUCCAGACGGUUGCCCAGGU | 1639 | asUfscauCfcAfGfacggUfuGfcccagsgsu | 2735 | antisense | 23 |
| CCUGGGCAACCGUCUGGAUGA | 1640 | cscsugggCfaAfCfCfgucuggaugaL96 | 2736 | sense | 21 |
| UCAUCCAGACGGUUGCCCAGGUA | 1641 | usCfsaucCfaGfAfcgguUfgCfccaggsusa | 2737 | antisense | 23 |
| GCAAAUGAUGAAGAAACUUUG | 1642 | gscsaaauGfaUfGfAfagaaacuuugL96 | 2738 | sense | 21 |
| CAAAGUUUCUUCAUCAUUUGCCC | 1643 | csAfsaagUfuUfCfuucaUfcAfuuugcscsc | 2739 | antisense | 23 |
| CAAAUGAUGAAGAAACUUUGG | 1644 | csasaaugAfuGfAfAfgaaacuuuggL96 | 2740 | sense | 21 |
| CCAAAGUUUCUUCAUCAUUUGCC | 1645 | csCfsaaaGfuUfUfcuucAfuCfauuugscsc | 2741 | antisense | 23 |
| UGGGGCAAAUGAUGAAGAAAC | 1646 | usgsgggcAfaAfUfGfaugaagaaacL96 | 2742 | sense | 21 |
| GUUUCUUCAUCAUUUGCCCCAGA | 1647 | gsUfsuucUfuCfAfucauUfuGfccccasgsa | 2743 | antisense | 23 |
| CUGGGGCAAAUGAUGAAGAAA | 1648 | csusggggCfaAfAfUfgaugaagaaaL96 | 2744 | sense | 21 |
| UUUCUUCAUCAUUUGCCCCAGAC | 1649 | usUfsucuUfcAfUfcauuUfgCfcccagsasc | 2745 | antisense | 23 |
| CCAAGGCUGUGUUUGUGGGGA | 1650 | cscsaaggCfuGfUfGfuuuguggggaL96 | 2746 | sense | 21 |
| UCCCCACAAACACAGCCUUGGCG | 1651 | usCfscccAfcAfAfacacAfgCfcuuggscsg | 2747 | antisense | 23 |
| CAAGGCUGUGUUUGUGGGGAG | 1652 | csasaggcUfgUfGfUfuuguggggagL96 | 2748 | sense | 21 |
| CUCCCCACAAACACAGCCUUGGC | 1653 | csUfscccCfaCfAfaacaCfaGfccuugsgsc | 2749 | antisense | 23 |
| GGCGCCAAGGCUGUGUUUGUG | 1654 | gsgscgccAfaGfGfCfuguguuugugL96 | 2750 | sense | 21 |
| CACAAACACAGCCUUGGCGCCAA | 1655 | csAfscaaAfcAfCfagccUfuGfgcgccsasa | 2751 | antisense | 23 |
| UGGCGCCAAGGCUGUGUUUGU | 1656 | usgsgcgcCfaAfGfGfcuguguuuguL96 | 2752 | sense | 21 |
| ACAAACACAGCCUUGGCGCCAAG | 1657 | asCfsaaaCfaCfAfgccuUfgGfcgccasasg | 2753 | antisense | 23 |
| ACUGCCGCCACAACUCAGGAU | 1658 | ascsugccGfcCfAfCfaacucaggauL96 | 2754 | sense | 21 |
| AUCCUGAGUUGUGGCGGCAGUUU | 1659 | asUfsccuGfaGfUfugugGfcGfgcagususu | 2755 | antisense | 23 |
| CUGCCGCCACAACUCAGGAUG | 1660 | csusgccgCfcAfCfAfacucaggaugL96 | 2756 | sense | 21 |
| CAUCCUGAGUUGUGGCGGCAGUU | 1661 | csAfsuccUfgAfGfuuguGfgCfggcagsusu | 2757 | antisense | 23 |
| UCAAACUGCCGCCACAACUCA | 1662 | uscsaaacUfgCfCfGfccacaacucaL96 | 2758 | sense | 21 |
| UGAGUUGUGGCGGCAGUUUGAAU | 1663 | usGfsaguUfgUfGfgcggCfaGfuuugasasu | 2759 | antisense | 23 |
| UUCAAACUGCCGCCACAACUC | 1664 | ususcaaaCfuGfCfCfgccacaacucL96 | 2760 | sense | 21 |
| GAGUUGUGGCGGCAGUUUGAAUC | 1665 | gsAfsguuGfuGfGfcggcAfgUfuugaasusc | 2761 | antisense | 23 |
| GGGAAGAUAUCAAAUGGCUGA | 1666 | gsgsgaagAfuAfUfCfaaauggcugaL96 | 2762 | sense | 21 |
| UCAGCCAUUUGAUAUCUUCCCAG | 1667 | usCfsagcCfaUfUfugauAfuCfuucccsasg | 2763 | antisense | 23 |
| GGAAGAUAUCAAAUGGCUGAG | 1668 | gsgsaagaUfaUfCfAfaauggcugagL96 | 2764 | sense | 21 |
| CUCAGCCAUUUGAUAUCUUCCCA | 1669 | csUfscagCfcAfUfuugaUfaUfcuuccscsa | 2765 | antisense | 23 |
| AGCUGGGAAGAUAUCAAAUGG | 1670 | asgscuggGfaAfGfAfuaucaaauggL96 | 2766 | sense | 21 |
| CCAUUUGAUAUCUUCCCAGCUGA | 1671 | csCfsauuUfgAfUfaucuUfcCfcagcusgsa | 2767 | antisense | 23 |
| CAGCUGGGAAGAUAUCAAAUG | 1672 | csasgcugGfgAfAfGfauaucaaaugL96 | 2768 | sense | 21 |
| CAUUUGAUAUCUUCCCAGCUGAU | 1673 | csAfsuuuGfaUfAfucuuCfcCfagcugsasu | 2769 | antisense | 23 |
| AAUCAGUACUUCCAAAGUCUA | 1674 | asasucagUfaCfUfUfccaaagucuaL96 | 2770 | sense | 21 |
| UAGACUUUGGAAGUACUGAUUUA | 1675 | usAfsgacUfuUfGfgaagUfaCfugauususa | 2771 | antisense | 23 |
| AUCAGUACUUCCAAAGUCUAU | 1676 | asuscaguAfcUfUfCfcaaagucuauL96 | 2772 | sense | 21 |
| AUAGACUUUGGAAGUACUGAUUU | 1677 | asUfsagaCfuUfUfggaaGfuAfcugaususu | 2773 | antisense | 23 |
| GCUAAAUCAGUACUUCCAAAG | 1678 | gscsuaaaUfcAfGfUfacuuccaaagL96 | 2774 | sense | 21 |
| CUUUGGAAGUACUGAUUUAGCAU | 1679 | csUfsuugGfaAfGfuacuGfaUfuuagcsasu | 2775 | antisense | 23 |
| UGCUAAAUCAGUACUUCCAAA | 1680 | usgscuaaAfuCfAfGfuacuuccaaaL96 | 2776 | sense | 21 |
| UUUGGAAGUACUGAUUUAGCAUG | 1681 | usUfsuggAfaGfUfacugAfuUfuagcasusg | 2777 | antisense | 23 |
| UCAGCAUGCCAAUAUGUGUGG | 1682 | uscsagcaUfgCfCfAfauauguguggL96 | 2778 | sense | 21 |
| CCACACAUAUUGGCAUGCUGACC | 1683 | csCfsacaCfaUfAfuuggCfaUfgcugascsc | 2779 | antisense | 23 |
| CAGCAUGCCAAUAUGUGUGGG | 1684 | csasgcauGfcCfAfAfuaugugugggL96 | 2780 | sense | 21 |
| CCCACACAUAUUGGCAUGCUGAC | 1685 | csCfscacAfcAfUfauugGfcAfugcugsasc | 2781 | antisense | 23 |
| AGGGUCAGCAUGCCAAUAUGU | 1686 | asgsggucAfgCfAfUfgccaauauguL96 | 2782 | sense | 21 |
| ACAUAUUGGCAUGCUGACCCUCU | 1687 | asCfsauaUfuGfGfcaugCfuGfacccuscsu | 2783 | antisense | 23 |
| GAGGGUCAGCAUGCCAAUAUG | 1688 | gsasggguCfaGfCfAfugccaauaugL96 | 2784 | sense | 21 |
| CAUAUUGGCAUGCUGACCCUCUG | 1689 | csAfsuauUfgGfCfaugcUfgAfcccucsusg | 2785 | antisense | 23 |
| GCAUAUGUGGCUAAAGCAAUA | 1690 | gscsauauGfuGfGfCfuaaagcaauaL96 | 2786 | sense | 21 |
| UAUUGCUUUAGCCACAUAUGCAG | 1691 | usAfsuugCfuUfUfagccAfcAfuaugcsasg | 2787 | antisense | 23 |
| CAUAUGUGGCUAAAGCAAUAG | 1692 | csasuaugUfgGfCfUfaaagcaauagL96 | 2788 | sense | 21 |
| CUAUUGCUUUAGCCACAUAUGCA | 1693 | csUfsauuGfcUfUfuagcCfaCfauaugscsa | 2789 | antisense | 23 |
| UGCUGCAUAUGUGGCUAAAGC | 1694 | usgscugcAfuAfUfGfuggcuaaagcL96 | 2790 | sense | 21 |
| GCUUUAGCCACAUAUGCAGCAAG | 1695 | gsCfsuuuAfgCfCfacauAfuGfcagcasasg | 2791 | antisense | 23 |
| UUGCUGCAUAUGUGGCUAAAG | 1696 | ususgcugCfaUfAfUfguggcuaaagL96 | 2792 | sense | 21 |
| CUUUAGCCACAUAUGCAGCAAGU | 1697 | csUfsuuaGfcCfAfcauaUfgCfagcaasgsu | 2793 | antisense | 23 |
| AAAUGAUGAAGAAACUUUGGC | 1698 | asasaugaUfgAfAfGfaaacuuuggcL96 | 2794 | sense | 21 |
| GCCAAAGUUUCUUCAUCAUUUGC | 1699 | gsCfscaaAfgUfUfucuuCfaUfcauuusgsc | 2795 | antisense | 23 |
| AAUGAUGAAGAAACUUUGGCU | 1700 | asasugauGfaAfGfAfaacuuuggcuL96 | 2796 | sense | 21 |
| AGCCAAAGUUUCUUCAUCAUUUG | 1701 | asGfsccaAfaGfUfuucuUfcAfucauususg | 2797 | antisense | 23 |
| GGGCAAAUGAUGAAGAAACUU | 1702 | gsgsgcaaAfuGfAfUfgaagaaacuuL96 | 2798 | sense | 21 |
| AAGUUUCUUCAUCAUUUGCCCCA | 1703 | asAfsguuUfcUfUfcaucAfuUfugcccscsa | 2799 | antisense | 23 |
| GGGGCAAAUGAUGAAGAAACU | 1704 | gsgsggcaAfaUfGfAfugaagaaacuL96 | 2800 | sense | 21 |
| AGUUUCUUCAUCAUUUGCCCCAG | 1705 | asGfsuuuCfuUfCfaucaUfuUfgccccsasg | 2801 | antisense | 23 |
| GAGAUACUAAAGGAAGAAUUC | 1706 | gsasgauaCfuAfAfAfggaagaauucL96 | 2802 | sense | 21 |
| GAAUUCUUCCUUUAGUAUCUCGA | 1707 | gsAfsauuCfuUfCfcuuuAfgUfaucucsgsa | 2803 | antisense | 23 |
| AGAUACUAAAGGAAGAAUUCC | 1708 | asgsauacUfaAfAfGfgaagaauuccL96 | 2804 | sense | 21 |
| GGAAUUCUUCCUUUAGUAUCUCG | 1709 | gsGfsaauUfcUfUfccuuUfaGfuaucuscsg | 2805 | antisense | 23 |
| CCUCGAGAUACUAAAGGAAGA | 1710 | cscsucgaGfaUfAfCfuaaaggaagaL96 | 2806 | sense | 21 |
| UCUUCCUUUAGUAUCUCGAGGAC | 1711 | usCfsuucCfuUfUfaguaUfcUfegaggsasc | 2807 | antisense | 23 |
| UCCUCGAGAUACUAAAGGAAG | 1712 | uscscucgAfgAfUfAfcuaaaggaagL96 | 2808 | sense | 21 |
| CUUCCUUUAGUAUCUCGAGGACA | 1713 | csUfsuccUfuUfAfguauCfuCfgaggascsa | 2809 | antisense | 23 |
| ACAACUCAGGAUGAAAAAUUU | 1714 | ascsaacuCfaGfGfAfugaaaaauuuL96 | 2810 | sense | 21 |
| AAAUUUUUCAUCCUGAGUUGUGG | 1715 | asAfsauuUfuUfCfauccUfgAfguugusgsg | 2811 | antisense | 23 |
| CAACUCAGGAUGAAAAAUUUU | 1716 | csasacucAfgGfAfUfgaaaaauuuuL96 | 2812 | sense | 21 |
| AAAAUUUUUCAUCCUGAGUUGUG | 1717 | asAfsaauUfuUfUfcaucCfuGfaguugsusg | 2813 | antisense | 23 |
| CGCCACAACUCAGGAUGAAAA | 1718 | csgsccacAfaCfUfCfaggaugaaaaL96 | 2814 | sense | 21 |
| UUUUCAUCCUGAGUUGUGGCGGC | 1719 | usUfsuucAfuCfCfugagUfuGfuggcgsgsc | 2815 | antisense | 23 |
| CCGCCACAACUCAGGAUGAAA | 1720 | cscsgccaCfaAfCfUfcaggaugaaaL96 | 2816 | sense | 21 |
| UUUCAUCCUGAGUUGUGGCGGCA | 1721 | usUfsucaUfcCfUfgaguUfgUfggcggscsa | 2817 | antisense | 23 |
| AGGGAAGGUGGAAGUCUUCCU | 1722 | asgsggaaGfgUfGfGfaagucuuccuL96 | 2818 | sense | 21 |
| AGGAAGACUUCCACCUUCCCUUC | 1723 | asGfsgaaGfaCfUfuccaCfcUfucccususc | 2819 | antisense | 23 |
| GGGAAGGUGGAAGUCUUCCUG | 1724 | gsgsgaagGfuGfGfAfagucuuccugL96 | 2820 | sense | 21 |
| CAGGAAGACUUCCACCUUCCCUU | 1725 | csAfsggaAfgAfCfuuccAfcCfuucccsusu | 2821 | antisense | 23 |
| UGGAAGGGAAGGUGGAAGUCU | 1726 | usgsgaagGfgAfAfGfguggaagucuL96 | 2822 | sense | 21 |
| AGACUUCCACCUUCCCUUCCACA | 1727 | asGfsacuUfcCfAfccuuCfcCfuuccascsa | 2823 | antisense | 23 |
| GUGGAAGGGAAGGUGGAAGUC | 1728 | gsusggaaGfgGfAfAfgguggaagucL96 | 2824 | sense | 21 |
| GACUUCCACCUUCCCUUCCACAG | 1729 | gsAfscuuCfcAfCfcuucCfcUfuccacsasg | 2825 | antisense | 23 |
| GGCGAGCUUGCCACUGUGAGA | 1730 | gsgscgagCfuUfGfCfcacugugagaL96 | 2826 | sense | 21 |
| UCUCACAGUGGCAAGCUCGCCGU | 1731 | usCfsucaCfaGfUfggcaAfgCfucgccsgsu | 2827 | antisense | 23 |
| GCGAGCUUGCCACUGUGAGAG | 1732 | gscsgagcUfuGfCfCfacugugagagL96 | 2828 | sense | 21 |
| CUCUCACAGUGGCAAGCUCGCCG | 1733 | csUfscucAfcAfGfuggcAfaGfcucgcscsg | 2829 | antisense | 23 |
| GGACGGCGAGCUUGCCACUGU | 1734 | gsgsacggCfgAfGfCfuugccacuguL96 | 2830 | sense | 21 |
| ACAGUGGCAAGCUCGCCGUCCAC | 1735 | asCfsaguGfgCfAfagcuCfgCfcguccsasc | 2831 | antisense | 23 |
| UGGACGGCGAGCUUGCCACUG | 1736 | usgsgacgGfcGfAfGfcuugccacugL96 | 2832 | sense | 21 |
| CAGUGGCAAGCUCGCCGUCCACA | 1737 | csAfsgugGfcAfAfgcucGfcCfguccascsa | 2833 | antisense | 23 |
| AUGUGCGUAACAGAUUCAAAC | 1738 | asusgugcGfuAfAfCfagauucaaacL96 | 2834 | sense | 21 |
| GUUUGAAUCUGUUACGCACAUCA | 1739 | gsUfsuugAfaUfCfuguuAfcGfcacauscsa | 2835 | antisense | 23 |
| UGUGCGUAACAGAUUCAAACU | 1740 | usgsugcgUfaAfCfAfgauucaaacuL96 | 2836 | sense | 21 |
| AGUUUGAAUCUGUUACGCACAUC | 1741 | asGfsuuuGfaAfUfcuguUfaCfgcacasusc | 2837 | antisense | 23 |
| GAUGAUGUGCGUAACAGAUUC | 1742 | gsasugauGfuGfCfGfuaacagauucL96 | 2838 | sense | 21 |
| GAAUCUGUUACGCACAUCAUCCA | 1743 | gsAfsaucUfgUfUfacgcAfcAfucaucscsa | 2839 | antisense | 23 |
| GGAUGAUGUGCGUAACAGAUU | 1744 | gsgsaugaUfgUfGfCfguaacagauuL96 | 2840 | sense | 21 |
| AAUCUGUUACGCACAUCAUCCAG | 1745 | asAfsucuGfuUfAfcgcaCfaUfcauccsasg | 2841 | antisense | 23 |
| GGGUCAGCAUGCCAAUAUGUG | 1746 | gsgsgucaGfcAfUfGfccaauaugugL96 | 2842 | sense | 21 |
| CACAUAUUGGCAUGCUGACCCUC | 1747 | csAfscauAfuUfGfgcauGfcUfgacccsusc | 2843 | antisense | 23 |
| GGUCAGCAUGCCAAUAUGUGU | 1748 | gsgsucagCfaUfGfCfcaauauguguL96 | 2844 | sense | 21 |
| ACACAUAUUGGCAUGCUGACCCU | 1749 | asCfsacaUfaUfUfggcaUfgCfugaccscsu | 2845 | antisense | 23 |
| CAGAGGGUCAGCAUGCCAAUA | 1750 | csasgaggGfuCfAfGfcaugccaauaL96 | 2846 | sense | 21 |
| UAUUGGCAUGCUGACCCUCUGUC | 1751 | usAfsuugGfcAfUfgcugAfcCfcucugsusc | 2847 | antisense | 23 |
| ACAGAGGGUCAGCAUGCCAAU | 1752 | ascsagagGfgUfCfAfgcaugccaauL96 | 2848 | sense | 21 |
| AUUGGCAUGCUGACCCUCUGUCC | 1753 | asUfsuggCfaUfGfcugaCfcCfucuguscsc | 2849 | antisense | 23 |
| GCUUGAAUGGGAUCUUGGUGU | 1754 | gscsuugaAfuGfGfGfaucuugguguL96 | 2850 | sense | 21 |
| ACACCAAGAUCCCAUUCAAGCCA | 1755 | asCfsaccAfaGfAfucccAfuUfcaagcscsa | 2851 | antisense | 23 |
| CUUGAAUGGGAUCUUGGUGUC | 1756 | csusugaaUfgGfGfAfucuuggugucL96 | 2852 | sense | 21 |
| GACACCAAGAUCCCAUUCAAGCC | 1757 | gsAfscacCfaAfGfauccCfaUfucaagscsc | 2853 | antisense | 23 |
| CAUGGCUUGAAUGGGAUCUUG | 1758 | csasuggcUfuGfAfAfugggaucuugL96 | 2854 | sense | 21 |
| CAAGAUCCCAUUCAAGCCAUGUU | 1759 | csAfsagaUfcCfCfauucAfaGfccaugsusu | 2855 | antisense | 23 |
| ACAUGGCUUGAAUGGGAUCUU | 1760 | ascsauggCfuUfGfAfaugggaucuuL96 | 2856 | sense | 21 |
| AAGAUCCCAUUCAAGCCAUGUUU | 1761 | asAfsgauCfcCfAfuucaAfgCfcaugususu | 2857 | antisense | 23 |
| UCAAAUGGCUGAGAAGACUGA | 1762 | uscsaaauGfgCfUfGfagaagacugaL96 | 2858 | sense | 21 |
| UCAGUCUUCUCAGCCAUUUGAUA | 1763 | usCfsaguCfuUfCfucagCfcAfuuugasusa | 2859 | antisense | 23 |
| CAAAUGGCUGAGAAGACUGAC | 1764 | csasaaugGfcUfGfAfgaagacugacL96 | 2860 | sense | 21 |
| GUCAGUCUUCUCAGCCAUUUGAU | 1765 | gsUfscagUfcUfUfcucaGfcCfauuugsasu | 2861 | antisense | 23 |
| GAUAUCAAAUGGCUGAGAAGA | 1766 | gsasuaucAfaAfUfGfgcugagaagaL96 | 2862 | sense | 21 |
| UCUUCUCAGCCAUUUGAUAUCUU | 1767 | usCfsuucUfcAfGfccauUfuGfauaucsusu | 2863 | antisense | 23 |
| AGAUAUCAAAUGGCUGAGAAG | 1768 | asgsauauCfaAfAfUfggcugagaagL96 | 2864 | sense | 21 |
| CUUCUCAGCCAUUUGAUAUCUUC | 1769 | csUfsucuCfaGfCfcauuUfgAfuaucususc | 2865 | antisense | 23 |
| GAAAGUCAUCGACAAGACAUU | 1770 | gsasaaguCfaUfCfGfacaagacauuL96 | 2866 | sense | 21 |
| AAUGUCUUGUCGAUGACUUUCAC | 1771 | asAfsuguCfuUfGfucgaUfgAfcuuucsasc | 2867 | antisense | 23 |
| AAAGUCAUCGACAAGACAUUG | 1772 | asasagucAfuCfGfAfcaagacauugL96 | 2868 | sense | 21 |
| CAAUGUCUUGUCGAUGACUUUCA | 1773 | csAfsaugUfcUfUfgucgAfuGfacuuuscsa | 2869 | antisense | 23 |
| AUGUGAAAGUCAUCGACAAGA | 1774 | asusgugaAfaGfUfCfaucgacaagaL96 | 2870 | sense | 21 |
| UCUUGUCGAUGACUUUCACAUUC | 1775 | usCfsuugUfcGfAfugacUfuUfcacaususc | 2871 | antisense | 23 |
| AAUGUGAAAGUCAUCGACAAG | 1776 | asasugugAfaAfGfUfcaucgacaagL96 | 2872 | sense | 21 |
| CUUGUCGAUGACUUUCACAUUCU | 1777 | csUfsuguCfgAfUfgacuUfuCfacauuscsu | 2873 | antisense | 23 |
| GGCUAAUUUGUAUCAAUGAUU | 1778 | gsgscuaaUfuUfGfUfaucaaugauuL96 | 2874 | sense | 21 |
| AAUCAUUGAUACAAAUUAGCCGG | 1779 | asAfsucaUfuGfAfuacaAfaUfuagccsgsg | 2875 | antisense | 23 |
| GCUAAUUUGUAUCAAUGAUUA | 1780 | gscsuaauUfuGfUfAfucaaugauuaL96 | 2876 | sense | 21 |
| UAAUCAUUGAUACAAAUUAGCCG | 1781 | usAfsaucAfuUfGfauacAfaAfuuagcscsg | 2877 | antisense | 23 |
| CCCCGGCUAAUUUGUAUCAAU | 1782 | cscsccggCfuAfAfUfuuguaucaauL96 | 2878 | sense | 21 |
| AUUGAUACAAAUUAGCCGGGGGA | 1783 | asUfsugaUfaCfAfaauuAfgCfcggggsgsa | 2879 | antisense | 23 |
| CCCCCGGCUAAUUUGUAUCAA | 1784 | cscscccgGfcUfAfAfuuuguaucaaL96 | 2880 | sense | 21 |
| UUGAUACAAAUUAGCCGGGGGAG | 1785 | usUfsgauAfcAfAfauuaGfcCfgggggsasg | 2881 | antisense | 23 |
| UGUCGACUUCUGUUUUAGGAC | 1786 | usgsucgaCfuUfCfUfguuuuaggacL96 | 2882 | sense | 21 |
| GUCCUAAAACAGAAGUCGACAGA | 1787 | gsUfsccuAfaAfAfcagaAfgUfcgacasgsa | 2883 | antisense | 23 |
| GUCGACUUCUGUUUUAGGACA | 1788 | gsuscgacUfuCfUfGfuuuuaggacaL96 | 2884 | sense | 21 |
| UGUCCUAAAACAGAAGUCGACAG | 1789 | usGfsuccUfaAfAfacagAfaGfucgacsasg | 2885 | antisense | 23 |
| GAUCUGUCGACUUCUGUUUUA | 1790 | gsasucugUfcGfAfCfuucuguuuuaL96 | 2886 | sense | 21 |
| UAAAACAGAAGUCGACAGAUCUG | 1791 | usAfsaaaCfaGfAfagucGfaCfagaucsusg | 2887 | antisense | 23 |
| AGAUCUGUCGACUUCUGUUUU | 1792 | asgsaucuGfuCfGfAfcuucuguuuuL96 | 2888 | sense | 21 |
| AAAACAGAAGUCGACAGAUCUGU | 1793 | asAfsaacAfgAfAfgucgAfcAfgaucusgsu | 2889 | antisense | 23 |
| CCGAGAAGUCACCAAGAAGCU | 1794 | cscsgagaAfgUfCfAfccaagaagcuL96 | 2890 | sense | 21 |
| AGCUUCUUGGUGACUUCUCGGUC | 1795 | asGfscuuCfuUfGfgugaCfuUfcucggsusc | 2891 | antisense | 23 |
| CGAGAAGUCACCAAGAAGCUA | 1796 | csgsagaaGfuCfAfCfcaagaagcuaL96 | 2892 | sense | 21 |
| UAGCUUCUUGGUGACUUCUCGGU | 1797 | usAfsgcuUfcUfUfggugAfcUfucucgsgsu | 2893 | antisense | 23 |
| AGGACCGAGAAGUCACCAAGA | 1798 | asgsgaccGfaGfAfAfgucaccaagaL96 | 2894 | sense | 21 |
| UCUUGGUGACUUCUCGGUCCUUG | 1799 | usCfsuugGfuGfAfcuucUfcGfguccususg | 2895 | antisense | 23 |
| AAGGACCGAGAAGUCACCAAG | 1800 | asasggacCfgAfGfAfagucaccaagL96 | 2896 | sense | 21 |
| CUUGGUGACUUCUCGGUCCUUGU | 1801 | csUfsuggUfgAfCfuucuCfgGfuccuusgsu | 2897 | antisense | 23 |
| AAACAUGGCUUGAAUGGGAUC | 1802 | asasacauGfgCfUfUfgaaugggaucL96 | 2898 | sense | 21 |
| GAUCCCAUUCAAGCCAUGUUUAA | 1803 | gsAfsuccCfaUfUfcaagCfcAfuguuusasa | 2899 | antisense | 23 |
| AACAUGGCUUGAAUGGGAUCU | 1804 | asascaugGfcUfUfGfaaugggaucuL96 | 2900 | sense | 21 |
| AGAUCCCAUUCAAGCCAUGUUUA | 1805 | asGfsaucCfcAfUfucaaGfcCfauguususa | 2901 | antisense | 23 |
| UGUUAAACAUGGCUUGAAUGG | 1806 | usgsuuaaAfcAfUfGfgcuugaauggL96 | 2902 | sense | 21 |
| CCAUUCAAGCCAUGUUUAACAGC | 1807 | csCfsauuCfaAfGfccauGfuUfuaacasgsc | 2903 | antisense | 23 |
| CUGUUAAACAUGGCUUGAAUG | 1808 | csusguuaAfaCfAfUfggcuugaaugL96 | 2904 | sense | 21 |
| CAUUCAAGCCAUGUUUAACAGCC | 1809 | csAfsuucAfaGfCfcaugUfuUfaacagscsc | 2905 | antisense | 23 |
| GACUUGCUGCAUAUGUGGCUA | 1810 | gsascuugCfuGfCfAfuauguggcuaL96 | 2906 | sense | 21 |
| UAGCCACAUAUGCAGCAAGUCCA | 1811 | usAfsgccAfcAfUfaugcAfgCfaagucscsa | 2907 | antisense | 23 |
| ACUUGCUGCAUAUGUGGCUAA | 1812 | ascsuugcUfgCfAfUfauguggcuaaL96 | 2908 | sense | 21 |
| UUAGCCACAUAUGCAGCAAGUCC | 1813 | usUfsagcCfaCfAfuaugCfaGfcaaguscsc | 2909 | antisense | 23 |
| AGUGGACUUGCUGCAUAUGUG | 1814 | asgsuggaCfuUfGfCfugcauaugugL96 | 2910 | sense | 21 |
| CACAUAUGCAGCAAGUCCACUGU | 1815 | csAfscauAfuGfCfagcaAfgUfccacusgsu | 2911 | antisense | 23 |
| CAGUGGACUUGCUGCAUAUGU | 1816 | csasguggAfcUfUfGfcugcauauguL96 | 2912 | sense | 21 |
| ACAUAUGCAGCAAGUCCACUGUC | 1817 | asCfsauaUfgCfAfgcaaGfuCfcacugsusc | 2913 | antisense | 23 |
| UAAAUCAGUACUUCCAAAGUC | 1818 | usasaaucAfgUfAfCfuuccaaagucL96 | 2914 | sense | 21 |
| GACUUUGGAAGUACUGAUUUAGC | 1819 | gsAfscuuUfgGfAfaguaCfuGfauuuasgsc | 2915 | antisense | 23 |
| AAAUCAGUACUUCCAAAGUCU | 1820 | asasaucaGfuAfCfUfuccaaagucuL96 | 2916 | sense | 21 |
| AGACUUUGGAAGUACUGAUUUAG | 1821 | asGfsacuUfuGfGfaaguAfcUfgauuusasg | 2917 | antisense | 23 |
| AUGCUAAAUCAGUACUUCCAA | 1822 | asusgcuaAfaUfCfAfguacuuccaaL96 | 2918 | sense | 21 |
| UUGGAAGUACUGAUUUAGCAUGU | 1823 | usUfsggaAfgUfAfcugaUfuUfagcausgsu | 2919 | antisense | 23 |
| CAUGCUAAAUCAGUACUUCCA | 1824 | csasugcuAfaAfUfCfaguacuuccaL96 | 2920 | sense | 21 |
| UGGAAGUACUGAUUUAGCAUGUU | 1825 | usGfsgaaGfuAfCfugauUfuAfgcaugsusu | 2921 | antisense | 23 |
| UCCUCAAUUGAAGAAGUGGCG | 1826 | uscscucaAfuUfGfAfagaaguggcgL96 | 2922 | sense | 21 |
| CGCCACUUCUUCAAUUGAGGAGG | 1827 | csGfsccaCfuUfCfuucaAfuUfgaggasgsg | 2923 | antisense | 23 |
| CCUCAAUUGAAGAAGUGGCGG | 1828 | cscsucaaUfuGfAfAfgaaguggcggL96 | 2924 | sense | 21 |
| CCGCCACUUCUUCAAUUGAGGAG | 1829 | csCfsgccAfcUfUfcuucAfaUfugaggsasg | 2925 | antisense | 23 |
| CACCUCCUCAAUUGAAGAAGU | 1830 | csasccucCfuCfAfAfuugaagaaguL96 | 2926 | sense | 21 |
| ACUUCUUCAAUUGAGGAGGUGGC | 1831 | asCfsuucUfuCfAfauugAfgGfaggugsgsc | 2927 | antisense | 23 |
| CCACCUCCUCAAUUGAAGAAG | 1832 | cscsaccuCfcUfCfAfauugaagaagL96 | 2928 | sense | 21 |
| CUUCUUCAAUUGAGGAGGUGGCC | 1833 | csUfsucuUfcAfAfuugaGfgAfgguggscsc | 2929 | antisense | 23 |
| CAAGAUGUCCUCGAGAUACUA | 1834 | csasagauGfuCfCfUfcgagauacuaL96 | 2930 | sense | 21 |
| UAGUAUCUCGAGGACAUCUUGAA | 1835 | usAfsguaUfcUfCfgaggAfcAfucuugsasa | 2931 | antisense | 23 |
| AAGAUGUCCUCGAGAUACUAA | 1836 | asasgaugUfcCfUfCfgagauacuaaL96 | 2932 | sense | 21 |
| UUAGUAUCUCGAGGACAUCUUGA | 1837 | usUfsaguAfuCfUfcgagGfaCfaucuusgsa | 2933 | antisense | 23 |
| UGUUCAAGAUGUCCUCGAGAU | 1838 | usgsuucaAfgAfUfGfuccucgagauL96 | 2934 | sense | 21 |
| AUCUCGAGGACAUCUUGAACACC | 1839 | asUfscucGfaGfGfacauCfuUfgaacascsc | 2935 | antisense | 23 |
| GUGUUCAAGAUGUCCUCGAGA | 1840 | gsusguucAfaGfAfUfguccucgagaL96 | 2936 | sense | 21 |
| UCUCGAGGACAUCUUGAACACCU | 1841 | usCfsucgAfgGfAfcaucUfuGfaacacscsu | 2937 | antisense | 23 |
| ACAUGCUAAAUCAGUACUUCC | 1842 | ascsaugcUfaAfAfUfcaguacuuccL96 | 2938 | sense | 21 |
| GGAAGUACUGAUUUAGCAUGUUG | 1843 | gsGfsaagUfaCfUfgauuUfaGfcaugususg | 2939 | antisense | 23 |
| CAUGCUAAAUCAGUACUUCCA | 1844 | csasugcuAfaAfUfCfaguacuuccaL96 | 2940 | sense | 21 |
| UGGAAGUACUGAUUUAGCAUGUU | 1845 | usGfsgaaGfuAfCfugauUfuAfgcaugsusu | 2941 | antisense | 23 |
| AACAACAUGCUAAAUCAGUAC | 1846 | asascaacAfuGfCfUfaaaucaguacL96 | 2942 | sense | 21 |
| GUACUGAUUUAGCAUGUUGUUCA | 1847 | gsUfsacuGfaUfUfuagcAfuGfuuguuscsa | 2943 | antisense | 23 |
| GAACAACAUGCUAAAUCAGUA | 1848 | gsasacaaCfaUfGfCfuaaaucaguaL96 | 2944 | sense | 21 |
| UACUGAUUUAGCAUGUUGUUCAU | 1849 | usAfscugAfuUfUfagcaUfgUfuguucsasu | 2945 | antisense | 23 |
| GAAAGGCACUGAUGUUCUGAA | 1850 | gsasaaggCfaCfUfGfauguucugaaL96 | 2946 | sense | 21 |
| UUCAGAACAUCAGUGCCUUUCCG | 1851 | usUfscagAfaCfAfucagUfgCfcuuucscsg | 2947 | antisense | 23 |
| AAAGGCACUGAUGUUCUGAAA | 1852 | asasaggcAfcUfGfAfuguucugaaaL96 | 2948 | sense | 21 |
| UUUCAGAACAUCAGUGCCUUUCC | 1853 | usUfsucaGfaAfCfaucaGfuGfccuuuscsc | 2949 | antisense | 23 |
| UGCGGAAAGGCACUGAUGUUC | 1854 | usgscggaAfaGfGfCfacugauguucL96 | 2950 | sense | 21 |
| GAACAUCAGUGCCUUUCCGCACA | 1855 | gsAfsacaUfcAfGfugccUfuUfccgcascsa | 2951 | antisense | 23 |
| GUGCGGAAAGGCACUGAUGUU | 1856 | gsusgcggAfaAfGfGfcacugauguuL96 | 2952 | sense | 21 |
| AACAUCAGUGCCUUUCCGCACAC | 1857 | asAfscauCfaGfUfgccuUfuCfcgcacsasc | 2953 | antisense | 23 |
| GUCAGCAUGCCAAUAUGUGUG | 1858 | gsuscagcAfuGfCfCfaauaugugugL96 | 2954 | sense | 21 |
| CACACAUAUUGGCAUGCUGACCC | 1859 | csAfscacAfuAfUfuggcAfuGfcugacscsc | 2955 | antisense | 23 |
| UCAGCAUGCCAAUAUGUGUGG | 1860 | uscsagcaUfgCfCfAfauauguguggL96 | 2956 | sense | 21 |
| CCACACAUAUUGGCAUGCUGACC | 1861 | csCfsacaCfaUfAfuuggCfaUfgcugascsc | 2957 | antisense | 23 |
| GAGGGUCAGCAUGCCAAUAUG | 1862 | gsasggguCfaGfCfAfugccaauaugL96 | 2958 | sense | 21 |
| CAUAUUGGCAUGCUGACCCUCUG | 1863 | csAfsuauUfgGfCfaugcUfgAfcccucsusg | 2959 | antisense | 23 |
| AGAGGGUCAGCAUGCCAAUAU | 1864 | asgsagggUfcAfGfCfaugccaauauL96 | 2960 | sense | 21 |
| AUAUUGGCAUGCUGACCCUCUGU | 1865 | asUfsauuGfgCfAfugcuGfaCfccucusgsu | 2961 | antisense | 23 |
| GAUGCUCCGGAAUGUUGCUGA | 1866 | gsasugcuCfcGfGfAfauguugcugaL96 | 2962 | sense | 21 |
| UCAGCAACAUUCCGGAGCAUCCU | 1867 | usCfsagcAfaCfAfuuccGfgAfgcaucscsu | 2963 | antisense | 23 |
| AUGCUCCGGAAUGUUGCUGAA | 1868 | asusgcucCfgGfAfAfuguugcugaaL96 | 2964 | sense | 21 |
| UUCAGCAACAUUCCGGAGCAUCC | 1869 | usUfscagCfaAfCfauucCfgGfagcauscsc | 2965 | antisense | 23 |
| CAAGGAUGCUCCGGAAUGUUG | 1870 | csasaggaUfgCfUfCfcggaauguugL96 | 2966 | sense | 21 |
| CAACAUUCCGGAGCAUCCUUGGA | 1871 | csAfsacaUfuCfCfggagCfaUfccuugsgsa | 2967 | antisense | 23 |
| CCAAGGAUGCUCCGGAAUGUU | 1872 | cscsaaggAfuGfCfUfccggaauguuL96 | 2968 | sense | 21 |
| AACAUUCCGGAGCAUCCUUGGAU | 1873 | asAfscauUfcCfGfgagcAfuCfcuuggsasu | 2969 | antisense | 23 |
| GCGUAACAGAUUCAAACUGCC | 1874 | gscsguaaCfaGfAfUfucaaacugccL96 | 2970 | sense | 21 |
| GGCAGUUUGAAUCUGUUACGCAC | 1875 | gsGfscagUfuUfGfaaucUfgUfuacgcsasc | 2971 | antisense | 23 |
| CGUAACAGAUUCAAACUGCCG | 1876 | csgsuaacAfgAfUfUfcaaacugccgL96 | 2972 | sense | 21 |
| CGGCAGUUUGAAUCUGUUACGCA | 1877 | csGfsgcaGfuUfUfgaauCfuGfuuacgscsa | 2973 | antisense | 23 |
| AUGUGCGUAACAGAUUCAAAC | 1878 | asusgugcGfuAfAfCfagauucaaacL96 | 2974 | sense | 21 |
| GUUUGAAUCUGUUACGCACAUCA | 1879 | gsUfsuugAfaUfCfuguuAfcGfcacauscsa | 2975 | antisense | 23 |
| GAUGUGCGUAACAGAUUCAAA | 1880 | gsasugugCfgUfAfAfcagauucaaaL96 | 2976 | sense | 21 |
| UUUGAAUCUGUUACGCACAUCAU | 1881 | usUfsugaAfuCfUfguuaCfgCfacaucsasu | 2977 | antisense | 23 |
| AGAGAAGAUGGGCUACAAGGC | 1882 | asgsagaaGfaUfGfGfgcuacaaggcL96 | 2978 | sense | 21 |
| GCCUUGUAGCCCAUCUUCUCUGC | 1883 | gsCfscuuGfuAfGfcccaUfcUfucucusgsc | 2979 | antisense | 23 |
| GAGAAGAUGGGCUACAAGGCC | 1884 | gsasgaagAfuGfGfGfcuacaaggccL96 | 2980 | sense | 21 |
| GGCCUUGUAGCCCAUCUUCUCUG | 1885 | gsGfsccuUfgUfAfgcccAfuCfuucucsusg | 2981 | antisense | 23 |
| AGGCAGAGAAGAUGGGCUACA | 1886 | asgsgcagAfgAfAfGfaugggcuacaL96 | 2982 | sense | 21 |
| UGUAGCCCAUCUUCUCUGCCUGC | 1887 | usGfsuagCfcCfAfucuuCfuCfugccusgsc | 2983 | antisense | 23 |
| CAGGCAGAGAAGAUGGGCUAC | 1888 | csasggcaGfaGfAfAfgaugggcuacL96 | 2984 | sense | 21 |
| GUAGCCCAUCUUCUCUGCCUGCC | 1889 | gsUfsagcCfcAfUfcuucUfcUfgccugscsc | 2985 | antisense | 23 |

TABLE 13
Modified antisense polynucleotides targeting HAO1.

| | | | SEQ |
|---|---|---|---|
| Target | Oligo Name | Sequence 5′-3′ | ID NO: |
| HAO1 | A-133284.1 | gsgsgsasgs(5MdC)sdAsdTsdTsdTsdTs(5MdC)sdAs(5MdC)sdAsgsgsususa | 4155 |
| HAO1 | A-133285.1 | asasususasdGs(5MdC)s(5MdC)sdGsdGsdGsdGsdGsdAsdGscsasususu | 4156 |
| HAO1 | A-133286.1 | asuscsasusdTsdGsdAsdTsdAs(5MdC)sdAsdAsdAsdTsusasgscsc | 4157 |
| HAO1 | A-133287.1 | gsususgsusdTs(5MdC)sdAsdTsdAsdAsdTs(5MdC)sdAsdTsusgsasusa | 4158 |
| HAO1 | A-133288.1 | gsasusususdAsdGs(5MdC)sdAsdTsdGsdTsdTsdGsdTsuscsasusa | 4159 |
| HAO1 | A-133289.1 | ususgsgsasdAsdGsdTsdAs(5MdC)sdTsdGsdAsdTsdTsusasgscsa | 4160 |
| HAO1 | A-133290.1 | csasusasusdAsdTsdAsdGsdAs(5MdC)sdTsdTsdTsdGsgsasasgsu | 4161 |
| HAO1 | A-133291.1 | csusgsusasdAsdTsdAsdGsdTs(5MdC)sdAsdTsdAsdTsasusasgsa | 4162 |
| HAO1 | A-133292.1 | ususgscscs(5MdC)s(5MdC)sdAsdGsdAs(5MdC)s(5MdC)sdTsdGsdTsasasusasg | 4163 |
| HAO1 | A-133293.1 | ususcsusus(5MdC)sdAsdTs(5MdC)sdAsdTsdTsdTsdGs(5MdC)scscscsasg | 4164 |
| HAO1 | A-133294.1 | usasuscsasdGs(5MdC)s(5MdC)sdAsdAsdAsdGsdTsdTsdTscsususcsa | 4165 |
| HAO1 | A-133295.1 | gscsusgscsdAsdAsdTsdAsdTsdTsdAsdTs(5MdC)sdAsgscscsasa | 4166 |
| HAO1 | A-133296.1 | asuscsusgsdGsdAsdAsdAsdAsdTsdGs(5MdC)sdTsdGscsasasusa | 4167 |
| HAO1 | A-133297.1 | gsasusascsdAsdGs(5MdC)sdTsdTs(5MdC)s(5MdC)sdAsdTs(5MdC)susgsgsasa | 4168 |
| HAO1 | A-133298.1 | gsasgscsasdTs(5MdC)s(5MdC)sdTsdTsdGsdGsdAsdTsdAscsasgscsu | 4169 |
| HAO1 | A-133299.1 | csasascsasdTsdTs(5MdC)s(5MdC)sdGsdGsdAsdGs(5MdC)sdAsuscscsusu | 4170 |
| HAO1 | A-133300.1 | gsasuscsusdGsdTsdTsdTs(5MdC)sdAsdGs(5MdC)sdAsdAscsasususc | 4171 |
| HAO1 | A-133301.1 | asgsasasgsdTs(5MdC)sdGsdAs(5MdC)sdAsdGsdAsdTs(5MdC)susgsususu | 4172 |
| HAO1 | A-133302.1 | usgsuscscsdTsdAsdAsdAsdAs(5MdC)sdAsdGsdAsdAsgsuscsgsa | 4173 |
| HAO1 | A-133303.1 | usgscsusgsdAs(5MdC)s(5MdC)s(5MdC)sdTs(5MdC)sdTsdGsdTs(5MdC)scsusasasa | 4174 |
| HAO1 | A-133304.1 | csasusasusdTsdGsdGs(5MdC)sdAsdTsdGs(5MdC)sdTsdGsascscscsu | 4175 |
| HAO1 | A-133305.1 | asgscscscs(5MdC)s(5MdC)sdAs(5MdC)sdAs(5MdC)sdAsdTsdAsdTsusgsgscsa | 4176 |
| HAO1 | A-133306.1 | csusgscsasdTsdGsdGs(5MdC)s(5MdC)sdGsdTsdAsdGs(5MdC)scscscscsa | 4177 |
| HAO1 | A-133307.1 | gsasgscscsdAsdTsdGs(5MdC)sdGs(5MdC)sdTsdGs(5MdC)sdAsusgsgscsc | 4178 |
| HAO1 | A-133308.1 | gscscsgsus(5MdC)s(5MdC)sdAs(5MdC)sdAsdTsdGsdAsdGs(5MdC)scsasusgsc | 4179 |
| HAO1 | A-133309.1 | asgsusgsgs(5MdC)sdAsdAsdGs(5MdC)sdTs(5MdC)sdGs(5MdC)s(5MdC)sgsuscscsa | 4180 |
| HAO1 | A-133310.1 | ascsasgsgs(5MdC)sdTs(5MdC)sdTs(5MdC)sdAs(5MdC)sdAsdGsdTsgsgscsasa | 4181 |
| HAO1 | A-133311.1 | csasgsgsgsdAs(5MdC)sdTsdGsdAs(5MdC)sdAsdGsdGs(5MdC)suscsuscsa | 4182 |
| HAO1 | A-133312.1 | asusgscscs(5MdC)sdGsdTsdTs(5MdC)s(5MdC)s(5MdC)sdAsdGsdGsgsascsusg | 4183 |
| HAO1 | A-133313.1 | gsasascsus(5MdC)sdAsdAs(5MdC)sdAsdTs(5MdC)sdAsdTsdGscscscsgsu | 4184 |
| HAO1 | A-133314.1 | gsasgsgsusdGsdGs(5MdC)s(5MdC)s(5MdC)sdAsdGsdGsdAsdAscsuscsasa | 4185 |
| HAO1 | A-133315.1 | uscsasasusdTsdGsdAsdGsdGsdAsdGsdGsdTsdGsgscscscsa | 4186 |
| HAO1 | A-133316.1 | cscsgscscsdAs(5MdC)sdTsdTs(5MdC)sdTsdTs(5MdC)sdAsdAsususgsasg | 4187 |
| HAO1 | A-133317.1 | csasgsgsas(5MdC)s(5MdC)sdAsdGs(5MdC)sdTsdTs(5MdC)s(5MdC)sdGscscsascsu | 4188 |
| HAO1 | A-133318.1 | ascsgsasasdGsdTsdGs(5MdC)s(5MdC)sdTs(5MdC)sdAsdGsdGsascscsasg | 4189 |
| HAO1 | A-133319.1 | csasgsususdGs(5MdC)sdAsdGs(5MdC)s(5MdC)sdAsdAs(5MdC)sdGsasasgsusg | 4190 |
| HAO1 | A-133320.1 | usgsusasgsdAsdTsdAsdTsdAs(5MdC)sdAsdGsdTsdTsgscsasgsc | 4191 |
| HAO1 | A-133321.1 | uscsuscsgsdGsdTs(5MdC)s(5MdC)sdTsdTsdGsdTsdAsdGsasusasusa | 4192 |
| HAO1 | A-133322.1 | ususcsususdGsdGsdTsdGsdAs(5MdC)sdTsdTs(5MdC)sdTscsgsgsusc | 4193 |
| HAO1 | A-133323.1 | cscsgscsas(5MdC)sdTsdAsdGs(5MdC)sdTsdTs(5MdC)sdTsdTsgsgsusgsa | 4194 |
| HAO1 | A-133324.1 | csususcsus(5MdC)sdTsdGs(5MdC)s(5MdC)sdTsdGs(5MdC)s(5MdC)sdGscsascsusa | 4195 |
| HAO1 | A-133325.1 | csususgsusdAsdGs(5MdC)s(5MdC)s(5MdC)sdAsdTs(5MdC)sdTsdTscsuscsusg | 4196 |
| HAO1 | A-133326.1 | asasasusasdTsdGsdGs(5MdC)s(5MdC)sdTsdTsdGsdTsdAsgscscscsa | 4197 |
| HAO1 | A-133327.1 | usgsuscscsdAs(5MdC)sdTsdGsdTs(5MdC)sdAs(5MdC)sdAsdAsasusasusg | 4198 |
| HAO1 | A-133328.1 | csasgsgsusdAsdAsdGsdGsdTsdGsdTsdGsdTs(5MdC)scsascsusg | 4199 |
| HAO1 | A-133329.1 | gsascsgsgsdTsdTsdGs(5MdC)s(5MdC)s(5MdC)sdAsdGsdGsdTsasasgsgsu | 4200 |
| HAO1 | A-133330.1 | csascsasus(5MdC)sdAsdTs(5MdC)s(5MdC)sdAsdGsdAs(5MdC)sdGsgsususgsc | 4201 |
| HAO1 | A-133331.1 | asasuscsusdGsdTsdTsdAs(5MdC)sdGs(5MdC)sdAs(5MdC)sdAsuscsasusc | 4202 |
| HAO1 | A-133332.1 | gscsgsgscsdAsdGsdTsdTsdTsdGsdAsdAsdTs(5MdC)susgsususa | 4203 |
| HAO1 | A-133333.1 | csusgsasgsdTsdTsdGsdTsdGsdGs(5MdC)sdGsdGs(5MdC)sasgsususu | 4204 |
| HAO1 | A-133334.1 | asasasasusdTsdTsdTsdTs(5MdC)sdAsdTs(5MdC)s(5MdC)sdTsgsasgsusu | 4205 |
| HAO1 | A-133335.1 | usascsusgsdGsdTsdTsdTs(5MdC)sdAsdAsdAsdAsdTsususususc | 4206 |
| HAO1 | A-133336.1 | asasasusgsdAsdTsdAsdAsdAsdGsdTsdAs(5MdC)sdTsgsgsususu | 4207 |
| HAO1 | A-133337.1 | cscsuscsasdGsdGsdAsdGsdAsdAsdAsdAsdTsdGsasusasasa | 4208 |
| HAO1 | A-133338.1 | uscscsasasdAsdAsdTsdTsdTsdTs(5MdC)s(5MdC)sdTs(5MdC)sasgsgsasg | 4209 |
| HAO1 | A-133339.1 | gsuscscsas(5MdC)sdTsdGsdTs(5MdC)sdGsdTs(5MdC)sdTs(5MdC)scsasasasa | 4210 |
| HAO1 | A-133340.1 | asusasusgs(5MdC)sdAsdGs(5MdC)sdAsdAsdGsdTs(5MdC)s(5MdC)sascsusgsu | 4211 |
| HAO1 | A-133341.1 | usususasgs(5MdC)s(5MdC)sdAs(5MdC)sdAsdTsdAsdTsdGs(5MdC)sasgscsasa | 4212 |
| HAO1 | A-133342.1 | usgsgsgsus(5MdC)sdTsdAsdTsdTsdGs(5MdC)sdTsdTsdTsasgscscsa | 4213 |
| HAO1 | A-133343.1 | asgscsusgsdAsdTsdAsdGsdAsdTsdGsdGsdGsdTscsusasusu | 4214 |
| HAO1 | A-133344.1 | gsasusasus(5MdC)sdTsdTs(5MdC)s(5MdC)s(5MdC)sdAsdGs(5MdC)sdTsgsasusasg | 4215 |
| HAO1 | A-133345.1 | csuscsasgs(5MdC)s(5MdC)sdAsdTsdTsdTsdGsdAsdTsdAsuscsususc | 4216 |
| HAO1 | A-133346.1 | gsasusgsus(5MdC)sdAsdGsdTs(5MdC)sdTsdTs(5MdC)sdTs(5MdC)sasgscscsa | 4217 |
| HAO1 | A-133347.1 | csasasususdGsdGs(5MdC)sdAsdAsdTsdGsdAsdTsdGsuscsasgsu | 4218 |
| HAO1 | A-133348.1 | cscscsususdTsdGs(5MdC)sdAsdAs(5MdC)sdAsdAsdTsdTsgsgscsasa | 4219 |
| HAO1 | A-133349.1 | csuscsuscsdAsdAsdAsdAsdTsdGs(5MdC)s(5MdC)s(5MdC)sdTsususgscsa | 4220 |
| HAO1 | A-133350.1 | gsgscsasus(5MdC)sdAsdTs(5MdC)sdAs(5MdC)s(5MdC)sdTs(5MdC)sdTscsasasasa | 4221 |
| HAO1 | A-133351.1 | asascsasgs(5MdC)s(5MdC)sdTs(5MdC)s(5MdC)s(5MdC)sdTsdGsdGs(5MdC)sasuscsasu | 4222 |
| HAO1 | A-133352.1 | asasgscscsdAsdTsdGsdTsdTsdTsdAsdAs(5MdC)sdAsgscscsusc | 4223 |
| HAO1 | A-133353.1 | asasgsasus(5MdC)s(5MdC)s(5MdC)sdAsdTsdTs(5MdC)sdAsdAsdGscscsasusg | 4224 |
| HAO1 | A-133354.1 | ususcsgsas(5MdC)sdAs(5MdC)s(5MdC)sdAsdAsdGsdAsdTs(5MdC)scscsasusu | 4225 |
| HAO1 | A-133355.1 | uscsgsasgs(5MdC)s(5MdC)s(5MdC)s(5MdC)sdAsdTsdGsdAsdTsdTscsgsascsa | 4226 |
| HAO1 | A-133356.1 | asuscsgsasdGsdTsdTsdGsdTs(5MdC)sdGsdAsdGs(5MdC)scscscsasu | 4227 |
| HAO1 | A-133357.1 | gsgscsusgsdGs(5MdC)sdAs(5MdC)s(5MdC)s(5MdC)s(5MdC)sdAsdTs(5MdC)sgsasgsusu | 4228 |
| HAO1 | A-133358.1 | asascsasus(5MdC)sdAsdAsdTsdAsdGsdTsdGsdGs(5MdC)susgsgscsa | 4229 |
| HAO1 | A-133359.1 | asusususcsdTsdGsdGs(5MdC)sdAsdGsdAsdAs(5MdC)sdAsuscsasasu | 4230 |
| HAO1 | A-133360.1 | asgscscsus(5MdC)s(5MdC)sdAs(5MdC)sdAsdAsdTsdTsdTs(5MdC)susgsgscsa | 4231 |
| HAO1 | A-133361.1 | csususcscs(5MdC)sdTsdTs(5MdC)s(5MdC)sdAs(5MdC)sdAsdGs(5MdC)scsuscscsa | 4232 |
| HAO1 | A-133362.1 | asasgsascsdTsdTs(5MdC)s(5MdC)sdAs(5MdC)s(5MdC)sdTsdTs(5MdC)scscsususc | 4233 |
| HAO1 | A-133363.1 | cscsgsuscs(5MdC)sdAsdGsdGsdAsdAsdGsdAs(5MdC)sdTsuscscsasc | 4234 |
| HAO1 | A-133364.1 | uscscsgscsdAs(5MdC)sdAs(5MdC)s(5MdC)s(5MdC)s(5MdC)s(5MdC)sdGsdTscscsasgsg | 4235 |
| HAO1 | A-133365.1 | csasuscsasdGsdTsdGs(5MdC)s(5MdC)sdTsdTsdTs(5MdC)s(5MdC)sgscsascsa | 4236 |
| HAO1 | A-133366.1 | asgscsususdTs(5MdC)sdAsdGsdAsdAs(5MdC)sdAsdTs(5MdC)sasgsusgsc | 4237 |
| HAO1 | A-133367.1 | csasasgsasdGs(5MdC)s(5MdC)sdAsdGsdAsdGs(5MdC)sdTsdTsuscsasgsa | 4238 |
| HAO1 | A-133368.1 | ascsasgscs(5MdC)sdTsdTsdGsdGs(5MdC)sdGs(5MdC)s(5MdC)sdAsasgsasgsc | 4239 |
| HAO1 | A-133369.1 | uscscscscsdAs(5MdC)sdAsdAsdAs(5MdC)sdAs(5MdC)sdAsdGscscsususg | 4240 |
| HAO1 | A-133370.1 | ascsgsasusdTsdGsdGsdTs(5MdC)sdTs(5MdC)s(5MdC)s(5MdC)s(5MdC)sascsasasa | 4241 |
| HAO1 | A-133371.1 | usasasgscs(5MdC)s(5MdC)s(5MdC)sdAsdAsdAs(5MdC)sdGsdAsdTsusgsgsusc | 4242 |
| HAO1 | A-133372.1 | cscscsusgsdGsdAsdAsdAsdGs(5MdC)sdTsdAsdAsdGscscscscsa | 4243 |
| HAO1 | A-133373.1 | csascscsusdTsdTs(5MdC)sdTs(5MdC)s(5MdC)s(5MdC)s(5MdC)s(5MdC)sdTsgsgsasasa | 4244 |
| HAO1 | A-133374.1 | gsascsasus(5MdC)sdTsdTsdGsdAsdAs(5MdC)sdAs(5MdC)s(5MdC)susususcsu | 4245 |
| HAO1 | A-133375.1 | usasgsusasdTs(5MdC)sdTs(5MdC)sdGsdAsdGsdGsdAs(5MdC)sasuscsusu | 4246 |
| HAO1 | A-133376.1 | gsasasusus(5MdC)sdTsdTs(5MdC)s(5MdC)sdTsdTsdTsdAsdGsusasuscsu | 4247 |
| HAO1 | A-133377.1 | gsgscscsasdAs(5MdC)s(5MdC)sdGsdGsdAsdAsdTsdTs(5MdC)sususcscsu | 4248 |
| HAO1 | A-133378.1 | csuscsasgsdAsdGs(5MdC)s(5MdC)sdAsdTsdGsdGs(5MdC)s(5MdC)sasascscsg | 4249 |
| HAO1 | A-133379.1 | asususcsusdGsdGs(5MdC)sdAs(5MdC)s(5MdC)s(5MdC)sdAs(5MdC)sdTscsasgsasg | 4250 |
| HAO1 | A-133380.1 | asusgsascsdTsdTsdTs(5MdC)sdAs(5MdC)sdAsdTsdTs(5MdC)susgsgscsa | 4251 |
| HAO1 | A-133381.1 | gsuscsususdGsdTs(5MdC)sdGsdAsdTsdGsdAs(5MdC)sdTsususcsasc | 4252 |
| HAO1 | A-133382.1 | usususcscsdTs(5MdC)sdAs(5MdC)s(5MdC)sdAsdAsdTsdGsdTscsususgsu | 4253 |
| HAO1 | A-133383.1 | csasasasgsdGsdAsdTsdTsdTsdTsdTs(5MdC)s(5MdC)sdTscsascscsa | 4254 |
| HAO1 | A-133384.1 | ususgsgsasdAsdAs(5MdC)sdGsdGs(5MdC)s(5MdC)sdAsdAsdAsgsgsasusu | 4255 |
| HAO1 | A-133385.1 | gscsascsusdGsdTs(5MdC)sdAsdGsdAsdTs(5MdC)sdTsdTsgsgsasasa | 4256 |
| HAO1 | A-133386.1 | asasasusasdTsdTsdGsdTsdGs(5MdC)sdAs(5MdC)sdTsdGsuscsasgsa | 4257 |
| HAO1 | A-133387.1 | usascsasgsdAsdTsdGsdGsdGsdAsdAsdAsdAsdTsasususgsu | 4258 |
| HAO1 | A-133388.1 | usgsasasasdAsdAsdAsdAsdAsdTsdAsdAsdTsdAscsasgsasu | 4259 |
| HAO1 | A-133389.1 | usasasusas(5MdC)sdAsdTsdGs(5MdC)sdTsdGsdAsdAsdAsasasasasa | 4260 |
| HAO1 | A-133390.1 | csuscsususdTsdGsdTs(5MdC)sdAsdAsdGsdTsdAsdAsusascsasu | 4261 |
| HAO1 | A-133391.1 | gscsascsasdGsdTsdGsdTs(5MdC)sdTs(5MdC)sdTsdTsdTsgsuscsasa | 4262 |
| HAO1 | A-133392.1 | usgsgsuscsdAs(5MdC)s(5MdC)s(5MdC)sdTs(5MdC)sdTsdGs(5MdC)sdAscsasgsusg | 4263 |
| HAO1 | A-133393.1 | ususascsasdGsdAs(5MdC)sdTsdGsdTsdGsdGsdTs(5MdC)sascscscsu | 4264 |
| HAO1 | A-133394.1 | ususgsasasdGsdTsdGsdGsdGsdGsdAsdAsdTsdTsascsasgsa | 4265 |
| HAO1 | A-133395.1 | cscscsususdTsdGsdTsdAsdTsdTsdGsdAsdAsdGsusgsgsgsg | 4266 |
| HAO1 | A-133396.1 | asasasgsasdAs(5MdC)sdGsdAs(5MdC)sdAs(5MdC)s(5MdC)s(5MdC)sdTsususgsusa | 4267 |
| HAO1 | A-133397.1 | usasusususdTsdGsdTsdTsdGsdGsdAsdAsdAsdAsgsasascsg | 4268 |
| HAO1 | A-133398.1 | asasgsgsgsdAsdTsdTsdGs(5MdC)sdTsdAsdTsdTsdTsusgsususg | 4269 |
| HAO1 | A-133399.1 | gscsasasusdGsdAsdAsdAsdTsdAsdAsdAsdAsdGsgsgsasusu | 4270 |
| HAO1 | A-133400.1 | asasasasgsdTs(5MdC)sdAsdAsdAsdAsdGs(5MdC)sdAsdAsusgsasasa | 4271 |
| HAO1 | A-133401.1 | gsascsascs(5MdC)s(5MdC)sdAsdTsdTsdGsdAsdAsdAsdAsgsuscsasa | 4272 |
| HAO1 | A-133402.1 | asasasgsgsdTsdTs(5MdC)s(5MdC)sdTsdAsdGsdGsdAs(5MdC)sascscscsa | 4273 |
| HAO1 | A-133403.1 | usususcsusdTsdTs(5MdC)sdTsdAsdAsdAsdAsdGsdGsususcscsu | 4274 |
| HAO1 | A-133404.1 | usgsasasasdGsdTs(5MdC)s(5MdC)sdAsdTsdTsdTs(5MdC)sdTsususcsusa | 4275 |
| HAO1 | A-133405.1 | usasusasusdTsdTs(5MdC)s(5MdC)sdAsdGsdGsdAsdTsdGsasasasgsu | 4276 |
| HAO1 | A-133406.1 | usasascsasdGsdTsdTsdAsdAsdTsdAsdTsdAsdTsususcscsa | 4277 |
| HAO1 | A-133407.1 | gsusususus(5MdC)sdTsdTsdTsdTsdTsdAsdAs(5MdC)sdAsgsususasa | 4278 |
| HAO1 | A-133408.1 | csascsasusdTsdTsdTs(5MdC)sdAsdAsdTsdGsdTsdTsususcsusu | 4279 |
| HAO1 | A-133409.1 | ascsgsususdGsdTs(5MdC)sdTsdAsdAsdAs(5MdC)sdAs(5MdC)sasusususu | 4280 |
| HAO1 | A-133410.1 | csasgsgsgsdGsdAsdTsdGsdAs(5MdC)sdGsdTsdTsdGsuscsusasa | 4281 |
| HAO1 | A-133411.1 | csascsususdTsdAsdGs(5MdC)s(5MdC)sdTsdGs(5MdC)s(5MdC)sdAsgsgsgsgsa | 4282 |
| HAO1 | A-133412.1 | asasasgsgsdAsdTsdAs(5MdC)sdAsdGs(5MdC)sdAs(5MdC)sdTsususasgsc | 4283 |
| HAO1 | A-133413.1 | csasasususdTsdTsdAs(5MdC)sdTsdAsdAsdAsdGsdGsasusascsa | 4284 |
| HAO1 | A-133414.1 | ususgscsusdAs(5MdC)s(5MdC)sdTs(5MdC)s(5MdC)sdAsdAsdTsdTsususascsu | 4285 |
| HAO1 | A-133415.1 | csascscsusdTsdAsdGsdTsdGsdTsdTsdTsdGs(5MdC)susascscsu | 4286 |
| HAO1 | A-133416.1 | uscsasususdAsdTs(5MdC)sdTsdTsdTsdTs(5MdC)sdAs(5MdC)scsususasg | 4287 |
| HAO1 | A-133417.1 | asascsasasdTsdGsdAsdGsdAsdTs(5MdC)sdAsdTsdTsasuscsusu | 4288 |
| HAO1 | A-133418.1 | usascsasgsdGsdTsdTsdAsdAsdTsdAsdAsdAs(5MdC)sasasusgsa | 4289 |
| HAO1 | A-133419.1 | gsusasasas(5MdC)sdAsdGsdAsdAsdTsdAs(5MdC)sdAsdGsgsususasa | 4290 |
| HAO1 | A-133420.1 | usususasasdAsdGsdAs(5MdC)sdAsdTsdGsdTsdAsdAsascsasgsa | 4291 |
| HAO1 | A-133421.1 | asasgsasas(5MdC)s(5MdC)sdAs(5MdC)sdTsdGsdTsdTsdTsdTsasasasgsa | 4292 |
| HAO1 | A-133422.1 | csususascsdAsdAsdTsdTsdTsdAsdAsdGsdAsdAscscsascsu | 4293 |
| HAO1 | A-133423.1 | csusususgsdAsdAs(5MdC)s(5MdC)sdTsdGsdAsdGs(5MdC)sdTsusascsasa | 4294 |
| HAO1 | A-133424.1 | asususascs(5MdC)sdAsdAs(5MdC)sdAs(5MdC)sdTsdTsdTsdGsasascscsu | 4295 |
| HAO1 | A-133425.1 | usgsusgsasdAsdTs(5MdC)sdAsdGsdGs(5MdC)sdAsdTsdTsascscsasa | 4296 |
| HAO1 | A-133426.1 | uscsuscsasdAsdAsdGsdTsdTsdGsdTsdGsdAsdAsuscsasgsg | 4297 |
| HAO1 | A-133427.1 | csasgsusgs(5MdC)sdTsdAs(5MdC)s(5MdC)sdTsdTs(5MdC)sdTs(5MdC)sasasasgsu | 4298 |
| HAO1 | A-133428.1 | ususcscsasdAsdTsdTs(5MdC)sdTs(5MdC)sdTs(5MdC)s(5MdC)sdAsgsusgscsu | 4299 |
| HAO1 | A-133429.1 | cscsgscscsdAs(5MdC)s(5MdC)s(5MdC)sdAsdTsdTs(5MdC)s(5MdC)sdAsasususcsu | 4300 |
| HAO1 | A-133430.1 | uscsascscsdAsdAsdTsdTsdAs(5MdC)s(5MdC)sdGs(5MdC)s(5MdC)sascscscsa | 4301 |
| HAO1 | A-133431.1 | asususcsasdAsdAsdGsdAsdAsdGsdTsdAsdTs(5MdC)sascscsasa | 4302 |
| HAO1 | A-133432.1 | usgsgsasasdAsdTs(5MdC)sdTsdAs(5MdC)sdAsdTsdTs(5MdC)sasasasgsa | 4303 |
| HAO1 | A-133433.1 | asasgsasusdGsdTsdGsdAsdTsdTsdGsdGsdAsdAsasuscsusa | 4304 |
| HAO1 | A-133434.1 | ususcsasgsdAs(5MdC)sdAs(5MdC)sdTsdAsdAsdAsdGsdAsusgsusgsa | 4305 |
| HAO1 | A-133435.1 | csasusususdGsdGsdAsdTsdAsdTsdAsdTsdTs(5MdC)sasgsascsa | 4306 |
| HAO1 | A-133436.1 | csasuscscsdTsdAsdAsdAsdAs(5MdC)sdAsdTsdTsdTsgsgsasusa | 4307 |
| HAO1 | A-133437.1 | asasgsusasdAs(5MdC)sdAsdTsdAs(5MdC)sdAsdTs(5MdC)s(5MdC)susasasasa | 4308 |
| HAO1 | A-133438.1 | usususcsus(5MdC)sdTs(5MdC)sdTsdAsdAsdGsdAsdAsdGsusasascsa | 4309 |
| HAO1 | A-133439.1 | asasasusgs(5MdC)sdTsdTsdTsdAsdTsdTsdTs(5MdC)sdTscsuscsusa | 4310 |

TABLE 14
Unmodified antisense polynucleotides targeting HAO1.

| | | | SEQ | | SEQ | |
|---|---|---|---|---|---|---|
| Target | Oligo Name | Oligo transSeq | ID NO: | mRNA Target sequence | ID NO: | Position |
| HAO1 | A-133284.1 | GGGAGCAUUUUCACAGGUUA | 4319 | UAACCUGUGAAAAUGCUCCC | 4475 | 13 |
| HAO1 | A-133285.1 | AAUUAGCCGGGGGAGCAUUU | 4320 | AAAUGCUCCCCCGGCUAAUU | 4476 | 23 |
| HAO1 | A-133286.1 | AUCAUUGAUACAAAUUAGCC | 4321 | GGCUAAUUUGUAUCAAUGAU | 4477 | 35 |
| HAO1 | A-133287.1 | GUUGUUCAUAAUCAUUGAUA | 4322 | UAUCAAUGAUUAUGAACAAC | 4478 | 45 |
| HAO1 | A-133288.1 | GAUUUAGCAUGUUGUUCAUA | 4323 | UAUGAACAACAUGCUAAAUC | 4479 | 55 |
| HAO1 | A-133289.1 | UUGGAAGUACUGAUUUAGCA | 4324 | UGCUAAAUCAGUACUUCCAA | 4480 | 66 |
| HAO1 | A-133290.1 | CAUAUAUAGACUUUGGAAGU | 4325 | ACUUCCAAAGUCUAUAUAUG | 4481 | 78 |
| HAO1 | A-133291.1 | CUGUAAUAGUCAUAUAUAGA | 4326 | UCUAUAUAUGACUAUUACAG | 4482 | 88 |
| HAO1 | A-133292.1 | UUGCCCCAGACCUGUAAUAG | 4327 | CUAUUACAGGUCUGGGGCAA | 4483 | 99 |
| HAO1 | A-133293.1 | UUCUUCAUCAUUUGCCCCAG | 4328 | CUGGGGCAAAUGAUGAAGAA | 4484 | 110 |
| HAO1 | A-133294.1 | UAUCAGCCAAAGUUUCUUCA | 4329 | UGAAGAAACUUUGGCUGAUA | 4485 | 123 |
| HAO1 | A-133295.1 | GCUGCAAUAUUAUCAGCCAA | 4330 | UUGGCUGAUAAUAUUGCAGC | 4486 | 133 |
| HAO1 | A-133296.1 | AUCUGGAAAAUGCUGCAAUA | 4331 | UAUUGCAGCAUUUUCCAGAU | 4487 | 144 |
| HAO1 | A-133297.1 | GAUACAGCUUCCAUCUGGAA | 4332 | UUCCAGAUGGAAGCUGUAUC | 4488 | 156 |
| HAO1 | A-133298.1 | GAGCAUCCUUGGAUACAGCU | 4333 | AGCUGUAUCCAAGGAUGCUC | 4489 | 167 |
| HAO1 | A-133299.1 | CAACAUUCCGGAGCAUCCUU | 4334 | AAGGAUGCUCCGGAAUGUUG | 4490 | 177 |
| HAO1 | A-133300.1 | GAUCUGUUUCAGCAACAUUC | 4335 | GAAUGUUGCUGAAACAGAUC | 4491 | 189 |
| HAO1 | A-133301.1 | AGAAGUCGACAGAUCUGUUU | 4336 | AAACAGAUCUGUCGACUUCU | 4492 | 200 |
| HAO1 | A-133302.1 | UGUCCUAAAACAGAAGUCGA | 4337 | UCGACUUCUGUUUUAGGACA | 4493 | 211 |
| HAO1 | A-133303.1 | UGCUGACCCUCUGUCCUAAA | 4338 | UUUAGGACAGAGGGUCAGCA | 4494 | 222 |
| HAO1 | A-133304.1 | CAUAUUGGCAUGCUGACCCU | 4339 | AGGGUCAGCAUGCCAAUAUG | 4495 | 232 |
| HAO1 | A-133305.1 | AGCCCCCACACAUAUUGGCA | 4340 | UGCCAAUAUGUGUGGGGGCU | 4496 | 242 |
| HAO1 | A-133306.1 | CUGCAUGGCCGUAGCCCCCA | 4341 | UGGGGGCUACGGCCAUGCAG | 4497 | 254 |
| HAO1 | A-133307.1 | GAGCCAUGCGCUGCAUGGCC | 4342 | GGCCAUGCAGCGCAUGGCUC | 4498 | 264 |
| HAO1 | A-133308.1 | GCCGUCCACAUGAGCCAUGC | 4343 | GCAUGGCUCAUGUGGACGGC | 4499 | 275 |
| HAO1 | A-133309.1 | AGUGGCAAGCUCGCCGUCCA | 4344 | UGGACGGCGAGCUUGCCACU | 4500 | 287 |
| HAO1 | A-133310.1 | ACAGGCUCUCACAGUGGCAA | 4345 | UUGCCACUGUGAGAGCCUGU | 4501 | 299 |
| HAO1 | A-133311.1 | CAGGGACUGACAGGCUCUCA | 4346 | UGAGAGCCUGUCAGUCCCUG | 4502 | 308 |
| HAO1 | A-133312.1 | AUGCCCGUUCCCAGGGACUG | 4347 | CAGUCCCUGGGAACGGGCAU | 4503 | 319 |
| HAO1 | A-133313.1 | GAACUCAACAUCAUGCCCGU | 4348 | ACGGGCAUGAUGUUGAGUUC | 4504 | 331 |
| HAO1 | A-133314.1 | GAGGUGGCCCAGGAACUCAA | 4349 | UUGAGUUCCUGGGCCACCUC | 4505 | 343 |
| HAO1 | A-133315.1 | UCAAUUGAGGAGGUGGCCCA | 4350 | UGGGCCACCUCCUCAAUUGA | 4506 | 352 |
| HAO1 | A-133316.1 | CCGCCACUUCUUCAAUUGAG | 4351 | CUCAAUUGAAGAAGUGGCGG | 4507 | 363 |
| HAO1 | A-133317.1 | CAGGACCAGCUUCCGCCACU | 4352 | AGUGGCGGAAGCUGGUCCUG | 4508 | 375 |
| HAO1 | A-133318.1 | ACGAAGUGCCUCAGGACCAG | 4353 | CUGGUCCUGAGGCACUUCGU | 4509 | 386 |
| HAO1 | A-133319.1 | CAGUUGCAGCCAACGAAGUG | 4354 | CACUUCGUUGGCUGCAACUG | 4510 | 398 |
| HAO1 | A-133320.1 | UGUAGAUAUACAGUUGCAGC | 4355 | GCUGCAACUGUAUAUCUACA | 4511 | 408 |
| HAO1 | A-133321.1 | UCUCGGUCCUUGUAGAUAUA | 4356 | UAUAUCUACAAGGACCGAGA | 4512 | 418 |
| HAO1 | A-133322.1 | UUCUUGGUGACUUCUCGGUC | 4357 | GACCGAGAAGUCACCAAGAA | 4513 | 430 |
| HAO1 | A-133323.1 | CCGCACUAGCUUCUUGGUGA | 4358 | UCACCAAGAAGCUAGUGCGG | 4514 | 440 |
| HAO1 | A-133324.1 | CUUCUCUGCCUGCCGCACUA | 4359 | UAGUGCGGCAGGCAGAGAAG | 4515 | 452 |
| HAO1 | A-133325.1 | CUUGUAGCCCAUCUUCUCUG | 4360 | CAGAGAAGAUGGGCUACAAG | 4516 | 464 |
| HAO1 | A-133326.1 | AAAUAUGGCCUUGUAGCCCA | 4361 | UGGGCUACAAGGCCAUAUUU | 4517 | 473 |
| HAO1 | A-133327.1 | UGUCCACUGUCACAAAUAUG | 4362 | CAUAUUUGUGACAGUGGACA | 4518 | 486 |
| HAO1 | A-133328.1 | CAGGUAAGGUGUGUCCACUG | 4363 | CAGUGGACACACCUUACCUG | 4519 | 497 |
| HAO1 | A-133329.1 | GACGGUUGCCCAGGUAAGGU | 4364 | ACCUUACCUGGGCAACCGUC | 4520 | 507 |
| HAO1 | A-133330.1 | CACAUCAUCCAGACGGUUGC | 4365 | GCAACCGUCUGGAUGAUGUG | 4521 | 518 |
| HAO1 | A-133331.1 | AAUCUGUUACGCACAUCAUC | 4366 | GAUGAUGUGCGUAACAGAUU | 4522 | 529 |
| HAO1 | A-133332.1 | GCGGCAGUUUGAAUCUGUUA | 4367 | UAACAGAUUCAAACUGCCGC | 4523 | 540 |
| HAO1 | A-133333.1 | CUGAGUUGUGGCGGCAGUUU | 4368 | AAACUGCCGCCACAACUCAG | 4524 | 550 |
| HAO1 | A-133334.1 | AAAAUUUUUCAUCCUGAGUU | 4369 | AACUCAGGAUGAAAAAUUUU | 4525 | 563 |
| HAO1 | A-133335.1 | UACUGGUUUCAAAAUUUUUC | 4370 | GAAAAAUUUUGAAACCAGUA | 4526 | 573 |
| HAO1 | A-133336.1 | AAAUGAUAAAGUACUGGUUU | 4371 | AAACCAGUACUUUAUCAUUU | 4527 | 584 |
| HAO1 | A-133337.1 | CCUCAGGAGAAAAUGAUAAA | 4372 | UUUAUCAUUUUCUCCUGAGG | 4528 | 594 |
| HAO1 | A-133338.1 | UCCAAAAUUUUCCUCAGGAG | 4373 | CUCCUGAGGAAAAUUUUGGA | 4529 | 605 |
| HAO1 | A-133339.1 | GUCCACUGUCGUCUCCAAAA | 4374 | UUUUGGAGACGACAGUGGAC | 4530 | 618 |
| HAO1 | A-133340.1 | AUAUGCAGCAAGUCCACUGU | 4375 | ACAGUGGACUUGCUGCAUAU | 4531 | 629 |
| HAO1 | A-133341.1 | UUUAGCCACAUAUGCAGCAA | 4376 | UUGCUGCAUAUGUGGCUAAA | 4532 | 638 |
| HAO1 | A-133342.1 | UGGGUCUAUUGCUUUAGCCA | 4377 | UGGCUAAAGCAAUAGACCCA | 4533 | 650 |
| HAO1 | A-133343.1 | AGCUGAUAGAUGGGUCUAUU | 4378 | AAUAGACCCAUCUAUCAGCU | 4534 | 660 |
| HAO1 | A-133344.1 | GAUAUCUUCCCAGCUGAUAG | 4379 | CUAUCAGCUGGGAAGAUAUC | 4535 | 671 |
| HAO1 | A-133345.1 | CUCAGCCAUUUGAUAUCUUC | 4380 | GAAGAUAUCAAAUGGCUGAG | 4536 | 682 |
| HAO1 | A-133346.1 | GAUGUCAGUCUUCUCAGCCA | 4381 | UGGCUGAGAAGACUGACAUC | 4537 | 694 |
| HAO1 | A-133347.1 | CAAUUGGCAAUGAUGUCAGU | 4382 | ACUGACAUCAUUGCCAAUUG | 4538 | 705 |
| HAO1 | A-133348.1 | CCCUUUGCAACAAUUGGCAA | 4383 | UUGCCAAUUGUUGCAAAGGG | 4539 | 715 |
| HAO1 | A-133349.1 | CUCUCAAAAUGCCCUUUGCA | 4384 | UGCAAAGGGCAUUUUGAGAG | 4540 | 726 |
| HAO1 | A-133350.1 | GGCAUCAUCACCUCUCAAAA | 4385 | UUUUGAGAGGUGAUGAUGCC | 4541 | 737 |
| HAO1 | A-133351.1 | AACAGCCUCCCUGGCAUCAU | 4386 | AUGAUGCCAGGGAGGCUGUU | 4542 | 749 |
| HAO1 | A-133352.1 | AAGCCAUGUUUAACAGCCUC | 4387 | GAGGCUGUUAAACAUGGCUU | 4543 | 760 |
| HAO1 | A-133353.1 | AAGAUCCCAUUCAAGCCAUG | 4388 | CAUGGCUUGAAUGGGAUCUU | 4544 | 772 |
| HAO1 | A-133354.1 | UUCGACACCAAGAUCCCAUU | 4389 | AAUGGGAUCUUGGUGUCGAA | 4545 | 781 |
| HAO1 | A-133355.1 | UCGAGCCCCAUGAUUCGACA | 4390 | UGUCGAAUCAUGGGGCUCGA | 4547 | 794 |
| HAO1 | A-133356.1 | AUCGAGUUGUCGAGCCCCAU | 4391 | AUGGGGCUCGACAACUCGAU | 4546 | 803 |
| HAO1 | A-133357.1 | GGCUGGCACCCCAUCGAGUU | 4392 | AACUCGAUGGGGUGCCAGCC | 4548 | 815 |
| HAO1 | A-133358.1 | AACAUCAAUAGUGGCUGGCA | 4393 | UGCCAGCCACUAUUGAUGUU | 4549 | 827 |
| HAO1 | A-133359.1 | AUUUCUGGCAGAACAUCAAU | 4394 | AUUGAUGUUCUGCCAGAAAU | 4550 | 838 |
| HAO1 | A-133360.1 | AGCCUCCACAAUUUCUGGCA | 4395 | UGCCAGAAAUUGUGGAGGCU | 4551 | 848 |
| HAO1 | A-133361.1 | CUUCCCUUCCACAGCCUCCA | 4396 | UGGAGGCUGUGGAAGGGAAG | 4552 | 860 |
| HAO1 | A-133362.1 | AAGACUUCCACCUUCCCUUC | 4397 | GAAGGGAAGGUGGAAGUCUU | 4553 | 871 |
| HAO1 | A-133363.1 | CCGUCCAGGAAGACUUCCAC | 4398 | GUGGAAGUCUUCCUGGACGG | 4554 | 880 |
| HAO1 | A-133364.1 | UCCGCACACCCCCGUCCAGG | 4399 | CCUGGACGGGGGUGUGCGGA | 4555 | 891 |
| HAO1 | A-133365.1 | CAUCAGUGCCUUUCCGCACA | 4400 | UGUGCGGAAAGGCACUGAUG | 4556 | 903 |
| HAO1 | A-133366.1 | AGCUUUCAGAACAUCAGUGC | 4401 | GCACUGAUGUUCUGAAAGCU | 4557 | 914 |
| HAO1 | A-133367.1 | CAAGAGCCAGAGCUUUCAGA | 4402 | UCUGAAAGCUCUGGCUCUUG | 4558 | 924 |
| HAO1 | A-133368.1 | ACAGCCUUGGCGCCAAGAGC | 4403 | GCUCUUGGCGCCAAGGCUGU | 4559 | 937 |
| HAO1 | A-133369.1 | UCCCCACAAACACAGCCUUG | 4404 | CAAGGCUGUGUUUGUGGGGA | 4560 | 948 |
| HAO1 | A-133370.1 | ACGAUUGGUCUCCCCACAAA | 4405 | UUUGUGGGGAGACCAAUCGU | 4561 | 958 |
| HAO1 | A-133371.1 | UAAGCCCCAAACGAUUGGUC | 4406 | GACCAAUCGUUUGGGGCUUA | 4562 | 968 |
| HAO1 | A-133372.1 | CCCUGGAAAGCUAAGCCCCA | 4407 | UGGGGCUUAGCUUUCCAGGG | 4563 | 979 |
| HAO1 | A-133373.1 | CACCUUUCUCCCCCUGGAAA | 4408 | UUUCCAGGGGGAGAAAGGUG | 4564 | 990 |
| HAO1 | A-133374.1 | GACAUCUUGAACACCUUUCU | 4409 | AGAAAGGUGUUCAAGAUGUC | 4565 | 1001 |
| HAO1 | A-133375.1 | UAGUAUCUCGAGGACAUCUU | 4410 | AAGAUGUCCUCGAGAUACUA | 4566 | 1013 |
| HAO1 | A-133376.1 | GAAUUCUUCCUUUAGUAUCU | 4411 | AGAUACUAAAGGAAGAAUUC | 4567 | 1025 |
| HAO1 | A-133377.1 | GGCCAACCGGAAUUCUUCCU | 4412 | AGGAAGAAUUCCGGUUGGCC | 4568 | 1034 |
| HAO1 | A-133378.1 | CUCAGAGCCAUGGCCAACCG | 4413 | CGGUUGGCCAUGGCUCUGAG | 4569 | 1045 |
| HAO1 | A-133379.1 | AUUCUGGCACCCACUCAGAG | 4414 | CUCUGAGUGGGUGCCAGAAU | 4570 | 1058 |
| HAO1 | A-133380.1 | AUGACUUUCACAUUCUGGCA | 4415 | UGCCAGAAUGUGAAAGUCAU | 4571 | 1069 |
| HAO1 | A-133381.1 | GUCUUGUCGAUGACUUUCAC | 4416 | GUGAAAGUCAUCGACAAGAC | 4572 | 1078 |
| HAO1 | A-133382.1 | UUUCCUCACCAAUGUCUUGU | 4417 | ACAAGACAUUGGUGAGGAAA | 4573 | 1091 |
| HAO1 | A-133383.1 | CAAAGGAUUUUUCCUCACCA | 4418 | UGGUGAGGAAAAAUCCUUUG | 4574 | 1100 |
| HAO1 | A-133384.1 | UUGGAAACGGCCAAAGGAUU | 4419 | AAUCCUUUGGCCGUUUCCAA | 4575 | 1111 |
| HAO1 | A-133385.1 | GCACUGUCAGAUCUUGGAAA | 4420 | UUUCCAAGAUCUGACAGUGC | 4576 | 1124 |
| HAO1 | A-133386.1 | AAAUAUUGUGCACUGUCAGA | 4421 | UCUGACAGUGCACAAUAUUU | 4577 | 1133 |
| HAO1 | A-133387.1 | UACAGAUGGGAAAAUAUUGU | 4422 | ACAAUAUUUUCCCAUCUGUA | 4578 | 1144 |
| HAO1 | A-133388.1 | UGAAAAAAAAUAAUACAGAU | 4423 | AUCUGUAUUAUUUUUUUUCA | 4579 | 1157 |
| HAO1 | A-133389.1 | UAAUACAUGCUGAAAAAAAA | 4424 | UUUUUUUUCAGCAUGUAUUA | 4580 | 1167 |
| HAO1 | A-133390.1 | CUCUUUGUCAAGUAAUACAU | 4425 | AUGUAUUACUUGACAAAGAG | 4581 | 1179 |
| HAO1 | A-133391.1 | GCACAGUGUCUCUUUGUCAA | 4426 | UUGACAAAGAGACACUGUGC | 4582 | 1188 |
| HAO1 | A-133392.1 | UGGUCACCCUCUGCACAGUG | 4427 | CACUGUGCAGAGGGUGACCA | 4583 | 1200 |
| HAO1 | A-133393.1 | UUACAGACUGUGGUCACCCU | 4428 | AGGGUGACCACAGUCUGUAA | 4584 | 1210 |
| HAO1 | A-133394.1 | UUGAAGUGGGGAAUUACAGA | 4429 | UCUGUAAUUCCCCACUUCAA | 4585 | 1223 |
| HAO1 | A-133395.1 | CCCUUUGUAUUGAAGUGGGG | 4430 | CCCCACUUCAAUACAAAGGG | 4586 | 1232 |
| HAO1 | A-133396.1 | AAAGAACGACACCCUUUGUA | 4431 | UACAAAGGGUGUCGUUCUUU | 4587 | 1243 |
| HAO1 | A-133397.1 | UAUUUUGUUGGAAAAGAACG | 4432 | CGUUCUUUUCCAACAAAAUA | 4588 | 1255 |
| HAO1 | A-133398.1 | AAGGGAUUGCUAUUUUGUUG | 4433 | CAACAAAAUAGCAAUCCCUU | 4589 | 1265 |
| HAO1 | A-133399.1 | GCAAUGAAAUAAAAGGGAUU | 4434 | AAUCCCUUUUAUUUCAUUGC | 4590 | 1277 |
| HAO1 | A-133400.1 | AAAAGUCAAAAGCAAUGAAA | 4435 | UUUCAUUGCUUUUGACUUUU | 4591 | 1288 |
| HAO1 | A-133401.1 | GACACCCAUUGAAAAGUCAA | 4436 | UUGACUUUUCAAUGGGUGUC | 4592 | 1299 |
| HAO1 | A-133402.1 | AAAGGUUCCUAGGACACCCA | 4437 | UGGGUGUCCUAGGAACCUUU | 4593 | 1311 |
| HAO1 | A-133403.1 | UUUCUUUCUAAAAGGUUCCU | 4438 | AGGAACCUUUUAGAAAGAAA | 4594 | 1321 |
| HAO1 | A-133404.1 | UGAAAGUCCAUUUCUUUCUA | 4439 | UAGAAAGAAAUGGACUUUCA | 4595 | 1331 |
| HAO1 | A-133405.1 | UAUAUUUCCAGGAUGAAAGU | 4440 | ACUUUCAUCCUGGAAAUAUA | 4596 | 1344 |
| HAO1 | A-133406.1 | UAACAGUUAAUAUAUUUCCA | 4441 | UGGAAAUAUAUUAACUGUUA | 4597 | 1354 |
| HAO1 | A-133407.1 | GUUUUCUUUUUAACAGUUAA | 4442 | UUAACUGUUAAAAAGAAAAC | 4598 | 1364 |
| HAO1 | A-133408.1 | CACAUUUUCAAUGUUUUCUU | 4443 | AAGAAAACAUUGAAAAUGUG | 4599 | 1376 |
| HAO1 | A-133409.1 | ACGUUGUCUAAACACAUUUU | 4444 | AAAAUGUGUUUAGACAACGU | 4600 | 1388 |
| HAO1 | A-133410.1 | CAGGGGAUGACGUUGUCUAA | 4445 | UUAGACAACGUCAUCCCCUG | 4601 | 1397 |
| HAO1 | A-133411.1 | CACUUUAGCCUGCCAGGGGA | 4446 | UCCCCUGGCAGGCUAAAGUG | 4602 | 1410 |
| HAO1 | A-133412.1 | AAAGGAUACAGCACUUUAGC | 4447 | GCUAAAGUGCUGUAUCCUUU | 4603 | 1421 |
| HAO1 | A-133413.1 | CAAUUUUACUAAAGGAUACA | 4448 | UGUAUCCUUUAGUAAAAUUG | 4604 | 1431 |
| HAO1 | A-133414.1 | UUGCUACCUCCAAUUUUACU | 4449 | AGUAAAAUUGGAGGUAGCAA | 4605 | 1441 |
| HAO1 | A-133415.1 | CACCUUAGUGUUUGCUACCU | 4450 | AGGUAGCAAACACUAAGGUG | 4606 | 1452 |
| HAO1 | A-133416.1 | UCAUUAUCUUUUCACCUUAG | 4451 | CUAAGGUGAAAAGAUAAUGA | 4607 | 1464 |
| HAO1 | A-133417.1 | AACAAUGAGAUCAUUAUCUU | 4452 | AAGAUAAUGAUCUCAUUGUU | 4608 | 1474 |
| HAO1 | A-133418.1 | UACAGGUUAAUAAACAAUGA | 4453 | UCAUUGUUUAUUAACCUGUA | 4609 | 1486 |
| HAO1 | A-133419.1 | GUAAACAGAAUACAGGUUAA | 4454 | UUAACCUGUAUUCUGUUUAC | 4610 | 1496 |
| HAO1 | A-133420.1 | UUUAAAGACAUGUAAACAGA | 4455 | UCUGUUUACAUGUCUUUAAA | 4611 | 1507 |
| HAO1 | A-133421.1 | AAGAACCACUGUUUUAAAGA | 4456 | UCUUUAAAACAGUGGUUCUU | 4612 | 1519 |
| HAO1 | A-133422.1 | CUUACAAUUUAAGAACCACU | 4457 | AGUGGUUCUUAAAUUGUAAG | 4613 | 1529 |
| HAO1 | A-133423.1 | CUUUGAACCUGAGCUUACAA | 4458 | UUGUAAGCUCAGGUUCAAAG | 4614 | 1542 |
| HAO1 | A-133424.1 | AUUACCAACACUUUGAACCU | 4459 | AGGUUCAAAGUGUUGGUAAU | 4615 | 1552 |
| HAO1 | A-133425.1 | UGUGAAUCAGGCAUUACCAA | 4460 | UUGGUAAUGCCUGAUUCACA | 4616 | 1564 |
| HAO1 | A-133426.1 | UCUCAAAGUUGUGAAUCAGG | 4461 | CCUGAUUCACAACUUUGAGA | 4617 | 1573 |
| HAO1 | A-133427.1 | CAGUGCUACCUUCUCAAAGU | 4462 | ACUUUGAGAAGGUAGCACUG | 4618 | 1584 |
| HAO1 | A-133428.1 | UUCCAAUUCUCUCCAGUGCU | 4463 | AGCACUGGAGAGAAUUGGAA | 4619 | 1597 |
| HAO1 | A-133429.1 | CCGCCACCCAUUCCAAUUCU | 4464 | AGAAUUGGAAUGGGUGGCGG | 4620 | 1607 |
| HAO1 | A-133430.1 | UCACCAAUUACCGCCACCCA | 4465 | UGGGUGGCGGUAAUUGGUGA | 4621 | 1617 |
| HAO1 | A-133431.1 | AUUCAAAGAAGUAUCACCAA | 4466 | UUGGUGAUACUUCUUUGAAU | 4622 | 1630 |
| HAO1 | A-133432.1 | UGGAAAUCUACAUUCAAAGA | 4467 | UCUUUGAAUGUAGAUUUCCA | 4623 | 1641 |
| HAO1 | A-133433.1 | AAGAUGUGAUUGGAAAUCUA | 4468 | UAGAUUUCCAAUCACAUCUU | 4624 | 1651 |
| HAO1 | A-133434.1 | UUCAGACACUAAAGAUGUGA | 4469 | UCACAUCUUUAGUGUCUGAA | 4625 | 1662 |
| HAO1 | A-133435.1 | CAUUUGGAUAUAUUCAGACA | 4470 | UGUCUGAAUAUAUCCAAAUG | 4626 | 1674 |
| HAO1 | A-133436.1 | CAUCCUAAAACAUUUGGAUA | 4471 | UAUCCAAAUGUUUUAGGAUG | 4627 | 1684 |
| HAO1 | A-133437.1 | AAGUAACAUACAUCCUAAAA | 4472 | UUUUAGGAUGUAUGUUACUU | 4628 | 1694 |
| HAO1 | A-133438.1 | UUUCUCUCUAAGAAGUAACA | 4473 | UGUUACUUCUUAGAGAGAAA | 4629 | 1706 |
| HAO1 | A-133439.1 | AAAUGCUUUAUUUCUCUCUA | 4474 | UAGAGAGAAAUAAAGCAUUU | 4630 | 1716 |

TABLEE 20
AGXT LOF AND CLINVAR VARIANTS IDENTIFIED IN THE UK BIOBANK 300,000 EXOME DATA

| chrom | pos (hg38) | ref | alt | rsid | gene | consequence | clinvar_rs | clinvar_clnsig |
|---|---|---|---|---|---|---|---|---|
| 2 | 240868890 | A | AC | rs398122322; | AGXT | frameshift_variant | 140583 | Pathogenic |
| | | | | rs777193616 | | | | |
| 2 | 240868995 | C | T | rs180177172 | AGXT | stop_gained | 204075 | Likely_pathogenic |
| 2 | 240869202 | C | G | | AGXT | stop_gained | 5642 | Pathogenic |
| 2 | 240869217 | G | GA | | AGXT | frameshift_variant | 204177 | Pathogenic |
| 2 | 240869256 | T | A | | AGXT | stop_gained | | |
| 2 | 240869328 | G | A | | AGXT | stop_gained | | |
| 2 | 240870646 | GC | G | | AGXT | frameshift_variant | | |
| 2 | 240871347 | A | G | rs180177219 | AGXT | splice_acceptor_variant | 204164 | Pathogenic |
| 2 | 240871409 | GT | G | | AGXT | frameshift_variant | | |
| 2 | 240871414 | G | GCAGCC | | AGXT | frameshift_variant | | |
| 2 | 240873010 | GC | G | | AGXT | frameshift_variant | | |
| 2 | 240873025 | AC | A | rs180177241; | AGXT | frameshift_variant | 204191 | Likely_pathogenic |
| | | | | rs754693216 | | | | |
| 2 | 240873025 | A | AC | rs180177242 | AGXT | frameshift_variant | 204192 | Pathogenic |
| 2 | 240873989 | CT | C | | AGXT | frameshift_variant | | |
| 2 | 240873994 | C | A | rs180177247 | AGXT | stop_gained | 204117 | Pathogenic |
| 2 | 240874054 | CAAGG | C | | AGXT | frameshift_variant | 370958 | Likely_pathogenic |
| 2 | 240874063 | G | A | | AGXT | splice_donor_variant | 204154 | Pathogenic |
| 2 | 240875143 | T | TC | | AGXT | frameshift_variant | | |
| 2 | 240875205 | G | C | | AGXT | splice_donor_variant | 204158 | Pathogenic |
| 2 | 240875934 | G | C | rs180177267 | AGXT | splice_acceptor_variant | 188774 | Likely_pathogenic |
| 2 | 240875949 | TC | T | | AGXT | frameshift_variant | | |
| 2 | 240876005 | G | T | | AGXT | splice_donor_variant | 204159 | Pathogenic |
| 2 | 240876005 | G | A | | AGXT | splice_donor_variant | 204160 | Pathogenic |
| 2 | 240877536 | G | C | rs180177285 | AGXT | splice_acceptor_variant | 204168 | Likely_pathogenic |
| 2 | 240877597 | C | T | rs180177294 | AGXT | stop_gained | 204137 | Likely_pathogenic |
| 2 | 240878021 | G | T | rs180177298 | AGXT | splice_acceptor_variant | 204170 | Likely_pathogenic |
| 2 | 240878035 | CCA | C | | AGXT | frameshift_variant | 204208 | Pathogenic |
| 2 | 240878074 | G | A | | AGXT | stop_gained | | |
| 2 | 240878075 | G | A | | AGXT | stop_gained | 204141 | Likely_pathogenic |
| 2 | 240868868 | G | T | rs180177213 | AGXT | start_lost | 204066 | Pathogenic |
| 2 | 240868893 | C | T | | AGXT | missense_variant | 204068 | Pathogenic |
| 2 | 240868972 | G | A | rs180177162 | AGXT | missense_variant | 204072 | Pathogenic |
| 2 | 240868986 | G | A | rs121908523 | AGXT | missense_variant | 5644 | Pathogenic/ |
| | | | | | | | | Likely_pathogenic |
| 2 | 240868990 | G | A | rs180177170 | AGXT | missense_variant | 204074 | Pathogenic |
| 2 | 240869004 | G | A | | AGXT | missense_variant | 204076 | Pathogenic |
| 2 | 240869171 | T | A | rs180177180 | AGXT | missense_variant | 204077 | Pathogenic |
| 2 | 240869179 | G | A | rs767586362 | AGXT | missense_variant | 204078 | Pathogenic |
| 2 | 240869336 | G | A | | AGXT | missense_variant | 204092 | Pathogenic |
| 2 | 240869357 | G | A | | AGXT | missense_variant | 204096 | Pathogenic |
| 2 | 240870656 | A | C | | AGXT | missense_variant | 204098 | Pathogenic |
| 2 | 240871379 | T | A | rs121908524 | AGXT | missense_variant | 5645 | Pathogenic |
| 2 | 240871391 | G | A | rs121908530 | AGXT | missense_variant | 5650 | Pathogenic |
| 2 | 240871406 | G | A | | AGXT | missense_variant | 204105 | Pathogenic/ |
| | | | | | | | | Likely_pathogenic |
| 2 | 240871433 | G | A | | AGXT | missense_variant | 40166 | Pathogenic/ |
| | | | | | | | | Likely_pathogenic |
| 2 | 240873001 | G | A | rs180177236 | AGXT | missense_variant | 204111 | Pathogenic |
| 2 | 240873049 | G | A | | AGXT | missense_variant | 204114 | Pathogenic |
| 2 | 240874041 | TCTC | T | | AGXT | inframe_deletion | 204194 | Pathogenic |
| 2 | 240875126 | G | T | | AGXT | missense_variant | 204123 | Pathogenic |
| 2 | 240875159 | T | C | rs121908525 | AGXT | missense_variant | 5646 | Pathogenic |
| 2 | 240875185 | T | C | rs180177264 | AGXT | missense_variant | 204126 | Pathogenic |
| 2 | 240875980 | G | C | rs146525143 | AGXT | missense_variant | 204129 | Pathogenic |
| 2 | 240877534 | C | G | | AGXT | splice_region_variant | 204169 | Pathogenic |

| chrom | pos (hg38) | clinvar_trait | hgvsp_refseq |
|---|---|---|---|
| 2 | 240868890 | Primary_hyperoxaluria,_type_I | NP_000021.1: p.Lys12GlnfsTerl56 |
| 2 | 240868995 | Primary_hyperoxaluria,_type_I | NP_000021.1: p.Gln44Ter |
| 2 | 240869202 | Primary_hyperoxaluria,_type_I | NP_000021.1: p.Tyr66Ter |
| 2 | 240869217 | Primary_hyperoxaluria,_type_I | NP_000021.1: p.Asn72LysfsTer96 |
| 2 | 240869256 | | NP_000021.1: p.Cys84Ter |
| 2 | 240869328 | | NP_000021.1: p.Trp108Ter |
| 2 | 240870646 | | NP_000021.1: p.Arg122GlufsTer5 |
| 2 | 240871347 | Primary_hyperoxaluria,_type_I | |
| 2 | 240871409 | | NP_000021.1: p.Val162GlyfsTer50 |
| 2 | 240871414 | | NP_000021.1: p.Leu166SerfsTer48 |
| 2 | 240873010 | | NP_000021.1: p.Ala186AspfsTer26 |
| 2 | 240873025 | Primary_hyperoxaluria,_type_I | NP_000021.1: p.Leu193PhefsTer19 |
| 2 | 240873025 | Primary_hyperoxaluria,_type_I | NP_000021.1: p.Leu193ProfsTer32 |
| 2 | 240873989 | | NP_000021.1: p.Leu203ArgfsTer9 |
| 2 | 240873994 | Primary_hyperoxaluria,_type_I | NP_000021.1: p.Tyr204Ter |
| 2 | 240874054 | Primary_hyperoxaluria,_type_I | NP_000021.1: p.Lys225ProfsTer47 |
| 2 | 240874063 | Primary_hyperoxaluria,_type_I | |
| 2 | 240875143 | | NP_000021.1: p.Phe240LeufsTer15 |
| 2 | 240875205 | Primary_hyperoxaluria,_type_I | |
| 2 | 240875934 | Primary_hyperoxaluria,_type_I | |
| 2 | 240875949 | | NP_000021.1: p.Val266SerfsTer7 |
| 2 | 240876005 | Primary_hyperoxaluria,_type_I | |
| 2 | 240876005 | Primary_hyperoxaluria,_type_I | |
| 2 | 240877536 | Primary_hyperoxaluria,_type_I | |
| 2 | 240877597 | Primary_hyperoxaluria,_type_I | NP_000021.1: p.Gln303Ter |
| 2 | 240878021 | Primary_hyperoxaluria,_type_I | |
| 2 | 240878035 | Primary_hyperoxaluria,_type_I | NP_000021.1: p.Thr320SerfsTer11 |
| 2 | 240878074 | | NP_000021.1: p.Trp332Ter |
| 2 | 240878075 | Primary_hyperoxaluria,_type_I | NP_000021.1: p.Trp332Ter |
| 2 | 240868868 | Primary_hyperoxaluria,_type_I | NP_000021.1: p.Met1? |
| 2 | 240868893 | Primary_hyperoxaluria,_type_I | NP_000021.1: p.Pro10Ser |
| 2 | 240868972 | Primary_hyperoxaluria,_type_I | NP_000021.1: p.Arg36His |
| 2 | 240868986 | Nephrocalcinosis\|Nephrolithiasis\| | NP_000021.1: p.Gly41Arg |
| | | Primary_hyperoxaluria,_type_I | |
| 2 | 240868990 | Primary_hyperoxaluria,_type_I | NP_000021.1: p.Gly42Glu |
| 2 | 240869004 | Primary_hyperoxaluria,_type_I | NP_000021.1: p.Gly47Arg |
| 2 | 240869171 | Primary_hyperoxaluria,_type_I | NP_000021.1: p.Ile56Asn |
| 2 | 240869179 | Primary_hyperoxaluria,_type_I | NP_000021.1: p.Glu59Lys |
| 2 | 240869336 | Primary_hyperoxaluria,_type_I | NP_000021.1: p.Arg111Gln |
| 2 | 240869357 | Primary_hyperoxaluria,_type_I | NP_000021.1: p.Arg118His |
| 2 | 240870656 | Primary_hyperoxaluria,_type_I | NP_000021.1: p.His124Pro |
| 2 | 240871379 | Primary_hyperoxaluria,_type_I\| | NP_000021.1: p.Phe152Ile |
| | | not_provided | |
| 2 | 240871391 | Primary_hyperoxaluria,_type_I | NP_000021.1: p.Gly156Arg |
| 2 | 240871406 | Nephrocalcinosis\|Nephrolithiasis\| | NP_000021.1: p.Gly161Ser |
| | | Primary_hyperoxaluria,_type_I | |
| 2 | 240871433 | Primary_hyperoxaluria\| | NP_000021.1: p.Gly170Arg |
| | | Primary_hyperoxaluria,_type_I\| | |
| | | not_provided | |
| 2 | 240873001 | Primary_hyperoxaluria,_type_I | NP_000021.1: p.Asp183Asn |
| 2 | 240873049 | Primary_hyperoxaluria,_type_I | NP_000021.1: p.Gly199Ser |
| 2 | 240874041 | Primary_hyperoxaluria,_type_I | NP_000021.1: p.Ser221del |
| 2 | 240875126 | Primary_hyperoxaluria,_type_I | NP_000021.1: p.Arg233Leu |
| 2 | 240875159 | Nephrocalcinosis\|Nephrolithiasis\| | NP_000021.1: p.Ile244Thr |
| | | Primary_hyperoxaluria\| | |
| | | Primary_hyperoxaluria,_type_I | |
| 2 | 240875185 | Primary_hyperoxaluria,_type_I | NP_000021.1: p.Cys253Arg |
| 2 | 240875980 | Primary_hyperoxaluria,_type_I | NP_000021.1: p.Glu274Asp |
| 2 | 240877534 | Primary_hyperoxaluria,_type_I | |

TABLE 21
AGXT LOF VARIANTS IDENTIFIED IN gnomAD_v3

| Chrom | Position (hg38) | rsID | Ref. | Alt. | Source | Consequence |
|---|---|---|---|---|---|---|
| 2 | 240868890 | rs1188924124 | A | AC | gnomAD Genomes | p.Lys12GlnfsTer156 |
| 2 | 240868890 | rs180177205 | AC | A | gnomAD Genomes | p.Lys12ArgfsTer34 |
| 2 | 240868980 | rs1282276334 | G | GCA | gnomAD Genomes | p.Ala40GlnfsTer7 |
| 2 | 240868985 | | C | CG | gnomAD Genomes | p.Leu43AlafsTer125 |
| 2 | 240869219 | | AC | A | gnomAD Genomes | p.Pro73HisfsTer47 |
| 2 | 240871438 | | ACT | A | gnomAD Genomes | p.Cys173ProfsTer51 |
| 2 | 240872978 | rs180177234 | G | A | gnomAD Genomes | c.525 − 1G > A |
| 2 | 240873023 | rs1179823296 | G | GA | gnomAD Genomes | p.Thr191AspfsTer34 |
| 2 | 240874004 | | C | T | gnomAD Genomes | p.Gln208Ter |
| 2 | 240875934 | rs180177267 | G | C | gnomAD Genomes | c.777 − 1G > C |
| 2 | 240876005 | | G | T | gnomAD Genomes | c.846 + 1G > T |
| 2 | 240877597 | rs180177294 | C | T | gnomAD Genomes | p.Gln303Ter |

| Chrom | Position (hg38) | Protein Consequence | Transcript Consequence | Annotation |
|---|---|---|---|---|
| 2 | 240868890 | p.Lys12GlnfsTer156 | c.33dup | frameshift_variant |
| 2 | 240868890 | p.Lys12ArgfsTer34 | c.33del | frameshift_variant |
| 2 | 240868980 | p.Ala40GlnfsTer7 | c.116_117dup | frameshift_variant |
| 2 | 240868985 | p.Leu43AlafsTer125 | c.126dup | frameshift_variant |
| 2 | 240869219 | p.Pro73HisfsTer47 | c.218del | frameshift_variant |
| 2 | 240871438 | p.Cys173ProfsTer51 | c.516_517del | frameshift_variant |
| 2 | 240872978 | | c.525 − 1G > A | splice_acceptor_variant |
| 2 | 240873023 | p.Thr191AspfsTer34 | c.569_570insA | frameshift_variant |
| 2 | 240874004 | p.Gln208Ter | c.622C > T | stop_gained |
| 2 | 240875934 | | c.777 − 1G > C | splice_acceptor_variant |
| 2 | 240876005 | | c.846 + 1G > T | splice_donor_variant |
| 2 | 240877597 | p.Gln303Ter | c.907C > T | stop_gained |

TABLE 22
AGXT LOF VARIANTS IDENTIFIED IN gnomAD_v2.1.1

| Chrom | Pos (hg19) | rsID | Ref | Alt | Source | Consequence |
|---|---|---|---|---|---|---|
| 2 | 241808397 | rs1282276334 | G | GCA | gnomAD Exomes | p.Ala40GlnfsTer7 |
| 2 | 241808402 | rs1333685290 | CG | C | gnomAD Exomes | p.Leu43CysfsTer3 |
| 2 | 241808619 | rs121908521 | C | G | gnomAD Exomes | p.Tyr66Ter |
| 2 | 241808659 | | G | GTTGCCAA | gnomAD Exomes | p.Gly80ValfsTer90 |
| 2 | 241808781 | rs113681235 | T | G | gnomAD Exomes | c.358 + 2T > G |
| 2 | 241810066 | rs180177210 | C | T | gnomAD Exomes | p.Arg122Ter |
| 2 | 241810127 | rs112910630 | T | C | gnomAD Exomes | c.423 + 2T > C |
| 2 | 241810815 | rs180177225 | C | A | gnomAD Exomes | p.Ser158Ter |
| 2 | 241810861 | rs180177232 | C | A | gnomAD Exomes | p.Cys173Ter |
| 2 | 241812394 | rs1452455390 | A | T | gnomAD Exomes | c.525 − 2A > T |
| 2 | 241812440 | rs1179823296 | G | GA | gnomAD Exomes | p.Thr191AspfsTer34 |
| 2 | 241812467 | rs1172393548 | G | A | gnomAD Exomes | c.595 + 1G > A |
| 2 | 241813394 | rs1468909944 | GGCATC | G | gnomAD Exomes | p.Ile200HisfsTer23 |
| 2 | 241813421 | rs750264224 | C | T | gnomAD Exomes | p.Gln208Ter |
| 2 | 241813477 | rs180177255 | CAAGT | C | gnomAD Exomes | c.679_680 + 2delAAGT |
| 2 | 241814525 | rs112673831 | G | A | gnomAD Exomes | c.681 − 1G > A |
| 2 | 241814525 | rs112673831 | G | T | gnomAD Exomes | c.681 − 1G > T |
| 2 | 241814622 | rs180177265 | G | A | gnomAD Exomes | c.776 + 1G > A |
| 2 | 241815351 | rs180177267 | G | C | gnomAD Exomes | c.777 − 1G > C |
| 2 | 241815390 | rs1213014609 | T | TGA | gnomAD Exomes | p.Ser275ArgfsTer38 |
| 2 | 241815390 | rs1213014609 | TGA | T | gnomAD Exomes | p.Ser275ProfsTer56 |
| 2 | 241815422 | rs180177281 | G | T | gnomAD Exomes | c.846 + 1G > T |
| 2 | 241816952 | rs1215010372 | AG | A | gnomAD Exomes | c.848delG |
| 2 | 241817471 | rs180177301 | TG | T | gnomAD Exomes | p.Val326TyrfsTer15 |
| 2 | 241817524 | rs773783526 | T | TC | gnomAD Exomes | p.Asp344ArgfsTer3 |

| Chrom | Pos (hg19) | Protein Consequence | Transcript Consequence | Annotation |
|---|---|---|---|---|
| 2 | 241808397 | p.Ala40GlnfsTer7 | c.116_117dupCA | frameshift_variant |
| 2 | 241808402 | p.Leu43CysfsTer3 | c.126delG | frameshift_variant |
| 2 | 241808619 | p.Tyr66Ter | C.198C < G | stop_gained |
| 2 | 241808659 | p.Gly80ValfsTer90 | c.238_239insTTGCCAA | frameshift_variant |
| 2 | 241808781 | | c.358 + 2T > G | splice_donor_variant |
| 2 | 241810066 | p.Arg122Ter | c.364C > T | stop_gained |
| 2 | 241810127 | | c.423 + 2T > C | splice_donor_variant |
| 2 | 241810815 | p.Ser158Ter | c.473C > A | stop_gained |
| 2 | 241810861 | p.Cys173Ter | c.519C > A | stop_gained |
| 2 | 241812394 | | c.525 − 2A > T | splice_acceptor_variant |
| 2 | 241812440 | p.Thr191AspfsTer34 | c.569_570insA | frameshift_variant |
| 2 | 241812467 | | c.595 + 1G > A | splice_donor_variant |
| 2 | 241813394 | p.Ile200HisfsTer23 | c.597_601delCATCG | frameshift_variant |
| 2 | 241813421 | p.Gln208Ter | c.622C > T | stop_gained |
| 2 | 241813477 | | c.679_680 + 2delAAGT | splice_donor_variant |
| 2 | 241814525 | | c.681 − 1G > A | splice_acceptor_variant |
| 2 | 241814525 | | c.681 − 1G > T | splice_acceptor_variant |
| 2 | 241814622 | | c.776 + 1G > A | splice_donor_variant |
| 2 | 241815351 | | c.777 − 1G > C | splice_acceptor_variant |
| 2 | 241815390 | p.Ser275ArgfsTer38 | c.823_824dupAG | frameshift_variant |
| 2 | 241815390 | p.Ser275ProfsTer56 | c.823_824delAG | frameshift_variant |
| 2 | 241815422 | | c.846 + 1G > T | splice_donor_variant |
| 2 | 241816952 | p.Gly283AlafsTer29 | c.848delG | splice_acceptor_variant |
| 2 | 241817471 | p.Val326TyrfsTer15 | c.976delG | frameshift_variant |
| 2 | 241817524 | p.Asp344ArgfsTer3 | c.1029dupC | frameshift_variant |

TABLE 23
AGXT VARIANTS IDENTIFIED IN CLINVAR ANNOTATED AS PATHOGENIC OR PATHOGENIC/LIKELY PATHOGENIC

| | | | | Clinical | | | GRCh37 | | GRCh38 | | | | |
|---|---|---|---|---|---|---|---|---|---|---|---|---|---|
| | | Protein | | significance | Review | | Chromo- | GRCh37 | Chromo- | GRCh38 | Varia- | Allele | dbSNP |
| Name | Gene(s) | change | Condition(s) | (Last reviewed) | status | Accession | some | Location | some | Location | tion ID | ID(s) | ID |
| NG_008005.1: | AGXT | | Primary | Pathogenic(Last | no assertion | VCV000204215 | 2 | 241808162- | 2 | 240868745- | 204215 | 200415 | |
| g.(?_5001)_(11460_12190)del | | | hyperoxaluria, | reviewed: | criteria | | | 241815351 | | 240875934 | | | |
| | | | type I | Nov. 27, 2014) | provided | | | | | | | | |
| NG_008005.1: | AGXT | | Primary | Pathogenic(Last | no assertion | VCV000204214 | 2 | 241808162- | 2 | 240868745- | 204214 | 200414 | |
| g.(?_5001)_(9305_10233)del | | | hyperoxaluria, | reviewed: | criteria | | | 241813394 | | 240873977 | | | |
| | | | type I | Nov. 27, 2014) | provided | | | | | | | | |
| NM_000030.3(AGXT): | AGXT | | Primary | Pathogenic(Last | no assertion | VCV000204172 | 2 | 241808284- | 2 | 240868867- | 204172 | 200417 | rs180177194 |
| c.2_3delinsAT | | | hyperoxaluria, | reviewed: | criteria | | | 241808285 | | 240868868 | | | |
| (p.Met1Asn) | | | type I | Nov. 27, 2014) | provided | | | | | | | | |
| NM_000030.3(AGXT): | AGXT | M1T | Primary | Pathogenic/Likely | criteria | VCV000204065 | 2 | 241808284 | 2 | 240868867 | 204065 | 200416 | rs138584408 |
| c.2T > C | | | hyperoxaluria, | pathogenic(Last | provided, | | | | | | | | |
| (p.Met1Thr) | | | type I | reviewed: | multiple | | | | | | | | |
| | | | | May 18, 2017) | submitters, | | | | | | | | |
| | | | | | no conflicts | | | | | | | | |
| NM_000030.3(AGXT): | AGXT | M1I | Primary | Pathogenic(Last | no assertion | VCV000204066 | 2 | 241808285 | 2 | 240868868 | 204066 | 200418 | rs180177213 |
| c.3G > T | | | hyperoxaluria, | reviewed: | criteria | | | | | | | | |
| (p.Met1Ile) | | | type I | Nov. 27, 2014) | provided | | | | | | | | |
| NM_000030.3(AGXT): | AGXT | V8L | Primary | Pathogenic(Last | no assertion | VCV000204067 | 2 | 241808304 | 2 | 240868887 | 204067 | 200419 | rs796052057 |
| c.22G > C | | | hyperoxaluria, | reviewed: | criteria | | | | | | | | |
| (p.Val8Leu) | | | type I | Nov. 27, 2014) | provided | | | | | | | | |
| NM_000030.3(AGXT): | AGXT | | Primary | Pathogenic(Last | criteria | VCV000140583 | 2 | 241808307- | 2 | 240868890- | 140583 | 150264 | rs180177201 |
| c.33dup | | | hyperoxaluria\| | reviewed: | provided, | | | 241808308 | | 240868891 | | | |
| (p.Lys12fs) | | | Primary | May 28, 2019) | multiple | | | | | | | | |
| | | | hyperoxaluria, | | submitters, | | | | | | | | |
| | | | type I\|not | | no conflicts | | | | | | | | |
| | | | provided | | | | | | | | | | |
| NM_000030.3(AGXT): | AGXT | P11fs | Primary | Pathogenic(Last | no assertion | VCV000204173 | 2 | 241808308- | 2 | 240868891 - | 204173 | 200425 | rs180177201 |
| c.32_33del | | | hyperoxaluria, | reviewed: | criteria | | | 241808309 | | 240868892 | | | |
| (p.Pro11fs) | | | type I | Nov. 27, 2014) | provided | | | | | | | | |
| NM_000030.3(AGXT): | AGXT | K12fs | not provided\| | Pathogenic/Likely | criteria | VCV000188775 | 2 | 241808308 | 2 | 240868891 | 188775 | 186650 | rs180177201 |
| c.33del | | | Primary | pathogenic(Last | provided, | | | | | | | | |
| (p.Lys12fs) | | | hyperoxaluria, | reviewed: | multiple | | | | | | | | |
| | | | type I | Oct. 22, 2018) | submitters, | | | | | | | | |
| | | | | | no conflicts | | | | | | | | |
| NM_000030.3(AGXT): | AGXT | P10S | Primary | Pathogenic(Last | no assertion | VCV000204068 | 2 | 241808310 | 2 | 240868893 | 204068 | 200422 | rs180177191 |
| c.28C > T | | | hyperoxaluria, | reviewed: | criteria | | | | | | | | |
| (p.Pro10Ser) | | | type I | Nov. 27, 2014) | provided | | | | | | | | |
| NM_000030.3(AGXT): | AGXT | Q23* | not provided | Pathogenic(Last | criteria | VCV000654767 | 2 | 241808349 | 2 | 240868932 | 654767 | 629745 | |
| c.67C > T | | | | reviewed: | provided, | | | | | | | | |
| (p.Gln23Ter) | | | | Dec. 21,2018) | single | | | | | | | | |
| | | | | | submitter | | | | | | | | |
| NM_000030.3(AGXT): | AGXT | L25R | Primary | Pathogenic(Last | no assertion | VCV000204070 | 2 | 241808356 | 2 | 240868939 | 204070 | 200428 | rs180177262 |
| c.74T > G | | | hyperoxaluria, | reviewed: | criteria | | | | | | | | |
| (p.Leu25Arg) | | | type I | Nov. 27, 2014) | provided | | | | | | | | |
| NM_000030.3(AGXT): | AGXT | L26P | Primary | Pathogenic(Last | no assertion | VCV000204071 | 2 | 241808359 | 2 | 240868942 | 204071 | 200429 | rs180177268 |
| c.77T > C | | | hyperoxaluria, | reviewed: | criteria | | | | | | | | |
| (p.Leu26Pro) | | | type I | Nov. 27, 2014) | provided | | | | | | | | |
| NM_000030.3(AGXT): | AGXT | P28fs | Primary | Pathogenic(Last | no assertion | VCV000204174 | 2 | 241808364 | 2 | 240868947 | 204174 | 200430 | rs180177278 |
| c.83del | | | hyperoxaluria, | reviewed: | criteria | | | | | | | | |
| (p.Pro28fs) | | | type I | Nov. 27, 2014) | provided | | | | | | | | |
| NM_000030.3(AGXT): | AGXT | R36H | Primary | Pathogenic(Last | criteria | VCV000204072 | 2 | 241808389 | 2 | 240868972 | 204072 | 200431 | rs180177162 |
| c.107G > A | | | hyperoxaluria, | reviewed: | provided, | | | | | | | | |
| (p.Arg36His) | | | type I | May 28, 2019) | single | | | | | | | | |
| | | | | | submitter | | | | | | | | |
| NM_000030.3(AGXT): | AGXT | L43fs | Primary | Pathogenic(Last | no assertion | VCV000204176 | 2 | 241808403 | 2 | 240868986 | 204176 | 200435 | rs180177171 |
| c.126del | | | hyperoxaluria, | reviewed: | criteria | | | | | | | | |
| (p.Leu43fs) | | | type I | Nov. 27, 2014) | provided | | | | | | | | |
| NM_000030.3(AGXT): | AGXT | G41R | Nephrolithiasis\| | Pathogenic/Likely | no assertion | VCV000005644 | 2 | 241808403 | 2 | 240868986 | 5644 | 20683 | rs121908523 |
| c.121G > A | | | Nephrocalcinosis\| | pathogenic(Last | criteria | | | | | | | | |
| (p.Gly41Arg) | | | Primary | reviewed: | provided | | | | | | | | |
| | | | hyperoxaluria, | Sep. 8, 2017) | | | | | | | | | |
| | | | type I | | | | | | | | | | |
| NM_000030.3(AGXT): | AGXT | G41E | Primary | Pathogenic(Last | no assertion | VCV000204073 | 2 | 241808404 | 2 | 240868987 | 204073 | 200433 | rs180177168 |
| c.122G > A | | | hyperoxaluria, | reviewed: | criteria | | | | | | | | |
| (p.Gly41Glu) | | | type I | Nov. 27, 2014) | provided | | | | | | | | |
| NM_000030.3(AGXT): | AGXT | G42E | Primary | Pathogenic(Last | no assertion | VCV000204074 | 2 | 241808407 | 2 | 240868990 | 204074 | 200434 | rs180177170 |
| c.125G > A | | | hyperoxaluria, | reviewed: | criteria | | | | | | | | |
| (p.Gly42Glu) | | | type I | Nov. 27, 2014) | provided | | | | | | | | |
| NM_000030.3(AGXT): | AGXT | G47R | Primary | Pathogenic(Last | no assertion | VCV000204076 | 2 | 241808421 | 2 | 240869004 | 204076 | 200437 | rs180177173 |
| c.139G > A | | | hyperoxaluria, | reviewed: | criteria | | | | | | | | |
| (p.Gly47Arg) | | | type I | Nov. 27, 2014) | provided | | | | | | | | |
| NM_000030.3(AGXT): | AGXT | | Primary | Pathogenic(Last | no assertion | VCV000204163 | 2 | 241808586 | 2 | 240869169 | 204163 | 200447 | rs180177177 |
| c.166 − 1G > A | | | hyperoxaluria, | reviewed: | criteria | | | | | | | | |
| | | | type I | Nov. 27, 2014) | provided | | | | | | | | |
| NM_000030.3(AGXT): | AGXT | I56N | Primary | Pathogenic(Last | no assertion | VCV000204077 | 2 | 241808588 | 2 | 240869171 | 204077 | 200448 | rs180177180 |
| c.167T > A | | | hyperoxaluria, | reviewed: | criteria | | | | | | | | |
| (p.Ile56Asn) | | | type I | Nov. 27, 2014) | provided | | | | | | | | |
| NM_000030.3(AGXT): | AGXT | E59K | Primary | Pathogenic(Last | no assertion | VCV000204078 | 2 | 241808596 | 2 | 240869179 | 204078 | 200449 | rs767586362 |
| c.175G > A | | | hyperoxaluria, | reviewed: | criteria | | | | | | | | |
| (p.Glu59Lys) | | | type I | Nov. 27, 2014) | provided | | | | | | | | |
| NM_000030.3(AGXT): | AGXT | G63R | Primary | Pathogenic(Last | no assertion | VCV000204079 | 2 | 241808608 | 2 | 240869191 | 204079 | 200450 | rs180177181 |
| c.187G > C | | | hyperoxaluria, | reviewed: | criteria | | | | | | | | |
| (p.Gly63Arg) | | | type I | Nov. 27, 2014) | provided | | | | | | | | |
| NM_000030.3(AGXT): | AGXT | Y66* | Primary | Pathogenic(Last | no assertion | VCV000005642 | 2 | 241808619 | 2 | 240869202 | 5642 | 20681 | rs121908521 |
| c.198C > G | | | hyperoxaluria, | reviewed: | criteria | | | | | | | | |
| (p.Tyr66Ter) | | | type I | Nov. 27, 2014) | provided | | | | | | | | |
| NM_000030.3(AGXT): | AGXT | Q69* | Primary | Pathogenic(Last | no assertion | VCV000204080 | 2 | 241808626 | 2 | 240869209 | 204080 | 200451 | rs180177182 |
| c.205C > T | | | hyperoxaluria, | reviewed: | criteria | | | | | | | | |
| (p.Gln69Ter) | | | type I | Nov. 27, 2014) | provided | | | | | | | | |
| NM_000030.3(AGXT): | AGXT | T70N | Primary | Pathogenic(Last | no assertion | VCV000204081 | 2 | 241808630 | 2 | 240869213 | 204081 | 200452 | rs796052058 |
| c.209C > A | | | hyperoxaluria, | reviewed: | criteria | | | | | | | | |
| (p.Thr70Asn) | | | type I | Nov. 27, 2014) | provided | | | | | | | | |
| NM_000030.3(AGXT): | AGXT | | Primary | Pathogenic(Last | no assertion | VCV000204177 | 2 | 241808634- | 2 | 240869217- | 204177 | 200453 | rs796052069 |
| c.215dup | | | hyperoxaluria, | reviewed: | criteria | | | 241808635 | | 240869218 | | | |
| (p.Asn72fs) | | | type I | Nov. 27, 2014) | provided | | | | | | | | |
| NM_000030.3(AGXT): | AGXT | S81L | Primary | Pathogenic(Last | no assertion | VCV000204083 | 2 | 241808663 | 2 | 240869246 | 204083 | 200456 | rs180177184 |
| c.242C > T | | | hyperoxaluria, | reviewed: | criteria | | | | | | | | |
| (p.Ser81Leu) | | | type I | Nov. 27, 2014) | provided | | | | | | | | |
| NM_000030.3(AGXT): | AGXT | S81* | Primary | Pathogenic(Last | no assertion | VCV000204082 | 2 | 241808663 | 2 | 240869246 | 204082 | 200455 | rs180177184 |
| c.242C > A | | | hyperoxaluria, | reviewed: | criteria | | | | | | | | |
| (p.Ser81Ter) | | | type I | Nov. 27, 2014) | provided | | | | | | | | |
| NM_000030.3(AGXT): | AGXT | G82R | Primary | Pathogenic(Last | no assertion | VCV000204084 | 2 | 241808665 | 2 | 240869248 | 204084 | 200457 | rs180177185 |
| c.244G > C | | | hyperoxaluria, | reviewed: | criteria | | | | | | | | |
| (p.Gly82Arg) | | | type I | Nov. 27, 2014) | provided | | | | | | | | |
| NM_000030.3(AGXT): | AGXT | H83R | Primary | Pathogenic(Last | no assertion | VCV000204085 | 2 | 241808669 | 2 | 240869252 | 204085 | 200458 | rs180177186 |
| c.248A > G | | | hyperoxaluria, | reviewed: | criteria | | | | | | | | |
| (p.His83Arg) | | | type I | Nov. 27, 2014) | provided | | | | | | | | |
| NM_000030.3(AGXT): | AGXT | A85D | Primary | Pathogenic(Last | no assertion | VCV000204086 | 2 | 241808675 | 2 | 240869258 | 204086 | 200459 | rs796052059 |
| c.254C > A | | | hyperoxaluria, | reviewed: | criteria | | | | | | | | |
| (p.Ala85Asp) | | | type I | Nov. 27, 2014) | provided | | | | | | | | |
| NM_000030.3(AGXT): | AGXT | N92fs | Primary | Pathogenic(Last | no assertion | VCV000204179 | 2 | 241808697 | 2 | 240869280 | 204179 | 200461 | rs180177187 |
| c.276del | | | hyperoxaluria, | reviewed: | criteria | | | | | | | | |
| (p.Asn92fs) | | | type I | Nov. 27, 2014) | provided | | | | | | | | |
| NM_000030.3(AGXT): | AGXT | | Primary | Pathogenic(Last | no assertion | VCV000204180 | 2 | 241808702- | 2 | 240869285- | 204180 | 200463 | rs180177190 |
| c.283_285dup | | | hyperoxaluria, | reviewed: | criteria | | | 241808703 | | 240869286 | | | |
| (p.Glu95dup) | | | type I | Nov. 27, 2014) | provided | | | | | | | | |
| NM_000030.3(AGXT): | AGXT | E95K | Primary | Pathogenic(Last | no assertion | VCV000204087 | 2 | 241808704 | 2 | 240869287 | 204087 | 200462 | rs180177189 |
| c.283G > A | | | hyperoxaluria, | reviewed: | criteria | | | | | | | | |
| (p.Glu95Lys) | | | type I | Nov. 27, 2014) | provided | | | | | | | | |
| NM_000030.2(AGXT): | AGXT | G103E | | Pathogenic(Last | no assertion | VCV000204181 | 2\|2 | 241808729 | 2\|2 | 240869312 | 204181 | 200466\| | rs180177196\| |
| c.[299_307dup; 308G > A] | | | | reviewed: | criteria | | | | | | | 200465 | rs180177193 |
| | | | | Nov. 27, 2014) | provided | | | | | | | | |
| NM_000030.3(AGXT): | AGXT | W108R | not provided\| | Pathogenic/Likely | criteria | VCV000188891 | 2 | 241808743 | 2 | 240869326 | 188891 | 186654 | rs180177197 |
| c.322T > C | | | Primary | pathogenic(Last | provided, | | | | | | | | |
| (p.Trp108Arg) | | | hyperoxaluria, | reviewed: | multiple | | | | | | | | |
| | | | type I | Dec. 27, 2018) | submitters, | | | | | | | | |
| | | | | | no conflicts | | | | | | | | |
| NM_000030.3(AGXT): | AGXT | Q110fs | Primary | Pathogenic(Last | no assertion | VCV000204182 | 2 | 241808744 | 2 | 240869327 | 204182 | 200470 | rs180177200 |
| c.327del | | | hyperoxaluria, | reviewed: | criteria | | | | | | | | |
| (p.Gln110fs) | | | type I | Nov. 27, 2014) | provided | | | | | | | | |
| NM_000030.3(AGXT): | AGXT | W108* | Primary | Pathogenic(Last | no assertion | VCV000204088 | 2 | 241808744 | 2 | 240869327 | 204088 | 200467 | rs180177198 |
| c.323G > A | | | hyperoxaluria, | reviewed: | criteria | | | | | | | | |
| (p.Trp108Ter) | | | type I | Nov. 27, 2014) | provided | | | | | | | | |
| NM_000030.3(AGXT): | AGXT | W108C | Primary | Pathogenic(Last | no assertion | VCV000204089 | 2 | 241808745 | 2 | 240869328 | 204089 | 200468 | rs796052060 |
| c.324G > T | | | hyperoxaluria, | reviewed: | criteria | | | | | | | | |
| (p.Trp108Cys) | | | type I | Nov. 27, 2014) | provided | | | | | | | | |
| NM_000030.3(AGXT): | AGXT | G109V | Primary | Pathogenic(Last | no assertion | VCV000204090 | 2 | 241808747 | 2 | 240869330 | 204090 | 200469 | rs180177199 |
| c.326G > T | | | hyperoxaluria, | reviewed: | criteria | | | | | | | | |
| (p.Gly109Val) | | | type I | Nov. 27, 2014) | provided | | | | | | | | |
| NM_000030.3(AGXT): | AGXT | R111* | Primary | Pathogenic(Last | no assertion | VCV000204091 | 2 | 241808752 | 2 | 240869335 | 204091 | 200471 | rs180177202 |
| c.331C > T | | | hyperoxaluria, | reviewed: | criteria | | | | | | | | |
| (p.Arg111Ter) | | | type I | Nov. 27, 2014) | provided | | | | | | | | |
| NM_000030.3(AGXT): | AGXT | R111Q | Primary | Pathogenic(Last | no assertion | VCV000204092 | 2 | 241808753 | 2 | 240869336 | 204092 | 200472 | rs180177203 |
| c.332G > A | | | hyperoxaluria, | reviewed: | criteria | | | | | | | | |
| (p.Arg111Gln) | | | type I | Nov. 27, 2014) | provided | | | | | | | | |
| NM_000030.3(AGXT): | AGXT | A112D | Primary | Pathogenic(Last | no assertion | VCV000204093 | 2 | 241808756 | 2 | 240869339 | 204093 | 200473 | rs796052061 |
| c.335C > A | | | hyperoxaluria, | reviewed: | criteria | | | | | | | | |
| (p.Ala112Asp) | | | type I | Nov. 27, 2014) | provided | | | | | | | | |
| NM_000030.3(AGXT): | AGXT | E117* | Primary | Pathogenic(Last | no assertion | VCV000204094 | 2 | 241808770 | 2 | 240869353 | 204094 | 200474 | rs180177208 |
| c.349G > T | | | hyperoxaluria, | reviewed: | criteria | | | | | | | | |
| (p.Glu117Ter) | | | type I | Nov. 27, 2014) | provided | | | | | | | | |
| NM_000030.3(AGXT): | AGXT | R118H | Primary | Pathogenic(Last | no assertion | VCV000204096 | 2 | 241808774 | 2 | 240869357 | 204096 | 200476 | rs138025751 |
| c.353G > A | | | hyperoxaluria, | reviewed: | criteria | | | | | | | | |
| (p.Arg118His) | | | type I | Nov. 27, 2014) | provided | | | | | | | | |
| NM_000030.3(AGXT): | AGXT | | Primary | Pathogenic(Last | no assertion | VCV000204151 | 2 | 241808780 | 2 | 240869363 | 204151 | 200477 | rs796052067 |
| c.358 + 1G > T | | | hyperoxaluria, | reviewed: | criteria | | | | | | | | |
| | | | type I | Nov. 27, 2014) | provided | | | | | | | | |
| NM_000030.3(AGXT): | AGXT | | Primary | Pathogenic(Last | no assertion | VCV000204152 | 2 | 241808781 | 2 | 240869364 | 204152 | 200478 | rs1l3681235 |
| c.358 + 2T > G | | | hyperoxaluria, | reviewed: | criteria | | | | | | | | |
| | | | type I | Nov. 27, 2014) | provided | | | | | | | | |
| NM_000030.3(AGXT): | AGXT | | Primary | Pathogenic(Last | no assertion | VCV000204183 | 2 | 241810057- | 2 | 240870640- | 204183 | 200481 | rs796052070 |
| c.359 − 1_382del | | | hyperoxaluria, | reviewed: | criteria | | | 241810081 | | 240870664 | | | |
| | | | type I | Nov. 27, 2014) | provided | | | | | | | | |
| NM_000030.3(AGXT): | AGXT | R122* | not provided\| | Pathogenic(Last | criteria | VCV000204097 | 2 | 241810066 | 2 | 240870649 | 204097 | 200482 | rs180177210 |
| c.364C > T | | | Primary | reviewed: | provided, | | | | | | | | |
| (p.Arg122Ter) | | | hyperoxaluria, | Dec. 21,2018) | single | | | | | | | | |
| | | | type I | | submitter | | | | | | | | |
| NM_000030.3(AGXT): | AGXT | H124P | Primary | Pathogenic(Last | no assertion | VCV000204098 | 2 | 241810073 | 2 | 240870656 | 204098 | 200483 | rs180177211 |
| c.371A > C | | | hyperoxaluria, | reviewed: | criteria | | | | | | | | |
| (p.His 124Pro) | | | type I | Nov. 27, 2014) | provided | | | | | | | | |
| NM_000030.3(AGXT): | AGXT | | Primary | Pathogenic(Last | criteria | VCV000557281 | 2 | 241810105 - | 2 | 240870688- | 557281 | 542186 | rs1553648488 |
| c.406_410dup | | | hyperoxaluria, | reviewed: | provided, | | | 241810106 | | 240870689 | | | |
| (p.Gln137fs) | | | type I | Mar. 21,2018) | single | | | | | | | | |
| | | | | | submitter | | | | | | | | |
| NM_000030.3(AGXT): | AGXT | Q137* | Primary | Pathogenic(Last | no assertion | VCV000204099 | 2 | 241810111 | 2 | 240870694 | 204099 | 200485 | rs180177214 |
| c.409C > T | | | hyperoxaluria, | reviewed: | criteria | | | | | | | | |
| (p.Gln137Ter) | | | type I | Nov. 27, 2014) | provided | | | | | | | | |
| NM_000030.3(AGXT): | AGXT | V139del | Primary | Pathogenic(Last | no assertion | VCV000204184 | 2 | 241810116- | 2 | 240870699- | 204184 | 200486 | rs180177215 |
| c.416_418del | | | hyperoxaluria, | reviewed: | criteria | | | 241810118 | | 240870701 | | | |
| (p.Val139del) | | | type I | Nov. 27, 2014) | provided | | | | | | | | |
| NM_000030.3(AGXT): | AGXT | E141D | Primary | Pathogenic(Last | no assertion | VCV000204100 | 2 | 241810125 | 2 | 240870708 | 204100 | 200487 | rs180177217 |
| c.423G > T | | | hyperoxaluria, | reviewed: | criteria | | | | | | | | |
| (p.Glu141Asp) | | | type I | Nov. 27, 2014) | provided | | | | | | | | |
| NM_000030.3(AGXT): | AGXT | | Primary | Pathogenic(Last | no assertion | VCV000204164 | 2 | 241810764 | 2 | 240871347 | 204164 | 200493 | rs180177219 |
| c.424 − 2A > G | | | hyperoxaluria, | reviewed: | criteria | | | | | | | | |
| | | | type I | Nov. 27, 2014) | provided | | | | | | | | |
| NM_000030.3(AGXT): | AGXT | V149fs | Primary | Pathogenic(Last | no assertion | VCV000204186 | 2 | 241810787 | 2 | 240871370 | 204186 | 200494 | rsl80177220 |
| c.445del | | | hyperoxaluria, | reviewed: | criteria | | | | | | | | |
| (p.Val149fs) | | | type I | Nov. 27, 2014) | provided | | | | | | | | |
| NM_000030.3(AGXT): | AGXT | L151fs | Primary | Pathogenic(Last | criteria | VCV000204185 | 2 | 241810787- | 2 | 240871370- | 204185 | 200495 | rs180177221 |
| c.447_454del | | | hyperoxaluria, | reviewed: | provided, | | | 241810794 | | 240871377 | | | |
| (p.Leu151fs) | | | type I | Jan. 18, 2016) | single | | | | | | | | |
| | | | | | submitter | | | | | | | | |
| NM_000030.3(AGXT): | AGXT | L150P | Primary | Pathogenic(Last | no assertion | VCV000204101 | 2 | 241810791 | 2 | 240871374 | 204101 | 200496 | rs180177222 |
| c.449T > C | | | hyperoxaluria, | reviewed: | criteria | | | | | | | | |
| (p.Leu150Pro) | | | type I | Nov. 27, 2014) | provided | | | | | | | | |
| NM_000030.3(AGXT): | AGXT | F152I | not provided\| | Pathogenic(Last | criteria | VCV000005645 | 2 | 241810796 | 2 | 240871379 | 5645 | 20684 | rs121908524 |
| c.454T > A | | | Primary | reviewed: | provided, | | | | | | | | |
| (p.Phe152Ile) | | | hyperoxaluria, | Jul. 2, 2018) | multiple | | | | | | | | |
| | | | type I\|Primary | | submitters, | | | | | | | | |
| | | | hyperoxaluria | | no conflicts | | | | | | | | |
| NM_000030.3(AGXT): | AGXT | L153V | Primary | Pathogenic(Last | no assertion | VCV000204102 | 2 | 241810799 | 2 | 240871382 | 204102 | 200497 | rs180177223 |
| c.457T > G | | | hyperoxaluria, | reviewed: | criteria | | | | | | | | |
| (p.Leu153Val) | | | type I | Nov. 27, 2014) | provided | | | | | | | | |
| NM_000030.3(AGXT): | AGXT | T154fs | Primary | Pathogenic(Last | no assertion | VCV000204187 | 2 | 241810801 | 2 | 240871384 | 204187 | 200498 | rs180177224 |
| c.460del | | | hyperoxaluria, | reviewed: | criteria | | | | | | | | |
| (p.Thr154fs) | | | type I | Nov. 27, 2014) | provided | | | | | | | | |
| NM_000030.3(AGXT): | AGXT | G156R | Primary | Pathogenic(Last | criteria | VCV000552979 | 2 | 241810808 | 2 | 240871391 | 552979 | 542075 | rs121908530 |
| c.466G > C | | | hyperoxaluria, | reviewed: | provided, | | | | | | | | |
| (p.Gly156Arg) | | | type I | Jul. 24, 2017) | single | | | | | | | | |
| | | | | | submitter | | | | | | | | |
| NM_000030.3(AGXT): | AGXT | G156R | Primary | Pathogenic(Last | criteria | VCV000005650 | 2 | 241810808 | 2 | 240871391 | 5650 | 20689 | rs121908530 |
| c.466G > A | | | hyperoxaluria, | reviewed: | provided, | | | | | | | | |
| (p.Gly156Arg) | | | type I | Jan. 14, 2016) | single | | | | | | | | |
| | | | | | submitter | | | | | | | | |
| NM_000030.3(AGXT): | AGXT | S158* | Primary | Pathogenic(Last | no assertion | VCV000204104 | 2 | 241810815 | 2 | 240871398 | 204104 | 200499 | rs180177225 |
| c.473C > A | | | hyperoxaluria, | reviewed: | criteria | | | | | | | | |
| (p.Ser158Ter) | | | type I | Nov. 27, 2014) | provided | | | | | | | | |
| NM_000030.3(AGXT): | AGXT | G161R | Primary | Pathogenic(Last | no assertion | VCV000204106 | 2 | 241810823 | 2 | 240871406 | 204106 | 200502 | rs180177227 |
| c.481G > C | | | hyperoxaluria, | reviewed: | criteria | | | | | | | | |
| (p.Gly161Arg) | | | type I | Nov. 27, 2014) | provided | | | | | | | | |
| NM_000030.3(AGXT): | AGXT | G161S | Nephrolithiasis\| | Pathogenic/Likely | no assertion | VCV000204105 | 2 | 241810823 | 2 | 240871406 | 204105 | 200501 | rs180177227 |
| c.481G > A | | | Nephrocalcinosis\| | pathogenic(Last | criteria | | | | | | | | |
| (p.Gly161Ser) | | | Primary | reviewed: | provided | | | | | | | | |
| | | | hyperoxaluria, | Sep. 8, 2017) | | | | | | | | | |
| | | | type I | | | | | | | | | | |
| NM_000030.3(AGXT): | AGXT | L166P | Primary | Pathogenic(Last | no assertion | VCV000204107 | 2 | 241810839 | 2 | 240871422 | 204107 | 200504 | rs180177230 |
| c.497T > C | | | hyperoxaluria, | reviewed: | criteria | | | | | | | | |
| (p.Leu166Pro) | | | type I | Nov. 27, 2014) | provided | | | | | | | | |
| NM_000030.3(AGXT): | AGXT | G170R | Primary | Pathogenic/Likely | criteria | VCV000040166 | 2 | 241810850 | 2 | 240871433 | 40166 | 38436 | rs121908529 |
| c.508G > A | | | hyperoxaluria\| | pathogenic(Last | provided, | | | | | | | | |
| (p.Gly170Arg) | | | not provided\| | reviewed: | multiple | | | | | | | | |
| | | | Primary | Dec. 4, 2018) | submitters, | | | | | | | | |
| | | | hyperoxaluria, | | no conflicts | | | | | | | | |
| | | | type I | | | | | | | | | | |
| NM_000030.3(AGXT): | AGXT | C173Y | Primary | Pathogenic(Last | no assertion | VCV000204108 | 2 | 241810860 | 2 | 240871443 | 204108 | 200505 | rs180177231 |
| c.518G > A | | | hyperoxaluria, | reviewed: | criteria | | | | | | | | |
| (p.Cys173Tyr) | | | type I | Nov. 27, 2014) | provided | | | | | | | | |
| NM_000030.3(AGXT): | AGXT | | Primary | Pathogenic(Last | no assertion | VCV000204188 | 2 | 241810861 - | 2 | 240871444- | 204188 | 200507 | rs180177233 |
| c.519_520delinsGA | | | hyperoxaluria, | reviewed: | criteria | | | 241810862 | | 240871445 | | | |
| (p.Cys173_{—} | | | type I | Nov. 27, 2014) | provided | | | | | | | | |
| His174delinsTrpAsn) | | | | | | | | | | | | | |
| NM_000030.3(AGXT): | AGXT | C173* | Primary | Pathogenic(Last | no assertion | VCV000204109 | 2 | 241810861 | 2 | 240871444 | 204109 | 200506 | rs180177232 |
| c.519C > A | | | hyperoxaluria, | reviewed: | criteria | | | | | | | | |
| (p.Cys173Ter) | | | type I | Nov. 27, 2014) | provided | | | | | | | | |
| NG_008005.1: | AGXT | | Primary | Pathogenic(Last | no assertion | VCV000204216 | 2 | 241810867- | 2 | 240871450- | 204216 | 200411 | |
| g.(7706_9235)_(15375_?)del | | | hyperoxaluria, | reviewed: | criteria | | | 241818536 | | 240879119 | | | |
| | | | type I | Nov. 27, 2014) | provided | | | | | | | | |
| NM_000030.3(AGXT): | AGXT | | Primary | Pathogenic(Last | criteria | VCV000204165 | 2 | 241812395 | 2 | 240872978 | 204165 | 200509 | rs180177234 |
| c.525 − 1G > A | | | hyperoxaluria, | reviewed: | provided, | | | | | | | | |
| | | | type I | Apr. 9, 2018) | single | | | | | | | | |
| | | | | | submitter | | | | | | | | |
| NM_000030.3(AGXT): | AGXT | D183N | Primary | Pathogenic(Last | no assertion | VCV000204111 | 2 | 241812418 | 2 | 240873001 | 204111 | 200511 | rs180177236 |
| c.547G > A | | | hyperoxaluria, | reviewed: | criteria | | | | | | | | |
| (p.Asp183Asn) | | | type I | Nov. 27, 2014) | provided | | | | | | | | |
| NM_000030.3(AGXT): | AGXT | | Primary | Pathogenic(Last | no assertion | VCV000204189 | 2 | 241812428- | 2 | 240873011 - | 204189 | 200512 | rs180177237 |
| c.557_562delinsATCGGT | | | hyperoxaluria, | reviewed: | criteria | | | 241812433 | | 240873016 | | | |
| (p.Ala186_{—} | | | type I | Nov. 27, 2014) | provided | | | | | | | | |
| Ser187delinsAspArg) | | | | | | | | | | | | | |
| NM_000030.3(AGXT): | AGXT | T191fs | Primary | Pathogenic(Last | no assertion | VCV000204190 | 2 | 241812439 | 2 | 240873022 | 204190 | 200513 | rs180177240 |
| c.570del | | | hyperoxaluria, | reviewed: | criteria | | | | | | | | |
| (p.Thr191fs) | | | type I | Nov. 27, 2014) | provided | | | | | | | | |
| NM_000030.3(AGXT): | AGXT | G190R | not provided\| | Pathogenic/Likely | criteria | VCV000189047 | 2 | 241812439 | 2 | 240873022 | 189047 | 186657 | rs180177239 |
| c.568G > A | | | Primary | pathogenic(Last | provided, | | | | | | | | |
| (p.Gly190Arg) | | | hyperoxaluria, | reviewed: | multiple | | | | | | | | |
| | | | type I | Oct. 23, 2018) | submitters, | | | | | | | | |
| | | | | | no conflicts | | | | | | | | |
| NM_000030.3(AGXT): | AGXT | | Primary | Pathogenic(Last | no assertion | VCV000204192 | 2 | 241812442- | 2 | 240873025 - | 204192 | 200515 | rs180177241 |
| c.577dup | | | hyperoxaluria, | reviewed: | criteria | | | 241812443 | | 240873026 | | | |
| (p.Leu193fs) | | | type I | Nov. 27, 2014) | provided | | | | | | | | |
| NM_000030.3(AGXT): | AGXT | M195L | Primary | Pathogenic(Last | no assertion | VCV000204112 | 2 | 241812454 | 2 | 240873037 | 204112 | 200516 | rs180177243 |
| c.583A > C | | | hyperoxaluria, | reviewed: | criteria | | | | | | | | |
| (p.Met195Leu) | | | type I | Nov. 27, 2014) | provided | | | | | | | | |
| NM_000030.3(AGXT): | AGXT | M195R | Primary | Pathogenic(Last | no assertion | VCV000204113 | 2 | 241812455 | 2 | 240873038 | 204113 | 200517 | rs180177244 |
| c.584T > G | | | hyperoxaluria, | reviewed: | criteria | | | | | | | | |
| (p.Met195Arg) | | | type I | Nov. 27, 2014) | provided | | | | | | | | |
| NM_000030.3(AGXT): | AGXT | G199S | Primary | Pathogenic(Last | no assertion | VCV000204114 | 2 | 241812466 | 2 | 240873049 | 204114 | 200518 | rs796052062 |
| c.595G > A | | | hyperoxaluria, | reviewed: | criteria | | | | | | | | |
| (p.Gly199Ser) | | | type I | Nov. 27, 2014) | provided | | | | | | | | |
| NM_000030.3(AGXT): | AGXT | | Primary | Pathogenic(Last | criteria | VCV000204166 | 2 | 241813393 | 2 | 240873976 | 204166 | 200519 | rs180177245 |
| c.596 − 2A > G | | | hyperoxaluria, | reviewed: | provided, | | | | | | | | |
| | | | type I | May 25, 2017) | single | | | | | | | | |
| | | | | | submitter | | | | | | | | |
| NM_000030.3(AGXT): | AGXT | D201E | Primary | Pathogenic | criteria | VCV000204115 | 2 | 241813402 | 2 | 240873985 | 204115 | 200520 | rs180177246 |
| c.603C > A | | | hyperoxaluria, | | provided, | | | | | | | | |
| (p.Asp201Glu) | | | type I | | single | | | | | | | | |
| | | | | | submitter | | | | | | | | |
| NM_000030.3(AGXT): | AGXT | I202N | Primary | Pathogenic(Last | no assertion | VCV000204116 | 2 | 241813404 | 2 | 240873987 | 204116 | 200521 | rs536352238 |
| c.605T > A | | | hyperoxaluria, | reviewed: | criteria | | | | | | | | |
| (p.Ile202Asn) | | | type I | Nov. 27, 2014) | provided | | | | | | | | |
| NM_000030.3(AGXT): | AGXT | Y204* | Primary | Pathogenic(Last | no assertion | VCV000204117 | 2 | 241813411 | 2 | 240873994 | 204117 | 200522 | rs180177247 |
| c.612C > A | | | hyperoxaluria, | reviewed: | criteria | | | | | | | | |
| (p.Tyr204Ter) | | | type I | Nov. 27, 2014) | provided | | | | | | | | |
| NM_000030.3(AGXT): | AGXT | S205P | not provided\| | Pathogenic(Last | criteria | VCV000005640 | 2 | 241813412 | 2 | 240873995 | 5640 | 20679 | rs121908520 |
| c.613T > C | | | Primary | reviewed: | provided, | | | | | | | | |
| (p.Ser205Pro) | | | hyperoxaluria, | Sep. 8, 2016) | single | | | | | | | | |
| | | | type I | | submitter | | | | | | | | |
| NM_000030.3(AGXT): | AGXT | S205* | Primary | Pathogenic(Last | no assertion | VCV000204119 | 2 | 241813413 | 2 | 240873996 | 204119 | 200523 | rs180177248 |
| c.614C > A | | | hyperoxaluria, | reviewed: | criteria | | | | | | | | |
| (p.Ser205Ter) | | | type I | Nov. 27, 2014) | provided | | | | | | | | |
| NM_000030.3(AGXT): | AGXT | S205L | Primary | Pathogenic(Last | no assertion | VCV000204118 | 2 | 241813413 | 2 | 240873996 | 204118 | 200524 | rs180177248 |
| c.614C > T | | | hyperoxaluria, | reviewed: | criteria | | | | | | | | |
| (p.Ser205Leu) | | | type I | Nov. 27, 2014) | provided | | | | | | | | |
| NM_000030.3(AGXT): | AGXT | A210P | Primary | Pathogenic(Last | no assertion | VCV000204120 | 2 | 241813427 | 2 | 240874010 | 204120 | 200525 | rs180177250 |
| c.628G > C | | | hyperoxaluria, | reviewed: | criteria | | | | | | | | |
| (p.Ala210Pro) | | | type I | Nov. 27, 2014) | provided | | | | | | | | |
| NM_000030.3(AGXT): | AGXT | P215fs | Primary | Pathogenic(Last | no assertion | VCV000204193 | 2 | 241813441- | 2 | 240874024- | 204193 | 200526 | rs180177251 |
| c.642_645del | | | hyperoxaluria, | reviewed: | criteria | | | 241813444 | | 240874027 | | | |
| (p.Pro215fs) | | | type I | Nov. 27, 2014) | provided | | | | | | | | |
| NM_000030.3(AGXT): | AGXT | G216R | Primary | Pathogenic(Last | no assertion | VCV000204121 | 2 | 241813445 | 2 | 240874028 | 204121 | 200527 | rs180177252 |
| c.646G > A | | | hyperoxaluria, | reviewed: | criteria | | | | | | | | |
| (p.Gly216Arg) | | | type I | Nov. 27, 2014) | provided | | | | | | | | |
| NM_000030.3(AGXT): | AGXT | S221del | Primary | Pathogenic(Last | no assertion | VCV000204194 | 2 | 241813459- | 2 | 240874042- | 204194 | 200529 | rs796052071 |
| c.662_664del | | | hyperoxaluria, | reviewed: | criteria | | | 241813461 | | 240874044 | | | |
| (p.Ser221del) | | | type I | Nov. 27, 2014) | provided | | | | | | | | |
| NM_000030.3(AGXT): | AGXT | S221P | Primary | Pathogenic(Last | no assertion | VCV000204122 | 2 | 241813460 | 2 | 240874043 | 204122 | 200528 | rs180177254 |
| c.661T > C | | | hyperoxaluria, | reviewed: | criteria | | | | | | | | |
| (p.Ser221Pro) | | | type I | Nov. 27, 2014) | provided | | | | | | | | |
| NM_000030.3(AGXT): | AGXT | | Primary | Pathogenic(Last | no assertion | VCV000204195 | 2 | 241813478- | 2 | 240874061- | 204195 | 200613 | rs180177255 |
| c.679_680 + 2del | | | hyperoxaluria, | reviewed: | criteria | | | 241813481 | | 240874064 | | | |
| | | | type I | Nov. 27, 2014) | provided | | | | | | | | |
| NM_000030.3(AGXT): | AGXT | | Primary | Pathogenic(Last | no assertion | VCV000204154 | 2 | 241813480 | 2 | 240874063 | 204154 | 200530 | rs111996685 |
| c.680 + 1G > A | | | hyperoxaluria, | reviewed: | criteria | | | | | | | | |
| | | | type I | Nov. 27, 2014) | provided | | | | | | | | |
| NM_000030.3(AGXT): | AGXT | | Primary | Pathogenic(Last | no assertion | VCV000204153 | 2 | 241813480 | 2 | 240874063 | 204153 | 200531 | rs111996685 |
| c.680 + 1G > C | | | hyperoxaluria, | reviewed: | criteria | | | | | | | | |
| | | | type I | Nov. 27, 2014) | provided | | | | | | | | |
| NM_000030.3(AGXT): | AGXT | | Primary | Pathogenic(Last | no assertion | VCV000204155 | 2 | 241813481 | 2 | 240874064 | 204155 | 200532 | rs111742810 |
| c.680 + 2T > A | | | hyperoxaluria, | reviewed: | criteria | | | | | | | | |
| | | | type I | Nov. 27, 2014) | provided | | | | | | | | |
| NM_000030.3(AGXT): | AGXT | | Primary | Pathogenic(Last | no assertion | VCV000204156 | 2 | 241813484 | 2 | 240874067 | 204156 | 200533 | rs180177256 |
| c.680 + 5G > C | | | hyperoxaluria, | reviewed: | criteria | | | | | | | | |
| | | | type I | Nov. 27, 2014) | provided | | | | | | | | |
| NM_000030.3(AGXT): | AGXT | | Primary | Pathogenic(Last | no assertion | VCV000204196 | 2 | 241813959- | 2 | 240874542- | 204196 | 200537 | rs1553648931 |
| c.680 + 480_776 + | | | hyperoxaluria, | reviewed: | criteria | | | 241814690 | | 240875273 | | | |
| 69delinsTGAGA | | | type I | Nov. 27, 2014) | provided | | | | | | | | |
| NM_000030.3(AGXT): | AGXT | R233C | Primary | Pathogenic/Likely | criteria | VCV000005647 | 2 | 241814542 | 2 | 240875125 | 5647 | 20686 | rs121908526 |
| c.697C > T | | | hyperoxaluria, | pathogenic(Last | provided, | | | | | | | | |
| (p.Arg233Cys) | | | type I | reviewed: | multiple | | | | | | | | |
| | | | | Mar. 7, 2017) | submitters, | | | | | | | | |
| | | | | | no conflicts | | | | | | | | |
| NM_000030.3(AGXT): | AGXT | R233L | Primary | Pathogenic(Last | no assertion | VCV000204123 | 2 | 241814543 | 2 | 240875126 | 204123 | 200539 | rs121908527 |
| c.698G > T | | | hyperoxaluria, | reviewed: | criteria | | | | | | | | |
| (p.Arg233Leu) | | | type I | Nov. 27, 2014) | provided | | | | | | | | |
| NM_000030.3(AGXT): | AGXT | | Primary | Pathogenic(Last | no assertion | VCV000204197 | 2 | 241814569- | 2 | 240875152- | 204197 | 200541 | rs180177257 |
| c.725dup | | | hyperoxaluria, | reviewed: | criteria | | | 241814570 | | 240875153 | | | |
| (p.Asp243fs) | | | type I | Nov. 27, 2014) | provided | | | | | | | | |
| NM_000030.3(AGXT): | AGXT | D243H | Primary | Pathogenic(Last | no assertion | VCV000204124 | 2 | 241814572 | 2 | 240875155 | 204124 | 200542 | rs180177258 |
| c.727G > C | | | hyperoxaluria, | reviewed: | criteria | | | | | | | | |
| (p.Asp243His) | | | type I | Nov. 27, 2014) | provided | | | | | | | | |
| NM_000030.3(AGXT): | AGXT | I244T | Primary | Pathogenic(Last | criteria | VCV000005646 | 2 | 241814576 | 2 | 240875159 | 5646 | 20685 | rs121908525 |
| c.731T > C | | | hyperoxaluria\| | reviewed: | provided, | | | | | | | | |
| (p.Ile244Thr) | | | Nephrolithiasis\| | May 7, 2017) | single | | | | | | | | |
| | | | Nephrocalcinosis\| | | submitter | | | | | | | | |
| | | | Primary | | | | | | | | | | |
| | | | hyperoxaluria, | | | | | | | | | | |
| | | | type I | | | | | | | | | | |
| NM_000030.3(AGXT): | AGXT | W246* | Primary | Pathogenic(Last | no assertion | VCV000005649 | 2 | 241814583 | 2 | 240875166 | 5649 | 20688 | rs121908528 |
| c.738G > A | | | hyperoxaluria, | reviewed: | criteria | | | | | | | | |
| (p.Trp246Ter) | | | type I | Nov. 27, 2014) | provided | | | | | | | | |
| NM_000030.3(AGXT): | AGXT | N249fs | Primary | Pathogenic(Last | no assertion | VCV000204198 | 2 | 241814588 | 2 | 240875171 | 204198 | 200544 | rs180177261 |
| c.744del | | | hyperoxaluria, | reviewed: | criteria | | | | | | | | |
| (p.Asn249fs) | | | type I | Nov. 27, 2014) | provided | | | | | | | | |
| NM_000030.3(AGXT): | AGXT | | Primary | Pathogenic(Last | no assertion | VCV000204199 | 2 | 241814596- | 2 | 240875179- | 204199 | 200545 | rs796052072 |
| c.751_752delinsAA | | | hyperoxaluria, | reviewed: | criteria | | | 241814597 | | 240875180 | | | |
| (p.Trp251Lys) | | | type I | Nov. 27, 2014) | provided | | | | | | | | |
| NM_000030.3(AGXT): | AGXT | W251* | Primary | Pathogenic(Last | no assertion | VCV000204125 | 2 | 241814598 | 2 | 240875181 | 204125 | 200546 | rs180177263 |
| c.753G > A | | | hyperoxaluria, | reviewed: | criteria | | | | | | | | |
| (p.Trp251Ter) | | | type I | Nov. 27, 2014) | provided | | | | | | | | |
| NM_000030.3(AGXT): | AGXT | C253R | Primary | Pathogenic(Last | no assertion | VCV000204126 | 2 | 241814602 | 2 | 240875185 | 204126 | 200547 | rs180177264 |
| c.757T > C | | | hyperoxaluria, | reviewed: | criteria | | | | | | | | |
| (p.Cys253Arg) | | | type I | Nov. 27, 2014) | provided | | | | | | | | |
| NM_000030.3(AGXT): | AGXT | | Primary | Pathogenic(Last | no assertion | VCV000204158 | 2 | 241814622 | 2 | 240875205 | 204158 | 200549 | rs180177265 |
| c.776 + 1G > C | | | hyperoxaluria, | reviewed: | criteria | | | | | | | | |
| | | | type I | Nov. 27, 2014) | provided | | | | | | | | |
| NM_000030.3(AGXT): | AGXT | | Primary | Pathogenic(Last | no assertion | VCV000204157 | 2 | 241814622 | 2 | 240875205 | 204157 | 200548 | rs180177265 |
| c.776 + 1G > A | | | hyperoxaluria, | reviewed: | criteria | | | | | | | | |
| | | | type I | Nov. 27, 2014) | provided | | | | | | | | |
| NM_000030.3(AGXT): | AGXT | | Primary | Pathogenic(Last | no assertion | VCV000204167 | 2 | 241815350 | 2 | 240875933 | 204167 | 200552 | rs796052068 |
| c.777 − 2A > G | | | hyperoxaluria, | reviewed: | criteria | | | | | | | | |
| | | | type I | Nov. 27, 2014) | provided | | | | | | | | |
| NM_000030.3(AGXT): | AGXT | | Primary | Pathogenic/Likely | criteria | VCV000188774 | 2 | 241815351 | 2 | 240875934 | 188774 | 186661 | rs180177267 |
| c.777 − 1G > C | | | hyperoxaluria, | pathogenic(Last | provided, | | | | | | | | |
| | | | type I | reviewed: | multiple | | | | | | | | |
| | | | | Oct. 31, 2018) | submitters, | | | | | | | | |
| | | | | | no conflicts | | | | | | | | |
| NM_000030.3(AGXT): | AGXT | H261Q | Primary | Pathogenic(Last | no assertion | VCV000204127 | 2 | 241815358 | 2 | 240875941 | 204127 | 200553 | rs180177269 |
| c.783T > A | | | hyperoxaluria, | reviewed: | criteria | | | | | | | | |
| (p.His261Gln) | | | type I | Nov. 27, 2014) | provided | | | | | | | | |
| NM_000030.3(AGXT): | AGXT | | Primary | Pathogenic(Last | no assertion | VCV000204200 | 2 | 241815373- | 2 | 240875956- | 204200 | 200554 | rs180177270 |
| c.798_802delinsACAATCTCAG | | | hyperoxaluria, | reviewed: | criteria | | | 241815377 | | 240875960 | | | |
| (p.Ile267fs) | | | type I | Nov. 27, 2014) | provided | | | | | | | | |
| (“ACAATCTCAG” disclosed | | | | | | | | | | | | | |
| as SEQ ID NO: 4631) | | | | | | | | | | | | | |
| NM_000030.3(AGXT): | AGXT | L269P | Primary | Pathogenic(Last | no assertion | VCV000204128 | 2 | 241815381 | 2 | 240875964 | 204128 | 200555 | rs180177271 |
| c.806T > C | | | hyperoxaluria, | reviewed: | criteria | | | | | | | | |
| (p.Leu269Pro) | | | type I | Nov. 27, 2014) | provided | | | | | | | | |
| NM_000030.3(AGXT): | AGXT | | Primary | Pathogenic(Last | criteria | VCV000204201 | 2 | 241815390- | 2 | 240875973- | 204201 | 200558 | rs180177273 |
| c.817_818AG[5] | | | hyperoxaluria, | reviewed: | provided, | | | 241815391 | | 240875974 | | | |
| (p.Ser275fs) | | | type I\|Primary | Nov. 30, 2018) | single | | | | | | | | |
| | | | hyperoxaluria | | submitter | | | | | | | | |
| NM_000030.3(AGXT): | AGXT | S275R | Primary | Pathogenic(Last | no assertion | VCV000204130 | 2 | 241815398 | 2 | 240875981 | 204130 | 200557 | rs180177272 |
| c.823A > C | | | hyperoxaluria, | reviewed: | criteria | | | | | | | | |
| (p.Ser275Arg) | | | type I | Nov. 27, 2014) | provided | | | | | | | | |
| NM_000030.2(AGXT): | AGXT | A277D | | Pathogenic(Last | no assertion | VCV000204202 | 2\|2 | 241815405 | 2\|2 | 240875988 | 204202 | 200560\| | rs796052073\| |
| c.[829_830insA; | | | | reviewed: | criteria | | | | | | | 200559 | rs180177275 |
| 8300A] | | | | Nov. 27, 2014) | provided | | | | | | | | |
| NM_000030.3(AGXT): | AGXT | I279fs | Primary | Pathogenic(Last | no assertion | VCV000204203 | 2 | 241815409 | 2 | 240875992 | 204203 | 200561 | rs180177276 |
| c.834del | | | hyperoxaluria, | reviewed: | criteria | | | | | | | | |
| (p.Ile279fs) | | | type I | Nov. 27, 2014) | provided | | | | | | | | |
| NM_000030.3(AGXT): | AGXT | E281* | not provided | Pathogenic(Last | criteria | VCV000641162 | 2 | 241815416 | 2 | 240875999 | 641162 | 629746 | |
| c.841G > T | | | | reviewed: | provided, | | | | | | | | |
| (p.Glu281Ter) | | | | Aug. 28, 2018) | single | | | | | | | | |
| | | | | | submitter | | | | | | | | |
| NM_000030.3(AGXT): | AGXT | Q282* | Primary | Pathogenic(Last | no assertion | VCV000204131 | 2 | 241815419 | 2 | 240876002 | 204131 | 200564 | rs180177279 |
| c.844C > T | | | hyperoxaluria, | reviewed: | criteria | | | | | | | | |
| (p.Gln282Ter) | | | type I | Nov. 27, 2014) | provided | | | | | | | | |
| NM_000030.3(AGXT): | AGXT | Q282H | Primary | Pathogenic(Last | no assertion | VCV000204132 | 2 | 241815421 | 2 | 240876004 | 204132 | 200566 | rs180177284 |
| c.846G > C | | | hyperoxaluria, | reviewed: | criteria | | | | | | | | |
| (p.Gln282His) | | | type I | Nov. 27, 2014) | provided | | | | | | | | |
| NM_000030.3(AGXT): | AGXT | | Primary | Pathogenic(Last | no assertion | VCV000204160 | 2 | 241815422 | 2 | 240876005 | 204160 | 200567 | rs180177281 |
| c.846 + 1G > A | | | hyperoxaluria, | reviewed: | criteria | | | | | | | | |
| | | | type I | Nov. 27, 2014) | provided | | | | | | | | |
| NM_000030.3(AGXT): | AGXT | | not provided\| | Pathogenic(Last | criteria | VCV000204159 | 2 | 241815422 | 2 | 240876005 | 204159 | 200568 | rs180177281 |
| c.846 + 1G > T | | | Primary | reviewed: | provided, | | | | | | | | |
| | | | hyperoxaluria, | Sep. 24, 2018) | single | | | | | | | | |
| | | | type I | | submitter | | | | | | | | |
| NM_000030.3(AGXT): | AGXT | | Primary | Pathogenic(Last | no assertion | VCV000204204 | 2 | 241816067- | 2 | 240876650- | 204204 | 200570 | |
| c.846 + 646_942 + 139del | | | hyperoxaluria, | reviewed: | criteria | | | 241817188 | | 240877771 | | | |
| | | | type I | Nov. 27, 2014) | provided | | | | | | | | |
| NM_000030.3(AGXT): | AGXT | | not provided\| | Pathogenic(Last | criteria | VCV000204169 | 2 | 241816951 | 2 | 240877534 | 204169 | 200571 | rs180177286 |
| c.847 − 3C > G | | | Primary | reviewed: | provided, | | | | | | | | |
| | | | hyperoxaluria, | Jan. 8, 2019) | multiple | | | | | | | | |
| | | | type I | | submitters, | | | | | | | | |
| | | | | | no conflicts | | | | | | | | |
| NM_000030.3(AGXT): | AGXT | L284P | Primary | Pathogenic (Last | no assertion | VCV000204133 | 2 | 241816958 | 2 | 240877541 | 204133 | 200573 | rs180177287 |
| c.851T > C | | | hyperoxaluria, | reviewed: | criteria | | | | | | | | |
| (p.Leu284Pro) | | | type I | Nov. 27, 2014) | provided | | | | | | | | |
| NM_000030.3(AGXT): | AGXT | E285* | Primary | Pathogenic(Last | no assertion | VCV000204134 | 2 | 241816960 | 2 | 240877543 | 204134 | 200574 | rs180177288 |
| c.853G > T | | | hyperoxaluria, | reviewed: | criteria | | | | | | | | |
| (p.Glu285Ter) | | | type I | Nov. 27, 2014) | provided | | | | | | | | |
| NM_000030.3(AGXT): | AGXT | | Primary | Pathogenic(Last | no assertion | VCV000204205 | 2 | 241816967- | 2 | 240877550- | 204205 | 200614 | rs180177289 |
| c.860_861delinsCG | | | hyperoxaluria, | reviewed: | criteria | | | 241816968 | | 240877551 | | | |
| (p.Ser287Thr) | | | type I | Nov. 27, 2014) | provided | | | | | | | | |
| NM_000030.3(AGXT): | AGXT | A296del | Primary | Pathogenic(Last | no assertion | VCV000204206 | 2 | 241816990- | 2 | 240877573 - | 204206 | 200577 | rs180177291 |
| c.883_885GCG[1] | | | hyperoxaluria, | reviewed: | criteria | | | 241816992 | | 240877575 | | | |
| (p.Ala296del) | | | type I | Nov. 27, 2014) | provided | | | | | | | | |
| NM_000030.3(AGXT): | AGXT | L298P | Primary | Pathogenic(Last | no assertion | VCV000204136 | 2 | 241817000 | 2 | 240877583 | 204136 | 200579 | rs180177293 |
| c.893T > C | | | hyperoxaluria, | reviewed: | criteria | | | | | | | | |
| (p.Leu298Pro) | | | type I | Nov. 27, 2014) | provided | | | | | | | | |
| NM_000030.3(AGXT): | AGXT | L307fs | Primary | Pathogenic(Last | no assertion | VCV000204207 | 2 | 241817026 | 2 | 240877609 | 204207 | 200581 | rs180177295 |
| c.919del | | | hyperoxaluria, | reviewed: | criteria | | | | | | | | |
| (p.Leu307fs) | | | type I | Nov. 27, 2014) | provided | | | | | | | | |
| NM_000030.3(AGXT): | AGXT | Q308* | Primary | Pathogenic(Last | no assertion | VCV000204138 | 2 | 241817029 | 2 | 240877612 | 204138 | 200582 | rs180177296 |
| c.922C > T | | | hyperoxaluria, | reviewed: | criteria | | | | | | | | |
| (p.Gln308Ter) | | | type I | Nov. 27, 2014) | provided | | | | | | | | |
| NM_000030.3(AGXT): | AGXT | | Primary | Pathogenic(Last | no assertion | VCV000204161 | 2 | 241817050 | 2 | 240877633 | 204161 | 200583 | rs180177297 |
| c.942 + 1G > T | | | hyperoxaluria, | reviewed: | criteria | | | | | | | | |
| | | | type I | Nov. 27, 2014) | provided | | | | | | | | |
| NM_000030.3(AGXT): | AGXT | | Primary | Pathogenic(Last | no assertion | VCV000204171 | 2 | 241817438 | 2 | 240878021 | 204171 | 200585 | rs180177298 |
| c.943 − 1G > A | | | hyperoxaluria, | reviewed: | criteria | | | | | | | | |
| | | | type I | Nov. 27, 2014) | provided | | | | | | | | |
| NM_000030.3(AGXT): | AGXT | L316P | Primary | Pathogenic(Last | no assertion | VCV000204139 | 2 | 241817443 | 2 | 240878026 | 204139 | 200587 | rs796052063 |
| c.947T > C | | | hyperoxaluria, | reviewed: | criteria | | | | | | | | |
| (p.Leu316Pro) | | | type I | Nov. 27, 2014) | provided | | | | | | | | |
| NM_000030.3(AGXT): | AGXT | P319L | Primary | Pathogenic(Last | no assertion | VCV000204140 | 2 | 241817452 | 2 | 240878035 | 204140 | 200588 | rs180177299 |
| c.956C > T | | | hyperoxaluria, | reviewed: | criteria | | | | | | | | |
| (p.Pro319Leu) | | | type I | Nov. 27, 2014) | provided | | | | | | | | |
| NM_000030.3(AGXT): | AGXT | | Primary | Pathogenic(Last | no assertion | VCV000204208 | 2 | 241817453 - | 2 | 240878036- | 204208 | 200589 | rs796052074 |
| c.957_958CA[1] | | | hyperoxaluria, | reviewed: | criteria | | | 241817454 | | 240878037 | | | |
| (p.Thr320fs) | | | type I | Nov. 27, 2014) | provided | | | | | | | | |
| NM_000030.3(AGXT): | AGXT | | Primary | Pathogenic(Last | no assertion | VCV000204209 | 2 | 241817465 - | 2 | 240878048- | 204209 | 200590 | rs180177300 |
| c.969_970TG[1] | | | hyperoxaluria, | reviewed: | criteria | | | 241817466 | | 240878049 | | | |
| (p.Val324fs) | | | type I | Nov. 27, 2014) | provided | | | | | | | | |
| NM_000030.3(AGXT): | AGXT | | Primary | Pathogenic(Last | no assertion | VCV000204210 | 2 | 241817479- | 2 | 240878062- | 204210 | 200592 | rs180177302 |
| c.983_988del | | | hyperoxaluria, | reviewed: | criteria | | | 241817484 | | 240878067 | | | |
| (p.Ala328_Tyr330delinsAsp) | | | type I | Nov. 27, 2014) | provided | | | | | | | | |
| NM_000030.3(AGXT): | AGXT | R333* | Primary | Pathogenic(Last | no assertion | VCV000204142 | 2 | 241817493 | 2 | 240878076 | 204142 | 200594 | rs180177303 |
| c.997A > T | | | hyperoxaluria, | reviewed: | criteria | | | | | | | | |
| (p.Arg333Ter) | | | type I | Nov. 27, 2014) | provided | | | | | | | | |
| NM_000030.3(AGXT): | AGXT | V336D | Primary | Pathogenic(Last | no assertion | VCV000204143 | 2 | 241817503 | 2 | 240878086 | 204143 | 200595 | rs180177155 |
| c.1007T > A | | | hyperoxaluria, | reviewed: | criteria | | | | | | | | |
| (p.Val336Asp) | | | type I | Nov. 27, 2014) | provided | | | | | | | | |
| NM_000030.3(AGXT): | AGXT | Y338* | Primary | Pathogenic(Last | no assertion | VCV000204144 | 2 | 241817510 | 2 | 240878093 | 204144 | 200596 | rs756437332 |
| c.1014C > G | | | hyperoxaluria, | reviewed: | criteria | | | | | | | | |
| (p.Tyr338Ter) | | | type I | Nov. 27, 2014) | provided | | | | | | | | |
| NM_000030.3(AGXT): | AGXT | G349S | Primary | Pathogenic(Last | no assertion | VCV000204145 | 2 | 241817541 | 2 | 240878124 | 204145 | 200597 | rs796052065 |
| c.1045G > A | | | hyperoxaluria, | reviewed: | criteria | | | | | | | | |
| (p.Gly349Ser) | | | type I | Nov. 27, 2014) | provided | | | | | | | | |
| NG_008005.1: | AGXT | | Primary | Pathogenic(Last | no assertion | VCV000204213 | 2 | 241817568- | 2 | 240878151- | 204213 | 200412 | |
| g.(14407_14970)_(15375_?)del | | | hyperoxaluria, | reviewed: | criteria | | | 241818536 | | 240879119 | | | |
| | | | type I | Nov. 27, 2014) | provided | | | | | | | | |
| NM_000030.3(AGXT): | AGXT | | Primary | Pathogenic(Last | no assertion | VCV000204162 | 2 | 241817568 | 2 | 240878151 | 204162 | 200598 | rs180177158 |
| c.1071 + 1G > A | | | hyperoxaluria, | reviewed: | criteria | | | | | | | | |
| | | | type I | Nov. 27, 2014) | provided | | | | | | | | |
| NM_000030.3(AGXT): | AGXT | L359P | Primary | Pathogenic(Last | no assertion | VCV000204146 | 2 | 241818135 | 2 | 240878718 | 204146 | 200600 | rs180177160 |
| c.1076T > C | | | hyperoxaluria, | reviewed: | criteria | | | | | | | | |
| (p.Leu359Pro) | | | type I | Nov. 27, 2014) | provided | | | | | | | | |
| NM_000030.3(AGXT): | AGXT | A368T | Primary | Pathogenic(Last | no assertion | VCV000204148 | 2 | 241818161 | 2 | 240878744 | 204148 | 200602 | rs180177163 |
| c.1102G > A | | | hyperoxaluria, | reviewed: | criteria | | | | | | | | |
| (p.Ala368Thr) | | | type I | Nov. 27, 2014) | provided | | | | | | | | |
| NM_000030.3(AGXT): | AGXT | | Primary | Pathogenic(Last | no assertion | VCV000204211 | 2 | 241818167- | 2 | 240878750- | 204211 | 200603 | rs796052075 |
| c.1108_1109CG[1] | | | hyperoxaluria, | reviewed: | criteria | | | 241818168 | | 240878751 | | | |
| (p.Asn372fs) | | | type I | Nov. 27, 2014) | provided | | | | | | | | |
| NM_000030.3(AGXT): | AGXT | | Primary | Pathogenic(Last | no assertion | VCV000204212 | 2 | 241818182- | 2 | 240878765- | 204212 | 200604 | rs180177164 |
| c.1123_1124CG[1] | | | hyperoxaluria, | reviewed: | criteria | | | 241818183 | | 240878766 | | | |
| (p.Val376fs) | | | type I | Nov. 27, 2014) | provided | | | | | | | | |
| NM_000030.3(AGXT): | AGXT | A383D | Primary | Pathogenic(Last | no assertion | VCV000204149 | 2 | 241818207 | 2 | 240878790 | 204149 | 200606 | rs796052066 |
| c.1148C > A | | | hyperoxaluria, | reviewed: | criteria | | | | | | | | |
| (p.Ala383Asp) | | | type I | Nov. 27, 2014) | provided | | | | | | | | |
| NM_000030.3(AGXT): | AGXT | L384P | Primary | Pathogenic(Last | no assertion | VCV000204150 | 2 | 241818210 | 2 | 240878793 | 204150 | 200607 | rs180177165 |
| c.1151T > C | | | hyperoxaluria, | reviewed: | criteria | | | | | | | | |
| (p.Leu384Pro) | | | type I | Nov. 27, 2014) | provided | | | | | | | | |
| AGXT, | AGXT | | Primary | Pathogenic(Last | no assertion | VCV000039487 | | | | | 39487 | 48086 | |
| 1-BP INS, | | | hyperoxaluria, | reviewed: | criteria | | | | | | | | |
| 33C | | | type I | Sep. 1, 2004) | provided | | | | | | | | |

INFORMAL SEQUENCE LISTING

| | |
|---|---|
| <210> 1 | |
| <211> 2052 | |
| <212> DNA | |
| <213> Homo sapiens | |
| <400> 1 | |
| gtctgccggt cggttgtctg gctgcgcgcg ccacccgggc ctctccagtg ccccgcctgg | 60 |
| ctcggcatcc acccccagcc cgactcacac gtgggttccc gcacgtccgc cggccccccc | 120 |
| cgctgacgtc agcatagctg ttccacttaa ggcccctccc gcgcccagct cagagtgctg | 180 |
| cagccgctgc cgccgattcc ggatctcatt gccacgcgcc cccgacgacc gcccgacgtg | 240 |
| cattcccgat tccttttggt tccaagtcca atatggcaac tctaaaggat cagctgattt | 300 |
| ataatcttct aaaggaagaa cagacccccc agaataagat tacagttgtt ggggttggtg | 360 |
| ctgttggcat ggcctgtgcc atcagtatct taatgaagga cttggcagat gaacttgctc | 420 |
| ttgttgatgt catcgaagac aaattgaagg gagagatgat ggatctccaa catggcagcc | 480 |
| ttttccttag aacaccaaag attgtctctg gcaaagtgga tatcttgacc tacgtggctt | 540 |
| ggaagataag tggttttccc aaaaaccgtg ttattggaag cggttgcaat ctggattcag | 600 |
| cccgattccg ttacctaatg ggggaaaggc tgggagttca cccattaagc tgtcatgggt | 660 |
| gggtccttgg ggaacatgga gattccagtg tgcctgtatg gagtggaatg aatgttgctg | 720 |
| gtgtctctct gaagactctg cacccagatt tagggactga taaagataag gaacagtgga | 780 |
| aagaggttca caagcaggtg gttgagagtg cttatgaggt gatcaaactc aaaggctaca | 840 |
| catcctgggc tattggactc tctgtagcag atttggcaga gagtataatg aagaatctta | 900 |
| ggcgggtgca cccagtttcc accatgatta agggtcttta cggaataaag gatgatgtct | 960 |
| tccttagtgt tccttgcatt ttgggacaga atggaatctc agaccttgtg aaggtgactc | 1020 |
| tgacttctga ggaagaggcc cgtttgaaga agagtgcaga tacactttgg gggatccaaa | 1080 |
| aggagctgca attttaaagt cttctgatgt catatcattt cactgtctag gctacaacag | 1140 |
| gattctaggt ggaggttgtg catgttgtcc tttttatctg atctgtgatt aaagcagtaa | 1200 |
| tattttaaga tggactggga aaaacatcaa ctcctgaagt tagaaataag aatggtttgt | 1260 |
| aaaatccaca gctatatcct gatgctggat ggtattaatc ttgtgtagtc ttcaactggt | 1320 |
| tagtgtgaaa tagttctgcc acctctgacg caccactgcc aatgctgtac gtactgcatt | 1380 |
| tgccccttga gccaggtgga tgtttaccgt gtgttatata acttcctggc tccttcactg | 1440 |
| aacatgccta gtccaacatt ttttcccagt gagtcacatc ctgggatcca gtgtataaat | 1500 |
| ccaatatcat gtcttgtgca taattcttcc aaaggatctt attttgtgaa ctatatcagt | 1560 |
| agtgtacatt accatataat gtaaaaagat ctacatacaa acaatgcaac caactatcca | 1620 |
| agtgttatac caactaaaac ccccaataaa ccttgaacag tgactacttt ggttaattca | 1680 |
| ttatattaag atataaagtc ataaagctgc tagttattat attaatttgg aaatattagg | 1740 |
| ctattcttgg gcaaccctgc aacgattttt tctaacaggg atattattga ctaatagcag | 1800 |
| aggatgtaat agtcaactga gttgtattgg taccacttcc attgtaagtc ccaaagtatt | 1860 |
| atatatttga taataatgct aatcataatt ggaaagtaac attctatatg taaatgtaaa | 1920 |
| atttatttgc caactgaata taggcaatga tagtgtgtca ctatagggaa cacagatttt | 1980 |
| tgagatcttg tcctctggaa gctggtaaca attaaaaaca atcttaaggc agggaaaaaa | 2040 |
| aaaaaaaaaa aa | 2052 |
| <210> 2 | |
| <211> 2052 | |
| <212> DNA | |
| <213> Homo sapiens | |
| <400> 2 | |
| tttttttttt ttttttttcc ctgccttaag attgttttta attgttacca gcttccagag | 60 |
| gacaagatct caaaaatctg tgttccctat agtgacacac tatcattgcc tatattcagt | 120 |
| tggcaaataa attttacatt tacatataga atgttacttt ccaattatga ttagcattat | 180 |
| tatcaaatat ataatacttt gggacttaca atggaagtgg taccaataca actcagttga | 240 |
| ctattacatc ctctgctatt agtcaataat atccctgtta gaaaaaatcg ttgcagggtt | 300 |
| gcccaagaat agcctaatat ttccaaatta atataataac tagcagcttt atgactttat | 360 |
| atcttaatat aatgaattaa ccaaagtagt cactgttcaa ggtttattgg gggttttagt | 420 |
| tggtataaca cttggatagt tggttgcatt gtttgtatgt agatcttttt acattatatg | 480 |
| gtaatgtaca ctactgatat agttcacaaa ataagatcct ttggaagaat tatgcacaag | 540 |
| acatgatatt ggatttatac actggatccc aggatgtgac tcactgggaa aaaatgttgg | 600 |
| actaggcatg ttcagtgaag gagccaggaa gttatataac acacggtaaa catccacctg | 660 |
| gctcaagggg caaatgcagt acgtacagca ttggcagtgg tgcgtcagag gtggcagaac | 720 |
| tatttcacac taaccagttg aagactacac aagattaata ccatccagca tcaggatata | 780 |
| gctgtggatt ttacaaacca ttcttatttc taacttcagg agttgatgtt tttcccagtc | 840 |
| catcttaaaa tattactgct ttaatcacag atcagataaa aaggacaaca tgcacaacct | 900 |
| ccacctagaa tcctgttgta gcctagacag tgaaatgata tgacatcaga agactttaaa | 960 |
| attgcagctc cttttggatc ccccaaagtg tatctgcact cttcttcaaa cgggcctctt | 1020 |
| cctcagaagt cagagtcacc ttcacaaggt ctgagattcc attctgtccc aaaatgcaag | 1080 |
| gaacactaag gaagacatca tcctttattc cgtaaagacc cttaatcatg gtggaaactg | 1140 |
| ggtgcacccg cctaagattc ttcattatac tctctgccaa atctgctaca gagagtccaa | 1200 |
| tagcccagga tgtgtagcct ttgagtttga tcacctcata agcactctca accacctgct | 1260 |
| tgtgaacctc tttccactgt tccttatctt tatcagtccc taaatctggg tgcagagtct | 1320 |
| tcagagagac accagcaaca ttcattccac tccatacagg cacactggaa tctccatgtt | 1380 |
| ccccaaggac ccacccatga cagcttaatg ggtgaactcc cagcctttcc cccattaggt | 1440 |
| aacggaatcg ggctgaatcc agattgcaac cgcttccaat aacacggttt ttgggaaaac | 1500 |
| cacttatctt ccaagccacg taggtcaaga tatccacttt gccagagaca atctttggtg | 1560 |
| ttctaaggaa aaggctgcca tgttggagat ccatcatctc tcccttcaat ttgtcttcga | 1620 |
| tgacatcaac aagagcaagt tcatctgcca agtccttcat taagatactg atggcacagg | 1680 |
| ccatgccaac agcaccaacc ccaacaactg taatcttatt ctggggggtc tgttcttcct | 1740 |
| ttagaagatt ataaatcagc tgatccttta gagttgccat attggacttg gaaccaaaag | 1800 |
| gaatcgggaa tgcacgtcgg gcggtcgtcg ggggcgcgtg gcaatgagat ccggaatcgg | 1860 |
| cggcagcggc tgcagcactc tgagctgggc gcgggagggg ccttaagtgg aacagctatg | 1920 |
| ctgacgtcag cggggggggc cggcggacgt gcgggaaccc acgtgtgagt cgggctgggg | 1980 |
| gtggatgccg agccaggcgg ggcactggag aggcccgggt ggcgcgcgca gccagacaac | 2040 |
| cgaccggcag ac | 2052 |
| <210> 3 | |
| <211> 2323 | |
| <212> DNA | |
| <213> Homo sapiens | |
| <400> 3 | |
| ttgggcgggg cgtaaaagcc gggcgttcgg aggacccagc aattagtctg atttccgccc | 60 |
| acctttccga gcgggaagga gagccacaaa gcgcgcatgc gcgcggatca ccgcaggctc | 120 |
| ctgtgccttg ggcttgagct ttgtggcagt taatggcttt tctgcacgta tctctggtgt | 180 |
| ttacttgaga agcctggctg tgtccttgct gtaggagccg gagtagctca gagtgatctt | 240 |
| gtctgaggaa aggccagccc cacttggggt taataaaccg cgatgggtga accctcagga | 300 |
| ggctatactt acacccaaac gtcgatattc cttttccacg ctaagattcc ttttggttcc | 360 |
| aagtccaata tggcaactct aaaggatcag ctgatttata atcttctaaa ggaagaacag | 420 |
| accccccaga ataagattac agttgttggg gttggtgctg ttggcatggc ctgtgccatc | 480 |
| agtatcttaa tgaaggactt ggcagatgaa cttgctcttg ttgatgtcat cgaagacaaa | 540 |
| ttgaagggag agatgatgga tctccaacat ggcagccttt tccttagaac accaaagatt | 600 |
| gtctctggca aagactataa tgtaactgca aactccaagc tggtcattat cacggctggg | 660 |
| gcacgtcagc aagagggaga aagccgtctt aatttggtcc agcgtaacgt gaacatcttt | 720 |
| aaattcatca ttcctaatgt tgtaaaatac agcccgaact gcaagttgct tattgtttca | 780 |
| aatccagtgg atatcttgac ctacgtggct tggaagataa gtggttttcc caaaaaccgt | 840 |
| gttattggaa gcggttgcaa tctggattca gcccgattcc gttacctaat gggggaaagg | 900 |
| ctgggagttc acccattaag ctgtcatggg tgggtccttg gggaacatgg agattccagt | 960 |
| gtgcctgtat ggagtggaat gaatgttgct ggtgtctctc tgaagactct gcacccagat | 1020 |
| ttagggactg ataaagataa ggaacagtgg aaagaggttc acaagcaggt ggttgagagt | 1080 |
| gcttatgagg tgatcaaact caaaggctac acatcctggg ctattggact ctctgtagca | 1140 |
| gatttggcag agagtataat gaagaatctt aggcgggtgc acccagtttc caccatgatt | 1200 |
| aagggtcttt acggaataaa ggatgatgtc ttccttagtg ttccttgcat tttgggacag | 1260 |
| aatggaatct cagaccttgt gaaggtgact ctgacttctg aggaagaggc ccgtttgaag | 1320 |
| aagagtgcag atacactttg ggggatccaa aaggagctgc aattttaaag tcttctgatg | 1380 |
| tcatatcatt tcactgtcta ggctacaaca ggattctagg tggaggttgt gcatgttgtc | 1440 |
| ctttttatct gatctgtgat taaagcagta atattttaag atggactggg aaaaacatca | 1500 |
| actcctgaag ttagaaataa gaatggtttg taaaatccac agctatatcc tgatgctgga | 1560 |
| tggtattaat cttgtgtagt cttcaactgg ttagtgtgaa atagttctgc cacctctgac | 1620 |
| gcaccactgc caatgctgta cgtactgcat ttgccccttg agccaggtgg atgtttaccg | 1680 |
| tgtgttatat aacttcctgg ctccttcact gaacatgcct agtccaacat tttttcccag | 1740 |
| tgagtcacat cctgggatcc agtgtataaa tccaatatca tgtcttgtgc ataattcttc | 1800 |
| caaaggatct tattttgtga actatatcag tagtgtacat taccatataa tgtaaaaaga | 1860 |
| tctacataca aacaatgcaa ccaactatcc aagtgttata ccaactaaaa cccccaataa | 1920 |
| accttgaaca gtgactactt tggttaattc attatattaa gatataaagt cataaagctg | 1980 |
| ctagttatta tattaatttg gaaatattag gctattcttg ggcaaccctg caacgatttt | 2040 |
| ttctaacagg gatattattg actaatagca gaggatgtaa tagtcaactg agttgtattg | 2100 |
| gtaccacttc cattgtaagt cccaaagtat tatatatttg ataataatgc taatcataat | 2160 |
| tggaaagtaa cattctatat gtaaatgtaa aatttatttg ccaactgaat ataggcaatg | 2220 |
| atagtgtgtc actataggga acacagattt ttgagatctt gtcctctgga agctggtaac | 2280 |
| aattaaaaac aatcttaagg cagggaaaaa aaaaaaaaaa aaa | 2323 |
| <210> 4 | |
| <211> 2323 | |
| <212> DNA | |
| <213> Homo sapiens | |
| <400> 4 | |
| tttttttttt ttttttttcc ctgccttaag attgttttta attgttacca gcttccagag | 60 |
| gacaagatct caaaaatctg tgttccctat agtgacacac tatcattgcc tatattcagt | 120 |
| tggcaaataa attttacatt tacatataga atgttacttt ccaattatga ttagcattat | 180 |
| tatcaaatat ataatacttt gggacttaca atggaagtgg taccaataca actcagttga | 240 |
| ctattacatc ctctgctatt agtcaataat atccctgtta gaaaaaatcg ttgcagggtt | 300 |
| gcccaagaat agcctaatat ttccaaatta atataataac tagcagcttt atgactttat | 360 |
| atcttaatat aatgaattaa ccaaagtagt cactgttcaa ggtttattgg gggttttagt | 420 |
| tggtataaca cttggatagt tggttgcatt gtttgtatgt agatcttttt acattatatg | 480 |
| gtaatgtaca ctactgatat agttcacaaa ataagatcct ttggaagaat tatgcacaag | 540 |
| acatgatatt ggatttatac actggatccc aggatgtgac tcactgggaa aaaatgttgg | 600 |
| actaggcatg ttcagtgaag gagccaggaa gttatataac acacggtaaa catccacctg | 660 |
| gctcaagggg caaatgcagt acgtacagca ttggcagtgg tgcgtcagag gtggcagaac | 720 |
| tatttcacac taaccagttg aagactacac aagattaata ccatccagca tcaggatata | 780 |
| gctgtggatt ttacaaacca ttcttatttc taacttcagg agttgatgtt tttcccagtc | 840 |
| catcttaaaa tattactgct ttaatcacag atcagataaa aaggacaaca tgcacaacct | 900 |
| ccacctagaa tcctgttgta gcctagacag tgaaatgata tgacatcaga agactttaaa | 960 |
| attgcagctc cttttggatc ccccaaagtg tatctgcact cttcttcaaa cgggcctctt | 1020 |
| cctcagaagt cagagtcacc ttcacaaggt ctgagattcc attctgtccc aaaatgcaag | 1080 |
| gaacactaag gaagacatca tcctttattc cgtaaagacc cttaatcatg gtggaaactg | 1140 |
| ggtgcacccg cctaagattc ttcattatac tctctgccaa atctgctaca gagagtccaa | 1200 |
| tagcccagga tgtgtagcct ttgagtttga tcacctcata agcactctca accacctgct | 1260 |
| tgtgaacctc tttccactgt tccttatctt tatcagtccc taaatctggg tgcagagtct | 1320 |
| tcagagagac accagcaaca ttcattccac tccatacagg cacactggaa tctccatgtt | 1380 |
| ccccaaggac ccacccatga cagcttaatg ggtgaactcc cagcctttcc cccattaggt | 1440 |
| aacggaatcg ggctgaatcc agattgcaac cgcttccaat aacacggttt ttgggaaaac | 1500 |
| cacttatctt ccaagccacg taggtcaaga tatccactgg atttgaaaca ataagcaact | 1560 |
| tgcagttcgg gctgtatttt acaacattag gaatgatgaa tttaaagatg ttcacgttac | 1620 |
| gctggaccaa attaagacgg ctttctccct cttgctgacg tgccccagcc gtgataatga | 1680 |
| ccagcttgga gtttgcagtt acattatagt ctttgccaga gacaatcttt ggtgttctaa | 1740 |
| ggaaaaggct gccatgttgg agatccatca tctctccctt caatttgtct tcgatgacat | 1800 |
| caacaagagc aagttcatct gccaagtcct tcattaagat actgatggca caggccatgc | 1860 |
| caacagcacc aaccccaaca actgtaatct tattctgggg ggtctgttct tcctttagaa | 1920 |
| gattataaat cagctgatcc tttagagttg ccatattgga cttggaacca aaaggaatct | 1980 |
| tagcgtggaa aaggaatatc gacgtttggg tgtaagtata gcctcctgag ggttcaccca | 2040 |
| tcgcggttta ttaaccccaa gtggggctgg cctttcctca gacaagatca ctctgagcta | 2100 |
| ctccggctcc tacagcaagg acacagccag gcttctcaag taaacaccag agatacgtgc | 2160 |
| agaaaagcca ttaactgcca caaagctcaa gcccaaggca caggagcctg cggtgatccg | 2220 |
| cgcgcatgcg cgctttgtgg ctctccttcc cgctcggaaa ggtgggcgga aatcagacta | 2280 |
| attgctgggt cctccgaacg cccggctttt acgccccgcc caa | 2323 |
| <210> 5 | |
| <211> 1957 | |
| <212> DNA | |
| <213> Homo sapiens | |
| <400> 5 | |
| gtctgccggt cggttgtctg gctgcgcgcg ccacccgggc ctctccagtg ccccgcctgg | 60 |
| ctcggcatcc acccccagcc cgactcacac gtgggttccc gcacgtccgc cggccccccc | 120 |
| cgctgacgtc agcatagctg ttccacttaa ggcccctccc gcgcccagct cagagtgctg | 180 |
| cagccgctgc cgccgattcc ggatctcatt gccacgcgcc cccgacgacc gcccgacgtg | 240 |
| cattcccgat tccttttggt tccaagtcca atatggcaac tctaaaggat cagctgattt | 300 |
| ataatcttct aaaggaagaa cagacccccc agaataagat tacagttgtt ggggttggtg | 360 |
| ctgttggcat ggcctgtgcc atcagtatct taatgaagga cttggcagat gaacttgctc | 420 |
| ttgttgatgt catcgaagac aaattgaagg gagagatgat ggatctccaa catggcagcc | 480 |
| ttttccttag aacaccaaag attgtctctg gcaaagacta taatgtaact gcaaactcca | 540 |
| agctggtcat tatcacggct ggggcacgtc agcaagaggg agaaagccgt cttaatttgg | 600 |
| tccagcgtaa cgtgaacatc tttaaattca tcattcctaa tgttgtaaaa tacagcccga | 660 |
| actgcaagtt gcttattgtt tcaaatccag tggatatctt gacctacgtg gcttggaaga | 720 |
| taagtggttt tcccaaaaac cgtgttattg gaagcggttg caatctggat tcagcccgat | 780 |
| tccgttacct aatgggggaa aggctgggag ttcacccatt aagctgtcat gggtgggtcc | 840 |
| ttggggaaca tggagattcc agtgtgcctg tatggagtgg aatgaatgtt gctggtgtct | 900 |
| ctctgaagac tctgcaccca gatttaggga ctgataaaga taaggaacag tggaaagagt | 960 |
| gcagatacac tttgggggat ccaaaaggag ctgcaatttt aaagtcttct gatgtcatat | 1020 |
| catttcactg tctaggctac aacaggattc taggtggagg ttgtgcatgt tgtccttttt | 1080 |
| atctgatctg tgattaaagc agtaatattt taagatggac tgggaaaaac atcaactcct | 1140 |
| gaagttagaa ataagaatgg tttgtaaaat ccacagctat atcctgatgc tggatggtat | 1200 |
| taatcttgtg tagtcttcaa ctggttagtg tgaaatagtt ctgccacctc tgacgcacca | 1260 |
| ctgccaatgc tgtacgtact gcatttgccc cttgagccag gtggatgttt accgtgtgtt | 1320 |
| atataacttc ctggctcctt cactgaacat gcctagtcca acattttttc ccagtgagtc | 1380 |
| acatcctggg atccagtgta taaatccaat atcatgtctt gtgcataatt cttccaaagg | 1440 |
| atcttatttt gtgaactata tcagtagtgt acattaccat ataatgtaaa aagatctaca | 1500 |
| tacaaacaat gcaaccaact atccaagtgt tataccaact aaaaccccca ataaaccttg | 1560 |
| aacagtgact actttggtta attcattata ttaagatata aagtcataaa gctgctagtt | 1620 |
| attatattaa tttggaaata ttaggctatt cttgggcaac cctgcaacga ttttttctaa | 1680 |
| cagggatatt attgactaat agcagaggat gtaatagtca actgagttgt attggtacca | 1740 |
| cttccattgt aagtcccaaa gtattatata tttgataata atgctaatca taattggaaa | 1800 |
| gtaacattct atatgtaaat gtaaaattta tttgccaact gaatataggc aatgatagtg | 1860 |
| tgtcactata gggaacacag atttttgaga tcttgtcctc tggaagctgg taacaattaa | 1920 |
| aaacaatctt aaggcaggga aaaaaaaaaa aaaaaaa | 1957 |
| <210> 6 | |
| <211> 1957 | |
| <212> DNA | |
| <213> Homo sapiens | |
| <400> 6 | |
| tttttttttt ttttttttcc ctgccttaag attgttttta attgttacca gcttccagag | 60 |
| gacaagatct caaaaatctg tgttccctat agtgacacac tatcattgcc tatattcagt | 120 |
| tggcaaataa attttacatt tacatataga atgttacttt ccaattatga ttagcattat | 180 |
| tatcaaatat ataatacttt gggacttaca atggaagtgg taccaataca actcagttga | 240 |
| ctattacatc ctctgctatt agtcaataat atccctgtta gaaaaaatcg ttgcagggtt | 300 |
| gcccaagaat agcctaatat ttccaaatta atataataac tagcagcttt atgactttat | 360 |
| atcttaatat aatgaattaa ccaaagtagt cactgttcaa ggtttattgg gggttttagt | 420 |
| tggtataaca cttggatagt tggttgcatt gtttgtatgt agatcttttt acattatatg | 480 |
| gtaatgtaca ctactgatat agttcacaaa ataagatcct ttggaagaat tatgcacaag | 540 |
| acatgatatt ggatttatac actggatccc aggatgtgac tcactgggaa aaaatgttgg | 600 |
| actaggcatg ttcagtgaag gagccaggaa gttatataac acacggtaaa catccacctg | 660 |
| gctcaagggg caaatgcagt acgtacagca ttggcagtgg tgcgtcagag gtggcagaac | 720 |
| tatttcacac taaccagttg aagactacac aagattaata ccatccagca tcaggatata | 780 |
| gctgtggatt ttacaaacca ttcttatttc taacttcagg agttgatgtt tttcccagtc | 840 |
| catcttaaaa tattactgct ttaatcacag atcagataaa aaggacaaca tgcacaacct | 900 |
| ccacctagaa tcctgttgta gcctagacag tgaaatgata tgacatcaga agactttaaa | 960 |
| attgcagctc cttttggatc ccccaaagtg tatctgcact ctttccactg ttccttatct | 1020 |
| ttatcagtcc ctaaatctgg gtgcagagtc ttcagagaga caccagcaac attcattcca | 1080 |
| ctccatacag gcacactgga atctccatgt tccccaagga cccacccatg acagcttaat | 1140 |
| gggtgaactc ccagcctttc ccccattagg taacggaatc gggctgaatc cagattgcaa | 1200 |
| ccgcttccaa taacacggtt tttgggaaaa ccacttatct tccaagccac gtaggtcaag | 1260 |
| atatccactg gatttgaaac aataagcaac ttgcagttcg ggctgtattt tacaacatta | 1320 |
| ggaatgatga atttaaagat gttcacgtta cgctggacca aattaagacg gctttctccc | 1380 |
| tcttgctgac gtgccccagc cgtgataatg accagcttgg agtttgcagt tacattatag | 1440 |
| tctttgccag agacaatctt tggtgttcta aggaaaaggc tgccatgttg gagatccatc | 1500 |
| atctctccct tcaatttgtc ttcgatgaca tcaacaagag caagttcatc tgccaagtcc | 1560 |
| ttcattaaga tactgatggc acaggccatg ccaacagcac caaccccaac aactgtaatc | 1620 |
| ttattctggg gggtctgttc ttcctttaga agattataaa tcagctgatc ctttagagtt | 1680 |
| gccatattgg acttggaacc aaaaggaatc gggaatgcac gtcgggcggt cgtcgggggc | 1740 |
| gcgtggcaat gagatccgga atcggcggca gcggctgcag cactctgagc tgggcgcggg | 1800 |
| aggggcctta agtggaacag ctatgctgac gtcagcgggg ggggccggcg gacgtgcggg | 1860 |
| aacccacgtg tgagtcgggc tgggggtgga tgccgagcca ggcggggcac tggagaggcc | 1920 |
| cgggtggcgc gcgcagccag acaaccgacc ggcagac | 1957 |
| <210> 7 | |
| <211> 2102 | |
| <212> DNA | |
| <213> Homo sapiens | |
| <400> 7 | |
| gtctgccggt cggttgtctg gctgcgcgcg ccacccgggc ctctccagtg ccccgcctgg | 60 |
| ctcggcatcc acccccagcc cgactcacac gtgggttccc gcacgtccgc cggccccccc | 120 |
| cgctgacgtc agcatagctg ttccacttaa ggcccctccc gcgcccagct cagagtgctg | 180 |
| cagccgctgc cgccgattcc ggatctcatt gccacgcgcc cccgacgacc gcccgacgtg | 240 |
| cattcccgat tccttttggt tccaagtcca atatggcaac tctaaaggat cagctgattt | 300 |
| ataatcttct aaaggaagaa cagacccccc agaataagat tacagttgtt ggggttggtg | 360 |
| ctgttggcat ggcctgtgcc atcagtatct taatgaagga cttggcagat gaacttgctc | 420 |
| ttgttgatgt catcgaagac aaattgaagg gagagatgat ggatctccaa catggcagcc | 480 |
| ttttccttag aacaccaaag attgtctctg gcaaagacta taatgtaact gcaaactcca | 540 |
| agctggtcat tatcacggct ggggcacgtc agcaagaggg agaaagccgt cttaatttgg | 600 |
| tccagcgtaa cgtgaacatc tttaaattca tcattcctaa tgttgtaaaa tacagcccga | 660 |
| actgcaagtt gcttattgtt tcaaatccag tggatatctt gacctacgtg gcttggaaga | 720 |
| taagtggttt tcccaaaaac cgtgttattg gaagcggttg caatctggat tcagcccgat | 780 |
| tccgttacct aatgggggaa aggctgggag ttcacccatt aagctgtcat gggtgggtcc | 840 |
| ttggggaaca tggagattcc agtgtgcctg tatggagtgg aatgaatgtt gctggtgtct | 900 |
| ctctgaagac tctgcaccca gatttaggga ctgataaaga taaggaacag tggaaagagg | 960 |
| ttcacaagca ggtggttgag agggtcttta cggaataaag gatgatgtct tccttagtgt | 1020 |
| tccttgcatt ttgggacaga atggaatctc agaccttgtg aaggtgactc tgacttctga | 1080 |
| ggaagaggcc cgtttgaaga agagtgcaga tacactttgg gggatccaaa aggagctgca | 1140 |
| attttaaagt cttctgatgt catatcattt cactgtctag gctacaacag gattctaggt | 1200 |
| ggaggttgtg catgttgtcc tttttatctg atctgtgatt aaagcagtaa tattttaaga | 1260 |
| tggactggga aaaacatcaa ctcctgaagt tagaaataag aatggtttgt aaaatccaca | 1320 |
| gctatatcct gatgctggat ggtattaatc ttgtgtagtc ttcaactggt tagtgtgaaa | 1380 |
| tagttctgcc acctctgacg caccactgcc aatgctgtac gtactgcatt tgccccttga | 1440 |
| gccaggtgga tgtttaccgt gtgttatata acttcctggc tccttcactg aacatgccta | 1500 |
| gtccaacatt ttttcccagt gagtcacatc ctgggatcca gtgtataaat ccaatatcat | 1560 |
| gtcttgtgca taattcttcc aaaggatctt attttgtgaa ctatatcagt agtgtacatt | 1620 |
| accatataat gtaaaaagat ctacatacaa acaatgcaac caactatcca agtgttatac | 1680 |
| caactaaaac ccccaataaa ccttgaacag tgactacttt ggttaattca ttatattaag | 1740 |
| atataaagtc ataaagctgc tagttattat attaatttgg aaatattagg ctattcttgg | 1800 |
| gcaaccctgc aacgattttt tctaacaggg atattattga ctaatagcag aggatgtaat | 1860 |
| agtcaactga gttgtattgg taccacttcc attgtaagtc ccaaagtatt atatatttga | 1920 |
| taataatgct aatcataatt ggaaagtaac attctatatg taaatgtaaa atttatttgc | 1980 |
| caactgaata taggcaatga tagtgtgtca ctatagggaa cacagatttt tgagatcttg | 2040 |
| tcctctggaa gctggtaaca attaaaaaca atcttaaggc agggaaaaaa aaaaaaaaaa | 2100 |
| aa | 2102 |
| <210> 8 | |
| <211> 2102 | |
| <212> DNA | |
| <213> Homo sapiens | |
| <400> 8 | |
| tttttttttt ttttttttcc ctgccttaag attgttttta attgttacca gcttccagag | 60 |
| gacaagatct caaaaatctg tgttccctat agtgacacac tatcattgcc tatattcagt | 120 |
| tggcaaataa attttacatt tacatataga atgttacttt ccaattatga ttagcattat | 180 |
| tatcaaatat ataatacttt gggacttaca atggaagtgg taccaataca actcagttga | 240 |
| ctattacatc ctctgctatt agtcaataat atccctgtta gaaaaaatcg ttgcagggtt | 300 |
| gcccaagaat agcctaatat ttccaaatta atataataac tagcagcttt atgactttat | 360 |
| atcttaatat aatgaattaa ccaaagtagt cactgttcaa ggtttattgg gggttttagt | 420 |
| tggtataaca cttggatagt tggttgcatt gtttgtatgt agatcttttt acattatatg | 480 |
| gtaatgtaca ctactgatat agttcacaaa ataagatcct ttggaagaat tatgcacaag | 540 |
| acatgatatt ggatttatac actggatccc aggatgtgac tcactgggaa aaaatgttgg | 600 |
| actaggcatg ttcagtgaag gagccaggaa gttatataac acacggtaaa catccacctg | 660 |
| gctcaagggg caaatgcagt acgtacagca ttggcagtgg tgcgtcagag gtggcagaac | 720 |
| tatttcacac taaccagttg aagactacac aagattaata ccatccagca tcaggatata | 780 |
| gctgtggatt ttacaaacca ttcttatttc taacttcagg agttgatgtt tttcccagtc | 840 |
| catcttaaaa tattactgct ttaatcacag atcagataaa aaggacaaca tgcacaacct | 900 |
| ccacctagaa tcctgttgta gcctagacag tgaaatgata tgacatcaga agactttaaa | 960 |
| attgcagctc cttttggatc ccccaaagtg tatctgcact cttcttcaaa cgggcctctt | 1020 |
| cctcagaagt cagagtcacc ttcacaaggt ctgagattcc attctgtccc aaaatgcaag | 1080 |
| gaacactaag gaagacatca tcctttattc cgtaaagacc ctctcaacca cctgcttgtg | 1140 |
| aacctctttc cactgttcct tatctttatc agtccctaaa tctgggtgca gagtcttcag | 1200 |
| agagacacca gcaacattca ttccactcca tacaggcaca ctggaatctc catgttcccc | 1260 |
| aaggacccac ccatgacagc ttaatgggtg aactcccagc ctttccccca ttaggtaacg | 1320 |
| gaatcgggct gaatccagat tgcaaccgct tccaataaca cggtttttgg gaaaaccact | 1380 |
| tatcttccaa gccacgtagg tcaagatatc cactggattt gaaacaataa gcaacttgca | 1440 |
| gttcgggctg tattttacaa cattaggaat gatgaattta aagatgttca cgttacgctg | 1500 |
| gaccaaatta agacggcttt ctccctcttg ctgacgtgcc ccagccgtga taatgaccag | 1560 |
| cttggagttt gcagttacat tatagtcttt gccagagaca atctttggtg ttctaaggaa | 1620 |
| aaggctgcca tgttggagat ccatcatctc tcccttcaat ttgtcttcga tgacatcaac | 1680 |
| aagagcaagt tcatctgcca agtccttcat taagatactg atggcacagg ccatgccaac | 1740 |
| agcaccaacc ccaacaactg taatcttatt ctggggggtc tgttcttcct ttagaagatt | 1800 |
| ataaatcagc tgatccttta gagttgccat attggacttg gaaccaaaag gaatcgggaa | 1860 |
| tgcacgtcgg gcggtcgtcg ggggcgcgtg gcaatgagat ccggaatcgg cggcagcggc | 1920 |
| tgcagcactc tgagctgggc gcgggagggg ccttaagtgg aacagctatg ctgacgtcag | 1980 |
| cggggggggc cggcggacgt gcgggaaccc acgtgtgagt cgggctgggg gtggatgccg | 2040 |
| agccaggcgg ggcactggag aggcccgggt ggcgcgcgca gccagacaac cgaccggcag | 2100 |
| ac | 2102 |
| <210> 9 | |
| <211> 2226 | |
| <212> DNA | |
| <213> Homo sapiens | |
| <400> 9 | |
| gtctgccggt cggttgtctg gctgcgcgcg ccacccgggc ctctccagtg ccccgcctgg | 60 |
| ctcggcatcc acccccagcc cgactcacac gtgggttccc gcacgtccgc cggccccccc | 120 |
| cgctgacgtc agcatagctg ttccacttaa ggcccctccc gcgcccagct cagagtgctg | 180 |
| cagccgctgc cgccgattcc ggatctcatt gccacgcgcc cccgacgacc gcccgacgtg | 240 |
| cattcccgat tccttttggt tccaagtcca atatggcaac tctaaaggat cagctgattt | 300 |
| ataatcttct aaaggaagaa cagacccccc agaataagat tacagttgtt ggggttggtg | 360 |
| ctgttggcat ggcctgtgcc atcagtatct taatgaagga cttggcagat gaacttgctc | 420 |
| ttgttgatgt catcgaagac aaattgaagg gagagatgat ggatctccaa catggcagcc | 480 |
| ttttccttag aacaccaaag attgtctctg gcaaagacta taatgtaact gcaaactcca | 540 |
| agctggtcat tatcacggct ggggcacgtc agcaagaggg agaaagccgt cttaatttgg | 600 |
| tccagcgtaa cgtgaacatc tttaaattca tcattcctaa tgttgtaaaa tacagcccga | 660 |
| actgcaagtt gcttattgtt tcaaatccag tggatatctt gacctacgtg gcttggaaga | 720 |
| taagtggttt tcccaaaaac cgtgttattg gaagcggttg caatctggat tcagcccgat | 780 |
| tccgttacct aatgggggaa aggctgggag ttcacccatt aagctgtcat gggtgggtcc | 840 |
| ttggggaaca tggagattcc agtgtgcctg tatggagtgg aatgaatgtt gctggtgtct | 900 |
| ctctgaagac tctgcaccca gatttaggga ctgataaaga taaggaacag tggaaagagg | 960 |
| ttcacaagca ggtggttgag agtgcttatg aggtgatcaa actcaaaggc tacacatcct | 1020 |
| gggctattgg actctctgta gcagatttgg cagagagtat aatgaagaat cttaggcggg | 1080 |
| tgcacccagt ttccaccatg attaagggtc tttacggaat aaaggatgat gtcttcctta | 1140 |
| gtgttccttg cattttggga cagaatggaa tctcagacct tgtgaaggtg actctgactt | 1200 |
| ctgaggaaga ggcccgtttg aagaagagtg cagatacact ttgggggatc caaaaggagc | 1260 |
| tgcaatttta aagtcttctg atgtcatatc atttcactgt ctaggctaca acaggattct | 1320 |
| aggtggaggt tgtgcatgtt gtccttttta tctgatctgt gattaaagca gtaatatttt | 1380 |
| aagatggact gggaaaaaca tcaactcctg aagttagaaa taagaatggt ttgtaaaatc | 1440 |
| cacagctata tcctgatgct ggatggtatt aatcttgtgt agtcttcaac tggttagtgt | 1500 |
| gaaatagttc tgccacctct gacgcaccac tgccaatgct gtacgtactg catttgcccc | 1560 |
| ttgagccagg tggatgttta ccgtgtgtta tataacttcc tggctccttc actgaacatg | 1620 |
| cctagtccaa cattttttcc cagtgagtca catcctggga tccagtgtat aaatccaata | 1680 |
| tcatgtcttg tgcataattc ttccaaagga tcttattttg tgaactatat cagtagtgta | 1740 |
| cattaccata taatgtaaaa agatctacat acaaacaatg caaccaacta tccaagtgtt | 1800 |
| ataccaacta aaacccccaa taaaccttga acagtgacta ctttggttaa ttcattatat | 1860 |
| taagatataa agtcataaag ctgctagtta ttatattaat ttggaaatat taggctattc | 1920 |
| ttgggcaacc ctgcaacgat tttttctaac agggatatta ttgactaata gcagaggatg | 1980 |
| taatagtcaa ctgagttgta ttggtaccac ttccattgta agtcccaaag tattatatat | 2040 |
| ttgataataa tgctaatcat aattggaaag taacattcta tatgtaaatg taaaatttat | 2100 |
| ttgccaactg aatataggca atgatagtgt gtcactatag ggaacacaga tttttgagat | 2160 |
| cttgtcctct ggaagctggt aacaattaaa aacaatctta aggcagggaa aaaaaaaaaa | 2220 |
| aaaaaa | 2226 |
| <210> 10 | |
| <211> 2226 | |
| <212> DNA | |
| <213> Homo sapiens | |
| <400> 10 | |
| tttttttttt ttttttttcc ctgccttaag attgttttta attgttacca gcttccagag | 60 |
| gacaagatct caaaaatctg tgttccctat agtgacacac tatcattgcc tatattcagt | 120 |
| tggcaaataa attttacatt tacatataga atgttacttt ccaattatga ttagcattat | 180 |
| tatcaaatat ataatacttt gggacttaca atggaagtgg taccaataca actcagttga | 240 |
| ctattacatc ctctgctatt agtcaataat atccctgtta gaaaaaatcg ttgcagggtt | 300 |
| gcccaagaat agcctaatat ttccaaatta atataataac tagcagcttt atgactttat | 360 |
| atcttaatat aatgaattaa ccaaagtagt cactgttcaa ggtttattgg gggttttagt | 420 |
| tggtataaca cttggatagt tggttgcatt gtttgtatgt agatcttttt acattatatg | 480 |
| gtaatgtaca ctactgatat agttcacaaa ataagatcct ttggaagaat tatgcacaag | 540 |
| acatgatatt ggatttatac actggatccc aggatgtgac tcactgggaa aaaatgttgg | 600 |
| actaggcatg ttcagtgaag gagccaggaa gttatataac acacggtaaa catccacctg | 660 |
| gctcaagggg caaatgcagt acgtacagca ttggcagtgg tgcgtcagag gtggcagaac | 720 |
| tatttcacac taaccagttg aagactacac aagattaata ccatccagca tcaggatata | 780 |
| gctgtggatt ttacaaacca ttcttatttc taacttcagg agttgatgtt tttcccagtc | 840 |
| catcttaaaa tattactgct ttaatcacag atcagataaa aaggacaaca tgcacaacct | 900 |
| ccacctagaa tcctgttgta gcctagacag tgaaatgata tgacatcaga agactttaaa | 960 |
| attgcagctc cttttggatc ccccaaagtg tatctgcact cttcttcaaa cgggcctctt | 1020 |
| cctcagaagt cagagtcacc ttcacaaggt ctgagattcc attctgtccc aaaatgcaag | 1080 |
| gaacactaag gaagacatca tcctttattc cgtaaagacc cttaatcatg gtggaaactg | 1140 |
| ggtgcacccg cctaagattc ttcattatac tctctgccaa atctgctaca gagagtccaa | 1200 |
| tagcccagga tgtgtagcct ttgagtttga tcacctcata agcactctca accacctgct | 1260 |
| tgtgaacctc tttccactgt tccttatctt tatcagtccc taaatctggg tgcagagtct | 1320 |
| tcagagagac accagcaaca ttcattccac tccatacagg cacactggaa tctccatgtt | 1380 |
| ccccaaggac ccacccatga cagcttaatg ggtgaactcc cagcctttcc cccattaggt | 1440 |
| aacggaatcg ggctgaatcc agattgcaac cgcttccaat aacacggttt ttgggaaaac | 1500 |
| cacttatctt ccaagccacg taggtcaaga tatccactgg atttgaaaca ataagcaact | 1560 |
| tgcagttcgg gctgtatttt acaacattag gaatgatgaa tttaaagatg ttcacgttac | 1620 |
| gctggaccaa attaagacgg ctttctccct cttgctgacg tgccccagcc gtgataatga | 1680 |
| ccagcttgga gtttgcagtt acattatagt ctttgccaga gacaatcttt ggtgttctaa | 1740 |
| ggaaaaggct gccatgttgg agatccatca tctctccctt caatttgtct tcgatgacat | 1800 |
| caacaagagc aagttcatct gccaagtcct tcattaagat actgatggca caggccatgc | 1860 |
| caacagcacc aaccccaaca actgtaatct tattctgggg ggtctgttct tcctttagaa | 1920 |
| gattataaat cagctgatcc tttagagttg ccatattgga cttggaacca aaaggaatcg | 1980 |
| ggaatgcacg tcgggcggtc gtcgggggcg cgtggcaatg agatccggaa tcggcggcag | 2040 |
| cggctgcagc actctgagct gggcgcggga ggggccttaa gtggaacagc tatgctgacg | 2100 |
| tcagcggggg gggccggcgg acgtgcggga acccacgtgt gagtcgggct gggggtggat | 2160 |
| gccgagccag gcggggcact ggagaggccc gggtggcgcg cgcagccaga caaccgaccg | 2220 |
| gcagac | 2226 |
| <210> 11 | |
| <211> 1854 | |
| <212> DNA | |
| <213> Mus musculus | |
| <400> 11 | |
| gggttcttgc gggggtgggg gggttaggaa ggaagcttgc gcgtgcgcag gcttaagcac | 60 |
| gttgctatgc cttggggtcg caccttgtgg ccgttattgg cgccctctgc tcttgatttt | 120 |
| tggtacttcc tggagcaact tggcgctcta cttgctgtag ggctctgggt gatgggagaa | 180 |
| gagcgggagg gcagctttct aaccatataa gaggagatac catccccttt tggggttcat | 240 |
| caagatgagt aagtcctcag gcggctacac gtacacggag acctcggtat tatttttcca | 300 |
| tttcaaggtc tcaaaagatt caaagtccaa gatggcaacc ctcaaggacc agctgattgt | 360 |
| gaatcttctt aaggaagagc aggctcccca gaacaagatt acagttgttg gggttggtgc | 420 |
| tgttggcatg gcttgtgcca tcagtatctt aatgaaggac ttggcggatg agcttgccct | 480 |
| tgttgacgtc atggaagaca aactcaaggg cgagatgatg gatctccagc atggcagcct | 540 |
| cttccttaaa acaccaaaaa ttgtctccag caaagactac tgtgtaactg cgaactccaa | 600 |
| gctggtcatt atcaccgcgg gggcccgtca gcaagagggg gagagccggc tcaacctggt | 660 |
| ccagcgaaac gtgaacatct tcaagttcat cattcccaac attgtcaagt acagtccaca | 720 |
| ctgcaagctg ctgatcgtct ccaatccagt ggatatcttg acctacgtgg cttggaaaat | 780 |
| cagtggcttt cccaaaaacc gagtaattgg aagtggttgc aatctggatt cagcgcggtt | 840 |
| ccgttacctg atgggagaga ggctgggggt tcacgcgctg agctgtcacg gctgggtcct | 900 |
| gggagaacat ggcgactcca gtgtgcctgt gtggagtggt gtgaatgttg ccggcgtctc | 960 |
| cctgaagtct cttaacccag aactgggcac tgacgcagac aaggagcagt ggaaggaggt | 1020 |
| tcacaagcag gtggtggaca gtgcctacga ggtgatcaag ctgaaaggtt acacatcctg | 1080 |
| ggccattggc ctctctgtgg cagacttggc tgagagcata atgaagaacc ttaggcgggt | 1140 |
| gcatcccatt tccaccatga ttaagggtct ctatggaatc aatgaggatg tcttcctcag | 1200 |
| tgtcccatgt atcctgggac aaaatggaat ctcggatgtt gtgaaggtga cactgactcc | 1260 |
| tgaggaagag gcccgcctga agaagagcgc agacaccctc tggggaatcc agaaggagct | 1320 |
| gcagttctaa agtcttcccc gtgtcctagc acttcactgt ccaggctgca gcagggcttc | 1380 |
| taggcagacc acacccttct cgtctgagct gtggttagta cagtggtgtt gagatggtgt | 1440 |
| ggggaaacat ctcactcccc acagctctgc cctgctgcca agtggtactt gtgtagtggt | 1500 |
| gacctggtta gtgtgacagt cccactgtct ctgagacaca ctgccaactg caggcttcga | 1560 |
| ttacccctgt gagcctgctg cattgctgcc ctgcaccaaa catgcctagg ccgacgagtt | 1620 |
| cccagttaag tcgtataacc tggctccagt gtgtacgtcc atgatgcata tcttgtgcat | 1680 |
| aaatgttgta caggatattt tatatattat atgtgtctgt agtgtgcatt gcaatattat | 1740 |
| gtgagatgta agatctgcat atggatgatg gaaccaacca cccaagtgtc atgccaaata | 1800 |
| aaaccttgaa cagtgaaaaa aaaaaaaaaa aaaaaaaaaa aaaaaaaaaa aaaa | 1854 |
| <210> 12 | |
| <211> 1854 | |
| <212> DNA | |
| <213> Mus musculus | |
| <400> 12 | |
| tttttttttt tttttttttt tttttttttt tttttttttc actgttcaag gttttatttg | 60 |
| gcatgacact tgggtggttg gttccatcat ccatatgcag atcttacatc tcacataata | 120 |
| ttgcaatgca cactacagac acatataata tataaaatat cctgtacaac atttatgcac | 180 |
| aagatatgca tcatggacgt acacactgga gccaggttat acgacttaac tgggaactcg | 240 |
| tcggcctagg catgtttggt gcagggcagc aatgcagcag gctcacaggg gtaatcgaag | 300 |
| cctgcagttg gcagtgtgtc tcagagacag tgggactgtc acactaacca ggtcaccact | 360 |
| acacaagtac cacttggcag cagggcagag ctgtggggag tgagatgttt ccccacacca | 420 |
| tctcaacacc actgtactaa ccacagctca gacgagaagg gtgtggtctg cctagaagcc | 480 |
| ctgctgcagc ctggacagtg aagtgctagg acacggggaa gactttagaa ctgcagctcc | 540 |
| ttctggattc cccagagggt gtctgcgctc ttcttcaggc gggcctcttc ctcaggagtc | 600 |
| agtgtcacct tcacaacatc cgagattcca ttttgtccca ggatacatgg gacactgagg | 660 |
| aagacatcct cattgattcc atagagaccc ttaatcatgg tggaaatggg atgcacccgc | 720 |
| ctaaggttct tcattatgct ctcagccaag tctgccacag agaggccaat ggcccaggat | 780 |
| gtgtaacctt tcagcttgat cacctcgtag gcactgtcca ccacctgctt gtgaacctcc | 840 |
| ttccactgct ccttgtctgc gtcagtgccc agttctgggt taagagactt cagggagacg | 900 |
| ccggcaacat tcacaccact ccacacaggc acactggagt cgccatgttc tcccaggacc | 960 |
| cagccgtgac agctcagcgc gtgaaccccc agcctctctc ccatcaggta acggaaccgc | 1020 |
| gctgaatcca gattgcaacc acttccaatt actcggtttt tgggaaagcc actgattttc | 1080 |
| caagccacgt aggtcaagat atccactgga ttggagacga tcagcagctt gcagtgtgga | 1140 |
| ctgtacttga caatgttggg aatgatgaac ttgaagatgt tcacgtttcg ctggaccagg | 1200 |
| ttgagccggc tctccccctc ttgctgacgg gcccccgcgg tgataatgac cagcttggag | 1260 |
| ttcgcagtta cacagtagtc tttgctggag acaatttttg gtgttttaag gaagaggctg | 1320 |
| ccatgctgga gatccatcat ctcgcccttg agtttgtctt ccatgacgtc aacaagggca | 1380 |
| agctcatccg ccaagtcctt cattaagata ctgatggcac aagccatgcc aacagcacca | 1440 |
| accccaacaa ctgtaatctt gttctgggga gcctgctctt ccttaagaag attcacaatc | 1500 |
| agctggtcct tgagggttgc catcttggac tttgaatctt ttgagacctt gaaatggaaa | 1560 |
| aataataccg aggtctccgt gtacgtgtag ccgcctgagg acttactcat cttgatgaac | 1620 |
| cccaaaaggg gatggtatct cctcttatat ggttagaaag ctgccctccc gctcttctcc | 1680 |
| catcacccag agccctacag caagtagagc gccaagttgc tccaggaagt accaaaaatc | 1740 |
| aagagcagag ggcgccaata acggccacaa ggtgcgaccc caaggcatag caacgtgctt | 1800 |
| aagcctgcgc acgcgcaagc ttccttccta acccccccac ccccgcaaga accc | 1854 |
| <210> 13 | |
| <211> 1661 | |
| <212> DNA | |
| <213> Mus musculus | |
| <400> 13 | |
| ggagcttcca tttaaggccc cgcccgcgtg ctgctctgcg tgctggagcc actgtcgccg | 60 |
| agctcgggcc acgctgcttc tcctcgccag tcgccccccc atcgtgcact agcggtctca | 120 |
| aaagattcaa agtccaagat ggcaaccctc aaggaccagc tgattgtgaa tcttcttaag | 180 |
| gaagagcagg ctccccagaa caagattaca gttgttgggg ttggtgctgt tggcatggct | 240 |
| tgtgccatca gtatcttaat gaaggacttg gcggatgagc ttgcccttgt tgacgtcatg | 300 |
| gaagacaaac tcaagggcga gatgatggat ctccagcatg gcagcctctt ccttaaaaca | 360 |
| ccaaaaattg tctccagcaa agactactgt gtaactgcga actccaagct ggtcattatc | 420 |
| accgcggggg cccgtcagca agagggggag agccggctca acctggtcca gcgaaacgtg | 480 |
| aacatcttca agttcatcat tcccaacatt gtcaagtaca gtccacactg caagctgctg | 540 |
| atcgtctcca atccagtgga tatcttgacc tacgtggctt ggaaaatcag tggctttccc | 600 |
| aaaaaccgag taattggaag tggttgcaat ctggattcag cgcggttccg ttacctgatg | 660 |
| ggagagaggc tgggggttca cgcgctgagc tgtcacggct gggtcctggg agaacatggc | 720 |
| gactccagtg tgcctgtgtg gagtggtgtg aatgttgccg gcgtctccct gaagtctctt | 780 |
| aacccagaac tgggcactga cgcagacaag gagcagtgga aggaggttca caagcaggtg | 840 |
| gtggacagtg cctacgaggt gatcaagctg aaaggttaca catcctgggc cattggcctc | 900 |
| tctgtggcag acttggctga gagcataatg aagaacctta ggcgggtgca tcccatttcc | 960 |
| accatgatta agggtctcta tggaatcaat gaggatgtct tcctcagtgt cccatgtatc | 1020 |
| ctgggacaaa atggaatctc ggatgttgtg aaggtgacac tgactcctga ggaagaggcc | 1080 |
| cgcctgaaga agagcgcaga caccctctgg ggaatccaga aggagctgca gttctaaagt | 1140 |
| cttccccgtg tcctagcact tcactgtcca ggctgcagca gggcttctag gcagaccaca | 1200 |
| cccttctcgt ctgagctgtg gttagtacag tggtgttgag atggtgtggg gaaacatctc | 1260 |
| actccccaca gctctgccct gctgccaagt ggtacttgtg tagtggtgac ctggttagtg | 1320 |
| tgacagtccc actgtctctg agacacactg ccaactgcag gcttcgatta cccctgtgag | 1380 |
| cctgctgcat tgctgccctg caccaaacat gcctaggccg acgagttccc agttaagtcg | 1440 |
| tataacctgg ctccagtgtg tacgtccatg atgcatatct tgtgcataaa tgttgtacag | 1500 |
| gatattttat atattatatg tgtctgtagt gtgcattgca atattatgtg agatgtaaga | 1560 |
| tctgcatatg gatgatggaa ccaaccaccc aagtgtcatg ccaaataaaa ccttgaacag | 1620 |
| tgaaaaaaaa aaaaaaaaaa aaaaaaaaaa aaaaaaaaaa a | 1661 |
| <210> 14 | |
| <211> 1661 | |
| <212> DNA | |
| <213> Mus musculus | |
| <400> 14 | |
| tttttttttt tttttttttt tttttttttt tttttttttc actgttcaag gttttatttg | 60 |
| gcatgacact tgggtggttg gttccatcat ccatatgcag atcttacatc tcacataata | 120 |
| ttgcaatgca cactacagac acatataata tataaaatat cctgtacaac atttatgcac | 180 |
| aagatatgca tcatggacgt acacactgga gccaggttat acgacttaac tgggaactcg | 240 |
| tcggcctagg catgtttggt gcagggcagc aatgcagcag gctcacaggg gtaatcgaag | 300 |
| cctgcagttg gcagtgtgtc tcagagacag tgggactgtc acactaacca ggtcaccact | 360 |
| acacaagtac cacttggcag cagggcagag ctgtggggag tgagatgttt ccccacacca | 420 |
| tctcaacacc actgtactaa ccacagctca gacgagaagg gtgtggtctg cctagaagcc | 480 |
| ctgctgcagc ctggacagtg aagtgctagg acacggggaa gactttagaa ctgcagctcc | 540 |
| ttctggattc cccagagggt gtctgcgctc ttcttcaggc gggcctcttc ctcaggagtc | 600 |
| agtgtcacct tcacaacatc cgagattcca ttttgtccca ggatacatgg gacactgagg | 660 |
| aagacatcct cattgattcc atagagaccc ttaatcatgg tggaaatggg atgcacccgc | 720 |
| ctaaggttct tcattatgct ctcagccaag tctgccacag agaggccaat ggcccaggat | 780 |
| gtgtaacctt tcagcttgat cacctcgtag gcactgtcca ccacctgctt gtgaacctcc | 840 |
| ttccactgct ccttgtctgc gtcagtgccc agttctgggt taagagactt cagggagacg | 900 |
| ccggcaacat tcacaccact ccacacaggc acactggagt cgccatgttc tcccaggacc | 960 |
| cagccgtgac agctcagcgc gtgaaccccc agcctctctc ccatcaggta acggaaccgc | 1020 |
| gctgaatcca gattgcaacc acttccaatt actcggtttt tgggaaagcc actgattttc | 1080 |
| caagccacgt aggtcaagat atccactgga ttggagacga tcagcagctt gcagtgtgga | 1140 |
| ctgtacttga caatgttggg aatgatgaac ttgaagatgt tcacgtttcg ctggaccagg | 1200 |
| ttgagccggc tctccccctc ttgctgacgg gcccccgcgg tgataatgac cagcttggag | 1260 |
| ttcgcagtta cacagtagtc tttgctggag acaatttttg gtgttttaag gaagaggctg | 1320 |
| ccatgctgga gatccatcat ctcgcccttg agtttgtctt ccatgacgtc aacaagggca | 1380 |
| agctcatccg ccaagtcctt cattaagata ctgatggcac aagccatgcc aacagcacca | 1440 |
| accccaacaa ctgtaatctt gttctgggga gcctgctctt ccttaagaag attcacaatc | 1500 |
| agctggtcct tgagggttgc catcttggac tttgaatctt ttgagaccgc tagtgcacga | 1560 |
| tgggggggcg actggcgagg agaagcagcg tggcccgagc tcggcgacag tggctccagc | 1620 |
| acgcagagca gcacgcgggc ggggccttaa atggaagctc c | 1661 |
| <210> 15 | |
| <211> 1609 | |
| <212> DNA | |
| <213> Rattus norvegicus | |
| <400> 15 | |
| gtgtgctgga gccactgtcg ccgatctcgc gcacgctact gctgctgctc gcccgtcgtc | 60 |
| ccccatcgtg cactaagcgg tcccaaaaga ttcaaagtcc aagatggcag ccctcaagga | 120 |
| ccagctgatt gtgaatcttc ttaaggaaga acaggtcccc cagaacaaga ttacagttgt | 180 |
| tggggttggt gctgttggca tggcttgtgc catcagtatc ttaatgaagg acttggctga | 240 |
| tgagcttgcc cttgttgatg tcatagaaga taagctaaag ggagagatga tggatcttca | 300 |
| gcatggcagc cttttcctta agacaccaaa aattgtctcc agcaaagatt atagtgtgac | 360 |
| tgcaaactcc aagctggtca ttatcaccgc gggggcccgt cagcaagagg gagagagccg | 420 |
| gctcaatttg gtccagcgaa acgtgaacat cttcaagttc atcattccaa atgttgtgaa | 480 |
| atacagtcca cagtgcaaac tgctcatcgt ctcaaaccca gtggatatct tgacctacgt | 540 |
| ggcttggaag atcagcggct tccccaaaaa cagagttatt ggaagtggtt gcaatctgga | 600 |
| ttcggctcgg ttccgttacc tgatgggaga aaggctggga gttcatccac tgagctgtca | 660 |
| cgggtgggtc ctgggagagc atggcgactc cagtgtgcct gtgtggagtg gtgtgaacgt | 720 |
| cgccggcgtc tccctgaagt ctctgaaccc gcagctgggc acggatgcag acaaggagca | 780 |
| gtggaaggat gtgcacaagc aggtggttga cagtgcatac gaagtgatca agctgaaagg | 840 |
| ttacacatcc tgggccattg gcctctccgt ggcagacttg gccgagagca taatgaagaa | 900 |
| ccttaggcgg gtgcatccca tttccaccat gattaagggt ctctatggaa tcaaggagga | 960 |
| tgtcttcctc agcgtcccat gtatcctggg acaaaatgga atctcagatg ttgtgaaggt | 1020 |
| gacactgact cctgacgagg aggcccgcct gaagaagagt gcagataccc tctggggaat | 1080 |
| ccagaaggag ctgcagttct aaagtcttcc cagtgtccta gcacttcact gtccaggctg | 1140 |
| cagcagggtt tctatggaga ccacgcactt ctcatctgag ctgtggttag tccagttggt | 1200 |
| ccagttgtgt tgaggtggtc tgggggaaat ctcagttcca cagctctacc ctgctaagtg | 1260 |
| gtacttgtgt agtggtaacc tggttagtgt gacaatccca ctgtctccaa gacacactgc | 1320 |
| caactgcatg caggctttga ttaccctgtg agcctgctgc attgctgtgc tacgcaccct | 1380 |
| caccaaacat gcctaggcca tgagttccca gttagttata agctggctcc agtgtgtaag | 1440 |
| tccatcgtgt atatcttgtg cataaatgtt ctacaggata ttttctgtat tatatgtgtc | 1500 |
| tgtagtgtac attgcaatat tacgtgaaat gtaagatctg catatggatg atggaaccaa | 1560 |
| ccactcaagt gtcatgccaa ggaaaacacc aaataaacct tgaacagtg | 1609 |
| <210> 16 | |
| <211> 1609 | |
| <212> DNA | |
| <213> Rattus norvegicus | |
| <400> 16 | |
| cactgttcaa ggtttatttg gtgttttcct tggcatgaca cttgagtggt tggttccatc | 60 |
| atccatatgc agatcttaca tttcacgtaa tattgcaatg tacactacag acacatataa | 120 |
| tacagaaaat atcctgtaga acatttatgc acaagatata cacgatggac ttacacactg | 180 |
| gagccagctt ataactaact gggaactcat ggcctaggca tgtttggtga gggtgcgtag | 240 |
| cacagcaatg cagcaggctc acagggtaat caaagcctgc atgcagttgg cagtgtgtct | 300 |
| tggagacagt gggattgtca cactaaccag gttaccacta cacaagtacc acttagcagg | 360 |
| gtagagctgt ggaactgaga tttcccccag accacctcaa cacaactgga ccaactggac | 420 |
| taaccacagc tcagatgaga agtgcgtggt ctccatagaa accctgctgc agcctggaca | 480 |
| gtgaagtgct aggacactgg gaagacttta gaactgcagc tccttctgga ttccccagag | 540 |
| ggtatctgca ctcttcttca ggcgggcctc ctcgtcagga gtcagtgtca ccttcacaac | 600 |
| atctgagatt ccattttgtc ccaggataca tgggacgctg aggaagacat cctccttgat | 660 |
| tccatagaga cccttaatca tggtggaaat gggatgcacc cgcctaaggt tcttcattat | 720 |
| gctctcggcc aagtctgcca cggagaggcc aatggcccag gatgtgtaac ctttcagctt | 780 |
| gatcacttcg tatgcactgt caaccacctg cttgtgcaca tccttccact gctccttgtc | 840 |
| tgcatccgtg cccagctgcg ggttcagaga cttcagggag acgccggcga cgttcacacc | 900 |
| actccacaca ggcacactgg agtcgccatg ctctcccagg acccacccgt gacagctcag | 960 |
| tggatgaact cccagccttt ctcccatcag gtaacggaac cgagccgaat ccagattgca | 1020 |
| accacttcca ataactctgt ttttggggaa gccgctgatc ttccaagcca cgtaggtcaa | 1080 |
| gatatccact gggtttgaga cgatgagcag tttgcactgt ggactgtatt tcacaacatt | 1140 |
| tggaatgatg aacttgaaga tgttcacgtt tcgctggacc aaattgagcc ggctctctcc | 1200 |
| ctcttgctga cgggcccccg cggtgataat gaccagcttg gagtttgcag tcacactata | 1260 |
| atctttgctg gagacaattt ttggtgtctt aaggaaaagg ctgccatgct gaagatccat | 1320 |
| catctctccc tttagcttat cttctatgac atcaacaagg gcaagctcat cagccaagtc | 1380 |
| cttcattaag atactgatgg cacaagccat gccaacagca ccaaccccaa caactgtaat | 1440 |
| cttgttctgg gggacctgtt cttccttaag aagattcaca atcagctggt ccttgagggc | 1500 |
| tgccatcttg gactttgaat cttttgggac cgcttagtgc acgatggggg acgacgggcg | 1560 |
| agcagcagca gtagcgtgcg cgagatcggc gacagtggct ccagcacac | 1609 |
| <210> 17 | |
| <211> 1919 | |
| <212> DNA | |
| <213> Macaca mulatta | |
| <400> 17 | |
| gggcgtaaaa gcagggcggt ctgaagccgc agctattagt ctgatttccg cccacctttc | 60 |
| cgagcgagga gaaccacaaa gcgcgcatgc gcgcggatca ccgcccgctt cagtgccttg | 120 |
| ggctcgagct ttgtggcagt tagtggcttt tctgcacata cctctggttt ttacttgaag | 180 |
| cctggctgtg tccttgctgt aggagcagga gtggctcaaa gtgatcttgt ctgaggaaag | 240 |
| gccagcccca cttggggtta ataaaccgcg atgggtgagc cctcaggagg ctatacttac | 300 |
| acccaaacgt cgatattcct tttccacgct aagattcctt ttggttccaa gtccaatatg | 360 |
| gcaactctca aggatcagct gattcataat cttctaaagg aagaacagac tccccagaat | 420 |
| aagattacag ttgttggggt tggtgctgtt ggcatggcct gtgccatcag tatcttaatg | 480 |
| aaggacttgg cagatgaact tgctcttgtt gatgtcatcg aagacaaatt gaagggagag | 540 |
| atgatggatc tccaacatgg cagccttttc cttagaacac caaagattgt ctctgggaaa | 600 |
| gactatagtg taactgcaaa ctccaagctg gtcattatca cggctggggc acgtcaacaa | 660 |
| gagggagaaa gccgtcttaa tttggtccag cgtaacgtga acatctttaa attcatcgtt | 720 |
| cctaatgttg taaaatacag cccgaactgc aagttgctta ttgtttcaaa tccagtggat | 780 |
| atcttgacct acgtggcttg gaagataagt ggttttccca aaaaccgtgt tattggaagt | 840 |
| ggttgcaatc tggattcagc cagattccgt tacctgatgg gggaaagact gggagttcac | 900 |
| ccattaagct gtcatgggtg ggtccttggg gaacatggag attccagtgt gcctgtatgg | 960 |
| agtggaatga atgttgctgg tgtctccctg aagactctgc acccagattt agggactgat | 1020 |
| aaagataagg aacagtggaa agaggttcac aagcaggtgg ttgagagtgc ttatgaggtg | 1080 |
| atcaaactca aaggctacac atcctgggcc attggactct ctgtagcaga tttggcagag | 1140 |
| agtataatga agaatcttag gcgagtgcac ccagtttcca ccatgattaa gggtctctat | 1200 |
| ggaataaagg atgatgtctt cctcagtgtt ccttgcattt tgggacagaa tggaatctca | 1260 |
| gaccttgtga aggtgactct gactcctgag gaagaggccc gtttgaagaa gagtgcagat | 1320 |
| acactttggg ggatccaaaa agagctgcaa ttttaaagtc ttctgatgtc atagcatttc | 1380 |
| actgtctagg ctacaacagg attctagttg gaggttgtac atgttgtcct ttttatctga | 1440 |
| tctgtgatta aaacagtaat attttaagat ggactgggaa aagcattaac tcctgaagtt | 1500 |
| agaaatagga atggtttgtg aaatccacag ctatatcctg atgctagatg gtattaatct | 1560 |
| tgtgtagtcc taaactggtt agtgtgaaat agttctgacg caccactgcc aattctgtac | 1620 |
| atgctgcatt tgccccttga gccaggtgga tgtttactgt gtgttttata atttcctggc | 1680 |
| tccttcactg aacatgccta gtccaacatt ttttcccagt cagtcacatc ctgggatcca | 1740 |
| gtgtataaat ccaatatcgt atgtcttgtg cataattgtt ccaaaggagc ttattttgtg | 1800 |
| aactatatat atcagtagtg tacattacca cataacataa aaagatctac atataaacaa | 1860 |
| tacaaccaac tatccaagtg ttataccaac taaaaacccc aataaacctt gaacagtga | 1919 |
| <210> 18 | |
| <211> 1919 | |
| <212> DNA | |
| <213> Macaca mulatta | |
| <400> 18 | |
| tcactgttca aggtttattg gggtttttag ttggtataac acttggatag ttggttgtat | 60 |
| tgtttatatg tagatctttt tatgttatgt ggtaatgtac actactgata tatatagttc | 120 |
| acaaaataag ctcctttgga acaattatgc acaagacata cgatattgga tttatacact | 180 |
| ggatcccagg atgtgactga ctgggaaaaa atgttggact aggcatgttc agtgaaggag | 240 |
| ccaggaaatt ataaaacaca cagtaaacat ccacctggct caaggggcaa atgcagcatg | 300 |
| tacagaattg gcagtggtgc gtcagaacta tttcacacta accagtttag gactacacaa | 360 |
| gattaatacc atctagcatc aggatatagc tgtggatttc acaaaccatt cctatttcta | 420 |
| acttcaggag ttaatgcttt tcccagtcca tcttaaaata ttactgtttt aatcacagat | 480 |
| cagataaaaa ggacaacatg tacaacctcc aactagaatc ctgttgtagc ctagacagtg | 540 |
| aaatgctatg acatcagaag actttaaaat tgcagctctt tttggatccc ccaaagtgta | 600 |
| tctgcactct tcttcaaacg ggcctcttcc tcaggagtca gagtcacctt cacaaggtct | 660 |
| gagattccat tctgtcccaa aatgcaagga acactgagga agacatcatc ctttattcca | 720 |
| tagagaccct taatcatggt ggaaactggg tgcactcgcc taagattctt cattatactc | 780 |
| tctgccaaat ctgctacaga gagtccaatg gcccaggatg tgtagccttt gagtttgatc | 840 |
| acctcataag cactctcaac cacctgcttg tgaacctctt tccactgttc cttatcttta | 900 |
| tcagtcccta aatctgggtg cagagtcttc agggagacac cagcaacatt cattccactc | 960 |
| catacaggca cactggaatc tccatgttcc ccaaggaccc acccatgaca gcttaatggg | 1020 |
| tgaactccca gtctttcccc catcaggtaa cggaatctgg ctgaatccag attgcaacca | 1080 |
| cttccaataa cacggttttt gggaaaacca cttatcttcc aagccacgta ggtcaagata | 1140 |
| tccactggat ttgaaacaat aagcaacttg cagttcgggc tgtattttac aacattagga | 1200 |
| acgatgaatt taaagatgtt cacgttacgc tggaccaaat taagacggct ttctccctct | 1260 |
| tgttgacgtg ccccagccgt gataatgacc agcttggagt ttgcagttac actatagtct | 1320 |
| ttcccagaga caatctttgg tgttctaagg aaaaggctgc catgttggag atccatcatc | 1380 |
| tctcccttca atttgtcttc gatgacatca acaagagcaa gttcatctgc caagtccttc | 1440 |
| attaagatac tgatggcaca ggccatgcca acagcaccaa ccccaacaac tgtaatctta | 1500 |
| ttctggggag tctgttcttc ctttagaaga ttatgaatca gctgatcctt gagagttgcc | 1560 |
| atattggact tggaaccaaa aggaatctta gcgtggaaaa ggaatatcga cgtttgggtg | 1620 |
| taagtatagc ctcctgaggg ctcacccatc gcggtttatt aaccccaagt ggggctggcc | 1680 |
| tttcctcaga caagatcact ttgagccact cctgctccta cagcaaggac acagccaggc | 1740 |
| ttcaagtaaa aaccagaggt atgtgcagaa aagccactaa ctgccacaaa gctcgagccc | 1800 |
| aaggcactga agcgggcggt gatccgcgcg catgcgcgct ttgtggttct cctcgctcgg | 1860 |
| aaaggtgggc ggaaatcaga ctaatagctg cggcttcaga ccgccctgct tttacgccc | 1919 |
| <210> 19 | |
| <211> 1918 | |
| <212> DNA | |
| <213> Macaca fascicularis | |
| <400> 19 | |
| agtgccttgg gctcgagctt tgtggcagtt agtggctttt ctgcacatac ctctggtttt | 60 |
| tacttgaagc ctggctgtgt ccttgctgta ggagcaggag tggctcaaag tgatcttgtc | 120 |
| tgaggaaagg ccagccccac ttggggttaa taaaccgcga tgggtgagcc ctcaggaggc | 180 |
| tatacttaca cccaaacgtc gatattcctt ttccacgcta agattccttt tggttccaag | 240 |
| tccaatatgg caactctcaa ggatcagctg attcataatc ttctaaagga agaacagact | 300 |
| ccccagaata agattacagt tgttggggtt ggtgctgttg gcatggcctg tgccatcagt | 360 |
| atcttaatga aggacttggc agatgaactt gctcttgttg atgtcatcga agacaaattg | 420 |
| aagggagaga tgatggatct ccaacatggc agccttttcc ttagaacacc aaagattgtc | 480 |
| tctgggaaag actatagtgt aactgcaaac tccaagctgg tcattatcac ggctggggca | 540 |
| cgtcaacaag agggagaaag ccgtcttaat ttggtccagc gtaacgtgaa catctttaaa | 600 |
| ttcatcgttc ctaatgttgt aaaatacagc ccgaactgca agttgcttat tgtttcaaat | 660 |
| ccagtggata tcttgaccta cgtggcttgg aagataagtg gttttcccaa aaaccgtgtt | 720 |
| attggaagtg gttgcaatct ggattcagcc agattccgtt acctgatggg ggaaagactg | 780 |
| ggagttcacc cattaagctg tcatgggtgg gtccttgggg aacatggaga ttccagtgtg | 840 |
| cctgtatgga gtggaatgaa tgttgctggt gtctccctga agactctgca cccagattta | 900 |
| gggactgata aagataagga acagtggaaa gaggttcaca agcaggtggt tgagagtgct | 960 |
| tatgaggtga tcaaactcaa aggctacaca tcctgggcca ttggactctc tgtagcagat | 1020 |
| ttggcagaga gtataatgaa gaatcttagg cgagtgcacc cagtttccac catgattaag | 1080 |
| ggtctctatg gaataaagga tgatgtcttc ctcagtgttc cttgcatttt gggacagaat | 1140 |
| ggaatctcag accttgtgaa ggtgactctg actcctgagg aagaggcccg tttgaagaag | 1200 |
| agtgcagata cactttgggg gatccaaaaa gagctgcaat tttaaagtct tctgatgtca | 1260 |
| tagcatttca ctgtctaggc tacaacagga ttctagttgg aggttgtgca tgttgtcctt | 1320 |
| tttatctgat ctgtgattaa aacagtaata ttttaagatg gactgggaaa agcattaact | 1380 |
| cctgaagtta gaaataggaa tggtttgtga aatccacagc tatatcctga tgctagatgg | 1440 |
| tattaatctt gtgtagtcct aaactggtta gtgtgaaata gttctgacgc accactgcca | 1500 |
| attctgtaca tgctgcattt gccccttgag ccaggtggat gtttactgtg tgttttataa | 1560 |
| tttcctggct ccttcactga acatgcctag tccaacattt tttcccagtc agtcacatcc | 1620 |
| tgggatccag tgtataaatc caatatcgta tgtcttgtgc ataattgttc caaaggagct | 1680 |
| tattttgtga actatatata tcagtagtgt acattaccac ataacataaa aagatctaca | 1740 |
| tataaacaat acaaccaact atccaagtgt tataccaact aaaaacccca ataaaccttg | 1800 |
| aacagtgaaa aaaaaaaaaa aaaaaaaatt aaaaaaaaat aaaaaaaaaa aaaaaaaaaa | 1860 |
| aaaaaaaaaa aaaaaaaaaa aaaaaaaaaa aaaaaaaaaa aaaaaaaaaa aaaaaaaa | 1918 |
| <210> 20 | |
| <211> 1918 | |
| <212> DNA | |
| <213> Macaca fascicularis | |
| <400> 20 | |
| tttttttttt tttttttttt tttttttttt tttttttttt tttttttttt tttttttttt | 60 |
| tttttttttt ttttttttat ttttttttaa tttttttttt tttttttttt tcactgttca | 120 |
| aggtttattg gggtttttag ttggtataac acttggatag ttggttgtat tgtttatatg | 180 |
| tagatctttt tatgttatgt ggtaatgtac actactgata tatatagttc acaaaataag | 240 |
| ctcctttgga acaattatgc acaagacata cgatattgga tttatacact ggatcccagg | 300 |
| atgtgactga ctgggaaaaa atgttggact aggcatgttc agtgaaggag ccaggaaatt | 360 |
| ataaaacaca cagtaaacat ccacctggct caaggggcaa atgcagcatg tacagaattg | 420 |
| gcagtggtgc gtcagaacta tttcacacta accagtttag gactacacaa gattaatacc | 480 |
| atctagcatc aggatatagc tgtggatttc acaaaccatt cctatttcta acttcaggag | 540 |
| ttaatgcttt tcccagtcca tcttaaaata ttactgtttt aatcacagat cagataaaaa | 600 |
| ggacaacatg cacaacctcc aactagaatc ctgttgtagc ctagacagtg aaatgctatg | 660 |
| acatcagaag actttaaaat tgcagctctt tttggatccc ccaaagtgta tctgcactct | 720 |
| tcttcaaacg ggcctcttcc tcaggagtca gagtcacctt cacaaggtct gagattccat | 780 |
| tctgtcccaa aatgcaagga acactgagga agacatcatc ctttattcca tagagaccct | 840 |
| taatcatggt ggaaactggg tgcactcgcc taagattctt cattatactc tctgccaaat | 900 |
| ctgctacaga gagtccaatg gcccaggatg tgtagccttt gagtttgatc acctcataag | 960 |
| cactctcaac cacctgcttg tgaacctctt tccactgttc cttatcttta tcagtcccta | 1020 |
| aatctgggtg cagagtcttc agggagacac cagcaacatt cattccactc catacaggca | 1080 |
| cactggaatc tccatgttcc ccaaggaccc acccatgaca gcttaatggg tgaactccca | 1140 |
| gtctttcccc catcaggtaa cggaatctgg ctgaatccag attgcaacca cttccaataa | 1200 |
| cacggttttt gggaaaacca cttatcttcc aagccacgta ggtcaagata tccactggat | 1260 |
| ttgaaacaat aagcaacttg cagttcgggc tgtattttac aacattagga acgatgaatt | 1320 |
| taaagatgtt cacgttacgc tggaccaaat taagacggct ttctccctct tgttgacgtg | 1380 |
| ccccagccgt gataatgacc agcttggagt ttgcagttac actatagtct ttcccagaga | 1440 |
| caatctttgg tgttctaagg aaaaggctgc catgttggag atccatcatc tctcccttca | 1500 |
| atttgtcttc gatgacatca acaagagcaa gttcatctgc caagtccttc attaagatac | 1560 |
| tgatggcaca ggccatgcca acagcaccaa ccccaacaac tgtaatctta ttctggggag | 1620 |
| tctgttcttc ctttagaaga ttatgaatca gctgatcctt gagagttgcc atattggact | 1680 |
| tggaaccaaa aggaatctta gcgtggaaaa ggaatatcga cgtttgggtg taagtatagc | 1740 |
| ctcctgaggg ctcacccatc gcggtttatt aaccccaagt ggggctggcc tttcctcaga | 1800 |
| caagatcact ttgagccact cctgctccta cagcaaggac acagccaggc ttcaagtaaa | 1860 |
| aaccagaggt atgtgcagaa aagccactaa ctgccacaaa gctcgagccc aaggcact | 1918 |
| <210> 21 | |
| <211> 1746 | |
| <212> DNA | |
| <213> Homo sapiens | |
| <400> 21 | |
| ctgggatagc aataacctgt gaaaatgctc ccccggctaa tttgtatcaa tgattatgaa | 60 |
| caacatgcta aatcagtact tccaaagtct atatatgact attacaggtc tggggcaaat | 120 |
| gatgaagaaa ctttggctga taatattgca gcattttcca gatggaagct gtatccaagg | 180 |
| atgctccgga atgttgctga aacagatctg tcgacttctg ttttaggaca gagggtcagc | 240 |
| atgccaatat gtgtgggggc tacggccatg cagcgcatgg ctcatgtgga cggcgagctt | 300 |
| gccactgtga gagcctgtca gtccctggga acgggcatga tgttgagttc ctgggccacc | 360 |
| tcctcaattg aagaagtggc ggaagctggt cctgaggcac ttcgttggct gcaactgtat | 420 |
| atctacaagg accgagaagt caccaagaag ctagtgcggc aggcagagaa gatgggctac | 480 |
| aaggccatat ttgtgacagt ggacacacct tacctgggca accgtctgga tgatgtgcgt | 540 |
| aacagattca aactgccgcc acaactcagg atgaaaaatt ttgaaaccag tactttatca | 600 |
| ttttctcctg aggaaaattt tggagacgac agtggacttg ctgcatatgt ggctaaagca | 660 |
| atagacccat ctatcagctg ggaagatatc aaatggctga gaagactgac atcattgcca | 720 |
| attgttgcaa agggcatttt gagaggtgat gatgccaggg aggctgttaa acatggcttg | 780 |
| aatgggatct tggtgtcgaa tcatggggct cgacaactcg atggggtgcc agccactatt | 840 |
| gatgttctgc cagaaattgt ggaggctgtg gaagggaagg tggaagtctt cctggacggg | 900 |
| ggtgtgcgga aaggcactga tgttctgaaa gctctggctc ttggcgccaa ggctgtgttt | 960 |
| gtggggagac caatcgtttg gggcttagct ttccaggggg agaaaggtgt tcaagatgtc | 1020 |
| ctcgagatac taaaggaaga attccggttg gccatggctc tgagtgggtg ccagaatgtg | 1080 |
| aaagtcatcg acaagacatt ggtgaggaaa aatcctttgg ccgtttccaa gatctgacag | 1140 |
| tgcacaatat tttcccatct gtattatttt ttttcagcat gtattacttg acaaagagac | 1200 |
| actgtgcaga gggtgaccac agtctgtaat tccccacttc aatacaaagg gtgtcgttct | 1260 |
| tttccaacaa aatagcaatc ccttttattt cattgctttt gacttttcaa tgggtgtcct | 1320 |
| aggaaccttt tagaaagaaa tggactttca tcctggaaat atattaactg ttaaaaagaa | 1380 |
| aacattgaaa atgtgtttag acaacgtcat cccctggcag gctaaagtgc tgtatccttt | 1440 |
| agtaaaattg gaggtagcaa acactaaggt gaaaagataa tgatctcatt gtttattaac | 1500 |
| ctgtattctg tttacatgtc tttaaaacag tggttcttaa attgtaagct caggttcaaa | 1560 |
| gtgttggtaa tgcctgattc acaactttga gaaggtagca ctggagagaa ttggaatggg | 1620 |
| tggcggtaat tggtgatact tctttgaatg tagatttcca atcacatctt tagtgtctga | 1680 |
| atatatccaa atgttttagg atgtatgtta cttcttagag agaaataaag catttttggg | 1740 |
| aagaat | 1746 |
| <210> 22 | |
| <211> 1746 | |
| <212> DNA | |
| <213> Homo sapiens | |
| <400> 22 | |
| attcttccca aaaatgcttt atttctctct aagaagtaac atacatccta aaacatttgg | 60 |
| atatattcag acactaaaga tgtgattgga aatctacatt caaagaagta tcaccaatta | 120 |
| ccgccaccca ttccaattct ctccagtgct accttctcaa agttgtgaat caggcattac | 180 |
| caacactttg aacctgagct tacaatttaa gaaccactgt tttaaagaca tgtaaacaga | 240 |
| atacaggtta ataaacaatg agatcattat cttttcacct tagtgtttgc tacctccaat | 300 |
| tttactaaag gatacagcac tttagcctgc caggggatga cgttgtctaa acacattttc | 360 |
| aatgttttct ttttaacagt taatatattt ccaggatgaa agtccatttc tttctaaaag | 420 |
| gttcctagga cacccattga aaagtcaaaa gcaatgaaat aaaagggatt gctattttgt | 480 |
| tggaaaagaa cgacaccctt tgtattgaag tggggaatta cagactgtgg tcaccctctg | 540 |
| cacagtgtct ctttgtcaag taatacatgc tgaaaaaaaa taatacagat gggaaaatat | 600 |
| tgtgcactgt cagatcttgg aaacggccaa aggatttttc ctcaccaatg tcttgtcgat | 660 |
| gactttcaca ttctggcacc cactcagagc catggccaac cggaattctt cctttagtat | 720 |
| ctcgaggaca tcttgaacac ctttctcccc ctggaaagct aagccccaaa cgattggtct | 780 |
| ccccacaaac acagccttgg cgccaagagc cagagctttc agaacatcag tgcctttccg | 840 |
| cacacccccg tccaggaaga cttccacctt cccttccaca gcctccacaa tttctggcag | 900 |
| aacatcaata gtggctggca ccccatcgag ttgtcgagcc ccatgattcg acaccaagat | 960 |
| cccattcaag ccatgtttaa cagcctccct ggcatcatca cctctcaaaa tgccctttgc | 1020 |
| aacaattggc aatgatgtca gtcttctcag ccatttgata tcttcccagc tgatagatgg | 1080 |
| gtctattgct ttagccacat atgcagcaag tccactgtcg tctccaaaat tttcctcagg | 1140 |
| agaaaatgat aaagtactgg tttcaaaatt tttcatcctg agttgtggcg gcagtttgaa | 1200 |
| tctgttacgc acatcatcca gacggttgcc caggtaaggt gtgtccactg tcacaaatat | 1260 |
| ggccttgtag cccatcttct ctgcctgccg cactagcttc ttggtgactt ctcggtcctt | 1320 |
| gtagatatac agttgcagcc aacgaagtgc ctcaggacca gcttccgcca cttcttcaat | 1380 |
| tgaggaggtg gcccaggaac tcaacatcat gcccgttccc agggactgac aggctctcac | 1440 |
| agtggcaagc tcgccgtcca catgagccat gcgctgcatg gccgtagccc ccacacatat | 1500 |
| tggcatgctg accctctgtc ctaaaacaga agtcgacaga tctgtttcag caacattccg | 1560 |
| gagcatcctt ggatacagct tccatctgga aaatgctgca atattatcag ccaaagtttc | 1620 |
| ttcatcattt gccccagacc tgtaatagtc atatatagac tttggaagta ctgatttagc | 1680 |
| atgttgttca taatcattga tacaaattag ccgggggagc attttcacag gttattgcta | 1740 |
| tcccag | 1746 |
| <210> 23 | |
| <211> 1801 | |
| <212> DNA | |
| <213> Macaca fascicularis | |
| <400> 23 | |
| gtgaggatgt agaaagcaat acattaaaaa aaacccaaaa aactccatct gggataacaa | 60 |
| taacctgtga aaatgctccc ccggctaatt tgtatcaatg attatgaaca acatgctaaa | 120 |
| tcagtacttc caaagtctat atatgactat tataggtctg gagcaaatga tgaagaaact | 180 |
| ttggccgata atgttgcagc attttccaga tggaagctgt atccaaggat gctccggaat | 240 |
| gttgctgaaa cagatctgtc gacttctgtt ttaggacaga gggtcagcat gccaatatgc | 300 |
| gtgggggcca cggccatgca gcgcatggct catgtggatg gcgagcttgc cactgtgcga | 360 |
| gcctgtcagt ccctgggaac gggcatgatg ttgagttcct gggccacctc ctcaattgaa | 420 |
| gaagtggcag aagctggtcc tgaggcactt cgttggttgt aactgtatat ctataaggac | 480 |
| cgagaagtca ccaagaagct ggtgcagcag gcagagaaga cgggctacaa ggccatattt | 540 |
| gtgacagtgg acacacctta cctgggcaac cgtcttgatg atgtacgtaa cagattcaag | 600 |
| ctgccaccac aactcaggat gaaaaatttt gaaaccagta ctttatcatt ttctcctgag | 660 |
| gaaaattttg gagatgacag tggacttgct gcatatgtgg ctaaagcgat agacccatct | 720 |
| atcagctggg aagatatcaa atggctgaga agactgacgt cattgccaat tgttgcaaag | 780 |
| ggcattttga gaggtgatga tgccagggag gctgttaaac atggcttgaa tgggatcttg | 840 |
| gtgtcgaatc atggggctcg acaactcgat ggggtgccag ccactattga tgttctgcca | 900 |
| gaaattgtgg aggccgtgga agggaaggtg gaagtcttcc tggacggggg tgtgcggaaa | 960 |
| ggcactgatg ttctgaaggc tctggctctt ggcgccaagg ctgtgtttgt ggggagacca | 1020 |
| atcatttggg gcttagcttt ccagggggag aaaggtgttc aagatgtcct tgagatacta | 1080 |
| aaggaagaat tccggttggc catggctttg agtgggtgcc agaatgtgaa agtcatcgac | 1140 |
| aagacattgg tgaggaaaaa tcctttggcc gtttccaaga tctgacagtg cacaatattt | 1200 |
| tcccatctgt attatttttt tttcagcatg tattacttga caaagagaca ctgtgcagag | 1260 |
| ggtgaccaca gtctgtaatt ccccacttca atacaaagga tgtcgttctt ttccaacaaa | 1320 |
| atagcaatcc cttttagttc attgcttttg acttttcaat gggtgtccta ggaacctttt | 1380 |
| agaaagaaat ggactttcat cctggaaata tattaactgt taaaaagaaa acattgaaaa | 1440 |
| tgtgtttaga caacgtcatc ctctggcagg ctaaagtact gtatccttta gtaaaattgg | 1500 |
| aggtagcaaa cactaaggtg aaaagataat gatctcattg tttattaacc tgtattctgt | 1560 |
| ttagatgtct ttaaaacagt ggttcttaaa ttgtaagctc aggttcaaag cattggaaat | 1620 |
| gcctgattga caacattgag aaggtagccc tggatagaat tggaatggat ggcagtaact | 1680 |
| ggtgatactt ctttgaatgc agctttccaa tcacatcttt agtgtctgaa tatatccaaa | 1740 |
| tgttttagga tatatgttac ttcttaatca gagagaaata aagcattttt tgggaaggat | 1800 |
| a | 1801 |
| <210> 24 | |
| <211> 1801 | |
| <212> DNA | |
| <213> Macaca fascicularis | |
| <400> 24 | |
| tatccttccc aaaaaatgct ttatttctct ctgattaaga agtaacatat atcctaaaac | 60 |
| atttggatat attcagacac taaagatgtg attggaaagc tgcattcaaa gaagtatcac | 120 |
| cagttactgc catccattcc aattctatcc agggctacct tctcaatgtt gtcaatcagg | 180 |
| catttccaat gctttgaacc tgagcttaca atttaagaac cactgtttta aagacatcta | 240 |
| aacagaatac aggttaataa acaatgagat cattatcttt tcaccttagt gtttgctacc | 300 |
| tccaatttta ctaaaggata cagtacttta gcctgccaga ggatgacgtt gtctaaacac | 360 |
| attttcaatg ttttcttttt aacagttaat atatttccag gatgaaagtc catttctttc | 420 |
| taaaaggttc ctaggacacc cattgaaaag tcaaaagcaa tgaactaaaa gggattgcta | 480 |
| ttttgttgga aaagaacgac atcctttgta ttgaagtggg gaattacaga ctgtggtcac | 540 |
| cctctgcaca gtgtctcttt gtcaagtaat acatgctgaa aaaaaaataa tacagatggg | 600 |
| aaaatattgt gcactgtcag atcttggaaa cggccaaagg atttttcctc accaatgtct | 660 |
| tgtcgatgac tttcacattc tggcacccac tcaaagccat ggccaaccgg aattcttcct | 720 |
| ttagtatctc aaggacatct tgaacacctt tctccccctg gaaagctaag ccccaaatga | 780 |
| ttggtctccc cacaaacaca gccttggcgc caagagccag agctttcaga acatcagtgc | 840 |
| ctttccgcac acccccgtcc aggaagactt ccaccttccc ttccacggcc tccacaattt | 900 |
| ctggcagaac atcaatagtg gctggcaccc catcgagttg tcgagcccca tgattcgaca | 960 |
| ccaagatccc attcaagcca tgtttaacag cctccctggc atcatcacct ctcaaaatgc | 1020 |
| cctttgcaac aattggcaat gacgtcagtc ttctcagcca tttgatatct tcccagctga | 1080 |
| tagatgggtc tatcgcttta gccacatatg cagcaagtcc actgtcatct ccaaaatttt | 1140 |
| cctcaggaga aaatgataaa gtactggttt caaaattttt catcctgagt tgtggtggca | 1200 |
| gcttgaatct gttacgtaca tcatcaagac ggttgcccag gtaaggtgtg tccactgtca | 1260 |
| caaatatggc cttgtagccc gtcttctctg cctgctgcac cagcttcttg gtgacttctc | 1320 |
| ggtccttata gatatacagt tacaaccaac gaagtgcctc aggaccagct tctgccactt | 1380 |
| cttcaattga ggaggtggcc caggaactca acatcatgcc cgttcccagg gactgacagg | 1440 |
| ctcgcacagt ggcaagctcg ccatccacat gagccatgcg ctgcatggcc gtggccccca | 1500 |
| cgcatattgg catgctgacc ctctgtccta aaacagaagt cgacagatct gtttcagcaa | 1560 |
| cattccggag catccttgga tacagcttcc atctggaaaa tgctgcaaca ttatcggcca | 1620 |
| aagtttcttc atcatttgct ccagacctat aatagtcata tatagacttt ggaagtactg | 1680 |
| atttagcatg ttgttcataa tcattgatac aaattagccg ggggagcatt ttcacaggtt | 1740 |
| attgttatcc cagatggagt tttttgggtt ttttttaatg tattgctttc tacatcctca | 1800 |
| c | 1801 |
| <210> 25 | |
| <211> 2029 | |
| <212> DNA | |
| <213> Mus musculus | |
| <400> 25 | |
| ggttgcccta ccctgccaca atgttgcctc gactggtctg catcagtgat tatgaacagc | 60 |
| atgtccgatc agtgcttcag aagtcagtgt atgactatta caggtctggg gcaaatgatc | 120 |
| aggagacgtt agctgataac atccaagcat tttctagatg gaagctctat ccacggatgc | 180 |
| ttcgcaacgt tgctgatatc gatctgtcaa cttctgtttt aggacagaga gtcagcatgc | 240 |
| caatatgtgt tggggctact gccatgcagt gcatggctca cgtggacggg gagctggcca | 300 |
| ctgtgcgagc ctgtcagacc atgggaactg gcatgatgct gagttcttgg gctacctcct | 360 |
| caatagaaga agtggcagaa gctggcccag aggcacttcg ctggatgcaa ctgtacatct | 420 |
| acaaagaccg tgagatcagc agacagatag tgaagcgagc tgagaagcag ggttacaagg | 480 |
| ccatatttgt gactgtggac accccttacc tgggcaaccg cattgatgac gtgcggaaca | 540 |
| ggttcaagct gccaccacaa ctcaggatga aaaactttga aaccaatgat ttggcatttt | 600 |
| ctcctaaggg aaattttgga gacaacagtg gacttgctga atatgtggca caagctatag | 660 |
| acccatctct cagctgggat gatattacat ggctcagacg attgacatca ctgcctattg | 720 |
| ttgtaaaggg cattttgaga ggtgatgatg ccaaggaagc tgttaaacat ggtgtggatg | 780 |
| ggatcttggt gtcgaatcat ggggcgcgac aactggatgg ggtgccagct actattgatg | 840 |
| tcctgccaga gattgttgag gctgtggaag ggaaggtaga agtcttcctg gatgggggag | 900 |
| taaggaaagg tactgatgtt ctcaaagctc tggccctagg agccaaggcc gtttttgtgg | 960 |
| gaagacccat catctggggc ttggctttcc agggggagaa aggtgttcaa gatgtcctcg | 1020 |
| agatattgaa ggaagaattc cgactggcca tggctctgag tgggtgccag aatgtgaaag | 1080 |
| tcatcgacaa gacattggtg aggaaaaatc ctttggctgt ttccaagatc tgacagtgca | 1140 |
| caatattttc ccatctgtat tatttttttt ccagcgtgga ttacttgaca aagagacact | 1200 |
| gtgcagaggg tgaccacaga ctgtaactcc ccacttctat acaaagggtg tcgttctttt | 1260 |
| ccaacaaaat agccacccct tttccttcat tgcttttgac ttttcaatgg gtgtcctagg | 1320 |
| aaccttctag aaagaaatgg acttgcatcc tggaaatata ttaactgtta aaaagaaaac | 1380 |
| attgaaaatg tgtttgggca acgtcatccc ctggcaggct aaagtgctgg ggaacaaaag | 1440 |
| atatcctctg gtgagattgc aggtagcatg ctgaagtgaa agatactgac ctcactgttc | 1500 |
| attaacctgt cttctgttta gatttcctta agacagtggc tcttacagtt tgcacttggc | 1560 |
| tttgaaatgc tggaaatgcc cagagaaaca tgaggtttgg atttgccatg ttgagaaaat | 1620 |
| agcaccaggt agaattgaaa tggatggtgg taatttgtga ttttttttct agaaactttt | 1680 |
| cattttttaa caccctattt ttttgaaggt agatttttag ctatatatca cacgtctgaa | 1740 |
| tatgtctgga tgttttgtgg cactcattgc atttgaaagg gatgtgtcta gtccagttgg | 1800 |
| gaccacatgg agctattttt acttttgaac tttgtctcct cattctcatt ttaaaataag | 1860 |
| tgttgacttc ctaattcctc ttgaatcttt tttgattttc tcacttttcc tcatttatag | 1920 |
| tcacattcag tgtaaagtac atattttgtg gggtccgtga tgaataaaga tttgaaattc | 1980 |
| ttgttcagaa ggaaggcaaa aaaaaaaaaa agtctttcct tttatcaca | 2029 |
| <210> 26 | |
| <211> 2029 | |
| <212> DNA | |
| <213> Mus musculus | |
| <400> 26 | |
| tgtgataaaa ggaaagactt tttttttttt ttgccttcct tctgaacaag aatttcaaat | 60 |
| ctttattcat cacggacccc acaaaatatg tactttacac tgaatgtgac tataaatgag | 120 |
| gaaaagtgag aaaatcaaaa aagattcaag aggaattagg aagtcaacac ttattttaaa | 180 |
| atgagaatga ggagacaaag ttcaaaagta aaaatagctc catgtggtcc caactggact | 240 |
| agacacatcc ctttcaaatg caatgagtgc cacaaaacat ccagacatat tcagacgtgt | 300 |
| gatatatagc taaaaatcta ccttcaaaaa aatagggtgt taaaaaatga aaagtttcta | 360 |
| gaaaaaaaat cacaaattac caccatccat ttcaattcta cctggtgcta ttttctcaac | 420 |
| atggcaaatc caaacctcat gtttctctgg gcatttccag catttcaaag ccaagtgcaa | 480 |
| actgtaagag ccactgtctt aaggaaatct aaacagaaga caggttaatg aacagtgagg | 540 |
| tcagtatctt tcacttcagc atgctacctg caatctcacc agaggatatc ttttgttccc | 600 |
| cagcacttta gcctgccagg ggatgacgtt gcccaaacac attttcaatg ttttcttttt | 660 |
| aacagttaat atatttccag gatgcaagtc catttctttc tagaaggttc ctaggacacc | 720 |
| cattgaaaag tcaaaagcaa tgaaggaaaa ggggtggcta ttttgttgga aaagaacgac | 780 |
| accctttgta tagaagtggg gagttacagt ctgtggtcac cctctgcaca gtgtctcttt | 840 |
| gtcaagtaat ccacgctgga aaaaaaataa tacagatggg aaaatattgt gcactgtcag | 900 |
| atcttggaaa cagccaaagg atttttcctc accaatgtct tgtcgatgac tttcacattc | 960 |
| tggcacccac tcagagccat ggccagtcgg aattcttcct tcaatatctc gaggacatct | 1020 |
| tgaacacctt tctccccctg gaaagccaag ccccagatga tgggtcttcc cacaaaaacg | 1080 |
| gccttggctc ctagggccag agctttgaga acatcagtac ctttccttac tcccccatcc | 1140 |
| aggaagactt ctaccttccc ttccacagcc tcaacaatct ctggcaggac atcaatagta | 1200 |
| gctggcaccc catccagttg tcgcgcccca tgattcgaca ccaagatccc atccacacca | 1260 |
| tgtttaacag cttccttggc atcatcacct ctcaaaatgc cctttacaac aataggcagt | 1320 |
| gatgtcaatc gtctgagcca tgtaatatca tcccagctga gagatgggtc tatagcttgt | 1380 |
| gccacatatt cagcaagtcc actgttgtct ccaaaatttc ccttaggaga aaatgccaaa | 1440 |
| tcattggttt caaagttttt catcctgagt tgtggtggca gcttgaacct gttccgcacg | 1500 |
| tcatcaatgc ggttgcccag gtaaggggtg tccacagtca caaatatggc cttgtaaccc | 1560 |
| tgcttctcag ctcgcttcac tatctgtctg ctgatctcac ggtctttgta gatgtacagt | 1620 |
| tgcatccagc gaagtgcctc tgggccagct tctgccactt cttctattga ggaggtagcc | 1680 |
| caagaactca gcatcatgcc agttcccatg gtctgacagg ctcgcacagt ggccagctcc | 1740 |
| ccgtccacgt gagccatgca ctgcatggca gtagccccaa cacatattgg catgctgact | 1800 |
| ctctgtccta aaacagaagt tgacagatcg atatcagcaa cgttgcgaag catccgtgga | 1860 |
| tagagcttcc atctagaaaa tgcttggatg ttatcagcta acgtctcctg atcatttgcc | 1920 |
| ccagacctgt aatagtcata cactgacttc tgaagcactg atcggacatg ctgttcataa | 1980 |
| tcactgatgc agaccagtcg aggcaacatt gtggcagggt agggcaacc | 2029 |
| <210> 27 | |
| <211> 1527 | |
| <212> DNA | |
| <213> Rattus norvegicus | |
| <400> 27 | |
| catcccctga cacaatgttg cctcggctgg tctgcatcag tgactatgaa cagcatgccc | 60 |
| ggacagtgct tcagaagtca gtatatgatt attacaagtc tggggcaaat gaccaggaga | 120 |
| ctttggctga taatatcaga gcattttcta ggtggaagct ctatccacgg atgctgcgca | 180 |
| acgttgctga tatcgacctg tcgacttctg ttttaggaca gagagtgagc atgccaatat | 240 |
| gcgttggggc tacggctatg cagtgcatgg ctcatgtgga tggggagctg gccactgttc | 300 |
| gagcctgtca gaccatggga actggcatga tgttgagttc ctgggccact tcctcaatag | 360 |
| aagaggtggc agaggctggc ccggaggcac ttcgctggat gcaactctac atctacaaag | 420 |
| atcgtgaggt cagcagtcag ctagtgaaga gggctgagca gatgggttac aaggccatat | 480 |
| ttgtgactgt ggacacccct tacctgggaa atcgcttcga tgatgtgcgg aacaggttca | 540 |
| agctaccacc acagctcagg atgaaaaact ttgaaaccaa cgatttggca ttttctccta | 600 |
| aggggaattt tggagacaac agtggccttg ctgaatatgt ggcacaagcc atagacccat | 660 |
| ctctcagctg ggatgatatt aaatggctca gacggttgac ctcactgccc attgttgtaa | 720 |
| agggaatttt gagaggtgat gatgcccagg aagctgttaa acatggtgtg gatgggatct | 780 |
| tagtgtcgaa tcatggggca cgacaactgg atggggtgcc agctactatt gatgccctgc | 840 |
| cagagatcgt tgaggctgtg gaagggaagg tagaagtctt cctggatggg ggagtcagga | 900 |
| aaggcaccga tgttctcaaa gctctggccc tgggagccag agctgttttt gtggggagac | 960 |
| ccatcatctg gggcttggct ttccaggggg agaaaggtgt tcaagatgtc ctcgagatac | 1020 |
| tgaaggaaga gttccggctg gccatggctc tgagtgggtg ccagaatgtg aaagtcatcg | 1080 |
| acaagacatt ggtgaggaaa aatcctttgg ctgtttccaa gatctgacag tgcacaatat | 1140 |
| tttcccatct gtattatttt tttccagcat ggattacttg acaaagagac actgtgcaga | 1200 |
| gggtgaccac agactgtaac tccccacttc aacacaaagg gtgtcgttct tttccaacaa | 1260 |
| aatagccacc ccttctcctt cattgctttt gacttttcaa tgggtgtcct aggaaccttc | 1320 |
| tagaaagaaa tggacttgca tcctggaaat atattaactg ttaaaaagaa aacattgaaa | 1380 |
| atgtgtttgg gcaacgtcat cccctggcag gctaaagtga gggggaacaa aagatatcct | 1440 |
| ctggtgagat tggaggtagc atgccgaagt aaaagacact gacctcactg tttattaaaa | 1500 |
| aaaaaaaaaa aaaaaaaaaa aaaaaaa | 1527 |
| <210> 28 | |
| <211> 1527 | |
| <212> DNA | |
| <213> Rattus norvegicus | |
| <400> 28 | |
| tttttttttt tttttttttt tttttttttt taataaacag tgaggtcagt gtcttttact | 60 |
| tcggcatgct acctccaatc tcaccagagg atatcttttg ttccccctca ctttagcctg | 120 |
| ccaggggatg acgttgccca aacacatttt caatgttttc tttttaacag ttaatatatt | 180 |
| tccaggatgc aagtccattt ctttctagaa ggttcctagg acacccattg aaaagtcaaa | 240 |
| agcaatgaag gagaaggggt ggctattttg ttggaaaaga acgacaccct ttgtgttgaa | 300 |
| gtggggagtt acagtctgtg gtcaccctct gcacagtgtc tctttgtcaa gtaatccatg | 360 |
| ctggaaaaaa ataatacaga tgggaaaata ttgtgcactg tcagatcttg gaaacagcca | 420 |
| aaggattttt cctcaccaat gtcttgtcga tgactttcac attctggcac ccactcagag | 480 |
| ccatggccag ccggaactct tccttcagta tctcgaggac atcttgaaca cctttctccc | 540 |
| cctggaaagc caagccccag atgatgggtc tccccacaaa aacagctctg gctcccaggg | 600 |
| ccagagcttt gagaacatcg gtgcctttcc tgactccccc atccaggaag acttctacct | 660 |
| tcccttccac agcctcaacg atctctggca gggcatcaat agtagctggc accccatcca | 720 |
| gttgtcgtgc cccatgattc gacactaaga tcccatccac accatgttta acagcttcct | 780 |
| gggcatcatc acctctcaaa attcccttta caacaatggg cagtgaggtc aaccgtctga | 840 |
| gccatttaat atcatcccag ctgagagatg ggtctatggc ttgtgccaca tattcagcaa | 900 |
| ggccactgtt gtctccaaaa ttccccttag gagaaaatgc caaatcgttg gtttcaaagt | 960 |
| ttttcatcct gagctgtggt ggtagcttga acctgttccg cacatcatcg aagcgatttc | 1020 |
| ccaggtaagg ggtgtccaca gtcacaaata tggccttgta acccatctgc tcagccctct | 1080 |
| tcactagctg actgctgacc tcacgatctt tgtagatgta gagttgcatc cagcgaagtg | 1140 |
| cctccgggcc agcctctgcc acctcttcta ttgaggaagt ggcccaggaa ctcaacatca | 1200 |
| tgccagttcc catggtctga caggctcgaa cagtggccag ctccccatcc acatgagcca | 1260 |
| tgcactgcat agccgtagcc ccaacgcata ttggcatgct cactctctgt cctaaaacag | 1320 |
| aagtcgacag gtcgatatca gcaacgttgc gcagcatccg tggatagagc ttccacctag | 1380 |
| aaaatgctct gatattatca gccaaagtct cctggtcatt tgccccagac ttgtaataat | 1440 |
| catatactga cttctgaagc actgtccggg catgctgttc atagtcactg atgcagacca | 1500 |
| gccgaggcaa cattgtgtca ggggatg | 1527 |
| <210> 29 | |
| <211> 1611 | |
| <212> DNA | |
| <213> Homo sapiens | |
| <400> 29 | |
| cggaagccca tccaccaatc ctcacctctc acctctgtgt ccgccctgct gggaaatatt | 60 |
| ccaggctttg gccaaggcca gtgcagcccc aggttcccga gcggcaggtt gggtgcggac | 120 |
| catggcctct cacaagctgc tggtgacccc ccccaaggcc ctgctcaagc ccctctccat | 180 |
| ccccaaccag ctcctgctgg ggcctggtcc ttccaacctg cctcctcgca tcatggcagc | 240 |
| cggggggctg cagatgatcg ggtccatgag caaggatatg taccagatca tggacgagat | 300 |
| caaggaaggc atccagtacg tgttccagac caggaaccca ctcacactgg tcatctctgg | 360 |
| ctcgggacac tgtgccctgg aggccgccct ggtcaatgtg ctggagcctg gggactcctt | 420 |
| cctggttggg gccaatggca tttgggggca gcgagccgtg gacatcgggg agcgcatagg | 480 |
| agcccgagtg cacccgatga ccaaggaccc tggaggccac tacacactgc aggaggtgga | 540 |
| ggagggcctg gcccagcaca agccagtgct gctgttctta acccacgggg agtcgtccac | 600 |
| cggcgtgctg cagccccttg atggcttcgg ggaactctgc cacaggtaca agtgcctgct | 660 |
| cctggtggat tcggtggcat ccctgggcgg gacccccctt tacatggacc ggcaaggcat | 720 |
| cgacatcctg tactcgggct cccagaaggc cctgaacgcc cctccaggga cctcgctcat | 780 |
| ctccttcagt gacaaggcca aaaagaagat gtactcccgc aagacgaagc ccttctcctt | 840 |
| ctacctggac atcaagtggc tggccaactt ctggggctgt gacgaccagc ccaggatgta | 900 |
| ccatcacaca atccccgtca tcagcctgta cagcctgaga gagagcctgg ccctcattgc | 960 |
| ggaacagggc ctggagaaca gctggcgcca gcaccgcgag gccgcggcgt atctgcatgg | 1020 |
| gcgcctgcag gcactggggc tgcagctctt cgtgaaggac ccggcgctcc ggcttcccac | 1080 |
| agtcaccact gtggctgtac ccgctggcta tgactggaga gacatcgtca gctacgtcat | 1140 |
| agaccacttc gacattgaga tcatgggtgg ccttgggccc tccacgggga aggtgctgcg | 1200 |
| gatcggcctg ctgggctgca atgccacccg cgagaatgtg gaccgcgtga cggaggccct | 1260 |
| gagggcggcc ctgcagcact gccccaagaa gaagctgtga cctgcccact ggcacacagc | 1320 |
| tggcactggc acacacctgt cccatgccca ccctgaggga tcaggagcaa acagaccctg | 1380 |
| caaggtcctc caggcctggg gacaggaaag ccactgaccc agcccgggag gcagaaccag | 1440 |
| gcagcctccc tggccccagg cagccctttt ccctccagtg gcacctcctg gaaacagtcc | 1500 |
| acttgggcgc aaaacccagt gccttccaaa tgagctgcag tccccaggcc atgagcctcc | 1560 |
| cgggaatgtt taataaaggg cctggccaac tctcctcaaa aaaaaaaaaa a | 1611 |
| <210> 30 | |
| <211> 392 | |
| <212> PRT | |
| <213> Homo sapiens | |
| <400> 30 | |
| Met Ala Ser His Lys Leu Leu Val Thr Pro pro Lys Ala Leu Leu Lys | |
| 1 5 10 15 | |
| Pro Leu Ser Ile Pro Asn Gln Leu Leu Leu Gly Pro Gly Pro Ser Asn | |
| 20 25 30 | |
| Leu Pro Pro Arg Ile Met Ala Ala Gly Gly Leu Gln Met Ile Gly Ser | |
| 35 40 45 | |
| Met Ser Lys Asp Met Tyr Gln Ile MEt Asp Glu Ile Lys Glu Gly Ile | |
| 50 55 60 | |
| Gln Tyr Val Phe Gln Thr Arg Asn Pro Leu Thr Leu Val Ile Ser Gly | |
| 65 70 75 80 | |
| Ser Gly His Cys Ala Leu Glu Ala Ala Leu Val Asn Val Leu Glu Pro | |
| 85 90 95 | |
| Gly Asp Ser Phe Leu Val Gly Ala Asn Gly Ile Trp Gly Gln Arg Ala | |
| 100 105 110 | |
| Val Asp Ile Gly Glu Arg Ile Gly Ala Arg Val His Pro Met Thr Lys | |
| 115 120 125 | |
| Asp Pro Gly Gly His Tyr Thr Leu Gln Glu Val Glu Glu Gly Leu Ala | |
| 130 135 140 | |
| Gln His Lys Pro Val Leu Leu Phe Leu Thr His GLy Gly Ser Ser Thr | |
| 145 150 155 160 | |
| Gly Val Leu Gln Pro Leu Asp Gly Phe Gly Glu Leu Cys His Arg Tyr | |
| 165 170 175 | |
| Lys Cys Leu Leu Leu Val Asp Ser Val Ala Ser Leu Gly Gly Thr Pro | |
| 180 185 190 | |
| Leu Tyr Met Asp Arg Gln Gly Ile Asp Ile Leu Tyr Ser Gly Ser Gln | |
| 195 200 205 | |
| Lys Ala Leu Asn Ala Pro Pro Gly Thr Ser Leu Ile Ser Phe Ser Asp | |
| 210 215 220 | |
| Lys Ala Lys Lys Lys Met Tyr Ser Arg Lys Thr Lys Pro Pge Ser Phe | |
| 225 230 235 240 | |
| Tyr Leu Asp Ile Lys Trp Leu Ala Asn Phe Trp GLy Cys Asp Asp Gln | |
| 245 250 255 | |
| Pro Arg Met Tyr His His Thr Ile Pro Val Ile Ser Leu Tyr Ser Leu | |
| 260 265 270 | |
| Arg Gly Ser Leu Ala Leu Ile Ala Glu Gln Gly Leu Glu Asn Ser Trp | |
| 275 280 285 | |
| Arg Gln His Arg Glu Ala Ala Ala Tyr Leu His Gly Arg Leu Gln Ala | |
| 290 295 300 | |
| Leu Gly Leu Gln Leu Phe Val Lys Asp Pro Ala Leu Arg Leu Pro Thr | |
| 305 310 315 320 | |
| Val Thr Thr Val Ala Val Pro Ala Gly Tyr Asp Trp Arg Asp Ile Val | |
| 325 330 335 | |
| Ser Tyr Val Ile Asp His Phe Asp Ile Glu Ile Met Gly Gly Leu Gly | |
| 340 345 350 | |
| Pro Ser Thr Gly Lys Val Leu Arg Ile Gly Leu Leu Gly Cys Asn Ala | |
| 355 360 365 | |
| Thr Arg Glu Asn Val Asp Arg Val Thr Glu Ala Leu Arg Ala Ala Leu | |
| 370 375 380 | |
| Gln His Cys Pro Lys Lys Lys Leu | |
| 385 390 | |

1. A method for treating a subject suffering from a kidney stone disease, the method comprising
determining the presence or absence of a heterozygous alanine-glyoxylate amino transferase (AGXT) gene variant in a sample obtained from the subject; and
administering to the subject a therapeutically effective amount of a nucleic acid inhibitor of lactate dehydrogenase A (LDHA) and/or a nucleic acid inhibitor of hydroxyacid oxidase (HAO1), if a heterozygous AGXT gene variant is present in the sample obtained from the subject,
thereby treating the subject suffering from a kidney stone formation disease.

2. A method of diagnosing and treating a kidney stone disease in a subject, the method comprising
detecting the presence or absence of a heterozygous alanine-glyoxylate amino transferase (AGXT) gene variant in a sample obtained from the subject;
diagnosing the subject with a kidney stone disease if a heterozygous AGXT gene variant is present in the sample obtained from the subject; and
administering to the subject a therapeutically effective amount of a nucleic acid inhibitor of lactate dehydrogenase A (LDHA) and/or a nucleic acid inhibitor of hydroxyacid oxidase (HAO1),
thereby treating the subject suffering from a kidney stone disease.

3. The method of claim 1, wherein the heterozygous AGXT gene variant is selected from the group consisting of the any one or more of the AGXT gene variants in any one of Tables 16, 18, and 20-23.

4. The method of claim 1, wherein the subject is a human.

5. The method of claim 1, wherein the kidney stone disease is a recurrent kidney stone disease.

6. (canceled)

7. (canceled)

8. The method of claim 1, wherein the nucleic acid inhibitor is a double stranded ribonucleic acid (dsRNA) agent that inhibits the expression of LDHA.

9. The method of claim 8, wherein the dsRNA agent comprises a sense strand and an antisense strand forming a double stranded region, wherein the sense strand comprises a nucleotide sequence comprising at least 15 contiguous nucleotides differing by no more than 3 nucleotides from a portion of the nucleotide sequence of SEQ ID NO: 1 and the antisense strand comprises a nucleotide sequence comprising at least 15 contiguous nucleotides differing by no more than 3 nucleotides from the corresponding portion of nucleotide sequence of SEQ ID NO: 2 such that the sense strand is complementary to the at least 15 contiguous nucleotides in the antisense strand.

10. The method of claim 8, wherein the dsRNA agent comprises a sense strand and an antisense strand forming a double stranded region, wherein the antisense strand comprises at least 15 contiguous nucleotides differing by no more than 3 nucleotides from any one of the antisense sequences listed in any one of Tables 2-3.

11. (canceled)

12. The method of claim 1, wherein the nucleic acid inhibitor is a double stranded ribonucleic acid (dsRNA) agent that inhibits the expression of HAO1.

13. The method of claim 12, wherein the dsRNA agent comprises a sense strand and an antisense strand forming a double stranded region, wherein the sense strand comprises a nucleotide sequence comprising at least 15 contiguous nucleotides differing by no more than 3 nucleotides from a portion of the nucleotide sequence of SEQ ID NO: 21 and the antisense strand comprises a nucleotide sequence comprising at least 15 contiguous nucleotides differing by no more than 3 nucleotides from the corresponding portion of nucleotide sequence of SEQ ID NO: 22 such that the sense strand is complementary to the at least 15 contiguous nucleotides in the antisense strand.

14. The method of claim 12, wherein the dsRNA agent comprises a sense strand and an antisense strand forming a double stranded region, wherein the antisense strand comprises at least 15 contiguous nucleotides differing by no more than 3 nucleotides from any one of the antisense sequences listed in any one of Tables 4-12.

15. (canceled)

16. The method of claim 1, wherein the nucleic acid inhibitor is a dual targeting double stranded ribonucleic acid (dsRNA) agent that inhibits the expression of LDHA and HAO1.

17. (canceled)

18. (canceled)

19. The method of claim 8, wherein the dsRNA agent comprises at least one nucleotide comprising a nucleotide modification.

20. (canceled)

21. (canceled)

22. The method of claim 19, wherein at least one of the nucleotide modifications is selected from the group a deoxy-nucleotide nucleotide modification, a 3′-terminal deoxy-thymine (dT) nucleotide modification, a 2′-O-methyl nucleotide modification, a 2′-fluoro nucleotide modification, a 2′-deoxy nucleotide modification, a locked nucleotide modification, an unlocked nucleotide modification, a conformationally restricted nucleotide modification, a constrained ethyl nucleotide modification, an abasic nucleotide modification, a 2′-amino nucleotide modification, a 2′-O-allyl-nucleotide modification, 2′-C-alkyl nucleotide modification, 2′-hydroxly nucleotide modification, a 2′-methoxyethyl nucleotide modification, a 2′ O-alkyl nucleotide modification, a morpholino nucleotide modification, a phosphoramidate modification, a non-natural base comprising nucleotide modification, a tetrahydropyran nucleotide modification, a 1,5-anhydrohexitol nucleotide modification, a cyclohexenyl nucleotide modification, a nucleotide comprising a 5′-phosphorothioate group modification, a nucleotide comprising a 5′-methylphosphonate group modification, a nucleotide comprising a 5′ phosphate or 5′ phosphate mimic modification, a nucleotide comprising vinyl phosphonate modification, a nucleotide comprising adenosine-glycol nucleic acid (GNA) modification, a nucleotide comprising thymidine-glycol nucleic acid (GNA)S-Isomer modification, a nucleotide comprising 2-hydroxymethyl-tetrahydrofurane-5-phosphate modification, a nucleotide comprising 2′-deoxythymidine-3′phosphate modification, a nucleotide comprising 2′-deoxyguanosine-3′-phosphate modification, and a terminal nucleotide linked to a cholesteryl derivative and a dodecanoic acid bisdecylamide group modification; and combinations thereof.

23. The method of claim 8, wherein the dsRNA agent further comprises at least one phosphorothioate internucleotide linkage.

24. (canceled)

25. The method of claim 8, wherein at least one strand of the dsRNA agent further comprises a ligand.

26. (canceled)

27. The method of claim 25, wherein the ligand is one or more N-acetylgalactosamine (GalNAc) derivatives.

28.-55. (canceled)

56. The method of claim 1, wherein the nucleic acid inhibitor is a single stranded antisense polynucleotide agent that inhibits the expression of LDHA.

57. (canceled)

58. The method of claim 1, wherein the nucleic acid inhibitor is a single stranded antisense polynucleotide agent that inhibits the expression of HAO1.

59.-71. (canceled)

72. The method of claim 1, wherein the nucleic acid inhibitor is present in a pharmaceutical formulation.

73. The method of claim 1, further comprising administering an additional therapeutic to the subject.

74. (canceled)

75. (canceled)

76. A method for preventing a kidney stone disease in a subject prone to suffering from a kidney stone disease, the method comprising
determining the presence or absence of a heterozygous alanine-glyoxylate amino transferase (AGXT) gene variant in a sample obtained from the subject; and
administering to the subject a prohylactically effective amount of a nucleic acid inhibitor of lactate dehydrogenase A (LDHA) and/or a nucleic acid inhibitor of hydroxyacid oxidase (HAO1), if a heterozygous AGXT gene variant is present in the sample obtained from the subject,
thereby preventing a kidney stone disease in the subject prone to suffering from a kidney stone disease.

77. A method of diagnosing and preventing a kidney stone disease in a subject prone to suffering from a kidney stone disease, the method comprising
detecting the presence or absence of a heterozygous alanine-glyoxylate amino transferase (AGXT) gene variant in a sample obtained from the subject;
diagnosing the subject with a kidney stone disease if a heterozygous AGXT gene variant is present in the sample obtained from the subject; and
administering to the subject a prophylactically effective amount of a nucleic acid inhibitor of lactate dehydrogenase A (LDHA) and/or a nucleic acid inhibitor of hydroxyacid oxidase (HAO1),
thereby diagnosing and preventing a kidney stone disease in a subject prone to suffering from a kidney stone disease.

The application's sequence listing, which the Patent Office published only in electronic form, follows.

SEQUENCE LISTING (4631 sequences)

SEQ ID NO: 1 - DNA, 2052 bp, Homo sapiens
  source 1..2052: mol_type = unassigned DNA
gtctgccggtcggttgtctggctgcgcgcgccacccgggcctctccagtgccccgcctggctcggcatccacccccagcccgactcacacgtgggttcccgcacgtccgccggccccccccgctgacgtcagcatagctgttccacttaaggcccctcccgcgcccagctcagagtgctgcagccgctgccgccgattccggatctcattgccacgcgcccccgacgaccgcccgacgtgcattcccgattccttttggttccaagtccaatatggcaactctaaaggatcagctgatttataatcttctaaaggaagaacagaccccccagaataagattacagttgttggggttggtgctgttggcatggcctgtgccatcagtatcttaatgaaggacttggcagatgaacttgctcttgttgatgtcatcgaagacaaattgaagggagagatgatggatctccaacatggcagccttttccttagaacaccaaagattgtctctggcaaagtggatatcttgacctacgtggcttggaagataagtggttttcccaaaaaccgtgttattggaagcggttgcaatctggattcagcccgattccgttacctaatgggggaaaggctgggagttcacccattaagctgtcatgggtgggtccttggggaacatggagattccagtgtgcctgtatggagtggaatgaatgttgctggtgtctctctgaagactctgcacccagatttagggactgataaagataaggaacagtggaaagaggttcacaagcaggtggttgagagtgcttatgaggtgatcaaactcaaaggctacacatcctgggctattggactctctgtagcagatttggcagagagtataatgaagaatcttaggcgggtgcacccagtttccaccatgattaagggtctttacggaataaaggatgatgtcttccttagtgttccttgcattttgggacagaatggaatctcagaccttgtgaaggtgactctgacttctgaggaagaggcccgtttgaagaagagtgcagatacactttgggggatccaaaaggagctgcaattttaaagtcttctgatgtcatatcatttcactgtctaggctacaacaggattctaggtggaggttgtgcatgttgtcctttttatctgatctgtgattaaagcagtaatattttaagatggactgggaaaaacatcaactcctgaagttagaaataagaatggtttgtaaaatccacagctatatcctgatgctggatggtattaatcttgtgtagtcttcaactggttagtgtgaaatagttctgccacctctgacgcaccactgccaatgctgtacgtactgcatttgccccttgagccaggtggatgtttaccgtgtgttatataacttcctggctccttcactgaacatgcctagtccaacattttttcccagtgagtcacatcctgggatccagtgtataaatccaatatcatgtcttgtgcataattcttccaaaggatcttattttgtgaactatatcagtagtgtacattaccatataatgtaaaaagatctacatacaaacaatgcaaccaactatccaagtgttataccaactaaaacccccaataaaccttgaacagtgactactttggttaattcattatattaagatataaagtcataaagctgctagttattatattaatttggaaatattaggctattcttgggcaaccctgcaacgattttttctaacagggatattattgactaatagcagaggatgtaatagtcaactgagttgtattggtaccacttccattgtaagtcccaaagtattatatatttgataataatgctaatcataattggaaagtaacattctatatgtaaatgtaaaatttatttgccaactgaatataggcaatgatagtgtgtcactatagggaacacagatttttgagatcttgtcctctggaagctggtaacaattaaaaacaatcttaaggcagggaaaaaaaaaaaaaaaaaa

SEQ ID NO: 2 - DNA, 2052 bp, Homo sapiens
  source 1..2052: mol_type = unassigned DNA
ttttttttttttttttttccctgccttaagattgtttttaattgttaccagcttccagaggacaagatctcaaaaatctgtgttccctatagtgacacactatcattgcctatattcagttggcaaataaattttacatttacatatagaatgttactttccaattatgattagcattattatcaaatatataatactttgggacttacaatggaagtggtaccaatacaactcagttgactattacatcctctgctattagtcaataatatccctgttagaaaaaatcgttgcagggttgcccaagaatagcctaatatttccaaattaatataataactagcagctttatgactttatatcttaatataatgaattaaccaaagtagtcactgttcaaggtttattgggggttttagttggtataacacttggatagttggttgcattgtttgtatgtagatctttttacattatatggtaatgtacactactgatatagttcacaaaataagatcctttggaagaattatgcacaagacatgatattggatttatacactggatcccaggatgtgactcactgggaaaaaatgttggactaggcatgttcagtgaaggagccaggaagttatataacacacggtaaacatccacctggctcaaggggcaaatgcagtacgtacagcattggcagtggtgcgtcagaggtggcagaactatttcacactaaccagttgaagactacacaagattaataccatccagcatcaggatatagctgtggattttacaaaccattcttatttctaacttcaggagttgatgtttttcccagtccatcttaaaatattactgctttaatcacagatcagataaaaaggacaacatgcacaacctccacctagaatcctgttgtagcctagacagtgaaatgatatgacatcagaagactttaaaattgcagctccttttggatcccccaaagtgtatctgcactcttcttcaaacgggcctcttcctcagaagtcagagtcaccttcacaaggtctgagattccattctgtcccaaaatgcaaggaacactaaggaagacatcatcctttattccgtaaagacccttaatcatggtggaaactgggtgcacccgcctaagattcttcattatactctctgccaaatctgctacagagagtccaatagcccaggatgtgtagcctttgagtttgatcacctcataagcactctcaaccacctgcttgtgaacctctttccactgttccttatctttatcagtccctaaatctgggtgcagagtcttcagagagacaccagcaacattcattccactccatacaggcacactggaatctccatgttccccaaggacccacccatgacagcttaatgggtgaactcccagcctttcccccattaggtaacggaatcgggctgaatccagattgcaaccgcttccaataacacggtttttgggaaaaccacttatcttccaagccacgtaggtcaagatatccactttgccagagacaatctttggtgttctaaggaaaaggctgccatgttggagatccatcatctctcccttcaatttgtcttcgatgacatcaacaagagcaagttcatctgccaagtccttcattaagatactgatggcacaggccatgccaacagcaccaaccccaacaactgtaatcttattctggggggtctgttcttcctttagaagattataaatcagctgatcctttagagttgccatattggacttggaaccaaaaggaatcgggaatgcacgtcgggcggtcgtcgggggcgcgtggcaatgagatccggaatcggcggcagcggctgcagcactctgagctgggcgcgggaggggccttaagtggaacagctatgctgacgtcagcggggggggccggcggacgtgcgggaacccacgtgtgagtcgggctgggggtggatgccgagccaggcggggcactggagaggcccgggtggcgcgcgcagccagacaaccgaccggcagac

SEQ ID NO: 3 - DNA, 2323 bp, Homo sapiens
  source 1..2323: mol_type = unassigned DNA
ttgggcggggcgtaaaagccgggcgttcggaggacccagcaattagtctgatttccgcccacctttccgagcgggaaggagagccacaaagcgcgcatgcgcgcggatcaccgcaggctcctgtgccttgggcttgagctttgtggcagttaatggcttttctgcacgtatctctggtgtttacttgagaagcctggctgtgtccttgctgtaggagccggagtagctcagagtgatcttgtctgaggaaaggccagccccacttggggttaataaaccgcgatgggtgaaccctcaggaggctatacttacacccaaacgtcgatattccttttccacgctaagattccttttggttccaagtccaatatggcaactctaaaggatcagctgatttataatcttctaaaggaagaacagaccccccagaataagattacagttgttggggttggtgctgttggcatggcctgtgccatcagtatcttaatgaaggacttggcagatgaacttgctcttgttgatgtcatcgaagacaaattgaagggagagatgatggatctccaacatggcagccttttccttagaacaccaaagattgtctctggcaaagactataatgtaactgcaaactccaagctggtcattatcacggctggggcacgtcagcaagagggagaaagccgtcttaatttggtccagcgtaacgtgaacatctttaaattcatcattcctaatgttgtaaaatacagcccgaactgcaagttgcttattgtttcaaatccagtggatatcttgacctacgtggcttggaagataagtggttttcccaaaaaccgtgttattggaagcggttgcaatctggattcagcccgattccgttacctaatgggggaaaggctgggagttcacccattaagctgtcatgggtgggtccttggggaacatggagattccagtgtgcctgtatggagtggaatgaatgttgctggtgtctctctgaagactctgcacccagatttagggactgataaagataaggaacagtggaaagaggttcacaagcaggtggttgagagtgcttatgaggtgatcaaactcaaaggctacacatcctgggctattggactctctgtagcagatttggcagagagtataatgaagaatcttaggcgggtgcacccagtttccaccatgattaagggtctttacggaataaaggatgatgtcttccttagtgttccttgcattttgggacagaatggaatctcagaccttgtgaaggtgactctgacttctgaggaagaggcccgtttgaagaagagtgcagatacactttgggggatccaaaaggagctgcaattttaaagtcttctgatgtcatatcatttcactgtctaggctacaacaggattctaggtggaggttgtgcatgttgtcctttttatctgatctgtgattaaagcagtaatattttaagatggactgggaaaaacatcaactcctgaagttagaaataagaatggtttgtaaaatccacagctatatcctgatgctggatggtattaatcttgtgtagtcttcaactggttagtgtgaaatagttctgccacctctgacgcaccactgccaatgctgtacgtactgcatttgccccttgagccaggtggatgtttaccgtgtgttatataacttcctggctccttcactgaacatgcctagtccaacattttttcccagtgagtcacatcctgggatccagtgtataaatccaatatcatgtcttgtgcataattcttccaaaggatcttattttgtgaactatatcagtagtgtacattaccatataatgtaaaaagatctacatacaaacaatgcaaccaactatccaagtgttataccaactaaaacccccaataaaccttgaacagtgactactttggttaattcattatattaagatataaagtcataaagctgctagttattatattaatttggaaatattaggctattcttgggcaaccctgcaacgattttttctaacagggatattattgactaatagcagaggatgtaatagtcaactgagttgtattggtaccacttccattgtaagtcccaaagtattatatatttgataataatgctaatcataattggaaagtaacattctatatgtaaatgtaaaatttatttgccaactgaatataggcaatgatagtgtgtcactatagggaacacagatttttgagatcttgtcctctggaagctggtaacaattaaaaacaatcttaaggcagggaaaaaaaaaaaaaaaaaa

SEQ ID NO: 4 - DNA, 2323 bp, Homo sapiens
  source 1..2323: mol_type = unassigned DNA
ttttttttttttttttttccctgccttaagattgtttttaattgttaccagcttccagaggacaagatctcaaaaatctgtgttccctatagtgacacactatcattgcctatattcagttggcaaataaattttacatttacatatagaatgttactttccaattatgattagcattattatcaaatatataatactttgggacttacaatggaagtggtaccaatacaactcagttgactattacatcctctgctattagtcaataatatccctgttagaaaaaatcgttgcagggttgcccaagaatagcctaatatttccaaattaatataataactagcagctttatgactttatatcttaatataatgaattaaccaaagtagtcactgttcaaggtttattgggggttttagttggtataacacttggatagttggttgcattgtttgtatgtagatctttttacattatatggtaatgtacactactgatatagttcacaaaataagatcctttggaagaattatgcacaagacatgatattggatttatacactggatcccaggatgtgactcactgggaaaaaatgttggactaggcatgttcagtgaaggagccaggaagttatataacacacggtaaacatccacctggctcaaggggcaaatgcagtacgtacagcattggcagtggtgcgtcagaggtggcagaactatttcacactaaccagttgaagactacacaagattaataccatccagcatcaggatatagctgtggattttacaaaccattcttatttctaacttcaggagttgatgtttttcccagtccatcttaaaatattactgctttaatcacagatcagataaaaaggacaacatgcacaacctccacctagaatcctgttgtagcctagacagtgaaatgatatgacatcagaagactttaaaattgcagctccttttggatcccccaaagtgtatctgcactcttcttcaaacgggcctcttcctcagaagtcagagtcaccttcacaaggtctgagattccattctgtcccaaaatgcaaggaacactaaggaagacatcatcctttattccgtaaagacccttaatcatggtggaaactgggtgcacccgcctaagattcttcattatactctctgccaaatctgctacagagagtccaatagcccaggatgtgtagcctttgagtttgatcacctcataagcactctcaaccacctgcttgtgaacctctttccactgttccttatctttatcagtccctaaatctgggtgcagagtcttcagagagacaccagcaacattcattccactccatacaggcacactggaatctccatgttccccaaggacccacccatgacagcttaatgggtgaactcccagcctttcccccattaggtaacggaatcgggctgaatccagattgcaaccgcttccaataacacggtttttgggaaaaccacttatcttccaagccacgtaggtcaagatatccactggatttgaaacaataagcaacttgcagttcgggctgtattttacaacattaggaatgatgaatttaaagatgttcacgttacgctggaccaaattaagacggctttctccctcttgctgacgtgccccagccgtgataatgaccagcttggagtttgcagttacattatagtctttgccagagacaatctttggtgttctaaggaaaaggctgccatgttggagatccatcatctctcccttcaatttgtcttcgatgacatcaacaagagcaagttcatctgccaagtccttcattaagatactgatggcacaggccatgccaacagcaccaaccccaacaactgtaatcttattctggggggtctgttcttcctttagaagattataaatcagctgatcctttagagttgccatattggacttggaaccaaaaggaatcttagcgtggaaaaggaatatcgacgtttgggtgtaagtatagcctcctgagggttcacccatcgcggtttattaaccccaagtggggctggcctttcctcagacaagatcactctgagctactccggctcctacagcaaggacacagccaggcttctcaagtaaacaccagagatacgtgcagaaaagccattaactgccacaaagctcaagcccaaggcacaggagcctgcggtgatccgcgcgcatgcgcgctttgtggctctccttcccgctcggaaaggtgggcggaaatcagactaattgctgggtcctccgaacgcccggcttttacgccccgcccaa

SEQ ID NO: 5 - DNA, 1957 bp, Homo sapiens
  source 1..1957: mol_type = unassigned DNA
gtctgccggtcggttgtctggctgcgcgcgccacccgggcctctccagtgccccgcctggctcggcatccacccccagcccgactcacacgtgggttcccgcacgtccgccggccccccccgctgacgtcagcatagctgttccacttaaggcccctcccgcgcccagctcagagtgctgcagccgctgccgccgattccggatctcattgccacgcgcccccgacgaccgcccgacgtgcattcccgattccttttggttccaagtccaatatggcaactctaaaggatcagctgatttataatcttctaaaggaagaacagaccccccagaataagattacagttgttggggttggtgctgttggcatggcctgtgccatcagtatcttaatgaaggacttggcagatgaacttgctcttgttgatgtcatcgaagacaaattgaagggagagatgatggatctccaacatggcagccttttccttagaacaccaaagattgtctctggcaaagactataatgtaactgcaaactccaagctggtcattatcacggctggggcacgtcagcaagagggagaaagccgtcttaatttggtccagcgtaacgtgaacatctttaaattcatcattcctaatgttgtaaaatacagcccgaactgcaagttgcttattgtttcaaatccagtggatatcttgacctacgtggcttggaagataagtggttttcccaaaaaccgtgttattggaagcggttgcaatctggattcagcccgattccgttacctaatgggggaaaggctgggagttcacccattaagctgtcatgggtgggtccttggggaacatggagattccagtgtgcctgtatggagtggaatgaatgttgctggtgtctctctgaagactctgcacccagatttagggactgataaagataaggaacagtggaaagagtgcagatacactttgggggatccaaaaggagctgcaattttaaagtcttctgatgtcatatcatttcactgtctaggctacaacaggattctaggtggaggttgtgcatgttgtcctttttatctgatctgtgattaaagcagtaatattttaagatggactgggaaaaacatcaactcctgaagttagaaataagaatggtttgtaaaatccacagctatatcctgatgctggatggtattaatcttgtgtagtcttcaactggttagtgtgaaatagttctgccacctctgacgcaccactgccaatgctgtacgtactgcatttgccccttgagccaggtggatgtttaccgtgtgttatataacttcctggctccttcactgaacatgcctagtccaacattttttcccagtgagtcacatcctgggatccagtgtataaatccaatatcatgtcttgtgcataattcttccaaaggatcttattttgtgaactatatcagtagtgtacattaccatataatgtaaaaagatctacatacaaacaatgcaaccaactatccaagtgttataccaactaaaacccccaataaaccttgaacagtgactactttggttaattcattatattaagatataaagtcataaagctgctagttattatattaatttggaaatattaggctattcttgggcaaccctgcaacgattttttctaacagggatattattgactaatagcagaggatgtaatagtcaactgagttgtattggtaccacttccattgtaagtcccaaagtattatatatttgataataatgctaatcataattggaaagtaacattctatatgtaaatgtaaaatttatttgccaactgaatataggcaatgatagtgtgtcactatagggaacacagatttttgagatcttgtcctctggaagctggtaacaattaaaaacaatcttaaggcagggaaaaaaaaaaaaaaaaaa

SEQ ID NO: 6 - DNA, 1957 bp, Homo sapiens
  source 1..1957: mol_type = unassigned DNA
ttttttttttttttttttccctgccttaagattgtttttaattgttaccagcttccagaggacaagatctcaaaaatctgtgttccctatagtgacacactatcattgcctatattcagttggcaaataaattttacatttacatatagaatgttactttccaattatgattagcattattatcaaatatataatactttgggacttacaatggaagtggtaccaatacaactcagttgactattacatcctctgctattagtcaataatatccctgttagaaaaaatcgttgcagggttgcccaagaatagcctaatatttccaaattaatataataactagcagctttatgactttatatcttaatataatgaattaaccaaagtagtcactgttcaaggtttattgggggttttagttggtataacacttggatagttggttgcattgtttgtatgtagatctttttacattatatggtaatgtacactactgatatagttcacaaaataagatcctttggaagaattatgcacaagacatgatattggatttatacactggatcccaggatgtgactcactgggaaaaaatgttggactaggcatgttcagtgaaggagccaggaagttatataacacacggtaaacatccacctggctcaaggggcaaatgcagtacgtacagcattggcagtggtgcgtcagaggtggcagaactatttcacactaaccagttgaagactacacaagattaataccatccagcatcaggatatagctgtggattttacaaaccattcttatttctaacttcaggagttgatgtttttcccagtccatcttaaaatattactgctttaatcacagatcagataaaaaggacaacatgcacaacctccacctagaatcctgttgtagcctagacagtgaaatgatatgacatcagaagactttaaaattgcagctccttttggatcccccaaagtgtatctgcactctttccactgttccttatctttatcagtccctaaatctgggtgcagagtcttcagagagacaccagcaacattcattccactccatacaggcacactggaatctccatgttccccaaggacccacccatgacagcttaatgggtgaactcccagcctttcccccattaggtaacggaatcgggctgaatccagattgcaaccgcttccaataacacggtttttgggaaaaccacttatcttccaagccacgtaggtcaagatatccactggatttgaaacaataagcaacttgcagttcgggctgtattttacaacattaggaatgatgaatttaaagatgttcacgttacgctggaccaaattaagacggctttctccctcttgctgacgtgccccagccgtgataatgaccagcttggagtttgcagttacattatagtctttgccagagacaatctttggtgttctaaggaaaaggctgccatgttggagatccatcatctctcccttcaatttgtcttcgatgacatcaacaagagcaagttcatctgccaagtccttcattaagatactgatggcacaggccatgccaacagcaccaaccccaacaactgtaatcttattctggggggtctgttcttcctttagaagattataaatcagctgatcctttagagttgccatattggacttggaaccaaaaggaatcgggaatgcacgtcgggcggtcgtcgggggcgcgtggcaatgagatccggaatcggcggcagcggctgcagcactctgagctgggcgcgggaggggccttaagtggaacagctatgctgacgtcagcggggggggccggcggacgtgcgggaacccacgtgtgagtcgggctgggggtggatgccgagccaggcggggcactggagaggcccgggtggcgcgcgcagccagacaaccgaccggcagac

SEQ ID NO: 7 - DNA, 2102 bp, Homo sapiens
  source 1..2102: mol_type = unassigned DNA
gtctgccggtcggttgtctggctgcgcgcgccacccgggcctctccagtgccccgcctggctcggcatccacccccagcccgactcacacgtgggttcccgcacgtccgccggccccccccgctgacgtcagcatagctgttccacttaaggcccctcccgcgcccagctcagagtgctgcagccgctgccgccgattccggatctcattgccacgcgcccccgacgaccgcccgacgtgcattcccgattccttttggttccaagtccaatatggcaactctaaaggatcagctgatttataatcttctaaaggaagaacagaccccccagaataagattacagttgttggggttggtgctgttggcatggcctgtgccatcagtatcttaatgaaggacttggcagatgaacttgctcttgttgatgtcatcgaagacaaattgaagggagagatgatggatctccaacatggcagccttttccttagaacaccaaagattgtctctggcaaagactataatgtaactgcaaactccaagctggtcattatcacggctggggcacgtcagcaagagggagaaagccgtcttaatttggtccagcgtaacgtgaacatctttaaattcatcattcctaatgttgtaaaatacagcccgaactgcaagttgcttattgtttcaaatccagtggatatcttgacctacgtggcttggaagataagtggttttcccaaaaaccgtgttattggaagcggttgcaatctggattcagcccgattccgttacctaatgggggaaaggctgggagttcacccattaagctgtcatgggtgggtccttggggaacatggagattccagtgtgcctgtatggagtggaatgaatgttgctggtgtctctctgaagactctgcacccagatttagggactgataaagataaggaacagtggaaagaggttcacaagcaggtggttgagagggtctttacggaataaaggatgatgtcttccttagtgttccttgcattttgggacagaatggaatctcagaccttgtgaaggtgactctgacttctgaggaagaggcccgtttgaagaagagtgcagatacactttgggggatccaaaaggagctgcaattttaaagtcttctgatgtcatatcatttcactgtctaggctacaacaggattctaggtggaggttgtgcatgttgtcctttttatctgatctgtgattaaagcagtaatattttaagatggactgggaaaaacatcaactcctgaagttagaaataagaatggtttgtaaaatccacagctatatcctgatgctggatggtattaatcttgtgtagtcttcaactggttagtgtgaaatagttctgccacctctgacgcaccactgccaatgctgtacgtactgcatttgccccttgagccaggtggatgtttaccgtgtgttatataacttcctggctccttcactgaacatgcctagtccaacattttttcccagtgagtcacatcctgggatccagtgtataaatccaatatcatgtcttgtgcataattcttccaaaggatcttattttgtgaactatatcagtagtgtacattaccatataatgtaaaaagatctacatacaaacaatgcaaccaactatccaagtgttataccaactaaaacccccaataaaccttgaacagtgactactttggttaattcattatattaagatataaagtcataaagctgctagttattatattaatttggaaatattaggctattcttgggcaaccctgcaacgattttttctaacagggatattattgactaatagcagaggatgtaatagtcaactgagttgtattggtaccacttccattgtaagtcccaaagtattatatatttgataataatgctaatcataattggaaagtaacattctatatgtaaatgtaaaatttatttgccaactgaatataggcaatgatagtgtgtcactatagggaacacagatttttgagatcttgtcctctggaagctggtaacaattaaaaacaatcttaaggcagggaaaaaaaaaaaaaaaaaa

SEQ ID NO: 8 - DNA, 2102 bp, Homo sapiens
  source 1..2102: mol_type = unassigned DNA
ttttttttttttttttttccctgccttaagattgtttttaattgttaccagcttccagaggacaagatctcaaaaatctgtgttccctatagtgacacactatcattgcctatattcagttggcaaataaattttacatttacatatagaatgttactttccaattatgattagcattattatcaaatatataatactttgggacttacaatggaagtggtaccaatacaactcagttgactattacatcctctgctattagtcaataatatccctgttagaaaaaatcgttgcagggttgcccaagaatagcctaatatttccaaattaatataataactagcagctttatgactttatatcttaatataatgaattaaccaaagtagtcactgttcaaggtttattgggggttttagttggtataacacttggatagttggttgcattgtttgtatgtagatctttttacattatatggtaatgtacactactgatatagttcacaaaataagatcctttggaagaattatgcacaagacatgatattggatttatacactggatcccaggatgtgactcactgggaaaaaatgttggactaggcatgttcagtgaaggagccaggaagttatataacacacggtaaacatccacctggctcaaggggcaaatgcagtacgtacagcattggcagtggtgcgtcagaggtggcagaactatttcacactaaccagttgaagactacacaagattaataccatccagcatcaggatatagctgtggattttacaaaccattcttatttctaacttcaggagttgatgtttttcccagtccatcttaaaatattactgctttaatcacagatcagataaaaaggacaacatgcacaacctccacctagaatcctgttgtagcctagacagtgaaatgatatgacatcagaagactttaaaattgcagctccttttggatcccccaaagtgtatctgcactcttcttcaaacgggcctcttcctcagaagtcagagtcaccttcacaaggtctgagattccattctgtcccaaaatgcaaggaacactaaggaagacatcatcctttattccgtaaagaccctctcaaccacctgcttgtgaacctctttccactgttccttatctttatcagtccctaaatctgggtgcagagtcttcagagagacaccagcaacattcattccactccatacaggcacactggaatctccatgttccccaaggacccacccatgacagcttaatgggtgaactcccagcctttcccccattaggtaacggaatcgggctgaatccagattgcaaccgcttccaataacacggtttttgggaaaaccacttatcttccaagccacgtaggtcaagatatccactggatttgaaacaataagcaacttgcagttcgggctgtattttacaacattaggaatgatgaatttaaagatgttcacgttacgctggaccaaattaagacggctttctccctcttgctgacgtgccccagccgtgataatgaccagcttggagtttgcagttacattatagtctttgccagagacaatctttggtgttctaaggaaaaggctgccatgttggagatccatcatctctcccttcaatttgtcttcgatgacatcaacaagagcaagttcatctgccaagtccttcattaagatactgatggcacaggccatgccaacagcaccaaccccaacaactgtaatcttattctggggggtctgttcttcctttagaagattataaatcagctgatcctttagagttgccatattggacttggaaccaaaaggaatcgggaatgcacgtcgggcggtcgtcgggggcgcgtggcaatgagatccggaatcggcggcagcggctgcagcactctgagctgggcgcgggaggggccttaagtggaacagctatgctgacgtcagcggggggggccggcggacgtgcgggaacccacgtgtgagtcgggctgggggtggatgccgagccaggcggggcactggagaggcccgggtggcgcgcgcagccagacaaccgaccggcagac

SEQ ID NO: 9 - DNA, 2226 bp, Homo sapiens
  source 1..2226: mol_type = unassigned DNA
gtctgccggtcggttgtctggctgcgcgcgccacccgggcctctccagtgccccgcctggctcggcatccacccccagcccgactcacacgtgggttcccgcacgtccgccggccccccccgctgacgtcagcatagctgttccacttaaggcccctcccgcgcccagctcagagtgctgcagccgctgccgccgattccggatctcattgccacgcgcccccgacgaccgcccgacgtgcattcccgattccttttggttccaagtccaatatggcaactctaaaggatcagctgatttataatcttctaaaggaagaacagaccccccagaataagattacagttgttggggttggtgctgttggcatggcctgtgccatcagtatcttaatgaaggacttggcagatgaacttgctcttgttgatgtcatcgaagacaaattgaagggagagatgatggatctccaacatggcagccttttccttagaacaccaaagattgtctctggcaaagactataatgtaactgcaaactccaagctggtcattatcacggctggggcacgtcagcaagagggagaaagccgtcttaatttggtccagcgtaacgtgaacatctttaaattcatcattcctaatgttgtaaaatacagcccgaactgcaagttgcttattgtttcaaatccagtggatatcttgacctacgtggcttggaagataagtggttttcccaaaaaccgtgttattggaagcggttgcaatctggattcagcccgattccgttacctaatgggggaaaggctgggagttcacccattaagctgtcatgggtgggtccttggggaacatggagattccagtgtgcctgtatggagtggaatgaatgttgctggtgtctctctgaagactctgcacccagatttagggactgataaagataaggaacagtggaaagaggttcacaagcaggtggttgagagtgcttatgaggtgatcaaactcaaaggctacacatcctgggctattggactctctgtagcagatttggcagagagtataatgaagaatcttaggcgggtgcacccagtttccaccatgattaagggtctttacggaataaaggatgatgtcttccttagtgttccttgcattttgggacagaatggaatctcagaccttgtgaaggtgactctgacttctgaggaagaggcccgtttgaagaagagtgcagatacactttgggggatccaaaaggagctgcaattttaaagtcttctgatgtcatatcatttcactgtctaggctacaacaggattctaggtggaggttgtgcatgttgtcctttttatctgatctgtgattaaagcagtaatattttaagatggactgggaaaaacatcaactcctgaagttagaaataagaatggtttgtaaaatccacagctatatcctgatgctggatggtattaatcttgtgtagtcttcaactggttagtgtgaaatagttctgccacctctgacgcaccactgccaatgctgtacgtactgcatttgccccttgagccaggtggatgtttaccgtgtgttatataacttcctggctccttcactgaacatgcctagtccaacattttttcccagtgagtcacatcctgggatccagtgtataaatccaatatcatgtcttgtgcataattcttccaaaggatcttattttgtgaactatatcagtagtgtacattaccatataatgtaaaaagatctacatacaaacaatgcaaccaactatccaagtgttataccaactaaaacccccaataaaccttgaacagtgactactttggttaattcattatattaagatataaagtcataaagctgctagttattatattaatttggaaatattaggctattcttgggcaaccctgcaacgattttttctaacagggatattattgactaatagcagaggatgtaatagtcaactgagttgtattggtaccacttccattgtaagtcccaaagtattatatatttgataataatgctaatcataattggaaagtaacattctatatgtaaatgtaaaatttatttgccaactgaatataggcaatgatagtgtgtcactatagggaacacagatttttgagatcttgtcctctggaagctggtaacaattaaaaacaatcttaaggcagggaaaaaaaaaaaaaaaaaa

SEQ ID NO: 10 - DNA, 2226 bp, Homo sapiens
  source 1..2226: mol_type = unassigned DNA
ttttttttttttttttttccctgccttaagattgtttttaattgttaccagcttccagaggacaagatctcaaaaatctgtgttccctatagtgacacactatcattgcctatattcagttggcaaataaattttacatttacatatagaatgttactttccaattatgattagcattattatcaaatatataatactttgggacttacaatggaagtggtaccaatacaactcagttgactattacatcctctgctattagtcaataatatccctgttagaaaaaatcgttgcagggttgcccaagaatagcctaatatttccaaattaatataataactagcagctttatgactttatatcttaatataatgaattaaccaaagtagtcactgttcaaggtttattgggggttttagttggtataacacttggatagttggttgcattgtttgtatgtagatctttttacattatatggtaatgtacactactgatatagttcacaaaataagatcctttggaagaattatgcacaagacatgatattggatttatacactggatcccaggatgtgactcactgggaaaaaatgttggactaggcatgttcagtgaaggagccaggaagttatataacacacggtaaacatccacctggctcaaggggcaaatgcagtacgtacagcattggcagtggtgcgtcagaggtggcagaactatttcacactaaccagttgaagactacacaagattaataccatccagcatcaggatatagctgtggattttacaaaccattcttatttctaacttcaggagttgatgtttttcccagtccatcttaaaatattactgctttaatcacagatcagataaaaaggacaacatgcacaacctccacctagaatcctgttgtagcctagacagtgaaatgatatgacatcagaagactttaaaattgcagctccttttggatcccccaaagtgtatctgcactcttcttcaaacgggcctcttcctcagaagtcagagtcaccttcacaaggtctgagattccattctgtcccaaaatgcaaggaacactaaggaagacatcatcctttattccgtaaagacccttaatcatggtggaaactgggtgcacccgcctaagattcttcattatactctctgccaaatctgctacagagagtccaatagcccaggatgtgtagcctttgagtttgatcacctcataagcactctcaaccacctgcttgtgaacctctttccactgttccttatctttatcagtccctaaatctgggtgcagagtcttcagagagacaccagcaacattcattccactccatacaggcacactggaatctccatgttccccaaggacccacccatgacagcttaatgggtgaactcccagcctttcccccattaggtaacggaatcgggctgaatccagattgcaaccgcttccaataacacggtttttgggaaaaccacttatcttccaagccacgtaggtcaagatatccactggatttgaaacaataagcaacttgcagttcgggctgtattttacaacattaggaatgatgaatttaaagatgttcacgttacgctggaccaaattaagacggctttctccctcttgctgacgtgccccagccgtgataatgaccagcttggagtttgcagttacattatagtctttgccagagacaatctttggtgttctaaggaaaaggctgccatgttggagatccatcatctctcccttcaatttgtcttcgatgacatcaacaagagcaagttcatctgccaagtccttcattaagatactgatggcacaggccatgccaacagcaccaaccccaacaactgtaatcttattctggggggtctgttcttcctttagaagattataaatcagctgatcctttagagttgccatattggacttggaaccaaaaggaatcgggaatgcacgtcgggcggtcgtcgggggcgcgtggcaatgagatccggaatcggcggcagcggctgcagcactctgagctgggcgcgggaggggccttaagtggaacagctatgctgacgtcagcggggggggccggcggacgtgcgggaacccacgtgtgagtcgggctgggggtggatgccgagccaggcggggcactggagaggcccgggtggcgcgcgcagccagacaaccgaccggcagac

SEQ ID NO: 11 - DNA, 1854 bp, Mus musculus
  source 1..1854: mol_type = unassigned DNA
gggttcttgcgggggtgggggggttaggaaggaagcttgcgcgtgcgcaggcttaagcacgttgctatgccttggggtcgcaccttgtggccgttattggcgccctctgctcttgatttttggtacttcctggagcaacttggcgctctacttgctgtagggctctgggtgatgggagaagagcgggagggcagctttctaaccatataagaggagataccatccccttttggggttcatcaagatgagtaagtcctcaggcggctacacgtacacggagacctcggtattatttttccatttcaaggtctcaaaagattcaaagtccaagatggcaaccctcaaggaccagctgattgtgaatcttcttaaggaagagcaggctccccagaacaagattacagttgttggggttggtgctgttggcatggcttgtgccatcagtatcttaatgaaggacttggcggatgagcttgcccttgttgacgtcatggaagacaaactcaagggcgagatgatggatctccagcatggcagcctcttccttaaaacaccaaaaattgtctccagcaaagactactgtgtaactgcgaactccaagctggtcattatcaccgcgggggcccgtcagcaagagggggagagccggctcaacctggtccagcgaaacgtgaacatcttcaagttcatcattcccaacattgtcaagtacagtccacactgcaagctgctgatcgtctccaatccagtggatatcttgacctacgtggcttggaaaatcagtggctttcccaaaaaccgagtaattggaagtggttgcaatctggattcagcgcggttccgttacctgatgggagagaggctgggggttcacgcgctgagctgtcacggctgggtcctgggagaacatggcgactccagtgtgcctgtgtggagtggtgtgaatgttgccggcgtctccctgaagtctcttaacccagaactgggcactgacgcagacaaggagcagtggaaggaggttcacaagcaggtggtggacagtgcctacgaggtgatcaagctgaaaggttacacatcctgggccattggcctctctgtggcagacttggctgagagcataatgaagaaccttaggcgggtgcatcccatttccaccatgattaagggtctctatggaatcaatgaggatgtcttcctcagtgtcccatgtatcctgggacaaaatggaatctcggatgttgtgaaggtgacactgactcctgaggaagaggcccgcctgaagaagagcgcagacaccctctggggaatccagaaggagctgcagttctaaagtcttccccgtgtcctagcacttcactgtccaggctgcagcagggcttctaggcagaccacacccttctcgtctgagctgtggttagtacagtggtgttgagatggtgtggggaaacatctcactccccacagctctgccctgctgccaagtggtacttgtgtagtggtgacctggttagtgtgacagtcccactgtctctgagacacactgccaactgcaggcttcgattacccctgtgagcctgctgcattgctgccctgcaccaaacatgcctaggccgacgagttcccagttaagtcgtataacctggctccagtgtgtacgtccatgatgcatatcttgtgcataaatgttgtacaggatattttatatattatatgtgtctgtagtgtgcattgcaatattatgtgagatgtaagatctgcatatggatgatggaaccaaccacccaagtgtcatgccaaataaaaccttgaacagtgaaaaaaaaaaaaaaaaaaaaaaaaaaaaaaaaaaaaaaa

SEQ ID NO: 12 - DNA, 1854 bp, Mus musculus
  source 1..1854: mol_type = unassigned DNA
tttttttttttttttttttttttttttttttttttttttcactgttcaaggttttatttggcatgacacttgggtggttggttccatcatccatatgcagatcttacatctcacataatattgcaatgcacactacagacacatataatatataaaatatcctgtacaacatttatgcacaagatatgcatcatggacgtacacactggagccaggttatacgacttaactgggaactcgtcggcctaggcatgtttggtgcagggcagcaatgcagcaggctcacaggggtaatcgaagcctgcagttggcagtgtgtctcagagacagtgggactgtcacactaaccaggtcaccactacacaagtaccacttggcagcagggcagagctgtggggagtgagatgtttccccacaccatctcaacaccactgtactaaccacagctcagacgagaagggtgtggtctgcctagaagccctgctgcagcctggacagtgaagtgctaggacacggggaagactttagaactgcagctccttctggattccccagagggtgtctgcgctcttcttcaggcgggcctcttcctcaggagtcagtgtcaccttcacaacatccgagattccattttgtcccaggatacatgggacactgaggaagacatcctcattgattccatagagacccttaatcatggtggaaatgggatgcacccgcctaaggttcttcattatgctctcagccaagtctgccacagagaggccaatggcccaggatgtgtaacctttcagcttgatcacctcgtaggcactgtccaccacctgcttgtgaacctccttccactgctccttgtctgcgtcagtgcccagttctgggttaagagacttcagggagacgccggcaacattcacaccactccacacaggcacactggagtcgccatgttctcccaggacccagccgtgacagctcagcgcgtgaacccccagcctctctcccatcaggtaacggaaccgcgctgaatccagattgcaaccacttccaattactcggtttttgggaaagccactgattttccaagccacgtaggtcaagatatccactggattggagacgatcagcagcttgcagtgtggactgtacttgacaatgttgggaatgatgaacttgaagatgttcacgtttcgctggaccaggttgagccggctctccccctcttgctgacgggcccccgcggtgataatgaccagcttggagttcgcagttacacagtagtctttgctggagacaatttttggtgttttaaggaagaggctgccatgctggagatccatcatctcgcccttgagtttgtcttccatgacgtcaacaagggcaagctcatccgccaagtccttcattaagatactgatggcacaagccatgccaacagcaccaaccccaacaactgtaatcttgttctggggagcctgctcttccttaagaagattcacaatcagctggtccttgagggttgccatcttggactttgaatcttttgagaccttgaaatggaaaaataataccgaggtctccgtgtacgtgtagccgcctgaggacttactcatcttgatgaaccccaaaaggggatggtatctcctcttatatggttagaaagctgccctcccgctcttctcccatcacccagagccctacagcaagtagagcgccaagttgctccaggaagtaccaaaaatcaagagcagagggcgccaataacggccacaaggtgcgaccccaaggcatagcaacgtgcttaagcctgcgcacgcgcaagcttccttcctaacccccccacccccgcaagaaccc

SEQ ID NO: 13 - DNA, 1661 bp, Mus musculus
  source 1..1661: mol_type = unassigned DNA
ggagcttccatttaaggccccgcccgcgtgctgctctgcgtgctggagccactgtcgccgagctcgggccacgctgcttctcctcgccagtcgcccccccatcgtgcactagcggtctcaaaagattcaaagtccaagatggcaaccctcaaggaccagctgattgtgaatcttcttaaggaagagcaggctccccagaacaagattacagttgttggggttggtgctgttggcatggcttgtgccatcagtatcttaatgaaggacttggcggatgagcttgcccttgttgacgtcatggaagacaaactcaagggcgagatgatggatctccagcatggcagcctcttccttaaaacaccaaaaattgtctccagcaaagactactgtgtaactgcgaactccaagctggtcattatcaccgcgggggcccgtcagcaagagggggagagccggctcaacctggtccagcgaaacgtgaacatcttcaagttcatcattcccaacattgtcaagtacagtccacactgcaagctgctgatcgtctccaatccagtggatatcttgacctacgtggcttggaaaatcagtggctttcccaaaaaccgagtaattggaagtggttgcaatctggattcagcgcggttccgttacctgatgggagagaggctgggggttcacgcgctgagctgtcacggctgggtcctgggagaacatggcgactccagtgtgcctgtgtggagtggtgtgaatgttgccggcgtctccctgaagtctcttaacccagaactgggcactgacgcagacaaggagcagtggaaggaggttcacaagcaggtggtggacagtgcctacgaggtgatcaagctgaaaggttacacatcctgggccattggcctctctgtggcagacttggctgagagcataatgaagaaccttaggcgggtgcatcccatttccaccatgattaagggtctctatggaatcaatgaggatgtcttcctcagtgtcccatgtatcctgggacaaaatggaatctcggatgttgtgaaggtgacactgactcctgaggaagaggcccgcctgaagaagagcgcagacaccctctggggaatccagaaggagctgcagttctaaagtcttccccgtgtcctagcacttcactgtccaggctgcagcagggcttctaggcagaccacacccttctcgtctgagctgtggttagtacagtggtgttgagatggtgtggggaaacatctcactccccacagctctgccctgctgccaagtggtacttgtgtagtggtgacctggttagtgtgacagtcccactgtctctgagacacactgccaactgcaggcttcgattacccctgtgagcctgctgcattgctgccctgcaccaaacatgcctaggccgacgagttcccagttaagtcgtataacctggctccagtgtgtacgtccatgatgcatatcttgtgcataaatgttgtacaggatattttatatattatatgtgtctgtagtgtgcattgcaatattatgtgagatgtaagatctgcatatggatgatggaaccaaccacccaagtgtcatgccaaataaaaccttgaacagtgaaaaaaaaaaaaaaaaaaaaaaaaaaaaaaaaaaaaaaa

SEQ ID NO: 14 - DNA, 1661 bp, Mus musculus
  source 1..1661: mol_type = unassigned DNA
tttttttttttttttttttttttttttttttttttttttcactgttcaaggttttatttggcatgacacttgggtggttggttccatcatccatatgcagatcttacatctcacataatattgcaatgcacactacagacacatataatatataaaatatcctgtacaacatttatgcacaagatatgcatcatggacgtacacactggagccaggttatacgacttaactgggaactcgtcggcctaggcatgtttggtgcagggcagcaatgcagcaggctcacaggggtaatcgaagcctgcagttggcagtgtgtctcagagacagtgggactgtcacactaaccaggtcaccactacacaagtaccacttggcagcagggcagagctgtggggagtgagatgtttccccacaccatctcaacaccactgtactaaccacagctcagacgagaagggtgtggtctgcctagaagccctgctgcagcctggacagtgaagtgctaggacacggggaagactttagaactgcagctccttctggattccccagagggtgtctgcgctcttcttcaggcgggcctcttcctcaggagtcagtgtcaccttcacaacatccgagattccattttgtcccaggatacatgggacactgaggaagacatcctcattgattccatagagacccttaatcatggtggaaatgggatgcacccgcctaaggttcttcattatgctctcagccaagtctgccacagagaggccaatggcccaggatgtgtaacctttcagcttgatcacctcgtaggcactgtccaccacctgcttgtgaacctccttccactgctccttgtctgcgtcagtgcccagttctgggttaagagacttcagggagacgccggcaacattcacaccactccacacaggcacactggagtcgccatgttctcccaggacccagccgtgacagctcagcgcgtgaacccccagcctctctcccatcaggtaacggaaccgcgctgaatccagattgcaaccacttccaattactcggtttttgggaaagccactgattttccaagccacgtaggtcaagatatccactggattggagacgatcagcagcttgcagtgtggactgtacttgacaatgttgggaatgatgaacttgaagatgttcacgtttcgctggaccaggttgagccggctctccccctcttgctgacgggcccccgcggtgataatgaccagcttggagttcgcagttacacagtagtctttgctggagacaatttttggtgttttaaggaagaggctgccatgctggagatccatcatctcgcccttgagtttgtcttccatgacgtcaacaagggcaagctcatccgccaagtccttcattaagatactgatggcacaagccatgccaacagcaccaaccccaacaactgtaatcttgttctggggagcctgctcttccttaagaagattcacaatcagctggtccttgagggttgccatcttggactttgaatcttttgagaccgctagtgcacgatgggggggcgactggcgaggagaagcagcgtggcccgagctcggcgacagtggctccagcacgcagagcagcacgcgggcggggccttaaatggaagctcc

SEQ ID NO: 15 - DNA, 1609 bp, Rattus norvegicus
  source 1..1609: mol_type = unassigned DNA
gtgtgctggagccactgtcgccgatctcgcgcacgctactgctgctgctcgcccgtcgtcccccatcgtgcactaagcggtcccaaaagattcaaagtccaagatggcagccctcaaggaccagctgattgtgaatcttcttaaggaagaacaggtcccccagaacaagattacagttgttggggttggtgctgttggcatggcttgtgccatcagtatcttaatgaaggacttggctgatgagcttgcccttgttgatgtcatagaagataagctaaagggagagatgatggatcttcagcatggcagccttttccttaagacaccaaaaattgtctccagcaaagattatagtgtgactgcaaactccaagctggtcattatcaccgcgggggcccgtcagcaagagggagagagccggctcaatttggtccagcgaaacgtgaacatcttcaagttcatcattccaaatgttgtgaaatacagtccacagtgcaaactgctcatcgtctcaaacccagtggatatcttgacctacgtggcttggaagatcagcggcttccccaaaaacagagttattggaagtggttgcaatctggattcggctcggttccgttacctgatgggagaaaggctgggagttcatccactgagctgtcacgggtgggtcctgggagagcatggcgactccagtgtgcctgtgtggagtggtgtgaacgtcgccggcgtctccctgaagtctctgaacccgcagctgggcacggatgcagacaaggagcagtggaaggatgtgcacaagcaggtggttgacagtgcatacgaagtgatcaagctgaaaggttacacatcctgggccattggcctctccgtggcagacttggccgagagcataatgaagaaccttaggcgggtgcatcccatttccaccatgattaagggtctctatggaatcaaggaggatgtcttcctcagcgtcccatgtatcctgggacaaaatggaatctcagatgttgtgaaggtgacactgactcctgacgaggaggcccgcctgaagaagagtgcagataccctctggggaatccagaaggagctgcagttctaaagtcttcccagtgtcctagcacttcactgtccaggctgcagcagggtttctatggagaccacgcacttctcatctgagctgtggttagtccagttggtccagttgtgttgaggtggtctgggggaaatctcagttccacagctctaccctgctaagtggtacttgtgtagtggtaacctggttagtgtgacaatcccactgtctccaagacacactgccaactgcatgcaggctttgattaccctgtgagcctgctgcattgctgtgctacgcaccctcaccaaacatgcctaggccatgagttcccagttagttataagctggctccagtgtgtaagtccatcgtgtatatcttgtgcataaatgttctacaggatattttctgtattatatgtgtctgtagtgtacattgcaatattacgtgaaatgtaagatctgcatatggatgatggaaccaaccactcaagtgtcatgccaaggaaaacaccaaataaaccttgaacagtg

SEQ ID NO: 16 - DNA, 1609 bp, Rattus norvegicus
  source 1..1609: mol_type = unassigned DNA
cactgttcaaggtttatttggtgttttccttggcatgacacttgagtggttggttccatcatccatatgcagatcttacatttcacgtaatattgcaatgtacactacagacacatataatacagaaaatatcctgtagaacatttatgcacaagatatacacgatggacttacacactggagccagcttataactaactgggaactcatggcctaggcatgtttggtgagggtgcgtagcacagcaatgcagcaggctcacagggtaatcaaagcctgcatgcagttggcagtgtgtcttggagacagtgggattgtcacactaaccaggttaccactacacaagtaccacttagcagggtagagctgtggaactgagatttcccccagaccacctcaacacaactggaccaactggactaaccacagctcagatgagaagtgcgtggtctccatagaaaccctgctgcagcctggacagtgaagtgctaggacactgggaagactttagaactgcagctccttctggattccccagagggtatctgcactcttcttcaggcgggcctcctcgtcaggagtcagtgtcaccttcacaacatctgagattccattttgtcccaggatacatgggacgctgaggaagacatcctccttgattccatagagacccttaatcatggtggaaatgggatgcacccgcctaaggttcttcattatgctctcggccaagtctgccacggagaggccaatggcccaggatgtgtaacctttcagcttgatcacttcgtatgcactgtcaaccacctgcttgtgcacatccttccactgctccttgtctgcatccgtgcccagctgcgggttcagagacttcagggagacgccggcgacgttcacaccactccacacaggcacactggagtcgccatgctctcccaggacccacccgtgacagctcagtggatgaactcccagcctttctcccatcaggtaacggaaccgagccgaatccagattgcaaccacttccaataactctgtttttggggaagccgctgatcttccaagccacgtaggtcaagatatccactgggtttgagacgatgagcagtttgcactgtggactgtatttcacaacatttggaatgatgaacttgaagatgttcacgtttcgctggaccaaattgagccggctctctccctcttgctgacgggcccccgcggtgataatgaccagcttggagtttgcagtcacactataatctttgctggagacaatttttggtgtcttaaggaaaaggctgccatgctgaagatccatcatctctccctttagcttatcttctatgacatcaacaagggcaagctcatcagccaagtccttcattaagatactgatggcacaagccatgccaacagcaccaaccccaacaactgtaatcttgttctgggggacctgttcttccttaagaagattcacaatcagctggtccttgagggctgccatcttggactttgaatcttttgggaccgcttagtgcacgatgggggacgacgggcgagcagcagcagtagcgtgcgcgagatcggcgacagtggctccagcacac

SEQ ID NO: 17 - DNA, 1919 bp, Macaca mulatta
  source 1..1919: mol_type = unassigned DNA
gggcgtaaaagcagggcggtctgaagccgcagctattagtctgatttccgcccacctttccgagcgaggagaaccacaaagcgcgcatgcgcgcggatcaccgcccgcttcagtgccttgggctcgagctttgtggcagttagtggcttttctgcacatacctctggtttttacttgaagcctggctgtgtccttgctgtaggagcaggagtggctcaaagtgatcttgtctgaggaaaggccagccccacttggggttaataaaccgcgatgggtgagccctcaggaggctatacttacacccaaacgtcgatattccttttccacgctaagattccttttggttccaagtccaatatggcaactctcaaggatcagctgattcataatcttctaaaggaagaacagactccccagaataagattacagttgttggggttggtgctgttggcatggcctgtgccatcagtatcttaatgaaggacttggcagatgaacttgctcttgttgatgtcatcgaagacaaattgaagggagagatgatggatctccaacatggcagccttttccttagaacaccaaagattgtctctgggaaagactatagtgtaactgcaaactccaagctggtcattatcacggctggggcacgtcaacaagagggagaaagccgtcttaatttggtccagcgtaacgtgaacatctttaaattcatcgttcctaatgttgtaaaatacagcccgaactgcaagttgcttattgtttcaaatccagtggatatcttgacctacgtggcttggaagataagtggttttcccaaaaaccgtgttattggaagtggttgcaatctggattcagccagattccgttacctgatgggggaaagactgggagttcacccattaagctgtcatgggtgggtccttggggaacatggagattccagtgtgcctgtatggagtggaatgaatgttgctggtgtctccctgaagactctgcacccagatttagggactgataaagataaggaacagtggaaagaggttcacaagcaggtggttgagagtgcttatgaggtgatcaaactcaaaggctacacatcctgggccattggactctctgtagcagatttggcagagagtataatgaagaatcttaggcgagtgcacccagtttccaccatgattaagggtctctatggaataaaggatgatgtcttcctcagtgttccttgcattttgggacagaatggaatctcagaccttgtgaaggtgactctgactcctgaggaagaggcccgtttgaagaagagtgcagatacactttgggggatccaaaaagagctgcaattttaaagtcttctgatgtcatagcatttcactgtctaggctacaacaggattctagttggaggttgtacatgttgtcctttttatctgatctgtgattaaaacagtaatattttaagatggactgggaaaagcattaactcctgaagttagaaataggaatggtttgtgaaatccacagctatatcctgatgctagatggtattaatcttgtgtagtcctaaactggttagtgtgaaatagttctgacgcaccactgccaattctgtacatgctgcatttgccccttgagccaggtggatgtttactgtgtgttttataatttcctggctccttcactgaacatgcctagtccaacattttttcccagtcagtcacatcctgggatccagtgtataaatccaatatcgtatgtcttgtgcataattgttccaaaggagcttattttgtgaactatatatatcagtagtgtacattaccacataacataaaaagatctacatataaacaatacaaccaactatccaagtgttataccaactaaaaaccccaataaaccttgaacagtga

SEQ ID NO: 18 - DNA, 1919 bp, Macaca mulatta
  source 1..1919: mol_type = unassigned DNA
tcactgttcaaggtttattggggtttttagttggtataacacttggatagttggttgtattgtttatatgtagatctttttatgttatgtggtaatgtacactactgatatatatagttcacaaaataagctcctttggaacaattatgcacaagacatacgatattggatttatacactggatcccaggatgtgactgactgggaaaaaatgttggactaggcatgttcagtgaaggagccaggaaattataaaacacacagtaaacatccacctggctcaaggggcaaatgcagcatgtacagaattggcagtggtgcgtcagaactatttcacactaaccagtttaggactacacaagattaataccatctagcatcaggatatagctgtggatttcacaaaccattcctatttctaacttcaggagttaatgcttttcccagtccatcttaaaatattactgttttaatcacagatcagataaaaaggacaacatgtacaacctccaactagaatcctgttgtagcctagacagtgaaatgctatgacatcagaagactttaaaattgcagctctttttggatcccccaaagtgtatctgcactcttcttcaaacgggcctcttcctcaggagtcagagtcaccttcacaaggtctgagattccattctgtcccaaaatgcaaggaacactgaggaagacatcatcctttattccatagagacccttaatcatggtggaaactgggtgcactcgcctaagattcttcattatactctctgccaaatctgctacagagagtccaatggcccaggatgtgtagcctttgagtttgatcacctcataagcactctcaaccacctgcttgtgaacctctttccactgttccttatctttatcagtccctaaatctgggtgcagagtcttcagggagacaccagcaacattcattccactccatacaggcacactggaatctccatgttccccaaggacccacccatgacagcttaatgggtgaactcccagtctttcccccatcaggtaacggaatctggctgaatccagattgcaaccacttccaataacacggtttttgggaaaaccacttatcttccaagccacgtaggtcaagatatccactggatttgaaacaataagcaacttgcagttcgggctgtattttacaacattaggaacgatgaatttaaagatgttcacgttacgctggaccaaattaagacggctttctccctcttgttgacgtgccccagccgtgataatgaccagcttggagtttgcagttacactatagtctttcccagagacaatctttggtgttctaaggaaaaggctgccatgttggagatccatcatctctcccttcaatttgtcttcgatgacatcaacaagagcaagttcatctgccaagtccttcattaagatactgatggcacaggccatgccaacagcaccaaccccaacaactgtaatcttattctggggagtctgttcttcctttagaagattatgaatcagctgatccttgagagttgccatattggacttggaaccaaaaggaatcttagcgtggaaaaggaatatcgacgtttgggtgtaagtatagcctcctgagggctcacccatcgcggtttattaaccccaagtggggctggcctttcctcagacaagatcactttgagccactcctgctcctacagcaaggacacagccaggcttcaagtaaaaaccagaggtatgtgcagaaaagccactaactgccacaaagctcgagcccaaggcactgaagcgggcggtgatccgcgcgcatgcgcgctttgtggttctcctcgctcggaaaggtgggcggaaatcagactaatagctgcggcttcagaccgccctgcttttacgccc

SEQ ID NO: 19 - DNA, 1918 bp, Macaca fascicularis
  source 1..1918: mol_type = unassigned DNA
agtgccttgggctcgagctttgtggcagttagtggcttttctgcacatacctctggtttttacttgaagcctggctgtgtccttgctgtaggagcaggagtggctcaaagtgatcttgtctgaggaaaggccagccccacttggggttaataaaccgcgatgggtgagccctcaggaggctatacttacacccaaacgtcgatattccttttccacgctaagattccttttggttccaagtccaatatggcaactctcaaggatcagctgattcataatcttctaaaggaagaacagactccccagaataagattacagttgttggggttggtgctgttggcatggcctgtgccatcagtatcttaatgaaggacttggcagatgaacttgctcttgttgatgtcatcgaagacaaattgaagggagagatgatggatctccaacatggcagccttttccttagaacaccaaagattgtctctgggaaagactatagtgtaactgcaaactccaagctggtcattatcacggctggggcacgtcaacaagagggagaaagccgtcttaatttggtccagcgtaacgtgaacatctttaaattcatcgttcctaatgttgtaaaatacagcccgaactgcaagttgcttattgtttcaaatccagtggatatcttgacctacgtggcttggaagataagtggttttcccaaaaaccgtgttattggaagtggttgcaatctggattcagccagattccgttacctgatgggggaaagactgggagttcacccattaagctgtcatgggtgggtccttggggaacatggagattccagtgtgcctgtatggagtggaatgaatgttgctggtgtctccctgaagactctgcacccagatttagggactgataaagataaggaacagtggaaagaggttcacaagcaggtggttgagagtgcttatgaggtgatcaaactcaaaggctacacatcctgggccattggactctctgtagcagatttggcagagagtataatgaagaatcttaggcgagtgcacccagtttccaccatgattaagggtctctatggaataaaggatgatgtcttcctcagtgttccttgcattttgggacagaatggaatctcagaccttgtgaaggtgactctgactcctgaggaagaggcccgtttgaagaagagtgcagatacactttgggggatccaaaaagagctgcaattttaaagtcttctgatgtcatagcatttcactgtctaggctacaacaggattctagttggaggttgtgcatgttgtcctttttatctgatctgtgattaaaacagtaatattttaagatggactgggaaaagcattaactcctgaagttagaaataggaatggtttgtgaaatccacagctatatcctgatgctagatggtattaatcttgtgtagtcctaaactggttagtgtgaaatagttctgacgcaccactgccaattctgtacatgctgcatttgccccttgagccaggtggatgtttactgtgtgttttataatttcctggctccttcactgaacatgcctagtccaacattttttcccagtcagtcacatcctgggatccagtgtataaatccaatatcgtatgtcttgtgcataattgttccaaaggagcttattttgtgaactatatatatcagtagtgtacattaccacataacataaaaagatctacatataaacaatacaaccaactatccaagtgttataccaactaaaaaccccaataaaccttgaacagtgaaaaaaaaaaaaaaaaaaaaattaaaaaaaaataaaaaaaaaaaaaaaaaaaaaaaaaaaaaaaaaaaaaaaaaaaaaaaaaaaaaaaaaaaaaaaaaaaaaaaaaaaaaa

SEQ ID NO: 20 - DNA, 1918 bp, Macaca fascicularis
  source 1..1918: mol_type = unassigned DNA
ttttttttttttttttttttttttttttttttttttttttttttttttttttttttttttttttttttttttttttttatttttttttaatttttttttttttttttttttcactgttcaaggtttattggggtttttagttggtataacacttggatagttggttgtattgtttatatgtagatctttttatgttatgtggtaatgtacactactgatatatatagttcacaaaataagctcctttggaacaattatgcacaagacatacgatattggatttatacactggatcccaggatgtgactgactgggaaaaaatgttggactaggcatgttcagtgaaggagccaggaaattataaaacacacagtaaacatccacctggctcaaggggcaaatgcagcatgtacagaattggcagtggtgcgtcagaactatttcacactaaccagtttaggactacacaagattaataccatctagcatcaggatatagctgtggatttcacaaaccattcctatttctaacttcaggagttaatgcttttcccagtccatcttaaaatattactgttttaatcacagatcagataaaaaggacaacatgcacaacctccaactagaatcctgttgtagcctagacagtgaaatgctatgacatcagaagactttaaaattgcagctctttttggatcccccaaagtgtatctgcactcttcttcaaacgggcctcttcctcaggagtcagagtcaccttcacaaggtctgagattccattctgtcccaaaatgcaaggaacactgaggaagacatcatcctttattccatagagacccttaatcatggtggaaactgggtgcactcgcctaagattcttcattatactctctgccaaatctgctacagagagtccaatggcccaggatgtgtagcctttgagtttgatcacctcataagcactctcaaccacctgcttgtgaacctctttccactgttccttatctttatcagtccctaaatctgggtgcagagtcttcagggagacaccagcaacattcattccactccatacaggcacactggaatctccatgttccccaaggacccacccatgacagcttaatgggtgaactcccagtctttcccccatcaggtaacggaatctggctgaatccagattgcaaccacttccaataacacggtttttgggaaaaccacttatcttccaagccacgtaggtcaagatatccactggatttgaaacaataagcaacttgcagttcgggctgtattttacaacattaggaacgatgaatttaaagatgttcacgttacgctggaccaaattaagacggctttctccctcttgttgacgtgccccagccgtgataatgaccagcttggagtttgcagttacactatagtctttcccagagacaatctttggtgttctaaggaaaaggctgccatgttggagatccatcatctctcccttcaatttgtcttcgatgacatcaacaagagcaagttcatctgccaagtccttcattaagatactgatggcacaggccatgccaacagcaccaaccccaacaactgtaatcttattctggggagtctgttcttcctttagaagattatgaatcagctgatccttgagagttgccatattggacttggaaccaaaaggaatcttagcgtggaaaaggaatatcgacgtttgggtgtaagtatagcctcctgagggctcacccatcgcggtttattaaccccaagtggggctggcctttcctcagacaagatcactttgagccactcctgctcctacagcaaggacacagccaggcttcaagtaaaaaccagaggtatgtgcagaaaagccactaactgccacaaagctcgagcccaaggcact

SEQ ID NO: 21 - DNA, 1746 bp, Homo sapiens
  source 1..1746: mol_type = unassigned DNA
ctgggatagcaataacctgtgaaaatgctcccccggctaatttgtatcaatgattatgaacaacatgctaaatcagtacttccaaagtctatatatgactattacaggtctggggcaaatgatgaagaaactttggctgataatattgcagcattttccagatggaagctgtatccaaggatgctccggaatgttgctgaaacagatctgtcgacttctgttttaggacagagggtcagcatgccaatatgtgtgggggctacggccatgcagcgcatggctcatgtggacggcgagcttgccactgtgagagcctgtcagtccctgggaacgggcatgatgttgagttcctgggccacctcctcaattgaagaagtggcggaagctggtcctgaggcacttcgttggctgcaactgtatatctacaaggaccgagaagtcaccaagaagctagtgcggcaggcagagaagatgggctacaaggccatatttgtgacagtggacacaccttacctgggcaaccgtctggatgatgtgcgtaacagattcaaactgccgccacaactcaggatgaaaaattttgaaaccagtactttatcattttctcctgaggaaaattttggagacgacagtggacttgctgcatatgtggctaaagcaatagacccatctatcagctgggaagatatcaaatggctgagaagactgacatcattgccaattgttgcaaagggcattttgagaggtgatgatgccagggaggctgttaaacatggcttgaatgggatcttggtgtcgaatcatggggctcgacaactcgatggggtgccagccactattgatgttctgccagaaattgtggaggctgtggaagggaaggtggaagtcttcctggacgggggtgtgcggaaaggcactgatgttctgaaagctctggctcttggcgccaaggctgtgtttgtggggagaccaatcgtttggggcttagctttccagggggagaaaggtgttcaagatgtcctcgagatactaaaggaagaattccggttggccatggctctgagtgggtgccagaatgtgaaagtcatcgacaagacattggtgaggaaaaatcctttggccgtttccaagatctgacagtgcacaatattttcccatctgtattattttttttcagcatgtattacttgacaaagagacactgtgcagagggtgaccacagtctgtaattccccacttcaatacaaagggtgtcgttcttttccaacaaaatagcaatcccttttatttcattgcttttgacttttcaatgggtgtcctaggaaccttttagaaagaaatggactttcatcctggaaatatattaactgttaaaaagaaaacattgaaaatgtgtttagacaacgtcatcccctggcaggctaaagtgctgtatcctttagtaaaattggaggtagcaaacactaaggtgaaaagataatgatctcattgtttattaacctgtattctgtttacatgtctttaaaacagtggttcttaaattgtaagctcaggttcaaagtgttggtaatgcctgattcacaactttgagaaggtagcactggagagaattggaatgggtggcggtaattggtgatacttctttgaatgtagatttccaatcacatctttagtgtctgaatatatccaaatgttttaggatgtatgttacttcttagagagaaataaagcatttttgggaagaat

SEQ ID NO: 22 - DNA, 1746 bp, Homo sapiens
  source 1..1746: mol_type = unassigned DNA
attcttcccaaaaatgctttatttctctctaagaagtaacatacatcctaaaacatttggatatattcagacactaaagatgtgattggaaatctacattcaaagaagtatcaccaattaccgccacccattccaattctctccagtgctaccttctcaaagttgtgaatcaggcattaccaacactttgaacctgagcttacaatttaagaaccactgttttaaagacatgtaaacagaatacaggttaataaacaatgagatcattatcttttcaccttagtgtttgctacctccaattttactaaaggatacagcactttagcctgccaggggatgacgttgtctaaacacattttcaatgttttctttttaacagttaatatatttccaggatgaaagtccatttctttctaaaaggttcctaggacacccattgaaaagtcaaaagcaatgaaataaaagggattgctattttgttggaaaagaacgacaccctttgtattgaagtggggaattacagactgtggtcaccctctgcacagtgtctctttgtcaagtaatacatgctgaaaaaaaataatacagatgggaaaatattgtgcactgtcagatcttggaaacggccaaaggatttttcctcaccaatgtcttgtcgatgactttcacattctggcacccactcagagccatggccaaccggaattcttcctttagtatctcgaggacatcttgaacacctttctccccctggaaagctaagccccaaacgattggtctccccacaaacacagccttggcgccaagagccagagctttcagaacatcagtgcctttccgcacacccccgtccaggaagacttccaccttcccttccacagcctccacaatttctggcagaacatcaatagtggctggcaccccatcgagttgtcgagccccatgattcgacaccaagatcccattcaagccatgtttaacagcctccctggcatcatcacctctcaaaatgccctttgcaacaattggcaatgatgtcagtcttctcagccatttgatatcttcccagctgatagatgggtctattgctttagccacatatgcagcaagtccactgtcgtctccaaaattttcctcaggagaaaatgataaagtactggtttcaaaatttttcatcctgagttgtggcggcagtttgaatctgttacgcacatcatccagacggttgcccaggtaaggtgtgtccactgtcacaaatatggccttgtagcccatcttctctgcctgccgcactagcttcttggtgacttctcggtccttgtagatatacagttgcagccaacgaagtgcctcaggaccagcttccgccacttcttcaattgaggaggtggcccaggaactcaacatcatgcccgttcccagggactgacaggctctcacagtggcaagctcgccgtccacatgagccatgcgctgcatggccgtagcccccacacatattggcatgctgaccctctgtcctaaaacagaagtcgacagatctgtttcagcaacattccggagcatccttggatacagcttccatctggaaaatgctgcaatattatcagccaaagtttcttcatcatttgccccagacctgtaatagtcatatatagactttggaagtactgatttagcatgttgttcataatcattgatacaaattagccgggggagcattttcacaggttattgctatcccag

SEQ ID NO: 23 - DNA, 1801 bp, Macaca fascicularis
  source 1..1801: mol_type = unassigned DNA
gtgaggatgtagaaagcaatacattaaaaaaaacccaaaaaactccatctgggataacaataacctgtgaaaatgctcccccggctaatttgtatcaatgattatgaacaacatgctaaatcagtacttccaaagtctatatatgactattataggtctggagcaaatgatgaagaaactttggccgataatgttgcagcattttccagatggaagctgtatccaaggatgctccggaatgttgctgaaacagatctgtcgacttctgttttaggacagagggtcagcatgccaatatgcgtgggggccacggccatgcagcgcatggctcatgtggatggcgagcttgccactgtgcgagcctgtcagtccctgggaacgggcatgatgttgagttcctgggccacctcctcaattgaagaagtggcagaagctggtcctgaggcacttcgttggttgtaactgtatatctataaggaccgagaagtcaccaagaagctggtgcagcaggcagagaagacgggctacaaggccatatttgtgacagtggacacaccttacctgggcaaccgtcttgatgatgtacgtaacagattcaagctgccaccacaactcaggatgaaaaattttgaaaccagtactttatcattttctcctgaggaaaattttggagatgacagtggacttgctgcatatgtggctaaagcgatagacccatctatcagctgggaagatatcaaatggctgagaagactgacgtcattgccaattgttgcaaagggcattttgagaggtgatgatgccagggaggctgttaaacatggcttgaatgggatcttggtgtcgaatcatggggctcgacaactcgatggggtgccagccactattgatgttctgccagaaattgtggaggccgtggaagggaaggtggaagtcttcctggacgggggtgtgcggaaaggcactgatgttctgaaagctctggctcttggcgccaaggctgtgtttgtggggagaccaatcatttggggcttagctttccagggggagaaaggtgttcaagatgtccttgagatactaaaggaagaattccggttggccatggctttgagtgggtgccagaatgtgaaagtcatcgacaagacattggtgaggaaaaatcctttggccgtttccaagatctgacagtgcacaatattttcccatctgtattatttttttttcagcatgtattacttgacaaagagacactgtgcagagggtgaccacagtctgtaattccccacttcaatacaaaggatgtcgttcttttccaacaaaatagcaatcccttttagttcattgcttttgacttttcaatgggtgtcctaggaaccttttagaaagaaatggactttcatcctggaaatatattaactgttaaaaagaaaacattgaaaatgtgtttagacaacgtcatcctctggcaggctaaagtactgtatcctttagtaaaattggaggtagcaaacactaaggtgaaaagataatgatctcattgtttattaacctgtattctgtttagatgtctttaaaacagtggttcttaaattgtaagctcaggttcaaagcattggaaatgcctgattgacaacattgagaaggtagccctggatagaattggaatggatggcagtaactggtgatacttctttgaatgcagctttccaatcacatctttagtgtctgaatatatccaaatgttttaggatatatgttacttcttaatcagagagaaataaagcattttttgggaaggata

SEQ ID NO: 24 - DNA, 1801 bp, Macaca fascicularis
  source 1..1801: mol_type = unassigned DNA
tatccttcccaaaaaatgctttatttctctctgattaagaagtaacatatatcctaaaacatttggatatattcagacactaaagatgtgattggaaagctgcattcaaagaagtatcaccagttactgccatccattccaattctatccagggctaccttctcaatgttgtcaatcaggcatttccaatgctttgaacctgagcttacaatttaagaaccactgttttaaagacatctaaacagaatacaggttaataaacaatgagatcattatcttttcaccttagtgtttgctacctccaattttactaaaggatacagtactttagcctgccagaggatgacgttgtctaaacacattttcaatgttttctttttaacagttaatatatttccaggatgaaagtccatttctttctaaaaggttcctaggacacccattgaaaagtcaaaagcaatgaactaaaagggattgctattttgttggaaaagaacgacatcctttgtattgaagtggggaattacagactgtggtcaccctctgcacagtgtctctttgtcaagtaatacatgctgaaaaaaaaataatacagatgggaaaatattgtgcactgtcagatcttggaaacggccaaaggatttttcctcaccaatgtcttgtcgatgactttcacattctggcacccactcaaagccatggccaaccggaattcttcctttagtatctcaaggacatcttgaacacctttctccccctggaaagctaagccccaaatgattggtctccccacaaacacagccttggcgccaagagccagagctttcagaacatcagtgcctttccgcacacccccgtccaggaagacttccaccttcccttccacggcctccacaatttctggcagaacatcaatagtggctggcaccccatcgagttgtcgagccccatgattcgacaccaagatcccattcaagccatgtttaacagcctccctggcatcatcacctctcaaaatgccctttgcaacaattggcaatgacgtcagtcttctcagccatttgatatcttcccagctgatagatgggtctatcgctttagccacatatgcagcaagtccactgtcatctccaaaattttcctcaggagaaaatgataaagtactggtttcaaaatttttcatcctgagttgtggtggcagcttgaatctgttacgtacatcatcaagacggttgcccaggtaaggtgtgtccactgtcacaaatatggccttgtagcccgtcttctctgcctgctgcaccagcttcttggtgacttctcggtccttatagatatacagttacaaccaacgaagtgcctcaggaccagcttctgccacttcttcaattgaggaggtggcccaggaactcaacatcatgcccgttcccagggactgacaggctcgcacagtggcaagctcgccatccacatgagccatgcgctgcatggccgtggcccccacgcatattggcatgctgaccctctgtcctaaaacagaagtcgacagatctgtttcagcaacattccggagcatccttggatacagcttccatctggaaaatgctgcaacattatcggccaaagtttcttcatcatttgctccagacctataatagtcatatatagactttggaagtactgatttagcatgttgttcataatcattgatacaaattagccgggggagcattttcacaggttattgttatcccagatggagttttttgggttttttttaatgtattgctttctacatcctcac

SEQ ID NO: 25 - DNA, 2029 bp, Mus musculus
  source 1..2029: mol_type = unassigned DNA
ggttgccctaccctgccacaatgttgcctcgactggtctgcatcagtgattatgaacagcatgtccgatcagtgcttcagaagtcagtgtatgactattacaggtctggggcaaatgatcaggagacgttagctgataacatccaagcattttctagatggaagctctatccacggatgcttcgcaacgttgctgatatcgatctgtcaacttctgttttaggacagagagtcagcatgccaatatgtgttggggctactgccatgcagtgcatggctcacgtggacggggagctggccactgtgcgagcctgtcagaccatgggaactggcatgatgctgagttcttgggctacctcctcaatagaagaagtggcagaagctggcccagaggcacttcgctggatgcaactgtacatctacaaagaccgtgagatcagcagacagatagtgaagcgagctgagaagcagggttacaaggccatatttgtgactgtggacaccccttacctgggcaaccgcattgatgacgtgcggaacaggttcaagctgccaccacaactcaggatgaaaaactttgaaaccaatgatttggcattttctcctaagggaaattttggagacaacagtggacttgctgaatatgtggcacaagctatagacccatctctcagctgggatgatattacatggctcagacgattgacatcactgcctattgttgtaaagggcattttgagaggtgatgatgccaaggaagctgttaaacatggtgtggatgggatcttggtgtcgaatcatggggcgcgacaactggatggggtgccagctactattgatgtcctgccagagattgttgaggctgtggaagggaaggtagaagtcttcctggatgggggagtaaggaaaggtactgatgttctcaaagctctggccctaggagccaaggccgtttttgtgggaagacccatcatctggggcttggctttccagggggagaaaggtgttcaagatgtcctcgagatattgaaggaagaattccgactggccatggctctgagtgggtgccagaatgtgaaagtcatcgacaagacattggtgaggaaaaatcctttggctgtttccaagatctgacagtgcacaatattttcccatctgtattattttttttccagcgtggattacttgacaaagagacactgtgcagagggtgaccacagactgtaactccccacttctatacaaagggtgtcgttcttttccaacaaaatagccaccccttttccttcattgcttttgacttttcaatgggtgtcctaggaaccttctagaaagaaatggacttgcatcctggaaatatattaactgttaaaaagaaaacattgaaaatgtgtttgggcaacgtcatcccctggcaggctaaagtgctggggaacaaaagatatcctctggtgagattgcaggtagcatgctgaagtgaaagatactgacctcactgttcattaacctgtcttctgtttagatttccttaagacagtggctcttacagtttgcacttggctttgaaatgctggaaatgcccagagaaacatgaggtttggatttgccatgttgagaaaatagcaccaggtagaattgaaatggatggtggtaatttgtgattttttttctagaaacttttcattttttaacaccctatttttttgaaggtagatttttagctatatatcacacgtctgaatatgtctggatgttttgtggcactcattgcatttgaaagggatgtgtctagtccagttgggaccacatggagctatttttacttttgaactttgtctcctcattctcattttaaaataagtgttgacttcctaattcctcttgaatcttttttgattttctcacttttcctcatttatagtcacattcagtgtaaagtacatattttgtggggtccgtgatgaataaagatttgaaattcttgttcagaaggaaggcaaaaaaaaaaaaaagtctttccttttatcaca

SEQ ID NO: 26 - DNA, 2029 bp, Mus musculus
  source 1..2029: mol_type = unassigned DNA
tgtgataaaaggaaagacttttttttttttttgccttccttctgaacaagaatttcaaatctttattcatcacggaccccacaaaatatgtactttacactgaatgtgactataaatgaggaaaagtgagaaaatcaaaaaagattcaagaggaattaggaagtcaacacttattttaaaatgagaatgaggagacaaagttcaaaagtaaaaatagctccatgtggtcccaactggactagacacatccctttcaaatgcaatgagtgccacaaaacatccagacatattcagacgtgtgatatatagctaaaaatctaccttcaaaaaaatagggtgttaaaaaatgaaaagtttctagaaaaaaaatcacaaattaccaccatccatttcaattctacctggtgctattttctcaacatggcaaatccaaacctcatgtttctctgggcatttccagcatttcaaagccaagtgcaaactgtaagagccactgtcttaaggaaatctaaacagaagacaggttaatgaacagtgaggtcagtatctttcacttcagcatgctacctgcaatctcaccagaggatatcttttgttccccagcactttagcctgccaggggatgacgttgcccaaacacattttcaatgttttctttttaacagttaatatatttccaggatgcaagtccatttctttctagaaggttcctaggacacccattgaaaagtcaaaagcaatgaaggaaaaggggtggctattttgttggaaaagaacgacaccctttgtatagaagtggggagttacagtctgtggtcaccctctgcacagtgtctctttgtcaagtaatccacgctggaaaaaaaataatacagatgggaaaatattgtgcactgtcagatcttggaaacagccaaaggatttttcctcaccaatgtcttgtcgatgactttcacattctggcacccactcagagccatggccagtcggaattcttccttcaatatctcgaggacatcttgaacacctttctccccctggaaagccaagccccagatgatgggtcttcccacaaaaacggccttggctcctagggccagagctttgagaacatcagtacctttccttactcccccatccaggaagacttctaccttcccttccacagcctcaacaatctctggcaggacatcaatagtagctggcaccccatccagttgtcgcgccccatgattcgacaccaagatcccatccacaccatgtttaacagcttccttggcatcatcacctctcaaaatgccctttacaacaataggcagtgatgtcaatcgtctgagccatgtaatatcatcccagctgagagatgggtctatagcttgtgccacatattcagcaagtccactgttgtctccaaaatttcccttaggagaaaatgccaaatcattggtttcaaagtttttcatcctgagttgtggtggcagcttgaacctgttccgcacgtcatcaatgcggttgcccaggtaaggggtgtccacagtcacaaatatggccttgtaaccctgcttctcagctcgcttcactatctgtctgctgatctcacggtctttgtagatgtacagttgcatccagcgaagtgcctctgggccagcttctgccacttcttctattgaggaggtagcccaagaactcagcatcatgccagttcccatggtctgacaggctcgcacagtggccagctccccgtccacgtgagccatgcactgcatggcagtagccccaacacatattggcatgctgactctctgtcctaaaacagaagttgacagatcgatatcagcaacgttgcgaagcatccgtggatagagcttccatctagaaaatgcttggatgttatcagctaacgtctcctgatcatttgccccagacctgtaatagtcatacactgacttctgaagcactgatcggacatgctgttcataatcactgatgcagaccagtcgaggcaacattgtggcagggtagggcaacc

SEQ ID NO: 27 - DNA, 1527 bp, Rattus norvegicus
  source 1..1527: mol_type = unassigned DNA
catcccctgacacaatgttgcctcggctggtctgcatcagtgactatgaacagcatgcccggacagtgcttcagaagtcagtatatgattattacaagtctggggcaaatgaccaggagactttggctgataatatcagagcattttctaggtggaagctctatccacggatgctgcgcaacgttgctgatatcgacctgtcgacttctgttttaggacagagagtgagcatgccaatatgcgttggggctacggctatgcagtgcatggctcatgtggatggggagctggccactgttcgagcctgtcagaccatgggaactggcatgatgttgagttcctgggccacttcctcaatagaagaggtggcagaggctggcccggaggcacttcgctggatgcaactctacatctacaaagatcgtgaggtcagcagtcagctagtgaagagggctgagcagatgggttacaaggccatatttgtgactgtggacaccccttacctgggaaatcgcttcgatgatgtgcggaacaggttcaagctaccaccacagctcaggatgaaaaactttgaaaccaacgatttggcattttctcctaaggggaattttggagacaacagtggccttgctgaatatgtggcacaagccatagacccatctctcagctgggatgatattaaatggctcagacggttgacctcactgcccattgttgtaaagggaattttgagaggtgatgatgcccaggaagctgttaaacatggtgtggatgggatcttagtgtcgaatcatggggcacgacaactggatggggtgccagctactattgatgccctgccagagatcgttgaggctgtggaagggaaggtagaagtcttcctggatgggggagtcaggaaaggcaccgatgttctcaaagctctggccctgggagccagagctgtttttgtggggagacccatcatctggggcttggctttccagggggagaaaggtgttcaagatgtcctcgagatactgaaggaagagttccggctggccatggctctgagtgggtgccagaatgtgaaagtcatcgacaagacattggtgaggaaaaatcctttggctgtttccaagatctgacagtgcacaatattttcccatctgtattatttttttccagcatggattacttgacaaagagacactgtgcagagggtgaccacagactgtaactccccacttcaacacaaagggtgtcgttcttttccaacaaaatagccaccccttctccttcattgcttttgacttttcaatgggtgtcctaggaaccttctagaaagaaatggacttgcatcctggaaatatattaactgttaaaaagaaaacattgaaaatgtgtttgggcaacgtcatcccctggcaggctaaagtgagggggaacaaaagatatcctctggtgagattggaggtagcatgccgaagtaaaagacactgacctcactgtttattaaaaaaaaaaaaaaaaaaaaaaaaaaaaaaa

SEQ ID NO: 28 - DNA, 1527 bp, Rattus norvegicus
  source 1..1527: mol_type = unassigned DNA
tttttttttttttttttttttttttttttttaataaacagtgaggtcagtgtcttttacttcggcatgctacctccaatctcaccagaggatatcttttgttccccctcactttagcctgccaggggatgacgttgcccaaacacattttcaatgttttctttttaacagttaatatatttccaggatgcaagtccatttctttctagaaggttcctaggacacccattgaaaagtcaaaagcaatgaaggagaaggggtggctattttgttggaaaagaacgacaccctttgtgttgaagtggggagttacagtctgtggtcaccctctgcacagtgtctctttgtcaagtaatccatgctggaaaaaaataatacagatgggaaaatattgtgcactgtcagatcttggaaacagccaaaggatttttcctcaccaatgtcttgtcgatgactttcacattctggcacccactcagagccatggccagccggaactcttccttcagtatctcgaggacatcttgaacacctttctccccctggaaagccaagccccagatgatgggtctccccacaaaaacagctctggctcccagggccagagctttgagaacatcggtgcctttcctgactcccccatccaggaagacttctaccttcccttccacagcctcaacgatctctggcagggcatcaatagtagctggcaccccatccagttgtcgtgccccatgattcgacactaagatcccatccacaccatgtttaacagcttcctgggcatcatcacctctcaaaattccctttacaacaatgggcagtgaggtcaaccgtctgagccatttaatatcatcccagctgagagatgggtctatggcttgtgccacatattcagcaaggccactgttgtctccaaaattccccttaggagaaaatgccaaatcgttggtttcaaagtttttcatcctgagctgtggtggtagcttgaacctgttccgcacatcatcgaagcgatttcccaggtaaggggtgtccacagtcacaaatatggccttgtaacccatctgctcagccctcttcactagctgactgctgacctcacgatctttgtagatgtagagttgcatccagcgaagtgcctccgggccagcctctgccacctcttctattgaggaagtggcccaggaactcaacatcatgccagttcccatggtctgacaggctcgaacagtggccagctccccatccacatgagccatgcactgcatagccgtagccccaacgcatattggcatgctcactctctgtcctaaaacagaagtcgacaggtcgatatcagcaacgttgcgcagcatccgtggatagagcttccacctagaaaatgctctgatattatcagccaaagtctcctggtcatttgccccagacttgtaataatcatatactgacttctgaagcactgtccgggcatgctgttcatagtcactgatgcagaccagccgaggcaacattgtgtcaggggatg

SEQ ID NO: 29 - DNA, 1611 bp, Homo sapiens
  source 1..1611: mol_type = unassigned DNA
cggaagcccatccaccaatcctcacctctcacctctgtgtccgccctgctgggaaatattccaggctttggccaaggccagtgcagccccaggttcccgagcggcaggttgggtgcggaccatggcctctcacaagctgctggtgaccccccccaaggccctgctcaagcccctctccatccccaaccagctcctgctggggcctggtccttccaacctgcctcctcgcatcatggcagccggggggctgcagatgatcgggtccatgagcaaggatatgtaccagatcatggacgagatcaaggaaggcatccagtacgtgttccagaccaggaacccactcacactggtcatctctggctcgggacactgtgccctggaggccgccctggtcaatgtgctggagcctggggactccttcctggttggggccaatggcatttgggggcagcgagccgtggacatcggggagcgcataggagcccgagtgcacccgatgaccaaggaccctggaggccactacacactgcaggaggtggaggagggcctggcccagcacaagccagtgctgctgttcttaacccacggggagtcgtccaccggcgtgctgcagccccttgatggcttcggggaactctgccacaggtacaagtgcctgctcctggtggattcggtggcatccctgggcgggacccccctttacatggaccggcaaggcatcgacatcctgtactcgggctcccagaaggccctgaacgcccctccagggacctcgctcatctccttcagtgacaaggccaaaaagaagatgtactcccgcaagacgaagcccttctccttctacctggacatcaagtggctggccaacttctggggctgtgacgaccagcccaggatgtaccatcacacaatccccgtcatcagcctgtacagcctgagagagagcctggccctcattgcggaacagggcctggagaacagctggcgccagcaccgcgaggccgcggcgtatctgcatgggcgcctgcaggcactggggctgcagctcttcgtgaaggacccggcgctccggcttcccacagtcaccactgtggctgtacccgctggctatgactggagagacatcgtcagctacgtcatagaccacttcgacattgagatcatgggtggccttgggccctccacggggaaggtgctgcggatcggcctgctgggctgcaatgccacccgcgagaatgtggaccgcgtgacggaggccctgagggcggccctgcagcactgccccaagaagaagctgtgacctgcccactggcacacagctggcactggcacacacctgtcccatgcccaccctgagggatcaggagcaaacagaccctgcaaggtcctccaggcctggggacaggaaagccactgacccagcccgggaggcagaaccaggcagcctccctggccccaggcagcccttttccctccagtggcacctcctggaaacagtccacttgggcgcaaaacccagtgccttccaaatgagctgcagtccccaggccatgagcctcccgggaatgtttaataaagggcctggccaactctcctcaaaaaaaaaaaaaa

SEQ ID NO: 30 - protein, 392 aa, Homo sapiens
MASHKLLVTPPKALLKPLSIPNQLLLGPGPSNLPPRIMAAGGLQMIGSMSKDMYQIMDEIKEGIQYVFQTRNPLTLVISGSGHCALEAALVNVLEPGDSFLVGANGIWGQRAVDIGERIGARVHPMTKDPGGHYTLQEVEEGLAQHKPVLLFLTHGESSTGVLQPLDGFGELCHRYKCLLLVDSVASLGGTPLYMDRQGIDILYSGSQKALNAPPGTSLISFSDKAKKKMYSRKTKPFSFYLDIKWLANFWGCDDQPRMYHHTIPVISLYSLRESLALIAEQGLENSWRQHREAAAYLHGRLQALGLQLFVKDPALRLPTVTTVAVPAGYDWRDIVSYVIDHFDIEIMGGLGPSTGKVLRIGLLGCNATRENVDRVTEALRAALQHCPKKKL

SEQ ID NO: 31 - RNA, 36 nt, synthetic construct
  source 1..36: mol_type = other RNA; note = Description of Artificial Sequence: Synthetic oligonucleotide
atgttgtcctttttatctgagcagccgaaaggctgc

SEQ ID NO: 32 - RNA, 22 nt, synthetic construct
  source 1..22: mol_type = other RNA; note = Description of Artificial Sequence: Synthetic oligonucleotide
tcagataaaaaggacaacatgg

SEQ ID NO: 33 - RNA, 21 nt, synthetic construct
  source 1..21: mol_type = other RNA; note = Description of Artificial Sequence: Synthetic oligonucleotide
gactttcatcctggaaatata

SEQ ID NO: 34 - RNA, 23 nt, synthetic construct
  source 1..23: mol_type = other RNA; note = Description of Artificial Sequence: Synthetic oligonucleotide
tatatttccaggatgaaagtcca

SEQ ID NO: 35 - RNA, 21 nt, synthetic construct
  source 1..21: mol_type = other RNA; note = Description of Artificial Sequence: Synthetic oligonucleotide
  modified_base 1: mod_base = OTHER; note = 2'-O-methylguanosine-3'-phosphorothioate
  modified_base 2: mod_base = OTHER; note = 2'-O-methyladenosine-3'-phosphorothioate
  modified_base 3: mod_base = OTHER; note = 2'-O-methylcytidine-3'-phosphate
  modified_base 4: mod_base = OTHER; note = 2'-O-methyluridine-3'-phosphate
  modified_base 5: mod_base = OTHER; note = 2'-O-methyluridine-3'-phosphate
  modified_base 6: mod_base = OTHER; note = 2'-O-methyluridine-3'-phosphate
  modified_base 7: mod_base = OTHER; note = 2'-fluorocytidine-3'-phosphate
  modified_base 8: mod_base = OTHER; note = 2'-O-methyladenosine-3'-phosphate
  modified_base 9: mod_base = OTHER; note = 2'-fluorouridine-3'-phosphate
  modified_base 10: mod_base = OTHER; note = 2'-fluorocytidine-3'-phosphate
  modified_base 11: mod_base = OTHER; note = 2'-fluorocytidine-3'-phosphate
  modified_base 12: mod_base = OTHER; note = 2'-O-methyluridine-3'-phosphate
  modified_base 13: mod_base = OTHER; note = 2'-O-methylguanosine-3'-phosphate
  modified_base 14: mod_base = OTHER; note = 2'-O-methylguanosine-3'-phosphate
  modified_base 15: mod_base = OTHER; note = 2'-O-methyladenosine-3'-phosphate
  modified_base 16: mod_base = OTHER; note = 2'-O-methyladenosine-3'-phosphate
  modified_base 17: mod_base = OTHER; note = 2'-O-methyladenosine-3'-phosphate
  modified_base 18: mod_base = OTHER; note = 2'-O-methyluridine-3'-phosphate
  modified_base 19: mod_base = OTHER; note = 2'-O-methyladenosine-3'-phosphate
  modified_base 20: mod_base = OTHER; note = 2'-O-methyluridine-3'-phosphate
  modified_base 21: mod_base = OTHER; note = 2'-O-methyladenosine-3'-phosphate
gactttcatcctggaaatata

SEQ ID NO: 36 - RNA, 23 nt, synthetic construct
  source 1..23: mol_type = other RNA; note = Description of Artificial Sequence: Synthetic oligonucleotide
  modified_base 1: mod_base = OTHER; note = 2'-O-methyluridine-3'-phosphorothioate
  modified_base 2: mod_base = OTHER; note = 2'-fluoroadenosine-3'-phosphorothioate
  modified_base 3: mod_base = OTHER; note = 2'-O-methyluridine-3'-phosphate
  modified_base 4: mod_base = OTHER; note = 2'-O-methyladenosine-3'-phosphate
  modified_base 5: mod_base = OTHER; note = 2'-O-methyluridine-3'-phosphate
  modified_base 6: mod_base = OTHER; note = 2'-fluorouridine-3'-phosphate
  modified_base 7: mod_base = OTHER; note = 2'-O-methyluridine-3'-phosphate
  modified_base 8: mod_base = OTHER; note = 2'-fluorocytidine-3'-phosphate
  modified_base 9: mod_base = OTHER; note = 2'-fluorocytidine-3'-phosphate
  modified_base 10: mod_base = OTHER; note = 2'-O-methyladenosine-3'-phosphate
  modified_base 11: mod_base = OTHER; note = 2'-O-methylguanosine-3'-phosphate
  modified_base 12: mod_base = OTHER; note = 2'-O-methylguanosine-3'-phosphate
  modified_base 13: mod_base = OTHER; note = 2'-O-methyladenosine-3'-phosphate
  modified_base 14: mod_base = OTHER; note = 2'-fluorouridine-3'-phosphate
  modified_base 15: mod_base = OTHER; note = 2'-O-methylguanosine-3'-phosphate
  modified_base 16: mod_base = OTHER; note = 2'-fluoroadenosine-3'-phosphate
  modified_base 17: mod_base = OTHER; note = 2'-O-methyladenosine-3'-phosphate
  modified_base 18: mod_base = OTHER; note = 2'-O-methyladenosine-3'-phosphate
  modified_base 19: mod_base = OTHER; note = 2'-O-methylguanosine-3'-phosphate
  modified_base 20: mod_base = OTHER; note = 2'-O-methyluridine-3'-phosphate
  modified_base 21: mod_base = OTHER; note = 2'-O-methylcytidine-3'-phosphorothioate
  modified_base 22: mod_base = OTHER; note = 2'-O-methylcytidine-3'-phosphorothioate
  modified_base 23: mod_base = OTHER; note = 2'-O-methyladenosine-3'-phosphate
tatatttccaggatgaaagtcca

SEQ ID NO: 37 - RNA, 21 nt, synthetic construct
  source 1..21: mol_type = other RNA; note = Description of Artificial Sequence: Synthetic oligonucleotide
  modified_base 1: mod_base = OTHER; note = 2'-fluoroadenosine-3'-phosphorothioate
  modified_base 2: mod_base = OTHER; note = 2'-O-methyluridine-3'-phosphorothioate
  modified_base 3: mod_base = OTHER; note = 2'-fluoroguanosine-3'-phosphate
  modified_base 4: mod_base = OTHER; note = 2'-O-methylguanosine-3'-phosphate
  modified_base 5: mod_base = OTHER; note = 2'-fluorouridine-3'-phosphate
  modified_base 6: mod_base = OTHER; note = 2'-O-methylguanosine-3'-phosphate
  modified_base 7: mod_base = OTHER; note = 2'-fluoroguanosine-3'-phosphate
  modified_base 8: mod_base = OTHER; note = 2'-O-methyluridine-3'-phosphate
  modified_base 9: mod_base = OTHER; note = 2'-fluoroadenosine-3'-phosphate
  modified_base 10: mod_base = OTHER; note = 2'-fluoroadenosine-3'-phosphate
  modified_base 11: mod_base = OTHER; note = 2'-fluorouridine-3'-phosphate
  modified_base 12: mod_base = OTHER; note = 2'-O-methyluridine-3'-phosphate
  modified_base 13: mod_base = OTHER; note = 2'-fluorouridine-3'-phosphate
  modified_base 14: mod_base = OTHER; note = 2'-O-methylguanosine-3'-phosphate
  modified_base 15: mod_base = OTHER; note = 2'-fluorouridine-3'-phosphate
  modified_base 16: mod_base = OTHER; note = 2'-O-methylguanosine-3'-phosphate
  modified_base 17: mod_base = OTHER; note = 2'-fluoroadenosine-3'-phosphate
  modified_base 18: mod_base = OTHER; note = 2'-O-methyluridine-3'-phosphate
  modified_base 19: mod_base = OTHER; note = 2'-fluorouridine-3'-phosphate
  modified_base 20: mod_base = OTHER; note = 2'-O-methyluridine-3'-phosphate
  modified_base 21: mod_base = OTHER; note = 2'-fluorouridine-3'-phosphate N-[tris(GalNAc-alkyl)-amidodecanoyl)]-4-hydroxyprolinol Hyp-(GalNAc-alkyl)3
atggtggtaatttgtgatttt

SEQ ID NO: 38 - RNA, 21 nt, synthetic construct
  source 1..21: mol_type = other RNA; note = Description of Artificial Sequence: Synthetic oligonucleotide
  modified_base 1: mod_base = OTHER; note = 2'-fluoroguanosine-3'-phosphorothioate
  modified_base 2: mod_base = OTHER; note = 2'-O-methyladenosine-3'-phosphorothioate
  modified_base 3: mod_base = OTHER; note = 2'-fluorocytidine-3'-phosphate
  modified_base 4: mod_base = OTHER; note = 2'-O-methyluridine-3'-phosphate
  modified_base 5: mod_base = OTHER; note = 2'-fluorouridine-3'-phosphate
  modified_base 6: mod_base = OTHER; note = 2'-O-methylguanosine-3'-phosphate
  modified_base 7: mod_base = OTHER; note = 2'-fluorocytidine-3'-phosphate
  modified_base 8: mod_base = OTHER; note = 2'-O-methyladenosine-3'-phosphate
  modified_base 9: mod_base = OTHER; note = 2'-fluorouridine-3'-phosphate
  modified_base 10: mod_base = OTHER; note = 2'-fluorocytidine-3'-phosphate
  modified_base 11: mod_base = OTHER; note = 2'-fluorocytidine-3'-phosphate
  modified_base 12: mod_base = OTHER; note = 2'-O-methyluridine-3'-phosphate
  modified_base 13: mod_base = OTHER; note = 2'-fluoroguanosine-3'-phosphate
  modified_base 14: mod_base = OTHER; note = 2'-O-methylguanosine-3'-phosphate
  modified_base 15: mod_base = OTHER; note = 2'-fluoroadenosine-3'-phosphate
  modified_base 16: mod_base = OTHER; note = 2'-O-methyladenosine-3'-phosphate
  modified_base 17: mod_base = OTHER; note = 2'-fluoroadenosine-3'-phosphate
  modified_base 18: mod_base = OTHER; note = 2'-O-methyluridine-3'-phosphate
  modified_base 19: mod_base = OTHER; note = 2'-fluoroadenosine-3'-phosphate
  modified_base 20: mod_base = OTHER; note = 2'-O-methyluridine-3'-phosphate
  modified_base 21: mod_base = OTHER; note = 2'-fluoroadenosine-3'-phosphate N-[tris(GalNAc-alkyl)-amidodecanoyl)]-4-hydroxyprolinol Hyp-(GalNAc-alkyl)3
gacttgcatcctggaaatata

SEQ ID NO: 39 - RNA, 21 nt, synthetic construct
  source 1..21: mol_type = other RNA; note = Description of Artificial Sequence: Synthetic oligonucleotide
  modified_base 1: mod_base = OTHER; note = 2'-fluoroguanosine-3'-phosphorothioate
  modified_base 2: mod_base = OTHER; note = 2'-O-methylguanosine-3'-phosphorothioate
  modified_base 3: mod_base = OTHER; note = 2'-fluoroadenosine-3'-phosphate
  modified_base 4: mod_base = OTHER; note = 2'-O-methyladenosine-3'-phosphate
  modified_base 5: mod_base = OTHER; note = 2'-fluoroguanosine-3'-phosphate
  modified_base 6: mod_base = OTHER; note = 2'-O-methylguanosine-3'-phosphate
  modified_base 7: mod_base = OTHER; note = 2'-fluoroguanosine-3'-phosphate
  modified_base 8: mod_base = OTHER; note = 2'-O-methyladenosine-3'-phosphate
  modified_base 9: mod_base = OTHER; note = 2'-fluoroadenosine-3'-phosphate
  modified_base 10: mod_base = OTHER; note = 2'-fluoroguanosine-3'-phosphate
  modified_base 11: mod_base = OTHER; note = 2'-fluoroguanosine-3'-phosphate
  modified_base 12: mod_base = OTHER; note = 2'-O-methyluridine-3'-phosphate
  modified_base 13: mod_base = OTHER; note = 2'-fluoroadenosine-3'-phosphate
  modified_base 14: mod_base = OTHER; note = 2'-O-methylguanosine-3'-phosphate
  modified_base 15: mod_base = OTHER; note = 2'-fluoroadenosine-3'-phosphate
  modified_base 16: mod_base = OTHER; note = 2'-O-methyladenosine-3'-phosphate
  modified_base 17: mod_base = OTHER; note = 2'-fluoroguanosine-3'-phosphate
  modified_base 18: mod_base = OTHER; note = 2'-O-methyluridine-3'-phosphate
  modified_base 19: mod_base = OTHER; note = 2'-fluorocytidine-3'-phosphate
  modified_base 20: mod_base = OTHER; note = 2'-O-methyluridine-3'-phosphate
  modified_base 21: mod_base = OTHER; note = 2'-fluorouridine-3'-phosphate N-[tris(GalNAc-alkyl)-amidodecanoyl)]-4-hydroxyprolinol Hyp-(GalNAc-alkyl)3
ggaagggaaggtagaagtctt

SEQ ID NO: 40 - RNA, 21 nt, synthetic construct
  source 1..21: mol_type = other RNA; note = Description of Artificial Sequence: Synthetic oligonucleotide
  modified_base 1: mod_base = OTHER; note = 2'-fluorouridine -3'-phosphorothioate
  modified_base 2: mod_base = OTHER; note = 2'-O-methylguanosine-3'-phosphorothioate
  modified_base 3: mod_base = OTHER; note = 2'-fluorouridine-3'-phosphate
  modified_base 4: mod_base = OTHER; note = 2'-O-methylcytidine-3'-phosphate
  modified_base 5: mod_base = OTHER; note = 2'-fluorouridine-3'-phosphate
  modified_base 6: mod_base = OTHER; note = 2'-O-methyluridine-3'-phosphate
  modified_base 7: mod_base = OTHER; note = 2'-fluorocytidine-3'-phosphate
  modified_base 8: mod_base = OTHER; note = 2'-O-methyluridine-3'-phosphate
  modified_base 9: mod_base = OTHER; note = 2'-fluoroguanosine-3'-phosphate
  modified_base 10: mod_base = OTHER; note = 2'-fluorouridine-3'-phosphate
  modified_base 11: mod_base = OTHER; note = 2'-fluorouridine-3'-phosphate
  modified_base 12: mod_base = OTHER; note = 2'-O-methyluridine-3'-phosphate
  modified_base 13: mod_base = OTHER; note = 2'-fluoroadenosine-3'-phosphate
  modified_base 14: mod_base = OTHER; note = 2'-O-methylguanosine-3'-phosphate
  modified_base 15: mod_base = OTHER; note = 2'-fluoroadenosine-3'-phosphate
  modified_base 16: mod_base = OTHER; note = 2'-O-methyluridine-3'-phosphate
  modified_base 17: mod_base = OTHER; note = 2'-fluorouridine-3'-phosphate
  modified_base 18: mod_base = OTHER; note = 2'-O-methyluridine-3'-phosphate
  modified_base 19: mod_base = OTHER; note = 2'-fluorocytidine-3'-phosphate
  modified_base 20: mod_base = OTHER; note = 2'-O-methylcytidine-3'-phosphate
  modified_base 21: mod_base = OTHER; note = 2'-fluorouridine-3'-phosphate N-[tris(GalNAc-alkyl)-amidodecanoyl)]-4-hydroxyprolinol Hyp-(GalNAc-alkyl)3
tgtcttctgtttagatttcct

SEQ ID NO: 41 - RNA, 21 nt, synthetic construct
  source 1..21: mol_type = other RNA; note = Description of Artificial Sequence: Synthetic oligonucleotide
  modified_base 1: mod_base = OTHER; note = 2'-fluorocytidine-3'-phosphorothioate
  modified_base 2: mod_base = OTHER; note = 2'-O-methyluridine-3'-phosphorothioate
  modified_base 3: mod_base = OTHER; note = 2'-fluorouridine-3'-phosphate
  modified_base 4: mod_base = OTHER; note = 2'-O-methyluridine-3'-phosphate
  modified_base 5: mod_base = OTHER; note = 2'-fluoroguanosine-3'-phosphate
  modified_base 6: mod_base = OTHER; note = 2'-O-methylguanosine-3'-phosphate
  modified_base 7: mod_base = OTHER; note = 2'-fluorocytidine-3'-phosphate
  modified_base 8: mod_base = OTHER; note = 2'-O-methyluridine-3'-phosphate
  modified_base 9: mod_base = OTHER; note = 2'-fluoroguanosine-3'-phosphate
  modified_base 10: mod_base = OTHER; note = 2'-fluorouridine-3'-phosphate
  modified_base 11: mod_base = OTHER; note = 2'-fluorouridine-3'-phosphate
  modified_base 12: mod_base = OTHER; note = 2'-O-methyluridine-3'-phosphate
  modified_base 13: mod_base = OTHER; note = 2'-fluorocytidine-3'-phosphate
  modified_base 14: mod_base = OTHER; note = 2'-O-methylcytidine-3'-phosphate
  modified_base 15: mod_base = OTHER; note = 2'-fluoroadenosine-3'-phosphate
  modified_base 16: mod_base = OTHER; note = 2'-O-methyladenosine-3'-phosphate
  modified_base 17: mod_base = OTHER; note = 2'-fluoroguanosine-3'-phosphate
  modified_base 18: mod_base = OTHER; note = 2'-O-methyladenosine-3'-phosphate
  modified_base 19: mod_base = OTHER; note = 2'-fluorouridine-3'-phosphate
  modified_base 20: mod_base = OTHER; note = 2'-O-methylcytidine-3'-phosphate
  modified_base 21: mod_base = OTHER; note = 2'-fluorouridine-3'-phosphate N-[tris(GalNAc-alkyl)-amidodecanoyl)]-4-hydroxyprolinol Hyp-(GalNAc-alkyl)3
ctttggctgtttccaagatct

SEQ ID NO: 42 - RNA, 21 nt, synthetic construct
  source 1..21: mol_type = other RNA; note = Description of Artificial Sequence: Synthetic oligonucleotide
  modified_base 1: mod_base = OTHER; note = 2'-fluoroadenosine-3'-phosphorothioate
  modified_base 2: mod_base = OTHER; note = 2'-O-methyladenosine-3'-phosphorothioate
  modified_base 3: mod_base = OTHER; note = 2'-fluorouridine-3'-phosphate
  modified_base 4: mod_base = OTHER; note = 2'-O-methylguanosine-3'-phosphate
  modified_base 5: mod_base = OTHER; note = 2'-fluorouridine-3'-phosphate
  modified_base 6: mod_base = OTHER; note = 2'-O-methylguanosine-3'-phosphate
  modified_base 7: mod_base = OTHER; note = 2'-fluorouridine-3'-phosphate
  modified_base 8: mod_base = OTHER; note = 2'-O-methyluridine-3'-phosphate
  modified_base 9: mod_base = OTHER; note = 2'-fluorouridine-3'-phosphate
  modified_base 10: mod_base = OTHER; note = 2'-fluoroguanosine-3'-phosphate
  modified_base 11: mod_base = OTHER; note = 2'-fluoroguanosine-3'-phosphate
  modified_base 12: mod_base = OTHER; note = 2'-O-methylguanosine-3'-phosphate
  modified_base 13: mod_base = OTHER; note = 2'-fluorocytidine-3'-phosphate
  modified_base 14: mod_base = OTHER; note = 2'-O-methyladenosine-3'-phosphate
  modified_base 15: mod_base = OTHER; note = 2'-fluoroadenosine-3'-phosphate
  modified_base 16: mod_base = OTHER; note = 2'-O-methylcytidine-3'-phosphate
  modified_base 17: mod_base = OTHER; note = 2'-fluoroguanosine-3'-phosphate
  modified_base 18: mod_base = OTHER; note = 2'-O-methyluridine-3'-phosphate
  modified_base 19: mod_base = OTHER; note = 2'-fluorocytidine-3'-phosphate
  modified_base 20: mod_base = OTHER; note = 2'-O-methyladenosine-3'-phosphate
  modified_base 21: mod_base = OTHER; note = 2'-fluorouridine-3'-phosphate N-[tris(GalNAc-alkyl)-amidodecanoyl)]-4-hydroxyprolinol Hyp-(GalNAc-alkyl)3
aatgtgtttgggcaacgtcat

SEQ ID NO: 43 - RNA, 21 nt, synthetic construct
  source 1..21: mol_type = other RNA; note = Description of Artificial Sequence: Synthetic oligonucleotide
  modified_base 1: mod_base = OTHER; note = 2'-fluorouridine -3'-phosphorothioate
  modified_base 2: mod_base = OTHER; note = 2'-O-methylguanosine-3'-phosphorothioate
  modified_base 3: mod_base = OTHER; note = 2'-fluorouridine-3'-phosphate
  modified_base 4: mod_base = OTHER; note = 2'-O-methylguanosine-3'-phosphate
  modified_base 5: mod_base = OTHER; note = 2'-fluoroadenosine-3'-phosphate
  modified_base 6: mod_base = OTHER; note = 2'-O-methylcytidine-3'-phosphate
  modified_base 7: mod_base = OTHER; note = 2'-fluorouridine-3'-phosphate
  modified_base 8: mod_base = OTHER; note = 2'-O-methylguanosine-3'-phosphate
  modified_base 9: mod_base = OTHER; note = 2'-fluorouridine-3'-phosphate
  modified_base 10: mod_base = OTHER; note = 2'-fluoroguanosine-3'-phosphate
  modified_base 11: mod_base = OTHER; note = 2'-fluoroguanosine-3'-phosphate
  modified_base 12: mod_base = OTHER; note = 2'-O-methyladenosine-3'-phosphate
  modified_base 13: mod_base = OTHER; note = 2'-fluorocytidine-3'-phosphate
  modified_base 14: mod_base = OTHER; note = 2'-O-methyladenosine-3'-phosphate
  modified_base 15: mod_base = OTHER; note = 2'-fluorocytidine-3'-phosphate
  modified_base 16: mod_base = OTHER; note = 2'-O-methylcytidine-3'-phosphate
  modified_base 17: mod_base = OTHER; note = 2'-fluorocytidine-3'-phosphate
  modified_base 18: mod_base = OTHER; note = 2'-O-methylcytidine-3'-phosphate
  modified_base 19: mod_base = OTHER; note = 2'-fluorouridine-3'-phosphate
  modified_base 20: mod_base = OTHER; note = 2'-O-methyluridine-3'-phosphate
  modified_base 21: mod_base = OTHER; note = 2'-fluoroadenosine-3'-phosphate N-[tris(GalNAc-alkyl)-amidodecanoyl)]-4-hydroxyprolinol Hyp-(GalNAc-alkyl)3
tgtgactgtggacacccctta

SEQ ID NO: 44 - RNA, 21 nt, synthetic construct
  source 1..21: mol_type = other RNA; note = Description of Artificial Sequence: Synthetic oligonucleotide
  modified_base 1: mod_base = OTHER; note = 2'-fluoroguanosine-3'-phosphorothioate
  modified_base 2: mod_base = OTHER; note = 2'-O-methyladenosine-3'-phosphorothioate
  modified_base 3: mod_base = OTHER; note = 2'-fluorouridine-3'-phosphate
  modified_base 4: mod_base = OTHER; note = 2'-O-methylguanosine-3'-phosphate
  modified_base 5: mod_base = OTHER; note = 2'-fluoroguanosine-3'-phosphate
  modified_base 6: mod_base = OTHER; note = 2'-O-methylguanosine-3'-phosphate
  modified_base 7: mod_base = OTHER; note = 2'-fluoroguanosine-3'-phosphate
  modified_base 8: mod_base = OTHER; note = 2'-O-methyluridine-3'-phosphate
  modified_base 9: mod_base = OTHER; note = 2'-fluoroguanosine-3'-phosphate
  modified_base 10: mod_base = OTHER; note = 2'-fluorocytidine-3'-phosphate
  modified_base 11: mod_base = OTHER; note = 2'-fluorocytidine-3'-phosphate
  modified_base 12: mod_base = OTHER; note = 2'-O-methyladenosine-3'-phosphate
  modified_base 13: mod_base = OTHER; note = 2'-fluoroguanosine-3'-phosphate
  modified_base 14: mod_base = OTHER; note = 2'-O-methylcytidine-3'-phosphate
  modified_base 15: mod_base = OTHER; note = 2'-fluorouridine-3'-phosphate
  modified_base 16: mod_base = OTHER; note = 2'-O-methyladenosine-3'-phosphate
  modified_base 17: mod_base = OTHER; note = 2'-fluorocytidine-3'-phosphate
  modified_base 18: mod_base = OTHER; note = 2'-O-methyluridine-3'-phosphate
  modified_base 19: mod_base = OTHER; note = 2'-fluoroadenosine-3'-phosphate
  modified_base 20: mod_base = OTHER; note = 2'-O-methyluridine-3'-phosphate
  modified_base 21: mod_base = OTHER; note = 2'-fluorouridine-3'-phosphate N-[tris(GalNAc-alkyl)-amidodecanoyl)]-4-hydroxyprolinol Hyp-(GalNAc-alkyl)3
gatggggtgccagctactatt

SEQ ID NO: 45 - RNA, 21 nt, synthetic construct
  source 1..21: mol_type = other RNA; note = Description of Artificial Sequence: Synthetic oligonucleotide
  modified_base 1: mod_base = OTHER; note = 2'-fluoroguanosine-3'-phosphorothioate
  modified_base 2: mod_base = OTHER; note = 2'-O-methyladenosine-3'-phosphorothioate
  modified_base 3: mod_base = OTHER; note = 2'-fluoroadenosine-3'-phosphate
  modified_base 4: mod_base = OTHER; note = 2'-O-methyladenosine-3'-phosphate
  modified_base 5: mod_base = OTHER; note = 2'-fluoroadenosine-3'-phosphate
  modified_base 6: mod_base = OTHER; note = 2'-O-methyluridine-3'-phosphate
  modified_base 7: mod_base = OTHER; note = 2'-fluoroguanosine-3'-phosphate
  modified_base 8: mod_base = OTHER; note = 2'-O-methyluridine-3'-phosphate
  modified_base 9: mod_base = OTHER; note = 2'-fluoroguanosine-3'-phosphate
  modified_base 10: mod_base = OTHER; note = 2'-fluorouridine-3'-phosphate
  modified_base 11: mod_base = OTHER; note = 2'-fluorouridine-3'-phosphate
  modified_base 12: mod_base = OTHER; note = 2'-O-methyluridine-3'-phosphate
  modified_base 13: mod_base = OTHER; note = 2'-fluoroguanosine-3'-phosphate
  modified_base 14: mod_base = OTHER; note = 2'-O-methylguanosine-3'-phosphate
  modified_base 15: mod_base = OTHER; note = 2'-fluoroguanosine-3'-phosphate
  modified_base 16: mod_base = OTHER; note = 2'-O-methylcytidine-3'-phosphate
  modified_base 17: mod_base = OTHER; note = 2'-fluoroadenosine-3'-phosphate
  modified_base 18: mod_base = OTHER; note = 2'-O-methyladenosine-3'-phosphate
  modified_base 19: mod_base = OTHER; note = 2'-fluorocytidine-3'-phosphate
  modified_base 20: mod_base = OTHER; note = 2'-O-methylguanosine-3'-phosphate
  modified_base 21: mod_base = OTHER; note = 2'-fluorouridine-3'-phosphate N-[tris(GalNAc-alkyl)-amidodecanoyl)]-4-hydroxyprolinol Hyp-(GalNAc-alkyl)3
gaaaatgtgtttgggcaacgt

SEQ ID NO: 46 - RNA, 21 nt, synthetic construct
  source 1..21: mol_type = other RNA; note = Description of Artificial Sequence: Synthetic oligonucleotide
  modified_base 1: mod_base = OTHER; note = 2'-fluoroguanosine-3'-phosphorothioate
  modified_base 2: mod_base = OTHER; note = 2'-O-methylguanosine-3'-phosphorothioate
  modified_base 3: mod_base = OTHER; note = 2'-fluorocytidine-3'-phosphate
  modified_base 4: mod_base = OTHER; note = 2'-O-methyluridine-3'-phosphate
  modified_base 5: mod_base = OTHER; note = 2'-fluoroguanosine-3'-phosphate
  modified_base 6: mod_base = OTHER; note = 2'-O-methyluridine-3'-phosphate
  modified_base 7: mod_base = OTHER; note = 2'-fluorouridine-3'-phosphate
  modified_base 8: mod_base = OTHER; note = 2'-O-methyluridine-3'-phosphate
  modified_base 9: mod_base = OTHER; note = 2'-fluorocytidine-3'-phosphate
  modified_base 10: mod_base = OTHER; note = 2'-fluorocytidine-3'-phosphate
  modified_base 11: mod_base = OTHER; note = 2'-fluoroadenosine-3'-phosphate
  modified_base 12: mod_base = OTHER; note = 2'-O-methyladenosine-3'-phosphate
  modified_base 13: mod_base = OTHER; note = 2'-fluoroguanosine-3'-phosphate
  modified_base 14: mod_base = OTHER; note = 2'-O-methyladenosine-3'-phosphate
  modified_base 15: mod_base = OTHER; note = 2'-fluorouridine-3'-phosphate
  modified_base 16: mod_base = OTHER; note = 2'-O-methylcytidine-3'-phosphate
  modified_base 17: mod_base = OTHER; note = 2'-fluorouridine-3'-phosphate
  modified_base 18: mod_base = OTHER; note = 2'-O-methylguanosine-3'-phosphate
  modified_base 19: mod_base = OTHER; note = 2'-fluoroadenosine-3'-phosphate
  modified_base 20: mod_base = OTHER; note = 2'-O-methylcytidine-3'-phosphate
  modified_base 21: mod_base = OTHER; note = 2'-fluoroadenosine-3'-phosphate N-[tris(GalNAc-alkyl)-amidodecanoyl)]-4-hydroxyprolinol Hyp-(GalNAc-alkyl)3
ggctgtttccaagatctgaca

SEQ ID NO: 47 - RNA, 21 nt, synthetic construct
  source 1..21: mol_type = other RNA; note = Description of Artificial Sequence: Synthetic oligonucleotide
  modified_base 1: mod_base = OTHER; note = 2'-fluorouridine -3'-phosphorothioate
  modified_base 2: mod_base = OTHER; note = 2'-O-methylcytidine-3'-phosphorothioate
  modified_base 3: mod_base = OTHER; note = 2'-fluorocytidine-3'-phosphate
  modified_base 4: mod_base = OTHER; note = 2'-O-methyladenosine-3'-phosphate
  modified_base 5: mod_base = OTHER; note = 2'-fluoroadenosine-3'-phosphate
  modified_base 6: mod_base = OTHER; note = 2'-O-methylcytidine-3'-phosphate
  modified_base 7: mod_base = OTHER; note = 2'-fluoroadenosine-3'-phosphate
  modified_base 8: mod_base = OTHER; note = 2'-O-methyladenosine-3'-phosphate
  modified_base 9: mod_base = OTHER; note = 2'-fluoroadenosine-3'-phosphate
  modified_base 10: mod_base = OTHER; note = 2'-fluoroadenosine-3'-phosphate
  modified_base 11: mod_base = OTHER; note = 2'-fluorouridine-3'-phosphate
  modified_base 12: mod_base = OTHER; note = 2'-O-methyladenosine-3'-phosphate
  modified_base 13: mod_base = OTHER; note = 2'-fluoroguanosine-3'-phosphate
  modified_base 14: mod_base = OTHER; note = 2'-O-methylcytidine-3'-phosphate
  modified_base 15: mod_base = OTHER; note = 2'-fluorocytidine-3'-phosphate
  modified_base 16: mod_base = OTHER; note = 2'-O-methyladenosine-3'-phosphate
  modified_base 17: mod_base = OTHER; note = 2'-fluorocytidine-3'-phosphate
  modified_base 18: mod_base = OTHER; note = 2'-O-methylcytidine-3'-phosphate
  modified_base 19: mod_base = OTHER; note = 2'-fluorocytidine-3'-phosphate
  modified_base 20: mod_base = OTHER; note = 2'-O-methylcytidine-3'-phosphate
  modified_base 21: mod_base = OTHER; note = 2'-fluorouridine-3'-phosphate N-[tris(GalNAc-alkyl)-amidodecanoyl)]-4-hydroxyprolinol Hyp-(GalNAc-alkyl)3
tccaacaaaatagccacccct

SEQ ID NO: 48 - RNA, 21 nt, synthetic construct
  source 1..21: mol_type = other RNA; note = Description of Artificial Sequence: Synthetic oligonucleotide
  modified_base 1: mod_base = OTHER; note = 2'-fluoroguanosine-3'-phosphorothioate
  modified_base 2: mod_base = OTHER; note = 2'-O-methyluridine-3'-phosphorothioate
  modified_base 3: mod_base = OTHER; note = 2'-fluorocytidine-3'-phosphate
  modified_base 4: mod_base = OTHER; note = 2'-O-methyluridine-3'-phosphate
  modified_base 5: mod_base = OTHER; note = 2'-fluorouridine-3'-phosphate
  modified_base 6: mod_base = OTHER; note = 2'-O-methylcytidine-3'-phosphate
  modified_base 7: mod_base = OTHER; note = 2'-fluorouridine-3'-phosphate
  modified_base 8: mod_base = OTHER; note = 2'-O-methylguanosine-3'-phosphate
  modified_base 9: mod_base = OTHER; note = 2'-fluorouridine-3'-phosphate
  modified_base 10: mod_base = OTHER; note = 2'-fluorouridine-3'-phosphate
  modified_base 11: mod_base = OTHER; note = 2'-fluorouridine-3'-phosphate
  modified_base 12: mod_base = OTHER; note = 2'-O-methyladenosine-3'-phosphate
  modified_base 13: mod_base = OTHER; note = 2'-fluoroguanosine-3'-phosphate
  modified_base 14: mod_base = OTHER; note = 2'-O-methyladenosine-3'-phosphate
  modified_base 15: mod_base = OTHER; note = 2'-fluorouridine-3'-phosphate
  modified_base 16: mod_base = OTHER; note = 2'-O-methyluridine-3'-phosphate
  modified_base 17: mod_base = OTHER; note = 2'-fluorouridine-3'-phosphate
  modified_base 18: mod_base = OTHER; note = 2'-O-methylcytidine-3'-phosphate
  modified_base 19: mod_base = OTHER; note = 2'-fluorocytidine-3'-phosphate
  modified_base 20: mod_base = OTHER; note = 2'-O-methyluridine-3'-phosphate
  modified_base 21: mod_base = OTHER; note = 2'-fluorouridine-3'-phosphate N-[tris(GalNAc-alkyl)-amidodecanoyl)]-4-hydroxyprolinol Hyp-(GalNAc-alkyl)3
gtcttctgtttagatttcctt

SEQ ID NO: 49 - RNA, 21 nt, synthetic construct
  source 1..21: mol_type = other RNA; note = Description of Artificial Sequence: Synthetic oligonucleotide
  modified_base 1: mod_base = OTHER; note = 2'-fluorouridine -3'-phosphorothioate
  modified_base 2: mod_base = OTHER; note = 2'-O-methylguanosine-3'-phosphorothioate
  modified_base 3: mod_base = OTHER; note = 2'-fluoroguanosine-3'-phosphate
  modified_base 4: mod_base = OTHER; note = 2'-O-methyladenosine-3'-phosphate
  modified_base 5: mod_base = OTHER; note = 2'-fluoroadenosine-3'-phosphate
  modified_base 6: mod_base = OTHER; note = 2'-O-methylguanosine-3'-phosphate
  modified_base 7: mod_base = OTHER; note = 2'-fluoroguanosine-3'-phosphate
  modified_base 8: mod_base = OTHER; note = 2'-O-methylguanosine-3'-phosphate
  modified_base 9: mod_base = OTHER; note = 2'-fluoroadenosine-3'-phosphate
  modified_base 10: mod_base = OTHER; note = 2'-fluoroadenosine-3'-phosphate
  modified_base 11: mod_base = OTHER; note = 2'-fluoroguanosine-3'-phosphate
  modified_base 12: mod_base = OTHER; note = 2'-O-methylguanosine-3'-phosphate
  modified_base 13: mod_base = OTHER; note = 2'-fluorouridine-3'-phosphate
  modified_base 14: mod_base = OTHER; note = 2'-O-methyladenosine-3'-phosphate
  modified_base 15: mod_base = OTHER; note = 2'-fluoroguanosine-3'-phosphate
  modified_base 16: mod_base = OTHER; note = 2'-O-methyladenosine-3'-phosphate
  modified_base 17: mod_base = OTHER; note = 2'-fluoroadenosine-3'-phosphate
  modified_base 18: mod_base = OTHER; note = 2'-O-methylguanosine-3'-phosphate
  modified_base 19: mod_base = OTHER; note = 2'-fluorouridine-3'-phosphate
  modified_base 20: mod_base = OTHER; note = 2'-O-methylcytidine-3'-phosphate
  modified_base 21: mod_base = OTHER; note = 2'-fluorouridine-3'-phosphate N-[tris(GalNAc-alkyl)-amidodecanoyl)]-4-hydroxyprolinol Hyp-(GalNAc-alkyl)3
tggaagggaaggtagaagtct

SEQ ID NO: 50 - RNA, 21 nt, synthetic construct
  source 1..21: mol_type = other RNA; note = Description of Artificial Sequence: Synthetic oligonucleotide
  modified_base 1: mod_base = OTHER; note = 2'-fluorouridine -3'-phosphorothioate
  modified_base 2: mod_base = OTHER; note = 2'-O-methylcytidine-3'-phosphorothioate
  modified_base 3: mod_base = OTHER; note = 2'-fluorocytidine-3'-phosphate
  modified_base 4: mod_base = OTHER; note = 2'-O-methyluridine-3'-phosphate
  modified_base 5: mod_base = OTHER; note = 2'-fluorouridine-3'-phosphate
  modified_base 6: mod_base = OTHER; note = 2'-O-methyluridine-3'-phosphate
  modified_base 7: mod_base = OTHER; note = 2'-fluoroguanosine-3'-phosphate
  modified_base 8: mod_base = OTHER; note = 2'-O-methylguanosine-3'-phosphate
  modified_base 9: mod_base = OTHER; note = 2'-fluorocytidine-3'-phosphate
  modified_base 10: mod_base = OTHER; note = 2'-fluorouridine-3'-phosphate
  modified_base 11: mod_base = OTHER; note = 2'-fluoroguanosine-3'-phosphate
  modified_base 12: mod_base = OTHER; note = 2'-O-methyluridine-3'-phosphate
  modified_base 13: mod_base = OTHER; note = 2'-fluorouridine-3'-phosphate
  modified_base 14: mod_base = OTHER; note = 2'-O-methyluridine-3'-phosphate
  modified_base 15: mod_base = OTHER; note = 2'-fluorocytidine-3'-phosphate
  modified_base 16: mod_base = OTHER; note = 2'-O-methylcytidine-3'-phosphate
  modified_base 17: mod_base = OTHER; note = 2'-fluoroadenosine-3'-phosphate
  modified_base 18: mod_base = OTHER; note = 2'-O-methyladenosine-3'-phosphate
  modified_base 19: mod_base = OTHER; note = 2'-fluoroguanosine-3'-phosphate
  modified_base 20: mod_base = OTHER; note = 2'-O-methyladenosine-3'-phosphate
  modified_base 21: mod_base = OTHER; note = 2'-fluorouridine-3'-phosphate N-[tris(GalNAc-alkyl)-amidodecanoyl)]-4-hydroxyprolinol Hyp-(GalNAc-alkyl)3
tcctttggctgtttccaagat

SEQ ID NO: 51 - RNA, 21 nt, synthetic construct
  source 1..21: mol_type = other RNA; note = Description of Artificial Sequence: Synthetic oligonucleotide
  modified_base 1: mod_base = OTHER; note = 2'-fluorocytidine-3'-phosphorothioate
  modified_base 2: mod_base = OTHER; note = 2'-O-methyladenosine-3'-phosphorothioate
  modified_base 3: mod_base = OTHER; note = 2'-fluorouridine-3'-phosphate
  modified_base 4: mod_base = OTHER; note = 2'-O-methylcytidine-3'-phosphate
  modified_base 5: mod_base = OTHER; note = 2'-fluorouridine-3'-phosphate
  modified_base 6: mod_base = OTHER; note = 2'-O-methylcytidine-3'-phosphate
  modified_base 7: mod_base = OTHER; note = 2'-fluorouridine-3'-phosphate
  modified_base 8: mod_base = OTHER; note = 2'-O-methylcytidine-3'-phosphate
  modified_base 9: mod_base = OTHER; note = 2'-fluoroadenosine-3'-phosphate
  modified_base 10: mod_base = OTHER; note = 2'-fluoroguanosine-3'-phosphate
  modified_base 11: mod_base = OTHER; note = 2'-fluorocytidine-3'-phosphate
  modified_base 12: mod_base = OTHER; note = 2'-O-methyluridine-3'-phosphate
  modified_base 13: mod_base = OTHER; note = 2'-fluoroguanosine-3'-phosphate
  modified_base 14: mod_base = OTHER; note = 2'-O-methylguanosine-3'-phosphate
  modified_base 15: mod_base = OTHER; note = 2'-fluoroguanosine-3'-phosphate
  modified_base 16: mod_base = OTHER; note = 2'-O-methyladenosine-3'-phosphate
  modified_base 17: mod_base = OTHER; note = 2'-fluorouridine-3'-phosphate
  modified_base 18: mod_base = OTHER; note = 2'-O-methylguanosine-3'-phosphate
  modified_base 19: mod_base = OTHER; note = 2'-fluoroadenosine-3'-phosphate
  modified_base 20: mod_base = OTHER; note = 2'-O-methyluridine-3'-phosphate
  modified_base 21: mod_base = OTHER; note = 2'-fluoroadenosine-3'-phosphate N-[tris(GalNAc-alkyl)-amidodecanoyl)]-4-hydroxyprolinol Hyp-(GalNAc-alkyl)3
catctctcagctgggatgata

SEQ ID NO: 52 - RNA, 21 nt, synthetic construct
  source 1..21: mol_type = other RNA; note = Description of Artificial Sequence: Synthetic oligonucleotide
  modified_base 1: mod_base = OTHER; note = 2'-fluoroguanosine-3'-phosphorothioate
  modified_base 2: mod_base = OTHER; note = 2'-O-methylguanosine-3'-phosphorothioate
  modified_base 3: mod_base = OTHER; note = 2'-fluoroguanosine-3'-phosphate
  modified_base 4: mod_base = OTHER; note = 2'-O-methylguanosine-3'-phosphate
  modified_base 5: mod_base = OTHER; note = 2'-fluorouridine-3'-phosphate
  modified_base 6: mod_base = OTHER; note = 2'-O-methylguanosine-3'-phosphate
  modified_base 7: mod_base = OTHER; note = 2'-fluorocytidine-3'-phosphate
  modified_base 8: mod_base = OTHER; note = 2'-O-methylcytidine-3'-phosphate
  modified_base 9: mod_base = OTHER; note = 2'-fluoroadenosine-3'-phosphate
  modified_base 10: mod_base = OTHER; note = 2'-fluoroguanosine-3'-phosphate
  modified_base 11: mod_base = OTHER; note = 2'-fluorocytidine-3'-phosphate
  modified_base 12: mod_base = OTHER; note = 2'-O-methyluridine-3'-phosphate
  modified_base 13: mod_base = OTHER; note = 2'-fluoroadenosine-3'-phosphate
  modified_base 14: mod_base = OTHER; note = 2'-O-methylcytidine-3'-phosphate
  modified_base 15: mod_base = OTHER; note = 2'-fluorouridine-3'-phosphate
  modified_base 16: mod_base = OTHER; note = 2'-O-methyladenosine-3'-phosphate
  modified_base 17: mod_base = OTHER; note = 2'-fluorouridine-3'-phosphate
  modified_base 18: mod_base = OTHER; note = 2'-O-methyluridine-3'-phosphate
  modified_base 19: mod_base = OTHER; note = 2'-fluoroguanosine-3'-phosphate
  modified_base 20: mod_base = OTHER; note = 2'-O-methyladenosine-3'-phosphate
  modified_base 21: mod_base = OTHER; note = 2'-fluorouridine-3'-phosphate N-[tris(GalNAc-alkyl)-amidodecanoyl)]-4-hydroxyprolinol Hyp-(GalNAc-alkyl)3
ggggtgccagctactattgat

SEQ ID NO: 53 - RNA, 21 nt, synthetic construct
  source 1..21: mol_type = other RNA; note = Description of Artificial Sequence: Synthetic oligonucleotide
  modified_base 1: mod_base = OTHER; note = 2'-fluoroadenosine-3'-phosphorothioate
  modified_base 2: mod_base = OTHER; note = 2'-O-methyluridine-3'-phosphorothioate
  modified_base 3: mod_base = OTHER; note = 2'-fluoroguanosine-3'-phosphate
  modified_base 4: mod_base = OTHER; note = 2'-O-methyluridine-3'-phosphate
  modified_base 5: mod_base = OTHER; note = 2'-fluoroguanosine-3'-phosphate
  modified_base 6: mod_base = OTHER; note = 2'-O-methyluridine-3'-phosphate
  modified_base 7: mod_base = OTHER; note = 2'-fluorouridine-3'-phosphate
  modified_base 8: mod_base = OTHER; note = 2'-O-methyluridine-3'-phosphate
  modified_base 9: mod_base = OTHER; note = 2'-fluoroguanosine-3'-phosphate
  modified_base 10: mod_base = OTHER; note = 2'-fluoroguanosine-3'-phosphate
  modified_base 11: mod_base = OTHER; note = 2'-fluoroguanosine-3'-phosphate
  modified_base 12: mod_base = OTHER; note = 2'-O-methylcytidine-3'-phosphate
  modified_base 13: mod_base = OTHER; note = 2'-fluoroadenosine-3'-phosphate
  modified_base 14: mod_base = OTHER; note = 2'-O-methyladenosine-3'-phosphate
  modified_base 15: mod_base = OTHER; note = 2'-fluorocytidine-3'-phosphate
  modified_base 16: mod_base = OTHER; note = 2'-O-methylguanosine-3'-phosphate
  modified_base 17: mod_base = OTHER; note = 2'-fluorouridine-3'-phosphate
  modified_base 18: mod_base = OTHER; note = 2'-O-methylcytidine-3'-phosphate
  modified_base 19: mod_base = OTHER; note = 2'-fluoroadenosine-3'-phosphate
  modified_base 20: mod_base = OTHER; note = 2'-O-methyluridine-3'-phosphate
  modified_base 21: mod_base = OTHER; note = 2'-fluoroadenosine-3'-phosphate N-[tris(GalNAc-alkyl)-amidodecanoyl)]-4-hydroxyprolinol Hyp-(GalNAc-alkyl)3
atgtgtttgggcaacgtcata

SEQ ID NO: 54 - RNA, 21 nt, synthetic construct
  source 1..21: mol_type = other RNA; note = Description of Artificial Sequence: Synthetic oligonucleotide
  modified_base 1: mod_base = OTHER; note = 2'-fluorocytidine-3'-phosphorothioate
  modified_base 2: mod_base = OTHER; note = 2'-O-methyluridine-3'-phosphorothioate
  modified_base 3: mod_base = OTHER; note = 2'-fluoroguanosine-3'-phosphate
  modified_base 4: mod_base = OTHER; note = 2'-O-methyluridine-3'-phosphate
  modified_base 5: mod_base = OTHER; note = 2'-fluorouridine-3'-phosphate
  modified_base 6: mod_base = OTHER; note = 2'-O-methyluridine-3'-phosphate
  modified_base 7: mod_base = OTHER; note = 2'-fluoroadenosine-3'-phosphate
  modified_base 8: mod_base = OTHER; note = 2'-O-methylguanosine-3'-phosphate
  modified_base 9: mod_base = OTHER; note = 2'-fluoroadenosine-3'-phosphate
  modified_base 10: mod_base = OTHER; note = 2'-fluorouridine-3'-phosphate
  modified_base 11: mod_base = OTHER; note = 2'-fluorouridine-3'-phosphate
  modified_base 12: mod_base = OTHER; note = 2'-O-methyluridine-3'-phosphate
  modified_base 13: mod_base = OTHER; note = 2'-fluorocytidine-3'-phosphate
  modified_base 14: mod_base = OTHER; note = 2'-O-methylcytidine-3'-phosphate
  modified_base 15: mod_base = OTHER; note = 2'-fluorouridine-3'-phosphate
  modified_base 16: mod_base = OTHER; note = 2'-O-methyluridine-3'-phosphate
  modified_base 17: mod_base = OTHER; note = 2'-fluoroadenosine-3'-phosphate
  modified_base 18: mod_base = OTHER; note = 2'-O-methyladenosine-3'-phosphate
  modified_base 19: mod_base = OTHER; note = 2'-fluoroguanosine-3'-phosphate
  modified_base 20: mod_base = OTHER; note = 2'-O-methyladenosine-3'-phosphate
  modified_base 21: mod_base = OTHER; note = 2'-fluoroadenosine-3'-phosphate N-[tris(GalNAc-alkyl)-amidodecanoyl)]-4-hydroxyprolinol Hyp-(GalNAc-alkyl)3
ctgtttagatttccttaagaa

SEQ ID NO: 55 - RNA, 21 nt, synthetic construct
  source 1..21: mol_type = other RNA; note = Description of Artificial Sequence: Synthetic oligonucleotide
  modified_base 1: mod_base = OTHER; note = 2'-fluoroadenosine-3'-phosphorothioate
  modified_base 2: mod_base = OTHER; note = 2'-O-methylguanosine-3'-phosphorothioate
  modified_base 3: mod_base = OTHER; note = 2'-fluoroadenosine-3'-phosphate
  modified_base 4: mod_base = OTHER; note = 2'-O-methyladenosine-3'-phosphate
  modified_base 5: mod_base = OTHER; note = 2'-fluoroadenosine-3'-phosphate
  modified_base 6: mod_base = OTHER; note = 2'-O-methylguanosine-3'-phosphate
  modified_base 7: mod_base = OTHER; note = 2'-fluoroadenosine-3'-phosphate
  modified_base 8: mod_base = OTHER; note = 2'-O-methyladenosine-3'-phosphate
  modified_base 9: mod_base = OTHER; note = 2'-fluoroadenosine-3'-phosphate
  modified_base 10: mod_base = OTHER; note = 2'-fluorouridine-3'-phosphate
  modified_base 11: mod_base = OTHER; note = 2'-fluoroguanosine-3'-phosphate
  modified_base 12: mod_base = OTHER; note = 2'-O-methylguanosine-3'-phosphate
  modified_base 13: mod_base = OTHER; note = 2'-fluoroadenosine-3'-phosphate
  modified_base 14: mod_base = OTHER; note = 2'-O-methylcytidine-3'-phosphate
  modified_base 15: mod_base = OTHER; note = 2'-fluorouridine-3'-phosphate
  modified_base 16: mod_base = OTHER; note = 2'-O-methyluridine-3'-phosphate
  modified_base 17: mod_base = OTHER; note = 2'-fluoroguanosine-3'-phosphate
  modified_base 18: mod_base = OTHER; note = 2'-O-methylcytidine-3'-phosphate
  modified_base 19: mod_base = OTHER; note = 2'-fluoroadenosine-3'-phosphate
  modified_base 20: mod_base = OTHER; note = 2'-O-methyluridine-3'-phosphate
  modified_base 21: mod_base = OTHER; note = 2'-fluoroadenosine-3'-phosphate N-[tris(GalNAc-alkyl)-amidodecanoyl)]-4-hydroxyprolinol Hyp-(GalNAc-alkyl)3
agaaagaaatggacttgcata

SEQ ID NO: 56 - RNA, 21 nt, synthetic construct
  source 1..21: mol_type = other RNA; note = Description of Artificial Sequence: Synthetic oligonucleotide
  modified_base 1: mod_base = OTHER; note = 2'-fluoroguanosine-3'-phosphorothioate
  modified_base 2: mod_base = OTHER; note = 2'-O-methylcytidine-3'-phosphorothioate
  modified_base 3: mod_base = OTHER; note = 2'-fluoroadenosine-3'-phosphate
  modified_base 4: mod_base = OTHER; note = 2'-O-methyluridine-3'-phosphate
  modified_base 5: mod_base = OTHER; note = 2'-fluorocytidine-3'-phosphate
  modified_base 6: mod_base = OTHER; note = 2'-O-methylcytidine-3'-phosphate
  modified_base 7: mod_base = OTHER; note = 2'-fluorouridine-3'-phosphate
  modified_base 8: mod_base = OTHER; note = 2'-O-methylguanosine-3'-phosphate
  modified_base 9: mod_base = OTHER; note = 2'-fluoroguanosine-3'-phosphate
  modified_base 10: mod_base = OTHER; note = 2'-fluoroadenosine-3'-phosphate
  modified_base 11: mod_base = OTHER; note = 2'-fluoroadenosine-3'-phosphate
  modified_base 12: mod_base = OTHER; note = 2'-O-methyladenosine-3'-phosphate
  modified_base 13: mod_base = OTHER; note = 2'-fluorouridine-3'-phosphate
  modified_base 14: mod_base = OTHER; note = 2'-O-methyladenosine-3'-phosphate
  modified_base 15: mod_base = OTHER; note = 2'-fluorouridine-3'-phosphate
  modified_base 16: mod_base = OTHER; note = 2'-O-methyladenosine-3'-phosphate
  modified_base 17: mod_base = OTHER; note = 2'-fluorouridine-3'-phosphate
  modified_base 18: mod_base = OTHER; note = 2'-O-methyluridine-3'-phosphate
  modified_base 19: mod_base = OTHER; note = 2'-fluoroadenosine-3'-phosphate
  modified_base 20: mod_base = OTHER; note = 2'-O-methyladenosine-3'-phosphate
  modified_base 21: mod_base = OTHER; note = 2'-fluoroadenosine-3'-phosphate N-[tris(GalNAc-alkyl)-amidodecanoyl)]-4-hydroxyprolinol Hyp-(GalNAc-alkyl)3
gcatcctggaaatatattaaa

SEQ ID NO: 57 - RNA, 21 nt, synthetic construct
  source 1..21: mol_type = other RNA; note = Description of Artificial Sequence: Synthetic oligonucleotide
  modified_base 1: mod_base = OTHER; note = 2'-fluorocytidine-3'-phosphorothioate
  modified_base 2: mod_base = OTHER; note = 2'-O-methylcytidine-3'-phosphorothioate
  modified_base 3: mod_base = OTHER; note = 2'-fluorouridine-3'-phosphate
  modified_base 4: mod_base = OTHER; note = 2'-O-methylguanosine-3'-phosphate
  modified_base 5: mod_base = OTHER; note = 2'-fluorouridine-3'-phosphate
  modified_base 6: mod_base = OTHER; note = 2'-O-methylcytidine-3'-phosphate
  modified_base 7: mod_base = OTHER; note = 2'-fluoroadenosine-3'-phosphate
  modified_base 8: mod_base = OTHER; note = 2'-O-methylguanosine-3'-phosphate
  modified_base 9: mod_base = OTHER; note = 2'-fluoroadenosine-3'-phosphate
  modified_base 10: mod_base = OTHER; note = 2'-fluorocytidine-3'-phosphate
  modified_base 11: mod_base = OTHER; note = 2'-fluorocytidine-3'-phosphate
  modified_base 12: mod_base = OTHER; note = 2'-O-methyladenosine-3'-phosphate
  modified_base 13: mod_base = OTHER; note = 2'-fluorouridine-3'-phosphate
  modified_base 14: mod_base = OTHER; note = 2'-O-methylguanosine-3'-phosphate
  modified_base 15: mod_base = OTHER; note = 2'-fluoroguanosine-3'-phosphate
  modified_base 16: mod_base = OTHER; note = 2'-O-methylguanosine-3'-phosphate
  modified_base 17: mod_base = OTHER; note = 2'-fluoroadenosine-3'-phosphate
  modified_base 18: mod_base = OTHER; note = 2'-O-methyladenosine-3'-phosphate
  modified_base 19: mod_base = OTHER; note = 2'-fluorocytidine-3'-phosphate
  modified_base 20: mod_base = OTHER; note = 2'-O-methyluridine-3'-phosphate
  modified_base 21: mod_base = OTHER; note = 2'-fluoroadenosine-3'-phosphate N-[tris(GalNAc-alkyl)-amidodecanoyl)]-4-hydroxyprolinol Hyp-(GalNAc-alkyl)3
cctgtcagaccatgggaacta

SEQ ID NO: 58 - RNA, 21 nt, synthetic construct
  source 1..21: mol_type = other RNA; note = Description of Artificial Sequence: Synthetic oligonucleotide
  modified_base 1: mod_base = OTHER; note = 2'-fluoroadenosine-3'-phosphorothioate
  modified_base 2: mod_base = OTHER; note = 2'-O-methyladenosine-3'-phosphorothioate
  modified_base 3: mod_base = OTHER; note = 2'-fluoroadenosine-3'-phosphate
  modified_base 4: mod_base = OTHER; note = 2'-O-methylcytidine-3'-phosphate
  modified_base 5: mod_base = OTHER; note = 2'-fluoroadenosine-3'-phosphate
  modified_base 6: mod_base = OTHER; note = 2'-O-methyluridine-3'-phosphate
  modified_base 7: mod_base = OTHER; note = 2'-fluoroguanosine-3'-phosphate
  modified_base 8: mod_base = OTHER; note = 2'-O-methylguanosine-3'-phosphate
  modified_base 9: mod_base = OTHER; note = 2'-fluorouridine-3'-phosphate
  modified_base 10: mod_base = OTHER; note = 2'-fluoroguanosine-3'-phosphate
  modified_base 11: mod_base = OTHER; note = 2'-fluorouridine-3'-phosphate
  modified_base 12: mod_base = OTHER; note = 2'-O-methylguanosine-3'-phosphate
  modified_base 13: mod_base = OTHER; note = 2'-fluoroguanosine-3'-phosphate
  modified_base 14: mod_base = OTHER; note = 2'-O-methyladenosine-3'-phosphate
  modified_base 15: mod_base = OTHER; note = 2'-fluorouridine-3'-phosphate
  modified_base 16: mod_base = OTHER; note = 2'-O-methylguanosine-3'-phosphate
  modified_base 17: mod_base = OTHER; note = 2'-fluoroguanosine-3'-phosphate
  modified_base 18: mod_base = OTHER; note = 2'-O-methylguanosine-3'-phosphate
  modified_base 19: mod_base = OTHER; note = 2'-fluoroadenosine-3'-phosphate
  modified_base 20: mod_base = OTHER; note = 2'-O-methyluridine-3'-phosphate
  modified_base 21: mod_base = OTHER; note = 2'-fluoroadenosine-3'-phosphate N-[tris(GalNAc-alkyl)-amidodecanoyl)]-4-hydroxyprolinol Hyp-(GalNAc-alkyl)3
aaacatggtgtggatgggata

SEQ ID NO: 59 - RNA, 21 nt, synthetic construct
  source 1..21: mol_type = other RNA; note = Description of Artificial Sequence: Synthetic oligonucleotide
  modified_base 1: mod_base = OTHER; note = 2'-fluorocytidine-3'-phosphorothioate
  modified_base 2: mod_base = OTHER; note = 2'-O-methyluridine-3'-phosphorothioate
  modified_base 3: mod_base = OTHER; note = 2'-fluorocytidine-3'-phosphate
  modified_base 4: mod_base = OTHER; note = 2'-O-methyladenosine-3'-phosphate
  modified_base 5: mod_base = OTHER; note = 2'-fluoroguanosine-3'-phosphate
  modified_base 6: mod_base = OTHER; note = 2'-O-methylguanosine-3'-phosphate
  modified_base 7: mod_base = OTHER; note = 2'-fluoroadenosine-3'-phosphate
  modified_base 8: mod_base = OTHER; note = 2'-O-methyluridine-3'-phosphate
  modified_base 9: mod_base = OTHER; note = 2'-fluoroguanosine-3'-phosphate
  modified_base 10: mod_base = OTHER; note = 2'-fluoroadenosine-3'-phosphate
  modified_base 11: mod_base = OTHER; note = 2'-fluoroadenosine-3'-phosphate
  modified_base 12: mod_base = OTHER; note = 2'-O-methyladenosine-3'-phosphate
  modified_base 13: mod_base = OTHER; note = 2'-fluoroadenosine-3'-phosphate
  modified_base 14: mod_base = OTHER; note = 2'-O-methyladenosine-3'-phosphate
  modified_base 15: mod_base = OTHER; note = 2'-fluorouridine-3'-phosphate
  modified_base 16: mod_base = OTHER; note = 2'-O-methyluridine-3'-phosphate
  modified_base 17: mod_base = OTHER; note = 2'-fluorouridine-3'-phosphate
  modified_base 18: mod_base = OTHER; note = 2'-O-methyluridine-3'-phosphate
  modified_base 19: mod_base = OTHER; note = 2'-fluoroguanosine-3'-phosphate
  modified_base 20: mod_base = OTHER; note = 2'-O-methyladenosine-3'-phosphate
  modified_base 21: mod_base = OTHER; note = 2'-fluoroadenosine-3'-phosphate N-[tris(GalNAc-alkyl)-amidodecanoyl)]-4-hydroxyprolinol Hyp-(GalNAc-alkyl)3
ctcaggatgaaaaattttgaa

SEQ ID NO: 60 - RNA, 21 nt, synthetic construct
  source 1..21: mol_type = other RNA; note = Description of Artificial Sequence: Synthetic oligonucleotide
  modified_base 1: mod_base = OTHER; note = 2'-fluorocytidine-3'-phosphorothioate
  modified_base 2: mod_base = OTHER; note = 2'-O-methyladenosine-3'-phosphorothioate
  modified_base 3: mod_base = OTHER; note = 2'-fluoroguanosine-3'-phosphate
  modified_base 4: mod_base = OTHER; note = 2'-O-methylcytidine-3'-phosphate
  modified_base 5: mod_base = OTHER; note = 2'-fluoroadenosine-3'-phosphate
  modified_base 6: mod_base = OTHER; note = 2'-O-methyluridine-3'-phosphate
  modified_base 7: mod_base = OTHER; note = 2'-fluoroguanosine-3'-phosphate
  modified_base 8: mod_base = OTHER; note = 2'-O-methyluridine-3'-phosphate
  modified_base 9: mod_base = OTHER; note = 2'-fluoroadenosine-3'-phosphate
  modified_base 10: mod_base = OTHER; note = 2'-fluorouridine-3'-phosphate
  modified_base 11: mod_base = OTHER; note = 2'-fluorouridine-3'-phosphate
  modified_base 12: mod_base = OTHER; note = 2'-O-methyladenosine-3'-phosphate
  modified_base 13: mod_base = OTHER; note = 2'-fluorocytidine-3'-phosphate
  modified_base 14: mod_base = OTHER; note = 2'-O-methyluridine-3'-phosphate
  modified_base 15: mod_base = OTHER; note = 2'-fluorouridine-3'-phosphate
  modified_base 16: mod_base = OTHER; note = 2'-O-methylguanosine-3'-phosphate
  modified_base 17: mod_base = OTHER; note = 2'-fluoroadenosine-3'-phosphate
  modified_base 18: mod_base = OTHER; note = 2'-O-methylcytidine-3'-phosphate
  modified_base 19: mod_base = OTHER; note = 2'-fluoroadenosine-3'-phosphate
  modified_base 20: mod_base = OTHER; note = 2'-O-methyladenosine-3'-phosphate
  modified_base 21: mod_base = OTHER; note = 2'-fluoroadenosine-3'-phosphate N-[tris(GalNAc-alkyl)-amidodecanoyl)]-4-hydroxyprolinol Hyp-(GalNAc-alkyl)3
cagcatgtattacttgacaaa

SEQ ID NO: 61 - RNA, 21 nt, synthetic construct
  source 1..21: mol_type = other RNA; note = Description of Artificial Sequence: Synthetic oligonucleotide
  modified_base 1: mod_base = OTHER; note = 2'-fluorouridine -3'-phosphorothioate
  modified_base 2: mod_base = OTHER; note = 2'-O-methyladenosine-3'-phosphorothioate
  modified_base 3: mod_base = OTHER; note = 2'-fluorouridine-3'-phosphate
  modified_base 4: mod_base = OTHER; note = 2'-O-methylguanosine-3'-phosphate
  modified_base 5: mod_base = OTHER; note = 2'-fluoroadenosine-3'-phosphate
  modified_base 6: mod_base = OTHER; note = 2'-O-methyladenosine-3'-phosphate
  modified_base 7: mod_base = OTHER; note = 2'-fluorocytidine-3'-phosphate
  modified_base 8: mod_base = OTHER; note = 2'-O-methyladenosine-3'-phosphate
  modified_base 9: mod_base = OTHER; note = 2'-fluoroadenosine-3'-phosphate
  modified_base 10: mod_base = OTHER; note = 2'-fluorocytidine-3'-phosphate
  modified_base 11: mod_base = OTHER; note = 2'-fluoroadenosine-3'-phosphate
  modified_base 12: mod_base = OTHER; note = 2'-O-methyluridine-3'-phosphate
  modified_base 13: mod_base = OTHER; note = 2'-fluoroguanosine-3'-phosphate
  modified_base 14: mod_base = OTHER; note = 2'-O-methylcytidine-3'-phosphate
  modified_base 15: mod_base = OTHER; note = 2'-fluorouridine-3'-phosphate
  modified_base 16: mod_base = OTHER; note = 2'-O-methyladenosine-3'-phosphate
  modified_base 17: mod_base = OTHER; note = 2'-fluoroadenosine-3'-phosphate
  modified_base 18: mod_base = OTHER; note = 2'-O-methyladenosine-3'-phosphate
  modified_base 19: mod_base = OTHER; note = 2'-fluorouridine-3'-phosphate
  modified_base 20: mod_base = OTHER; note = 2'-O-methylcytidine-3'-phosphate
  modified_base 21: mod_base = OTHER; note = 2'-fluoroadenosine-3'-phosphate N-[tris(GalNAc-alkyl)-amidodecanoyl)]-4-hydroxyprolinol Hyp-(GalNAc-alkyl)3
tatgaacaacatgctaaatca

SEQ ID NO: 62 - RNA, 21 nt, synthetic construct
  source 1..21: mol_type = other RNA; note = Description of Artificial Sequence: Synthetic oligonucleotide
  modified_base 1: mod_base = OTHER; note = 2'-fluoroadenosine-3'-phosphorothioate
  modified_base 2: mod_base = OTHER; note = 2'-O-methyluridine-3'-phosphorothioate
  modified_base 3: mod_base = OTHER; note = 2'-fluoroadenosine-3'-phosphate
  modified_base 4: mod_base = OTHER; note = 2'-O-methyluridine-3'-phosphate
  modified_base 5: mod_base = OTHER; note = 2'-fluoroadenosine-3'-phosphate
  modified_base 6: mod_base = OTHER; note = 2'-O-methyluridine-3'-phosphate
  modified_base 7: mod_base = OTHER; note = 2'-fluorocytidine-3'-phosphate
  modified_base 8: mod_base = OTHER; note = 2'-O-methylcytidine-3'-phosphate
  modified_base 9: mod_base = OTHER; note = 2'-fluoroadenosine-3'-phosphate
  modified_base 10: mod_base = OTHER; note = 2'-fluoroadenosine-3'-phosphate
  modified_base 11: mod_base = OTHER; note = 2'-fluoroadenosine-3'-phosphate
  modified_base 12: mod_base = OTHER; note = 2'-O-methyluridine-3'-phosphate
  modified_base 13: mod_base = OTHER; note = 2'-fluoroguanosine-3'-phosphate
  modified_base 14: mod_base = OTHER; note = 2'-O-methyluridine-3'-phosphate
  modified_base 15: mod_base = OTHER; note = 2'-fluorouridine-3'-phosphate
  modified_base 16: mod_base = OTHER; note = 2'-O-methyluridine-3'-phosphate
  modified_base 17: mod_base = OTHER; note = 2'-fluorouridine-3'-phosphate
  modified_base 18: mod_base = OTHER; note = 2'-O-methyladenosine-3'-phosphate
  modified_base 19: mod_base = OTHER; note = 2'-fluoroguanosine-3'-phosphate
  modified_base 20: mod_base = OTHER; note = 2'-O-methylguanosine-3'-phosphate
  modified_base 21: mod_base = OTHER; note = 2'-fluoroadenosine-3'-phosphate N-[tris(GalNAc-alkyl)-amidodecanoyl)]-4-hydroxyprolinol Hyp-(GalNAc-alkyl)3
atatatccaaatgttttagga

SEQ ID NO: 63 - RNA, 21 nt, synthetic construct
  source 1..21: mol_type = other RNA; note = Description of Artificial Sequence: Synthetic oligonucleotide
  modified_base 1: mod_base = OTHER; note = 2'-fluorocytidine-3'-phosphorothioate
  modified_base 2: mod_base = OTHER; note = 2'-O-methylcytidine-3'-phosphorothioate
  modified_base 3: mod_base = OTHER; note = 2'-fluoroadenosine-3'-phosphate
  modified_base 4: mod_base = OTHER; note = 2'-O-methylguanosine-3'-phosphate
  modified_base 5: mod_base = OTHER; note = 2'-fluoroadenosine-3'-phosphate
  modified_base 6: mod_base = OTHER; note = 2'-O-methyluridine-3'-phosphate
  modified_base 7: mod_base = OTHER; note = 2'-fluoroguanosine-3'-phosphate
  modified_base 8: mod_base = OTHER; note = 2'-O-methylguanosine-3'-phosphate
  modified_base 9: mod_base = OTHER; note = 2'-fluoroadenosine-3'-phosphate
  modified_base 10: mod_base = OTHER; note = 2'-fluoroadenosine-3'-phosphate
  modified_base 11: mod_base = OTHER; note = 2'-fluoroguanosine-3'-phosphate
  modified_base 12: mod_base = OTHER; note = 2'-O-methylcytidine-3'-phosphate
  modified_base 13: mod_base = OTHER; note = 2'-fluorouridine-3'-phosphate
  modified_base 14: mod_base = OTHER; note = 2'-O-methylguanosine-3'-phosphate
  modified_base 15: mod_base = OTHER; note = 2'-fluorouridine-3'-phosphate
  modified_base 16: mod_base = OTHER; note = 2'-O-methyladenosine-3'-phosphate
  modified_base 17: mod_base = OTHER; note = 2'-fluorouridine-3'-phosphate
  modified_base 18: mod_base = OTHER; note = 2'-O-methylcytidine-3'-phosphate
  modified_base 19: mod_base = OTHER; note = 2'-fluorocytidine-3'-phosphate
  modified_base 20: mod_base = OTHER; note = 2'-O-methyladenosine-3'-phosphate
  modified_base 21: mod_base = OTHER; note = 2'-fluoroadenosine-3'-phosphate N-[tris(GalNAc-alkyl)-amidodecanoyl)]-4-hydroxyprolinol Hyp-(GalNAc-alkyl)3
ccagatggaagctgtatccaa

SEQ ID NO: 64 - RNA, 21 nt, synthetic construct
  source 1..21: mol_type = other RNA; note = Description of Artificial Sequence: Synthetic oligonucleotide
  modified_base 1: mod_base = OTHER; note = 2'-fluoroguanosine-3'-phosphorothioate
  modified_base 2: mod_base = OTHER; note = 2'-O-methyladenosine-3'-phosphorothioate
  modified_base 3: mod_base = OTHER; note = 2'-fluorocytidine-3'-phosphate
  modified_base 4: mod_base = OTHER; note = 2'-O-methyluridine-3'-phosphate
  modified_base 5: mod_base = OTHER; note = 2'-fluorouridine-3'-phosphate
  modified_base 6: mod_base = OTHER; note = 2'-O-methyluridine-3'-phosphate
  modified_base 7: mod_base = OTHER; note = 2'-fluorocytidine-3'-phosphate
  modified_base 8: mod_base = OTHER; note = 2'-O-methyladenosine-3'-phosphate
  modified_base 9: mod_base = OTHER; note = 2'-fluorouridine-3'-phosphate
  modified_base 10: mod_base = OTHER; note = 2'-fluorocytidine-3'-phosphate
  modified_base 11: mod_base = OTHER; note = 2'-fluorocytidine-3'-phosphate
  modified_base 12: mod_base = OTHER; note = 2'-O-methyluridine-3'-phosphate
  modified_base 13: mod_base = OTHER; note = 2'-fluoroguanosine-3'-phosphate
  modified_base 14: mod_base = OTHER; note = 2'-O-methylguanosine-3'-phosphate
  modified_base 15: mod_base = OTHER; note = 2'-fluoroadenosine-3'-phosphate
  modified_base 16: mod_base = OTHER; note = 2'-O-methyladenosine-3'-phosphate
  modified_base 17: mod_base = OTHER; note = 2'-fluoroadenosine-3'-phosphate
  modified_base 18: mod_base = OTHER; note = 2'-O-methyluridine-3'-phosphate
  modified_base 19: mod_base = OTHER; note = 2'-fluoroadenosine-3'-phosphate
  modified_base 20: mod_base = OTHER; note = 2'-O-methyluridine-3'-phosphate
  modified_base 21: mod_base = OTHER; note = 2'-fluoroadenosine-3'-phosphate N-[tris(GalNAc-alkyl)-amidodecanoyl)]-4-hydroxyprolinol Hyp-(GalNAc-alkyl)3
gactttcatcctggaaatata

SEQ ID NO: 65 - RNA, 21 nt, synthetic construct
  source 1..21: mol_type = other RNA; note = Description of Artificial Sequence: Synthetic oligonucleotide
  modified_base 1: mod_base = OTHER; note = 2'-fluorocytidine-3'-phosphorothioate
  modified_base 2: mod_base = OTHER; note = 2'-O-methylcytidine-3'-phosphorothioate
  modified_base 3: mod_base = OTHER; note = 2'-fluorocytidine-3'-phosphate
  modified_base 4: mod_base = OTHER; note = 2'-O-methylcytidine-3'-phosphate
  modified_base 5: mod_base = OTHER; note = 2'-fluoroguanosine-3'-phosphate
  modified_base 6: mod_base = OTHER; note = 2'-O-methylguanosine-3'-phosphate
  modified_base 7: mod_base = OTHER; note = 2'-fluorocytidine-3'-phosphate
  modified_base 8: mod_base = OTHER; note = 2'-O-methyluridine-3'-phosphate
  modified_base 9: mod_base = OTHER; note = 2'-fluoroadenosine-3'-phosphate
  modified_base 10: mod_base = OTHER; note = 2'-fluoroadenosine-3'-phosphate
  modified_base 11: mod_base = OTHER; note = 2'-fluorouridine-3'-phosphate
  modified_base 12: mod_base = OTHER; note = 2'-O-methyluridine-3'-phosphate
  modified_base 13: mod_base = OTHER; note = 2'-fluorouridine-3'-phosphate
  modified_base 14: mod_base = OTHER; note = 2'-O-methylguanosine-3'-phosphate
  modified_base 15: mod_base = OTHER; note = 2'-fluorouridine-3'-phosphate
  modified_base 16: mod_base = OTHER; note = 2'-O-methyladenosine-3'-phosphate
  modified_base 17: mod_base = OTHER; note = 2'-fluorouridine-3'-phosphate
  modified_base 18: mod_base = OTHER; note = 2'-O-methylcytidine-3'-phosphate
  modified_base 19: mod_base = OTHER; note = 2'-fluoroadenosine-3'-phosphate
  modified_base 20: mod_base = OTHER; note = 2'-O-methyladenosine-3'-phosphate
  modified_base 21: mod_base = OTHER; note = 2'-fluorouridine-3'-phosphate N-[tris(GalNAc-alkyl)-amidodecanoyl)]-4-hydroxyprolinol Hyp-(GalNAc-alkyl)3
ccccggctaatttgtatcaat

SEQ ID NO: 66 - RNA, 21 nt, synthetic construct
  source 1..21: mol_type = other RNA; note = Description of Artificial Sequence: Synthetic oligonucleotide
  modified_base 1: mod_base = OTHER; note = 2'-fluorouridine -3'-phosphorothioate
  modified_base 2: mod_base = OTHER; note = 2'-O-methyluridine-3'-phosphorothioate
  modified_base 3: mod_base = OTHER; note = 2'-fluoroadenosine-3'-phosphate
  modified_base 4: mod_base = OTHER; note = 2'-O-methyladenosine-3'-phosphate
  modified_base 5: mod_base = OTHER; note = 2'-fluoroadenosine-3'-phosphate
  modified_base 6: mod_base = OTHER; note = 2'-O-methylcytidine-3'-phosphate
  modified_base 7: mod_base = OTHER; note = 2'-fluoroadenosine-3'-phosphate
  modified_base 8: mod_base = OTHER; note = 2'-O-methyluridine-3'-phosphate
  modified_base 9: mod_base = OTHER; note = 2'-fluoroguanosine-3'-phosphate
  modified_base 10: mod_base = OTHER; note = 2'-fluoroguanosine-3'-phosphate
  modified_base 11: mod_base = OTHER; note = 2'-fluorocytidine-3'-phosphate
  modified_base 12: mod_base = OTHER; note = 2'-O-methyluridine-3'-phosphate
  modified_base 13: mod_base = OTHER; note = 2'-fluorouridine-3'-phosphate
  modified_base 14: mod_base = OTHER; note = 2'-O-methylguanosine-3'-phosphate
  modified_base 15: mod_base = OTHER; note = 2'-fluoroadenosine-3'-phosphate
  modified_base 16: mod_base = OTHER; note = 2'-O-methyladenosine-3'-phosphate
  modified_base 17: mod_base = OTHER; note = 2'-fluorouridine-3'-phosphate
  modified_base 18: mod_base = OTHER; note = 2'-O-methylguanosine-3'-phosphate
  modified_base 19: mod_base = OTHER; note = 2'-fluoroguanosine-3'-phosphate
  modified_base 20: mod_base = OTHER; note = 2'-O-methylguanosine-3'-phosphate
  modified_base 21: mod_base = OTHER; note = 2'-fluoroadenosine-3'-phosphate N-[tris(GalNAc-alkyl)-amidodecanoyl)]-4-hydroxyprolinol Hyp-(GalNAc-alkyl)3
ttaaacatggcttgaatggga

SEQ ID NO: 67 - RNA, 21 nt, synthetic construct
  source 1..21: mol_type = other RNA; note = Description of Artificial Sequence: Synthetic oligonucleotide
  modified_base 1: mod_base = OTHER; note = 2'-fluoroadenosine-3'-phosphorothioate
  modified_base 2: mod_base = OTHER; note = 2'-O-methyladenosine-3'-phosphorothioate
  modified_base 3: mod_base = OTHER; note = 2'-fluorouridine-3'-phosphate
  modified_base 4: mod_base = OTHER; note = 2'-O-methylguanosine-3'-phosphate
  modified_base 5: mod_base = OTHER; note = 2'-fluorouridine-3'-phosphate
  modified_base 6: mod_base = OTHER; note = 2'-O-methylguanosine-3'-phosphate
  modified_base 7: mod_base = OTHER; note = 2'-fluorouridine-3'-phosphate
  modified_base 8: mod_base = OTHER; note = 2'-O-methyluridine-3'-phosphate
  modified_base 9: mod_base = OTHER; note = 2'-fluorouridine-3'-phosphate
  modified_base 10: mod_base = OTHER; note = 2'-fluoroadenosine-3'-phosphate
  modified_base 11: mod_base = OTHER; note = 2'-fluoroguanosine-3'-phosphate
  modified_base 12: mod_base = OTHER; note = 2'-O-methyladenosine-3'-phosphate
  modified_base 13: mod_base = OTHER; note = 2'-fluorocytidine-3'-phosphate
  modified_base 14: mod_base = OTHER; note = 2'-O-methyladenosine-3'-phosphate
  modified_base 15: mod_base = OTHER; note = 2'-fluoroadenosine-3'-phosphate
  modified_base 16: mod_base = OTHER; note = 2'-O-methylcytidine-3'-phosphate
  modified_base 17: mod_base = OTHER; note = 2'-fluoroguanosine-3'-phosphate
  modified_base 18: mod_base = OTHER; note = 2'-O-methyluridine-3'-phosphate
  modified_base 19: mod_base = OTHER; note = 2'-fluorocytidine-3'-phosphate
  modified_base 20: mod_base = OTHER; note = 2'-O-methyladenosine-3'-phosphate
  modified_base 21: mod_base = OTHER; note = 2'-fluorouridine-3'-phosphate N-[tris(GalNAc-alkyl)-amidodecanoyl)]-4-hydroxyprolinol Hyp-(GalNAc-alkyl)3
aatgtgtttagacaacgtcat

SEQ ID NO: 68 - RNA, 21 nt, synthetic construct
  source 1..21: mol_type = other RNA; note = Description of Artificial Sequence: Synthetic oligonucleotide
  modified_base 1: mod_base = OTHER; note = 2'-fluoroadenosine-3'-phosphorothioate
  modified_base 2: mod_base = OTHER; note = 2'-O-methylcytidine-3'-phosphorothioate
  modified_base 3: mod_base = OTHER; note = 2'-fluorouridine-3'-phosphate
  modified_base 4: mod_base = OTHER; note = 2'-O-methyladenosine-3'-phosphate
  modified_base 5: mod_base = OTHER; note = 2'-fluoroadenosine-3'-phosphate
  modified_base 6: mod_base = OTHER; note = 2'-O-methyladenosine-3'-phosphate
  modified_base 7: mod_base = OTHER; note = 2'-fluoroguanosine-3'-phosphate
  modified_base 8: mod_base = OTHER; note = 2'-O-methylguanosine-3'-phosphate
  modified_base 9: mod_base = OTHER; note = 2'-fluoroadenosine-3'-phosphate
  modified_base 10: mod_base = OTHER; note = 2'-fluoroadenosine-3'-phosphate
  modified_base 11: mod_base = OTHER; note = 2'-fluoroguanosine-3'-phosphate
  modified_base 12: mod_base = OTHER; note = 2'-O-methyladenosine-3'-phosphate
  modified_base 13: mod_base = OTHER; note = 2'-fluoroadenosine-3'-phosphate
  modified_base 14: mod_base = OTHER; note = 2'-O-methyluridine-3'-phosphate
  modified_base 15: mod_base = OTHER; note = 2'-fluorouridine-3'-phosphate
  modified_base 16: mod_base = OTHER; note = 2'-O-methylcytidine-3'-phosphate
  modified_base 17: mod_base = OTHER; note = 2'-fluorocytidine-3'-phosphate
  modified_base 18: mod_base = OTHER; note = 2'-O-methylguanosine-3'-phosphate
  modified_base 19: mod_base = OTHER; note = 2'-fluoroguanosine-3'-phosphate
  modified_base 20: mod_base = OTHER; note = 2'-O-methyluridine-3'-phosphate
  modified_base 21: mod_base = OTHER; note = 2'-fluorouridine-3'-phosphate N-[tris(GalNAc-alkyl)-amidodecanoyl)]-4-hydroxyprolinol Hyp-(GalNAc-alkyl)3
actaaaggaagaattccggtt

SEQ ID NO: 69 - RNA, 21 nt, synthetic construct
  source 1..21: mol_type = other RNA; note = Description of Artificial Sequence: Synthetic oligonucleotide
  modified_base 1: mod_base = OTHER; note = 2'-fluorouridine -3'-phosphorothioate
  modified_base 2: mod_base = OTHER; note = 2'-O-methyladenosine-3'-phosphorothioate
  modified_base 3: mod_base = OTHER; note = 2'-fluorouridine-3'-phosphate
  modified_base 4: mod_base = OTHER; note = 2'-O-methyladenosine-3'-phosphate
  modified_base 5: mod_base = OTHER; note = 2'-fluorouridine-3'-phosphate
  modified_base 6: mod_base = OTHER; note = 2'-O-methylcytidine-3'-phosphate
  modified_base 7: mod_base = OTHER; note = 2'-fluorocytidine-3'-phosphate
  modified_base 8: mod_base = OTHER; note = 2'-O-methyladenosine-3'-phosphate
  modified_base 9: mod_base = OTHER; note = 2'-fluoroadenosine-3'-phosphate
  modified_base 10: mod_base = OTHER; note = 2'-fluoroadenosine-3'-phosphate
  modified_base 11: mod_base = OTHER; note = 2'-fluorouridine-3'-phosphate
  modified_base 12: mod_base = OTHER; note = 2'-O-methylguanosine-3'-phosphate
  modified_base 13: mod_base = OTHER; note = 2'-fluorouridine-3'-phosphate
  modified_base 14: mod_base = OTHER; note = 2'-O-methyluridine-3'-phosphate
  modified_base 15: mod_base = OTHER; note = 2'-fluorouridine-3'-phosphate
  modified_base 16: mod_base = OTHER; note = 2'-O-methyluridine-3'-phosphate
  modified_base 17: mod_base = OTHER; note = 2'-fluoroadenosine-3'-phosphate
  modified_base 18: mod_base = OTHER; note = 2'-O-methylguanosine-3'-phosphate
  modified_base 19: mod_base = OTHER; note = 2'-fluoroguanosine-3'-phosphate
  modified_base 20: mod_base = OTHER; note = 2'-O-methyladenosine-3'-phosphate
  modified_base 21: mod_base = OTHER; note = 2'-fluorouridine-3'-phosphate N-[tris(GalNAc-alkyl)-amidodecanoyl)]-4-hydroxyprolinol Hyp-(GalNAc-alkyl)3
tatatccaaatgttttaggat

SEQ ID NO: 70 - RNA, 21 nt, synthetic construct
  source 1..21: mol_type = other RNA; note = Description of Artificial Sequence: Synthetic oligonucleotide
  modified_base 1: mod_base = OTHER; note = 2'-fluoroguanosine-3'-phosphorothioate
  modified_base 2: mod_base = OTHER; note = 2'-O-methyluridine-3'-phosphorothioate
  modified_base 3: mod_base = OTHER; note = 2'-fluoroguanosine-3'-phosphate
  modified_base 4: mod_base = OTHER; note = 2'-O-methylcytidine-3'-phosphate
  modified_base 5: mod_base = OTHER; note = 2'-fluoroguanosine-3'-phosphate
  modified_base 6: mod_base = OTHER; note = 2'-O-methylguanosine-3'-phosphate
  modified_base 7: mod_base = OTHER; note = 2'-fluoroadenosine-3'-phosphate
  modified_base 8: mod_base = OTHER; note = 2'-O-methyladenosine-3'-phosphate
  modified_base 9: mod_base = OTHER; note = 2'-fluoroadenosine-3'-phosphate
  modified_base 10: mod_base = OTHER; note = 2'-fluoroguanosine-3'-phosphate
  modified_base 11: mod_base = OTHER; note = 2'-fluoroguanosine-3'-phosphate
  modified_base 12: mod_base = OTHER; note = 2'-O-methylcytidine-3'-phosphate
  modified_base 13: mod_base = OTHER; note = 2'-fluoroadenosine-3'-phosphate
  modified_base 14: mod_base = OTHER; note = 2'-O-methylcytidine-3'-phosphate
  modified_base 15: mod_base = OTHER; note = 2'-fluorouridine-3'-phosphate
  modified_base 16: mod_base = OTHER; note = 2'-O-methylguanosine-3'-phosphate
  modified_base 17: mod_base = OTHER; note = 2'-fluoroadenosine-3'-phosphate
  modified_base 18: mod_base = OTHER; note = 2'-O-methyluridine-3'-phosphate
  modified_base 19: mod_base = OTHER; note = 2'-fluoroguanosine-3'-phosphate
  modified_base 20: mod_base = OTHER; note = 2'-O-methyluridine-3'-phosphate
  modified_base 21: mod_base = OTHER; note = 2'-fluorouridine-3'-phosphate N-[tris(GalNAc-alkyl)-amidodecanoyl)]-4-hydroxyprolinol Hyp-(GalNAc-alkyl)3
gtgcggaaaggcactgatgtt

SEQ ID NO: 71 - RNA, 21 nt, synthetic construct
  source 1..21: mol_type = other RNA; note = Description of Artificial Sequence: Synthetic oligonucleotide
  modified_base 1: mod_base = OTHER; note = 2'-fluorouridine -3'-phosphorothioate
  modified_base 2: mod_base = OTHER; note = 2'-O-methyladenosine-3'-phosphorothioate
  modified_base 3: mod_base = OTHER; note = 2'-fluoroadenosine-3'-phosphate
  modified_base 4: mod_base = OTHER; note = 2'-O-methyladenosine-3'-phosphate
  modified_base 5: mod_base = OTHER; note = 2'-fluoroadenosine-3'-phosphate
  modified_base 6: mod_base = OTHER; note = 2'-O-methylcytidine-3'-phosphate
  modified_base 7: mod_base = OTHER; note = 2'-fluoroadenosine-3'-phosphate
  modified_base 8: mod_base = OTHER; note = 2'-O-methylguanosine-3'-phosphate
  modified_base 9: mod_base = OTHER; note = 2'-fluorouridine-3'-phosphate
  modified_base 10: mod_base = OTHER; note = 2'-fluoroguanosine-3'-phosphate
  modified_base 11: mod_base = OTHER; note = 2'-fluoroguanosine-3'-phosphate
  modified_base 12: mod_base = OTHER; note = 2'-O-methyluridine-3'-phosphate
  modified_base 13: mod_base = OTHER; note = 2'-fluorouridine-3'-phosphate
  modified_base 14: mod_base = OTHER; note = 2'-O-methylcytidine-3'-phosphate
  modified_base 15: mod_base = OTHER; note = 2'-fluorouridine-3'-phosphate
  modified_base 16: mod_base = OTHER; note = 2'-O-methyluridine-3'-phosphate
  modified_base 17: mod_base = OTHER; note = 2'-fluoroadenosine-3'-phosphate
  modified_base 18: mod_base = OTHER; note = 2'-O-methyladenosine-3'-phosphate
  modified_base 19: mod_base = OTHER; note = 2'-fluoroadenosine-3'-phosphate
  modified_base 20: mod_base = OTHER; note = 2'-O-methyluridine-3'-phosphate
  modified_base 21: mod_base = OTHER; note = 2'-fluorouridine-3'-phosphate N-[tris(GalNAc-alkyl)-amidodecanoyl)]-4-hydroxyprolinol Hyp-(GalNAc-alkyl)3
taaaacagtggttcttaaatt

SEQ ID NO: 72 - RNA, 21 nt, synthetic construct
  source 1..21: mol_type = other RNA; note = Description of Artificial Sequence: Synthetic oligonucleotide
  modified_base 1: mod_base = OTHER; note = 2'-fluoroadenosine-3'-phosphorothioate
  modified_base 2: mod_base = OTHER; note = 2'-O-methyluridine-3'-phosphorothioate
  modified_base 3: mod_base = OTHER; note = 2'-fluoroguanosine-3'-phosphate
  modified_base 4: mod_base = OTHER; note = 2'-O-methyladenosine-3'-phosphate
  modified_base 5: mod_base = OTHER; note = 2'-fluoroadenosine-3'-phosphate
  modified_base 6: mod_base = OTHER; note = 2'-O-methyladenosine-3'-phosphate
  modified_base 7: mod_base = OTHER; note = 2'-fluoroadenosine-3'-phosphate
  modified_base 8: mod_base = OTHER; note = 2'-O-methyladenosine-3'-phosphate
  modified_base 9: mod_base = OTHER; note = 2'-fluorouridine-3'-phosphate
  modified_base 10: mod_base = OTHER; note = 2'-fluorouridine-3'-phosphate
  modified_base 11: mod_base = OTHER; note = 2'-fluorouridine-3'-phosphate
  modified_base 12: mod_base = OTHER; note = 2'-O-methyluridine-3'-phosphate
  modified_base 13: mod_base = OTHER; note = 2'-fluoroguanosine-3'-phosphate
  modified_base 14: mod_base = OTHER; note = 2'-O-methyladenosine-3'-phosphate
  modified_base 15: mod_base = OTHER; note = 2'-fluoroadenosine-3'-phosphate
  modified_base 16: mod_base = OTHER; note = 2'-O-methyladenosine-3'-phosphate
  modified_base 17: mod_base = OTHER; note = 2'-fluorocytidine-3'-phosphate
  modified_base 18: mod_base = OTHER; note = 2'-O-methylcytidine-3'-phosphate
  modified_base 19: mod_base = OTHER; note = 2'-fluoroadenosine-3'-phosphate
  modified_base 20: mod_base = OTHER; note = 2'-O-methylguanosine-3'-phosphate
  modified_base 21: mod_base = OTHER; note = 2'-fluorouridine-3'-phosphate N-[tris(GalNAc-alkyl)-amidodecanoyl)]-4-hydroxyprolinol Hyp-(GalNAc-alkyl)3
atgaaaaattttgaaaccagt

SEQ ID NO: 73 - RNA, 21 nt, synthetic construct
  source 1..21: mol_type = other RNA; note = Description of Artificial Sequence: Synthetic oligonucleotide
  modified_base 1: mod_base = OTHER; note = 2'-fluoroadenosine-3'-phosphorothioate
  modified_base 2: mod_base = OTHER; note = 2'-O-methyladenosine-3'-phosphorothioate
  modified_base 3: mod_base = OTHER; note = 2'-fluorocytidine-3'-phosphate
  modified_base 4: mod_base = OTHER; note = 2'-O-methyladenosine-3'-phosphate
  modified_base 5: mod_base = OTHER; note = 2'-fluoroadenosine-3'-phosphate
  modified_base 6: mod_base = OTHER; note = 2'-O-methyladenosine-3'-phosphate
  modified_base 7: mod_base = OTHER; note = 2'-fluoroadenosine-3'-phosphate
  modified_base 8: mod_base = OTHER; note = 2'-O-methyluridine-3'-phosphate
  modified_base 9: mod_base = OTHER; note = 2'-fluoroadenosine-3'-phosphate
  modified_base 10: mod_base = OTHER; note = 2'-fluoroguanosine-3'-phosphate
  modified_base 11: mod_base = OTHER; note = 2'-fluorocytidine-3'-phosphate
  modified_base 12: mod_base = OTHER; note = 2'-O-methyladenosine-3'-phosphate
  modified_base 13: mod_base = OTHER; note = 2'-fluoroadenosine-3'-phosphate
  modified_base 14: mod_base = OTHER; note = 2'-O-methyluridine-3'-phosphate
  modified_base 15: mod_base = OTHER; note = 2'-fluorocytidine-3'-phosphate
  modified_base 16: mod_base = OTHER; note = 2'-O-methylcytidine-3'-phosphate
  modified_base 17: mod_base = OTHER; note = 2'-fluorocytidine-3'-phosphate
  modified_base 18: mod_base = OTHER; note = 2'-O-methyluridine-3'-phosphate
  modified_base 19: mod_base = OTHER; note = 2'-fluorouridine-3'-phosphate
  modified_base 20: mod_base = OTHER; note = 2'-O-methyluridine-3'-phosphate
  modified_base 21: mod_base = OTHER; note = 2'-fluorouridine-3'-phosphate N-[tris(GalNAc-alkyl)-amidodecanoyl)]-4-hydroxyprolinol Hyp-(GalNAc-alkyl)3
aacaaaatagcaatccctttt

SEQ ID NO: 74 - RNA, 21 nt, synthetic construct
  source 1..21: mol_type = other RNA; note = Description of Artificial Sequence: Synthetic oligonucleotide
  modified_base 1: mod_base = OTHER; note = 2'-fluorocytidine-3'-phosphorothioate
  modified_base 2: mod_base = OTHER; note = 2'-O-methyluridine-3'-phosphorothioate
  modified_base 3: mod_base = OTHER; note = 2'-fluoroguanosine-3'-phosphate
  modified_base 4: mod_base = OTHER; note = 2'-O-methyladenosine-3'-phosphate
  modified_base 5: mod_base = OTHER; note = 2'-fluoroadenosine-3'-phosphate
  modified_base 6: mod_base = OTHER; note = 2'-O-methyladenosine-3'-phosphate
  modified_base 7: mod_base = OTHER; note = 2'-fluorocytidine-3'-phosphate
  modified_base 8: mod_base = OTHER; note = 2'-O-methyladenosine-3'-phosphate
  modified_base 9: mod_base = OTHER; note = 2'-fluoroguanosine-3'-phosphate
  modified_base 10: mod_base = OTHER; note = 2'-fluoroadenosine-3'-phosphate
  modified_base 11: mod_base = OTHER; note = 2'-fluorouridine-3'-phosphate
  modified_base 12: mod_base = OTHER; note = 2'-O-methylcytidine-3'-phosphate
  modified_base 13: mod_base = OTHER; note = 2'-fluorouridine-3'-phosphate
  modified_base 14: mod_base = OTHER; note = 2'-O-methylguanosine-3'-phosphate
  modified_base 15: mod_base = OTHER; note = 2'-fluorouridine-3'-phosphate
  modified_base 16: mod_base = OTHER; note = 2'-O-methylcytidine-3'-phosphate
  modified_base 17: mod_base = OTHER; note = 2'-fluoroguanosine-3'-phosphate
  modified_base 18: mod_base = OTHER; note = 2'-O-methyladenosine-3'-phosphate
  modified_base 19: mod_base = OTHER; note = 2'-fluorocytidine-3'-phosphate
  modified_base 20: mod_base = OTHER; note = 2'-O-methyluridine-3'-phosphate
  modified_base 21: mod_base = OTHER; note = 2'-fluorouridine-3'-phosphate N-[tris(GalNAc-alkyl)-amidodecanoyl)]-4-hydroxyprolinol Hyp-(GalNAc-alkyl)3
ctgaaacagatctgtcgactt

SEQ ID NO: 75 - RNA, 21 nt, synthetic construct
  source 1..21: mol_type = other RNA; note = Description of Artificial Sequence: Synthetic oligonucleotide
  modified_base 1: mod_base = OTHER; note = 2'-fluorouridine -3'-phosphorothioate
  modified_base 2: mod_base = OTHER; note = 2'-O-methyluridine-3'-phosphorothioate
  modified_base 3: mod_base = OTHER; note = 2'-fluoroguanosine-3'-phosphate
  modified_base 4: mod_base = OTHER; note = 2'-O-methyluridine-3'-phosphate
  modified_base 5: mod_base = OTHER; note = 2'-fluorouridine-3'-phosphate
  modified_base 6: mod_base = OTHER; note = 2'-O-methylguanosine-3'-phosphate
  modified_base 7: mod_base = OTHER; note = 2'-fluorocytidine-3'-phosphate
  modified_base 8: mod_base = OTHER; note = 2'-O-methyladenosine-3'-phosphate
  modified_base 9: mod_base = OTHER; note = 2'-fluoroadenosine-3'-phosphate
  modified_base 10: mod_base = OTHER; note = 2'-fluoroadenosine-3'-phosphate
  modified_base 11: mod_base = OTHER; note = 2'-fluoroguanosine-3'-phosphate
  modified_base 12: mod_base = OTHER; note = 2'-O-methylguanosine-3'-phosphate
  modified_base 13: mod_base = OTHER; note = 2'-fluoroguanosine-3'-phosphate
  modified_base 14: mod_base = OTHER; note = 2'-O-methylcytidine-3'-phosphate
  modified_base 15: mod_base = OTHER; note = 2'-fluoroadenosine-3'-phosphate
  modified_base 16: mod_base = OTHER; note = 2'-O-methyluridine-3'-phosphate
  modified_base 17: mod_base = OTHER; note = 2'-fluorouridine-3'-phosphate
  modified_base 18: mod_base = OTHER; note = 2'-O-methyluridine-3'-phosphate
  modified_base 19: mod_base = OTHER; note = 2'-fluorouridine-3'-phosphate
  modified_base 20: mod_base = OTHER; note = 2'-O-methylguanosine-3'-phosphate
  modified_base 21: mod_base = OTHER; note = 2'-fluoroadenosine-3'-phosphate N-[tris(GalNAc-alkyl)-amidodecanoyl)]-4-hydroxyprolinol Hyp-(GalNAc-alkyl)3
ttgttgcaaagggcattttga

SEQ ID NO: 76 - RNA, 21 nt, synthetic construct
  source 1..21: mol_type = other RNA; note = Description of Artificial Sequence: Synthetic oligonucleotide
  modified_base 1: mod_base = OTHER; note = 2'-fluorocytidine-3'-phosphorothioate
  modified_base 2: mod_base = OTHER; note = 2'-O-methyluridine-3'-phosphorothioate
  modified_base 3: mod_base = OTHER; note = 2'-fluorocytidine-3'-phosphate
  modified_base 4: mod_base = OTHER; note = 2'-O-methyladenosine-3'-phosphate
  modified_base 5: mod_base = OTHER; note = 2'-fluorouridine-3'-phosphate
  modified_base 6: mod_base = OTHER; note = 2'-O-methyluridine-3'-phosphate
  modified_base 7: mod_base = OTHER; note = 2'-fluoroguanosine-3'-phosphate
  modified_base 8: mod_base = OTHER; note = 2'-O-methyluridine-3'-phosphate
  modified_base 9: mod_base = OTHER; note = 2'-fluorouridine-3'-phosphate
  modified_base 10: mod_base = OTHER; note = 2'-fluorouridine-3'-phosphate
  modified_base 11: mod_base = OTHER; note = 2'-fluoroadenosine-3'-phosphate
  modified_base 12: mod_base = OTHER; note = 2'-O-methyluridine-3'-phosphate
  modified_base 13: mod_base = OTHER; note = 2'-fluorouridine-3'-phosphate
  modified_base 14: mod_base = OTHER; note = 2'-O-methyladenosine-3'-phosphate
  modified_base 15: mod_base = OTHER; note = 2'-fluoroadenosine-3'-phosphate
  modified_base 16: mod_base = OTHER; note = 2'-O-methylcytidine-3'-phosphate
  modified_base 17: mod_base = OTHER; note = 2'-fluorocytidine-3'-phosphate
  modified_base 18: mod_base = OTHER; note = 2'-O-methyluridine-3'-phosphate
  modified_base 19: mod_base = OTHER; note = 2'-fluoroguanosine-3'-phosphate
  modified_base 20: mod_base = OTHER; note = 2'-O-methyluridine-3'-phosphate
  modified_base 21: mod_base = OTHER; note = 2'-fluoroadenosine-3'-phosphate N-[tris(GalNAc-alkyl)-amidodecanoyl)]-4-hydroxyprolinol Hyp-(GalNAc-alkyl)3
ctcattgtttattaacctgta

SEQ ID NO: 77 - RNA, 21 nt, synthetic construct
  source 1..21: mol_type = other RNA; note = Description of Artificial Sequence: Synthetic oligonucleotide
  modified_base 1: mod_base = OTHER; note = 2'-fluorocytidine-3'-phosphorothioate
  modified_base 2: mod_base = OTHER; note = 2'-O-methyladenosine-3'-phosphorothioate
  modified_base 3: mod_base = OTHER; note = 2'-fluoroadenosine-3'-phosphate
  modified_base 4: mod_base = OTHER; note = 2'-O-methylcytidine-3'-phosphate
  modified_base 5: mod_base = OTHER; note = 2'-fluoroadenosine-3'-phosphate
  modified_base 6: mod_base = OTHER; note = 2'-O-methyladenosine-3'-phosphate
  modified_base 7: mod_base = OTHER; note = 2'-fluoroadenosine-3'-phosphate
  modified_base 8: mod_base = OTHER; note = 2'-O-methyladenosine-3'-phosphate
  modified_base 9: mod_base = OTHER; note = 2'-fluorouridine-3'-phosphate
  modified_base 10: mod_base = OTHER; note = 2'-fluoroadenosine-3'-phosphate
  modified_base 11: mod_base = OTHER; note = 2'-fluoroguanosine-3'-phosphate
  modified_base 12: mod_base = OTHER; note = 2'-O-methylcytidine-3'-phosphate
  modified_base 13: mod_base = OTHER; note = 2'-fluoroadenosine-3'-phosphate
  modified_base 14: mod_base = OTHER; note = 2'-O-methyladenosine-3'-phosphate
  modified_base 15: mod_base = OTHER; note = 2'-fluorouridine-3'-phosphate
  modified_base 16: mod_base = OTHER; note = 2'-O-methylcytidine-3'-phosphate
  modified_base 17: mod_base = OTHER; note = 2'-fluorocytidine-3'-phosphate
  modified_base 18: mod_base = OTHER; note = 2'-O-methylcytidine-3'-phosphate
  modified_base 19: mod_base = OTHER; note = 2'-fluorouridine-3'-phosphate
  modified_base 20: mod_base = OTHER; note = 2'-O-methyluridine-3'-phosphate
  modified_base 21: mod_base = OTHER; note = 2'-fluorouridine-3'-phosphate N-[tris(GalNAc-alkyl)-amidodecanoyl)]-4-hydroxyprolinol Hyp-(GalNAc-alkyl)3
caacaaaatagcaatcccttt

SEQ ID NO: 78 - RNA, 21 nt, synthetic construct
  source 1..21: mol_type = other RNA; note = Description of Artificial Sequence: Synthetic oligonucleotide
  modified_base 1: mod_base = OTHER; note = 2'-fluorocytidine-3'-phosphorothioate
  modified_base 2: mod_base = OTHER; note = 2'-O-methyladenosine-3'-phosphorothioate
  modified_base 3: mod_base = OTHER; note = 2'-fluorouridine-3'-phosphate
  modified_base 4: mod_base = OTHER; note = 2'-O-methyluridine-3'-phosphate
  modified_base 5: mod_base = OTHER; note = 2'-fluoroguanosine-3'-phosphate
  modified_base 6: mod_base = OTHER; note = 2'-O-methyluridine-3'-phosphate
  modified_base 7: mod_base = OTHER; note = 2'-fluorouridine-3'-phosphate
  modified_base 8: mod_base = OTHER; note = 2'-O-methyluridine-3'-phosphate
  modified_base 9: mod_base = OTHER; note = 2'-fluoroadenosine-3'-phosphate
  modified_base 10: mod_base = OTHER; note = 2'-fluorouridine-3'-phosphate
  modified_base 11: mod_base = OTHER; note = 2'-fluorouridine-3'-phosphate
  modified_base 12: mod_base = OTHER; note = 2'-O-methyladenosine-3'-phosphate
  modified_base 13: mod_base = OTHER; note = 2'-fluoroadenosine-3'-phosphate
  modified_base 14: mod_base = OTHER; note = 2'-O-methylcytidine-3'-phosphate
  modified_base 15: mod_base = OTHER; note = 2'-fluorocytidine-3'-phosphate
  modified_base 16: mod_base = OTHER; note = 2'-O-methyluridine-3'-phosphate
  modified_base 17: mod_base = OTHER; note = 2'-fluoroguanosine-3'-phosphate
  modified_base 18: mod_base = OTHER; note = 2'-O-methyluridine-3'-phosphate
  modified_base 19: mod_base = OTHER; note = 2'-fluoroadenosine-3'-phosphate
  modified_base 20: mod_base = OTHER; note = 2'-O-methyluridine-3'-phosphate
  modified_base 21: mod_base = OTHER; note = 2'-fluorouridine-3'-phosphate N-[tris(GalNAc-alkyl)-amidodecanoyl)]-4-hydroxyprolinol Hyp-(GalNAc-alkyl)3
cattgtttattaacctgtatt

SEQ ID NO: 79 - RNA, 21 nt, synthetic construct
  source 1..21: mol_type = other RNA; note = Description of Artificial Sequence: Synthetic oligonucleotide
  modified_base 1: mod_base = OTHER; note = 2'-fluorouridine -3'-phosphorothioate
  modified_base 2: mod_base = OTHER; note = 2'-O-methyladenosine-3'-phosphorothioate
  modified_base 3: mod_base = OTHER; note = 2'-fluorouridine-3'-phosphate
  modified_base 4: mod_base = OTHER; note = 2'-O-methylcytidine-3'-phosphate
  modified_base 5: mod_base = OTHER; note = 2'-fluoroadenosine-3'-phosphate
  modified_base 6: mod_base = OTHER; note = 2'-O-methylguanosine-3'-phosphate
  modified_base 7: mod_base = OTHER; note = 2'-fluorocytidine-3'-phosphate
  modified_base 8: mod_base = OTHER; note = 2'-O-methyluridine-3'-phosphate
  modified_base 9: mod_base = OTHER; note = 2'-fluoroguanosine-3'-phosphate
  modified_base 10: mod_base = OTHER; note = 2'-fluoroguanosine-3'-phosphate
  modified_base 11: mod_base = OTHER; note = 2'-fluoroguanosine-3'-phosphate
  modified_base 12: mod_base = OTHER; note = 2'-O-methyladenosine-3'-phosphate
  modified_base 13: mod_base = OTHER; note = 2'-fluoroadenosine-3'-phosphate
  modified_base 14: mod_base = OTHER; note = 2'-O-methylguanosine-3'-phosphate
  modified_base 15: mod_base = OTHER; note = 2'-fluoroadenosine-3'-phosphate
  modified_base 16: mod_base = OTHER; note = 2'-O-methyluridine-3'-phosphate
  modified_base 17: mod_base = OTHER; note = 2'-fluoroadenosine-3'-phosphate
  modified_base 18: mod_base = OTHER; note = 2'-O-methyluridine-3'-phosphate
  modified_base 19: mod_base = OTHER; note = 2'-fluorocytidine-3'-phosphate
  modified_base 20: mod_base = OTHER; note = 2'-O-methyladenosine-3'-phosphate
  modified_base 21: mod_base = OTHER; note = 2'-fluoroadenosine-3'-phosphate N-[tris(GalNAc-alkyl)-amidodecanoyl)]-4-hydroxyprolinol Hyp-(GalNAc-alkyl)3
tatcagctgggaagatatcaa

SEQ ID NO: 80 - RNA, 21 nt, synthetic construct
  source 1..21: mol_type = other RNA; note = Description of Artificial Sequence: Synthetic oligonucleotide
  modified_base 1: mod_base = OTHER; note = 2'-fluorouridine -3'-phosphorothioate
  modified_base 2: mod_base = OTHER; note = 2'-O-methylguanosine-3'-phosphorothioate
  modified_base 3: mod_base = OTHER; note = 2'-fluorouridine-3'-phosphate
  modified_base 4: mod_base = OTHER; note = 2'-O-methylcytidine-3'-phosphate
  modified_base 5: mod_base = OTHER; note = 2'-fluorocytidine-3'-phosphate
  modified_base 6: mod_base = OTHER; note = 2'-O-methyluridine-3'-phosphate
  modified_base 7: mod_base = OTHER; note = 2'-fluoroadenosine-3'-phosphate
  modified_base 8: mod_base = OTHER; note = 2'-O-methylguanosine-3'-phosphate
  modified_base 9: mod_base = OTHER; note = 2'-fluoroguanosine-3'-phosphate
  modified_base 10: mod_base = OTHER; note = 2'-fluoroadenosine-3'-phosphate
  modified_base 11: mod_base = OTHER; note = 2'-fluoroadenosine-3'-phosphate
  modified_base 12: mod_base = OTHER; note = 2'-O-methylcytidine-3'-phosphate
  modified_base 13: mod_base = OTHER; note = 2'-fluorocytidine-3'-phosphate
  modified_base 14: mod_base = OTHER; note = 2'-O-methyluridine-3'-phosphate
  modified_base 15: mod_base = OTHER; note = 2'-fluorouridine-3'-phosphate
  modified_base 16: mod_base = OTHER; note = 2'-O-methyluridine-3'-phosphate
  modified_base 17: mod_base = OTHER; note = 2'-fluorouridine-3'-phosphate
  modified_base 18: mod_base = OTHER; note = 2'-O-methyladenosine-3'-phosphate
  modified_base 19: mod_base = OTHER; note = 2'-fluoroguanosine-3'-phosphate
  modified_base 20: mod_base = OTHER; note = 2'-O-methyladenosine-3'-phosphate
  modified_base 21: mod_base = OTHER; note = 2'-fluoroadenosine-3'-phosphate N-[tris(GalNAc-alkyl)-amidodecanoyl)]-4-hydroxyprolinol Hyp-(GalNAc-alkyl)3
tgtcctaggaaccttttagaa

SEQ ID NO: 81 - RNA, 21 nt, synthetic construct
  source 1..21: mol_type = other RNA; note = Description of Artificial Sequence: Synthetic oligonucleotide
  modified_base 1: mod_base = OTHER; note = 2'-fluorouridine -3'-phosphorothioate
  modified_base 2: mod_base = OTHER; note = 2'-O-methylcytidine-3'-phosphorothioate
  modified_base 3: mod_base = OTHER; note = 2'-fluorocytidine-3'-phosphate
  modified_base 4: mod_base = OTHER; note = 2'-O-methyladenosine-3'-phosphate
  modified_base 5: mod_base = OTHER; note = 2'-fluoroadenosine-3'-phosphate
  modified_base 6: mod_base = OTHER; note = 2'-O-methylcytidine-3'-phosphate
  modified_base 7: mod_base = OTHER; note = 2'-fluoroadenosine-3'-phosphate
  modified_base 8: mod_base = OTHER; note = 2'-O-methyladenosine-3'-phosphate
  modified_base 9: mod_base = OTHER; note = 2'-fluoroadenosine-3'-phosphate
  modified_base 10: mod_base = OTHER; note = 2'-fluoroadenosine-3'-phosphate
  modified_base 11: mod_base = OTHER; note = 2'-fluorouridine-3'-phosphate
  modified_base 12: mod_base = OTHER; note = 2'-O-methyladenosine-3'-phosphate
  modified_base 13: mod_base = OTHER; note = 2'-fluoroguanosine-3'-phosphate
  modified_base 14: mod_base = OTHER; note = 2'-O-methylcytidine-3'-phosphate
  modified_base 15: mod_base = OTHER; note = 2'-fluoroadenosine-3'-phosphate
  modified_base 16: mod_base = OTHER; note = 2'-O-methyladenosine-3'-phosphate
  modified_base 17: mod_base = OTHER; note = 2'-fluorouridine-3'-phosphate
  modified_base 18: mod_base = OTHER; note = 2'-O-methylcytidine-3'-phosphate
  modified_base 19: mod_base = OTHER; note = 2'-fluorocytidine-3'-phosphate
  modified_base 20: mod_base = OTHER; note = 2'-O-methylcytidine-3'-phosphate
  modified_base 21: mod_base = OTHER; note = 2'-fluorouridine-3'-phosphate N-[tris(GalNAc-alkyl)-amidodecanoyl)]-4-hydroxyprolinol Hyp-(GalNAc-alkyl)3
tccaacaaaatagcaatccct

SEQ ID NO: 82 - RNA, 21 nt, synthetic construct
  source 1..21: mol_type = other RNA; note = Description of Artificial Sequence: Synthetic oligonucleotide
  modified_base 1: mod_base = OTHER; note = 2'-fluoroguanosine-3'-phosphorothioate
  modified_base 2: mod_base = OTHER; note = 2'-O-methylguanosine-3'-phosphorothioate
  modified_base 3: mod_base = OTHER; note = 2'-fluorouridine-3'-phosphate
  modified_base 4: mod_base = OTHER; note = 2'-O-methylguanosine-3'-phosphate
  modified_base 5: mod_base = OTHER; note = 2'-fluorouridine-3'-phosphate
  modified_base 6: mod_base = OTHER; note = 2'-O-methylguanosine-3'-phosphate
  modified_base 7: mod_base = OTHER; note = 2'-fluorocytidine-3'-phosphate
  modified_base 8: mod_base = OTHER; note = 2'-O-methylguanosine-3'-phosphate
  modified_base 9: mod_base = OTHER; note = 2'-fluoroguanosine-3'-phosphate
  modified_base 10: mod_base = OTHER; note = 2'-fluoroadenosine-3'-phosphate
  modified_base 11: mod_base = OTHER; note = 2'-fluoroadenosine-3'-phosphate
  modified_base 12: mod_base = OTHER; note = 2'-O-methyladenosine-3'-phosphate
  modified_base 13: mod_base = OTHER; note = 2'-fluoroguanosine-3'-phosphate
  modified_base 14: mod_base = OTHER; note = 2'-O-methylguanosine-3'-phosphate
  modified_base 15: mod_base = OTHER; note = 2'-fluorocytidine-3'-phosphate
  modified_base 16: mod_base = OTHER; note = 2'-O-methyladenosine-3'-phosphate
  modified_base 17: mod_base = OTHER; note = 2'-fluorocytidine-3'-phosphate
  modified_base 18: mod_base = OTHER; note = 2'-O-methyluridine-3'-phosphate
  modified_base 19: mod_base = OTHER; note = 2'-fluoroguanosine-3'-phosphate
  modified_base 20: mod_base = OTHER; note = 2'-O-methyladenosine-3'-phosphate
  modified_base 21: mod_base = OTHER; note = 2'-fluorouridine-3'-phosphate N-[tris(GalNAc-alkyl)-amidodecanoyl)]-4-hydroxyprolinol Hyp-(GalNAc-alkyl)3
ggtgtgcggaaaggcactgat

SEQ ID NO: 83 - RNA, 21 nt, synthetic construct
  source 1..21: mol_type = other RNA; note = Description of Artificial Sequence: Synthetic oligonucleotide
  modified_base 1: mod_base = OTHER; note = 2'-fluorouridine -3'-phosphorothioate
  modified_base 2: mod_base = OTHER; note = 2'-O-methyluridine-3'-phosphorothioate
  modified_base 3: mod_base = OTHER; note = 2'-fluoroguanosine-3'-phosphate
  modified_base 4: mod_base = OTHER; note = 2'-O-methyladenosine-3'-phosphate
  modified_base 5: mod_base = OTHER; note = 2'-fluoroadenosine-3'-phosphate
  modified_base 6: mod_base = OTHER; note = 2'-O-methyladenosine-3'-phosphate
  modified_base 7: mod_base = OTHER; note = 2'-fluorocytidine-3'-phosphate
  modified_base 8: mod_base = OTHER; note = 2'-O-methylcytidine-3'-phosphate
  modified_base 9: mod_base = OTHER; note = 2'-fluoroadenosine-3'-phosphate
  modified_base 10: mod_base = OTHER; note = 2'-fluoroguanosine-3'-phosphate
  modified_base 11: mod_base = OTHER; note = 2'-fluorouridine-3'-phosphate
  modified_base 12: mod_base = OTHER; note = 2'-O-methyladenosine-3'-phosphate
  modified_base 13: mod_base = OTHER; note = 2'-fluorocytidine-3'-phosphate
  modified_base 14: mod_base = OTHER; note = 2'-O-methyluridine-3'-phosphate
  modified_base 15: mod_base = OTHER; note = 2'-fluorouridine-3'-phosphate
  modified_base 16: mod_base = OTHER; note = 2'-O-methyluridine-3'-phosphate
  modified_base 17: mod_base = OTHER; note = 2'-fluoroadenosine-3'-phosphate
  modified_base 18: mod_base = OTHER; note = 2'-O-methyluridine-3'-phosphate
  modified_base 19: mod_base = OTHER; note = 2'-fluorocytidine-3'-phosphate
  modified_base 20: mod_base = OTHER; note = 2'-O-methyladenosine-3'-phosphate
  modified_base 21: mod_base = OTHER; note = 2'-fluorouridine-3'-phosphate N-[tris(GalNAc-alkyl)-amidodecanoyl)]-4-hydroxyprolinol Hyp-(GalNAc-alkyl)3
ttgaaaccagtactttatcat

SEQ ID NO: 84 - RNA, 21 nt, synthetic construct
  source 1..21: mol_type = other RNA; note = Description of Artificial Sequence: Synthetic oligonucleotide
  modified_base 1: mod_base = OTHER; note = 2'-fluorouridine -3'-phosphorothioate
  modified_base 2: mod_base = OTHER; note = 2'-O-methyladenosine-3'-phosphorothioate
  modified_base 3: mod_base = OTHER; note = 2'-fluorocytidine-3'-phosphate
  modified_base 4: mod_base = OTHER; note = 2'-O-methyluridine-3'-phosphate
  modified_base 5: mod_base = OTHER; note = 2'-fluorouridine-3'-phosphate
  modified_base 6: mod_base = OTHER; note = 2'-O-methylcytidine-3'-phosphate
  modified_base 7: mod_base = OTHER; note = 2'-fluorocytidine-3'-phosphate
  modified_base 8: mod_base = OTHER; note = 2'-O-methyladenosine-3'-phosphate
  modified_base 9: mod_base = OTHER; note = 2'-fluoroadenosine-3'-phosphate
  modified_base 10: mod_base = OTHER; note = 2'-fluoroadenosine-3'-phosphate
  modified_base 11: mod_base = OTHER; note = 2'-fluoroguanosine-3'-phosphate
  modified_base 12: mod_base = OTHER; note = 2'-O-methyluridine-3'-phosphate
  modified_base 13: mod_base = OTHER; note = 2'-fluorocytidine-3'-phosphate
  modified_base 14: mod_base = OTHER; note = 2'-O-methyluridine-3'-phosphate
  modified_base 15: mod_base = OTHER; note = 2'-fluoroadenosine-3'-phosphate
  modified_base 16: mod_base = OTHER; note = 2'-O-methyluridine-3'-phosphate
  modified_base 17: mod_base = OTHER; note = 2'-fluoroadenosine-3'-phosphate
  modified_base 18: mod_base = OTHER; note = 2'-O-methyluridine-3'-phosphate
  modified_base 19: mod_base = OTHER; note = 2'-fluoroadenosine-3'-phosphate
  modified_base 20: mod_base = OTHER; note = 2'-O-methyluridine-3'-phosphate
  modified_base 21: mod_base = OTHER; note = 2'-fluoroadenosine-3'-phosphate N-[tris(GalNAc-alkyl)-amidodecanoyl)]-4-hydroxyprolinol Hyp-(GalNAc-alkyl)3
tacttccaaagtctatatata

SEQ ID NO: 85 - RNA, 21 nt, synthetic construct
  source 1..21: mol_type = other RNA; note = Description of Artificial Sequence: Synthetic oligonucleotide
  modified_base 1: mod_base = OTHER; note = 2'-fluorouridine -3'-phosphorothioate
  modified_base 2: mod_base = OTHER; note = 2'-O-methylcytidine-3'-phosphorothioate
  modified_base 3: mod_base = OTHER; note = 2'-fluorocytidine-3'-phosphate
  modified_base 4: mod_base = OTHER; note = 2'-O-methyluridine-3'-phosphate
  modified_base 5: mod_base = OTHER; note = 2'-fluoroadenosine-3'-phosphate
  modified_base 6: mod_base = OTHER; note = 2'-O-methylguanosine-3'-phosphate
  modified_base 7: mod_base = OTHER; note = 2'-fluoroguanosine-3'-phosphate
  modified_base 8: mod_base = OTHER; note = 2'-O-methyladenosine-3'-phosphate
  modified_base 9: mod_base = OTHER; note = 2'-fluoroadenosine-3'-phosphate
  modified_base 10: mod_base = OTHER; note = 2'-fluorocytidine-3'-phosphate
  modified_base 11: mod_base = OTHER; note = 2'-fluorocytidine-3'-phosphate
  modified_base 12: mod_base = OTHER; note = 2'-O-methyluridine-3'-phosphate
  modified_base 13: mod_base = OTHER; note = 2'-fluorouridine-3'-phosphate
  modified_base 14: mod_base = OTHER; note = 2'-O-methyluridine-3'-phosphate
  modified_base 15: mod_base = OTHER; note = 2'-fluorouridine-3'-phosphate
  modified_base 16: mod_base = OTHER; note = 2'-O-methyladenosine-3'-phosphate
  modified_base 17: mod_base = OTHER; note = 2'-fluoroguanosine-3'-phosphate
  modified_base 18: mod_base = OTHER; note = 2'-O-methyladenosine-3'-phosphate
  modified_base 19: mod_base = OTHER; note = 2'-fluoroadenosine-3'-phosphate
  modified_base 20: mod_base = OTHER; note = 2'-O-methyladenosine-3'-phosphate
  modified_base 21: mod_base = OTHER; note = 2'-fluorouridine-3'-phosphate N-[tris(GalNAc-alkyl)-amidodecanoyl)]-4-hydroxyprolinol Hyp-(GalNAc-alkyl)3
tcctaggaaccttttagaaat

SEQ ID NO: 86 - RNA, 21 nt, synthetic construct
  source 1..21: mol_type = other RNA; note = Description of Artificial Sequence: Synthetic oligonucleotide
  modified_base 1: mod_base = OTHER; note = 2'-fluorocytidine-3'-phosphorothioate
  modified_base 2: mod_base = OTHER; note = 2'-O-methyluridine-3'-phosphorothioate
  modified_base 3: mod_base = OTHER; note = 2'-fluorocytidine-3'-phosphate
  modified_base 4: mod_base = OTHER; note = 2'-O-methylcytidine-3'-phosphate
  modified_base 5: mod_base = OTHER; note = 2'-fluorouridine-3'-phosphate
  modified_base 6: mod_base = OTHER; note = 2'-O-methylguanosine-3'-phosphate
  modified_base 7: mod_base = OTHER; note = 2'-fluoroadenosine-3'-phosphate
  modified_base 8: mod_base = OTHER; note = 2'-O-methylguanosine-3'-phosphate
  modified_base 9: mod_base = OTHER; note = 2'-fluoroguanosine-3'-phosphate
  modified_base 10: mod_base = OTHER; note = 2'-fluoroadenosine-3'-phosphate
  modified_base 11: mod_base = OTHER; note = 2'-fluoroadenosine-3'-phosphate
  modified_base 12: mod_base = OTHER; note = 2'-O-methyladenosine-3'-phosphate
  modified_base 13: mod_base = OTHER; note = 2'-fluoroadenosine-3'-phosphate
  modified_base 14: mod_base = OTHER; note = 2'-O-methyluridine-3'-phosphate
  modified_base 15: mod_base = OTHER; note = 2'-fluorouridine-3'-phosphate
  modified_base 16: mod_base = OTHER; note = 2'-O-methyluridine-3'-phosphate
  modified_base 17: mod_base = OTHER; note = 2'-fluorouridine-3'-phosphate
  modified_base 18: mod_base = OTHER; note = 2'-O-methylguanosine-3'-phosphate
  modified_base 19: mod_base = OTHER; note = 2'-fluoroguanosine-3'-phosphate
  modified_base 20: mod_base = OTHER; note = 2'-O-methyladenosine-3'-phosphate
  modified_base 21: mod_base = OTHER; note = 2'-fluoroadenosine-3'-phosphate N-[tris(GalNAc-alkyl)-amidodecanoyl)]-4-hydroxyprolinol Hyp-(GalNAc-alkyl)3
ctcctgaggaaaattttggaa

SEQ ID NO: 87 - RNA, 21 nt, synthetic construct
  source 1..21: mol_type = other RNA; note = Description of Artificial Sequence: Synthetic oligonucleotide
  modified_base 1: mod_base = OTHER; note = 2'-fluoroguanosine-3'-phosphorothioate
  modified_base 2: mod_base = OTHER; note = 2'-O-methylcytidine-3'-phosphorothioate
  modified_base 3: mod_base = OTHER; note = 2'-fluorouridine-3'-phosphate
  modified_base 4: mod_base = OTHER; note = 2'-O-methylcytidine-3'-phosphate
  modified_base 5: mod_base = OTHER; note = 2'-fluorocytidine-3'-phosphate
  modified_base 6: mod_base = OTHER; note = 2'-O-methylguanosine-3'-phosphate
  modified_base 7: mod_base = OTHER; note = 2'-fluoroguanosine-3'-phosphate
  modified_base 8: mod_base = OTHER; note = 2'-O-methyladenosine-3'-phosphate
  modified_base 9: mod_base = OTHER; note = 2'-fluoroadenosine-3'-phosphate
  modified_base 10: mod_base = OTHER; note = 2'-fluorouridine-3'-phosphate
  modified_base 11: mod_base = OTHER; note = 2'-fluoroguanosine-3'-phosphate
  modified_base 12: mod_base = OTHER; note = 2'-O-methyluridine-3'-phosphate
  modified_base 13: mod_base = OTHER; note = 2'-fluorouridine-3'-phosphate
  modified_base 14: mod_base = OTHER; note = 2'-O-methylguanosine-3'-phosphate
  modified_base 15: mod_base = OTHER; note = 2'-fluorocytidine-3'-phosphate
  modified_base 16: mod_base = OTHER; note = 2'-O-methyluridine-3'-phosphate
  modified_base 17: mod_base = OTHER; note = 2'-fluoroguanosine-3'-phosphate
  modified_base 18: mod_base = OTHER; note = 2'-O-methyladenosine-3'-phosphate
  modified_base 19: mod_base = OTHER; note = 2'-fluoroadenosine-3'-phosphate
  modified_base 20: mod_base = OTHER; note = 2'-O-methyladenosine-3'-phosphate
  modified_base 21: mod_base = OTHER; note = 2'-fluorouridine-3'-phosphate N-[tris(GalNAc-alkyl)-amidodecanoyl)]-4-hydroxyprolinol Hyp-(GalNAc-alkyl)3
gctccggaatgttgctgaaat

SEQ ID NO: 88 - RNA, 21 nt, synthetic construct
  source 1..21: mol_type = other RNA; note = Description of Artificial Sequence: Synthetic oligonucleotide
  modified_base 1: mod_base = OTHER; note = 2'-fluoroguanosine-3'-phosphorothioate
  modified_base 2: mod_base = OTHER; note = 2'-O-methyluridine-3'-phosphorothioate
  modified_base 3: mod_base = OTHER; note = 2'-fluoroguanosine-3'-phosphate
  modified_base 4: mod_base = OTHER; note = 2'-O-methyluridine-3'-phosphate
  modified_base 5: mod_base = OTHER; note = 2'-fluorouridine-3'-phosphate
  modified_base 6: mod_base = OTHER; note = 2'-O-methyluridine-3'-phosphate
  modified_base 7: mod_base = OTHER; note = 2'-fluoroguanosine-3'-phosphate
  modified_base 8: mod_base = OTHER; note = 2'-O-methyluridine-3'-phosphate
  modified_base 9: mod_base = OTHER; note = 2'-fluoroguanosine-3'-phosphate
  modified_base 10: mod_base = OTHER; note = 2'-fluoroguanosine-3'-phosphate
  modified_base 11: mod_base = OTHER; note = 2'-fluoroguanosine-3'-phosphate
  modified_base 12: mod_base = OTHER; note = 2'-O-methylguanosine-3'-phosphate
  modified_base 13: mod_base = OTHER; note = 2'-fluoroadenosine-3'-phosphate
  modified_base 14: mod_base = OTHER; note = 2'-O-methylguanosine-3'-phosphate
  modified_base 15: mod_base = OTHER; note = 2'-fluoroadenosine-3'-phosphate
  modified_base 16: mod_base = OTHER; note = 2'-O-methylcytidine-3'-phosphate
  modified_base 17: mod_base = OTHER; note = 2'-fluorocytidine-3'-phosphate
  modified_base 18: mod_base = OTHER; note = 2'-O-methyladenosine-3'-phosphate
  modified_base 19: mod_base = OTHER; note = 2'-fluoroadenosine-3'-phosphate
  modified_base 20: mod_base = OTHER; note = 2'-O-methyluridine-3'-phosphate
  modified_base 21: mod_base = OTHER; note = 2'-fluoroadenosine-3'-phosphate N-[tris(GalNAc-alkyl)-amidodecanoyl)]-4-hydroxyprolinol Hyp-(GalNAc-alkyl)3
gtgtttgtggggagaccaata

SEQ ID NO: 89 - RNA, 23 nt, synthetic construct
  source 1..23: mol_type = other RNA; note = Description of Artificial Sequence: Synthetic oligonucleotide
  modified_base 1: mod_base = OTHER; note = 2'-O-methyluridine-3'-phosphorothioate
  modified_base 2: mod_base = OTHER; note = 2'-fluorouridine -3'-phosphorothioate
  modified_base 3: mod_base = OTHER; note = 2'-O-methylguanosine-3'-phosphate
  modified_base 4: mod_base = OTHER; note = 2'-fluorouridine-3'-phosphate
  modified_base 5: mod_base = OTHER; note = 2'-O-methylcytidine-3'-phosphate
  modified_base 6: mod_base = OTHER; note = 2'-fluoroguanosine-3'-phosphate
  modified_base 7: mod_base = OTHER; note = 2'-O-methyladenosine-3'-phosphate
  modified_base 8: mod_base = OTHER; note = 2'-fluorouridine-3'-phosphate
  modified_base 9: mod_base = OTHER; note = 2'-O-methylguanosine-3'-phosphate
  modified_base 10: mod_base = OTHER; note = 2'-fluoroadenosine-3'-phosphate
  modified_base 11: mod_base = OTHER; note = 2'-O-methylcytidine-3'-phosphate
  modified_base 12: mod_base = OTHER; note = 2'-O-methyluridine-3'-phosphate
  modified_base 13: mod_base = OTHER; note = 2'-O-methyluridine-3'-phosphate
  modified_base 14: mod_base = OTHER; note = 2'-fluorouridine-3'-phosphate
  modified_base 15: mod_base = OTHER; note = 2'-O-methylcytidine-3'-phosphate
  modified_base 16: mod_base = OTHER; note = 2'-fluoroadenosine-3'-phosphate
  modified_base 17: mod_base = OTHER; note = 2'-O-methylcytidine-3'-phosphate
  modified_base 18: mod_base = OTHER; note = 2'-fluoroadenosine-3'-phosphate
  modified_base 19: mod_base = OTHER; note = 2'-O-methyluridine-3'-phosphate
  modified_base 20: mod_base = OTHER; note = 2'-fluorouridine-3'-phosphate
  modified_base 21: mod_base = OTHER; note = 2'-O-methylcytidine-3'-phosphorothioate
  modified_base 22: mod_base = OTHER; note = 2'-O-methyluridine-3'-phosphorothioate
  modified_base 23: mod_base = OTHER; note = 2'-O-methylguanosine-3'-phosphate
ttgtcgatgactttcacattctg

SEQ ID NO: 90 - RNA, 23 nt, synthetic construct
  source 1..23: mol_type = other RNA; note = Description of Artificial Sequence: Synthetic oligonucleotide
  modified_base 1: mod_base = OTHER; note = 2'-O-methyluridine-3'-phosphorothioate
  modified_base 2: mod_base = OTHER; note = 2'-fluorocytidine-3'-phosphorothioate
  modified_base 3: mod_base = OTHER; note = 2'-O-methylcytidine-3'-phosphate
  modified_base 4: mod_base = OTHER; note = 2'-fluorouridine-3'-phosphate
  modified_base 5: mod_base = OTHER; note = 2'-O-methyladenosine-3'-phosphate
  modified_base 6: mod_base = OTHER; note = 2'-fluoroguanosine-3'-phosphate
  modified_base 7: mod_base = OTHER; note = 2'-O-methylguanosine-3'-phosphate
  modified_base 8: mod_base = OTHER; note = 2'-fluoroadenosine-3'-phosphate
  modified_base 9: mod_base = OTHER; note = 2'-O-methylcytidine-3'-phosphate
  modified_base 10: mod_base = OTHER; note = 2'-fluoroadenosine-3'-phosphate
  modified_base 11: mod_base = OTHER; note = 2'-O-methylcytidine-3'-phosphate
  modified_base 12: mod_base = OTHER; note = 2'-O-methylcytidine-3'-phosphate
  modified_base 13: mod_base = OTHER; note = 2'-O-methylcytidine-3'-phosphate
  modified_base 14: mod_base = OTHER; note = 2'-fluoroadenosine-3'-phosphate
  modified_base 15: mod_base = OTHER; note = 2'-O-methyluridine-3'-phosphate
  modified_base 16: mod_base = OTHER; note = 2'-fluorouridine-3'-phosphate
  modified_base 17: mod_base = OTHER; note = 2'-O-methylguanosine-3'-phosphate
  modified_base 18: mod_base = OTHER; note = 2'-fluoroadenosine-3'-phosphate
  modified_base 19: mod_base = OTHER; note = 2'-O-methyladenosine-3'-phosphate
  modified_base 20: mod_base = OTHER; note = 2'-fluoroadenosine-3'-phosphate
  modified_base 21: mod_base = OTHER; note = 2'-O-methyladenosine-3'-phosphorothioate
  modified_base 22: mod_base = OTHER; note = 2'-O-methylguanosine-3'-phosphorothioate
  modified_base 23: mod_base = OTHER; note = 2'-O-methyluridine-3'-phosphate
tcctaggacacccattgaaaagt

SEQ ID NO: 91 - RNA, 23 nt, synthetic construct
  source 1..23: mol_type = other RNA; note = Description of Artificial Sequence: Synthetic oligonucleotide
  modified_base 1: mod_base = OTHER; note = 2'-O-methyladenosine-3'-phosphorothioate
  modified_base 2: mod_base = OTHER; note = 2'-fluoroadenosine-3'-phosphorothioate
  modified_base 3: mod_base = OTHER; note = 2'-O-methyluridine-3'-phosphate
  modified_base 4: mod_base = OTHER; note = 2'-fluoroguanosine-3'-phosphate
  modified_base 5: mod_base = OTHER; note = 2'-O-methyluridine-3'-phosphate
  modified_base 6: mod_base = OTHER; note = 2'-fluorocytidine-3'-phosphate
  modified_base 7: mod_base = OTHER; note = 2'-O-methyluridine-3'-phosphate
  modified_base 8: mod_base = OTHER; note = 2'-fluorouridine-3'-phosphate
  modified_base 9: mod_base = OTHER; note = 2'-O-methylguanosine-3'-phosphate
  modified_base 10: mod_base = OTHER; note = 2'-fluorouridine-3'-phosphate
  modified_base 11: mod_base = OTHER; note = 2'-O-methylcytidine-3'-phosphate
  modified_base 12: mod_base = OTHER; note = 2'-O-methylguanosine-3'-phosphate
  modified_base 13: mod_base = OTHER; note = 2'-O-methyladenosine-3'-phosphate
  modified_base 14: mod_base = OTHER; note = 2'-fluorouridine-3'-phosphate
  modified_base 15: mod_base = OTHER; note = 2'-O-methylguanosine-3'-phosphate
  modified_base 16: mod_base = OTHER; note = 2'-fluoroadenosine-3'-phosphate
  modified_base 17: mod_base = OTHER; note = 2'-O-methylcytidine-3'-phosphate
  modified_base 18: mod_base = OTHER; note = 2'-fluorouridine-3'-phosphate
  modified_base 19: mod_base = OTHER; note = 2'-O-methyluridine-3'-phosphate
  modified_base 20: mod_base = OTHER; note = 2'-fluorouridine-3'-phosphate
  modified_base 21: mod_base = OTHER; note = 2'-O-methylcytidine-3'-phosphorothioate
  modified_base 22: mod_base = OTHER; note = 2'-O-methyladenosine-3'-phosphorothioate
  modified_base 23: mod_base = OTHER; note = 2'-O-methylcytidine-3'-phosphate
aatgtcttgtcgatgactttcac

SEQ ID NO: 92 - RNA, 23 nt, synthetic construct
  source 1..23: mol_type = other RNA; note = Description of Artificial Sequence: Synthetic oligonucleotide
  modified_base 1: mod_base = OTHER; note = 2'-O-methyluridine-3'-phosphorothioate
  modified_base 2: mod_base = OTHER; note = 2'-fluorocytidine-3'-phosphorothioate
  modified_base 3: mod_base = OTHER; note = 2'-O-methyladenosine-3'-phosphate
  modified_base 4: mod_base = OTHER; note = 2'-fluorocytidine-3'-phosphate
  modified_base 5: mod_base = OTHER; note = 2'-O-methylcytidine-3'-phosphate
  modified_base 6: mod_base = OTHER; note = 2'-fluoroadenosine-3'-phosphate
  modified_base 7: mod_base = OTHER; note = 2'-O-methyladenosine-3'-phosphate
  modified_base 8: mod_base = OTHER; note = 2'-fluorouridine-3'-phosphate
  modified_base 9: mod_base = OTHER; note = 2'-O-methylguanosine-3'-phosphate
  modified_base 10: mod_base = OTHER; note = 2'-fluorouridine-3'-phosphate
  modified_base 11: mod_base = OTHER; note = 2'-O-methylcytidine-3'-phosphate
  modified_base 12: mod_base = OTHER; note = 2'-O-methyluridine-3'-phosphate
  modified_base 13: mod_base = OTHER; note = 2'-O-methyluridine-3'-phosphate
  modified_base 14: mod_base = OTHER; note = 2'-fluoroguanosine-3'-phosphate
  modified_base 15: mod_base = OTHER; note = 2'-O-methyluridine-3'-phosphate
  modified_base 16: mod_base = OTHER; note = 2'-fluorocytidine-3'-phosphate
  modified_base 17: mod_base = OTHER; note = 2'-O-methylguanosine-3'-phosphate
  modified_base 18: mod_base = OTHER; note = 2'-fluoroadenosine-3'-phosphate
  modified_base 19: mod_base = OTHER; note = 2'-O-methyluridine-3'-phosphate
  modified_base 20: mod_base = OTHER; note = 2'-fluoroguanosine-3'-phosphate
  modified_base 21: mod_base = OTHER; note = 2'-O-methyladenosine-3'-phosphorothioate
  modified_base 22: mod_base = OTHER; note = 2'-O-methylcytidine-3'-phosphorothioate
  modified_base 23: mod_base = OTHER; note = 2'-O-methyluridine-3'-phosphate
tcaccaatgtcttgtcgatgact

SEQ ID NO: 93 - RNA, 23 nt, synthetic construct
  source 1..23: mol_type = other RNA; note = Description of Artificial Sequence: Synthetic oligonucleotide
  modified_base 1: mod_base = OTHER; note = 2'-O-methyluridine-3'-phosphorothioate
  modified_base 2: mod_base = OTHER; note = 2'-fluorouridine -3'-phosphorothioate
  modified_base 3: mod_base = OTHER; note = 2'-O-methylcytidine-3'-phosphate
  modified_base 4: mod_base = OTHER; note = 2'-fluorocytidine-3'-phosphate
  modified_base 5: mod_base = OTHER; note = 2'-O-methyluridine-3'-phosphate
  modified_base 6: mod_base = OTHER; note = 2'-fluoroadenosine-3'-phosphate
  modified_base 7: mod_base = OTHER; note = 2'-O-methylguanosine-3'-phosphate
  modified_base 8: mod_base = OTHER; note = 2'-fluoroguanosine-3'-phosphate
  modified_base 9: mod_base = OTHER; note = 2'-O-methyladenosine-3'-phosphate
  modified_base 10: mod_base = OTHER; note = 2'-fluorocytidine-3'-phosphate
  modified_base 11: mod_base = OTHER; note = 2'-O-methyladenosine-3'-phosphate
  modified_base 12: mod_base = OTHER; note = 2'-O-methylcytidine-3'-phosphate
  modified_base 13: mod_base = OTHER; note = 2'-O-methylcytidine-3'-phosphate
  modified_base 14: mod_base = OTHER; note = 2'-fluorocytidine-3'-phosphate
  modified_base 15: mod_base = OTHER; note = 2'-O-methyladenosine-3'-phosphate
  modified_base 16: mod_base = OTHER; note = 2'-fluorouridine-3'-phosphate
  modified_base 17: mod_base = OTHER; note = 2'-O-methyluridine-3'-phosphate
  modified_base 18: mod_base = OTHER; note = 2'-fluoroguanosine-3'-phosphate
  modified_base 19: mod_base = OTHER; note = 2'-O-methyladenosine-3'-phosphate
  modified_base 20: mod_base = OTHER; note = 2'-fluoroadenosine-3'-phosphate
  modified_base 21: mod_base = OTHER; note = 2'-O-methyladenosine-3'-phosphorothioate
  modified_base 22: mod_base = OTHER; note = 2'-O-methyladenosine-3'-phosphorothioate
  modified_base 23: mod_base = OTHER; note = 2'-O-methylguanosine-3'-phosphate
ttcctaggacacccattgaaaag

SEQ ID NO: 94 - RNA, 23 nt, synthetic construct
  source 1..23: mol_type = other RNA; note = Description of Artificial Sequence: Synthetic oligonucleotide
  modified_base 1: mod_base = OTHER; note = 2'-O-methyladenosine-3'-phosphorothioate
  modified_base 2: mod_base = OTHER; note = 2'-fluoroadenosine-3'-phosphorothioate
  modified_base 3: mod_base = OTHER; note = 2'-O-methylguanosine-3'-phosphate
  modified_base 4: mod_base = OTHER; note = 2'-fluoroguanosine-3'-phosphate
  modified_base 5: mod_base = OTHER; note = 2'-O-methyluridine-3'-phosphate
  modified_base 6: mod_base = OTHER; note = 2'-fluorouridine-3'-phosphate
  modified_base 7: mod_base = OTHER; note = 2'-O-methylcytidine-3'-phosphate
  modified_base 8: mod_base = OTHER; note = 2'-fluorocytidine-3'-phosphate
  modified_base 9: mod_base = OTHER; note = 2'-O-methyluridine-3'-phosphate
  modified_base 10: mod_base = OTHER; note = 2'-fluoroadenosine-3'-phosphate
  modified_base 11: mod_base = OTHER; note = 2'-O-methylguanosine-3'-phosphate
  modified_base 12: mod_base = OTHER; note = 2'-O-methylguanosine-3'-phosphate
  modified_base 13: mod_base = OTHER; note = 2'-O-methyladenosine-3'-phosphate
  modified_base 14: mod_base = OTHER; note = 2'-fluorocytidine-3'-phosphate
  modified_base 15: mod_base = OTHER; note = 2'-O-methyladenosine-3'-phosphate
  modified_base 16: mod_base = OTHER; note = 2'-fluorocytidine-3'-phosphate
  modified_base 17: mod_base = OTHER; note = 2'-O-methylcytidine-3'-phosphate
  modified_base 18: mod_base = OTHER; note = 2'-fluorocytidine-3'-phosphate
  modified_base 19: mod_base = OTHER; note = 2'-O-methyladenosine-3'-phosphate
  modified_base 20: mod_base = OTHER; note = 2'-fluorouridine-3'-phosphate
  modified_base 21: mod_base = OTHER; note = 2'-O-methyluridine-3'-phosphorothioate
  modified_base 22: mod_base = OTHER; note = 2'-O-methylguanosine-3'-phosphorothioate
  modified_base 23: mod_base = OTHER; note = 2'-O-methyladenosine-3'-phosphate
aaggttcctaggacacccattga

SEQ ID NO: 95 - RNA, 23 nt, synthetic construct
  source 1..23: mol_type = other RNA; note = Description of Artificial Sequence: Synthetic oligonucleotide
  modified_base 1: mod_base = OTHER; note = 2'-O-methyluridine-3'-phosphorothioate
  modified_base 2: mod_base = OTHER; note = 2'-fluoroguanosine-3'-phosphorothioate
  modified_base 3: mod_base = OTHER; note = 2'-O-methylguanosine-3'-phosphate
  modified_base 4: mod_base = OTHER; note = 2'-fluoroadenosine-3'-phosphate
  modified_base 5: mod_base = OTHER; note = 2'-O-methyladenosine-3'-phosphate
  modified_base 6: mod_base = OTHER; note = 2'-fluoroadenosine-3'-phosphate
  modified_base 7: mod_base = OTHER; note = 2'-O-methyladenosine-3'-phosphate
  modified_base 8: mod_base = OTHER; note = 2'-fluorouridine-3'-phosphate
  modified_base 9: mod_base = OTHER; note = 2'-O-methyladenosine-3'-phosphate
  modified_base 10: mod_base = OTHER; note = 2'-fluorouridine-3'-phosphate
  modified_base 11: mod_base = OTHER; note = 2'-O-methyluridine-3'-phosphate
  modified_base 12: mod_base = OTHER; note = 2'-O-methylguanosine-3'-phosphate
  modified_base 13: mod_base = OTHER; note = 2'-O-methyluridine-3'-phosphate
  modified_base 14: mod_base = OTHER; note = 2'-fluoroguanosine-3'-phosphate
  modified_base 15: mod_base = OTHER; note = 2'-O-methylcytidine-3'-phosphate
  modified_base 16: mod_base = OTHER; note = 2'-fluoroadenosine-3'-phosphate
  modified_base 17: mod_base = OTHER; note = 2'-O-methylcytidine-3'-phosphate
  modified_base 18: mod_base = OTHER; note = 2'-fluorouridine-3'-phosphate
  modified_base 19: mod_base = OTHER; note = 2'-O-methylguanosine-3'-phosphate
  modified_base 20: mod_base = OTHER; note = 2'-fluorouridine-3'-phosphate
  modified_base 21: mod_base = OTHER; note = 2'-O-methylcytidine-3'-phosphorothioate
  modified_base 22: mod_base = OTHER; note = 2'-O-methyladenosine-3'-phosphorothioate
  modified_base 23: mod_base = OTHER; note = 2'-O-methylguanosine-3'-phosphate
tggaaaatattgtgcactgtcag

SEQ ID NO: 96 - RNA, 23 nt, synthetic construct
  source 1..23: mol_type = other RNA; note = Description of Artificial Sequence: Synthetic oligonucleotide
  modified_base 1: mod_base = OTHER; note = 2'-O-methyluridine-3'-phosphorothioate
  modified_base 2: mod_base = OTHER; note = 2'-fluorouridine -3'-phosphorothioate
  modified_base 3: mod_base = OTHER; note = 2'-O-methyladenosine-3'-phosphate
  modified_base 4: mod_base = OTHER; note = 2'-fluoroguanosine-3'-phosphate
  modified_base 5: mod_base = OTHER; note = 2'-O-methylguanosine-3'-phosphate
  modified_base 6: mod_base = OTHER; note = 2'-fluoroadenosine-3'-phosphate
  modified_base 7: mod_base = OTHER; note = 2'-O-methylcytidine-3'-phosphate
  modified_base 8: mod_base = OTHER; note = 2'-fluoroadenosine-3'-phosphate
  modified_base 9: mod_base = OTHER; note = 2'-O-methylcytidine-3'-phosphate
  modified_base 10: mod_base = OTHER; note = 2'-fluorocytidine-3'-phosphate
  modified_base 11: mod_base = OTHER; note = 2'-O-methylcytidine-3'-phosphate
  modified_base 12: mod_base = OTHER; note = 2'-O-methyladenosine-3'-phosphate
  modified_base 13: mod_base = OTHER; note = 2'-O-methyluridine-3'-phosphate
  modified_base 14: mod_base = OTHER; note = 2'-fluorouridine-3'-phosphate
  modified_base 15: mod_base = OTHER; note = 2'-O-methylguanosine-3'-phosphate
  modified_base 16: mod_base = OTHER; note = 2'-fluoroadenosine-3'-phosphate
  modified_base 17: mod_base = OTHER; note = 2'-O-methyladenosine-3'-phosphate
  modified_base 18: mod_base = OTHER; note = 2'-fluoroadenosine-3'-phosphate
  modified_base 19: mod_base = OTHER; note = 2'-O-methyladenosine-3'-phosphate
  modified_base 20: mod_base = OTHER; note = 2'-fluoroguanosine-3'-phosphate
  modified_base 21: mod_base = OTHER; note = 2'-O-methyluridine-3'-phosphorothioate
  modified_base 22: mod_base = OTHER; note = 2'-O-methylcytidine-3'-phosphorothioate
  modified_base 23: mod_base = OTHER; note = 2'-O-methyladenosine-3'-phosphate
ttaggacacccattgaaaagtca

SEQ ID NO: 97 - RNA, 23 nt, synthetic construct
  source 1..23: mol_type = other RNA; note = Description of Artificial Sequence: Synthetic oligonucleotide
  modified_base 1: mod_base = OTHER; note = 2'-O-methyluridine-3'-phosphorothioate
  modified_base 2: mod_base = OTHER; note = 2'-fluorocytidine-3'-phosphorothioate
  modified_base 3: mod_base = OTHER; note = 2'-O-methyladenosine-3'-phosphate
  modified_base 4: mod_base = OTHER; note = 2'-fluoroadenosine-3'-phosphate
  modified_base 5: mod_base = OTHER; note = 2'-O-methyluridine-3'-phosphate
  modified_base 6: mod_base = OTHER; note = 2'-fluoroguanosine-3'-phosphate
  modified_base 7: mod_base = OTHER; note = 2'-O-methyluridine-3'-phosphate
  modified_base 8: mod_base = OTHER; note = 2'-fluorocytidine-3'-phosphate
  modified_base 9: mod_base = OTHER; note = 2'-O-methyluridine-3'-phosphate
  modified_base 10: mod_base = OTHER; note = 2'-fluorouridine-3'-phosphate
  modified_base 11: mod_base = OTHER; note = 2'-O-methylguanosine-3'-phosphate
  modified_base 12: mod_base = OTHER; note = 2'-O-methyluridine-3'-phosphate
  modified_base 13: mod_base = OTHER; note = 2'-O-methylcytidine-3'-phosphate
  modified_base 14: mod_base = OTHER; note = 2'-fluoroguanosine-3'-phosphate
  modified_base 15: mod_base = OTHER; note = 2'-O-methyladenosine-3'-phosphate
  modified_base 16: mod_base = OTHER; note = 2'-fluorouridine-3'-phosphate
  modified_base 17: mod_base = OTHER; note = 2'-O-methylguanosine-3'-phosphate
  modified_base 18: mod_base = OTHER; note = 2'-fluoroadenosine-3'-phosphate
  modified_base 19: mod_base = OTHER; note = 2'-O-methylcytidine-3'-phosphate
  modified_base 20: mod_base = OTHER; note = 2'-fluorouridine-3'-phosphate
  modified_base 21: mod_base = OTHER; note = 2'-O-methyluridine-3'-phosphorothioate
  modified_base 22: mod_base = OTHER; note = 2'-O-methyluridine-3'-phosphorothioate
  modified_base 23: mod_base = OTHER; note = 2'-O-methylcytidine-3'-phosphate
tcaatgtcttgtcgatgactttc

SEQ ID NO: 98 - RNA, 23 nt, synthetic construct
  source 1..23: mol_type = other RNA; note = Description of Artificial Sequence: Synthetic oligonucleotide
  modified_base 1: mod_base = OTHER; note = 2'-O-methyluridine-3'-phosphorothioate
  modified_base 2: mod_base = OTHER; note = 2'-fluorocytidine-3'-phosphorothioate
  modified_base 3: mod_base = OTHER; note = 2'-O-methyluridine-3'-phosphate
  modified_base 4: mod_base = OTHER; note = 2'-fluorocytidine-3'-phosphate
  modified_base 5: mod_base = OTHER; note = 2'-O-methyladenosine-3'-phosphate
  modified_base 6: mod_base = OTHER; note = 2'-fluorocytidine-3'-phosphate
  modified_base 7: mod_base = OTHER; note = 2'-O-methylcytidine-3'-phosphate
  modified_base 8: mod_base = OTHER; note = 2'-fluoroadenosine-3'-phosphate
  modified_base 9: mod_base = OTHER; note = 2'-O-methyladenosine-3'-phosphate
  modified_base 10: mod_base = OTHER; note = 2'-fluorouridine-3'-phosphate
  modified_base 11: mod_base = OTHER; note = 2'-O-methylguanosine-3'-phosphate
  modified_base 12: mod_base = OTHER; note = 2'-O-methyluridine-3'-phosphate
  modified_base 13: mod_base = OTHER; note = 2'-O-methylcytidine-3'-phosphate
  modified_base 14: mod_base = OTHER; note = 2'-fluorouridine-3'-phosphate
  modified_base 15: mod_base = OTHER; note = 2'-O-methyluridine-3'-phosphate
  modified_base 16: mod_base = OTHER; note = 2'-fluoroguanosine-3'-phosphate
  modified_base 17: mod_base = OTHER; note = 2'-O-methyluridine-3'-phosphate
  modified_base 18: mod_base = OTHER; note = 2'-fluorocytidine-3'-phosphate
  modified_base 19: mod_base = OTHER; note = 2'-O-methylguanosine-3'-phosphate
  modified_base 20: mod_base = OTHER; note = 2'-fluoroadenosine-3'-phosphate
  modified_base 21: mod_base = OTHER; note = 2'-O-methyluridine-3'-phosphorothioate
  modified_base 22: mod_base = OTHER; note = 2'-O-methylguanosine-3'-phosphorothioate
  modified_base 23: mod_base = OTHER; note = 2'-O-methyladenosine-3'-phosphate
tctcaccaatgtcttgtcgatga

SEQ ID NO: 99 - RNA, 23 nt, synthetic construct
  source 1..23: mol_type = other RNA; note = Description of Artificial Sequence: Synthetic oligonucleotide
  modified_base 1: mod_base = OTHER; note = 2'-O-methyluridine-3'-phosphorothioate
  modified_base 2: mod_base = OTHER; note = 2'-fluoroadenosine-3'-phosphorothioate
  modified_base 3: mod_base = OTHER; note = 2'-O-methyluridine-3'-phosphate
  modified_base 4: mod_base = OTHER; note = 2'-fluorocytidine-3'-phosphate
  modified_base 5: mod_base = OTHER; note = 2'-O-methyluridine-3'-phosphate
  modified_base 6: mod_base = OTHER; note = 2'-fluorouridine-3'-phosphate
  modified_base 7: mod_base = OTHER; note = 2'-O-methylguanosine-3'-phosphate
  modified_base 8: mod_base = OTHER; note = 2'-fluoroadenosine-3'-phosphate
  modified_base 9: mod_base = OTHER; note = 2'-O-methyladenosine-3'-phosphate
  modified_base 10: mod_base = OTHER; note = 2'-fluorocytidine-3'-phosphate
  modified_base 11: mod_base = OTHER; note = 2'-O-methyladenosine-3'-phosphate
  modified_base 12: mod_base = OTHER; note = 2'-O-methylcytidine-3'-phosphate
  modified_base 13: mod_base = OTHER; note = 2'-O-methylcytidine-3'-phosphate
  modified_base 14: mod_base = OTHER; note = 2'-fluorouridine-3'-phosphate
  modified_base 15: mod_base = OTHER; note = 2'-O-methyluridine-3'-phosphate
  modified_base 16: mod_base = OTHER; note = 2'-fluorouridine-3'-phosphate
  modified_base 17: mod_base = OTHER; note = 2'-O-methylcytidine-3'-phosphate
  modified_base 18: mod_base = OTHER; note = 2'-fluorouridine-3'-phosphate
  modified_base 19: mod_base = OTHER; note = 2'-O-methylcytidine-3'-phosphate
  modified_base 20: mod_base = OTHER; note = 2'-fluorocytidine-3'-phosphate
  modified_base 21: mod_base = OTHER; note = 2'-O-methylcytidine-3'-phosphorothioate
  modified_base 22: mod_base = OTHER; note = 2'-O-methylcytidine-3'-phosphorothioate
  modified_base 23: mod_base = OTHER; note = 2'-O-methylcytidine-3'-phosphate
tatcttgaacacctttctccccc

SEQ ID NO: 100 - RNA, 23 nt, synthetic construct
  source 1..23: mol_type = other RNA; note = Description of Artificial Sequence: Synthetic oligonucleotide
  modified_base 1: mod_base = OTHER; note = 2'-O-methyluridine-3'-phosphorothioate
  modified_base 2: mod_base = OTHER; note = 2'-fluorocytidine-3'-phosphorothioate
  modified_base 3: mod_base = OTHER; note = 2'-O-methyluridine-3'-phosphate
  modified_base 4: mod_base = OTHER; note = 2'-fluoroadenosine-3'-phosphate
  modified_base 5: mod_base = OTHER; note = 2'-O-methylguanosine-3'-phosphate
  modified_base 6: mod_base = OTHER; note = 2'-fluoroguanosine-3'-phosphate
  modified_base 7: mod_base = OTHER; note = 2'-O-methyladenosine-3'-phosphate
  modified_base 8: mod_base = OTHER; note = 2'-fluorocytidine-3'-phosphate
  modified_base 9: mod_base = OTHER; note = 2'-O-methyladenosine-3'-phosphate
  modified_base 10: mod_base = OTHER; note = 2'-fluorocytidine-3'-phosphate
  modified_base 11: mod_base = OTHER; note = 2'-O-methylcytidine-3'-phosphate
  modified_base 12: mod_base = OTHER; note = 2'-O-methylcytidine-3'-phosphate
  modified_base 13: mod_base = OTHER; note = 2'-O-methyladenosine-3'-phosphate
  modified_base 14: mod_base = OTHER; note = 2'-fluorouridine-3'-phosphate
  modified_base 15: mod_base = OTHER; note = 2'-O-methyluridine-3'-phosphate
  modified_base 16: mod_base = OTHER; note = 2'-fluoroguanosine-3'-phosphate
  modified_base 17: mod_base = OTHER; note = 2'-O-methyladenosine-3'-phosphate
  modified_base 18: mod_base = OTHER; note = 2'-fluoroadenosine-3'-phosphate
  modified_base 19: mod_base = OTHER; note = 2'-O-methyladenosine-3'-phosphate
  modified_base 20: mod_base = OTHER; note = 2'-fluoroadenosine-3'-phosphate
  modified_base 21: mod_base = OTHER; note = 2'-O-methylguanosine-3'-phosphorothioate
  modified_base 22: mod_base = OTHER; note = 2'-O-methyluridine-3'-phosphorothioate
  modified_base 23: mod_base = OTHER; note = 2'-O-methylcytidine-3'-phosphate
tctaggacacccattgaaaagtc

SEQ ID NO: 101 - RNA, 23 nt, synthetic construct
  source 1..23: mol_type = other RNA; note = Description of Artificial Sequence: Synthetic oligonucleotide
  modified_base 1: mod_base = OTHER; note = 2'-O-methyluridine-3'-phosphorothioate
  modified_base 2: mod_base = OTHER; note = 2'-fluoroguanosine-3'-phosphorothioate
  modified_base 3: mod_base = OTHER; note = 2'-O-methyluridine-3'-phosphate
  modified_base 4: mod_base = OTHER; note = 2'-fluorouridine-3'-phosphate
  modified_base 5: mod_base = OTHER; note = 2'-O-methylcytidine-3'-phosphate
  modified_base 6: mod_base = OTHER; note = 2'-fluorocytidine-3'-phosphate
  modified_base 7: mod_base = OTHER; note = 2'-O-methyluridine-3'-phosphate
  modified_base 8: mod_base = OTHER; note = 2'-fluoroadenosine-3'-phosphate
  modified_base 9: mod_base = OTHER; note = 2'-O-methylguanosine-3'-phosphate
  modified_base 10: mod_base = OTHER; note = 2'-fluoroguanosine-3'-phosphate
  modified_base 11: mod_base = OTHER; note = 2'-O-methyladenosine-3'-phosphate
  modified_base 12: mod_base = OTHER; note = 2'-O-methylcytidine-3'-phosphate
  modified_base 13: mod_base = OTHER; note = 2'-O-methyladenosine-3'-phosphate
  modified_base 14: mod_base = OTHER; note = 2'-fluorocytidine-3'-phosphate
  modified_base 15: mod_base = OTHER; note = 2'-O-methylcytidine-3'-phosphate
  modified_base 16: mod_base = OTHER; note = 2'-fluorocytidine-3'-phosphate
  modified_base 17: mod_base = OTHER; note = 2'-O-methyladenosine-3'-phosphate
  modified_base 18: mod_base = OTHER; note = 2'-fluorouridine-3'-phosphate
  modified_base 19: mod_base = OTHER; note = 2'-O-methyluridine-3'-phosphate
  modified_base 20: mod_base = OTHER; note = 2'-fluoroguanosine-3'-phosphate
  modified_base 21: mod_base = OTHER; note = 2'-O-methyladenosine-3'-phosphorothioate
  modified_base 22: mod_base = OTHER; note = 2'-O-methyladenosine-3'-phosphorothioate
  modified_base 23: mod_base = OTHER; note = 2'-O-methyladenosine-3'-phosphate
tgttcctaggacacccattgaaa

SEQ ID NO: 102 - RNA, 23 nt, synthetic construct
  source 1..23: mol_type = other RNA; note = Description of Artificial Sequence: Synthetic oligonucleotide
  modified_base 1: mod_base = OTHER; note = 2'-O-methyluridine-3'-phosphorothioate
  modified_base 2: mod_base = OTHER; note = 2'-fluoroguanosine-3'-phosphorothioate
  modified_base 3: mod_base = OTHER; note = 2'-O-methyladenosine-3'-phosphate
  modified_base 4: mod_base = OTHER; note = 2'-fluorocytidine-3'-phosphate
  modified_base 5: mod_base = OTHER; note = 2'-O-methyladenosine-3'-phosphate
  modified_base 6: mod_base = OTHER; note = 2'-fluorocytidine-3'-phosphate
  modified_base 7: mod_base = OTHER; note = 2'-O-methylcytidine-3'-phosphate
  modified_base 8: mod_base = OTHER; note = 2'-fluorocytidine-3'-phosphate
  modified_base 9: mod_base = OTHER; note = 2'-O-methyladenosine-3'-phosphate
  modified_base 10: mod_base = OTHER; note = 2'-fluorouridine-3'-phosphate
  modified_base 11: mod_base = OTHER; note = 2'-O-methyluridine-3'-phosphate
  modified_base 12: mod_base = OTHER; note = 2'-O-methylguanosine-3'-phosphate
  modified_base 13: mod_base = OTHER; note = 2'-O-methyladenosine-3'-phosphate
  modified_base 14: mod_base = OTHER; note = 2'-fluoroadenosine-3'-phosphate
  modified_base 15: mod_base = OTHER; note = 2'-O-methyladenosine-3'-phosphate
  modified_base 16: mod_base = OTHER; note = 2'-fluoroadenosine-3'-phosphate
  modified_base 17: mod_base = OTHER; note = 2'-O-methylguanosine-3'-phosphate
  modified_base 18: mod_base = OTHER; note = 2'-fluorouridine-3'-phosphate
  modified_base 19: mod_base = OTHER; note = 2'-O-methylcytidine-3'-phosphate
  modified_base 20: mod_base = OTHER; note = 2'-fluoroadenosine-3'-phosphate
  modified_base 21: mod_base = OTHER; note = 2'-O-methyladenosine-3'-phosphorothioate
  modified_base 22: mod_base = OTHER; note = 2'-O-methyladenosine-3'-phosphorothioate
  modified_base 23: mod_base = OTHER; note = 2'-O-methyladenosine-3'-phosphate
tgacacccattgaaaagtcaaaa

SEQ ID NO: 103 - RNA, 23 nt, synthetic construct
  source 1..23: mol_type = other RNA; note = Description of Artificial Sequence: Synthetic oligonucleotide
  modified_base 1: mod_base = OTHER; note = 2'-O-methyluridine-3'-phosphorothioate
  modified_base 2: mod_base = OTHER; note = 2'-fluoroadenosine-3'-phosphorothioate
  modified_base 3: mod_base = OTHER; note = 2'-O-methyladenosine-3'-phosphate
  modified_base 4: mod_base = OTHER; note = 2'-fluorouridine-3'-phosphate
  modified_base 5: mod_base = OTHER; note = 2'-O-methylguanosine-3'-phosphate
  modified_base 6: mod_base = OTHER; note = 2'-fluorouridine-3'-phosphate
  modified_base 7: mod_base = OTHER; note = 2'-O-methylcytidine-3'-phosphate
  modified_base 8: mod_base = OTHER; note = 2'-fluorouridine-3'-phosphate
  modified_base 9: mod_base = OTHER; note = 2'-O-methyluridine-3'-phosphate
  modified_base 10: mod_base = OTHER; note = 2'-fluoroguanosine-3'-phosphate
  modified_base 11: mod_base = OTHER; note = 2'-O-methyluridine-3'-phosphate
  modified_base 12: mod_base = OTHER; note = 2'-O-methylcytidine-3'-phosphate
  modified_base 13: mod_base = OTHER; note = 2'-O-methylguanosine-3'-phosphate
  modified_base 14: mod_base = OTHER; note = 2'-fluoroadenosine-3'-phosphate
  modified_base 15: mod_base = OTHER; note = 2'-O-methyluridine-3'-phosphate
  modified_base 16: mod_base = OTHER; note = 2'-fluoroguanosine-3'-phosphate
  modified_base 17: mod_base = OTHER; note = 2'-O-methyladenosine-3'-phosphate
  modified_base 18: mod_base = OTHER; note = 2'-fluorocytidine-3'-phosphate
  modified_base 19: mod_base = OTHER; note = 2'-O-methyluridine-3'-phosphate
  modified_base 20: mod_base = OTHER; note = 2'-fluorouridine-3'-phosphate
  modified_base 21: mod_base = OTHER; note = 2'-O-methyluridine-3'-phosphorothioate
  modified_base 22: mod_base = OTHER; note = 2'-O-methylcytidine-3'-phosphorothioate
  modified_base 23: mod_base = OTHER; note = 2'-O-methyladenosine-3'-phosphate
taatgtcttgtcgatgactttca

SEQ ID NO: 104 - RNA, 23 nt, synthetic construct
  source 1..23: mol_type = other RNA; note = Description of Artificial Sequence: Synthetic oligonucleotide
  modified_base 1: mod_base = OTHER; note = 2'-O-methyluridine-3'-phosphorothioate
  modified_base 2: mod_base = OTHER; note = 2'-fluorouridine -3'-phosphorothioate
  modified_base 3: mod_base = OTHER; note = 2'-O-methylguanosine-3'-phosphate
  modified_base 4: mod_base = OTHER; note = 2'-fluoroadenosine-3'-phosphate
  modified_base 5: mod_base = OTHER; note = 2'-O-methyladenosine-3'-phosphate
  modified_base 6: mod_base = OTHER; note = 2'-fluorocytidine-3'-phosphate
  modified_base 7: mod_base = OTHER; note = 2'-O-methyladenosine-3'-phosphate
  modified_base 8: mod_base = OTHER; note = 2'-fluorocytidine-3'-phosphate
  modified_base 9: mod_base = OTHER; note = 2'-O-methylcytidine-3'-phosphate
  modified_base 10: mod_base = OTHER; note = 2'-fluorouridine-3'-phosphate
  modified_base 11: mod_base = OTHER; note = 2'-O-methyluridine-3'-phosphate
  modified_base 12: mod_base = OTHER; note = 2'-O-methyluridine-3'-phosphate
  modified_base 13: mod_base = OTHER; note = 2'-O-methylcytidine-3'-phosphate
  modified_base 14: mod_base = OTHER; note = 2'-fluorouridine-3'-phosphate
  modified_base 15: mod_base = OTHER; note = 2'-O-methylcytidine-3'-phosphate
  modified_base 16: mod_base = OTHER; note = 2'-fluorocytidine-3'-phosphate
  modified_base 17: mod_base = OTHER; note = 2'-O-methylcytidine-3'-phosphate
  modified_base 18: mod_base = OTHER; note = 2'-fluorocytidine-3'-phosphate
  modified_base 19: mod_base = OTHER; note = 2'-O-methylcytidine-3'-phosphate
  modified_base 20: mod_base = OTHER; note = 2'-fluorouridine-3'-phosphate
  modified_base 21: mod_base = OTHER; note = 2'-O-methylguanosine-3'-phosphorothioate
  modified_base 22: mod_base = OTHER; note = 2'-O-methylguanosine-3'-phosphorothioate
  modified_base 23: mod_base = OTHER; note = 2'-O-methyladenosine-3'-phosphate
ttgaacacctttctccccctgga

SEQ ID NO: 105 - RNA, 23 nt, synthetic construct
  source 1..23: mol_type = other RNA; note = Description of Artificial Sequence: Synthetic oligonucleotide
  modified_base 1: mod_base = OTHER; note = 2'-O-methyladenosine-3'-phosphorothioate
  modified_base 2: mod_base = OTHER; note = 2'-fluoroadenosine-3'-phosphorothioate
  modified_base 3: mod_base = OTHER; note = 2'-O-methylguanosine-3'-phosphate
  modified_base 4: mod_base = OTHER; note = 2'-fluoroguanosine-3'-phosphate
  modified_base 5: mod_base = OTHER; note = 2'-O-methyladenosine-3'-phosphate
  modified_base 6: mod_base = OTHER; note = 2'-fluorouridine-3'-phosphate
  modified_base 7: mod_base = OTHER; note = 2'-O-methyluridine-3'-phosphate
  modified_base 8: mod_base = OTHER; note = 2'-fluorouridine-3'-phosphate
  modified_base 9: mod_base = OTHER; note = 2'-O-methyluridine-3'-phosphate
  modified_base 10: mod_base = OTHER; note = 2'-fluorouridine-3'-phosphate
  modified_base 11: mod_base = OTHER; note = 2'-O-methylcytidine-3'-phosphate
  modified_base 12: mod_base = OTHER; note = 2'-O-methylcytidine-3'-phosphate
  modified_base 13: mod_base = OTHER; note = 2'-O-methyluridine-3'-phosphate
  modified_base 14: mod_base = OTHER; note = 2'-fluorocytidine-3'-phosphate
  modified_base 15: mod_base = OTHER; note = 2'-O-methyladenosine-3'-phosphate
  modified_base 16: mod_base = OTHER; note = 2'-fluorocytidine-3'-phosphate
  modified_base 17: mod_base = OTHER; note = 2'-O-methylcytidine-3'-phosphate
  modified_base 18: mod_base = OTHER; note = 2'-fluoroadenosine-3'-phosphate
  modified_base 19: mod_base = OTHER; note = 2'-O-methyladenosine-3'-phosphate
  modified_base 20: mod_base = OTHER; note = 2'-fluorouridine-3'-phosphate
  modified_base 21: mod_base = OTHER; note = 2'-O-methylguanosine-3'-phosphorothioate
  modified_base 22: mod_base = OTHER; note = 2'-O-methyluridine-3'-phosphorothioate
  modified_base 23: mod_base = OTHER; note = 2'-O-methylcytidine-3'-phosphate
aaggatttttcctcaccaatgtc

SEQ ID NO: 106 - RNA, 23 nt, synthetic construct
  source 1..23: mol_type = other RNA; note = Description of Artificial Sequence: Synthetic oligonucleotide
  modified_base 1: mod_base = OTHER; note = 2'-O-methyladenosine-3'-phosphorothioate
  modified_base 2: mod_base = OTHER; note = 2'-fluoroguanosine-3'-phosphorothioate
  modified_base 3: mod_base = OTHER; note = 2'-O-methylguanosine-3'-phosphate
  modified_base 4: mod_base = OTHER; note = 2'-fluoroadenosine-3'-phosphate
  modified_base 5: mod_base = OTHER; note = 2'-O-methyluridine-3'-phosphate
  modified_base 6: mod_base = OTHER; note = 2'-fluorouridine-3'-phosphate
  modified_base 7: mod_base = OTHER; note = 2'-O-methyluridine-3'-phosphate
  modified_base 8: mod_base = OTHER; note = 2'-fluorouridine-3'-phosphate
  modified_base 9: mod_base = OTHER; note = 2'-O-methyluridine-3'-phosphate
  modified_base 10: mod_base = OTHER; note = 2'-fluorocytidine-3'-phosphate
  modified_base 11: mod_base = OTHER; note = 2'-O-methylcytidine-3'-phosphate
  modified_base 12: mod_base = OTHER; note = 2'-O-methyluridine-3'-phosphate
  modified_base 13: mod_base = OTHER; note = 2'-O-methylcytidine-3'-phosphate
  modified_base 14: mod_base = OTHER; note = 2'-fluoroadenosine-3'-phosphate
  modified_base 15: mod_base = OTHER; note = 2'-O-methylcytidine-3'-phosphate
  modified_base 16: mod_base = OTHER; note = 2'-fluorocytidine-3'-phosphate
  modified_base 17: mod_base = OTHER; note = 2'-O-methyladenosine-3'-phosphate
  modified_base 18: mod_base = OTHER; note = 2'-fluoroadenosine-3'-phosphate
  modified_base 19: mod_base = OTHER; note = 2'-O-methyluridine-3'-phosphate
  modified_base 20: mod_base = OTHER; note = 2'-fluoroguanosine-3'-phosphate
  modified_base 21: mod_base = OTHER; note = 2'-O-methyluridine-3'-phosphorothioate
  modified_base 22: mod_base = OTHER; note = 2'-O-methylcytidine-3'-phosphorothioate
  modified_base 23: mod_base = OTHER; note = 2'-O-methyluridine-3'-phosphate
aggatttttcctcaccaatgtct

SEQ ID NO: 107 - RNA, 23 nt, synthetic construct
  source 1..23: mol_type = other RNA; note = Description of Artificial Sequence: Synthetic oligonucleotide
  modified_base 1: mod_base = OTHER; note = 2'-O-methyluridine-3'-phosphorothioate
  modified_base 2: mod_base = OTHER; note = 2'-fluorouridine -3'-phosphorothioate
  modified_base 3: mod_base = OTHER; note = 2'-O-methyluridine-3'-phosphate
  modified_base 4: mod_base = OTHER; note = 2'-fluoroguanosine-3'-phosphate
  modified_base 5: mod_base = OTHER; note = 2'-O-methyladenosine-3'-phosphate
  modified_base 6: mod_base = OTHER; note = 2'-fluoroadenosine-3'-phosphate
  modified_base 7: mod_base = OTHER; note = 2'-O-methylcytidine-3'-phosphate
  modified_base 8: mod_base = OTHER; note = 2'-fluoroadenosine-3'-phosphate
  modified_base 9: mod_base = OTHER; note = 2'-O-methylcytidine-3'-phosphate
  modified_base 10: mod_base = OTHER; note = 2'-fluorocytidine-3'-phosphate
  modified_base 11: mod_base = OTHER; note = 2'-O-methyluridine-3'-phosphate
  modified_base 12: mod_base = OTHER; note = 2'-O-methyluridine-3'-phosphate
  modified_base 13: mod_base = OTHER; note = 2'-O-methyluridine-3'-phosphate
  modified_base 14: mod_base = OTHER; note = 2'-fluorocytidine-3'-phosphate
  modified_base 15: mod_base = OTHER; note = 2'-O-methyluridine-3'-phosphate
  modified_base 16: mod_base = OTHER; note = 2'-fluorocytidine-3'-phosphate
  modified_base 17: mod_base = OTHER; note = 2'-O-methylcytidine-3'-phosphate
  modified_base 18: mod_base = OTHER; note = 2'-fluorocytidine-3'-phosphate
  modified_base 19: mod_base = OTHER; note = 2'-O-methylcytidine-3'-phosphate
  modified_base 20: mod_base = OTHER; note = 2'-fluorocytidine-3'-phosphate
  modified_base 21: mod_base = OTHER; note = 2'-O-methyluridine-3'-phosphorothioate
  modified_base 22: mod_base = OTHER; note = 2'-O-methylguanosine-3'-phosphorothioate
  modified_base 23: mod_base = OTHER; note = 2'-O-methylguanosine-3'-phosphate
tttgaacacctttctccccctgg

SEQ ID NO: 108 - RNA, 23 nt, synthetic construct
  source 1..23: mol_type = other RNA; note = Description of Artificial Sequence: Synthetic oligonucleotide
  modified_base 1: mod_base = OTHER; note = 2'-O-methyladenosine-3'-phosphorothioate
  modified_base 2: mod_base = OTHER; note = 2'-fluoroadenosine-3'-phosphorothioate
  modified_base 3: mod_base = OTHER; note = 2'-O-methyladenosine-3'-phosphate
  modified_base 4: mod_base = OTHER; note = 2'-fluoroadenosine-3'-phosphate
  modified_base 5: mod_base = OTHER; note = 2'-O-methyluridine-3'-phosphate
  modified_base 6: mod_base = OTHER; note = 2'-fluorocytidine-3'-phosphate
  modified_base 7: mod_base = OTHER; note = 2'-O-methyladenosine-3'-phosphate
  modified_base 8: mod_base = OTHER; note = 2'-fluorocytidine-3'-phosphate
  modified_base 9: mod_base = OTHER; note = 2'-O-methyladenosine-3'-phosphate
  modified_base 10: mod_base = OTHER; note = 2'-fluoroadenosine-3'-phosphate
  modified_base 11: mod_base = OTHER; note = 2'-O-methyladenosine-3'-phosphate
  modified_base 12: mod_base = OTHER; note = 2'-O-methyluridine-3'-phosphate
  modified_base 13: mod_base = OTHER; note = 2'-O-methyluridine-3'-phosphate
  modified_base 14: mod_base = OTHER; note = 2'-fluoroadenosine-3'-phosphate
  modified_base 15: mod_base = OTHER; note = 2'-O-methylcytidine-3'-phosphate
  modified_base 16: mod_base = OTHER; note = 2'-fluorocytidine-3'-phosphate
  modified_base 17: mod_base = OTHER; note = 2'-O-methyladenosine-3'-phosphate
  modified_base 18: mod_base = OTHER; note = 2'-fluorocytidine-3'-phosphate
  modified_base 19: mod_base = OTHER; note = 2'-O-methylcytidine-3'-phosphate
  modified_base 20: mod_base = OTHER; note = 2'-fluoroadenosine-3'-phosphate
  modified_base 21: mod_base = OTHER; note = 2'-O-methyluridine-3'-phosphorothioate
  modified_base 22: mod_base = OTHER; note = 2'-O-methylcytidine-3'-phosphorothioate
  modified_base 23: mod_base = OTHER; note = 2'-O-methylcytidine-3'-phosphate
aaaatcacaaattaccaccatcc

SEQ ID NO: 109 - RNA, 23 nt, synthetic construct
  source 1..23: mol_type = other RNA; note = Description of Artificial Sequence: Synthetic oligonucleotide
  modified_base 1: mod_base = OTHER; note = 2'-O-methyluridine-3'-phosphorothioate
  modified_base 2: mod_base = OTHER; note = 2'-fluoroadenosine-3'-phosphorothioate
  modified_base 3: mod_base = OTHER; note = 2'-O-methyluridine-3'-phosphate
  modified_base 4: mod_base = OTHER; note = 2'-fluoroadenosine-3'-phosphate
  modified_base 5: mod_base = OTHER; note = 2'-O-methyluridine-3'-phosphate
  modified_base 6: mod_base = OTHER; note = 2'-fluorouridine-3'-phosphate
  modified_base 7: mod_base = OTHER; note = 2'-O-methyluridine-3'-phosphate
  modified_base 8: mod_base = OTHER; note = 2'-fluorocytidine-3'-phosphate
  modified_base 9: mod_base = OTHER; note = 2'-O-methylcytidine-3'-phosphate
  modified_base 10: mod_base = OTHER; note = 2'-fluoroadenosine-3'-phosphate
  modified_base 11: mod_base = OTHER; note = 2'-O-methylguanosine-3'-phosphate
  modified_base 12: mod_base = OTHER; note = 2'-O-methylguanosine-3'-phosphate
  modified_base 13: mod_base = OTHER; note = 2'-O-methyladenosine-3'-phosphate
  modified_base 14: mod_base = OTHER; note = 2'-fluorouridine-3'-phosphate
  modified_base 15: mod_base = OTHER; note = 2'-O-methylguanosine-3'-phosphate
  modified_base 16: mod_base = OTHER; note = 2'-fluorocytidine-3'-phosphate
  modified_base 17: mod_base = OTHER; note = 2'-O-methyladenosine-3'-phosphate
  modified_base 18: mod_base = OTHER; note = 2'-fluoroadenosine-3'-phosphate
  modified_base 19: mod_base = OTHER; note = 2'-O-methylguanosine-3'-phosphate
  modified_base 20: mod_base = OTHER; note = 2'-fluorouridine-3'-phosphate
  modified_base 21: mod_base = OTHER; note = 2'-O-methylcytidine-3'-phosphorothioate
  modified_base 22: mod_base = OTHER; note = 2'-O-methylcytidine-3'-phosphorothioate
  modified_base 23: mod_base = OTHER; note = 2'-O-methyladenosine-3'-phosphate
tatatttccaggatgcaagtcca

SEQ ID NO: 110 - RNA, 23 nt, synthetic construct
  source 1..23: mol_type = other RNA; note = Description of Artificial Sequence: Synthetic oligonucleotide
  modified_base 1: mod_base = OTHER; note = 2'-O-methyladenosine-3'-phosphorothioate
  modified_base 2: mod_base = OTHER; note = 2'-fluoroadenosine-3'-phosphorothioate
  modified_base 3: mod_base = OTHER; note = 2'-O-methylguanosine-3'-phosphate
  modified_base 4: mod_base = OTHER; note = 2'-fluoroadenosine-3'-phosphate
  modified_base 5: mod_base = OTHER; note = 2'-O-methylcytidine-3'-phosphate
  modified_base 6: mod_base = OTHER; note = 2'-fluorouridine-3'-phosphate
  modified_base 7: mod_base = OTHER; note = 2'-O-methyluridine-3'-phosphate
  modified_base 8: mod_base = OTHER; note = 2'-fluorocytidine-3'-phosphate
  modified_base 9: mod_base = OTHER; note = 2'-O-methyluridine-3'-phosphate
  modified_base 10: mod_base = OTHER; note = 2'-fluoroadenosine-3'-phosphate
  modified_base 11: mod_base = OTHER; note = 2'-O-methylcytidine-3'-phosphate
  modified_base 12: mod_base = OTHER; note = 2'-O-methylcytidine-3'-phosphate
  modified_base 13: mod_base = OTHER; note = 2'-O-methyluridine-3'-phosphate
  modified_base 14: mod_base = OTHER; note = 2'-fluorouridine-3'-phosphate
  modified_base 15: mod_base = OTHER; note = 2'-O-methylcytidine-3'-phosphate
  modified_base 16: mod_base = OTHER; note = 2'-fluorocytidine-3'-phosphate
  modified_base 17: mod_base = OTHER; note = 2'-O-methylcytidine-3'-phosphate
  modified_base 18: mod_base = OTHER; note = 2'-fluorouridine-3'-phosphate
  modified_base 19: mod_base = OTHER; note = 2'-O-methyluridine-3'-phosphate
  modified_base 20: mod_base = OTHER; note = 2'-fluorocytidine-3'-phosphate
  modified_base 21: mod_base = OTHER; note = 2'-O-methylcytidine-3'-phosphorothioate
  modified_base 22: mod_base = OTHER; note = 2'-O-methyladenosine-3'-phosphorothioate
  modified_base 23: mod_base = OTHER; note = 2'-O-methylcytidine-3'-phosphate
aagacttctaccttcccttccac

SEQ ID NO: 111 - RNA, 23 nt, synthetic construct
  source 1..23: mol_type = other RNA; note = Description of Artificial Sequence: Synthetic oligonucleotide
  modified_base 1: mod_base = OTHER; note = 2'-O-methyladenosine-3'-phosphorothioate
  modified_base 2: mod_base = OTHER; note = 2'-fluoroguanosine-3'-phosphorothioate
  modified_base 3: mod_base = OTHER; note = 2'-O-methylguanosine-3'-phosphate
  modified_base 4: mod_base = OTHER; note = 2'-fluoroadenosine-3'-phosphate
  modified_base 5: mod_base = OTHER; note = 2'-O-methyladenosine-3'-phosphate
  modified_base 6: mod_base = OTHER; note = 2'-fluoroadenosine-3'-phosphate
  modified_base 7: mod_base = OTHER; note = 2'-O-methyluridine-3'-phosphate
  modified_base 8: mod_base = OTHER; note = 2'-fluorocytidine-3'-phosphate
  modified_base 9: mod_base = OTHER; note = 2'-O-methyluridine-3'-phosphate
  modified_base 10: mod_base = OTHER; note = 2'-fluoroadenosine-3'-phosphate
  modified_base 11: mod_base = OTHER; note = 2'-O-methyladenosine-3'-phosphate
  modified_base 12: mod_base = OTHER; note = 2'-O-methyladenosine-3'-phosphate
  modified_base 13: mod_base = OTHER; note = 2'-O-methylcytidine-3'-phosphate
  modified_base 14: mod_base = OTHER; note = 2'-fluoroadenosine-3'-phosphate
  modified_base 15: mod_base = OTHER; note = 2'-O-methylguanosine-3'-phosphate
  modified_base 16: mod_base = OTHER; note = 2'-fluoroadenosine-3'-phosphate
  modified_base 17: mod_base = OTHER; note = 2'-O-methyladenosine-3'-phosphate
  modified_base 18: mod_base = OTHER; note = 2'-fluoroguanosine-3'-phosphate
  modified_base 19: mod_base = OTHER; note = 2'-O-methyladenosine-3'-phosphate
  modified_base 20: mod_base = OTHER; note = 2'-fluorocytidine-3'-phosphate
  modified_base 21: mod_base = OTHER; note = 2'-O-methyladenosine-3'-phosphorothioate
  modified_base 22: mod_base = OTHER; note = 2'-O-methylguanosine-3'-phosphorothioate
  modified_base 23: mod_base = OTHER; note = 2'-O-methylguanosine-3'-phosphate
aggaaatctaaacagaagacagg

SEQ ID NO: 112 - RNA, 23 nt, synthetic construct
  source 1..23: mol_type = other RNA; note = Description of Artificial Sequence: Synthetic oligonucleotide
  modified_base 1: mod_base = OTHER; note = 2'-O-methyladenosine-3'-phosphorothioate
  modified_base 2: mod_base = OTHER; note = 2'-fluoroguanosine-3'-phosphorothioate
  modified_base 3: mod_base = OTHER; note = 2'-O-methyladenosine-3'-phosphate
  modified_base 4: mod_base = OTHER; note = 2'-fluorouridine-3'-phosphate
  modified_base 5: mod_base = OTHER; note = 2'-O-methylcytidine-3'-phosphate
  modified_base 6: mod_base = OTHER; note = 2'-fluorouridine-3'-phosphate
  modified_base 7: mod_base = OTHER; note = 2'-O-methyluridine-3'-phosphate
  modified_base 8: mod_base = OTHER; note = 2'-fluoroguanosine-3'-phosphate
  modified_base 9: mod_base = OTHER; note = 2'-O-methylguanosine-3'-phosphate
  modified_base 10: mod_base = OTHER; note = 2'-fluoroadenosine-3'-phosphate
  modified_base 11: mod_base = OTHER; note = 2'-O-methyladenosine-3'-phosphate
  modified_base 12: mod_base = OTHER; note = 2'-O-methyladenosine-3'-phosphate
  modified_base 13: mod_base = OTHER; note = 2'-O-methylcytidine-3'-phosphate
  modified_base 14: mod_base = OTHER; note = 2'-fluoroadenosine-3'-phosphate
  modified_base 15: mod_base = OTHER; note = 2'-O-methylguanosine-3'-phosphate
  modified_base 16: mod_base = OTHER; note = 2'-fluorocytidine-3'-phosphate
  modified_base 17: mod_base = OTHER; note = 2'-O-methylcytidine-3'-phosphate
  modified_base 18: mod_base = OTHER; note = 2'-fluoroadenosine-3'-phosphate
  modified_base 19: mod_base = OTHER; note = 2'-O-methyladenosine-3'-phosphate
  modified_base 20: mod_base = OTHER; note = 2'-fluoroadenosine-3'-phosphate
  modified_base 21: mod_base = OTHER; note = 2'-O-methylguanosine-3'-phosphorothioate
  modified_base 22: mod_base = OTHER; note = 2'-O-methylguanosine-3'-phosphorothioate
  modified_base 23: mod_base = OTHER; note = 2'-O-methyladenosine-3'-phosphate
agatcttggaaacagccaaagga

SEQ ID NO: 113 - RNA, 23 nt, synthetic construct
  source 1..23: mol_type = other RNA; note = Description of Artificial Sequence: Synthetic oligonucleotide
  modified_base 1: mod_base = OTHER; note = 2'-O-methyladenosine-3'-phosphorothioate
  modified_base 2: mod_base = OTHER; note = 2'-fluorouridine -3'-phosphorothioate
  modified_base 3: mod_base = OTHER; note = 2'-O-methylguanosine-3'-phosphate
  modified_base 4: mod_base = OTHER; note = 2'-fluoroadenosine-3'-phosphate
  modified_base 5: mod_base = OTHER; note = 2'-O-methylcytidine-3'-phosphate
  modified_base 6: mod_base = OTHER; note = 2'-fluoroguanosine-3'-phosphate
  modified_base 7: mod_base = OTHER; note = 2'-O-methyluridine-3'-phosphate
  modified_base 8: mod_base = OTHER; note = 2'-fluorouridine-3'-phosphate
  modified_base 9: mod_base = OTHER; note = 2'-O-methylguanosine-3'-phosphate
  modified_base 10: mod_base = OTHER; note = 2'-fluorocytidine-3'-phosphate
  modified_base 11: mod_base = OTHER; note = 2'-O-methylcytidine-3'-phosphate
  modified_base 12: mod_base = OTHER; note = 2'-O-methylcytidine-3'-phosphate
  modified_base 13: mod_base = OTHER; note = 2'-O-methyladenosine-3'-phosphate
  modified_base 14: mod_base = OTHER; note = 2'-fluoroadenosine-3'-phosphate
  modified_base 15: mod_base = OTHER; note = 2'-O-methyladenosine-3'-phosphate
  modified_base 16: mod_base = OTHER; note = 2'-fluorocytidine-3'-phosphate
  modified_base 17: mod_base = OTHER; note = 2'-O-methyladenosine-3'-phosphate
  modified_base 18: mod_base = OTHER; note = 2'-fluorocytidine-3'-phosphate
  modified_base 19: mod_base = OTHER; note = 2'-O-methyladenosine-3'-phosphate
  modified_base 20: mod_base = OTHER; note = 2'-fluorouridine-3'-phosphate
  modified_base 21: mod_base = OTHER; note = 2'-O-methyluridine-3'-phosphorothioate
  modified_base 22: mod_base = OTHER; note = 2'-O-methyluridine-3'-phosphorothioate
  modified_base 23: mod_base = OTHER; note = 2'-O-methyluridine-3'-phosphate
atgacgttgcccaaacacatttt

SEQ ID NO: 114 - RNA, 23 nt, synthetic construct
  source 1..23: mol_type = other RNA; note = Description of Artificial Sequence: Synthetic oligonucleotide
  modified_base 1: mod_base = OTHER; note = 2'-O-methyluridine-3'-phosphorothioate
  modified_base 2: mod_base = OTHER; note = 2'-fluoroadenosine-3'-phosphorothioate
  modified_base 3: mod_base = OTHER; note = 2'-O-methyladenosine-3'-phosphate
  modified_base 4: mod_base = OTHER; note = 2'-fluoroguanosine-3'-phosphate
  modified_base 5: mod_base = OTHER; note = 2'-O-methylguanosine-3'-phosphate
  modified_base 6: mod_base = OTHER; note = 2'-fluoroguanosine-3'-phosphate
  modified_base 7: mod_base = OTHER; note = 2'-O-methylguanosine-3'-phosphate
  modified_base 8: mod_base = OTHER; note = 2'-fluorouridine-3'-phosphate
  modified_base 9: mod_base = OTHER; note = 2'-O-methylguanosine-3'-phosphate
  modified_base 10: mod_base = OTHER; note = 2'-fluorouridine-3'-phosphate
  modified_base 11: mod_base = OTHER; note = 2'-O-methylcytidine-3'-phosphate
  modified_base 12: mod_base = OTHER; note = 2'-O-methylcytidine-3'-phosphate
  modified_base 13: mod_base = OTHER; note = 2'-O-methyladenosine-3'-phosphate
  modified_base 14: mod_base = OTHER; note = 2'-fluorocytidine-3'-phosphate
  modified_base 15: mod_base = OTHER; note = 2'-O-methyladenosine-3'-phosphate
  modified_base 16: mod_base = OTHER; note = 2'-fluoroguanosine-3'-phosphate
  modified_base 17: mod_base = OTHER; note = 2'-O-methyluridine-3'-phosphate
  modified_base 18: mod_base = OTHER; note = 2'-fluorocytidine-3'-phosphate
  modified_base 19: mod_base = OTHER; note = 2'-O-methyladenosine-3'-phosphate
  modified_base 20: mod_base = OTHER; note = 2'-fluorocytidine-3'-phosphate
  modified_base 21: mod_base = OTHER; note = 2'-O-methyladenosine-3'-phosphorothioate
  modified_base 22: mod_base = OTHER; note = 2'-O-methyladenosine-3'-phosphorothioate
  modified_base 23: mod_base = OTHER; note = 2'-O-methyladenosine-3'-phosphate
taaggggtgtccacagtcacaaa

SEQ ID NO: 115 - RNA, 23 nt, synthetic construct
  source 1..23: mol_type = other RNA; note = Description of Artificial Sequence: Synthetic oligonucleotide
  modified_base 1: mod_base = OTHER; note = 2'-O-methyladenosine-3'-phosphorothioate
  modified_base 2: mod_base = OTHER; note = 2'-fluoroadenosine-3'-phosphorothioate
  modified_base 3: mod_base = OTHER; note = 2'-O-methyluridine-3'-phosphate
  modified_base 4: mod_base = OTHER; note = 2'-fluoroadenosine-3'-phosphate
  modified_base 5: mod_base = OTHER; note = 2'-O-methylguanosine-3'-phosphate
  modified_base 6: mod_base = OTHER; note = 2'-fluorouridine-3'-phosphate
  modified_base 7: mod_base = OTHER; note = 2'-O-methyladenosine-3'-phosphate
  modified_base 8: mod_base = OTHER; note = 2'-fluoroguanosine-3'-phosphate
  modified_base 9: mod_base = OTHER; note = 2'-O-methylcytidine-3'-phosphate
  modified_base 10: mod_base = OTHER; note = 2'-fluorouridine-3'-phosphate
  modified_base 11: mod_base = OTHER; note = 2'-O-methylguanosine-3'-phosphate
  modified_base 12: mod_base = OTHER; note = 2'-O-methylguanosine-3'-phosphate
  modified_base 13: mod_base = OTHER; note = 2'-O-methylcytidine-3'-phosphate
  modified_base 14: mod_base = OTHER; note = 2'-fluoroadenosine-3'-phosphate
  modified_base 15: mod_base = OTHER; note = 2'-O-methylcytidine-3'-phosphate
  modified_base 16: mod_base = OTHER; note = 2'-fluorocytidine-3'-phosphate
  modified_base 17: mod_base = OTHER; note = 2'-O-methylcytidine-3'-phosphate
  modified_base 18: mod_base = OTHER; note = 2'-fluorocytidine-3'-phosphate
  modified_base 19: mod_base = OTHER; note = 2'-O-methyladenosine-3'-phosphate
  modified_base 20: mod_base = OTHER; note = 2'-fluorouridine-3'-phosphate
  modified_base 21: mod_base = OTHER; note = 2'-O-methylcytidine-3'-phosphorothioate
  modified_base 22: mod_base = OTHER; note = 2'-O-methylcytidine-3'-phosphorothioate
  modified_base 23: mod_base = OTHER; note = 2'-O-methyladenosine-3'-phosphate
aatagtagctggcaccccatcca

SEQ ID NO: 116 - RNA, 23 nt, synthetic construct
  source 1..23: mol_type = other RNA; note = Description of Artificial Sequence: Synthetic oligonucleotide
  modified_base 1: mod_base = OTHER; note = 2'-O-methyladenosine-3'-phosphorothioate
  modified_base 2: mod_base = OTHER; note = 2'-fluorocytidine-3'-phosphorothioate
  modified_base 3: mod_base = OTHER; note = 2'-O-methylguanosine-3'-phosphate
  modified_base 4: mod_base = OTHER; note = 2'-fluorouridine-3'-phosphate
  modified_base 5: mod_base = OTHER; note = 2'-O-methyluridine-3'-phosphate
  modified_base 6: mod_base = OTHER; note = 2'-fluoroguanosine-3'-phosphate
  modified_base 7: mod_base = OTHER; note = 2'-O-methylcytidine-3'-phosphate
  modified_base 8: mod_base = OTHER; note = 2'-fluorocytidine-3'-phosphate
  modified_base 9: mod_base = OTHER; note = 2'-O-methylcytidine-3'-phosphate
  modified_base 10: mod_base = OTHER; note = 2'-fluoroadenosine-3'-phosphate
  modified_base 11: mod_base = OTHER; note = 2'-O-methyladenosine-3'-phosphate
  modified_base 12: mod_base = OTHER; note = 2'-O-methyladenosine-3'-phosphate
  modified_base 13: mod_base = OTHER; note = 2'-O-methylcytidine-3'-phosphate
  modified_base 14: mod_base = OTHER; note = 2'-fluoroadenosine-3'-phosphate
  modified_base 15: mod_base = OTHER; note = 2'-O-methylcytidine-3'-phosphate
  modified_base 16: mod_base = OTHER; note = 2'-fluoroadenosine-3'-phosphate
  modified_base 17: mod_base = OTHER; note = 2'-O-methyluridine-3'-phosphate
  modified_base 18: mod_base = OTHER; note = 2'-fluorouridine-3'-phosphate
  modified_base 19: mod_base = OTHER; note = 2'-O-methyluridine-3'-phosphate
  modified_base 20: mod_base = OTHER; note = 2'-fluorouridine-3'-phosphate
  modified_base 21: mod_base = OTHER; note = 2'-O-methylcytidine-3'-phosphorothioate
  modified_base 22: mod_base = OTHER; note = 2'-O-methyladenosine-3'-phosphorothioate
  modified_base 23: mod_base = OTHER; note = 2'-O-methyladenosine-3'-phosphate
acgttgcccaaacacattttcaa

SEQ ID NO: 117 - RNA, 23 nt, synthetic construct
  source 1..23: mol_type = other RNA; note = Description of Artificial Sequence: Synthetic oligonucleotide
  modified_base 1: mod_base = OTHER; note = 2'-O-methyluridine-3'-phosphorothioate
  modified_base 2: mod_base = OTHER; note = 2'-fluoroguanosine-3'-phosphorothioate
  modified_base 3: mod_base = OTHER; note = 2'-O-methyluridine-3'-phosphate
  modified_base 4: mod_base = OTHER; note = 2'-fluorocytidine-3'-phosphate
  modified_base 5: mod_base = OTHER; note = 2'-O-methyladenosine-3'-phosphate
  modified_base 6: mod_base = OTHER; note = 2'-fluoroguanosine-3'-phosphate
  modified_base 7: mod_base = OTHER; note = 2'-O-methyladenosine-3'-phosphate
  modified_base 8: mod_base = OTHER; note = 2'-fluorouridine-3'-phosphate
  modified_base 9: mod_base = OTHER; note = 2'-O-methylcytidine-3'-phosphate
  modified_base 10: mod_base = OTHER; note = 2'-fluorouridine-3'-phosphate
  modified_base 11: mod_base = OTHER; note = 2'-O-methyluridine-3'-phosphate
  modified_base 12: mod_base = OTHER; note = 2'-O-methylguanosine-3'-phosphate
  modified_base 13: mod_base = OTHER; note = 2'-O-methylguanosine-3'-phosphate
  modified_base 14: mod_base = OTHER; note = 2'-fluoroadenosine-3'-phosphate
  modified_base 15: mod_base = OTHER; note = 2'-O-methyladenosine-3'-phosphate
  modified_base 16: mod_base = OTHER; note = 2'-fluoroadenosine-3'-phosphate
  modified_base 17: mod_base = OTHER; note = 2'-O-methylcytidine-3'-phosphate
  modified_base 18: mod_base = OTHER; note = 2'-fluoroadenosine-3'-phosphate
  modified_base 19: mod_base = OTHER; note = 2'-O-methylguanosine-3'-phosphate
  modified_base 20: mod_base = OTHER; note = 2'-fluorocytidine-3'-phosphate
  modified_base 21: mod_base = OTHER; note = 2'-O-methylcytidine-3'-phosphorothioate
  modified_base 22: mod_base = OTHER; note = 2'-O-methyladenosine-3'-phosphorothioate
  modified_base 23: mod_base = OTHER; note = 2'-O-methyladenosine-3'-phosphate
tgtcagatcttggaaacagccaa

SEQ ID NO: 118 - RNA, 23 nt, synthetic construct
  source 1..23: mol_type = other RNA; note = Description of Artificial Sequence: Synthetic oligonucleotide
  modified_base 1: mod_base = OTHER; note = 2'-O-methyladenosine-3'-phosphorothioate
  modified_base 2: mod_base = OTHER; note = 2'-fluoroguanosine-3'-phosphorothioate
  modified_base 3: mod_base = OTHER; note = 2'-O-methylguanosine-3'-phosphate
  modified_base 4: mod_base = OTHER; note = 2'-fluoroguanosine-3'-phosphate
  modified_base 5: mod_base = OTHER; note = 2'-O-methylguanosine-3'-phosphate
  modified_base 6: mod_base = OTHER; note = 2'-fluorouridine-3'-phosphate
  modified_base 7: mod_base = OTHER; note = 2'-O-methylguanosine-3'-phosphate
  modified_base 8: mod_base = OTHER; note = 2'-fluoroguanosine-3'-phosphate
  modified_base 9: mod_base = OTHER; note = 2'-O-methylcytidine-3'-phosphate
  modified_base 10: mod_base = OTHER; note = 2'-fluorouridine-3'-phosphate
  modified_base 11: mod_base = OTHER; note = 2'-O-methyladenosine-3'-phosphate
  modified_base 12: mod_base = OTHER; note = 2'-O-methyluridine-3'-phosphate
  modified_base 13: mod_base = OTHER; note = 2'-O-methyluridine-3'-phosphate
  modified_base 14: mod_base = OTHER; note = 2'-fluorouridine-3'-phosphate
  modified_base 15: mod_base = OTHER; note = 2'-O-methyluridine-3'-phosphate
  modified_base 16: mod_base = OTHER; note = 2'-fluoroguanosine-3'-phosphate
  modified_base 17: mod_base = OTHER; note = 2'-O-methyluridine-3'-phosphate
  modified_base 18: mod_base = OTHER; note = 2'-fluorouridine-3'-phosphate
  modified_base 19: mod_base = OTHER; note = 2'-O-methylguanosine-3'-phosphate
  modified_base 20: mod_base = OTHER; note = 2'-fluoroguanosine-3'-phosphate
  modified_base 21: mod_base = OTHER; note = 2'-O-methyladenosine-3'-phosphorothioate
  modified_base 22: mod_base = OTHER; note = 2'-O-methyladenosine-3'-phosphorothioate
  modified_base 23: mod_base = OTHER; note = 2'-O-methyladenosine-3'-phosphate
aggggtggctattttgttggaaa

SEQ ID NO: 119 - RNA, 23 nt, synthetic construct
  source 1..23: mol_type = other RNA; note = Description of Artificial Sequence: Synthetic oligonucleotide
  modified_base 1: mod_base = OTHER; note = 2'-O-methyladenosine-3'-phosphorothioate
  modified_base 2: mod_base = OTHER; note = 2'-fluoroadenosine-3'-phosphorothioate
  modified_base 3: mod_base = OTHER; note = 2'-O-methylguanosine-3'-phosphate
  modified_base 4: mod_base = OTHER; note = 2'-fluoroguanosine-3'-phosphate
  modified_base 5: mod_base = OTHER; note = 2'-O-methyladenosine-3'-phosphate
  modified_base 6: mod_base = OTHER; note = 2'-fluoroadenosine-3'-phosphate
  modified_base 7: mod_base = OTHER; note = 2'-O-methyladenosine-3'-phosphate
  modified_base 8: mod_base = OTHER; note = 2'-fluorouridine-3'-phosphate
  modified_base 9: mod_base = OTHER; note = 2'-O-methylcytidine-3'-phosphate
  modified_base 10: mod_base = OTHER; note = 2'-fluorouridine-3'-phosphate
  modified_base 11: mod_base = OTHER; note = 2'-O-methyladenosine-3'-phosphate
  modified_base 12: mod_base = OTHER; note = 2'-O-methyladenosine-3'-phosphate
  modified_base 13: mod_base = OTHER; note = 2'-O-methyladenosine-3'-phosphate
  modified_base 14: mod_base = OTHER; note = 2'-fluorocytidine-3'-phosphate
  modified_base 15: mod_base = OTHER; note = 2'-O-methyladenosine-3'-phosphate
  modified_base 16: mod_base = OTHER; note = 2'-fluoroguanosine-3'-phosphate
  modified_base 17: mod_base = OTHER; note = 2'-O-methyladenosine-3'-phosphate
  modified_base 18: mod_base = OTHER; note = 2'-fluoroadenosine-3'-phosphate
  modified_base 19: mod_base = OTHER; note = 2'-O-methylguanosine-3'-phosphate
  modified_base 20: mod_base = OTHER; note = 2'-fluoroadenosine-3'-phosphate
  modified_base 21: mod_base = OTHER; note = 2'-O-methylcytidine-3'-phosphorothioate
  modified_base 22: mod_base = OTHER; note = 2'-O-methyladenosine-3'-phosphorothioate
  modified_base 23: mod_base = OTHER; note = 2'-O-methylguanosine-3'-phosphate
aaggaaatctaaacagaagacag

SEQ ID NO: 120 - RNA, 23 nt, synthetic construct
  source 1..23: mol_type = other RNA; note = Description of Artificial Sequence: Synthetic oligonucleotide
  modified_base 1: mod_base = OTHER; note = 2'-O-methyladenosine-3'-phosphorothioate
  modified_base 2: mod_base = OTHER; note = 2'-fluoroguanosine-3'-phosphorothioate
  modified_base 3: mod_base = OTHER; note = 2'-O-methyladenosine-3'-phosphate
  modified_base 4: mod_base = OTHER; note = 2'-fluorocytidine-3'-phosphate
  modified_base 5: mod_base = OTHER; note = 2'-O-methyluridine-3'-phosphate
  modified_base 6: mod_base = OTHER; note = 2'-fluorouridine-3'-phosphate
  modified_base 7: mod_base = OTHER; note = 2'-O-methylcytidine-3'-phosphate
  modified_base 8: mod_base = OTHER; note = 2'-fluorouridine-3'-phosphate
  modified_base 9: mod_base = OTHER; note = 2'-O-methyladenosine-3'-phosphate
  modified_base 10: mod_base = OTHER; note = 2'-fluorocytidine-3'-phosphate
  modified_base 11: mod_base = OTHER; note = 2'-O-methylcytidine-3'-phosphate
  modified_base 12: mod_base = OTHER; note = 2'-O-methyluridine-3'-phosphate
  modified_base 13: mod_base = OTHER; note = 2'-O-methyluridine-3'-phosphate
  modified_base 14: mod_base = OTHER; note = 2'-fluorocytidine-3'-phosphate
  modified_base 15: mod_base = OTHER; note = 2'-O-methylcytidine-3'-phosphate
  modified_base 16: mod_base = OTHER; note = 2'-fluorocytidine-3'-phosphate
  modified_base 17: mod_base = OTHER; note = 2'-O-methyluridine-3'-phosphate
  modified_base 18: mod_base = OTHER; note = 2'-fluorouridine-3'-phosphate
  modified_base 19: mod_base = OTHER; note = 2'-O-methylcytidine-3'-phosphate
  modified_base 20: mod_base = OTHER; note = 2'-fluorocytidine-3'-phosphate
  modified_base 21: mod_base = OTHER; note = 2'-O-methyladenosine-3'-phosphorothioate
  modified_base 22: mod_base = OTHER; note = 2'-O-methylcytidine-3'-phosphorothioate
  modified_base 23: mod_base = OTHER; note = 2'-O-methyladenosine-3'-phosphate
agacttctaccttcccttccaca

SEQ ID NO: 121 - RNA, 23 nt, synthetic construct
  source 1..23: mol_type = other RNA; note = Description of Artificial Sequence: Synthetic oligonucleotide
  modified_base 1: mod_base = OTHER; note = 2'-O-methyladenosine-3'-phosphorothioate
  modified_base 2: mod_base = OTHER; note = 2'-fluorouridine -3'-phosphorothioate
  modified_base 3: mod_base = OTHER; note = 2'-O-methylcytidine-3'-phosphate
  modified_base 4: mod_base = OTHER; note = 2'-fluorouridine-3'-phosphate
  modified_base 5: mod_base = OTHER; note = 2'-O-methyluridine-3'-phosphate
  modified_base 6: mod_base = OTHER; note = 2'-fluoroguanosine-3'-phosphate
  modified_base 7: mod_base = OTHER; note = 2'-O-methylguanosine-3'-phosphate
  modified_base 8: mod_base = OTHER; note = 2'-fluoroadenosine-3'-phosphate
  modified_base 9: mod_base = OTHER; note = 2'-O-methyladenosine-3'-phosphate
  modified_base 10: mod_base = OTHER; note = 2'-fluoroadenosine-3'-phosphate
  modified_base 11: mod_base = OTHER; note = 2'-O-methylcytidine-3'-phosphate
  modified_base 12: mod_base = OTHER; note = 2'-O-methyladenosine-3'-phosphate
  modified_base 13: mod_base = OTHER; note = 2'-O-methylguanosine-3'-phosphate
  modified_base 14: mod_base = OTHER; note = 2'-fluorocytidine-3'-phosphate
  modified_base 15: mod_base = OTHER; note = 2'-O-methylcytidine-3'-phosphate
  modified_base 16: mod_base = OTHER; note = 2'-fluoroadenosine-3'-phosphate
  modified_base 17: mod_base = OTHER; note = 2'-O-methyladenosine-3'-phosphate
  modified_base 18: mod_base = OTHER; note = 2'-fluoroadenosine-3'-phosphate
  modified_base 19: mod_base = OTHER; note = 2'-O-methylguanosine-3'-phosphate
  modified_base 20: mod_base = OTHER; note = 2'-fluoroguanosine-3'-phosphate
  modified_base 21: mod_base = OTHER; note = 2'-O-methyladenosine-3'-phosphorothioate
  modified_base 22: mod_base = OTHER; note = 2'-O-methyluridine-3'-phosphorothioate
  modified_base 23: mod_base = OTHER; note = 2'-O-methyluridine-3'-phosphate
atcttggaaacagccaaaggatt

SEQ ID NO: 122 - RNA, 23 nt, synthetic construct
  source 1..23: mol_type = other RNA; note = Description of Artificial Sequence: Synthetic oligonucleotide
  modified_base 1: mod_base = OTHER; note = 2'-O-methyluridine-3'-phosphorothioate
  modified_base 2: mod_base = OTHER; note = 2'-fluoroadenosine-3'-phosphorothioate
  modified_base 3: mod_base = OTHER; note = 2'-O-methyluridine-3'-phosphate
  modified_base 4: mod_base = OTHER; note = 2'-fluorocytidine-3'-phosphate
  modified_base 5: mod_base = OTHER; note = 2'-O-methyladenosine-3'-phosphate
  modified_base 6: mod_base = OTHER; note = 2'-fluorouridine-3'-phosphate
  modified_base 7: mod_base = OTHER; note = 2'-O-methylcytidine-3'-phosphate
  modified_base 8: mod_base = OTHER; note = 2'-fluorocytidine-3'-phosphate
  modified_base 9: mod_base = OTHER; note = 2'-O-methylcytidine-3'-phosphate
  modified_base 10: mod_base = OTHER; note = 2'-fluoroadenosine-3'-phosphate
  modified_base 11: mod_base = OTHER; note = 2'-O-methylguanosine-3'-phosphate
  modified_base 12: mod_base = OTHER; note = 2'-O-methylcytidine-3'-phosphate
  modified_base 13: mod_base = OTHER; note = 2'-O-methyluridine-3'-phosphate
  modified_base 14: mod_base = OTHER; note = 2'-fluoroguanosine-3'-phosphate
  modified_base 15: mod_base = OTHER; note = 2'-O-methyladenosine-3'-phosphate
  modified_base 16: mod_base = OTHER; note = 2'-fluoroguanosine-3'-phosphate
  modified_base 17: mod_base = OTHER; note = 2'-O-methyladenosine-3'-phosphate
  modified_base 18: mod_base = OTHER; note = 2'-fluoroguanosine-3'-phosphate
  modified_base 19: mod_base = OTHER; note = 2'-O-methyladenosine-3'-phosphate
  modified_base 20: mod_base = OTHER; note = 2'-fluorouridine-3'-phosphate
  modified_base 21: mod_base = OTHER; note = 2'-O-methylguanosine-3'-phosphorothioate
  modified_base 22: mod_base = OTHER; note = 2'-O-methylguanosine-3'-phosphorothioate
  modified_base 23: mod_base = OTHER; note = 2'-O-methylguanosine-3'-phosphate
tatcatcccagctgagagatggg

SEQ ID NO: 123 - RNA, 23 nt, synthetic construct
  source 1..23: mol_type = other RNA; note = Description of Artificial Sequence: Synthetic oligonucleotide
  modified_base 1: mod_base = OTHER; note = 2'-O-methyladenosine-3'-phosphorothioate
  modified_base 2: mod_base = OTHER; note = 2'-fluorouridine -3'-phosphorothioate
  modified_base 3: mod_base = OTHER; note = 2'-O-methylcytidine-3'-phosphate
  modified_base 4: mod_base = OTHER; note = 2'-fluoroadenosine-3'-phosphate
  modified_base 5: mod_base = OTHER; note = 2'-O-methyladenosine-3'-phosphate
  modified_base 6: mod_base = OTHER; note = 2'-fluorouridine-3'-phosphate
  modified_base 7: mod_base = OTHER; note = 2'-O-methyladenosine-3'-phosphate
  modified_base 8: mod_base = OTHER; note = 2'-fluoroguanosine-3'-phosphate
  modified_base 9: mod_base = OTHER; note = 2'-O-methyluridine-3'-phosphate
  modified_base 10: mod_base = OTHER; note = 2'-fluoroadenosine-3'-phosphate
  modified_base 11: mod_base = OTHER; note = 2'-O-methylguanosine-3'-phosphate
  modified_base 12: mod_base = OTHER; note = 2'-O-methylcytidine-3'-phosphate
  modified_base 13: mod_base = OTHER; note = 2'-O-methyluridine-3'-phosphate
  modified_base 14: mod_base = OTHER; note = 2'-fluoroguanosine-3'-phosphate
  modified_base 15: mod_base = OTHER; note = 2'-O-methylguanosine-3'-phosphate
  modified_base 16: mod_base = OTHER; note = 2'-fluorocytidine-3'-phosphate
  modified_base 17: mod_base = OTHER; note = 2'-O-methyladenosine-3'-phosphate
  modified_base 18: mod_base = OTHER; note = 2'-fluorocytidine-3'-phosphate
  modified_base 19: mod_base = OTHER; note = 2'-O-methylcytidine-3'-phosphate
  modified_base 20: mod_base = OTHER; note = 2'-fluorocytidine-3'-phosphate
  modified_base 21: mod_base = OTHER; note = 2'-O-methylcytidine-3'-phosphorothioate
  modified_base 22: mod_base = OTHER; note = 2'-O-methyladenosine-3'-phosphorothioate
  modified_base 23: mod_base = OTHER; note = 2'-O-methyluridine-3'-phosphate
atcaatagtagctggcaccccat

SEQ ID NO: 124 - RNA, 23 nt, synthetic construct
  source 1..23: mol_type = other RNA; note = Description of Artificial Sequence: Synthetic oligonucleotide
  modified_base 1: mod_base = OTHER; note = 2'-O-methyluridine-3'-phosphorothioate
  modified_base 2: mod_base = OTHER; note = 2'-fluoroadenosine-3'-phosphorothioate
  modified_base 3: mod_base = OTHER; note = 2'-O-methyluridine-3'-phosphate
  modified_base 4: mod_base = OTHER; note = 2'-fluoroguanosine-3'-phosphate
  modified_base 5: mod_base = OTHER; note = 2'-O-methyladenosine-3'-phosphate
  modified_base 6: mod_base = OTHER; note = 2'-fluorocytidine-3'-phosphate
  modified_base 7: mod_base = OTHER; note = 2'-O-methylguanosine-3'-phosphate
  modified_base 8: mod_base = OTHER; note = 2'-fluorouridine-3'-phosphate
  modified_base 9: mod_base = OTHER; note = 2'-O-methyluridine-3'-phosphate
  modified_base 10: mod_base = OTHER; note = 2'-fluoroguanosine-3'-phosphate
  modified_base 11: mod_base = OTHER; note = 2'-O-methylcytidine-3'-phosphate
  modified_base 12: mod_base = OTHER; note = 2'-O-methylcytidine-3'-phosphate
  modified_base 13: mod_base = OTHER; note = 2'-O-methylcytidine-3'-phosphate
  modified_base 14: mod_base = OTHER; note = 2'-fluoroadenosine-3'-phosphate
  modified_base 15: mod_base = OTHER; note = 2'-O-methyladenosine-3'-phosphate
  modified_base 16: mod_base = OTHER; note = 2'-fluoroadenosine-3'-phosphate
  modified_base 17: mod_base = OTHER; note = 2'-O-methylcytidine-3'-phosphate
  modified_base 18: mod_base = OTHER; note = 2'-fluoroadenosine-3'-phosphate
  modified_base 19: mod_base = OTHER; note = 2'-O-methylcytidine-3'-phosphate
  modified_base 20: mod_base = OTHER; note = 2'-fluoroadenosine-3'-phosphate
  modified_base 21: mod_base = OTHER; note = 2'-O-methyluridine-3'-phosphorothioate
  modified_base 22: mod_base = OTHER; note = 2'-O-methyluridine-3'-phosphorothioate
  modified_base 23: mod_base = OTHER; note = 2'-O-methyluridine-3'-phosphate
tatgacgttgcccaaacacattt

SEQ ID NO: 125 - RNA, 23 nt, synthetic construct
  source 1..23: mol_type = other RNA; note = Description of Artificial Sequence: Synthetic oligonucleotide
  modified_base 1: mod_base = OTHER; note = 2'-O-methyluridine-3'-phosphorothioate
  modified_base 2: mod_base = OTHER; note = 2'-fluorouridine -3'-phosphorothioate
  modified_base 3: mod_base = OTHER; note = 2'-O-methylcytidine-3'-phosphate
  modified_base 4: mod_base = OTHER; note = 2'-fluorouridine-3'-phosphate
  modified_base 5: mod_base = OTHER; note = 2'-O-methyluridine-3'-phosphate
  modified_base 6: mod_base = OTHER; note = 2'-fluoroadenosine-3'-phosphate
  modified_base 7: mod_base = OTHER; note = 2'-O-methyladenosine-3'-phosphate
  modified_base 8: mod_base = OTHER; note = 2'-fluoroguanosine-3'-phosphate
  modified_base 9: mod_base = OTHER; note = 2'-O-methylguanosine-3'-phosphate
  modified_base 10: mod_base = OTHER; note = 2'-fluoroadenosine-3'-phosphate
  modified_base 11: mod_base = OTHER; note = 2'-O-methyladenosine-3'-phosphate
  modified_base 12: mod_base = OTHER; note = 2'-O-methyladenosine-3'-phosphate
  modified_base 13: mod_base = OTHER; note = 2'-O-methyluridine-3'-phosphate
  modified_base 14: mod_base = OTHER; note = 2'-fluorocytidine-3'-phosphate
  modified_base 15: mod_base = OTHER; note = 2'-O-methyluridine-3'-phosphate
  modified_base 16: mod_base = OTHER; note = 2'-fluoroadenosine-3'-phosphate
  modified_base 17: mod_base = OTHER; note = 2'-O-methyladenosine-3'-phosphate
  modified_base 18: mod_base = OTHER; note = 2'-fluoroadenosine-3'-phosphate
  modified_base 19: mod_base = OTHER; note = 2'-O-methylcytidine-3'-phosphate
  modified_base 20: mod_base = OTHER; note = 2'-fluoroadenosine-3'-phosphate
  modified_base 21: mod_base = OTHER; note = 2'-O-methylguanosine-3'-phosphorothioate
  modified_base 22: mod_base = OTHER; note = 2'-O-methyladenosine-3'-phosphorothioate
  modified_base 23: mod_base = OTHER; note = 2'-O-methyladenosine-3'-phosphate
ttcttaaggaaatctaaacagaa

SEQ ID NO: 126 - RNA, 23 nt, synthetic construct
  source 1..23: mol_type = other RNA; note = Description of Artificial Sequence: Synthetic oligonucleotide
  modified_base 1: mod_base = OTHER; note = 2'-O-methyluridine-3'-phosphorothioate
  modified_base 2: mod_base = OTHER; note = 2'-fluoroadenosine-3'-phosphorothioate
  modified_base 3: mod_base = OTHER; note = 2'-O-methyluridine-3'-phosphate
  modified_base 4: mod_base = OTHER; note = 2'-fluoroguanosine-3'-phosphate
  modified_base 5: mod_base = OTHER; note = 2'-O-methylcytidine-3'-phosphate
  modified_base 6: mod_base = OTHER; note = 2'-fluoroadenosine-3'-phosphate
  modified_base 7: mod_base = OTHER; note = 2'-O-methyladenosine-3'-phosphate
  modified_base 8: mod_base = OTHER; note = 2'-fluoroguanosine-3'-phosphate
  modified_base 9: mod_base = OTHER; note = 2'-O-methyluridine-3'-phosphate
  modified_base 10: mod_base = OTHER; note = 2'-fluorocytidine-3'-phosphate
  modified_base 11: mod_base = OTHER; note = 2'-O-methylcytidine-3'-phosphate
  modified_base 12: mod_base = OTHER; note = 2'-O-methyladenosine-3'-phosphate
  modified_base 13: mod_base = OTHER; note = 2'-O-methyluridine-3'-phosphate
  modified_base 14: mod_base = OTHER; note = 2'-fluorouridine-3'-phosphate
  modified_base 15: mod_base = OTHER; note = 2'-O-methyluridine-3'-phosphate
  modified_base 16: mod_base = OTHER; note = 2'-fluorocytidine-3'-phosphate
  modified_base 17: mod_base = OTHER; note = 2'-O-methyluridine-3'-phosphate
  modified_base 18: mod_base = OTHER; note = 2'-fluorouridine-3'-phosphate
  modified_base 19: mod_base = OTHER; note = 2'-O-methyluridine-3'-phosphate
  modified_base 20: mod_base = OTHER; note = 2'-fluorocytidine-3'-phosphate
  modified_base 21: mod_base = OTHER; note = 2'-O-methyluridine-3'-phosphorothioate
  modified_base 22: mod_base = OTHER; note = 2'-O-methyladenosine-3'-phosphorothioate
  modified_base 23: mod_base = OTHER; note = 2'-O-methylguanosine-3'-phosphate
tatgcaagtccatttctttctag

SEQ ID NO: 127 - RNA, 23 nt, synthetic construct
  source 1..23: mol_type = other RNA; note = Description of Artificial Sequence: Synthetic oligonucleotide
  modified_base 1: mod_base = OTHER; note = 2'-O-methyluridine-3'-phosphorothioate
  modified_base 2: mod_base = OTHER; note = 2'-fluorouridine -3'-phosphorothioate
  modified_base 3: mod_base = OTHER; note = 2'-O-methyluridine-3'-phosphate
  modified_base 4: mod_base = OTHER; note = 2'-fluoroadenosine-3'-phosphate
  modified_base 5: mod_base = OTHER; note = 2'-O-methyladenosine-3'-phosphate
  modified_base 6: mod_base = OTHER; note = 2'-fluorouridine-3'-phosphate
  modified_base 7: mod_base = OTHER; note = 2'-O-methyladenosine-3'-phosphate
  modified_base 8: mod_base = OTHER; note = 2'-fluorouridine-3'-phosphate
  modified_base 9: mod_base = OTHER; note = 2'-O-methyladenosine-3'-phosphate
  modified_base 10: mod_base = OTHER; note = 2'-fluorouridine-3'-phosphate
  modified_base 11: mod_base = OTHER; note = 2'-O-methyluridine-3'-phosphate
  modified_base 12: mod_base = OTHER; note = 2'-O-methyluridine-3'-phosphate
  modified_base 13: mod_base = OTHER; note = 2'-O-methylcytidine-3'-phosphate
  modified_base 14: mod_base = OTHER; note = 2'-fluorocytidine-3'-phosphate
  modified_base 15: mod_base = OTHER; note = 2'-O-methyladenosine-3'-phosphate
  modified_base 16: mod_base = OTHER; note = 2'-fluoroguanosine-3'-phosphate
  modified_base 17: mod_base = OTHER; note = 2'-O-methylguanosine-3'-phosphate
  modified_base 18: mod_base = OTHER; note = 2'-fluoroadenosine-3'-phosphate
  modified_base 19: mod_base = OTHER; note = 2'-O-methyluridine-3'-phosphate
  modified_base 20: mod_base = OTHER; note = 2'-fluoroguanosine-3'-phosphate
  modified_base 21: mod_base = OTHER; note = 2'-O-methylcytidine-3'-phosphorothioate
  modified_base 22: mod_base = OTHER; note = 2'-O-methyladenosine-3'-phosphorothioate
  modified_base 23: mod_base = OTHER; note = 2'-O-methyladenosine-3'-phosphate
tttaatatatttccaggatgcaa

SEQ ID NO: 128 - RNA, 23 nt, synthetic construct
  source 1..23: mol_type = other RNA; note = Description of Artificial Sequence: Synthetic oligonucleotide
  modified_base 1: mod_base = OTHER; note = 2'-O-methyluridine-3'-phosphorothioate
  modified_base 2: mod_base = OTHER; note = 2'-fluoroadenosine-3'-phosphorothioate
  modified_base 3: mod_base = OTHER; note = 2'-O-methylguanosine-3'-phosphate
  modified_base 4: mod_base = OTHER; note = 2'-fluorouridine-3'-phosphate
  modified_base 5: mod_base = OTHER; note = 2'-O-methyluridine-3'-phosphate
  modified_base 6: mod_base = OTHER; note = 2'-fluorocytidine-3'-phosphate
  modified_base 7: mod_base = OTHER; note = 2'-O-methylcytidine-3'-phosphate
  modified_base 8: mod_base = OTHER; note = 2'-fluorocytidine-3'-phosphate
  modified_base 9: mod_base = OTHER; note = 2'-O-methyladenosine-3'-phosphate
  modified_base 10: mod_base = OTHER; note = 2'-fluorouridine-3'-phosphate
  modified_base 11: mod_base = OTHER; note = 2'-O-methylguanosine-3'-phosphate
  modified_base 12: mod_base = OTHER; note = 2'-O-methylguanosine-3'-phosphate
  modified_base 13: mod_base = OTHER; note = 2'-O-methyluridine-3'-phosphate
  modified_base 14: mod_base = OTHER; note = 2'-fluorocytidine-3'-phosphate
  modified_base 15: mod_base = OTHER; note = 2'-O-methyluridine-3'-phosphate
  modified_base 16: mod_base = OTHER; note = 2'-fluoroguanosine-3'-phosphate
  modified_base 17: mod_base = OTHER; note = 2'-O-methyladenosine-3'-phosphate
  modified_base 18: mod_base = OTHER; note = 2'-fluorocytidine-3'-phosphate
  modified_base 19: mod_base = OTHER; note = 2'-O-methyladenosine-3'-phosphate
  modified_base 20: mod_base = OTHER; note = 2'-fluoroguanosine-3'-phosphate
  modified_base 21: mod_base = OTHER; note = 2'-O-methylguanosine-3'-phosphorothioate
  modified_base 22: mod_base = OTHER; note = 2'-O-methylcytidine-3'-phosphorothioate
  modified_base 23: mod_base = OTHER; note = 2'-O-methyluridine-3'-phosphate
tagttcccatggtctgacaggct

SEQ ID NO: 129 - RNA, 23 nt, synthetic construct
  source 1..23: mol_type = other RNA; note = Description of Artificial Sequence: Synthetic oligonucleotide
  modified_base 1: mod_base = OTHER; note = 2'-O-methyluridine-3'-phosphorothioate
  modified_base 2: mod_base = OTHER; note = 2'-fluoroadenosine-3'-phosphorothioate
  modified_base 3: mod_base = OTHER; note = 2'-O-methyluridine-3'-phosphate
  modified_base 4: mod_base = OTHER; note = 2'-fluorocytidine-3'-phosphate
  modified_base 5: mod_base = OTHER; note = 2'-O-methylcytidine-3'-phosphate
  modified_base 6: mod_base = OTHER; note = 2'-fluorocytidine-3'-phosphate
  modified_base 7: mod_base = OTHER; note = 2'-O-methyladenosine-3'-phosphate
  modified_base 8: mod_base = OTHER; note = 2'-fluorouridine-3'-phosphate
  modified_base 9: mod_base = OTHER; note = 2'-O-methylcytidine-3'-phosphate
  modified_base 10: mod_base = OTHER; note = 2'-fluorocytidine-3'-phosphate
  modified_base 11: mod_base = OTHER; note = 2'-O-methyladenosine-3'-phosphate
  modified_base 12: mod_base = OTHER; note = 2'-O-methylcytidine-3'-phosphate
  modified_base 13: mod_base = OTHER; note = 2'-O-methyladenosine-3'-phosphate
  modified_base 14: mod_base = OTHER; note = 2'-fluorocytidine-3'-phosphate
  modified_base 15: mod_base = OTHER; note = 2'-O-methylcytidine-3'-phosphate
  modified_base 16: mod_base = OTHER; note = 2'-fluoroadenosine-3'-phosphate
  modified_base 17: mod_base = OTHER; note = 2'-O-methyluridine-3'-phosphate
  modified_base 18: mod_base = OTHER; note = 2'-fluoroguanosine-3'-phosphate
  modified_base 19: mod_base = OTHER; note = 2'-O-methyluridine-3'-phosphate
  modified_base 20: mod_base = OTHER; note = 2'-fluorouridine-3'-phosphate
  modified_base 21: mod_base = OTHER; note = 2'-O-methyluridine-3'-phosphorothioate
  modified_base 22: mod_base = OTHER; note = 2'-O-methyladenosine-3'-phosphorothioate
  modified_base 23: mod_base = OTHER; note = 2'-O-methyladenosine-3'-phosphate
tatcccatccacaccatgtttaa

SEQ ID NO: 130 - RNA, 23 nt, synthetic construct
  source 1..23: mol_type = other RNA; note = Description of Artificial Sequence: Synthetic oligonucleotide
  modified_base 1: mod_base = OTHER; note = 2'-O-methyluridine-3'-phosphorothioate
  modified_base 2: mod_base = OTHER; note = 2'-fluorouridine -3'-phosphorothioate
  modified_base 3: mod_base = OTHER; note = 2'-O-methylcytidine-3'-phosphate
  modified_base 4: mod_base = OTHER; note = 2'-fluoroadenosine-3'-phosphate
  modified_base 5: mod_base = OTHER; note = 2'-O-methyladenosine-3'-phosphate
  modified_base 6: mod_base = OTHER; note = 2'-fluoroadenosine-3'-phosphate
  modified_base 7: mod_base = OTHER; note = 2'-O-methyladenosine-3'-phosphate
  modified_base 8: mod_base = OTHER; note = 2'-fluorouridine-3'-phosphate
  modified_base 9: mod_base = OTHER; note = 2'-O-methyluridine-3'-phosphate
  modified_base 10: mod_base = OTHER; note = 2'-fluorouridine-3'-phosphate
  modified_base 11: mod_base = OTHER; note = 2'-O-methyluridine-3'-phosphate
  modified_base 12: mod_base = OTHER; note = 2'-O-methyluridine-3'-phosphate
  modified_base 13: mod_base = OTHER; note = 2'-O-methylcytidine-3'-phosphate
  modified_base 14: mod_base = OTHER; note = 2'-fluoroadenosine-3'-phosphate
  modified_base 15: mod_base = OTHER; note = 2'-O-methyluridine-3'-phosphate
  modified_base 16: mod_base = OTHER; note = 2'-fluorocytidine-3'-phosphate
  modified_base 17: mod_base = OTHER; note = 2'-O-methylcytidine-3'-phosphate
  modified_base 18: mod_base = OTHER; note = 2'-fluorouridine-3'-phosphate
  modified_base 19: mod_base = OTHER; note = 2'-O-methylguanosine-3'-phosphate
  modified_base 20: mod_base = OTHER; note = 2'-fluoroadenosine-3'-phosphate
  modified_base 21: mod_base = OTHER; note = 2'-O-methylguanosine-3'-phosphorothioate
  modified_base 22: mod_base = OTHER; note = 2'-O-methyluridine-3'-phosphorothioate
  modified_base 23: mod_base = OTHER; note = 2'-O-methyluridine-3'-phosphate
ttcaaaatttttcatcctgagtt

SEQ ID NO: 131 - RNA, 23 nt, synthetic construct
  source 1..23: mol_type = other RNA; note = Description of Artificial Sequence: Synthetic oligonucleotide
  modified_base 1: mod_base = OTHER; note = 2'-O-methyluridine-3'-phosphorothioate
  modified_base 2: mod_base = OTHER; note = 2'-fluorouridine -3'-phosphorothioate
  modified_base 3: mod_base = OTHER; note = 2'-O-methyluridine-3'-phosphate
  modified_base 4: mod_base = OTHER; note = 2'-fluoroguanosine-3'-phosphate
  modified_base 5: mod_base = OTHER; note = 2'-O-methyluridine-3'-phosphate
  modified_base 6: mod_base = OTHER; note = 2'-fluorocytidine-3'-phosphate
  modified_base 7: mod_base = OTHER; note = 2'-O-methyladenosine-3'-phosphate
  modified_base 8: mod_base = OTHER; note = 2'-fluoroadenosine-3'-phosphate
  modified_base 9: mod_base = OTHER; note = 2'-O-methylguanosine-3'-phosphate
  modified_base 10: mod_base = OTHER; note = 2'-fluorouridine-3'-phosphate
  modified_base 11: mod_base = OTHER; note = 2'-O-methyladenosine-3'-phosphate
  modified_base 12: mod_base = OTHER; note = 2'-O-methyladenosine-3'-phosphate
  modified_base 13: mod_base = OTHER; note = 2'-O-methyluridine-3'-phosphate
  modified_base 14: mod_base = OTHER; note = 2'-fluoroadenosine-3'-phosphate
  modified_base 15: mod_base = OTHER; note = 2'-O-methylcytidine-3'-phosphate
  modified_base 16: mod_base = OTHER; note = 2'-fluoroadenosine-3'-phosphate
  modified_base 17: mod_base = OTHER; note = 2'-O-methyluridine-3'-phosphate
  modified_base 18: mod_base = OTHER; note = 2'-fluoroguanosine-3'-phosphate
  modified_base 19: mod_base = OTHER; note = 2'-O-methylcytidine-3'-phosphate
  modified_base 20: mod_base = OTHER; note = 2'-fluorouridine-3'-phosphate
  modified_base 21: mod_base = OTHER; note = 2'-O-methylguanosine-3'-phosphorothioate
  modified_base 22: mod_base = OTHER; note = 2'-O-methyladenosine-3'-phosphorothioate
  modified_base 23: mod_base = OTHER; note = 2'-O-methyladenosine-3'-phosphate
tttgtcaagtaatacatgctgaa

SEQ ID NO: 132 - RNA, 23 nt, synthetic construct
  source 1..23: mol_type = other RNA; note = Description of Artificial Sequence: Synthetic oligonucleotide
  modified_base 1: mod_base = OTHER; note = 2'-O-methyluridine-3'-phosphorothioate
  modified_base 2: mod_base = OTHER; note = 2'-fluoroguanosine-3'-phosphorothioate
  modified_base 3: mod_base = OTHER; note = 2'-O-methyladenosine-3'-phosphate
  modified_base 4: mod_base = OTHER; note = 2'-fluorouridine-3'-phosphate
  modified_base 5: mod_base = OTHER; note = 2'-O-methyluridine-3'-phosphate
  modified_base 6: mod_base = OTHER; note = 2'-fluorouridine-3'-phosphate
  modified_base 7: mod_base = OTHER; note = 2'-O-methyladenosine-3'-phosphate
  modified_base 8: mod_base = OTHER; note = 2'-fluoroguanosine-3'-phosphate
  modified_base 9: mod_base = OTHER; note = 2'-O-methylcytidine-3'-phosphate
  modified_base 10: mod_base = OTHER; note = 2'-fluoroadenosine-3'-phosphate
  modified_base 11: mod_base = OTHER; note = 2'-O-methyluridine-3'-phosphate
  modified_base 12: mod_base = OTHER; note = 2'-O-methylguanosine-3'-phosphate
  modified_base 13: mod_base = OTHER; note = 2'-O-methyluridine-3'-phosphate
  modified_base 14: mod_base = OTHER; note = 2'-fluorouridine-3'-phosphate
  modified_base 15: mod_base = OTHER; note = 2'-O-methylguanosine-3'-phosphate
  modified_base 16: mod_base = OTHER; note = 2'-fluorouridine-3'-phosphate
  modified_base 17: mod_base = OTHER; note = 2'-O-methyluridine-3'-phosphate
  modified_base 18: mod_base = OTHER; note = 2'-fluorocytidine-3'-phosphate
  modified_base 19: mod_base = OTHER; note = 2'-O-methyladenosine-3'-phosphate
  modified_base 20: mod_base = OTHER; note = 2'-fluorouridine-3'-phosphate
  modified_base 21: mod_base = OTHER; note = 2'-O-methyladenosine-3'-phosphorothioate
  modified_base 22: mod_base = OTHER; note = 2'-O-methyladenosine-3'-phosphorothioate
  modified_base 23: mod_base = OTHER; note = 2'-O-methyluridine-3'-phosphate
tgatttagcatgttgttcataat

SEQ ID NO: 133 - RNA, 23 nt, synthetic construct
  source 1..23: mol_type = other RNA; note = Description of Artificial Sequence: Synthetic oligonucleotide
  modified_base 1: mod_base = OTHER; note = 2'-O-methyluridine-3'-phosphorothioate
  modified_base 2: mod_base = OTHER; note = 2'-fluorocytidine-3'-phosphorothioate
  modified_base 3: mod_base = OTHER; note = 2'-O-methylcytidine-3'-phosphate
  modified_base 4: mod_base = OTHER; note = 2'-fluorouridine-3'-phosphate
  modified_base 5: mod_base = OTHER; note = 2'-O-methyladenosine-3'-phosphate
  modified_base 6: mod_base = OTHER; note = 2'-fluoroadenosine-3'-phosphate
  modified_base 7: mod_base = OTHER; note = 2'-O-methyladenosine-3'-phosphate
  modified_base 8: mod_base = OTHER; note = 2'-fluoroadenosine-3'-phosphate
  modified_base 9: mod_base = OTHER; note = 2'-O-methylcytidine-3'-phosphate
  modified_base 10: mod_base = OTHER; note = 2'-fluoroadenosine-3'-phosphate
  modified_base 11: mod_base = OTHER; note = 2'-O-methyluridine-3'-phosphate
  modified_base 12: mod_base = OTHER; note = 2'-O-methyluridine-3'-phosphate
  modified_base 13: mod_base = OTHER; note = 2'-O-methyluridine-3'-phosphate
  modified_base 14: mod_base = OTHER; note = 2'-fluoroguanosine-3'-phosphate
  modified_base 15: mod_base = OTHER; note = 2'-O-methylguanosine-3'-phosphate
  modified_base 16: mod_base = OTHER; note = 2'-fluoroadenosine-3'-phosphate
  modified_base 17: mod_base = OTHER; note = 2'-O-methyluridine-3'-phosphate
  modified_base 18: mod_base = OTHER; note = 2'-fluoroadenosine-3'-phosphate
  modified_base 19: mod_base = OTHER; note = 2'-O-methyluridine-3'-phosphate
  modified_base 20: mod_base = OTHER; note = 2'-fluoroadenosine-3'-phosphate
  modified_base 21: mod_base = OTHER; note = 2'-O-methyluridine-3'-phosphorothioate
  modified_base 22: mod_base = OTHER; note = 2'-O-methyluridine-3'-phosphorothioate
  modified_base 23: mod_base = OTHER; note = 2'-O-methylcytidine-3'-phosphate
tcctaaaacatttggatatattc

SEQ ID NO: 134 - RNA, 23 nt, synthetic construct
  source 1..23: mol_type = other RNA; note = Description of Artificial Sequence: Synthetic oligonucleotide
  modified_base 1: mod_base = OTHER; note = 2'-O-methyluridine-3'-phosphorothioate
  modified_base 2: mod_base = OTHER; note = 2'-fluorouridine -3'-phosphorothioate
  modified_base 3: mod_base = OTHER; note = 2'-O-methylguanosine-3'-phosphate
  modified_base 4: mod_base = OTHER; note = 2'-fluoroguanosine-3'-phosphate
  modified_base 5: mod_base = OTHER; note = 2'-O-methyladenosine-3'-phosphate
  modified_base 6: mod_base = OTHER; note = 2'-fluorouridine-3'-phosphate
  modified_base 7: mod_base = OTHER; note = 2'-O-methyladenosine-3'-phosphate
  modified_base 8: mod_base = OTHER; note = 2'-fluorocytidine-3'-phosphate
  modified_base 9: mod_base = OTHER; note = 2'-O-methyladenosine-3'-phosphate
  modified_base 10: mod_base = OTHER; note = 2'-fluoroguanosine-3'-phosphate
  modified_base 11: mod_base = OTHER; note = 2'-O-methylcytidine-3'-phosphate
  modified_base 12: mod_base = OTHER; note = 2'-O-methyluridine-3'-phosphate
  modified_base 13: mod_base = OTHER; note = 2'-O-methyluridine-3'-phosphate
  modified_base 14: mod_base = OTHER; note = 2'-fluorocytidine-3'-phosphate
  modified_base 15: mod_base = OTHER; note = 2'-O-methylcytidine-3'-phosphate
  modified_base 16: mod_base = OTHER; note = 2'-fluoroadenosine-3'-phosphate
  modified_base 17: mod_base = OTHER; note = 2'-O-methyluridine-3'-phosphate
  modified_base 18: mod_base = OTHER; note = 2'-fluorocytidine-3'-phosphate
  modified_base 19: mod_base = OTHER; note = 2'-O-methyluridine-3'-phosphate
  modified_base 20: mod_base = OTHER; note = 2'-fluoroguanosine-3'-phosphate
  modified_base 21: mod_base = OTHER; note = 2'-O-methylguanosine-3'-phosphorothioate
  modified_base 22: mod_base = OTHER; note = 2'-O-methyladenosine-3'-phosphorothioate
  modified_base 23: mod_base = OTHER; note = 2'-O-methyladenosine-3'-phosphate
ttggatacagcttccatctggaa

SEQ ID NO: 135 - RNA, 23 nt, synthetic construct
  source 1..23: mol_type = other RNA; note = Description of Artificial Sequence: Synthetic oligonucleotide
  modified_base 1: mod_base = OTHER; note = 2'-O-methyluridine-3'-phosphorothioate
  modified_base 2: mod_base = OTHER; note = 2'-fluoroadenosine-3'-phosphorothioate
  modified_base 3: mod_base = OTHER; note = 2'-O-methyluridine-3'-phosphate
  modified_base 4: mod_base = OTHER; note = 2'-fluoroadenosine-3'-phosphate
  modified_base 5: mod_base = OTHER; note = 2'-O-methyluridine-3'-phosphate
  modified_base 6: mod_base = OTHER; note = 2'-fluorouridine-3'-phosphate
  modified_base 7: mod_base = OTHER; note = 2'-O-methyluridine-3'-phosphate
  modified_base 8: mod_base = OTHER; note = 2'-fluorocytidine-3'-phosphate
  modified_base 9: mod_base = OTHER; note = 2'-O-methylcytidine-3'-phosphate
  modified_base 10: mod_base = OTHER; note = 2'-fluoroadenosine-3'-phosphate
  modified_base 11: mod_base = OTHER; note = 2'-O-methylguanosine-3'-phosphate
  modified_base 12: mod_base = OTHER; note = 2'-O-methylguanosine-3'-phosphate
  modified_base 13: mod_base = OTHER; note = 2'-O-methyladenosine-3'-phosphate
  modified_base 14: mod_base = OTHER; note = 2'-fluorouridine-3'-phosphate
  modified_base 15: mod_base = OTHER; note = 2'-O-methylguanosine-3'-phosphate
  modified_base 16: mod_base = OTHER; note = 2'-fluoroadenosine-3'-phosphate
  modified_base 17: mod_base = OTHER; note = 2'-O-methyladenosine-3'-phosphate
  modified_base 18: mod_base = OTHER; note = 2'-fluoroadenosine-3'-phosphate
  modified_base 19: mod_base = OTHER; note = 2'-O-methylguanosine-3'-phosphate
  modified_base 20: mod_base = OTHER; note = 2'-fluorouridine-3'-phosphate
  modified_base 21: mod_base = OTHER; note = 2'-O-methylcytidine-3'-phosphorothioate
  modified_base 22: mod_base = OTHER; note = 2'-O-methylcytidine-3'-phosphorothioate
  modified_base 23: mod_base = OTHER; note = 2'-O-methyladenosine-3'-phosphate
tatatttccaggatgaaagtcca

SEQ ID NO: 136 - RNA, 23 nt, synthetic construct
  source 1..23: mol_type = other RNA; note = Description of Artificial Sequence: Synthetic oligonucleotide
  modified_base 1: mod_base = OTHER; note = 2'-O-methyladenosine-3'-phosphorothioate
  modified_base 2: mod_base = OTHER; note = 2'-fluorouridine -3'-phosphorothioate
  modified_base 3: mod_base = OTHER; note = 2'-O-methyluridine-3'-phosphate
  modified_base 4: mod_base = OTHER; note = 2'-fluoroguanosine-3'-phosphate
  modified_base 5: mod_base = OTHER; note = 2'-O-methyladenosine-3'-phosphate
  modified_base 6: mod_base = OTHER; note = 2'-fluorouridine-3'-phosphate
  modified_base 7: mod_base = OTHER; note = 2'-O-methyladenosine-3'-phosphate
  modified_base 8: mod_base = OTHER; note = 2'-fluorocytidine-3'-phosphate
  modified_base 9: mod_base = OTHER; note = 2'-O-methyladenosine-3'-phosphate
  modified_base 10: mod_base = OTHER; note = 2'-fluoroadenosine-3'-phosphate
  modified_base 11: mod_base = OTHER; note = 2'-O-methyladenosine-3'-phosphate
  modified_base 12: mod_base = OTHER; note = 2'-O-methyluridine-3'-phosphate
  modified_base 13: mod_base = OTHER; note = 2'-O-methyluridine-3'-phosphate
  modified_base 14: mod_base = OTHER; note = 2'-fluoroadenosine-3'-phosphate
  modified_base 15: mod_base = OTHER; note = 2'-O-methylguanosine-3'-phosphate
  modified_base 16: mod_base = OTHER; note = 2'-fluorocytidine-3'-phosphate
  modified_base 17: mod_base = OTHER; note = 2'-O-methylcytidine-3'-phosphate
  modified_base 18: mod_base = OTHER; note = 2'-fluoroguanosine-3'-phosphate
  modified_base 19: mod_base = OTHER; note = 2'-O-methylguanosine-3'-phosphate
  modified_base 20: mod_base = OTHER; note = 2'-fluoroguanosine-3'-phosphate
  modified_base 21: mod_base = OTHER; note = 2'-O-methylguanosine-3'-phosphorothioate
  modified_base 22: mod_base = OTHER; note = 2'-O-methylguanosine-3'-phosphorothioate
  modified_base 23: mod_base = OTHER; note = 2'-O-methyladenosine-3'-phosphate
attgatacaaattagccggggga

SEQ ID NO: 137 - RNA, 23 nt, synthetic construct
  source 1..23: mol_type = other RNA; note = Description of Artificial Sequence: Synthetic oligonucleotide
  modified_base 1: mod_base = OTHER; note = 2'-O-methyluridine-3'-phosphorothioate
  modified_base 2: mod_base = OTHER; note = 2'-fluorocytidine-3'-phosphorothioate
  modified_base 3: mod_base = OTHER; note = 2'-O-methylcytidine-3'-phosphate
  modified_base 4: mod_base = OTHER; note = 2'-fluorocytidine-3'-phosphate
  modified_base 5: mod_base = OTHER; note = 2'-O-methyladenosine-3'-phosphate
  modified_base 6: mod_base = OTHER; note = 2'-fluorouridine-3'-phosphate
  modified_base 7: mod_base = OTHER; note = 2'-O-methyluridine-3'-phosphate
  modified_base 8: mod_base = OTHER; note = 2'-fluorocytidine-3'-phosphate
  modified_base 9: mod_base = OTHER; note = 2'-O-methyladenosine-3'-phosphate
  modified_base 10: mod_base = OTHER; note = 2'-fluoroadenosine-3'-phosphate
  modified_base 11: mod_base = OTHER; note = 2'-O-methylguanosine-3'-phosphate
  modified_base 12: mod_base = OTHER; note = 2'-O-methylcytidine-3'-phosphate
  modified_base 13: mod_base = OTHER; note = 2'-O-methylcytidine-3'-phosphate
  modified_base 14: mod_base = OTHER; note = 2'-fluoroadenosine-3'-phosphate
  modified_base 15: mod_base = OTHER; note = 2'-O-methyluridine-3'-phosphate
  modified_base 16: mod_base = OTHER; note = 2'-fluoroguanosine-3'-phosphate
  modified_base 17: mod_base = OTHER; note = 2'-O-methyluridine-3'-phosphate
  modified_base 18: mod_base = OTHER; note = 2'-fluorouridine-3'-phosphate
  modified_base 19: mod_base = OTHER; note = 2'-O-methyluridine-3'-phosphate
  modified_base 20: mod_base = OTHER; note = 2'-fluoroadenosine-3'-phosphate
  modified_base 21: mod_base = OTHER; note = 2'-O-methyladenosine-3'-phosphorothioate
  modified_base 22: mod_base = OTHER; note = 2'-O-methylcytidine-3'-phosphorothioate
  modified_base 23: mod_base = OTHER; note = 2'-O-methyladenosine-3'-phosphate
tcccattcaagccatgtttaaca

SEQ ID NO: 138 - RNA, 23 nt, synthetic construct
  source 1..23: mol_type = other RNA; note = Description of Artificial Sequence: Synthetic oligonucleotide
  modified_base 1: mod_base = OTHER; note = 2'-O-methyladenosine-3'-phosphorothioate
  modified_base 2: mod_base = OTHER; note = 2'-fluorouridine -3'-phosphorothioate
  modified_base 3: mod_base = OTHER; note = 2'-O-methylguanosine-3'-phosphate
  modified_base 4: mod_base = OTHER; note = 2'-fluoroadenosine-3'-phosphate
  modified_base 5: mod_base = OTHER; note = 2'-O-methylcytidine-3'-phosphate
  modified_base 6: mod_base = OTHER; note = 2'-fluoroguanosine-3'-phosphate
  modified_base 7: mod_base = OTHER; note = 2'-O-methyluridine-3'-phosphate
  modified_base 8: mod_base = OTHER; note = 2'-fluorouridine-3'-phosphate
  modified_base 9: mod_base = OTHER; note = 2'-O-methylguanosine-3'-phosphate
  modified_base 10: mod_base = OTHER; note = 2'-fluorouridine-3'-phosphate
  modified_base 11: mod_base = OTHER; note = 2'-O-methylcytidine-3'-phosphate
  modified_base 12: mod_base = OTHER; note = 2'-O-methyluridine-3'-phosphate
  modified_base 13: mod_base = OTHER; note = 2'-O-methyladenosine-3'-phosphate
  modified_base 14: mod_base = OTHER; note = 2'-fluoroadenosine-3'-phosphate
  modified_base 15: mod_base = OTHER; note = 2'-O-methyladenosine-3'-phosphate
  modified_base 16: mod_base = OTHER; note = 2'-fluorocytidine-3'-phosphate
  modified_base 17: mod_base = OTHER; note = 2'-O-methyladenosine-3'-phosphate
  modified_base 18: mod_base = OTHER; note = 2'-fluorocytidine-3'-phosphate
  modified_base 19: mod_base = OTHER; note = 2'-O-methyladenosine-3'-phosphate
  modified_base 20: mod_base = OTHER; note = 2'-fluorouridine-3'-phosphate
  modified_base 21: mod_base = OTHER; note = 2'-O-methyluridine-3'-phosphorothioate
  modified_base 22: mod_base = OTHER; note = 2'-O-methyluridine-3'-phosphorothioate
  modified_base 23: mod_base = OTHER; note = 2'-O-methyluridine-3'-phosphate
atgacgttgtctaaacacatttt

SEQ ID NO: 139 - RNA, 23 nt, synthetic construct
  source 1..23: mol_type = other RNA; note = Description of Artificial Sequence: Synthetic oligonucleotide
  modified_base 1: mod_base = OTHER; note = 2'-O-methyladenosine-3'-phosphorothioate
  modified_base 2: mod_base = OTHER; note = 2'-fluoroadenosine-3'-phosphorothioate
  modified_base 3: mod_base = OTHER; note = 2'-O-methylcytidine-3'-phosphate
  modified_base 4: mod_base = OTHER; note = 2'-fluorocytidine-3'-phosphate
  modified_base 5: mod_base = OTHER; note = 2'-O-methylguanosine-3'-phosphate
  modified_base 6: mod_base = OTHER; note = 2'-fluoroguanosine-3'-phosphate
  modified_base 7: mod_base = OTHER; note = 2'-O-methyladenosine-3'-phosphate
  modified_base 8: mod_base = OTHER; note = 2'-fluoroadenosine-3'-phosphate
  modified_base 9: mod_base = OTHER; note = 2'-O-methyluridine-3'-phosphate
  modified_base 10: mod_base = OTHER; note = 2'-fluorouridine-3'-phosphate
  modified_base 11: mod_base = OTHER; note = 2'-O-methylcytidine-3'-phosphate
  modified_base 12: mod_base = OTHER; note = 2'-O-methyluridine-3'-phosphate
  modified_base 13: mod_base = OTHER; note = 2'-O-methyluridine-3'-phosphate
  modified_base 14: mod_base = OTHER; note = 2'-fluorocytidine-3'-phosphate
  modified_base 15: mod_base = OTHER; note = 2'-O-methylcytidine-3'-phosphate
  modified_base 16: mod_base = OTHER; note = 2'-fluorouridine-3'-phosphate
  modified_base 17: mod_base = OTHER; note = 2'-O-methyluridine-3'-phosphate
  modified_base 18: mod_base = OTHER; note = 2'-fluorouridine-3'-phosphate
  modified_base 19: mod_base = OTHER; note = 2'-O-methyladenosine-3'-phosphate
  modified_base 20: mod_base = OTHER; note = 2'-fluoroguanosine-3'-phosphate
  modified_base 21: mod_base = OTHER; note = 2'-O-methyluridine-3'-phosphorothioate
  modified_base 22: mod_base = OTHER; note = 2'-O-methyladenosine-3'-phosphorothioate
  modified_base 23: mod_base = OTHER; note = 2'-O-methyluridine-3'-phosphate
aaccggaattcttcctttagtat

SEQ ID NO: 140 - RNA, 23 nt, synthetic construct
  source 1..23: mol_type = other RNA; note = Description of Artificial Sequence: Synthetic oligonucleotide
  modified_base 1: mod_base = OTHER; note = 2'-O-methyladenosine-3'-phosphorothioate
  modified_base 2: mod_base = OTHER; note = 2'-fluorouridine -3'-phosphorothioate
  modified_base 3: mod_base = OTHER; note = 2'-O-methylcytidine-3'-phosphate
  modified_base 4: mod_base = OTHER; note = 2'-fluorocytidine-3'-phosphate
  modified_base 5: mod_base = OTHER; note = 2'-O-methyluridine-3'-phosphate
  modified_base 6: mod_base = OTHER; note = 2'-fluoroadenosine-3'-phosphate
  modified_base 7: mod_base = OTHER; note = 2'-O-methyladenosine-3'-phosphate
  modified_base 8: mod_base = OTHER; note = 2'-fluoroadenosine-3'-phosphate
  modified_base 9: mod_base = OTHER; note = 2'-O-methyladenosine-3'-phosphate
  modified_base 10: mod_base = OTHER; note = 2'-fluorocytidine-3'-phosphate
  modified_base 11: mod_base = OTHER; note = 2'-O-methyladenosine-3'-phosphate
  modified_base 12: mod_base = OTHER; note = 2'-O-methyluridine-3'-phosphate
  modified_base 13: mod_base = OTHER; note = 2'-O-methyluridine-3'-phosphate
  modified_base 14: mod_base = OTHER; note = 2'-fluorouridine-3'-phosphate
  modified_base 15: mod_base = OTHER; note = 2'-O-methylguanosine-3'-phosphate
  modified_base 16: mod_base = OTHER; note = 2'-fluoroguanosine-3'-phosphate
  modified_base 17: mod_base = OTHER; note = 2'-O-methyladenosine-3'-phosphate
  modified_base 18: mod_base = OTHER; note = 2'-fluorouridine-3'-phosphate
  modified_base 19: mod_base = OTHER; note = 2'-O-methyladenosine-3'-phosphate
  modified_base 20: mod_base = OTHER; note = 2'-fluorouridine-3'-phosphate
  modified_base 21: mod_base = OTHER; note = 2'-O-methyladenosine-3'-phosphorothioate
  modified_base 22: mod_base = OTHER; note = 2'-O-methyluridine-3'-phosphorothioate
  modified_base 23: mod_base = OTHER; note = 2'-O-methyluridine-3'-phosphate
atcctaaaacatttggatatatt

SEQ ID NO: 141 - RNA, 23 nt, synthetic construct
  source 1..23: mol_type = other RNA; note = Description of Artificial Sequence: Synthetic oligonucleotide
  modified_base 1: mod_base = OTHER; note = 2'-O-methyladenosine-3'-phosphorothioate
  modified_base 2: mod_base = OTHER; note = 2'-fluoroadenosine-3'-phosphorothioate
  modified_base 3: mod_base = OTHER; note = 2'-O-methylcytidine-3'-phosphate
  modified_base 4: mod_base = OTHER; note = 2'-fluoroadenosine-3'-phosphate
  modified_base 5: mod_base = OTHER; note = 2'-O-methyluridine-3'-phosphate
  modified_base 6: mod_base = OTHER; note = 2'-fluorocytidine-3'-phosphate
  modified_base 7: mod_base = OTHER; note = 2'-O-methyladenosine-3'-phosphate
  modified_base 8: mod_base = OTHER; note = 2'-fluoroguanosine-3'-phosphate
  modified_base 9: mod_base = OTHER; note = 2'-O-methyluridine-3'-phosphate
  modified_base 10: mod_base = OTHER; note = 2'-fluoroguanosine-3'-phosphate
  modified_base 11: mod_base = OTHER; note = 2'-O-methylcytidine-3'-phosphate
  modified_base 12: mod_base = OTHER; note = 2'-O-methylcytidine-3'-phosphate
  modified_base 13: mod_base = OTHER; note = 2'-O-methyluridine-3'-phosphate
  modified_base 14: mod_base = OTHER; note = 2'-fluorouridine-3'-phosphate
  modified_base 15: mod_base = OTHER; note = 2'-O-methyluridine-3'-phosphate
  modified_base 16: mod_base = OTHER; note = 2'-fluorocytidine-3'-phosphate
  modified_base 17: mod_base = OTHER; note = 2'-O-methylcytidine-3'-phosphate
  modified_base 18: mod_base = OTHER; note = 2'-fluoroguanosine-3'-phosphate
  modified_base 19: mod_base = OTHER; note = 2'-O-methylcytidine-3'-phosphate
  modified_base 20: mod_base = OTHER; note = 2'-fluoroadenosine-3'-phosphate
  modified_base 21: mod_base = OTHER; note = 2'-O-methylcytidine-3'-phosphorothioate
  modified_base 22: mod_base = OTHER; note = 2'-O-methyladenosine-3'-phosphorothioate
  modified_base 23: mod_base = OTHER; note = 2'-O-methylcytidine-3'-phosphate
aacatcagtgcctttccgcacac

SEQ ID NO: 142 - RNA, 23 nt, synthetic construct
  source 1..23: mol_type = other RNA; note = Description of Artificial Sequence: Synthetic oligonucleotide
  modified_base 1: mod_base = OTHER; note = 2'-O-methyladenosine-3'-phosphorothioate
  modified_base 2: mod_base = OTHER; note = 2'-fluoroadenosine-3'-phosphorothioate
  modified_base 3: mod_base = OTHER; note = 2'-O-methyluridine-3'-phosphate
  modified_base 4: mod_base = OTHER; note = 2'-fluorouridine-3'-phosphate
  modified_base 5: mod_base = OTHER; note = 2'-O-methyluridine-3'-phosphate
  modified_base 6: mod_base = OTHER; note = 2'-fluoroadenosine-3'-phosphate
  modified_base 7: mod_base = OTHER; note = 2'-O-methyladenosine-3'-phosphate
  modified_base 8: mod_base = OTHER; note = 2'-fluoroguanosine-3'-phosphate
  modified_base 9: mod_base = OTHER; note = 2'-O-methyladenosine-3'-phosphate
  modified_base 10: mod_base = OTHER; note = 2'-fluoroadenosine-3'-phosphate
  modified_base 11: mod_base = OTHER; note = 2'-O-methylcytidine-3'-phosphate
  modified_base 12: mod_base = OTHER; note = 2'-O-methylcytidine-3'-phosphate
  modified_base 13: mod_base = OTHER; note = 2'-O-methyladenosine-3'-phosphate
  modified_base 14: mod_base = OTHER; note = 2'-fluorocytidine-3'-phosphate
  modified_base 15: mod_base = OTHER; note = 2'-O-methyluridine-3'-phosphate
  modified_base 16: mod_base = OTHER; note = 2'-fluoroguanosine-3'-phosphate
  modified_base 17: mod_base = OTHER; note = 2'-O-methyluridine-3'-phosphate
  modified_base 18: mod_base = OTHER; note = 2'-fluorouridine-3'-phosphate
  modified_base 19: mod_base = OTHER; note = 2'-O-methyluridine-3'-phosphate
  modified_base 20: mod_base = OTHER; note = 2'-fluorouridine-3'-phosphate
  modified_base 21: mod_base = OTHER; note = 2'-O-methyladenosine-3'-phosphorothioate
  modified_base 22: mod_base = OTHER; note = 2'-O-methyladenosine-3'-phosphorothioate
  modified_base 23: mod_base = OTHER; note = 2'-O-methyladenosine-3'-phosphate
aatttaagaaccactgttttaaa

SEQ ID NO: 143 - RNA, 23 nt, synthetic construct
  source 1..23: mol_type = other RNA; note = Description of Artificial Sequence: Synthetic oligonucleotide
  modified_base 1: mod_base = OTHER; note = 2'-O-methyladenosine-3'-phosphorothioate
  modified_base 2: mod_base = OTHER; note = 2'-fluorocytidine-3'-phosphorothioate
  modified_base 3: mod_base = OTHER; note = 2'-O-methyluridine-3'-phosphate
  modified_base 4: mod_base = OTHER; note = 2'-fluoroguanosine-3'-phosphate
  modified_base 5: mod_base = OTHER; note = 2'-O-methylguanosine-3'-phosphate
  modified_base 6: mod_base = OTHER; note = 2'-fluorouridine-3'-phosphate
  modified_base 7: mod_base = OTHER; note = 2'-O-methyluridine-3'-phosphate
  modified_base 8: mod_base = OTHER; note = 2'-fluorouridine-3'-phosphate
  modified_base 9: mod_base = OTHER; note = 2'-O-methylcytidine-3'-phosphate
  modified_base 10: mod_base = OTHER; note = 2'-fluoroadenosine-3'-phosphate
  modified_base 11: mod_base = OTHER; note = 2'-O-methyladenosine-3'-phosphate
  modified_base 12: mod_base = OTHER; note = 2'-O-methyladenosine-3'-phosphate
  modified_base 13: mod_base = OTHER; note = 2'-O-methyladenosine-3'-phosphate
  modified_base 14: mod_base = OTHER; note = 2'-fluorouridine-3'-phosphate
  modified_base 15: mod_base = OTHER; note = 2'-O-methyluridine-3'-phosphate
  modified_base 16: mod_base = OTHER; note = 2'-fluorouridine-3'-phosphate
  modified_base 17: mod_base = OTHER; note = 2'-O-methyluridine-3'-phosphate
  modified_base 18: mod_base = OTHER; note = 2'-fluorouridine-3'-phosphate
  modified_base 19: mod_base = OTHER; note = 2'-O-methylcytidine-3'-phosphate
  modified_base 20: mod_base = OTHER; note = 2'-fluoroadenosine-3'-phosphate
  modified_base 21: mod_base = OTHER; note = 2'-O-methyluridine-3'-phosphorothioate
  modified_base 22: mod_base = OTHER; note = 2'-O-methylcytidine-3'-phosphorothioate
  modified_base 23: mod_base = OTHER; note = 2'-O-methylcytidine-3'-phosphate
actggtttcaaaatttttcatcc

SEQ ID NO: 144 - RNA, 23 nt, synthetic construct
  source 1..23: mol_type = other RNA; note = Description of Artificial Sequence: Synthetic oligonucleotide
  modified_base 1: mod_base = OTHER; note = 2'-O-methyladenosine-3'-phosphorothioate
  modified_base 2: mod_base = OTHER; note = 2'-fluoroadenosine-3'-phosphorothioate
  modified_base 3: mod_base = OTHER; note = 2'-O-methyladenosine-3'-phosphate
  modified_base 4: mod_base = OTHER; note = 2'-fluoroadenosine-3'-phosphate
  modified_base 5: mod_base = OTHER; note = 2'-O-methylguanosine-3'-phosphate
  modified_base 6: mod_base = OTHER; note = 2'-fluoroguanosine-3'-phosphate
  modified_base 7: mod_base = OTHER; note = 2'-O-methylguanosine-3'-phosphate
  modified_base 8: mod_base = OTHER; note = 2'-fluoroadenosine-3'-phosphate
  modified_base 9: mod_base = OTHER; note = 2'-O-methyluridine-3'-phosphate
  modified_base 10: mod_base = OTHER; note = 2'-fluorouridine-3'-phosphate
  modified_base 11: mod_base = OTHER; note = 2'-O-methylguanosine-3'-phosphate
  modified_base 12: mod_base = OTHER; note = 2'-O-methylcytidine-3'-phosphate
  modified_base 13: mod_base = OTHER; note = 2'-O-methyluridine-3'-phosphate
  modified_base 14: mod_base = OTHER; note = 2'-fluoroadenosine-3'-phosphate
  modified_base 15: mod_base = OTHER; note = 2'-O-methyluridine-3'-phosphate
  modified_base 16: mod_base = OTHER; note = 2'-fluorouridine-3'-phosphate
  modified_base 17: mod_base = OTHER; note = 2'-O-methyluridine-3'-phosphate
  modified_base 18: mod_base = OTHER; note = 2'-fluorouridine-3'-phosphate
  modified_base 19: mod_base = OTHER; note = 2'-O-methylguanosine-3'-phosphate
  modified_base 20: mod_base = OTHER; note = 2'-fluorouridine-3'-phosphate
  modified_base 21: mod_base = OTHER; note = 2'-O-methyluridine-3'-phosphorothioate
  modified_base 22: mod_base = OTHER; note = 2'-O-methylguanosine-3'-phosphorothioate
  modified_base 23: mod_base = OTHER; note = 2'-O-methylguanosine-3'-phosphate
aaaagggattgctattttgttgg

SEQ ID NO: 145 - RNA, 23 nt, synthetic construct
  source 1..23: mol_type = other RNA; note = Description of Artificial Sequence: Synthetic oligonucleotide
  modified_base 1: mod_base = OTHER; note = 2'-O-methyladenosine-3'-phosphorothioate
  modified_base 2: mod_base = OTHER; note = 2'-fluoroadenosine-3'-phosphorothioate
  modified_base 3: mod_base = OTHER; note = 2'-O-methylguanosine-3'-phosphate
  modified_base 4: mod_base = OTHER; note = 2'-fluorouridine-3'-phosphate
  modified_base 5: mod_base = OTHER; note = 2'-O-methylcytidine-3'-phosphate
  modified_base 6: mod_base = OTHER; note = 2'-fluoroguanosine-3'-phosphate
  modified_base 7: mod_base = OTHER; note = 2'-O-methyladenosine-3'-phosphate
  modified_base 8: mod_base = OTHER; note = 2'-fluorocytidine-3'-phosphate
  modified_base 9: mod_base = OTHER; note = 2'-O-methyladenosine-3'-phosphate
  modified_base 10: mod_base = OTHER; note = 2'-fluoroguanosine-3'-phosphate
  modified_base 11: mod_base = OTHER; note = 2'-O-methyladenosine-3'-phosphate
  modified_base 12: mod_base = OTHER; note = 2'-O-methyluridine-3'-phosphate
  modified_base 13: mod_base = OTHER; note = 2'-O-methylcytidine-3'-phosphate
  modified_base 14: mod_base = OTHER; note = 2'-fluorouridine-3'-phosphate
  modified_base 15: mod_base = OTHER; note = 2'-O-methylguanosine-3'-phosphate
  modified_base 16: mod_base = OTHER; note = 2'-fluorouridine-3'-phosphate
  modified_base 17: mod_base = OTHER; note = 2'-O-methyluridine-3'-phosphate
  modified_base 18: mod_base = OTHER; note = 2'-fluorouridine-3'-phosphate
  modified_base 19: mod_base = OTHER; note = 2'-O-methylcytidine-3'-phosphate
  modified_base 20: mod_base = OTHER; note = 2'-fluoroadenosine-3'-phosphate
  modified_base 21: mod_base = OTHER; note = 2'-O-methylguanosine-3'-phosphorothioate
  modified_base 22: mod_base = OTHER; note = 2'-O-methylcytidine-3'-phosphorothioate
  modified_base 23: mod_base = OTHER; note = 2'-O-methyladenosine-3'-phosphate
aagtcgacagatctgtttcagca

SEQ ID NO: 146 - RNA, 23 nt, synthetic construct
  source 1..23: mol_type = other RNA; note = Description of Artificial Sequence: Synthetic oligonucleotide
  modified_base 1: mod_base = OTHER; note = 2'-O-methyluridine-3'-phosphorothioate
  modified_base 2: mod_base = OTHER; note = 2'-fluorocytidine-3'-phosphorothioate
  modified_base 3: mod_base = OTHER; note = 2'-O-methyladenosine-3'-phosphate
  modified_base 4: mod_base = OTHER; note = 2'-fluoroadenosine-3'-phosphate
  modified_base 5: mod_base = OTHER; note = 2'-O-methyladenosine-3'-phosphate
  modified_base 6: mod_base = OTHER; note = 2'-fluoroadenosine-3'-phosphate
  modified_base 7: mod_base = OTHER; note = 2'-O-methyluridine-3'-phosphate
  modified_base 8: mod_base = OTHER; note = 2'-fluoroguanosine-3'-phosphate
  modified_base 9: mod_base = OTHER; note = 2'-O-methylcytidine-3'-phosphate
  modified_base 10: mod_base = OTHER; note = 2'-fluorocytidine-3'-phosphate
  modified_base 11: mod_base = OTHER; note = 2'-O-methylcytidine-3'-phosphate
  modified_base 12: mod_base = OTHER; note = 2'-O-methyluridine-3'-phosphate
  modified_base 13: mod_base = OTHER; note = 2'-O-methyluridine-3'-phosphate
  modified_base 14: mod_base = OTHER; note = 2'-fluorouridine-3'-phosphate
  modified_base 15: mod_base = OTHER; note = 2'-O-methylguanosine-3'-phosphate
  modified_base 16: mod_base = OTHER; note = 2'-fluorocytidine-3'-phosphate
  modified_base 17: mod_base = OTHER; note = 2'-O-methyladenosine-3'-phosphate
  modified_base 18: mod_base = OTHER; note = 2'-fluoroadenosine-3'-phosphate
  modified_base 19: mod_base = OTHER; note = 2'-O-methylcytidine-3'-phosphate
  modified_base 20: mod_base = OTHER; note = 2'-fluoroadenosine-3'-phosphate
  modified_base 21: mod_base = OTHER; note = 2'-O-methyladenosine-3'-phosphorothioate
  modified_base 22: mod_base = OTHER; note = 2'-O-methyluridine-3'-phosphorothioate
  modified_base 23: mod_base = OTHER; note = 2'-O-methyluridine-3'-phosphate
tcaaaatgccctttgcaacaatt

SEQ ID NO: 147 - RNA, 23 nt, synthetic construct
  source 1..23: mol_type = other RNA; note = Description of Artificial Sequence: Synthetic oligonucleotide
  modified_base 1: mod_base = OTHER; note = 2'-O-methyluridine-3'-phosphorothioate
  modified_base 2: mod_base = OTHER; note = 2'-fluoroadenosine-3'-phosphorothioate
  modified_base 3: mod_base = OTHER; note = 2'-O-methylcytidine-3'-phosphate
  modified_base 4: mod_base = OTHER; note = 2'-fluoroadenosine-3'-phosphate
  modified_base 5: mod_base = OTHER; note = 2'-O-methylguanosine-3'-phosphate
  modified_base 6: mod_base = OTHER; note = 2'-fluoroguanosine-3'-phosphate
  modified_base 7: mod_base = OTHER; note = 2'-O-methyluridine-3'-phosphate
  modified_base 8: mod_base = OTHER; note = 2'-fluorouridine-3'-phosphate
  modified_base 9: mod_base = OTHER; note = 2'-O-methyladenosine-3'-phosphate
  modified_base 10: mod_base = OTHER; note = 2'-fluoroadenosine-3'-phosphate
  modified_base 11: mod_base = OTHER; note = 2'-O-methyluridine-3'-phosphate
  modified_base 12: mod_base = OTHER; note = 2'-O-methyladenosine-3'-phosphate
  modified_base 13: mod_base = OTHER; note = 2'-O-methyladenosine-3'-phosphate
  modified_base 14: mod_base = OTHER; note = 2'-fluoroadenosine-3'-phosphate
  modified_base 15: mod_base = OTHER; note = 2'-O-methylcytidine-3'-phosphate
  modified_base 16: mod_base = OTHER; note = 2'-fluoroadenosine-3'-phosphate
  modified_base 17: mod_base = OTHER; note = 2'-O-methyladenosine-3'-phosphate
  modified_base 18: mod_base = OTHER; note = 2'-fluorouridine-3'-phosphate
  modified_base 19: mod_base = OTHER; note = 2'-O-methylguanosine-3'-phosphate
  modified_base 20: mod_base = OTHER; note = 2'-fluoroadenosine-3'-phosphate
  modified_base 21: mod_base = OTHER; note = 2'-O-methylguanosine-3'-phosphorothioate
  modified_base 22: mod_base = OTHER; note = 2'-O-methyladenosine-3'-phosphorothioate
  modified_base 23: mod_base = OTHER; note = 2'-O-methyluridine-3'-phosphate
tacaggttaataaacaatgagat

SEQ ID NO: 148 - RNA, 23 nt, synthetic construct
  source 1..23: mol_type = other RNA; note = Description of Artificial Sequence: Synthetic oligonucleotide
  modified_base 1: mod_base = OTHER; note = 2'-O-methyladenosine-3'-phosphorothioate
  modified_base 2: mod_base = OTHER; note = 2'-fluoroadenosine-3'-phosphorothioate
  modified_base 3: mod_base = OTHER; note = 2'-O-methyladenosine-3'-phosphate
  modified_base 4: mod_base = OTHER; note = 2'-fluoroguanosine-3'-phosphate
  modified_base 5: mod_base = OTHER; note = 2'-O-methylguanosine-3'-phosphate
  modified_base 6: mod_base = OTHER; note = 2'-fluoroguanosine-3'-phosphate
  modified_base 7: mod_base = OTHER; note = 2'-O-methyladenosine-3'-phosphate
  modified_base 8: mod_base = OTHER; note = 2'-fluorouridine-3'-phosphate
  modified_base 9: mod_base = OTHER; note = 2'-O-methyluridine-3'-phosphate
  modified_base 10: mod_base = OTHER; note = 2'-fluoroguanosine-3'-phosphate
  modified_base 11: mod_base = OTHER; note = 2'-O-methylcytidine-3'-phosphate
  modified_base 12: mod_base = OTHER; note = 2'-O-methyluridine-3'-phosphate
  modified_base 13: mod_base = OTHER; note = 2'-O-methyladenosine-3'-phosphate
  modified_base 14: mod_base = OTHER; note = 2'-fluorouridine-3'-phosphate
  modified_base 15: mod_base = OTHER; note = 2'-O-methyluridine-3'-phosphate
  modified_base 16: mod_base = OTHER; note = 2'-fluorouridine-3'-phosphate
  modified_base 17: mod_base = OTHER; note = 2'-O-methyluridine-3'-phosphate
  modified_base 18: mod_base = OTHER; note = 2'-fluoroguanosine-3'-phosphate
  modified_base 19: mod_base = OTHER; note = 2'-O-methyluridine-3'-phosphate
  modified_base 20: mod_base = OTHER; note = 2'-fluorouridine-3'-phosphate
  modified_base 21: mod_base = OTHER; note = 2'-O-methylguanosine-3'-phosphorothioate
  modified_base 22: mod_base = OTHER; note = 2'-O-methylguanosine-3'-phosphorothioate
  modified_base 23: mod_base = OTHER; note = 2'-O-methyladenosine-3'-phosphate
aaagggattgctattttgttgga

SEQ ID NO: 149 - RNA, 23 nt, synthetic construct
  source 1..23: mol_type = other RNA; note = Description of Artificial Sequence: Synthetic oligonucleotide
  modified_base 1: mod_base = OTHER; note = 2'-O-methyladenosine-3'-phosphorothioate
  modified_base 2: mod_base = OTHER; note = 2'-fluoroadenosine-3'-phosphorothioate
  modified_base 3: mod_base = OTHER; note = 2'-O-methyluridine-3'-phosphate
  modified_base 4: mod_base = OTHER; note = 2'-fluoroadenosine-3'-phosphate
  modified_base 5: mod_base = OTHER; note = 2'-O-methylcytidine-3'-phosphate
  modified_base 6: mod_base = OTHER; note = 2'-fluoroadenosine-3'-phosphate
  modified_base 7: mod_base = OTHER; note = 2'-O-methylguanosine-3'-phosphate
  modified_base 8: mod_base = OTHER; note = 2'-fluoroguanosine-3'-phosphate
  modified_base 9: mod_base = OTHER; note = 2'-O-methyluridine-3'-phosphate
  modified_base 10: mod_base = OTHER; note = 2'-fluorouridine-3'-phosphate
  modified_base 11: mod_base = OTHER; note = 2'-O-methyladenosine-3'-phosphate
  modified_base 12: mod_base = OTHER; note = 2'-O-methyladenosine-3'-phosphate
  modified_base 13: mod_base = OTHER; note = 2'-O-methyluridine-3'-phosphate
  modified_base 14: mod_base = OTHER; note = 2'-fluoroadenosine-3'-phosphate
  modified_base 15: mod_base = OTHER; note = 2'-O-methyladenosine-3'-phosphate
  modified_base 16: mod_base = OTHER; note = 2'-fluoroadenosine-3'-phosphate
  modified_base 17: mod_base = OTHER; note = 2'-O-methylcytidine-3'-phosphate
  modified_base 18: mod_base = OTHER; note = 2'-fluoroadenosine-3'-phosphate
  modified_base 19: mod_base = OTHER; note = 2'-O-methyladenosine-3'-phosphate
  modified_base 20: mod_base = OTHER; note = 2'-fluorouridine-3'-phosphate
  modified_base 21: mod_base = OTHER; note = 2'-O-methylguanosine-3'-phosphorothioate
  modified_base 22: mod_base = OTHER; note = 2'-O-methyladenosine-3'-phosphorothioate
  modified_base 23: mod_base = OTHER; note = 2'-O-methylguanosine-3'-phosphate
aatacaggttaataaacaatgag

SEQ ID NO: 150 - RNA, 23 nt, synthetic construct
  source 1..23: mol_type = other RNA; note = Description of Artificial Sequence: Synthetic oligonucleotide
  modified_base 1: mod_base = OTHER; note = 2'-O-methyluridine-3'-phosphorothioate
  modified_base 2: mod_base = OTHER; note = 2'-fluorouridine -3'-phosphorothioate
  modified_base 3: mod_base = OTHER; note = 2'-O-methylguanosine-3'-phosphate
  modified_base 4: mod_base = OTHER; note = 2'-fluoroadenosine-3'-phosphate
  modified_base 5: mod_base = OTHER; note = 2'-O-methyluridine-3'-phosphate
  modified_base 6: mod_base = OTHER; note = 2'-fluoroadenosine-3'-phosphate
  modified_base 7: mod_base = OTHER; note = 2'-O-methyluridine-3'-phosphate
  modified_base 8: mod_base = OTHER; note = 2'-fluorocytidine-3'-phosphate
  modified_base 9: mod_base = OTHER; note = 2'-O-methyluridine-3'-phosphate
  modified_base 10: mod_base = OTHER; note = 2'-fluorouridine-3'-phosphate
  modified_base 11: mod_base = OTHER; note = 2'-O-methylcytidine-3'-phosphate
  modified_base 12: mod_base = OTHER; note = 2'-O-methylcytidine-3'-phosphate
  modified_base 13: mod_base = OTHER; note = 2'-O-methylcytidine-3'-phosphate
  modified_base 14: mod_base = OTHER; note = 2'-fluoroadenosine-3'-phosphate
  modified_base 15: mod_base = OTHER; note = 2'-O-methylguanosine-3'-phosphate
  modified_base 16: mod_base = OTHER; note = 2'-fluorocytidine-3'-phosphate
  modified_base 17: mod_base = OTHER; note = 2'-O-methyluridine-3'-phosphate
  modified_base 18: mod_base = OTHER; note = 2'-fluoroguanosine-3'-phosphate
  modified_base 19: mod_base = OTHER; note = 2'-O-methyladenosine-3'-phosphate
  modified_base 20: mod_base = OTHER; note = 2'-fluorouridine-3'-phosphate
  modified_base 21: mod_base = OTHER; note = 2'-O-methyladenosine-3'-phosphorothioate
  modified_base 22: mod_base = OTHER; note = 2'-O-methylguanosine-3'-phosphorothioate
  modified_base 23: mod_base = OTHER; note = 2'-O-methyladenosine-3'-phosphate
ttgatatcttcccagctgataga

SEQ ID NO: 151 - RNA, 23 nt, synthetic construct
  source 1..23: mol_type = other RNA; note = Description of Artificial Sequence: Synthetic oligonucleotide
  modified_base 1: mod_base = OTHER; note = 2'-O-methyluridine-3'-phosphorothioate
  modified_base 2: mod_base = OTHER; note = 2'-fluorouridine -3'-phosphorothioate
  modified_base 3: mod_base = OTHER; note = 2'-O-methylcytidine-3'-phosphate
  modified_base 4: mod_base = OTHER; note = 2'-fluorouridine-3'-phosphate
  modified_base 5: mod_base = OTHER; note = 2'-O-methyladenosine-3'-phosphate
  modified_base 6: mod_base = OTHER; note = 2'-fluoroadenosine-3'-phosphate
  modified_base 7: mod_base = OTHER; note = 2'-O-methyladenosine-3'-phosphate
  modified_base 8: mod_base = OTHER; note = 2'-fluoroadenosine-3'-phosphate
  modified_base 9: mod_base = OTHER; note = 2'-O-methylguanosine-3'-phosphate
  modified_base 10: mod_base = OTHER; note = 2'-fluoroguanosine-3'-phosphate
  modified_base 11: mod_base = OTHER; note = 2'-O-methyluridine-3'-phosphate
  modified_base 12: mod_base = OTHER; note = 2'-O-methyluridine-3'-phosphate
  modified_base 13: mod_base = OTHER; note = 2'-O-methylcytidine-3'-phosphate
  modified_base 14: mod_base = OTHER; note = 2'-fluorocytidine-3'-phosphate
  modified_base 15: mod_base = OTHER; note = 2'-O-methyluridine-3'-phosphate
  modified_base 16: mod_base = OTHER; note = 2'-fluoroadenosine-3'-phosphate
  modified_base 17: mod_base = OTHER; note = 2'-O-methylguanosine-3'-phosphate
  modified_base 18: mod_base = OTHER; note = 2'-fluoroguanosine-3'-phosphate
  modified_base 19: mod_base = OTHER; note = 2'-O-methyladenosine-3'-phosphate
  modified_base 20: mod_base = OTHER; note = 2'-fluorocytidine-3'-phosphate
  modified_base 21: mod_base = OTHER; note = 2'-O-methyladenosine-3'-phosphorothioate
  modified_base 22: mod_base = OTHER; note = 2'-O-methylcytidine-3'-phosphorothioate
  modified_base 23: mod_base = OTHER; note = 2'-O-methylcytidine-3'-phosphate
ttctaaaaggttcctaggacacc

SEQ ID NO: 152 - RNA, 23 nt, synthetic construct
  source 1..23: mol_type = other RNA; note = Description of Artificial Sequence: Synthetic oligonucleotide
  modified_base 1: mod_base = OTHER; note = 2'-O-methyladenosine-3'-phosphorothioate
  modified_base 2: mod_base = OTHER; note = 2'-fluoroguanosine-3'-phosphorothioate
  modified_base 3: mod_base = OTHER; note = 2'-O-methylguanosine-3'-phosphate
  modified_base 4: mod_base = OTHER; note = 2'-fluoroguanosine-3'-phosphate
  modified_base 5: mod_base = OTHER; note = 2'-O-methyladenosine-3'-phosphate
  modified_base 6: mod_base = OTHER; note = 2'-fluorouridine-3'-phosphate
  modified_base 7: mod_base = OTHER; note = 2'-O-methyluridine-3'-phosphate
  modified_base 8: mod_base = OTHER; note = 2'-fluoroguanosine-3'-phosphate
  modified_base 9: mod_base = OTHER; note = 2'-O-methylcytidine-3'-phosphate
  modified_base 10: mod_base = OTHER; note = 2'-fluorouridine-3'-phosphate
  modified_base 11: mod_base = OTHER; note = 2'-O-methyladenosine-3'-phosphate
  modified_base 12: mod_base = OTHER; note = 2'-O-methyluridine-3'-phosphate
  modified_base 13: mod_base = OTHER; note = 2'-O-methyluridine-3'-phosphate
  modified_base 14: mod_base = OTHER; note = 2'-fluorouridine-3'-phosphate
  modified_base 15: mod_base = OTHER; note = 2'-O-methyluridine-3'-phosphate
  modified_base 16: mod_base = OTHER; note = 2'-fluoroguanosine-3'-phosphate
  modified_base 17: mod_base = OTHER; note = 2'-O-methyluridine-3'-phosphate
  modified_base 18: mod_base = OTHER; note = 2'-fluorouridine-3'-phosphate
  modified_base 19: mod_base = OTHER; note = 2'-O-methylguanosine-3'-phosphate
  modified_base 20: mod_base = OTHER; note = 2'-fluoroguanosine-3'-phosphate
  modified_base 21: mod_base = OTHER; note = 2'-O-methyladenosine-3'-phosphorothioate
  modified_base 22: mod_base = OTHER; note = 2'-O-methyladenosine-3'-phosphorothioate
  modified_base 23: mod_base = OTHER; note = 2'-O-methyladenosine-3'-phosphate
agggattgctattttgttggaaa

SEQ ID NO: 153 - RNA, 23 nt, synthetic construct
  source 1..23: mol_type = other RNA; note = Description of Artificial Sequence: Synthetic oligonucleotide
  modified_base 1: mod_base = OTHER; note = 2'-O-methyladenosine-3'-phosphorothioate
  modified_base 2: mod_base = OTHER; note = 2'-fluorouridine -3'-phosphorothioate
  modified_base 3: mod_base = OTHER; note = 2'-O-methylcytidine-3'-phosphate
  modified_base 4: mod_base = OTHER; note = 2'-fluoroadenosine-3'-phosphate
  modified_base 5: mod_base = OTHER; note = 2'-O-methylguanosine-3'-phosphate
  modified_base 6: mod_base = OTHER; note = 2'-fluorouridine-3'-phosphate
  modified_base 7: mod_base = OTHER; note = 2'-O-methylguanosine-3'-phosphate
  modified_base 8: mod_base = OTHER; note = 2'-fluorocytidine-3'-phosphate
  modified_base 9: mod_base = OTHER; note = 2'-O-methylcytidine-3'-phosphate
  modified_base 10: mod_base = OTHER; note = 2'-fluorouridine-3'-phosphate
  modified_base 11: mod_base = OTHER; note = 2'-O-methyluridine-3'-phosphate
  modified_base 12: mod_base = OTHER; note = 2'-O-methyluridine-3'-phosphate
  modified_base 13: mod_base = OTHER; note = 2'-O-methylcytidine-3'-phosphate
  modified_base 14: mod_base = OTHER; note = 2'-fluorocytidine-3'-phosphate
  modified_base 15: mod_base = OTHER; note = 2'-O-methylguanosine-3'-phosphate
  modified_base 16: mod_base = OTHER; note = 2'-fluorocytidine-3'-phosphate
  modified_base 17: mod_base = OTHER; note = 2'-O-methyladenosine-3'-phosphate
  modified_base 18: mod_base = OTHER; note = 2'-fluorocytidine-3'-phosphate
  modified_base 19: mod_base = OTHER; note = 2'-O-methyladenosine-3'-phosphate
  modified_base 20: mod_base = OTHER; note = 2'-fluorocytidine-3'-phosphate
  modified_base 21: mod_base = OTHER; note = 2'-O-methylcytidine-3'-phosphorothioate
  modified_base 22: mod_base = OTHER; note = 2'-O-methylcytidine-3'-phosphorothioate
  modified_base 23: mod_base = OTHER; note = 2'-O-methylcytidine-3'-phosphate
atcagtgcctttccgcacacccc

SEQ ID NO: 154 - RNA, 23 nt, synthetic construct
  source 1..23: mol_type = other RNA; note = Description of Artificial Sequence: Synthetic oligonucleotide
  modified_base 1: mod_base = OTHER; note = 2'-O-methyladenosine-3'-phosphorothioate
  modified_base 2: mod_base = OTHER; note = 2'-fluorouridine -3'-phosphorothioate
  modified_base 3: mod_base = OTHER; note = 2'-O-methylguanosine-3'-phosphate
  modified_base 4: mod_base = OTHER; note = 2'-fluoroadenosine-3'-phosphate
  modified_base 5: mod_base = OTHER; note = 2'-O-methyluridine-3'-phosphate
  modified_base 6: mod_base = OTHER; note = 2'-fluoroadenosine-3'-phosphate
  modified_base 7: mod_base = OTHER; note = 2'-O-methyladenosine-3'-phosphate
  modified_base 8: mod_base = OTHER; note = 2'-fluoroadenosine-3'-phosphate
  modified_base 9: mod_base = OTHER; note = 2'-O-methylguanosine-3'-phosphate
  modified_base 10: mod_base = OTHER; note = 2'-fluorouridine-3'-phosphate
  modified_base 11: mod_base = OTHER; note = 2'-O-methyladenosine-3'-phosphate
  modified_base 12: mod_base = OTHER; note = 2'-O-methylcytidine-3'-phosphate
  modified_base 13: mod_base = OTHER; note = 2'-O-methyluridine-3'-phosphate
  modified_base 14: mod_base = OTHER; note = 2'-fluoroguanosine-3'-phosphate
  modified_base 15: mod_base = OTHER; note = 2'-O-methylguanosine-3'-phosphate
  modified_base 16: mod_base = OTHER; note = 2'-fluorouridine-3'-phosphate
  modified_base 17: mod_base = OTHER; note = 2'-O-methyluridine-3'-phosphate
  modified_base 18: mod_base = OTHER; note = 2'-fluorouridine-3'-phosphate
  modified_base 19: mod_base = OTHER; note = 2'-O-methylcytidine-3'-phosphate
  modified_base 20: mod_base = OTHER; note = 2'-fluoroadenosine-3'-phosphate
  modified_base 21: mod_base = OTHER; note = 2'-O-methyladenosine-3'-phosphorothioate
  modified_base 22: mod_base = OTHER; note = 2'-O-methyladenosine-3'-phosphorothioate
  modified_base 23: mod_base = OTHER; note = 2'-O-methyladenosine-3'-phosphate
atgataaagtactggtttcaaaa

SEQ ID NO: 155 - RNA, 23 nt, synthetic construct
  source 1..23: mol_type = other RNA; note = Description of Artificial Sequence: Synthetic oligonucleotide
  modified_base 1: mod_base = OTHER; note = 2'-O-methyluridine-3'-phosphorothioate
  modified_base 2: mod_base = OTHER; note = 2'-fluoroadenosine-3'-phosphorothioate
  modified_base 3: mod_base = OTHER; note = 2'-O-methyluridine-3'-phosphate
  modified_base 4: mod_base = OTHER; note = 2'-fluoroadenosine-3'-phosphate
  modified_base 5: mod_base = OTHER; note = 2'-O-methyluridine-3'-phosphate
  modified_base 6: mod_base = OTHER; note = 2'-fluoroadenosine-3'-phosphate
  modified_base 7: mod_base = OTHER; note = 2'-O-methyluridine-3'-phosphate
  modified_base 8: mod_base = OTHER; note = 2'-fluoroadenosine-3'-phosphate
  modified_base 9: mod_base = OTHER; note = 2'-O-methylguanosine-3'-phosphate
  modified_base 10: mod_base = OTHER; note = 2'-fluoroadenosine-3'-phosphate
  modified_base 11: mod_base = OTHER; note = 2'-O-methylcytidine-3'-phosphate
  modified_base 12: mod_base = OTHER; note = 2'-O-methyluridine-3'-phosphate
  modified_base 13: mod_base = OTHER; note = 2'-O-methyluridine-3'-phosphate
  modified_base 14: mod_base = OTHER; note = 2'-fluorouridine-3'-phosphate
  modified_base 15: mod_base = OTHER; note = 2'-O-methylguanosine-3'-phosphate
  modified_base 16: mod_base = OTHER; note = 2'-fluoroguanosine-3'-phosphate
  modified_base 17: mod_base = OTHER; note = 2'-O-methyladenosine-3'-phosphate
  modified_base 18: mod_base = OTHER; note = 2'-fluoroadenosine-3'-phosphate
  modified_base 19: mod_base = OTHER; note = 2'-O-methylguanosine-3'-phosphate
  modified_base 20: mod_base = OTHER; note = 2'-fluorouridine-3'-phosphate
  modified_base 21: mod_base = OTHER; note = 2'-O-methyladenosine-3'-phosphorothioate
  modified_base 22: mod_base = OTHER; note = 2'-O-methylcytidine-3'-phosphorothioate
  modified_base 23: mod_base = OTHER; note = 2'-O-methyluridine-3'-phosphate
tatatatagactttggaagtact

SEQ ID NO: 156 - RNA, 23 nt, synthetic construct
  source 1..23: mol_type = other RNA; note = Description of Artificial Sequence: Synthetic oligonucleotide
  modified_base 1: mod_base = OTHER; note = 2'-O-methyladenosine-3'-phosphorothioate
  modified_base 2: mod_base = OTHER; note = 2'-fluorouridine -3'-phosphorothioate
  modified_base 3: mod_base = OTHER; note = 2'-O-methyluridine-3'-phosphate
  modified_base 4: mod_base = OTHER; note = 2'-fluorouridine-3'-phosphate
  modified_base 5: mod_base = OTHER; note = 2'-O-methylcytidine-3'-phosphate
  modified_base 6: mod_base = OTHER; note = 2'-fluorouridine-3'-phosphate
  modified_base 7: mod_base = OTHER; note = 2'-O-methyladenosine-3'-phosphate
  modified_base 8: mod_base = OTHER; note = 2'-fluoroadenosine-3'-phosphate
  modified_base 9: mod_base = OTHER; note = 2'-O-methyladenosine-3'-phosphate
  modified_base 10: mod_base = OTHER; note = 2'-fluoroadenosine-3'-phosphate
  modified_base 11: mod_base = OTHER; note = 2'-O-methylguanosine-3'-phosphate
  modified_base 12: mod_base = OTHER; note = 2'-O-methylguanosine-3'-phosphate
  modified_base 13: mod_base = OTHER; note = 2'-O-methyluridine-3'-phosphate
  modified_base 14: mod_base = OTHER; note = 2'-fluorouridine-3'-phosphate
  modified_base 15: mod_base = OTHER; note = 2'-O-methylcytidine-3'-phosphate
  modified_base 16: mod_base = OTHER; note = 2'-fluorocytidine-3'-phosphate
  modified_base 17: mod_base = OTHER; note = 2'-O-methyluridine-3'-phosphate
  modified_base 18: mod_base = OTHER; note = 2'-fluoroadenosine-3'-phosphate
  modified_base 19: mod_base = OTHER; note = 2'-O-methylguanosine-3'-phosphate
  modified_base 20: mod_base = OTHER; note = 2'-fluoroguanosine-3'-phosphate
  modified_base 21: mod_base = OTHER; note = 2'-O-methyladenosine-3'-phosphorothioate
  modified_base 22: mod_base = OTHER; note = 2'-O-methylcytidine-3'-phosphorothioate
  modified_base 23: mod_base = OTHER; note = 2'-O-methyladenosine-3'-phosphate
atttctaaaaggttcctaggaca

SEQ ID NO: 157 - RNA, 23 nt, synthetic construct
  source 1..23: mol_type = other RNA; note = Description of Artificial Sequence: Synthetic oligonucleotide
  modified_base 1: mod_base = OTHER; note = 2'-O-methyluridine-3'-phosphorothioate
  modified_base 2: mod_base = OTHER; note = 2'-fluorouridine -3'-phosphorothioate
  modified_base 3: mod_base = OTHER; note = 2'-O-methylcytidine-3'-phosphate
  modified_base 4: mod_base = OTHER; note = 2'-fluorocytidine-3'-phosphate
  modified_base 5: mod_base = OTHER; note = 2'-O-methyladenosine-3'-phosphate
  modified_base 6: mod_base = OTHER; note = 2'-fluoroadenosine-3'-phosphate
  modified_base 7: mod_base = OTHER; note = 2'-O-methyladenosine-3'-phosphate
  modified_base 8: mod_base = OTHER; note = 2'-fluoroadenosine-3'-phosphate
  modified_base 9: mod_base = OTHER; note = 2'-O-methyluridine-3'-phosphate
  modified_base 10: mod_base = OTHER; note = 2'-fluorouridine-3'-phosphate
  modified_base 11: mod_base = OTHER; note = 2'-O-methyluridine-3'-phosphate
  modified_base 12: mod_base = OTHER; note = 2'-O-methyluridine-3'-phosphate
  modified_base 13: mod_base = OTHER; note = 2'-O-methylcytidine-3'-phosphate
  modified_base 14: mod_base = OTHER; note = 2'-fluorocytidine-3'-phosphate
  modified_base 15: mod_base = OTHER; note = 2'-O-methyluridine-3'-phosphate
  modified_base 16: mod_base = OTHER; note = 2'-fluorocytidine-3'-phosphate
  modified_base 17: mod_base = OTHER; note = 2'-O-methyladenosine-3'-phosphate
  modified_base 18: mod_base = OTHER; note = 2'-fluoroguanosine-3'-phosphate
  modified_base 19: mod_base = OTHER; note = 2'-O-methylguanosine-3'-phosphate
  modified_base 20: mod_base = OTHER; note = 2'-fluoroadenosine-3'-phosphate
  modified_base 21: mod_base = OTHER; note = 2'-O-methylguanosine-3'-phosphorothioate
  modified_base 22: mod_base = OTHER; note = 2'-O-methyladenosine-3'-phosphorothioate
  modified_base 23: mod_base = OTHER; note = 2'-O-methyladenosine-3'-phosphate
ttccaaaattttcctcaggagaa

SEQ ID NO: 158 - RNA, 23 nt, synthetic construct
  source 1..23: mol_type = other RNA; note = Description of Artificial Sequence: Synthetic oligonucleotide
  modified_base 1: mod_base = OTHER; note = 2'-O-methyladenosine-3'-phosphorothioate
  modified_base 2: mod_base = OTHER; note = 2'-fluorouridine -3'-phosphorothioate
  modified_base 3: mod_base = OTHER; note = 2'-O-methyluridine-3'-phosphate
  modified_base 4: mod_base = OTHER; note = 2'-fluorouridine-3'-phosphate
  modified_base 5: mod_base = OTHER; note = 2'-O-methylcytidine-3'-phosphate
  modified_base 6: mod_base = OTHER; note = 2'-fluoroadenosine-3'-phosphate
  modified_base 7: mod_base = OTHER; note = 2'-O-methylguanosine-3'-phosphate
  modified_base 8: mod_base = OTHER; note = 2'-fluorocytidine-3'-phosphate
  modified_base 9: mod_base = OTHER; note = 2'-O-methyladenosine-3'-phosphate
  modified_base 10: mod_base = OTHER; note = 2'-fluoroadenosine-3'-phosphate
  modified_base 11: mod_base = OTHER; note = 2'-O-methylcytidine-3'-phosphate
  modified_base 12: mod_base = OTHER; note = 2'-O-methyladenosine-3'-phosphate
  modified_base 13: mod_base = OTHER; note = 2'-O-methyluridine-3'-phosphate
  modified_base 14: mod_base = OTHER; note = 2'-fluorouridine-3'-phosphate
  modified_base 15: mod_base = OTHER; note = 2'-O-methylcytidine-3'-phosphate
  modified_base 16: mod_base = OTHER; note = 2'-fluorocytidine-3'-phosphate
  modified_base 17: mod_base = OTHER; note = 2'-O-methylguanosine-3'-phosphate
  modified_base 18: mod_base = OTHER; note = 2'-fluoroguanosine-3'-phosphate
  modified_base 19: mod_base = OTHER; note = 2'-O-methyladenosine-3'-phosphate
  modified_base 20: mod_base = OTHER; note = 2'-fluoroguanosine-3'-phosphate
  modified_base 21: mod_base = OTHER; note = 2'-O-methylcytidine-3'-phosphorothioate
  modified_base 22: mod_base = OTHER; note = 2'-O-methyladenosine-3'-phosphorothioate
  modified_base 23: mod_base = OTHER; note = 2'-O-methyluridine-3'-phosphate
atttcagcaacattccggagcat

SEQ ID NO: 159 - RNA, 23 nt, synthetic construct
  source 1..23: mol_type = other RNA; note = Description of Artificial Sequence: Synthetic oligonucleotide
  modified_base 1: mod_base = OTHER; note = 2'-O-methyluridine-3'-phosphorothioate
  modified_base 2: mod_base = OTHER; note = 2'-fluoroadenosine-3'-phosphorothioate
  modified_base 3: mod_base = OTHER; note = 2'-O-methyluridine-3'-phosphate
  modified_base 4: mod_base = OTHER; note = 2'-fluorouridine-3'-phosphate
  modified_base 5: mod_base = OTHER; note = 2'-O-methylguanosine-3'-phosphate
  modified_base 6: mod_base = OTHER; note = 2'-fluoroguanosine-3'-phosphate
  modified_base 7: mod_base = OTHER; note = 2'-O-methyluridine-3'-phosphate
  modified_base 8: mod_base = OTHER; note = 2'-fluorocytidine-3'-phosphate
  modified_base 9: mod_base = OTHER; note = 2'-O-methyluridine-3'-phosphate
  modified_base 10: mod_base = OTHER; note = 2'-fluorocytidine-3'-phosphate
  modified_base 11: mod_base = OTHER; note = 2'-O-methylcytidine-3'-phosphate
  modified_base 12: mod_base = OTHER; note = 2'-O-methylcytidine-3'-phosphate
  modified_base 13: mod_base = OTHER; note = 2'-O-methylcytidine-3'-phosphate
  modified_base 14: mod_base = OTHER; note = 2'-fluoroadenosine-3'-phosphate
  modified_base 15: mod_base = OTHER; note = 2'-O-methylcytidine-3'-phosphate
  modified_base 16: mod_base = OTHER; note = 2'-fluoroadenosine-3'-phosphate
  modified_base 17: mod_base = OTHER; note = 2'-O-methyladenosine-3'-phosphate
  modified_base 18: mod_base = OTHER; note = 2'-fluoroadenosine-3'-phosphate
  modified_base 19: mod_base = OTHER; note = 2'-O-methylcytidine-3'-phosphate
  modified_base 20: mod_base = OTHER; note = 2'-fluoroadenosine-3'-phosphate
  modified_base 21: mod_base = OTHER; note = 2'-O-methylcytidine-3'-phosphorothioate
  modified_base 22: mod_base = OTHER; note = 2'-O-methyladenosine-3'-phosphorothioate
  modified_base 23: mod_base = OTHER; note = 2'-O-methylguanosine-3'-phosphate
tattggtctccccacaaacacag

SEQ ID NO: 160 - RNA, 21 nt, synthetic construct
  source 1..21: mol_type = other RNA; note = Description of Artificial Sequence: Synthetic oligonucleotide
  modified_base 1: mod_base = OTHER; note = 2'-fluoroguanosine-3'-phosphorothioate
  modified_base 2: mod_base = OTHER; note = 2'-O-methyladenosine-3'-phosphorothioate
  modified_base 3: mod_base = OTHER; note = 2'-fluoroadenosine-3'-phosphate
  modified_base 4: mod_base = OTHER; note = 2'-O-methyluridine-3'-phosphate
  modified_base 5: mod_base = OTHER; note = 2'-fluoroguanosine-3'-phosphate
  modified_base 6: mod_base = OTHER; note = 2'-O-methyluridine-3'-phosphate
  modified_base 7: mod_base = OTHER; note = 2'-fluoroguanosine-3'-phosphate
  modified_base 8: mod_base = OTHER; note = 2'-O-methyladenosine-3'-phosphate
  modified_base 9: mod_base = OTHER; note = 2'-fluoroadenosine-3'-phosphate
  modified_base 10: mod_base = OTHER; note = 2'-fluoroadenosine-3'-phosphate
  modified_base 11: mod_base = OTHER; note = 2'-fluoroguanosine-3'-phosphate
  modified_base 12: mod_base = OTHER; note = 2'-O-methyluridine-3'-phosphate
  modified_base 13: mod_base = OTHER; note = 2'-fluorocytidine-3'-phosphate
  modified_base 14: mod_base = OTHER; note = 2'-O-methyladenosine-3'-phosphate
  modified_base 15: mod_base = OTHER; note = 2'-fluorouridine-3'-phosphate
  modified_base 16: mod_base = OTHER; note = 2'-O-methylcytidine-3'-phosphate
  modified_base 17: mod_base = OTHER; note = 2'-fluoroguanosine-3'-phosphate
  modified_base 18: mod_base = OTHER; note = 2'-O-methyladenosine-3'-phosphate
  modified_base 19: mod_base = OTHER; note = 2'-fluorocytidine-3'-phosphate
  modified_base 20: mod_base = OTHER; note = 2'-O-methyladenosine-3'-phosphate
  modified_base 21: mod_base = OTHER; note = 2'-fluoroadenosine-3'-phosphate N-[tris(GalNAc-alkyl)-amidodecanoyl)]-4-hydroxyprolinol Hyp-(GalNAc-alkyl)3
gaatgtgaaagtcatcgacaa

SEQ ID NO: 161 - DNA, 22 bp, synthetic construct
  source 1..22: mol_type = other DNA; note = Description of Artificial Sequence: Synthetic oligonucleotide
  misc_difference 1: note = inverted abasic DNA (2-hydroxymethyl-tetrahydrofurane-5-phosphate)
  modified_base 2: mod_base = OTHER; note = 2'-O-methylguanosine-3'-phosphorothioate
  modified_base 3: mod_base = OTHER; note = 2'-O-methyladenosine-3'-phosphorothioate
  modified_base 4: mod_base = OTHER; note = 2'-fluoroadenosine-3'-phosphate
  modified_base 5: mod_base = OTHER; note = 2'-O-methyluridine-3'-phosphate
  modified_base 6: mod_base = OTHER; note = 2'-fluoroguanosine-3'-phosphate
  modified_base 7: mod_base = OTHER; note = 2'-O-methyluridine-3'-phosphate
  modified_base 8: mod_base = OTHER; note = 2'-fluoroguanosine-3'-phosphate
  modified_base 9: mod_base = OTHER; note = 2'-O-methyladenosine-3'-phosphate
  modified_base 10: mod_base = OTHER; note = 2'-fluoroadenosine-3'-phosphate
  modified_base 11: mod_base = OTHER; note = 2'-fluoroadenosine-3'-phosphate
  modified_base 12: mod_base = OTHER; note = 2'-fluoroguanosine-3'-phosphate
  modified_base 13: mod_base = OTHER; note = 2'-O-methyluridine-3'-phosphate
  modified_base 14: mod_base = OTHER; note = 2'-fluorocytidine-3'-phosphate
  modified_base 15: mod_base = OTHER; note = 2'-O-methyladenosine-3'-phosphate
  modified_base 16: mod_base = OTHER; note = 2'-fluorouridine-3'-phosphate
  modified_base 17: mod_base = OTHER; note = 2'-O-methylcytidine-3'-phosphate
  modified_base 18: mod_base = OTHER; note = 2'-fluoroguanosine-3'-phosphate
  modified_base 19: mod_base = OTHER; note = 2'-O-methyladenosine-3'-phosphate
  modified_base 20: mod_base = OTHER; note = 2'-fluorocytidine-3'-phosphate
  modified_base 21: mod_base = OTHER; note = 2'-O-methyladenosine-3'-phosphate
  modified_base 22: mod_base = OTHER; note = 2'-fluoroadenosine-3'-phosphate N-[tris(GalNAc-alkyl)-amidodecanoyl)]-4-hydroxyprolinol Hyp-(GalNAc-alkyl)3
  misc_feature 1: note = DNA
  misc_feature 2..22: note = RNA
ngaatgtgaaagtcatcgacaa

SEQ ID NO: 162 - RNA, 21 nt, synthetic construct
  source 1..21: mol_type = other RNA; note = Description of Artificial Sequence: Synthetic oligonucleotide
  modified_base 1: mod_base = OTHER; note = 2'-O-methylguanosine-3'-phosphorothioate
  modified_base 2: mod_base = OTHER; note = 2'-O-methyladenosine-3'-phosphorothioate
  modified_base 3: mod_base = OTHER; note = 2'-O-methyladenosine-3'-phosphate
  modified_base 4: mod_base = OTHER; note = 2'-O-methyluridine-3'-phosphate
  modified_base 5: mod_base = OTHER; note = 2'-O-methylguanosine-3'-phosphate
  modified_base 6: mod_base = OTHER; note = 2'-O-methyluridine-3'-phosphate
  modified_base 7: mod_base = OTHER; note = 2'-fluoroguanosine-3'-phosphate
  modified_base 8: mod_base = OTHER; note = 2'-O-methyladenosine-3'-phosphate
  modified_base 9: mod_base = OTHER; note = 2'-fluoroadenosine-3'-phosphate
  modified_base 10: mod_base = OTHER; note = 2'-fluoroadenosine-3'-phosphate
  modified_base 11: mod_base = OTHER; note = 2'-fluoroguanosine-3'-phosphate
  modified_base 12: mod_base = OTHER; note = 2'-O-methyluridine-3'-phosphate
  modified_base 13: mod_base = OTHER; note = 2'-O-methylcytidine-3'-phosphate
  modified_base 14: mod_base = OTHER; note = 2'-O-methyladenosine-3'-phosphate
  modified_base 15: mod_base = OTHER; note = 2'-O-methyluridine-3'-phosphate
  modified_base 16: mod_base = OTHER; note = 2'-fluorocytidine-3'-phosphate
  modified_base 17: mod_base = OTHER; note = 2'-O-methylguanosine-3'-phosphate
  modified_base 18: mod_base = OTHER; note = 2'-O-methyladenosine-3'-phosphate
  modified_base 19: mod_base = OTHER; note = 2'-O-methylcytidine-3'-phosphate
  modified_base 20: mod_base = OTHER; note = 2'-O-methyladenosine-3'-phosphate
  modified_base 21: mod_base = OTHER; note = 2'-O-methyladenosine-3'-phosphate N-[tris(GalNAc-alkyl)-amidodecanoyl)]-4-hydroxyprolinol Hyp-(GalNAc-alkyl)3
gaatgtgaaagtcatcgacaa

SEQ ID NO: 163 - RNA, 21 nt, synthetic construct
  source 1..21: mol_type = other RNA; note = Description of Artificial Sequence: Synthetic oligonucleotide
  modified_base 1: mod_base = OTHER; note = 2'-O-methylguanosine-3'-phosphorothioate
  modified_base 2: mod_base = OTHER; note = 2'-O-methyladenosine-3'-phosphorothioate
  modified_base 3: mod_base = OTHER; note = 2'-O-methyladenosine-3'-phosphate
  modified_base 4: mod_base = OTHER; note = 2'-O-methyluridine-3'-phosphate
  modified_base 5: mod_base = OTHER; note = 2'-O-methylguanosine-3'-phosphate
  modified_base 6: mod_base = OTHER; note = 2'-O-methyluridine-3'-phosphate
  modified_base 7: mod_base = OTHER; note = 2'-fluoroguanosine-3'-phosphate
  modified_base 8: mod_base = OTHER; note = 2'-O-methyladenosine-3'-phosphate
  modified_base 9: mod_base = OTHER; note = 2'-fluoroadenosine-3'-phosphate
  modified_base 10: mod_base = OTHER; note = 2'-fluoroadenosine-3'-phosphate
  modified_base 11: mod_base = OTHER; note = 2'-fluoroguanosine-3'-phosphate
  modified_base 12: mod_base = OTHER; note = 2'-O-methyluridine-3'-phosphate
  modified_base 13: mod_base = OTHER; note = 2'-O-methylcytidine-3'-phosphate
  modified_base 14: mod_base = OTHER; note = 2'-O-methyladenosine-3'-phosphate
  modified_base 15: mod_base = OTHER; note = 2'-O-methyluridine-3'-phosphate
  modified_base 16: mod_base = OTHER; note = 2'-O-methylcytidine-3'-phosphate
  modified_base 17: mod_base = OTHER; note = 2'-O-methylguanosine-3'-phosphate
  modified_base 18: mod_base = OTHER; note = 2'-O-methyladenosine-3'-phosphate
  modified_base 19: mod_base = OTHER; note = 2'-O-methylcytidine-3'-phosphate
  modified_base 20: mod_base = OTHER; note = 2'-O-methyladenosine-3'-phosphate
  modified_base 21: mod_base = OTHER; note = 2'-O-methyladenosine-3'-phosphate N-[tris(GalNAc-alkyl)-amidodecanoyl)]-4-hydroxyprolinol Hyp-(GalNAc-alkyl)3
gaatgtgaaagtcatcgacaa

SEQ ID NO: 164 - RNA, 21 nt, synthetic construct
  source 1..21: mol_type = other RNA; note = Description of Artificial Sequence: Synthetic oligonucleotide
  modified_base 1: mod_base = OTHER; note = 2'-O-methylguanosine-3'-phosphorothioate
  modified_base 2: mod_base = OTHER; note = 2'-O-methyladenosine-3'-phosphorothioate
  modified_base 3: mod_base = OTHER; note = 2'-O-methyladenosine-3'-phosphate
  modified_base 4: mod_base = OTHER; note = 2'-O-methyluridine-3'-phosphate
  modified_base 5: mod_base = OTHER; note = 2'-O-methylguanosine-3'-phosphate
  modified_base 6: mod_base = OTHER; note = 2'-O-methyluridine-3'-phosphate
  modified_base 7: mod_base = OTHER; note = 2'-fluoroguanosine-3'-phosphate
  modified_base 8: mod_base = OTHER; note = 2'-O-methyladenosine-3'-phosphate
  modified_base 9: mod_base = OTHER; note = 2'-O-methyladenosine-3'-phosphate
  modified_base 10: mod_base = OTHER; note = 2'-fluoroadenosine-3'-phosphate
  modified_base 11: mod_base = OTHER; note = 2'-fluoroguanosine-3'-phosphate
  modified_base 12: mod_base = OTHER; note = 2'-O-methyluridine-3'-phosphate
  modified_base 13: mod_base = OTHER; note = 2'-O-methylcytidine-3'-phosphate
  modified_base 14: mod_base = OTHER; note = 2'-O-methyladenosine-3'-phosphate
  modified_base 15: mod_base = OTHER; note = 2'-O-methyluridine-3'-phosphate
  modified_base 16: mod_base = OTHER; note = 2'-O-methylcytidine-3'-phosphate
  modified_base 17: mod_base = OTHER; note = 2'-O-methylguanosine-3'-phosphate
  modified_base 18: mod_base = OTHER; note = 2'-O-methyladenosine-3'-phosphate
  modified_base 19: mod_base = OTHER; note = 2'-O-methylcytidine-3'-phosphate
  modified_base 20: mod_base = OTHER; note = 2'-O-methyladenosine-3'-phosphate
  modified_base 21: mod_base = OTHER; note = 2'-O-methyladenosine-3'-phosphate N-[tris(GalNAc-alkyl)-amidodecanoyl)]-4-hydroxyprolinol Hyp-(GalNAc-alkyl)3
gaatgtgaaagtcatcgacaa

SEQ ID NO: 165 - RNA, 21 nt, synthetic construct
  source 1..21: mol_type = other RNA; note = Description of Artificial Sequence: Synthetic oligonucleotide
  modified_base 1: mod_base = OTHER; note = 2'-O-methylguanosine-3'-phosphorothioate
  modified_base 2: mod_base = OTHER; note = 2'-O-methyladenosine-3'-phosphorothioate
  modified_base 3: mod_base = OTHER; note = 2'-O-methyladenosine-3'-phosphate
  modified_base 4: mod_base = OTHER; note = 2'-O-methyluridine-3'-phosphate
  modified_base 5: mod_base = OTHER; note = 2'-O-methylguanosine-3'-phosphate
  modified_base 6: mod_base = OTHER; note = 2'-O-methyluridine-3'-phosphate
  modified_base 7: mod_base = OTHER; note = 2'-fluoroguanosine-3'-phosphate
  modified_base 8: mod_base = OTHER; note = 2'-O-methyladenosine-3'-phosphate
  modified_base 9: mod_base = OTHER; note = 2'-O-methyladenosine-3'-phosphate
  modified_base 10: mod_base = OTHER; note = 2'-O-methyladenosine-3'-phosphate
  modified_base 11: mod_base = OTHER; note = 2'-fluoroguanosine-3'-phosphate
  modified_base 12: mod_base = OTHER; note = 2'-O-methyluridine-3'-phosphate
  modified_base 13: mod_base = OTHER; note = 2'-O-methylcytidine-3'-phosphate
  modified_base 14: mod_base = OTHER; note = 2'-O-methyladenosine-3'-phosphate
  modified_base 15: mod_base = OTHER; note = 2'-O-methyluridine-3'-phosphate
  modified_base 16: mod_base = OTHER; note = 2'-O-methylcytidine-3'-phosphate
  modified_base 17: mod_base = OTHER; note = 2'-fluoroguanosine-3'-phosphate
  modified_base 18: mod_base = OTHER; note = 2'-O-methyladenosine-3'-phosphate
  modified_base 19: mod_base = OTHER; note = 2'-O-methylcytidine-3'-phosphate
  modified_base 20: mod_base = OTHER; note = 2'-O-methyladenosine-3'-phosphate
  modified_base 21: mod_base = OTHER; note = 2'-O-methyladenosine-3'-phosphate N-[tris(GalNAc-alkyl)-amidodecanoyl)]-4-hydroxyprolinol Hyp-(GalNAc-alkyl)3
gaatgtgaaagtcatcgacaa

SEQ ID NO: 166 - RNA, 21 nt, synthetic construct
  source 1..21: mol_type = other RNA; note = Description of Artificial Sequence: Synthetic oligonucleotide
  modified_base 1: mod_base = OTHER; note = 2'-O-methylguanosine-3'-phosphorothioate
  modified_base 2: mod_base = OTHER; note = 2'-O-methyladenosine-3'-phosphorothioate
  modified_base 3: mod_base = OTHER; note = 2'-O-methyladenosine-3'-phosphate
  modified_base 4: mod_base = OTHER; note = 2'-O-methyluridine-3'-phosphate
  modified_base 5: mod_base = OTHER; note = 2'-O-methylguanosine-3'-phosphate
  modified_base 6: mod_base = OTHER; note = 2'-O-methyluridine-3'-phosphate
  modified_base 7: mod_base = OTHER; note = 2'-O-methylguanosine-3'-phosphate
  modified_base 8: mod_base = OTHER; note = 2'-O-methyladenosine-3'-phosphate
  modified_base 9: mod_base = OTHER; note = 2'-O-methyladenosine-3'-phosphate
  modified_base 10: mod_base = OTHER; note = 2'-O-methyladenosine-3'-phosphate
  modified_base 11: mod_base = OTHER; note = 2'-fluoroguanosine-3'-phosphate
  modified_base 12: mod_base = OTHER; note = 2'-O-methyluridine-3'-phosphate
  modified_base 13: mod_base = OTHER; note = 2'-O-methylcytidine-3'-phosphate
  modified_base 14: mod_base = OTHER; note = 2'-O-methyladenosine-3'-phosphate
  modified_base 15: mod_base = OTHER; note = 2'-O-methyluridine-3'-phosphate
  modified_base 16: mod_base = OTHER; note = 2'-O-methylcytidine-3'-phosphate
  modified_base 17: mod_base = OTHER; note = 2'-fluoroguanosine-3'-phosphate
  modified_base 18: mod_base = OTHER; note = 2'-O-methyladenosine-3'-phosphate
  modified_base 19: mod_base = OTHER; note = 2'-O-methylcytidine-3'-phosphate
  modified_base 20: mod_base = OTHER; note = 2'-O-methyladenosine-3'-phosphate
  modified_base 21: mod_base = OTHER; note = 2'-O-methyladenosine-3'-phosphate N-[tris(GalNAc-alkyl)-amidodecanoyl)]-4-hydroxyprolinol Hyp-(GalNAc-alkyl)3
gaatgtgaaagtcatcgacaa

SEQ ID NO: 167 - RNA, 21 nt, synthetic construct
  source 1..21: mol_type = other RNA; note = Description of Artificial Sequence: Synthetic oligonucleotide
  modified_base 1: mod_base = OTHER; note = 2'-O-methylguanosine-3'-phosphorothioate
  modified_base 2: mod_base = OTHER; note = 2'-O-methyladenosine-3'-phosphorothioate
  modified_base 3: mod_base = OTHER; note = 2'-O-methyladenosine-3'-phosphate
  modified_base 4: mod_base = OTHER; note = 2'-O-methyluridine-3'-phosphate
  modified_base 5: mod_base = OTHER; note = 2'-O-methylguanosine-3'-phosphate
  modified_base 6: mod_base = OTHER; note = 2'-O-methyluridine-3'-phosphate
  modified_base 7: mod_base = OTHER; note = 2'-fluoroguanosine-3'-phosphate
  modified_base 8: mod_base = OTHER; note = 2'-O-methyladenosine-3'-phosphate
  modified_base 9: mod_base = OTHER; note = 2'-O-methyladenosine-3'-phosphate
  modified_base 10: mod_base = OTHER; note = 2'-O-methyladenosine-3'-phosphate
  modified_base 11: mod_base = OTHER; note = 2'-fluoroguanosine-3'-phosphate
  modified_base 12: mod_base = OTHER; note = 2'-O-methyluridine-3'-phosphate
  modified_base 13: mod_base = OTHER; note = 2'-O-methylcytidine-3'-phosphate
  modified_base 14: mod_base = OTHER; note = 2'-O-methyladenosine-3'-phosphate
  modified_base 15: mod_base = OTHER; note = 2'-O-methyluridine-3'-phosphate
  modified_base 16: mod_base = OTHER; note = 2'-O-methylcytidine-3'-phosphate
  modified_base 17: mod_base = OTHER; note = 2'-O-methylguanosine-3'-phosphate
  modified_base 18: mod_base = OTHER; note = 2'-O-methyladenosine-3'-phosphate
  modified_base 19: mod_base = OTHER; note = 2'-O-methylcytidine-3'-phosphate
  modified_base 20: mod_base = OTHER; note = 2'-O-methyladenosine-3'-phosphate
  modified_base 21: mod_base = OTHER; note = 2'-O-methyladenosine-3'-phosphate N-[tris(GalNAc-alkyl)-amidodecanoyl)]-4-hydroxyprolinol Hyp-(GalNAc-alkyl)3
gaatgtgaaagtcatcgacaa

SEQ ID NO: 168 - RNA, 19 nt, synthetic construct
  source 1..19: mol_type = other RNA; note = Description of Artificial Sequence: Synthetic oligonucleotide
  modified_base 1: mod_base = OTHER; note = 2'-fluoroadenosine-3'-phosphorothioate
  modified_base 2: mod_base = OTHER; note = 2'-O-methyluridine-3'-phosphorothioate
  modified_base 3: mod_base = OTHER; note = 2'-fluoroguanosine-3'-phosphate
  modified_base 4: mod_base = OTHER; note = 2'-O-methyluridine-3'-phosphate
  modified_base 5: mod_base = OTHER; note = 2'-fluoroguanosine-3'-phosphate
  modified_base 6: mod_base = OTHER; note = 2'-O-methyladenosine-3'-phosphate
  modified_base 7: mod_base = OTHER; note = 2'-fluoroadenosine-3'-phosphate
  modified_base 8: mod_base = OTHER; note = 2'-fluoroadenosine-3'-phosphate
  modified_base 9: mod_base = OTHER; note = 2'-fluoroguanosine-3'-phosphate
  modified_base 10: mod_base = OTHER; note = 2'-O-methyluridine-3'-phosphate
  modified_base 11: mod_base = OTHER; note = 2'-fluorocytidine-3'-phosphate
  modified_base 12: mod_base = OTHER; note = 2'-O-methyladenosine-3'-phosphate
  modified_base 13: mod_base = OTHER; note = 2'-fluorouridine-3'-phosphate
  modified_base 14: mod_base = OTHER; note = 2'-O-methylcytidine-3'-phosphate
  modified_base 15: mod_base = OTHER; note = 2'-fluoroguanosine-3'-phosphate
  modified_base 16: mod_base = OTHER; note = 2'-O-methyladenosine-3'-phosphate
  modified_base 17: mod_base = OTHER; note = 2'-fluorocytidine-3'-phosphate
  modified_base 18: mod_base = OTHER; note = 2'-O-methyladenosine-3'-phosphate
  modified_base 19: mod_base = OTHER; note = 2'-fluoroadenosine-3'-phosphate N-[tris(GalNAc-alkyl)-amidodecanoyl)]-4-hydroxyprolinol Hyp-(GalNAc-alkyl)3
atgtgaaagtcatcgacaa

SEQ ID NO: 169 - RNA, 19 nt, synthetic construct
  source 1..19: mol_type = other RNA; note = Description of Artificial Sequence: Synthetic oligonucleotide
  modified_base 1: mod_base = OTHER; note = 2'-O-methyladenosine-3'-phosphorothioate
  modified_base 2: mod_base = OTHER; note = 2'-O-methyluridine-3'-phosphorothioate
  modified_base 3: mod_base = OTHER; note = 2'-O-methylguanosine-3'-phosphate
  modified_base 4: mod_base = OTHER; note = 2'-O-methyluridine-3'-phosphate
  modified_base 5: mod_base = OTHER; note = 2'-fluoroguanosine-3'-phosphate
  modified_base 6: mod_base = OTHER; note = 2'-O-methyladenosine-3'-phosphate
  modified_base 7: mod_base = OTHER; note = 2'-fluoroadenosine-3'-phosphate
  modified_base 8: mod_base = OTHER; note = 2'-fluoroadenosine-3'-phosphate
  modified_base 9: mod_base = OTHER; note = 2'-fluoroguanosine-3'-phosphate
  modified_base 10: mod_base = OTHER; note = 2'-O-methyluridine-3'-phosphate
  modified_base 11: mod_base = OTHER; note = 2'-O-methylcytidine-3'-phosphate
  modified_base 12: mod_base = OTHER; note = 2'-O-methyladenosine-3'-phosphate
  modified_base 13: mod_base = OTHER; note = 2'-O-methyluridine-3'-phosphate
  modified_base 14: mod_base = OTHER; note = 2'-O-methylcytidine-3'-phosphate
  modified_base 15: mod_base = OTHER; note = 2'-O-methylguanosine-3'-phosphate
  modified_base 16: mod_base = OTHER; note = 2'-O-methyladenosine-3'-phosphate
  modified_base 17: mod_base = OTHER; note = 2'-O-methylcytidine-3'-phosphate
  modified_base 18: mod_base = OTHER; note = 2'-O-methyladenosine-3'-phosphate
  modified_base 19: mod_base = OTHER; note = 2'-O-methyladenosine-3'-phosphate N-[tris(GalNAc-alkyl)-amidodecanoyl)]-4-hydroxyprolinol Hyp-(GalNAc-alkyl)3
atgtgaaagtcatcgacaa

SEQ ID NO: 170 - RNA, 21 nt, synthetic construct
  source 1..21: mol_type = other RNA; note = Description of Artificial Sequence: Synthetic oligonucleotide
  modified_base 1: mod_base = OTHER; note = 2'-fluoroguanosine-3'-phosphorothioate
  modified_base 2: mod_base = OTHER; note = 2'-O-methyladenosine-3'-phosphorothioate
  modified_base 3: mod_base = OTHER; note = 2'-fluoroadenosine-3'-phosphate
  modified_base 4: mod_base = OTHER; note = 2'-O-methyluridine-3'-phosphate
  modified_base 5: mod_base = OTHER; note = 2'-fluoroguanosine-3'-phosphate
  modified_base 6: mod_base = OTHER; note = 2'-O-methyluridine-3'-phosphate
  modified_base 7: mod_base = OTHER; note = 2'-fluoroguanosine-3'-phosphate
  modified_base 8: mod_base = OTHER; note = 2'-O-methyladenosine-3'-phosphate
  modified_base 9: mod_base = OTHER; note = 2'-fluoroadenosine-3'-phosphate
  modified_base 10: mod_base = OTHER; note = 2'-fluoroadenosine-3'-phosphate
  modified_base 11: mod_base = OTHER; note = 2'-fluoroguanosine-3'-phosphate
  modified_base 12: mod_base = OTHER; note = 2'-O-methyluridine-3'-phosphate
  modified_base 13: mod_base = OTHER; note = 2'-fluorocytidine-3'-phosphate
  modified_base 14: mod_base = OTHER; note = 2'-O-methyladenosine-3'-phosphate
  modified_base 15: mod_base = OTHER; note = 2'-fluorouridine-3'-phosphate
  modified_base 16: mod_base = OTHER; note = 2'-O-methylcytidine-3'-phosphate
  modified_base 17: mod_base = OTHER; note = 2'-fluoroguanosine-3'-phosphate
  modified_base 18: mod_base = OTHER; note = 2'-O-methyladenosine-3'-phosphate
  modified_base 19: mod_base = OTHER; note = 2'-fluorocytidine-3'-phosphate
  modified_base 20: mod_base = OTHER; note = 2'-O-methyladenosine-3'-phosphate
  modified_base 21: mod_base = OTHER; note = 2'-fluoroadenosine-3'-phosphate N-[tris(GalNAc-alkyl)-amidodecanoyl)]-4-hydroxyprolinol Hyp-(GalNAc-alkyl)3
gaatgtgaaagtcatcgacaa

SEQ ID NO: 171 - RNA, 21 nt, synthetic construct
  source 1..21: mol_type = other RNA; note = Description of Artificial Sequence: Synthetic oligonucleotide
  modified_base 1: mod_base = OTHER; note = 2'-fluoroguanosine-3'-phosphorothioate
  modified_base 2: mod_base = OTHER; note = 2'-O-methyladenosine-3'-phosphorothioate
  modified_base 3: mod_base = OTHER; note = 2'-fluoroadenosine-3'-phosphate
  modified_base 4: mod_base = OTHER; note = 2'-O-methyluridine-3'-phosphate
  modified_base 5: mod_base = OTHER; note = 2'-fluoroguanosine-3'-phosphate
  modified_base 6: mod_base = OTHER; note = 2'-O-methyluridine-3'-phosphate
  modified_base 7: mod_base = OTHER; note = 2'-fluoroguanosine-3'-phosphate
  modified_base 8: mod_base = OTHER; note = 2'-O-methyladenosine-3'-phosphate
  modified_base 9: mod_base = OTHER; note = 2'-fluoroadenosine-3'-phosphate
  modified_base 10: mod_base = OTHER; note = 2'-fluoroadenosine-3'-phosphate
  modified_base 11: mod_base = OTHER; note = 2'-fluoroguanosine-3'-phosphate
  modified_base 12: mod_base = OTHER; note = 2'-O-methyluridine-3'-phosphate
  modified_base 13: mod_base = OTHER; note = 2'-fluorocytidine-3'-phosphate
  modified_base 14: mod_base = OTHER; note = 2'-O-methyladenosine-3'-phosphate
  modified_base 15: mod_base = OTHER; note = 2'-fluorouridine-3'-phosphate
  modified_base 16: mod_base = OTHER; note = 2'-O-methylcytidine-3'-phosphate
  modified_base 17: mod_base = OTHER; note = 2'-fluoroguanosine-3'-phosphate
  modified_base 18: mod_base = OTHER; note = 2'-O-methyladenosine-3'-phosphate
  modified_base 19: mod_base = OTHER; note = 2'-fluorocytidine-3'-phosphate
  modified_base 20: mod_base = OTHER; note = 2'-O-methyladenosine-3'-phosphate
  modified_base 21: mod_base = OTHER; note = 2'-fluoroadenosine-3'-phosphate N-[tris(GalNAc-alkyl)-amidodecanoyl)]-4-hydroxyprolinol Hyp-(GalNAc-alkyl)3
gaatgtgaaagtcatcgacaa

SEQ ID NO: 172 - RNA, 21 nt, synthetic construct
  source 1..21: mol_type = other RNA; note = Description of Artificial Sequence: Synthetic oligonucleotide
  modified_base 1: mod_base = OTHER; note = 2'-fluoroguanosine-3'-phosphorothioate
  modified_base 2: mod_base = OTHER; note = 2'-O-methyladenosine-3'-phosphorothioate
  modified_base 3: mod_base = OTHER; note = 2'-fluoroadenosine-3'-phosphate
  modified_base 4: mod_base = OTHER; note = 2'-O-methyluridine-3'-phosphate
  modified_base 5: mod_base = OTHER; note = 2'-fluoroguanosine-3'-phosphate
  modified_base 6: mod_base = OTHER; note = 2'-O-methyluridine-3'-phosphate
  modified_base 7: mod_base = OTHER; note = 2'-fluoroguanosine-3'-phosphate
  modified_base 8: mod_base = OTHER; note = 2'-O-methyladenosine-3'-phosphate
  modified_base 9: mod_base = OTHER; note = 2'-fluoroadenosine-3'-phosphate
  modified_base 10: mod_base = OTHER; note = 2'-fluoroadenosine-3'-phosphate
  modified_base 11: mod_base = OTHER; note = 2'-fluoroguanosine-3'-phosphate
  modified_base 12: mod_base = OTHER; note = 2'-O-methyluridine-3'-phosphate
  modified_base 13: mod_base = OTHER; note = 2'-fluorocytidine-3'-phosphate
  modified_base 14: mod_base = OTHER; note = 2'-O-methyladenosine-3'-phosphate
  modified_base 15: mod_base = OTHER; note = 2'-fluorouridine-3'-phosphate
  modified_base 16: mod_base = OTHER; note = 2'-O-methylcytidine-3'-phosphate
  modified_base 17: mod_base = OTHER; note = 2'-fluoroguanosine-3'-phosphate
  modified_base 18: mod_base = OTHER; note = 2'-O-methyladenosine-3'-phosphate
  modified_base 19: mod_base = OTHER; note = 2'-fluorocytidine-3'-phosphate
  modified_base 20: mod_base = OTHER; note = 2'-O-methyladenosine-3'-phosphate
  modified_base 21: mod_base = OTHER; note = 2'-fluoroadenosine-3'-phosphate N-[tris(GalNAc-alkyl)-amidodecanoyl)]-4-hydroxyprolinol Hyp-(GalNAc-alkyl)3
gaatgtgaaagtcatcgacaa

SEQ ID NO: 173 - RNA, 21 nt, synthetic construct
  source 1..21: mol_type = other RNA; note = Description of Artificial Sequence: Synthetic oligonucleotide
  modified_base 1: mod_base = OTHER; note = 2'-fluoroguanosine-3'-phosphorothioate
  modified_base 2: mod_base = OTHER; note = 2'-O-methyladenosine-3'-phosphorothioate
  modified_base 3: mod_base = OTHER; note = 2'-fluoroadenosine-3'-phosphate
  modified_base 4: mod_base = OTHER; note = 2'-O-methyluridine-3'-phosphate
  modified_base 5: mod_base = OTHER; note = 2'-fluoroguanosine-3'-phosphate
  modified_base 6: mod_base = OTHER; note = 2'-O-methyluridine-3'-phosphate
  modified_base 7: mod_base = OTHER; note = 2'-fluoroguanosine-3'-phosphate
  modified_base 8: mod_base = OTHER; note = 2'-O-methyladenosine-3'-phosphate
  modified_base 9: mod_base = OTHER; note = 2'-fluoroadenosine-3'-phosphate
  modified_base 10: mod_base = OTHER; note = 2'-fluoroadenosine-3'-phosphate
  modified_base 11: mod_base = OTHER; note = 2'-fluoroguanosine-3'-phosphate
  modified_base 12: mod_base = OTHER; note = 2'-O-methyluridine-3'-phosphate
  modified_base 13: mod_base = OTHER; note = 2'-fluorocytidine-3'-phosphate
  modified_base 14: mod_base = OTHER; note = 2'-O-methyladenosine-3'-phosphate
  modified_base 15: mod_base = OTHER; note = 2'-fluorouridine-3'-phosphate
  modified_base 16: mod_base = OTHER; note = 2'-O-methylcytidine-3'-phosphate
  modified_base 17: mod_base = OTHER; note = 2'-fluoroguanosine-3'-phosphate
  modified_base 18: mod_base = OTHER; note = 2'-O-methyladenosine-3'-phosphate
  modified_base 19: mod_base = OTHER; note = 2'-fluorocytidine-3'-phosphate
  modified_base 20: mod_base = OTHER; note = 2'-O-methyladenosine-3'-phosphate
  modified_base 21: mod_base = OTHER; note = 2'-fluoroadenosine-3'-phosphate N-[tris(GalNAc-alkyl)-amidodecanoyl)]-4-hydroxyprolinol Hyp-(GalNAc-alkyl)3
gaatgtgaaagtcatcgacaa

SEQ ID NO: 174 - RNA, 21 nt, synthetic construct
  source 1..21: mol_type = other RNA; note = Description of Artificial Sequence: Synthetic oligonucleotide
  modified_base 1: mod_base = OTHER; note = 2'-fluoroguanosine-3'-phosphorothioate
  modified_base 2: mod_base = OTHER; note = 2'-O-methyladenosine-3'-phosphorothioate
  modified_base 3: mod_base = OTHER; note = 2'-fluoroadenosine-3'-phosphate
  modified_base 4: mod_base = OTHER; note = 2'-O-methyluridine-3'-phosphate
  modified_base 5: mod_base = OTHER; note = 2'-fluoroguanosine-3'-phosphate
  modified_base 6: mod_base = OTHER; note = 2'-O-methyluridine-3'-phosphate
  modified_base 7: mod_base = OTHER; note = 2'-fluoroguanosine-3'-phosphate
  modified_base 8: mod_base = OTHER; note = 2'-O-methyladenosine-3'-phosphate
  modified_base 9: mod_base = OTHER; note = 2'-fluoroadenosine-3'-phosphate
  modified_base 10: mod_base = OTHER; note = 2'-fluoroadenosine-3'-phosphate
  modified_base 11: mod_base = OTHER; note = 2'-fluoroguanosine-3'-phosphate
  modified_base 12: mod_base = OTHER; note = 2'-O-methyluridine-3'-phosphate
  modified_base 13: mod_base = OTHER; note = 2'-fluorocytidine-3'-phosphate
  modified_base 14: mod_base = OTHER; note = 2'-O-methyladenosine-3'-phosphate
  modified_base 15: mod_base = OTHER; note = 2'-fluorouridine-3'-phosphate
  modified_base 16: mod_base = OTHER; note = 2'-O-methylcytidine-3'-phosphate
  modified_base 17: mod_base = OTHER; note = 2'-fluoroguanosine-3'-phosphate
  modified_base 18: mod_base = OTHER; note = 2'-O-methyladenosine-3'-phosphate
  modified_base 19: mod_base = OTHER; note = 2'-fluorocytidine-3'-phosphate
  modified_base 20: mod_base = OTHER; note = 2'-O-methyladenosine-3'-phosphate
  modified_base 21: mod_base = OTHER; note = 2'-fluoroadenosine-3'-phosphate N-[tris(GalNAc-alkyl)-amidodecanoyl)]-4-hydroxyprolinol Hyp-(GalNAc-alkyl)3
gaatgtgaaagtcatcgacaa

SEQ ID NO: 175 - RNA, 21 nt, synthetic construct
  source 1..21: mol_type = other RNA; note = Description of Artificial Sequence: Synthetic oligonucleotide
  modified_base 1: mod_base = OTHER; note = 2'-O-methylguanosine-3'-phosphorothioate
  modified_base 2: mod_base = OTHER; note = 2'-O-methyladenosine-3'-phosphorothioate
  modified_base 3: mod_base = OTHER; note = 2'-O-methyladenosine-3'-phosphate
  modified_base 4: mod_base = OTHER; note = 2'-O-methyluridine-3'-phosphate
  modified_base 5: mod_base = OTHER; note = 2'-O-methylguanosine-3'-phosphate
  modified_base 6: mod_base = OTHER; note = 2'-O-methyluridine-3'-phosphate
  modified_base 7: mod_base = OTHER; note = 2'-fluoroguanosine-3'-phosphate
  modified_base 8: mod_base = OTHER; note = 2'-O-methyladenosine-3'-phosphate
  modified_base 9: mod_base = OTHER; note = 2'-fluoroadenosine-3'-phosphate
  modified_base 10: mod_base = OTHER; note = 2'-fluoroadenosine-3'-phosphate
  modified_base 11: mod_base = OTHER; note = 2'-fluoroguanosine-3'-phosphate
  modified_base 12: mod_base = OTHER; note = 2'-O-methyluridine-3'-phosphate
  modified_base 13: mod_base = OTHER; note = 2'-O-methylcytidine-3'-phosphate
  modified_base 14: mod_base = OTHER; note = 2'-O-methyladenosine-3'-phosphate
  modified_base 15: mod_base = OTHER; note = 2'-O-methyluridine-3'-phosphate
  modified_base 16: mod_base = OTHER; note = 2'-O-methylcytidine-3'-phosphate
  modified_base 17: mod_base = OTHER; note = 2'-O-methylguanosine-3'-phosphate
  modified_base 18: mod_base = OTHER; note = 2'-O-methyladenosine-3'-phosphate
  modified_base 19: mod_base = OTHER; note = 2'-O-methylcytidine-3'-phosphate
  modified_base 20: mod_base = OTHER; note = 2'-O-methyladenosine-3'-phosphate
  modified_base 21: mod_base = OTHER; note = 2'-O-methyladenosine-3'-phosphate N-[tris(GalNAc-alkyl)-amidodecanoyl)]-4-hydroxyprolinol Hyp-(GalNAc-alkyl)3
gaatgtgaaagtcatcgacaa

SEQ ID NO: 176 - RNA, 21 nt, synthetic construct
  source 1..21: mol_type = other RNA; note = Description of Artificial Sequence: Synthetic oligonucleotide
  modified_base 1: mod_base = OTHER; note = 2'-O-methylguanosine-3'-phosphorothioate
  modified_base 2: mod_base = OTHER; note = 2'-O-methyladenosine-3'-phosphorothioate
  modified_base 3: mod_base = OTHER; note = 2'-O-methyladenosine-3'-phosphate
  modified_base 4: mod_base = OTHER; note = 2'-O-methyluridine-3'-phosphate
  modified_base 5: mod_base = OTHER; note = 2'-O-methylguanosine-3'-phosphate
  modified_base 6: mod_base = OTHER; note = 2'-O-methyluridine-3'-phosphate
  modified_base 7: mod_base = OTHER; note = 2'-fluoroguanosine-3'-phosphate
  modified_base 8: mod_base = OTHER; note = 2'-O-methyladenosine-3'-phosphate
  modified_base 9: mod_base = OTHER; note = 2'-fluoroadenosine-3'-phosphate
  modified_base 10: mod_base = OTHER; note = 2'-fluoroadenosine-3'-phosphate
  modified_base 11: mod_base = OTHER; note = 2'-fluoroguanosine-3'-phosphate
  modified_base 12: mod_base = OTHER; note = 2'-O-methyluridine-3'-phosphate
  modified_base 13: mod_base = OTHER; note = 2'-O-methylcytidine-3'-phosphate
  modified_base 14: mod_base = OTHER; note = 2'-O-methyladenosine-3'-phosphate
  modified_base 15: mod_base = OTHER; note = 2'-O-methyluridine-3'-phosphate
  modified_base 16: mod_base = OTHER; note = 2'-O-methylcytidine-3'-phosphate
  modified_base 17: mod_base = OTHER; note = 2'-O-methylguanosine-3'-phosphate
  modified_base 18: mod_base = OTHER; note = 2'-O-methyladenosine-3'-phosphate
  modified_base 19: mod_base = OTHER; note = 2'-O-methylcytidine-3'-phosphate
  modified_base 20: mod_base = OTHER; note = 2'-O-methyladenosine-3'-phosphate
  modified_base 21: mod_base = OTHER; note = 2'-O-methyladenosine-3'-phosphate N-[tris(GalNAc-alkyl)-amidodecanoyl)]-4-hydroxyprolinol Hyp-(GalNAc-alkyl)3
gaatgtgaaagtcatcgacaa

SEQ ID NO: 177 - RNA, 21 nt, synthetic construct
  source 1..21: mol_type = other RNA; note = Description of Artificial Sequence: Synthetic oligonucleotide
  modified_base 1: mod_base = OTHER; note = 2'-O-methylguanosine-3'-phosphorothioate
  modified_base 2: mod_base = OTHER; note = 2'-O-methyladenosine-3'-phosphorothioate
  modified_base 3: mod_base = OTHER; note = 2'-O-methyladenosine-3'-phosphate
  modified_base 4: mod_base = OTHER; note = 2'-O-methyluridine-3'-phosphate
  modified_base 5: mod_base = OTHER; note = 2'-O-methylguanosine-3'-phosphate
  modified_base 6: mod_base = OTHER; note = 2'-O-methyluridine-3'-phosphate
  modified_base 7: mod_base = OTHER; note = 2'-fluoroguanosine-3'-phosphate
  modified_base 8: mod_base = OTHER; note = 2'-O-methyladenosine-3'-phosphate
  modified_base 9: mod_base = OTHER; note = 2'-O-methyladenosine-3'-phosphate
  modified_base 10: mod_base = OTHER; note = 2'-fluoroadenosine-3'-phosphate
  modified_base 11: mod_base = OTHER; note = 2'-fluoroguanosine-3'-phosphate
  modified_base 12: mod_base = OTHER; note = 2'-O-methyluridine-3'-phosphate
  modified_base 13: mod_base = OTHER; note = 2'-O-methylcytidine-3'-phosphate
  modified_base 14: mod_base = OTHER; note = 2'-O-methyladenosine-3'-phosphate
  modified_base 15: mod_base = OTHER; note = 2'-O-methyluridine-3'-phosphate
  modified_base 16: mod_base = OTHER; note = 2'-O-methylcytidine-3'-phosphate
  modified_base 17: mod_base = OTHER; note = 2'-O-methylguanosine-3'-phosphate
  modified_base 18: mod_base = OTHER; note = 2'-O-methyladenosine-3'-phosphate
  modified_base 19: mod_base = OTHER; note = 2'-O-methylcytidine-3'-phosphate
  modified_base 20: mod_base = OTHER; note = 2'-O-methyladenosine-3'-phosphate
  modified_base 21: mod_base = OTHER; note = 2'-O-methyladenosine-3'-phosphate N-[tris(GalNAc-alkyl)-amidodecanoyl)]-4-hydroxyprolinol Hyp-(GalNAc-alkyl)3
gaatgtgaaagtcatcgacaa

SEQ ID NO: 178 - RNA, 21 nt, synthetic construct
  source 1..21: mol_type = other RNA; note = Description of Artificial Sequence: Synthetic oligonucleotide
  modified_base 1: mod_base = OTHER; note = 2'-O-methylguanosine-3'-phosphorothioate
  modified_base 2: mod_base = OTHER; note = 2'-O-methyladenosine-3'-phosphorothioate
  modified_base 3: mod_base = OTHER; note = 2'-O-methyladenosine-3'-phosphate
  modified_base 4: mod_base = OTHER; note = 2'-O-methyluridine-3'-phosphate
  modified_base 5: mod_base = OTHER; note = 2'-O-methylguanosine-3'-phosphate
  modified_base 6: mod_base = OTHER; note = 2'-O-methyluridine-3'-phosphate
  modified_base 7: mod_base = OTHER; note = 2'-fluoroguanosine-3'-phosphate
  modified_base 8: mod_base = OTHER; note = 2'-O-methyladenosine-3'-phosphate
  modified_base 9: mod_base = OTHER; note = 2'-O-methyladenosine-3'-phosphate
  modified_base 10: mod_base = OTHER; note = 2'-fluoroadenosine-3'-phosphate
  modified_base 11: mod_base = OTHER; note = 2'-fluoroguanosine-3'-phosphate
  modified_base 12: mod_base = OTHER; note = 2'-O-methyluridine-3'-phosphate
  modified_base 13: mod_base = OTHER; note = 2'-O-methylcytidine-3'-phosphate
  modified_base 14: mod_base = OTHER; note = 2'-O-methyladenosine-3'-phosphate
  modified_base 15: mod_base = OTHER; note = 2'-O-methyluridine-3'-phosphate
  modified_base 16: mod_base = OTHER; note = 2'-O-methylcytidine-3'-phosphate
  modified_base 17: mod_base = OTHER; note = 2'-O-methylguanosine-3'-phosphate
  modified_base 18: mod_base = OTHER; note = 2'-O-methyladenosine-3'-phosphate
  modified_base 19: mod_base = OTHER; note = 2'-O-methylcytidine-3'-phosphate
  modified_base 20: mod_base = OTHER; note = 2'-O-methyladenosine-3'-phosphate
  modified_base 21: mod_base = OTHER; note = 2'-O-methyladenosine-3'-phosphate N-[tris(GalNAc-alkyl)-amidodecanoyl)]-4-hydroxyprolinol Hyp-(GalNAc-alkyl)3
gaatgtgaaagtcatcgacaa

SEQ ID NO: 179 - RNA, 21 nt, synthetic construct
  source 1..21: mol_type = other RNA; note = Description of Artificial Sequence: Synthetic oligonucleotide
  modified_base 1: mod_base = OTHER; note = 2'-O-methylguanosine-3'-phosphorothioate
  modified_base 2: mod_base = OTHER; note = 2'-O-methyladenosine-3'-phosphorothioate
  modified_base 3: mod_base = OTHER; note = 2'-O-methyladenosine-3'-phosphate
  modified_base 4: mod_base = OTHER; note = 2'-O-methyluridine-3'-phosphate
  modified_base 5: mod_base = OTHER; note = 2'-O-methylguanosine-3'-phosphate
  modified_base 6: mod_base = OTHER; note = 2'-O-methyluridine-3'-phosphate
  modified_base 7: mod_base = OTHER; note = 2'-fluoroguanosine-3'-phosphate
  modified_base 8: mod_base = OTHER; note = 2'-O-methyladenosine-3'-phosphate
  modified_base 9: mod_base = OTHER; note = 2'-O-methyladenosine-3'-phosphate
  modified_base 10: mod_base = OTHER; note = 2'-fluoroadenosine-3'-phosphate
  modified_base 11: mod_base = OTHER; note = 2'-fluoroguanosine-3'-phosphate
  modified_base 12: mod_base = OTHER; note = 2'-O-methyluridine-3'-phosphate
  modified_base 13: mod_base = OTHER; note = 2'-O-methylcytidine-3'-phosphate
  modified_base 14: mod_base = OTHER; note = 2'-O-methyladenosine-3'-phosphate
  modified_base 15: mod_base = OTHER; note = 2'-O-methyluridine-3'-phosphate
  modified_base 16: mod_base = OTHER; note = 2'-O-methylcytidine-3'-phosphate
  modified_base 17: mod_base = OTHER; note = 2'-O-methylguanosine-3'-phosphate
  modified_base 18: mod_base = OTHER; note = 2'-O-methyladenosine-3'-phosphate
  modified_base 19: mod_base = OTHER; note = 2'-O-methylcytidine-3'-phosphate
  modified_base 20: mod_base = OTHER; note = 2'-O-methyladenosine-3'-phosphate
  modified_base 21: mod_base = OTHER; note = 2'-O-methyladenosine-3'-phosphate N-[tris(GalNAc-alkyl)-amidodecanoyl)]-4-hydroxyprolinol Hyp-(GalNAc-alkyl)3
gaatgtgaaagtcatcgacaa

SEQ ID NO: 180 - RNA, 21 nt, synthetic construct
  source 1..21: mol_type = other RNA; note = Description of Artificial Sequence: Synthetic oligonucleotide
  modified_base 1: mod_base = OTHER; note = 2'-O-methylguanosine-3'-phosphorothioate
  modified_base 2: mod_base = OTHER; note = 2'-O-methyladenosine-3'-phosphorothioate
  modified_base 3: mod_base = OTHER; note = 2'-O-methyladenosine-3'-phosphate
  modified_base 4: mod_base = OTHER; note = 2'-O-methyluridine-3'-phosphate
  modified_base 5: mod_base = OTHER; note = 2'-O-methylguanosine-3'-phosphate
  modified_base 6: mod_base = OTHER; note = 2'-O-methyluridine-3'-phosphate
  modified_base 7: mod_base = OTHER; note = 2'-O-methylguanosine-3'-phosphate
  modified_base 8: mod_base = OTHER; note = 2'-O-methyladenosine-3'-phosphate
  modified_base 9: mod_base = OTHER; note = 2'-O-methyladenosine-3'-phosphate
  modified_base 10: mod_base = OTHER; note = 2'-O-methyladenosine-3'-phosphate
  modified_base 11: mod_base = OTHER; note = 2'-O-methylguanosine-3'-phosphate
  modified_base 12: mod_base = OTHER; note = 2'-O-methyluridine-3'-phosphate
  modified_base 13: mod_base = OTHER; note = 2'-O-methylcytidine-3'-phosphate
  modified_base 14: mod_base = OTHER; note = 2'-O-methyladenosine-3'-phosphate
  modified_base 15: mod_base = OTHER; note = 2'-O-methyluridine-3'-phosphate
  modified_base 16: mod_base = OTHER; note = Cytidine-glycol nucleic acid (GNA)
  modified_base 17: mod_base = OTHER; note = 2'-O-methylguanosine-3'-phosphate
  modified_base 18: mod_base = OTHER; note = 2'-O-methyladenosine-3'-phosphate
  modified_base 19: mod_base = OTHER; note = 2'-O-methylcytidine-3'-phosphate
  modified_base 20: mod_base = OTHER; note = 2'-O-methyladenosine-3'-phosphate
  modified_base 21: mod_base = OTHER; note = 2'-O-methyladenosine-3'-phosphate N-[tris(GalNAc-alkyl)-amidodecanoyl)]-4-hydroxyprolinol Hyp-(GalNAc-alkyl)3
gaatgtgaaagtcatcgacaa

SEQ ID NO: 181 - DNA, 21 bp, synthetic construct
  source 1..21: mol_type = other DNA; note = Description of Artificial Sequence: Synthetic oligonucleotide; note = Description of Combined DNA/RNA Molecule: Synthetic oligonucleotide
  modified_base 1: mod_base = OTHER; note = 2'-O-methylguanosine-3'-phosphorothioate
  modified_base 2: mod_base = OTHER; note = 2'-O-methyladenosine-3'-phosphorothioate
  modified_base 3: mod_base = OTHER; note = 2'-O-methyladenosine-3'-phosphate
  modified_base 4: mod_base = OTHER; note = 2'-O-methyluridine-3'-phosphate
  modified_base 5: mod_base = OTHER; note = 2'-O-methylguanosine-3'-phosphate
  modified_base 7: mod_base = OTHER; note = 2'-O-methylguanosine-3'-phosphate
  modified_base 8: mod_base = OTHER; note = 2'-O-methyladenosine-3'-phosphate
  modified_base 9: mod_base = OTHER; note = 2'-O-methyladenosine-3'-phosphate
  modified_base 10: mod_base = OTHER; note = 2'-O-methyladenosine-3'-phosphate
  modified_base 11: mod_base = OTHER; note = 2'-O-methylguanosine-3'-phosphate
  modified_base 12: mod_base = OTHER; note = 2'-O-methyluridine-3'-phosphate
  modified_base 13: mod_base = OTHER; note = 2'-O-methylcytidine-3'-phosphate
  modified_base 14: mod_base = OTHER; note = 2'-O-methyladenosine-3'-phosphate
  modified_base 15: mod_base = OTHER; note = 2'-O-methyluridine-3'-phosphate
  modified_base 16: mod_base = OTHER; note = Cytidine-glycol nucleic acid (GNA)
  modified_base 17: mod_base = OTHER; note = 2'-O-methylguanosine-3'-phosphate
  modified_base 18: mod_base = OTHER; note = 2'-O-methyladenosine-3'-phosphate
  modified_base 19: mod_base = OTHER; note = 2'-O-methylcytidine-3'-phosphate
  modified_base 20: mod_base = OTHER; note = 2'-O-methyladenosine-3'-phosphate
  modified_base 21: mod_base = OTHER; note = 2'-O-methyladenosine-3'-phosphate N-[tris(GalNAc-alkyl)-amidodecanoyl)]-4-hydroxyprolinol Hyp-(GalNAc-alkyl)3
  misc_feature 1..5: note = RNA
  misc_feature 6: note = DNA
  misc_feature 7..21: note = RNA
gaatgtgaaagtcatcgacaa

SEQ ID NO: 182 - DNA, 21 bp, synthetic construct
  source 1..21: mol_type = other DNA; note = Description of Artificial Sequence: Synthetic oligonucleotide; note = Description of Combined DNA/RNA Molecule: Synthetic oligonucleotide
  modified_base 1: mod_base = OTHER; note = 2'-O-methylguanosine-3'-phosphorothioate
  modified_base 2: mod_base = OTHER; note = 2'-O-methyladenosine-3'-phosphorothioate
  modified_base 3: mod_base = OTHER; note = 2'-O-methyladenosine-3'-phosphate
  modified_base 4: mod_base = OTHER; note = 2'-O-methyluridine-3'-phosphate
  modified_base 6: mod_base = OTHER; note = 2'-O-methyluridine-3'-phosphate
  modified_base 7: mod_base = OTHER; note = 2'-O-methylguanosine-3'-phosphate
  modified_base 8: mod_base = OTHER; note = 2'-O-methyladenosine-3'-phosphate
  modified_base 9: mod_base = OTHER; note = 2'-O-methyladenosine-3'-phosphate
  modified_base 10: mod_base = OTHER; note = 2'-O-methyladenosine-3'-phosphate
  modified_base 12: mod_base = OTHER; note = 2'-O-methyluridine-3'-phosphate
  modified_base 13: mod_base = OTHER; note = 2'-O-methylcytidine-3'-phosphate
  modified_base 14: mod_base = OTHER; note = 2'-O-methyladenosine-3'-phosphate
  modified_base 15: mod_base = OTHER; note = 2'-O-methyluridine-3'-phosphate
  modified_base 16: mod_base = OTHER; note = Cytidine-glycol nucleic acid (GNA)
  modified_base 17: mod_base = OTHER; note = 2'-O-methylguanosine-3'-phosphate
  modified_base 18: mod_base = OTHER; note = 2'-O-methyladenosine-3'-phosphate
  modified_base 19: mod_base = OTHER; note = 2'-O-methylcytidine-3'-phosphate
  modified_base 20: mod_base = OTHER; note = 2'-O-methyladenosine-3'-phosphate
  modified_base 21: mod_base = OTHER; note = 2'-O-methyladenosine-3'-phosphate N-[tris(GalNAc-alkyl)-amidodecanoyl)]-4-hydroxyprolinol Hyp-(GalNAc-alkyl)3
  misc_feature 1..4: note = RNA
  misc_feature 5: note = DNA
  misc_feature 6..10: note = RNA
  misc_feature 11: note = DNA
  misc_feature 12..21: note = RNA
gaatgtgaaagtcatcgacaa

SEQ ID NO: 183 - DNA, 21 bp, synthetic construct
  source 1..21: mol_type = other DNA; note = Description of Artificial Sequence: Synthetic oligonucleotide; note = Description of Combined DNA/RNA Molecule: Synthetic oligonucleotide
  modified_base 1: mod_base = OTHER; note = 2'-O-methylguanosine-3'-phosphorothioate
  modified_base 2: mod_base = OTHER; note = 2'-O-methyladenosine-3'-phosphorothioate
  modified_base 3: mod_base = OTHER; note = 2'-O-methyladenosine-3'-phosphate
  modified_base 4: mod_base = OTHER; note = 2'-O-methyluridine-3'-phosphate
  modified_base 5: mod_base = OTHER; note = 2'-O-methylguanosine-3'-phosphate
  modified_base 7: mod_base = OTHER; note = 2'-O-methylguanosine-3'-phosphate
  modified_base 8: mod_base = OTHER; note = 2'-O-methyladenosine-3'-phosphate
  modified_base 9: mod_base = OTHER; note = 2'-O-methyladenosine-3'-phosphate
  modified_base 10: mod_base = OTHER; note = 2'-O-methyladenosine-3'-phosphate
  modified_base 12: mod_base = OTHER; note = 2'-O-methyluridine-3'-phosphate
  modified_base 13: mod_base = OTHER; note = 2'-O-methylcytidine-3'-phosphate
  modified_base 14: mod_base = OTHER; note = 2'-O-methyladenosine-3'-phosphate
  modified_base 15: mod_base = OTHER; note = 2'-O-methyluridine-3'-phosphate
  modified_base 16: mod_base = OTHER; note = Cytidine-glycol nucleic acid (GNA)
  modified_base 17: mod_base = OTHER; note = 2'-O-methylguanosine-3'-phosphate
  modified_base 18: mod_base = OTHER; note = 2'-O-methyladenosine-3'-phosphate
  modified_base 19: mod_base = OTHER; note = 2'-O-methylcytidine-3'-phosphate
  modified_base 20: mod_base = OTHER; note = 2'-O-methyladenosine-3'-phosphate
  modified_base 21: mod_base = OTHER; note = 2'-O-methyladenosine-3'-phosphate N-[tris(GalNAc-alkyl)-amidodecanoyl)]-4-hydroxyprolinol Hyp-(GalNAc-alkyl)3
  misc_feature 1..5: note = RNA
  misc_feature 6: note = DNA
  misc_feature 7..10: note = RNA
  misc_feature 11: note = DNA
  misc_feature 12..21: note = RNA
gaatgtgaaagtcatcgacaa

SEQ ID NO: 184 - DNA, 21 bp, synthetic construct
  source 1..21: mol_type = other DNA; note = Description of Artificial Sequence: Synthetic oligonucleotide; note = Description of Combined DNA/RNA Molecule: Synthetic oligonucleotide
  modified_base 1: mod_base = OTHER; note = 2'-O-methylguanosine-3'-phosphorothioate
  modified_base 2: mod_base = OTHER; note = 2'-O-methyladenosine-3'-phosphorothioate
  modified_base 3: mod_base = OTHER; note = 2'-O-methyladenosine-3'-phosphate
  modified_base 4: mod_base = OTHER; note = 2'-O-methyluridine-3'-phosphate
  modified_base 5: mod_base = OTHER; note = 2'-O-methylguanosine-3'-phosphate
  modified_base 6: mod_base = OTHER; note = 2'-O-methyluridine-3'-phosphate
  modified_base 8: mod_base = OTHER; note = 2'-O-methyladenosine-3'-phosphate
  modified_base 9: mod_base = OTHER; note = 2'-O-methyladenosine-3'-phosphate
  modified_base 10: mod_base = OTHER; note = 2'-O-methyladenosine-3'-phosphate
  modified_base 12: mod_base = OTHER; note = 2'-O-methyluridine-3'-phosphate
  modified_base 13: mod_base = OTHER; note = 2'-O-methylcytidine-3'-phosphate
  modified_base 14: mod_base = OTHER; note = 2'-O-methyladenosine-3'-phosphate
  modified_base 15: mod_base = OTHER; note = 2'-O-methyluridine-3'-phosphate
  modified_base 16: mod_base = OTHER; note = Cytidine-glycol nucleic acid (GNA)
  modified_base 17: mod_base = OTHER; note = 2'-O-methylguanosine-3'-phosphate
  modified_base 18: mod_base = OTHER; note = 2'-O-methyladenosine-3'-phosphate
  modified_base 19: mod_base = OTHER; note = 2'-O-methylcytidine-3'-phosphate
  modified_base 20: mod_base = OTHER; note = 2'-O-methyladenosine-3'-phosphate
  modified_base 21: mod_base = OTHER; note = 2'-O-methyladenosine-3'-phosphate N-[tris(GalNAc-alkyl)-amidodecanoyl)]-4-hydroxyprolinol Hyp-(GalNAc-alkyl)3
  misc_feature 1..6: note = RNA
  misc_feature 7: note = DNA
  misc_feature 8..10: note = RNA
  misc_feature 11: note = DNA
  misc_feature 12..21: note = RNA
gaatgtgaaagtcatcgacaa

SEQ ID NO: 185 - DNA, 21 bp, synthetic construct
  source 1..21: mol_type = other DNA; note = Description of Artificial Sequence: Synthetic oligonucleotide; note = Description of Combined DNA/RNA Molecule: Synthetic oligonucleotide
  modified_base 1: mod_base = OTHER; note = 2'-O-methylguanosine-3'-phosphorothioate
  modified_base 2: mod_base = OTHER; note = 2'-O-methyladenosine-3'-phosphorothioate
  modified_base 3: mod_base = OTHER; note = 2'-O-methyladenosine-3'-phosphate
  modified_base 4: mod_base = OTHER; note = 2'-O-methyluridine-3'-phosphate
  modified_base 5: mod_base = OTHER; note = 2'-O-methylguanosine-3'-phosphate
  modified_base 6: mod_base = OTHER; note = 2'-O-methyluridine-3'-phosphate
  modified_base 7: mod_base = OTHER; note = 2'-O-methylguanosine-3'-phosphate
  modified_base 8: mod_base = OTHER; note = 2'-O-methyladenosine-3'-phosphate
  modified_base 9: mod_base = OTHER; note = 2'-O-methyladenosine-3'-phosphate
  modified_base 10: mod_base = OTHER; note = 2'-O-methyladenosine-3'-phosphate
  modified_base 12: mod_base = OTHER; note = 2'-O-methyluridine-3'-phosphate
  modified_base 13: mod_base = OTHER; note = 2'-O-methylcytidine-3'-phosphate
  modified_base 14: mod_base = OTHER; note = 2'-O-methyladenosine-3'-phosphate
  modified_base 15: mod_base = OTHER; note = 2'-O-methyluridine-3'-phosphate
  modified_base 16: mod_base = OTHER; note = 2'-O-methylcytidine-3'-phosphate
  modified_base 18: mod_base = OTHER; note = 2'-O-methyladenosine-3'-phosphate
  modified_base 19: mod_base = OTHER; note = 2'-O-methylcytidine-3'-phosphate
  modified_base 20: mod_base = OTHER; note = 2'-O-methyladenosine-3'-phosphate
  modified_base 21: mod_base = OTHER; note = 2'-O-methyladenosine-3'-phosphate N-[tris(GalNAc-alkyl)-amidodecanoyl)]-4-hydroxyprolinol Hyp-(GalNAc-alkyl)3
  misc_feature 1..10: note = RNA
  misc_feature 11: note = DNA
  misc_feature 12..16: note = RNA
  misc_feature 17: note = DNA
  misc_feature 18..21: note = RNA
gaatgtgaaagtcatcgacaa

SEQ ID NO: 186 - DNA, 21 bp, synthetic construct
  source 1..21: mol_type = other DNA; note = Description of Artificial Sequence: Synthetic oligonucleotide; note = Description of Combined DNA/RNA Molecule: Synthetic oligonucleotide
  modified_base 1: mod_base = OTHER; note = 2'-O-methylguanosine-3'-phosphorothioate
  modified_base 2: mod_base = OTHER; note = 2'-O-methyladenosine-3'-phosphorothioate
  modified_base 3: mod_base = OTHER; note = 2'-O-methyladenosine-3'-phosphate
  modified_base 4: mod_base = OTHER; note = 2'-O-methyluridine-3'-phosphate
  modified_base 5: mod_base = OTHER; note = 2'-O-methylguanosine-3'-phosphate
  modified_base 6: mod_base = OTHER; note = 2'-O-methyluridine-3'-phosphate
  modified_base 7: mod_base = OTHER; note = 2'-O-methylguanosine-3'-phosphate
  modified_base 8: mod_base = OTHER; note = 2'-O-methyladenosine-3'-phosphate
  modified_base 9: mod_base = OTHER; note = 2'-O-methyladenosine-3'-phosphate
  modified_base 10: mod_base = OTHER; note = 2'-O-methyladenosine-3'-phosphate
  modified_base 12: mod_base = OTHER; note = 2'-O-methyluridine-3'-phosphate
  modified_base 13: mod_base = OTHER; note = 2'-O-methylcytidine-3'-phosphate
  modified_base 14: mod_base = OTHER; note = 2'-O-methyladenosine-3'-phosphate
  modified_base 15: mod_base = OTHER; note = 2'-O-methyluridine-3'-phosphate
  modified_base 16: mod_base = OTHER; note = 2'-O-methylcytidine-3'-phosphate
  modified_base 18: mod_base = OTHER; note = 2'-O-methyladenosine-3'-phosphate
  modified_base 19: mod_base = OTHER; note = 2'-O-methylcytidine-3'-phosphate
  modified_base 20: mod_base = OTHER; note = 2'-O-methyladenosine-3'-phosphate
  modified_base 21: mod_base = OTHER; note = 2'-O-methyladenosine-3'-phosphate N-[tris(GalNAc-alkyl)-amidodecanoyl)]-4-hydroxyprolinol Hyp-(GalNAc-alkyl)3
  misc_feature 1..10: note = RNA
  misc_feature 11: note = DNA
  misc_feature 12..16: note = RNA
  misc_feature 17: note = DNA
  misc_feature 18..21: note = RNA
gaatgtgaaagtcatctacaa

SEQ ID NO: 187 - DNA, 21 bp, synthetic construct
  source 1..21: mol_type = other DNA; note = Description of Artificial Sequence: Synthetic oligonucleotide; note = Description of Combined DNA/RNA Molecule: Synthetic oligonucleotide
  modified_base 1: mod_base = OTHER; note = 2'-O-methylguanosine-3'-phosphorothioate
  modified_base 2: mod_base = OTHER; note = 2'-O-methyladenosine-3'-phosphorothioate
  modified_base 3: mod_base = OTHER; note = 2'-O-methyladenosine-3'-phosphate
  modified_base 4: mod_base = OTHER; note = 2'-O-methyluridine-3'-phosphate
  modified_base 5: mod_base = OTHER; note = 2'-O-methylguanosine-3'-phosphate
  modified_base 6: mod_base = OTHER; note = 2'-O-methyluridine-3'-phosphate
  modified_base 7: mod_base = OTHER; note = 2'-O-methylguanosine-3'-phosphate
  modified_base 8: mod_base = OTHER; note = 2'-O-methyladenosine-3'-phosphate
  modified_base 9: mod_base = OTHER; note = 2'-O-methyladenosine-3'-phosphate
  modified_base 10: mod_base = OTHER; note = 2'-O-methyladenosine-3'-phosphate
  modified_base 12: mod_base = OTHER; note = 2'-O-methyluridine-3'-phosphate
  modified_base 13: mod_base = OTHER; note = 2'-O-methylcytidine-3'-phosphate
  modified_base 14: mod_base = OTHER; note = 2'-O-methyladenosine-3'-phosphate
  modified_base 15: mod_base = OTHER; note = 2'-O-methyluridine-3'-phosphate
  modified_base 16: mod_base = OTHER; note = 2'-O-methylcytidine-3'-phosphate
  misc_difference 17: note 2-hydroxymethyl-tetrahydrofurane-4-methoxy-3-phosphate (abasic 2'-OMe furanose)
  modified_base 18: mod_base = OTHER; note = 2'-O-methyladenosine-3'-phosphate
  modified_base 19: mod_base = OTHER; note = 2'-O-methylcytidine-3'-phosphate
  modified_base 20: mod_base = OTHER; note = 2'-O-methyladenosine-3'-phosphate
  modified_base 21: mod_base = OTHER; note = 2'-O-methyladenosine-3'-phosphate N-[tris(GalNAc-alkyl)-amidodecanoyl)]-4-hydroxyprolinol Hyp-(GalNAc-alkyl)3
  misc_feature 1..10: note = RNA
  misc_feature 11: note = DNA
  misc_feature 12..21: note = RNA
gaatgtgaaagtcatcnacaa

SEQ ID NO: 188 - DNA, 21 bp, synthetic construct
  source 1..21: mol_type = other DNA; note = Description of Artificial Sequence: Synthetic oligonucleotide; note = Description of Combined DNA/RNA Molecule: Synthetic oligonucleotide
  modified_base 1: mod_base = OTHER; note = 2'-O-methylguanosine-3'-phosphorothioate
  modified_base 2: mod_base = OTHER; note = 2'-O-methyladenosine-3'-phosphorothioate
  modified_base 3: mod_base = OTHER; note = 2'-O-methyladenosine-3'-phosphate
  modified_base 4: mod_base = OTHER; note = 2'-O-methyluridine-3'-phosphate
  modified_base 5: mod_base = OTHER; note = 2'-O-methylguanosine-3'-phosphate
  modified_base 6: mod_base = OTHER; note = 2'-O-methyluridine-3'-phosphate
  modified_base 7: mod_base = OTHER; note = 2'-O-methylguanosine-3'-phosphate
  modified_base 8: mod_base = OTHER; note = 2'-O-methyladenosine-3'-phosphate
  modified_base 9: mod_base = OTHER; note = 2'-O-methyladenosine-3'-phosphate
  modified_base 10: mod_base = OTHER; note = 2'-O-methyladenosine-3'-phosphate
  modified_base 12: mod_base = OTHER; note = 2'-O-methyluridine-3'-phosphate
  modified_base 13: mod_base = OTHER; note = 2'-O-methylcytidine-3'-phosphate
  modified_base 14: mod_base = OTHER; note = 2'-O-methyladenosine-3'-phosphate
  modified_base 16: mod_base = OTHER; note = 2'-O-methylcytidine-3'-phosphate
  modified_base 18: mod_base = OTHER; note = 2'-O-methyladenosine-3'-phosphate
  modified_base 19: mod_base = OTHER; note = 2'-O-methylcytidine-3'-phosphate
  modified_base 20: mod_base = OTHER; note = 2'-O-methyladenosine-3'-phosphate
  modified_base 21: mod_base = OTHER; note = 2'-O-methyladenosine-3'-phosphate N-[tris(GalNAc-alkyl)-amidodecanoyl)]-4-hydroxyprolinol Hyp-(GalNAc-alkyl)3
  misc_feature 1..10: note = RNA
  misc_feature 11: note = DNA
  misc_feature 12..14: note = RNA
  misc_feature 15: note = DNA
  misc_feature 16: note = RNA
  misc_feature 17: note = DNA
  misc_feature 18..21: note = RNA
gaatgtgaaagtcatctacaa

SEQ ID NO: 189 - DNA, 21 bp, synthetic construct
  source 1..21: mol_type = other DNA; note = Description of Artificial Sequence: Synthetic oligonucleotide; note = Description of Combined DNA/RNA Molecule: Synthetic oligonucleotide
  modified_base 1: mod_base = OTHER; note = 2'-O-methylguanosine-3'-phosphorothioate
  modified_base 2: mod_base = OTHER; note = 2'-O-methyladenosine-3'-phosphorothioate
  modified_base 3: mod_base = OTHER; note = 2'-O-methyladenosine-3'-phosphate
  modified_base 4: mod_base = OTHER; note = 2'-O-methyluridine-3'-phosphate
  modified_base 5: mod_base = OTHER; note = 2'-O-methylguanosine-3'-phosphate
  modified_base 6: mod_base = OTHER; note = 2'-O-methyluridine-3'-phosphate
  modified_base 7: mod_base = OTHER; note = 2'-O-methylguanosine-3'-phosphate
  modified_base 8: mod_base = OTHER; note = 2'-O-methyladenosine-3'-phosphate
  modified_base 9: mod_base = OTHER; note = 2'-O-methyladenosine-3'-phosphate
  modified_base 10: mod_base = OTHER; note = 2'-O-methyladenosine-3'-phosphate
  modified_base 12: mod_base = OTHER; note = 2'-O-methyluridine-3'-phosphate
  modified_base 13: mod_base = OTHER; note = 2'-O-methylcytidine-3'-phosphate
  modified_base 14: mod_base = OTHER; note = 2'-O-methyladenosine-3'-phosphate
  modified_base 15: mod_base = OTHER; note = 2'-O-methyluridine-3'-phosphate
  modified_base 16: mod_base = OTHER; note = 2'-O-methylcytidine-3'-phosphate
  modified_base 18: mod_base = OTHER; note = 2'-O-methyladenosine-3'-phosphate
  modified_base 20: mod_base = OTHER; note = 2'-O-methyladenosine-3'-phosphate
  modified_base 21: mod_base = OTHER; note = 2'-O-methyladenosine-3'-phosphate N-[tris(GalNAc-alkyl)-amidodecanoyl)]-4-hydroxyprolinol Hyp-(GalNAc-alkyl)3
  misc_feature 1..10: note = RNA
  misc_feature 11: note = DNA
  misc_feature 12..16: note = RNA
  misc_feature 17: note = DNA
  misc_feature 18: note = RNA
  misc_feature 19: note = DNA
  misc_feature 20..21: note = RNA
gaatgtgaaagtcatcgacaa

SEQ ID NO: 190 - DNA, 21 bp, synthetic construct
  source 1..21: mol_type = other DNA; note = Description of Artificial Sequence: Synthetic oligonucleotide; note = Description of Combined DNA/RNA Molecule: Synthetic oligonucleotide
  modified_base 1: mod_base = OTHER; note = 2'-O-methylguanosine-3'-phosphorothioate
  modified_base 2: mod_base = OTHER; note = 2'-O-methyladenosine-3'-phosphorothioate
  modified_base 3: mod_base = OTHER; note = 2'-O-methyladenosine-3'-phosphate
  modified_base 4: mod_base = OTHER; note = 2'-O-methyluridine-3'-phosphate
  modified_base 5: mod_base = OTHER; note = 2'-O-methylguanosine-3'-phosphate
  modified_base 6: mod_base = OTHER; note = 2'-O-methyluridine-3'-phosphate
  modified_base 7: mod_base = OTHER; note = 2'-O-methylguanosine-3'-phosphate
  modified_base 8: mod_base = OTHER; note = 2'-O-methyladenosine-3'-phosphate
  modified_base 9: mod_base = OTHER; note = 2'-O-methyladenosine-3'-phosphate
  modified_base 10: mod_base = OTHER; note = 2'-O-methyladenosine-3'-phosphate
  modified_base 12: mod_base = OTHER; note = 2'-O-methyluridine-3'-phosphate
  modified_base 13: mod_base = OTHER; note = 2'-O-methylcytidine-3'-phosphate
  modified_base 14: mod_base = OTHER; note = 2'-O-methyladenosine-3'-phosphate
  modified_base 15: mod_base = OTHER; note = 2'-O-methyluridine-3'-phosphate
  modified_base 16: mod_base = OTHER; note = 2'-O-methylcytidine-3'-phosphate
  modified_base 18: mod_base = OTHER; note = 2'-O-methyladenosine-3'-phosphate
  modified_base 20: mod_base = OTHER; note = 2'-O-methyladenosine-3'-phosphate
  modified_base 21: mod_base = OTHER; note = 2'-O-methyladenosine-3'-phosphate N-[tris(GalNAc-alkyl)-amidodecanoyl)]-4-hydroxyprolinol Hyp-(GalNAc-alkyl)3
  misc_feature 1..10: note = RNA
  misc_feature 11: note = DNA
  misc_feature 12..16: note = RNA
  misc_feature 17: note = DNA
  misc_feature 18: note = RNA
  misc_feature 19: note = DNA
  misc_feature 20..21: note = RNA
gaatgtgaaagtcatctacaa

SEQ ID NO: 191 - DNA, 21 bp, synthetic construct
  source 1..21: mol_type = other DNA; note = Description of Artificial Sequence: Synthetic oligonucleotide; note = Description of Combined DNA/RNA Molecule: Synthetic oligonucleotide
  modified_base 1: mod_base = OTHER; note = 2'-O-methylguanosine-3'-phosphorothioate
  modified_base 2: mod_base = OTHER; note = 2'-O-methyladenosine-3'-phosphorothioate
  modified_base 3: mod_base = OTHER; note = 2'-O-methyladenosine-3'-phosphate
  modified_base 4: mod_base = OTHER; note = 2'-O-methyluridine-3'-phosphate
  modified_base 5: mod_base = OTHER; note = 2'-O-methylguanosine-3'-phosphate
  modified_base 6: mod_base = OTHER; note = 2'-O-methyluridine-3'-phosphate
  modified_base 7: mod_base = OTHER; note = 2'-O-methylguanosine-3'-phosphate
  modified_base 8: mod_base = OTHER; note = 2'-O-methyladenosine-3'-phosphate
  modified_base 9: mod_base = OTHER; note = 2'-O-methyladenosine-3'-phosphate
  modified_base 10: mod_base = OTHER; note = 2'-O-methyladenosine-3'-phosphate
  modified_base 12: mod_base = OTHER; note = 2'-O-methyluridine-3'-phosphate
  modified_base 13: mod_base = OTHER; note = 2'-O-methylcytidine-3'-phosphate
  modified_base 14: mod_base = OTHER; note = 2'-O-methyladenosine-3'-phosphate
  modified_base 15: mod_base = OTHER; note = 2'-O-methyluridine-3'-phosphate
  modified_base 16: mod_base = OTHER; note = 2'-O-methylcytidine-3'-phosphate
  misc_difference 17: note 2-hydroxymethyl-tetrahydrofurane-4-methoxy-3-phosphate (abasic 2'-OMe furanose)
  modified_base 18: mod_base = OTHER; note = 2'-O-methyladenosine-3'-phosphate
  modified_base 20: mod_base = OTHER; note = 2'-O-methyladenosine-3'-phosphate
  modified_base 21: mod_base = OTHER; note = 2'-O-methyladenosine-3'-phosphate N-[tris(GalNAc-alkyl)-amidodecanoyl)]-4-hydroxyprolinol Hyp-(GalNAc-alkyl)3
  misc_feature 1..10: note = RNA
  misc_feature 11: note = DNA
  misc_feature 12..18: note = RNA
  misc_feature 19: note = DNA
  misc_feature 20..21: note = RNA
gaatgtgaaagtcatcnacaa

SEQ ID NO: 192 - RNA, 21 nt, synthetic construct
  source 1..21: mol_type = other RNA; note = Description of Artificial Sequence: Synthetic oligonucleotide
  modified_base 1: mod_base = OTHER; note = 2'-fluoroguanosine-3'-phosphorothioate
  modified_base 2: mod_base = OTHER; note = 2'-O-methyladenosine-3'-phosphorothioate
  modified_base 3: mod_base = OTHER; note = 2'-fluoroadenosine-3'-phosphate
  modified_base 4: mod_base = OTHER; note = 2'-O-methyluridine-3'-phosphate
  modified_base 5: mod_base = OTHER; note = 2'-fluoroguanosine-3'-phosphate
  modified_base 6: mod_base = OTHER; note = 2'-O-methyluridine-3'-phosphate
  modified_base 7: mod_base = OTHER; note = 2'-fluoroguanosine-3'-phosphate
  modified_base 8: mod_base = OTHER; note = 2'-O-methyladenosine-3'-phosphate
  modified_base 9: mod_base = OTHER; note = 2'-fluoroadenosine-3'-phosphate
  modified_base 10: mod_base = OTHER; note = 2'-fluoroadenosine-3'-phosphate
  modified_base 11: mod_base = OTHER; note = 2'-fluoroguanosine-3'-phosphate
  modified_base 12: mod_base = OTHER; note = 2'-O-methyluridine-3'-phosphate
  modified_base 13: mod_base = OTHER; note = 2'-fluorocytidine-3'-phosphate
  modified_base 14: mod_base = OTHER; note = 2'-O-methyladenosine-3'-phosphate
  modified_base 15: mod_base = OTHER; note = 2'-fluorouridine-3'-phosphate
  modified_base 16: mod_base = OTHER; note = 2'-O-methylcytidine-3'-phosphate
  modified_base 17: mod_base = OTHER; note = 2'-fluoroguanosine-3'-phosphate
  modified_base 18: mod_base = OTHER; note = 2'-O-methyladenosine-3'-phosphate
  modified_base 19: mod_base = OTHER; note = 2'-fluorocytidine-3'-phosphate
  modified_base 20: mod_base = OTHER; note = 2'-O-methyladenosine-3'-phosphate
  modified_base 21: mod_base = OTHER; note = 2'-fluoroadenosine-3'-phosphate N-[tris(GalNAc-alkyl)-amidodecanoyl)]-4-hydroxyprolinol Hyp-(GalNAc-alkyl)3
gaatgtgaaagtcatcgacaa

SEQ ID NO: 193 - RNA, 21 nt, synthetic construct
  source 1..21: mol_type = other RNA; note = Description of Artificial Sequence: Synthetic oligonucleotide
  modified_base 1: mod_base = OTHER; note = 2'-fluoroguanosine-3'-phosphorothioate
  modified_base 2: mod_base = OTHER; note = 2'-O-methyladenosine-3'-phosphorothioate
  modified_base 3: mod_base = OTHER; note = 2'-fluoroadenosine-3'-phosphate
  modified_base 4: mod_base = OTHER; note = 2'-O-methyluridine-3'-phosphate
  modified_base 5: mod_base = OTHER; note = 2'-fluoroguanosine-3'-phosphate
  modified_base 6: mod_base = OTHER; note = 2'-O-methyluridine-3'-phosphate
  modified_base 7: mod_base = OTHER; note = 2'-fluoroguanosine-3'-phosphate
  modified_base 8: mod_base = OTHER; note = 2'-O-methyladenosine-3'-phosphate
  modified_base 9: mod_base = OTHER; note = 2'-fluoroadenosine-3'-phosphate
  modified_base 10: mod_base = OTHER; note = 2'-fluoroadenosine-3'-phosphate
  modified_base 11: mod_base = OTHER; note = 2'-fluoroguanosine-3'-phosphate
  modified_base 12: mod_base = OTHER; note = 2'-O-methyluridine-3'-phosphate
  modified_base 13: mod_base = OTHER; note = 2'-fluorocytidine-3'-phosphate
  modified_base 14: mod_base = OTHER; note = 2'-O-methyladenosine-3'-phosphate
  modified_base 15: mod_base = OTHER; note = 2'-fluorouridine-3'-phosphate
  modified_base 16: mod_base = OTHER; note = 2'-O-methylcytidine-3'-phosphate
  modified_base 17: mod_base = OTHER; note = 2'-fluoroguanosine-3'-phosphate
  modified_base 18: mod_base = OTHER; note = 2'-O-methyladenosine-3'-phosphate
  modified_base 19: mod_base = OTHER; note = 2'-fluorocytidine-3'-phosphate
  modified_base 20: mod_base = OTHER; note = 2'-O-methyladenosine-3'-phosphate
  modified_base 21: mod_base = OTHER; note = 2'-fluoroadenosine-3'-phosphate N-[tris(GalNAc-alkyl)-amidodecanoyl)]-4-hydroxyprolinol Hyp-(GalNAc-alkyl)3
gaatgtgaaagtcatcgacaa

SEQ ID NO: 194 - RNA, 21 nt, synthetic construct
  source 1..21: mol_type = other RNA; note = Description of Artificial Sequence: Synthetic oligonucleotide
  modified_base 1: mod_base = OTHER; note = 2'-fluoroguanosine-3'-phosphorothioate
  modified_base 2: mod_base = OTHER; note = 2'-O-methyladenosine-3'-phosphorothioate
  modified_base 3: mod_base = OTHER; note = 2'-fluoroadenosine-3'-phosphate
  modified_base 4: mod_base = OTHER; note = 2'-O-methyluridine-3'-phosphate
  modified_base 5: mod_base = OTHER; note = 2'-fluoroguanosine-3'-phosphate
  modified_base 6: mod_base = OTHER; note = 2'-O-methyluridine-3'-phosphate
  modified_base 7: mod_base = OTHER; note = 2'-fluoroguanosine-3'-phosphate
  modified_base 8: mod_base = OTHER; note = 2'-O-methyladenosine-3'-phosphate
  modified_base 9: mod_base = OTHER; note = 2'-fluoroadenosine-3'-phosphate
  modified_base 10: mod_base = OTHER; note = 2'-fluoroadenosine-3'-phosphate
  modified_base 11: mod_base = OTHER; note = 2'-fluoroguanosine-3'-phosphate
  modified_base 12: mod_base = OTHER; note = 2'-O-methyluridine-3'-phosphate
  modified_base 13: mod_base = OTHER; note = 2'-fluorocytidine-3'-phosphate
  modified_base 14: mod_base = OTHER; note = 2'-O-methyladenosine-3'-phosphate
  modified_base 15: mod_base = OTHER; note = 2'-fluorouridine-3'-phosphate
  modified_base 16: mod_base = OTHER; note = 2'-O-methylcytidine-3'-phosphate
  modified_base 17: mod_base = OTHER; note = 2'-fluoroguanosine-3'-phosphate
  modified_base 18: mod_base = OTHER; note = 2'-O-methyladenosine-3'-phosphate
  modified_base 19: mod_base = OTHER; note = 2'-fluorocytidine-3'-phosphate
  modified_base 20: mod_base = OTHER; note = 2'-O-methyladenosine-3'-phosphate
  modified_base 21: mod_base = OTHER; note = 2'-fluoroadenosine-3'-phosphate N-[tris(GalNAc-alkyl)-amidodecanoyl)]-4-hydroxyprolinol Hyp-(GalNAc-alkyl)3
gaatgtgaaagtcatcgacaa

SEQ ID NO: 195 - RNA, 21 nt, synthetic construct
  source 1..21: mol_type = other RNA; note = Description of Artificial Sequence: Synthetic oligonucleotide
  modified_base 1: mod_base = OTHER; note = 2'-fluoroguanosine-3'-phosphorothioate
  modified_base 2: mod_base = OTHER; note = 2'-O-methyladenosine-3'-phosphorothioate
  modified_base 3: mod_base = OTHER; note = 2'-fluoroadenosine-3'-phosphate
  modified_base 4: mod_base = OTHER; note = 2'-O-methyluridine-3'-phosphate
  modified_base 5: mod_base = OTHER; note = 2'-fluoroguanosine-3'-phosphate
  modified_base 6: mod_base = OTHER; note = 2'-O-methyluridine-3'-phosphate
  modified_base 7: mod_base = OTHER; note = 2'-fluoroguanosine-3'-phosphate
  modified_base 8: mod_base = OTHER; note = 2'-O-methyladenosine-3'-phosphate
  modified_base 9: mod_base = OTHER; note = 2'-fluoroadenosine-3'-phosphate
  modified_base 10: mod_base = OTHER; note = 2'-fluoroadenosine-3'-phosphate
  modified_base 11: mod_base = OTHER; note = 2'-fluoroguanosine-3'-phosphate
  modified_base 12: mod_base = OTHER; note = 2'-O-methyluridine-3'-phosphate
  modified_base 13: mod_base = OTHER; note = 2'-fluorocytidine-3'-phosphate
  modified_base 14: mod_base = OTHER; note = 2'-O-methyladenosine-3'-phosphate
  modified_base 15: mod_base = OTHER; note = 2'-fluorouridine-3'-phosphate
  modified_base 16: mod_base = OTHER; note = 2'-O-methylcytidine-3'-phosphate
  modified_base 17: mod_base = OTHER; note = 2'-fluoroguanosine-3'-phosphate
  modified_base 18: mod_base = OTHER; note = 2'-O-methyladenosine-3'-phosphate
  modified_base 19: mod_base = OTHER; note = 2'-fluorocytidine-3'-phosphate
  modified_base 20: mod_base = OTHER; note = 2'-O-methyladenosine-3'-phosphate
  modified_base 21: mod_base = OTHER; note = 2'-fluoroadenosine-3'-phosphate N-[tris(GalNAc-alkyl)-amidodecanoyl)]-4-hydroxyprolinol Hyp-(GalNAc-alkyl)3
gaatgtgaaagtcatcgacaa

SEQ ID NO: 196 - RNA, 21 nt, synthetic construct
  source 1..21: mol_type = other RNA; note = Description of Artificial Sequence: Synthetic oligonucleotide
  modified_base 1: mod_base = OTHER; note = 2'-fluoroguanosine-3'-phosphorothioate
  modified_base 2: mod_base = OTHER; note = 2'-O-methyladenosine-3'-phosphorothioate
  modified_base 3: mod_base = OTHER; note = 2'-fluoroadenosine-3'-phosphate
  modified_base 4: mod_base = OTHER; note = 2'-O-methyluridine-3'-phosphate
  modified_base 5: mod_base = OTHER; note = 2'-fluoroguanosine-3'-phosphate
  modified_base 6: mod_base = OTHER; note = 2'-O-methyluridine-3'-phosphate
  modified_base 7: mod_base = OTHER; note = 2'-fluoroguanosine-3'-phosphate
  modified_base 8: mod_base = OTHER; note = 2'-O-methyladenosine-3'-phosphate
  modified_base 9: mod_base = OTHER; note = 2'-fluoroadenosine-3'-phosphate
  modified_base 10: mod_base = OTHER; note = 2'-fluoroadenosine-3'-phosphate
  modified_base 11: mod_base = OTHER; note = 2'-fluoroguanosine-3'-phosphate
  modified_base 12: mod_base = OTHER; note = 2'-O-methyluridine-3'-phosphate
  modified_base 13: mod_base = OTHER; note = 2'-fluorocytidine-3'-phosphate
  modified_base 14: mod_base = OTHER; note = 2'-O-methyladenosine-3'-phosphate
  modified_base 15: mod_base = OTHER; note = 2'-fluorouridine-3'-phosphate
  modified_base 16: mod_base = OTHER; note = 2'-O-methylcytidine-3'-phosphate
  modified_base 17: mod_base = OTHER; note = 2'-fluoroguanosine-3'-phosphate
  modified_base 18: mod_base = OTHER; note = 2'-O-methyladenosine-3'-phosphate
  modified_base 19: mod_base = OTHER; note = 2'-fluorocytidine-3'-phosphate
  modified_base 20: mod_base = OTHER; note = 2'-O-methyladenosine-3'-phosphate
  modified_base 21: mod_base = OTHER; note = 2'-fluoroadenosine-3'-phosphate N-[tris(GalNAc-alkyl)-amidodecanoyl)]-4-hydroxyprolinol Hyp-(GalNAc-alkyl)3
gaatgtgaaagtcatcgacaa

SEQ ID NO: 197 - RNA, 21 nt, synthetic construct
  source 1..21: mol_type = other RNA; note = Description of Artificial Sequence: Synthetic oligonucleotide
  modified_base 1: mod_base = OTHER; note = 2'-fluoroguanosine-3'-phosphorothioate
  modified_base 2: mod_base = OTHER; note = 2'-O-methyladenosine-3'-phosphorothioate
  modified_base 3: mod_base = OTHER; note = 2'-fluoroadenosine-3'-phosphate
  modified_base 4: mod_base = OTHER; note = 2'-O-methyluridine-3'-phosphate
  modified_base 5: mod_base = OTHER; note = 2'-fluoroguanosine-3'-phosphate
  modified_base 6: mod_base = OTHER; note = 2'-O-methyluridine-3'-phosphate
  modified_base 7: mod_base = OTHER; note = 2'-fluoroguanosine-3'-phosphate
  modified_base 8: mod_base = OTHER; note = 2'-O-methyladenosine-3'-phosphate
  modified_base 9: mod_base = OTHER; note = 2'-fluoroadenosine-3'-phosphate
  modified_base 10: mod_base = OTHER; note = 2'-fluoroadenosine-3'-phosphate
  modified_base 11: mod_base = OTHER; note = 2'-fluoroguanosine-3'-phosphate
  modified_base 12: mod_base = OTHER; note = 2'-O-methyluridine-3'-phosphate
  modified_base 13: mod_base = OTHER; note = 2'-fluorocytidine-3'-phosphate
  modified_base 14: mod_base = OTHER; note = 2'-O-methyladenosine-3'-phosphate
  modified_base 15: mod_base = OTHER; note = 2'-fluorouridine-3'-phosphate
  modified_base 16: mod_base = OTHER; note = 2'-O-methylcytidine-3'-phosphate
  modified_base 17: mod_base = OTHER; note = 2'-fluoroguanosine-3'-phosphate
  modified_base 18: mod_base = OTHER; note = 2'-O-methyladenosine-3'-phosphate
  modified_base 19: mod_base = OTHER; note = 2'-fluorocytidine-3'-phosphate
  modified_base 20: mod_base = OTHER; note = 2'-O-methyladenosine-3'-phosphate
  modified_base 21: mod_base = OTHER; note = 2'-fluoroadenosine-3'-phosphate N-[tris(GalNAc-alkyl)-amidodecanoyl)]-4-hydroxyprolinol Hyp-(GalNAc-alkyl)3
gaatgtgaaagtcatcgacaa

SEQ ID NO: 198 - DNA, 21 bp, synthetic construct
  source 1..21: mol_type = other DNA; note = Description of Artificial Sequence: Synthetic oligonucleotide; note = Description of Combined DNA/RNA Molecule: Synthetic oligonucleotide
  modified_base 1: mod_base = OTHER; note = 2'-O-methylguanosine-3'-phosphorothioate
  modified_base 2: mod_base = OTHER; note = 2'-O-methyladenosine-3'-phosphorothioate
  modified_base 3: mod_base = OTHER; note = 2'-O-methyladenosine-3'-phosphate
  modified_base 4: mod_base = OTHER; note = 2'-O-methyluridine-3'-phosphate
  modified_base 5: mod_base = OTHER; note = 2'-O-methylguanosine-3'-phosphate
  modified_base 6: mod_base = OTHER; note = 2'-O-methyluridine-3'-phosphate
  modified_base 7: mod_base = OTHER; note = 2'-O-methylguanosine-3'-phosphate
  modified_base 8: mod_base = OTHER; note = 2'-O-methyladenosine-3'-phosphate
  modified_base 9: mod_base = OTHER; note = 2'-O-methyladenosine-3'-phosphate
  modified_base 10: mod_base = OTHER; note = 2'-O-methyladenosine-3'-phosphate
  modified_base 12: mod_base = OTHER; note = 2'-O-methyluridine-3'-phosphate
  modified_base 13: mod_base = OTHER; note = 2'-O-methylcytidine-3'-phosphate
  modified_base 14: mod_base = OTHER; note = 2'-O-methyladenosine-3'-phosphate
  modified_base 15: mod_base = OTHER; note = 2'-O-methyluridine-3'-phosphate
  modified_base 16: mod_base = OTHER; note = Cytidine-glycol nucleic acid (GNA)
  modified_base 17: mod_base = OTHER; note = 2'-O-methylguanosine-3'-phosphate
  modified_base 18: mod_base = OTHER; note = 2'-O-methyladenosine-3'-phosphate
  modified_base 19: mod_base = OTHER; note = 2'-O-methylcytidine-3'-phosphate
  modified_base 20: mod_base = OTHER; note = 2'-O-methyladenosine-3'-phosphate
  modified_base 21: mod_base = OTHER; note = 2'-O-methyladenosine-3'-phosphate N-[tris(GalNAc-alkyl)-amidodecanoyl)]-4-hydroxyprolinol Hyp-(GalNAc-alkyl)3
  misc_feature 1..10: note = RNA
  misc_feature 11: note = DNA
  misc_feature 12..21: note = RNA
gaatgtgaaagtcatcgacaa

SEQ ID NO: 199 - RNA, 21 nt, synthetic construct
  source 1..21: mol_type = other RNA; note = Description of Artificial Sequence: Synthetic oligonucleotide
  modified_base 1: mod_base = OTHER; note = 2'-fluoroguanosine-3'-phosphorothioate
  modified_base 2: mod_base = OTHER; note = 2'-O-methyladenosine-3'-phosphorothioate
  modified_base 3: mod_base = OTHER; note = 2'-fluorocytidine-3'-phosphate
  modified_base 4: mod_base = OTHER; note = 2'-O-methyluridine-3'-phosphate
  modified_base 5: mod_base = OTHER; note = 2'-fluorouridine-3'-phosphate
  modified_base 6: mod_base = OTHER; note = 2'-O-methyluridine-3'-phosphate
  modified_base 7: mod_base = OTHER; note = 2'-fluorocytidine-3'-phosphate
  modified_base 8: mod_base = OTHER; note = 2'-O-methyladenosine-3'-phosphate
  modified_base 9: mod_base = OTHER; note = 2'-fluorouridine-3'-phosphate
  modified_base 10: mod_base = OTHER; note = 2'-fluorocytidine-3'-phosphate
  modified_base 11: mod_base = OTHER; note = 2'-fluorocytidine-3'-phosphate
  modified_base 12: mod_base = OTHER; note = 2'-O-methyluridine-3'-phosphate
  modified_base 13: mod_base = OTHER; note = 2'-fluoroguanosine-3'-phosphate
  modified_base 14: mod_base = OTHER; note = 2'-O-methylguanosine-3'-phosphate
  modified_base 15: mod_base = OTHER; note = 2'-fluoroadenosine-3'-phosphate
  modified_base 16: mod_base = OTHER; note = 2'-O-methyladenosine-3'-phosphate
  modified_base 17: mod_base = OTHER; note = 2'-fluoroadenosine-3'-phosphate
  modified_base 18: mod_base = OTHER; note = 2'-O-methyluridine-3'-phosphate
  modified_base 19: mod_base = OTHER; note = 2'-fluoroadenosine-3'-phosphate
  modified_base 20: mod_base = OTHER; note = 2'-O-methyluridine-3'-phosphate
  modified_base 21: mod_base = OTHER; note = 2'-fluoroadenosine-3'-phosphate N-[tris(GalNAc-alkyl)-amidodecanoyl)]-4-hydroxyprolinol Hyp-(GalNAc-alkyl)3
gactttcatcctggaaatata

SEQ ID NO: 200 - RNA, 21 nt, synthetic construct
  source 1..21: mol_type = other RNA; note = Description of Artificial Sequence: Synthetic oligonucleotide
  modified_base 1: mod_base = OTHER; note = 2'-O-methylguanosine-3'-phosphorothioate
  modified_base 2: mod_base = OTHER; note = 2'-O-methyladenosine-3'-phosphorothioate
  modified_base 3: mod_base = OTHER; note = 2'-O-methylcytidine-3'-phosphate
  modified_base 4: mod_base = OTHER; note = 2'-O-methyluridine-3'-phosphate
  modified_base 5: mod_base = OTHER; note = 2'-O-methyluridine-3'-phosphate
  modified_base 6: mod_base = OTHER; note = 2'-O-methyluridine-3'-phosphate
  modified_base 7: mod_base = OTHER; note = 2'-fluorocytidine-3'-phosphate
  modified_base 8: mod_base = OTHER; note = 2'-O-methyladenosine-3'-phosphate
  modified_base 9: mod_base = OTHER; note = 2'-fluorouridine-3'-phosphate
  modified_base 10: mod_base = OTHER; note = 2'-fluorocytidine-3'-phosphate
  modified_base 11: mod_base = OTHER; note = 2'-fluorocytidine-3'-phosphate
  modified_base 12: mod_base = OTHER; note = 2'-O-methyluridine-3'-phosphate
  modified_base 13: mod_base = OTHER; note = 2'-O-methylguanosine-3'-phosphate
  modified_base 14: mod_base = OTHER; note = 2'-O-methylguanosine-3'-phosphate
  modified_base 15: mod_base = OTHER; note = 2'-O-methyladenosine-3'-phosphate
  modified_base 16: mod_base = OTHER; note = 2'-fluoroadenosine-3'-phosphate
  modified_base 17: mod_base = OTHER; note = 2'-O-methyladenosine-3'-phosphate
  modified_base 18: mod_base = OTHER; note = 2'-O-methyluridine-3'-phosphate
  modified_base 19: mod_base = OTHER; note = 2'-O-methyladenosine-3'-phosphate
  modified_base 20: mod_base = OTHER; note = 2'-O-methyluridine-3'-phosphate
  modified_base 21: mod_base = OTHER; note = 2'-O-methyladenosine-3'-phosphate N-[tris(GalNAc-alkyl)-amidodecanoyl)]-4-hydroxyprolinol Hyp-(GalNAc-alkyl)3
gactttcatcctggaaatata

SEQ ID NO: 201 - RNA, 21 nt, synthetic construct
  source 1..21: mol_type = other RNA; note = Description of Artificial Sequence: Synthetic oligonucleotide
  modified_base 1: mod_base = OTHER; note = 2'-O-methylguanosine-3'-phosphorothioate
  modified_base 2: mod_base = OTHER; note = 2'-O-methyladenosine-3'-phosphorothioate
  modified_base 3: mod_base = OTHER; note = 2'-O-methylcytidine-3'-phosphate
  modified_base 4: mod_base = OTHER; note = 2'-O-methyluridine-3'-phosphate
  modified_base 5: mod_base = OTHER; note = 2'-O-methyluridine-3'-phosphate
  modified_base 6: mod_base = OTHER; note = 2'-O-methyluridine-3'-phosphate
  modified_base 7: mod_base = OTHER; note = 2'-fluorocytidine-3'-phosphate
  modified_base 8: mod_base = OTHER; note = 2'-O-methyladenosine-3'-phosphate
  modified_base 9: mod_base = OTHER; note = 2'-fluorouridine-3'-phosphate
  modified_base 10: mod_base = OTHER; note = 2'-fluorocytidine-3'-phosphate
  modified_base 11: mod_base = OTHER; note = 2'-fluorocytidine-3'-phosphate
  modified_base 12: mod_base = OTHER; note = 2'-O-methyluridine-3'-phosphate
  modified_base 13: mod_base = OTHER; note = 2'-O-methylguanosine-3'-phosphate
  modified_base 14: mod_base = OTHER; note = 2'-O-methylguanosine-3'-phosphate
  modified_base 15: mod_base = OTHER; note = 2'-O-methyladenosine-3'-phosphate
  modified_base 16: mod_base = OTHER; note = 2'-O-methyladenosine-3'-phosphate
  modified_base 17: mod_base = OTHER; note = 2'-O-methyladenosine-3'-phosphate
  modified_base 18: mod_base = OTHER; note = 2'-O-methyluridine-3'-phosphate
  modified_base 19: mod_base = OTHER; note = 2'-O-methyladenosine-3'-phosphate
  modified_base 20: mod_base = OTHER; note = 2'-O-methyluridine-3'-phosphate
  modified_base 21: mod_base = OTHER; note = 2'-O-methyladenosine-3'-phosphate N-[tris(GalNAc-alkyl)-amidodecanoyl)]-4-hydroxyprolinol Hyp-(GalNAc-alkyl)3
gactttcatcctggaaatata

SEQ ID NO: 202 - RNA, 21 nt, synthetic construct
  source 1..21: mol_type = other RNA; note = Description of Artificial Sequence: Synthetic oligonucleotide
  modified_base 1: mod_base = OTHER; note = 2'-O-methylguanosine-3'-phosphorothioate
  modified_base 2: mod_base = OTHER; note = 2'-O-methyladenosine-3'-phosphorothioate
  modified_base 3: mod_base = OTHER; note = 2'-O-methylcytidine-3'-phosphate
  modified_base 4: mod_base = OTHER; note = 2'-O-methyluridine-3'-phosphate
  modified_base 5: mod_base = OTHER; note = 2'-O-methyluridine-3'-phosphate
  modified_base 6: mod_base = OTHER; note = 2'-O-methyluridine-3'-phosphate
  modified_base 7: mod_base = OTHER; note = 2'-fluorocytidine-3'-phosphate
  modified_base 8: mod_base = OTHER; note = 2'-O-methyladenosine-3'-phosphate
  modified_base 9: mod_base = OTHER; note = 2'-O-methyluridine-3'-phosphate
  modified_base 10: mod_base = OTHER; note = 2'-O-methylcytidine-3'-phosphate
  modified_base 11: mod_base = OTHER; note = 2'-fluorocytidine-3'-phosphate
  modified_base 12: mod_base = OTHER; note = 2'-O-methyluridine-3'-phosphate
  modified_base 13: mod_base = OTHER; note = 2'-O-methylguanosine-3'-phosphate
  modified_base 14: mod_base = OTHER; note = 2'-O-methylguanosine-3'-phosphate
  modified_base 15: mod_base = OTHER; note = 2'-O-methyladenosine-3'-phosphate
  modified_base 16: mod_base = OTHER; note = 2'-O-methyladenosine-3'-phosphate
  modified_base 17: mod_base = OTHER; note = 2'-fluoroadenosine-3'-phosphate
  modified_base 18: mod_base = OTHER; note = 2'-O-methyluridine-3'-phosphate
  modified_base 19: mod_base = OTHER; note = 2'-O-methyladenosine-3'-phosphate
  modified_base 20: mod_base = OTHER; note = 2'-O-methyluridine-3'-phosphate
  modified_base 21: mod_base = OTHER; note = 2'-O-methyladenosine-3'-phosphate N-[tris(GalNAc-alkyl)-amidodecanoyl)]-4-hydroxyprolinol Hyp-(GalNAc-alkyl)3
gactttcatcctggaaatata

SEQ ID NO: 203 - RNA, 21 nt, synthetic construct
  source 1..21: mol_type = other RNA; note = Description of Artificial Sequence: Synthetic oligonucleotide
  modified_base 1: mod_base = OTHER; note = 2'-O-methylguanosine-3'-phosphorothioate
  modified_base 2: mod_base = OTHER; note = 2'-O-methyladenosine-3'-phosphorothioate
  modified_base 3: mod_base = OTHER; note = 2'-O-methylcytidine-3'-phosphate
  modified_base 4: mod_base = OTHER; note = 2'-O-methyluridine-3'-phosphate
  modified_base 5: mod_base = OTHER; note = 2'-O-methyluridine-3'-phosphate
  modified_base 6: mod_base = OTHER; note = 2'-O-methyluridine-3'-phosphate
  modified_base 7: mod_base = OTHER; note = 2'-O-methylcytidine-3'-phosphate
  modified_base 8: mod_base = OTHER; note = 2'-O-methyladenosine-3'-phosphate
  modified_base 9: mod_base = OTHER; note = 2'-O-methyluridine-3'-phosphate
  modified_base 10: mod_base = OTHER; note = 2'-O-methylcytidine-3'-phosphate
  modified_base 11: mod_base = OTHER; note = 2'-fluorocytidine-3'-phosphate
  modified_base 12: mod_base = OTHER; note = 2'-O-methyluridine-3'-phosphate
  modified_base 13: mod_base = OTHER; note = 2'-O-methylguanosine-3'-phosphate
  modified_base 14: mod_base = OTHER; note = 2'-O-methylguanosine-3'-phosphate
  modified_base 15: mod_base = OTHER; note = 2'-O-methyladenosine-3'-phosphate
  modified_base 16: mod_base = OTHER; note = 2'-O-methyladenosine-3'-phosphate
  modified_base 17: mod_base = OTHER; note = 2'-fluoroadenosine-3'-phosphate
  modified_base 18: mod_base = OTHER; note = 2'-O-methyluridine-3'-phosphate
  modified_base 19: mod_base = OTHER; note = 2'-O-methyladenosine-3'-phosphate
  modified_base 20: mod_base = OTHER; note = 2'-O-methyluridine-3'-phosphate
  modified_base 21: mod_base = OTHER; note = 2'-O-methyladenosine-3'-phosphate N-[tris(GalNAc-alkyl)-amidodecanoyl)]-4-hydroxyprolinol Hyp-(GalNAc-alkyl)3
gactttcatcctggaaatata

SEQ ID NO: 204 - RNA, 21 nt, synthetic construct
  source 1..21: mol_type = other RNA; note = Description of Artificial Sequence: Synthetic oligonucleotide
  modified_base 1: mod_base = OTHER; note = 2'-O-methylguanosine-3'-phosphorothioate
  modified_base 2: mod_base = OTHER; note = 2'-O-methyladenosine-3'-phosphorothioate
  modified_base 3: mod_base = OTHER; note = 2'-O-methylcytidine-3'-phosphate
  modified_base 4: mod_base = OTHER; note = 2'-O-methyluridine-3'-phosphate
  modified_base 5: mod_base = OTHER; note = 2'-O-methyluridine-3'-phosphate
  modified_base 6: mod_base = OTHER; note = 2'-O-methyluridine-3'-phosphate
  modified_base 7: mod_base = OTHER; note = 2'-fluorocytidine-3'-phosphate
  modified_base 8: mod_base = OTHER; note = 2'-O-methyladenosine-3'-phosphate
  modified_base 9: mod_base = OTHER; note = 2'-O-methyluridine-3'-phosphate
  modified_base 10: mod_base = OTHER; note = 2'-O-methylcytidine-3'-phosphate
  modified_base 11: mod_base = OTHER; note = 2'-fluorocytidine-3'-phosphate
  modified_base 12: mod_base = OTHER; note = 2'-O-methyluridine-3'-phosphate
  modified_base 13: mod_base = OTHER; note = 2'-O-methylguanosine-3'-phosphate
  modified_base 14: mod_base = OTHER; note = 2'-O-methylguanosine-3'-phosphate
  modified_base 15: mod_base = OTHER; note = 2'-O-methyladenosine-3'-phosphate
  modified_base 16: mod_base = OTHER; note = 2'-O-methyladenosine-3'-phosphate
  modified_base 17: mod_base = OTHER; note = 2'-O-methyladenosine-3'-phosphate
  modified_base 18: mod_base = OTHER; note = 2'-O-methyluridine-3'-phosphate
  modified_base 19: mod_base = OTHER; note = 2'-O-methyladenosine-3'-phosphate
  modified_base 20: mod_base = OTHER; note = 2'-O-methyluridine-3'-phosphate
  modified_base 21: mod_base = OTHER; note = 2'-O-methyladenosine-3'-phosphate N-[tris(GalNAc-alkyl)-amidodecanoyl)]-4-hydroxyprolinol Hyp-(GalNAc-alkyl)3
gactttcatcctggaaatata

SEQ ID NO: 205 - RNA, 19 nt, synthetic construct
  source 1..19: mol_type = other RNA; note = Description of Artificial Sequence: Synthetic oligonucleotide
  modified_base 1: mod_base = OTHER; note = 2'-fluorocytidine-3'-phosphorothioate
  modified_base 2: mod_base = OTHER; note = 2'-O-methyluridine-3'-phosphorothioate
  modified_base 3: mod_base = OTHER; note = 2'-fluorouridine-3'-phosphate
  modified_base 4: mod_base = OTHER; note = 2'-O-methyluridine-3'-phosphate
  modified_base 5: mod_base = OTHER; note = 2'-fluorocytidine-3'-phosphate
  modified_base 6: mod_base = OTHER; note = 2'-O-methyladenosine-3'-phosphate
  modified_base 7: mod_base = OTHER; note = 2'-fluorouridine-3'-phosphate
  modified_base 8: mod_base = OTHER; note = 2'-fluorocytidine-3'-phosphate
  modified_base 9: mod_base = OTHER; note = 2'-fluorocytidine-3'-phosphate
  modified_base 10: mod_base = OTHER; note = 2'-O-methyluridine-3'-phosphate
  modified_base 11: mod_base = OTHER; note = 2'-fluoroguanosine-3'-phosphate
  modified_base 12: mod_base = OTHER; note = 2'-O-methylguanosine-3'-phosphate
  modified_base 13: mod_base = OTHER; note = 2'-fluoroadenosine-3'-phosphate
  modified_base 14: mod_base = OTHER; note = 2'-O-methyladenosine-3'-phosphate
  modified_base 15: mod_base = OTHER; note = 2'-fluoroadenosine-3'-phosphate
  modified_base 16: mod_base = OTHER; note = 2'-O-methyluridine-3'-phosphate
  modified_base 17: mod_base = OTHER; note = 2'-fluoroadenosine-3'-phosphate
  modified_base 18: mod_base = OTHER; note = 2'-O-methyluridine-3'-phosphate
  modified_base 19: mod_base = OTHER; note = 2'-fluoroadenosine-3'-phosphate N-[tris(GalNAc-alkyl)-amidodecanoyl)]-4-hydroxyprolinol Hyp-(GalNAc-alkyl)3
ctttcatcctggaaatata

SEQ ID NO: 206 - RNA, 19 nt, synthetic construct
  source 1..19: mol_type = other RNA; note = Description of Artificial Sequence: Synthetic oligonucleotide
  modified_base 1: mod_base = OTHER; note = 2'-O-methylcytidine-3'-phosphorothioate
  modified_base 2: mod_base = OTHER; note = 2'-O-methyluridine-3'-phosphorothioate
  modified_base 3: mod_base = OTHER; note = 2'-O-methyluridine-3'-phosphate
  modified_base 4: mod_base = OTHER; note = 2'-O-methyluridine-3'-phosphate
  modified_base 5: mod_base = OTHER; note = 2'-fluorocytidine-3'-phosphate
  modified_base 6: mod_base = OTHER; note = 2'-O-methyladenosine-3'-phosphate
  modified_base 7: mod_base = OTHER; note = 2'-fluorouridine-3'-phosphate
  modified_base 8: mod_base = OTHER; note = 2'-fluorocytidine-3'-phosphate
  modified_base 9: mod_base = OTHER; note = 2'-fluorocytidine-3'-phosphate
  modified_base 10: mod_base = OTHER; note = 2'-O-methyluridine-3'-phosphate
  modified_base 11: mod_base = OTHER; note = 2'-O-methylguanosine-3'-phosphate
  modified_base 12: mod_base = OTHER; note = 2'-O-methylguanosine-3'-phosphate
  modified_base 13: mod_base = OTHER; note = 2'-O-methyladenosine-3'-phosphate
  modified_base 14: mod_base = OTHER; note = 2'-O-methyladenosine-3'-phosphate
  modified_base 15: mod_base = OTHER; note = 2'-O-methyladenosine-3'-phosphate
  modified_base 16: mod_base = OTHER; note = 2'-O-methyluridine-3'-phosphate
  modified_base 17: mod_base = OTHER; note = 2'-O-methyladenosine-3'-phosphate
  modified_base 18: mod_base = OTHER; note = 2'-O-methyluridine-3'-phosphate
  modified_base 19: mod_base = OTHER; note = 2'-O-methyladenosine-3'-phosphate N-[tris(GalNAc-alkyl)-amidodecanoyl)]-4-hydroxyprolinol Hyp-(GalNAc-alkyl)3
ctttcatcctggaaatata

SEQ ID NO: 207 - RNA, 21 nt, synthetic construct
  source 1..21: mol_type = other RNA; note = Description of Artificial Sequence: Synthetic oligonucleotide
  modified_base 1: mod_base = OTHER; note = 2'-fluoroguanosine-3'-phosphorothioate
  modified_base 2: mod_base = OTHER; note = 2'-O-methyladenosine-3'-phosphorothioate
  modified_base 3: mod_base = OTHER; note = 2'-fluorocytidine-3'-phosphate
  modified_base 4: mod_base = OTHER; note = 2'-O-methyluridine-3'-phosphate
  modified_base 5: mod_base = OTHER; note = 2'-fluorouridine-3'-phosphate
  modified_base 6: mod_base = OTHER; note = 2'-O-methyluridine-3'-phosphate
  modified_base 7: mod_base = OTHER; note = 2'-fluorocytidine-3'-phosphate
  modified_base 8: mod_base = OTHER; note = 2'-O-methyladenosine-3'-phosphate
  modified_base 9: mod_base = OTHER; note = 2'-fluorouridine-3'-phosphate
  modified_base 10: mod_base = OTHER; note = 2'-fluorocytidine-3'-phosphate
  modified_base 11: mod_base = OTHER; note = 2'-fluorocytidine-3'-phosphate
  modified_base 12: mod_base = OTHER; note = 2'-O-methyluridine-3'-phosphate
  modified_base 13: mod_base = OTHER; note = 2'-fluoroguanosine-3'-phosphate
  modified_base 14: mod_base = OTHER; note = 2'-O-methylguanosine-3'-phosphate
  modified_base 15: mod_base = OTHER; note = 2'-fluoroadenosine-3'-phosphate
  modified_base 16: mod_base = OTHER; note = 2'-O-methyladenosine-3'-phosphate
  modified_base 17: mod_base = OTHER; note = 2'-fluoroadenosine-3'-phosphate
  modified_base 18: mod_base = OTHER; note = 2'-O-methyluridine-3'-phosphate
  modified_base 19: mod_base = OTHER; note = 2'-fluoroadenosine-3'-phosphate
  modified_base 20: mod_base = OTHER; note = 2'-O-methyluridine-3'-phosphate
  modified_base 21: mod_base = OTHER; note = 2'-fluoroadenosine-3'-phosphate N-[tris(GalNAc-alkyl)-amidodecanoyl)]-4-hydroxyprolinol Hyp-(GalNAc-alkyl)3
gactttcatcctggaaatata

SEQ ID NO: 208 - RNA, 21 nt, synthetic construct
  source 1..21: mol_type = other RNA; note = Description of Artificial Sequence: Synthetic oligonucleotide
  modified_base 1: mod_base = OTHER; note = 2'-fluoroguanosine-3'-phosphorothioate
  modified_base 2: mod_base = OTHER; note = 2'-O-methyladenosine-3'-phosphorothioate
  modified_base 3: mod_base = OTHER; note = 2'-fluorocytidine-3'-phosphate
  modified_base 4: mod_base = OTHER; note = 2'-O-methyluridine-3'-phosphate
  modified_base 5: mod_base = OTHER; note = 2'-fluorouridine-3'-phosphate
  modified_base 6: mod_base = OTHER; note = 2'-O-methyluridine-3'-phosphate
  modified_base 7: mod_base = OTHER; note = 2'-fluorocytidine-3'-phosphate
  modified_base 8: mod_base = OTHER; note = 2'-O-methyladenosine-3'-phosphate
  modified_base 9: mod_base = OTHER; note = 2'-fluorouridine-3'-phosphate
  modified_base 10: mod_base = OTHER; note = 2'-fluorocytidine-3'-phosphate
  modified_base 11: mod_base = OTHER; note = 2'-fluorocytidine-3'-phosphate
  modified_base 12: mod_base = OTHER; note = 2'-O-methyluridine-3'-phosphate
  modified_base 13: mod_base = OTHER; note = 2'-fluoroguanosine-3'-phosphate
  modified_base 14: mod_base = OTHER; note = 2'-O-methylguanosine-3'-phosphate
  modified_base 15: mod_base = OTHER; note = 2'-fluoroadenosine-3'-phosphate
  modified_base 16: mod_base = OTHER; note = 2'-O-methyladenosine-3'-phosphate
  modified_base 17: mod_base = OTHER; note = 2'-fluoroadenosine-3'-phosphate
  modified_base 18: mod_base = OTHER; note = 2'-O-methyluridine-3'-phosphate
  modified_base 19: mod_base = OTHER; note = 2'-fluoroadenosine-3'-phosphate
  modified_base 20: mod_base = OTHER; note = 2'-O-methyluridine-3'-phosphate
  modified_base 21: mod_base = OTHER; note = 2'-fluoroadenosine-3'-phosphate N-[tris(GalNAc-alkyl)-amidodecanoyl)]-4-hydroxyprolinol Hyp-(GalNAc-alkyl)3
gactttcatcctggaaatata

SEQ ID NO: 209 - RNA, 21 nt, synthetic construct
  source 1..21: mol_type = other RNA; note = Description of Artificial Sequence: Synthetic oligonucleotide
  modified_base 1: mod_base = OTHER; note = 2'-fluoroguanosine-3'-phosphorothioate
  modified_base 2: mod_base = OTHER; note = 2'-O-methyladenosine-3'-phosphorothioate
  modified_base 3: mod_base = OTHER; note = 2'-fluorocytidine-3'-phosphate
  modified_base 4: mod_base = OTHER; note = 2'-O-methyluridine-3'-phosphate
  modified_base 5: mod_base = OTHER; note = 2'-fluorouridine-3'-phosphate
  modified_base 6: mod_base = OTHER; note = 2'-O-methyluridine-3'-phosphate
  modified_base 7: mod_base = OTHER; note = 2'-fluorocytidine-3'-phosphate
  modified_base 8: mod_base = OTHER; note = 2'-O-methyladenosine-3'-phosphate
  modified_base 9: mod_base = OTHER; note = 2'-fluorouridine-3'-phosphate
  modified_base 10: mod_base = OTHER; note = 2'-fluorocytidine-3'-phosphate
  modified_base 11: mod_base = OTHER; note = 2'-fluorocytidine-3'-phosphate
  modified_base 12: mod_base = OTHER; note = 2'-O-methyluridine-3'-phosphate
  modified_base 13: mod_base = OTHER; note = 2'-fluoroguanosine-3'-phosphate
  modified_base 14: mod_base = OTHER; note = 2'-O-methylguanosine-3'-phosphate
  modified_base 15: mod_base = OTHER; note = 2'-fluoroadenosine-3'-phosphate
  modified_base 16: mod_base = OTHER; note = 2'-O-methyladenosine-3'-phosphate
  modified_base 17: mod_base = OTHER; note = 2'-fluoroadenosine-3'-phosphate
  modified_base 18: mod_base = OTHER; note = 2'-O-methyluridine-3'-phosphate
  modified_base 19: mod_base = OTHER; note = 2'-fluoroadenosine-3'-phosphate
  modified_base 20: mod_base = OTHER; note = 2'-O-methyluridine-3'-phosphate
  modified_base 21: mod_base = OTHER; note = 2'-fluoroadenosine-3'-phosphate N-[tris(GalNAc-alkyl)-amidodecanoyl)]-4-hydroxyprolinol Hyp-(GalNAc-alkyl)3
gactttcatcctggaaatata

SEQ ID NO: 210 - RNA, 21 nt, synthetic construct
  source 1..21: mol_type = other RNA; note = Description of Artificial Sequence: Synthetic oligonucleotide
  modified_base 1: mod_base = OTHER; note = 2'-fluoroguanosine-3'-phosphorothioate
  modified_base 2: mod_base = OTHER; note = 2'-O-methyladenosine-3'-phosphorothioate
  modified_base 3: mod_base = OTHER; note = 2'-fluorocytidine-3'-phosphate
  modified_base 4: mod_base = OTHER; note = 2'-O-methyluridine-3'-phosphate
  modified_base 5: mod_base = OTHER; note = 2'-fluorouridine-3'-phosphate
  modified_base 6: mod_base = OTHER; note = 2'-O-methyluridine-3'-phosphate
  modified_base 7: mod_base = OTHER; note = 2'-fluorocytidine-3'-phosphate
  modified_base 8: mod_base = OTHER; note = 2'-O-methyladenosine-3'-phosphate
  modified_base 9: mod_base = OTHER; note = 2'-fluorouridine-3'-phosphate
  modified_base 10: mod_base = OTHER; note = 2'-fluorocytidine-3'-phosphate
  modified_base 11: mod_base = OTHER; note = 2'-fluorocytidine-3'-phosphate
  modified_base 12: mod_base = OTHER; note = 2'-O-methyluridine-3'-phosphate
  modified_base 13: mod_base = OTHER; note = 2'-fluoroguanosine-3'-phosphate
  modified_base 14: mod_base = OTHER; note = 2'-O-methylguanosine-3'-phosphate
  modified_base 15: mod_base = OTHER; note = 2'-fluoroadenosine-3'-phosphate
  modified_base 16: mod_base = OTHER; note = 2'-O-methyladenosine-3'-phosphate
  modified_base 17: mod_base = OTHER; note = 2'-fluoroadenosine-3'-phosphate
  modified_base 18: mod_base = OTHER; note = 2'-O-methyluridine-3'-phosphate
  modified_base 19: mod_base = OTHER; note = 2'-fluoroadenosine-3'-phosphate
  modified_base 20: mod_base = OTHER; note = 2'-O-methyluridine-3'-phosphate
  modified_base 21: mod_base = OTHER; note = 2'-fluoroadenosine-3'-phosphate N-[tris(GalNAc-alkyl)-amidodecanoyl)]-4-hydroxyprolinol Hyp-(GalNAc-alkyl)3
gactttcatcctggaaatata

SEQ ID NO: 211 - RNA, 21 nt, synthetic construct
  source 1..21: mol_type = other RNA; note = Description of Artificial Sequence: Synthetic oligonucleotide
  modified_base 1: mod_base = OTHER; note = 2'-fluoroguanosine-3'-phosphorothioate
  modified_base 2: mod_base = OTHER; note = 2'-O-methyladenosine-3'-phosphorothioate
  modified_base 3: mod_base = OTHER; note = 2'-fluorocytidine-3'-phosphate
  modified_base 4: mod_base = OTHER; note = 2'-O-methyluridine-3'-phosphate
  modified_base 5: mod_base = OTHER; note = 2'-fluorouridine-3'-phosphate
  modified_base 6: mod_base = OTHER; note = 2'-O-methyluridine-3'-phosphate
  modified_base 7: mod_base = OTHER; note = 2'-fluorocytidine-3'-phosphate
  modified_base 8: mod_base = OTHER; note = 2'-O-methyladenosine-3'-phosphate
  modified_base 9: mod_base = OTHER; note = 2'-fluorouridine-3'-phosphate
  modified_base 10: mod_base = OTHER; note = 2'-fluorocytidine-3'-phosphate
  modified_base 11: mod_base = OTHER; note = 2'-fluorocytidine-3'-phosphate
  modified_base 12: mod_base = OTHER; note = 2'-O-methyluridine-3'-phosphate
  modified_base 13: mod_base = OTHER; note = 2'-fluoroguanosine-3'-phosphate
  modified_base 14: mod_base = OTHER; note = 2'-O-methylguanosine-3'-phosphate
  modified_base 15: mod_base = OTHER; note = 2'-fluoroadenosine-3'-phosphate
  modified_base 16: mod_base = OTHER; note = 2'-O-methyladenosine-3'-phosphate
  modified_base 17: mod_base = OTHER; note = 2'-fluoroadenosine-3'-phosphate
  modified_base 18: mod_base = OTHER; note = 2'-O-methyluridine-3'-phosphate
  modified_base 19: mod_base = OTHER; note = 2'-fluoroadenosine-3'-phosphate
  modified_base 20: mod_base = OTHER; note = 2'-O-methyluridine-3'-phosphate
  modified_base 21: mod_base = OTHER; note = 2'-fluoroadenosine-3'-phosphate N-[tris(GalNAc-alkyl)-amidodecanoyl)]-4-hydroxyprolinol Hyp-(GalNAc-alkyl)3
gactttcatcctggaaatata

SEQ ID NO: 212 - RNA, 21 nt, synthetic construct
  source 1..21: mol_type = other RNA; note = Description of Artificial Sequence: Synthetic oligonucleotide
  modified_base 1: mod_base = OTHER; note = 2'-O-methylguanosine-3'-phosphorothioate
  modified_base 2: mod_base = OTHER; note = 2'-O-methyladenosine-3'-phosphorothioate
  modified_base 3: mod_base = OTHER; note = 2'-O-methylcytidine-3'-phosphate
  modified_base 4: mod_base = OTHER; note = 2'-O-methyluridine-3'-phosphate
  modified_base 5: mod_base = OTHER; note = 2'-O-methyluridine-3'-phosphate
  modified_base 6: mod_base = OTHER; note = 2'-O-methyluridine-3'-phosphate
  modified_base 7: mod_base = OTHER; note = 2'-fluorocytidine-3'-phosphate
  modified_base 8: mod_base = OTHER; note = 2'-O-methyladenosine-3'-phosphate
  modified_base 9: mod_base = OTHER; note = 2'-fluorouridine-3'-phosphate
  modified_base 10: mod_base = OTHER; note = 2'-fluorocytidine-3'-phosphate
  modified_base 11: mod_base = OTHER; note = 2'-fluorocytidine-3'-phosphate
  modified_base 12: mod_base = OTHER; note = 2'-O-methyluridine-3'-phosphate
  modified_base 13: mod_base = OTHER; note = 2'-O-methylguanosine-3'-phosphate
  modified_base 14: mod_base = OTHER; note = 2'-O-methylguanosine-3'-phosphate
  modified_base 15: mod_base = OTHER; note = 2'-O-methyladenosine-3'-phosphate
  modified_base 16: mod_base = OTHER; note = 2'-O-methyladenosine-3'-phosphate
  modified_base 17: mod_base = OTHER; note = 2'-O-methyladenosine-3'-phosphate
  modified_base 18: mod_base = OTHER; note = 2'-O-methyluridine-3'-phosphate
  modified_base 19: mod_base = OTHER; note = 2'-O-methyladenosine-3'-phosphate
  modified_base 20: mod_base = OTHER; note = 2'-O-methyluridine-3'-phosphate
  modified_base 21: mod_base = OTHER; note = 2'-O-methyladenosine-3'-phosphate N-[tris(GalNAc-alkyl)-amidodecanoyl)]-4-hydroxyprolinol Hyp-(GalNAc-alkyl)3
gactttcatcctggaaatata

SEQ ID NO: 213 - RNA, 21 nt, synthetic construct
  source 1..21: mol_type = other RNA; note = Description of Artificial Sequence: Synthetic oligonucleotide
  modified_base 1: mod_base = OTHER; note = 2'-O-methylguanosine-3'-phosphorothioate
  modified_base 2: mod_base = OTHER; note = 2'-O-methyladenosine-3'-phosphorothioate
  modified_base 3: mod_base = OTHER; note = 2'-O-methylcytidine-3'-phosphate
  modified_base 4: mod_base = OTHER; note = 2'-O-methyluridine-3'-phosphate
  modified_base 5: mod_base = OTHER; note = 2'-O-methyluridine-3'-phosphate
  modified_base 6: mod_base = OTHER; note = 2'-O-methyluridine-3'-phosphate
  modified_base 7: mod_base = OTHER; note = 2'-fluorocytidine-3'-phosphate
  modified_base 8: mod_base = OTHER; note = 2'-O-methyladenosine-3'-phosphate
  modified_base 9: mod_base = OTHER; note = 2'-fluorouridine-3'-phosphate
  modified_base 10: mod_base = OTHER; note = 2'-fluorocytidine-3'-phosphate
  modified_base 11: mod_base = OTHER; note = 2'-fluorocytidine-3'-phosphate
  modified_base 12: mod_base = OTHER; note = 2'-O-methyluridine-3'-phosphate
  modified_base 13: mod_base = OTHER; note = 2'-O-methylguanosine-3'-phosphate
  modified_base 14: mod_base = OTHER; note = 2'-O-methylguanosine-3'-phosphate
  modified_base 15: mod_base = OTHER; note = 2'-O-methyladenosine-3'-phosphate
  modified_base 16: mod_base = OTHER; note = 2'-O-methyladenosine-3'-phosphate
  modified_base 17: mod_base = OTHER; note = 2'-O-methyladenosine-3'-phosphate
  modified_base 18: mod_base = OTHER; note = 2'-O-methyluridine-3'-phosphate
  modified_base 19: mod_base = OTHER; note = 2'-O-methyladenosine-3'-phosphate
  modified_base 20: mod_base = OTHER; note = 2'-O-methyluridine-3'-phosphate
  modified_base 21: mod_base = OTHER; note = 2'-O-methyladenosine-3'-phosphate N-[tris(GalNAc-alkyl)-amidodecanoyl)]-4-hydroxyprolinol Hyp-(GalNAc-alkyl)3
gactttcatcctggaaatata

SEQ ID NO: 214 - RNA, 21 nt, synthetic construct
  source 1..21: mol_type = other RNA; note = Description of Artificial Sequence: Synthetic oligonucleotide
  modified_base 1: mod_base = OTHER; note = 2'-O-methylguanosine-3'-phosphorothioate
  modified_base 2: mod_base = OTHER; note = 2'-O-methyladenosine-3'-phosphorothioate
  modified_base 3: mod_base = OTHER; note = 2'-O-methylcytidine-3'-phosphate
  modified_base 4: mod_base = OTHER; note = 2'-O-methyluridine-3'-phosphate
  modified_base 5: mod_base = OTHER; note = 2'-O-methyluridine-3'-phosphate
  modified_base 6: mod_base = OTHER; note = 2'-O-methyluridine-3'-phosphate
  modified_base 7: mod_base = OTHER; note = 2'-fluorocytidine-3'-phosphate
  modified_base 8: mod_base = OTHER; note = 2'-O-methyladenosine-3'-phosphate
  modified_base 9: mod_base = OTHER; note = 2'-fluorouridine-3'-phosphate
  modified_base 10: mod_base = OTHER; note = 2'-fluorocytidine-3'-phosphate
  modified_base 11: mod_base = OTHER; note = 2'-fluorocytidine-3'-phosphate
  modified_base 12: mod_base = OTHER; note = 2'-O-methyluridine-3'-phosphate
  modified_base 13: mod_base = OTHER; note = 2'-O-methylguanosine-3'-phosphate
  modified_base 14: mod_base = OTHER; note = 2'-O-methylguanosine-3'-phosphate
  modified_base 15: mod_base = OTHER; note = 2'-O-methyladenosine-3'-phosphate
  modified_base 16: mod_base = OTHER; note = 2'-O-methyladenosine-3'-phosphate
  modified_base 17: mod_base = OTHER; note = 2'-O-methyladenosine-3'-phosphate
  modified_base 18: mod_base = OTHER; note = 2'-O-methyluridine-3'-phosphate
  modified_base 19: mod_base = OTHER; note = 2'-O-methyladenosine-3'-phosphate
  modified_base 20: mod_base = OTHER; note = 2'-O-methyluridine-3'-phosphate
  modified_base 21: mod_base = OTHER; note = 2'-O-methyladenosine-3'-phosphate N-[tris(GalNAc-alkyl)-amidodecanoyl)]-4-hydroxyprolinol Hyp-(GalNAc-alkyl)3
gactttcatcctggaaatata

SEQ ID NO: 215 - RNA, 21 nt, synthetic construct
  source 1..21: mol_type = other RNA; note = Description of Artificial Sequence: Synthetic oligonucleotide
  modified_base 1: mod_base = OTHER; note = 2'-O-methylguanosine-3'-phosphorothioate
  modified_base 2: mod_base = OTHER; note = 2'-O-methyladenosine-3'-phosphorothioate
  modified_base 3: mod_base = OTHER; note = 2'-O-methylcytidine-3'-phosphate
  modified_base 4: mod_base = OTHER; note = 2'-O-methyluridine-3'-phosphate
  modified_base 5: mod_base = OTHER; note = 2'-O-methyluridine-3'-phosphate
  modified_base 6: mod_base = OTHER; note = 2'-O-methyluridine-3'-phosphate
  modified_base 7: mod_base = OTHER; note = 2'-fluorocytidine-3'-phosphate
  modified_base 8: mod_base = OTHER; note = 2'-O-methyladenosine-3'-phosphate
  modified_base 9: mod_base = OTHER; note = 2'-O-methyluridine-3'-phosphate
  modified_base 10: mod_base = OTHER; note = 2'-fluorocytidine-3'-phosphate
  modified_base 11: mod_base = OTHER; note = 2'-fluorocytidine-3'-phosphate
  modified_base 12: mod_base = OTHER; note = 2'-O-methyluridine-3'-phosphate
  modified_base 13: mod_base = OTHER; note = 2'-O-methylguanosine-3'-phosphate
  modified_base 14: mod_base = OTHER; note = 2'-O-methylguanosine-3'-phosphate
  modified_base 15: mod_base = OTHER; note = 2'-O-methyladenosine-3'-phosphate
  modified_base 16: mod_base = OTHER; note = 2'-O-methyladenosine-3'-phosphate
  modified_base 17: mod_base = OTHER; note = 2'-O-methyladenosine-3'-phosphate
  modified_base 18: mod_base = OTHER; note = 2'-O-methyluridine-3'-phosphate
  modified_base 19: mod_base = OTHER; note = 2'-O-methyladenosine-3'-phosphate
  modified_base 20: mod_base = OTHER; note = 2'-O-methyluridine-3'-phosphate
  modified_base 21: mod_base = OTHER; note = 2'-O-methyladenosine-3'-phosphate N-[tris(GalNAc-alkyl)-amidodecanoyl)]-4-hydroxyprolinol Hyp-(GalNAc-alkyl)3
gactttcatcctggaaatata

SEQ ID NO: 216 - RNA, 21 nt, synthetic construct
  source 1..21: mol_type = other RNA; note = Description of Artificial Sequence: Synthetic oligonucleotide
  modified_base 1: mod_base = OTHER; note = 2'-O-methylguanosine-3'-phosphorothioate
  modified_base 2: mod_base = OTHER; note = 2'-O-methyladenosine-3'-phosphorothioate
  modified_base 3: mod_base = OTHER; note = 2'-O-methylcytidine-3'-phosphate
  modified_base 4: mod_base = OTHER; note = 2'-O-methyluridine-3'-phosphate
  modified_base 5: mod_base = OTHER; note = 2'-O-methyluridine-3'-phosphate
  modified_base 6: mod_base = OTHER; note = 2'-O-methyluridine-3'-phosphate
  modified_base 7: mod_base = OTHER; note = 2'-fluorocytidine-3'-phosphate
  modified_base 8: mod_base = OTHER; note = 2'-O-methyladenosine-3'-phosphate
  modified_base 9: mod_base = OTHER; note = 2'-O-methyluridine-3'-phosphate
  modified_base 10: mod_base = OTHER; note = 2'-fluorocytidine-3'-phosphate
  modified_base 11: mod_base = OTHER; note = 2'-fluorocytidine-3'-phosphate
  modified_base 12: mod_base = OTHER; note = 2'-O-methyluridine-3'-phosphate
  modified_base 13: mod_base = OTHER; note = 2'-O-methylguanosine-3'-phosphate
  modified_base 14: mod_base = OTHER; note = 2'-O-methylguanosine-3'-phosphate
  modified_base 15: mod_base = OTHER; note = 2'-O-methyladenosine-3'-phosphate
  modified_base 16: mod_base = OTHER; note = 2'-O-methyladenosine-3'-phosphate
  modified_base 17: mod_base = OTHER; note = 2'-O-methyladenosine-3'-phosphate
  modified_base 18: mod_base = OTHER; note = 2'-O-methyluridine-3'-phosphate
  modified_base 19: mod_base = OTHER; note = 2'-O-methyladenosine-3'-phosphate
  modified_base 20: mod_base = OTHER; note = 2'-O-methyluridine-3'-phosphate
  modified_base 21: mod_base = OTHER; note = 2'-O-methyladenosine-3'-phosphate N-[tris(GalNAc-alkyl)-amidodecanoyl)]-4-hydroxyprolinol Hyp-(GalNAc-alkyl)3
gactttcatcctggaaatata

SEQ ID NO: 217 - RNA, 21 nt, synthetic construct
  source 1..21: mol_type = other RNA; note = Description of Artificial Sequence: Synthetic oligonucleotide
  modified_base 1: mod_base = OTHER; note = 2'-O-methylguanosine-3'-phosphorothioate
  modified_base 2: mod_base = OTHER; note = 2'-O-methyladenosine-3'-phosphorothioate
  modified_base 3: mod_base = OTHER; note = 2'-O-methylcytidine-3'-phosphate
  modified_base 4: mod_base = OTHER; note = 2'-O-methyluridine-3'-phosphate
  modified_base 5: mod_base = OTHER; note = 2'-O-methyluridine-3'-phosphate
  modified_base 6: mod_base = OTHER; note = 2'-O-methyluridine-3'-phosphate
  modified_base 7: mod_base = OTHER; note = 2'-fluorocytidine-3'-phosphate
  modified_base 8: mod_base = OTHER; note = 2'-O-methyladenosine-3'-phosphate
  modified_base 9: mod_base = OTHER; note = 2'-O-methyluridine-3'-phosphate
  modified_base 10: mod_base = OTHER; note = 2'-fluorocytidine-3'-phosphate
  modified_base 11: mod_base = OTHER; note = 2'-fluorocytidine-3'-phosphate
  modified_base 12: mod_base = OTHER; note = 2'-O-methyluridine-3'-phosphate
  modified_base 13: mod_base = OTHER; note = 2'-O-methylguanosine-3'-phosphate
  modified_base 14: mod_base = OTHER; note = 2'-O-methylguanosine-3'-phosphate
  modified_base 15: mod_base = OTHER; note = 2'-O-methyladenosine-3'-phosphate
  modified_base 16: mod_base = OTHER; note = 2'-O-methyladenosine-3'-phosphate
  modified_base 17: mod_base = OTHER; note = 2'-O-methyladenosine-3'-phosphate
  modified_base 18: mod_base = OTHER; note = 2'-O-methyluridine-3'-phosphate
  modified_base 19: mod_base = OTHER; note = 2'-O-methyladenosine-3'-phosphate
  modified_base 20: mod_base = OTHER; note = 2'-O-methyluridine-3'-phosphate
  modified_base 21: mod_base = OTHER; note = 2'-O-methyladenosine-3'-phosphate N-[tris(GalNAc-alkyl)-amidodecanoyl)]-4-hydroxyprolinol Hyp-(GalNAc-alkyl)3
gactttcatcctggaaatata

SEQ ID NO: 218 - RNA, 21 nt, synthetic construct
  source 1..21: mol_type = other RNA; note = Description of Artificial Sequence: Synthetic oligonucleotide
  modified_base 1: mod_base = OTHER; note = 2'-O-methylguanosine-3'-phosphorothioate
  modified_base 2: mod_base = OTHER; note = 2'-O-methyladenosine-3'-phosphorothioate
  modified_base 3: mod_base = OTHER; note = 2'-O-methylcytidine-3'-phosphate
  modified_base 4: mod_base = OTHER; note = 2'-O-methyluridine-3'-phosphate
  modified_base 5: mod_base = OTHER; note = 2'-O-methyluridine-3'-phosphate
  modified_base 6: mod_base = OTHER; note = 2'-O-methyluridine-3'-phosphate
  modified_base 7: mod_base = OTHER; note = 2'-O-methylcytidine-3'-phosphate
  modified_base 8: mod_base = OTHER; note = 2'-O-methyladenosine-3'-phosphate
  modified_base 9: mod_base = OTHER; note = 2'-O-methyluridine-3'-phosphate
  modified_base 10: mod_base = OTHER; note = 2'-O-methylcytidine-3'-phosphate
  modified_base 11: mod_base = OTHER; note = 2'-O-methylcytidine-3'-phosphate
  modified_base 12: mod_base = OTHER; note = 2'-O-methyluridine-3'-phosphate
  modified_base 13: mod_base = OTHER; note = 2'-O-methylguanosine-3'-phosphate
  modified_base 14: mod_base = OTHER; note = 2'-O-methylguanosine-3'-phosphate
  modified_base 15: mod_base = OTHER; note = 2'-O-methyladenosine-3'-phosphate
  modified_base 16: mod_base = OTHER; note = 2'-O-methyladenosine-3'-phosphate
  modified_base 17: mod_base = OTHER; note = Adenosine-glycol nucleic acid (GNA)
  modified_base 18: mod_base = OTHER; note = 2'-O-methyluridine-3'-phosphate
  modified_base 19: mod_base = OTHER; note = 2'-O-methyladenosine-3'-phosphate
  modified_base 20: mod_base = OTHER; note = 2'-O-methyluridine-3'-phosphate
  modified_base 21: mod_base = OTHER; note = 2'-O-methyladenosine-3'-phosphate N-[tris(GalNAc-alkyl)-amidodecanoyl)]-4-hydroxyprolinol Hyp-(GalNAc-alkyl)3
gactttcatcctggaaatata

SEQ ID NO: 219 - DNA, 21 bp, synthetic construct
  source 1..21: mol_type = other DNA; note = Description of Artificial Sequence: Synthetic oligonucleotide; note = Description of Combined DNA/RNA Molecule: Synthetic oligonucleotide
  modified_base 1: mod_base = OTHER; note = 2'-O-methylguanosine-3'-phosphorothioate
  modified_base 2: mod_base = OTHER; note = 2'-O-methyladenosine-3'-phosphorothioate
  modified_base 3: mod_base = OTHER; note = 2'-O-methylcytidine-3'-phosphate
  modified_base 4: mod_base = OTHER; note = 2'-O-methyluridine-3'-phosphate
  modified_base 5: mod_base = OTHER; note = 2'-O-methyluridine-3'-phosphate
  modified_base 6: mod_base = OTHER; note = 2'-O-methyluridine-3'-phosphate
  modified_base 7: mod_base = OTHER; note = 2'-O-methylcytidine-3'-phosphate
  modified_base 8: mod_base = OTHER; note = 2'-O-methyladenosine-3'-phosphate
  modified_base 9: mod_base = OTHER; note = 2'-O-methyluridine-3'-phosphate
  modified_base 10: mod_base = OTHER; note = 2'-O-methylcytidine-3'-phosphate
  modified_base 12: mod_base = OTHER; note = 2'-O-methyluridine-3'-phosphate
  modified_base 13: mod_base = OTHER; note = 2'-O-methylguanosine-3'-phosphate
  modified_base 14: mod_base = OTHER; note = 2'-O-methylguanosine-3'-phosphate
  modified_base 15: mod_base = OTHER; note = 2'-O-methyladenosine-3'-phosphate
  modified_base 16: mod_base = OTHER; note = 2'-O-methyladenosine-3'-phosphate
  modified_base 17: mod_base = OTHER; note = Adenosine-glycol nucleic acid (GNA)
  modified_base 18: mod_base = OTHER; note = 2'-O-methyluridine-3'-phosphate
  modified_base 19: mod_base = OTHER; note = 2'-O-methyladenosine-3'-phosphate
  modified_base 20: mod_base = OTHER; note = 2'-O-methyluridine-3'-phosphate
  modified_base 21: mod_base = OTHER; note = 2'-O-methyladenosine-3'-phosphate N-[tris(GalNAc-alkyl)-amidodecanoyl)]-4-hydroxyprolinol Hyp-(GalNAc-alkyl)3
  misc_feature 1..10: note = RNA
  misc_feature 11: note = DNA
  misc_feature 12..21: note = RNA
gactttcatcctggaaatata

SEQ ID NO: 220 - DNA, 21 bp, synthetic construct
  source 1..21: mol_type = other DNA; note = Description of Artificial Sequence: Synthetic oligonucleotide; note = Description of Combined DNA/RNA Molecule: Synthetic oligonucleotide
  modified_base 1: mod_base = OTHER; note = 2'-O-methylguanosine-3'-phosphorothioate
  modified_base 2: mod_base = OTHER; note = 2'-O-methyladenosine-3'-phosphorothioate
  modified_base 3: mod_base = OTHER; note = 2'-O-methylcytidine-3'-phosphate
  modified_base 4: mod_base = OTHER; note = 2'-O-methyluridine-3'-phosphate
  modified_base 6: mod_base = OTHER; note = 2'-O-methyluridine-3'-phosphate
  modified_base 7: mod_base = OTHER; note = 2'-O-methylcytidine-3'-phosphate
  modified_base 8: mod_base = OTHER; note = 2'-O-methyladenosine-3'-phosphate
  modified_base 9: mod_base = OTHER; note = 2'-O-methyluridine-3'-phosphate
  modified_base 10: mod_base = OTHER; note = 2'-O-methylcytidine-3'-phosphate
  modified_base 12: mod_base = OTHER; note = 2'-O-methyluridine-3'-phosphate
  modified_base 13: mod_base = OTHER; note = 2'-O-methylguanosine-3'-phosphate
  modified_base 14: mod_base = OTHER; note = 2'-O-methylguanosine-3'-phosphate
  modified_base 15: mod_base = OTHER; note = 2'-O-methyladenosine-3'-phosphate
  modified_base 16: mod_base = OTHER; note = 2'-O-methyladenosine-3'-phosphate
  modified_base 17: mod_base = OTHER; note = Adenosine-glycol nucleic acid (GNA)
  modified_base 18: mod_base = OTHER; note = 2'-O-methyluridine-3'-phosphate
  modified_base 19: mod_base = OTHER; note = 2'-O-methyladenosine-3'-phosphate
  modified_base 20: mod_base = OTHER; note = 2'-O-methyluridine-3'-phosphate
  modified_base 21: mod_base = OTHER; note = 2'-O-methyladenosine-3'-phosphate N-[tris(GalNAc-alkyl)-amidodecanoyl)]-4-hydroxyprolinol Hyp-(GalNAc-alkyl)3
  misc_feature 1..4: note = RNA
  misc_feature 5: note = DNA
  misc_feature 6..10: note = RNA
  misc_feature 11: note = DNA
  misc_feature 12..21: note = RNA
gactttcatcctggaaatata

SEQ ID NO: 221 - DNA, 21 bp, synthetic construct
  source 1..21: mol_type = other DNA; note = Description of Artificial Sequence: Synthetic oligonucleotide; note = Description of Combined DNA/RNA Molecule: Synthetic oligonucleotide
  modified_base 1: mod_base = OTHER; note = 2'-O-methylguanosine-3'-phosphorothioate
  modified_base 2: mod_base = OTHER; note = 2'-O-methyladenosine-3'-phosphorothioate
  modified_base 3: mod_base = OTHER; note = 2'-O-methylcytidine-3'-phosphate
  modified_base 4: mod_base = OTHER; note = 2'-O-methyluridine-3'-phosphate
  modified_base 5: mod_base = OTHER; note = 2'-O-methyluridine-3'-phosphate
  modified_base 7: mod_base = OTHER; note = 2'-O-methylcytidine-3'-phosphate
  modified_base 8: mod_base = OTHER; note = 2'-O-methyladenosine-3'-phosphate
  modified_base 9: mod_base = OTHER; note = 2'-O-methyluridine-3'-phosphate
  modified_base 10: mod_base = OTHER; note = 2'-O-methylcytidine-3'-phosphate
  modified_base 12: mod_base = OTHER; note = 2'-O-methyluridine-3'-phosphate
  modified_base 13: mod_base = OTHER; note = 2'-O-methylguanosine-3'-phosphate
  modified_base 14: mod_base = OTHER; note = 2'-O-methylguanosine-3'-phosphate
  modified_base 15: mod_base = OTHER; note = 2'-O-methyladenosine-3'-phosphate
  modified_base 16: mod_base = OTHER; note = 2'-O-methyladenosine-3'-phosphate
  modified_base 17: mod_base = OTHER; note = Adenosine-glycol nucleic acid (GNA)
  modified_base 18: mod_base = OTHER; note = 2'-O-methyluridine-3'-phosphate
  modified_base 19: mod_base = OTHER; note = 2'-O-methyladenosine-3'-phosphate
  modified_base 20: mod_base = OTHER; note = 2'-O-methyluridine-3'-phosphate
  modified_base 21: mod_base = OTHER; note = 2'-O-methyladenosine-3'-phosphate N-[tris(GalNAc-alkyl)-amidodecanoyl)]-4-hydroxyprolinol Hyp-(GalNAc-alkyl)3
  misc_feature 1..5: note = RNA
  misc_feature 6: note = DNA
  misc_feature 7..10: note = RNA
  misc_feature 11: note = DNA
  misc_feature 12..21: note = RNA
gactttcatcctggaaatata

SEQ ID NO: 222 - DNA, 21 bp, synthetic construct
  source 1..21: mol_type = other DNA; note = Description of Artificial Sequence: Synthetic oligonucleotide; note = Description of Combined DNA/RNA Molecule: Synthetic oligonucleotide
  modified_base 1: mod_base = OTHER; note = 2'-O-methylguanosine-3'-phosphorothioate
  modified_base 2: mod_base = OTHER; note = 2'-O-methyladenosine-3'-phosphorothioate
  modified_base 3: mod_base = OTHER; note = 2'-O-methylcytidine-3'-phosphate
  modified_base 4: mod_base = OTHER; note = 2'-O-methyluridine-3'-phosphate
  modified_base 5: mod_base = OTHER; note = 2'-O-methyluridine-3'-phosphate
  modified_base 6: mod_base = OTHER; note = 2'-O-methyluridine-3'-phosphate
  modified_base 8: mod_base = OTHER; note = 2'-O-methyladenosine-3'-phosphate
  modified_base 9: mod_base = OTHER; note = 2'-O-methyluridine-3'-phosphate
  modified_base 10: mod_base = OTHER; note = 2'-O-methylcytidine-3'-phosphate
  modified_base 12: mod_base = OTHER; note = 2'-O-methyluridine-3'-phosphate
  modified_base 13: mod_base = OTHER; note = 2'-O-methylguanosine-3'-phosphate
  modified_base 14: mod_base = OTHER; note = 2'-O-methylguanosine-3'-phosphate
  modified_base 15: mod_base = OTHER; note = 2'-O-methyladenosine-3'-phosphate
  modified_base 16: mod_base = OTHER; note = 2'-O-methyladenosine-3'-phosphate
  modified_base 17: mod_base = OTHER; note = Adenosine-glycol nucleic acid (GNA)
  modified_base 18: mod_base = OTHER; note = 2'-O-methyluridine-3'-phosphate
  modified_base 19: mod_base = OTHER; note = 2'-O-methyladenosine-3'-phosphate
  modified_base 20: mod_base = OTHER; note = 2'-O-methyluridine-3'-phosphate
  modified_base 21: mod_base = OTHER; note = 2'-O-methyladenosine-3'-phosphate N-[tris(GalNAc-alkyl)-amidodecanoyl)]-4-hydroxyprolinol Hyp-(GalNAc-alkyl)3
  misc_feature 1..6: note = RNA
  misc_feature 7: note = DNA
  misc_feature 8..10: note = RNA
  misc_feature 11: note = DNA
  misc_feature 12..21: note = RNA
gactttcatcctggaaatata

SEQ ID NO: 223 - DNA, 21 bp, synthetic construct
  source 1..21: mol_type = other DNA; note = Description of Artificial Sequence: Synthetic oligonucleotide; note = Description of Combined DNA/RNA Molecule: Synthetic oligonucleotide
  modified_base 1: mod_base = OTHER; note = 2'-O-methylguanosine-3'-phosphorothioate
  modified_base 2: mod_base = OTHER; note = 2'-O-methyladenosine-3'-phosphorothioate
  modified_base 3: mod_base = OTHER; note = 2'-O-methylcytidine-3'-phosphate
  modified_base 4: mod_base = OTHER; note = 2'-O-methyluridine-3'-phosphate
  modified_base 5: mod_base = OTHER; note = 2'-O-methyluridine-3'-phosphate
  modified_base 6: mod_base = OTHER; note = 2'-O-methyluridine-3'-phosphate
  modified_base 7: mod_base = OTHER; note = 2'-O-methylcytidine-3'-phosphate
  modified_base 8: mod_base = OTHER; note = 2'-O-methyladenosine-3'-phosphate
  modified_base 9: mod_base = OTHER; note = 2'-O-methyluridine-3'-phosphate
  modified_base 10: mod_base = OTHER; note = 2'-O-methylcytidine-3'-phosphate
  modified_base 12: mod_base = OTHER; note = 2'-O-methyluridine-3'-phosphate
  modified_base 13: mod_base = OTHER; note = 2'-O-methylguanosine-3'-phosphate
  modified_base 14: mod_base = OTHER; note = 2'-O-methylguanosine-3'-phosphate
  modified_base 15: mod_base = OTHER; note = 2'-O-methyladenosine-3'-phosphate
  modified_base 16: mod_base = OTHER; note = 2'-O-methyladenosine-3'-phosphate
  modified_base 18: mod_base = OTHER; note = 2'-O-methyluridine-3'-phosphate
  modified_base 19: mod_base = OTHER; note = 2'-O-methyladenosine-3'-phosphate
  modified_base 20: mod_base = OTHER; note = 2'-O-methyluridine-3'-phosphate
  modified_base 21: mod_base = OTHER; note = 2'-O-methyladenosine-3'-phosphate N-[tris(GalNAc-alkyl)-amidodecanoyl)]-4-hydroxyprolinol Hyp-(GalNAc-alkyl)3
  misc_feature 1..10: note = RNA
  misc_feature 11: note = DNA
  misc_feature 12..16: note = RNA
  misc_feature 17: note = DNA
  misc_feature 18..21: note = RNA
gactttcatcctggaaatata

SEQ ID NO: 224 - DNA, 21 bp, synthetic construct
  source 1..21: mol_type = other DNA; note = Description of Artificial Sequence: Synthetic oligonucleotide; note = Description of Combined DNA/RNA Molecule: Synthetic oligonucleotide
  modified_base 1: mod_base = OTHER; note = 2'-O-methylguanosine-3'-phosphorothioate
  modified_base 2: mod_base = OTHER; note = 2'-O-methyladenosine-3'-phosphorothioate
  modified_base 3: mod_base = OTHER; note = 2'-O-methylcytidine-3'-phosphate
  modified_base 4: mod_base = OTHER; note = 2'-O-methyluridine-3'-phosphate
  modified_base 5: mod_base = OTHER; note = 2'-O-methyluridine-3'-phosphate
  modified_base 6: mod_base = OTHER; note = 2'-O-methyluridine-3'-phosphate
  modified_base 7: mod_base = OTHER; note = 2'-O-methylcytidine-3'-phosphate
  modified_base 8: mod_base = OTHER; note = 2'-O-methyladenosine-3'-phosphate
  modified_base 9: mod_base = OTHER; note = 2'-O-methyluridine-3'-phosphate
  modified_base 10: mod_base = OTHER; note = 2'-O-methylcytidine-3'-phosphate
  modified_base 12: mod_base = OTHER; note = 2'-O-methyluridine-3'-phosphate
  modified_base 13: mod_base = OTHER; note = 2'-O-methylguanosine-3'-phosphate
  modified_base 14: mod_base = OTHER; note = 2'-O-methylguanosine-3'-phosphate
  modified_base 15: mod_base = OTHER; note = 2'-O-methyladenosine-3'-phosphate
  modified_base 16: mod_base = OTHER; note = 2'-O-methyladenosine-3'-phosphate
  modified_base 18: mod_base = OTHER; note = 2'-O-methyluridine-3'-phosphate
  modified_base 19: mod_base = OTHER; note = 2'-O-methyladenosine-3'-phosphate
  modified_base 20: mod_base = OTHER; note = 2'-O-methyluridine-3'-phosphate
  modified_base 21: mod_base = OTHER; note = 2'-O-methyladenosine-3'-phosphate N-[tris(GalNAc-alkyl)-amidodecanoyl)]-4-hydroxyprolinol Hyp-(GalNAc-alkyl)3
  misc_feature 1..10: note = RNA
  misc_feature 11: note = DNA
  misc_feature 12..16: note = RNA
  misc_feature 17: note = DNA
  misc_feature 18..21: note = RNA
gactttcatcctggaattata

SEQ ID NO: 225 - DNA, 21 bp, synthetic construct
  source 1..21: mol_type = other DNA; note = Description of Artificial Sequence: Synthetic oligonucleotide; note = Description of Combined DNA/RNA Molecule: Synthetic oligonucleotide
  modified_base 1: mod_base = OTHER; note = 2'-O-methylguanosine-3'-phosphorothioate
  modified_base 2: mod_base = OTHER; note = 2'-O-methyladenosine-3'-phosphorothioate
  modified_base 3: mod_base = OTHER; note = 2'-O-methylcytidine-3'-phosphate
  modified_base 4: mod_base = OTHER; note = 2'-O-methyluridine-3'-phosphate
  modified_base 5: mod_base = OTHER; note = 2'-O-methyluridine-3'-phosphate
  modified_base 6: mod_base = OTHER; note = 2'-O-methyluridine-3'-phosphate
  modified_base 7: mod_base = OTHER; note = 2'-O-methylcytidine-3'-phosphate
  modified_base 8: mod_base = OTHER; note = 2'-O-methyladenosine-3'-phosphate
  modified_base 9: mod_base = OTHER; note = 2'-O-methyluridine-3'-phosphate
  modified_base 10: mod_base = OTHER; note = 2'-O-methylcytidine-3'-phosphate
  modified_base 12: mod_base = OTHER; note = 2'-O-methyluridine-3'-phosphate
  modified_base 13: mod_base = OTHER; note = 2'-O-methylguanosine-3'-phosphate
  modified_base 14: mod_base = OTHER; note = 2'-O-methylguanosine-3'-phosphate
  modified_base 15: mod_base = OTHER; note = 2'-O-methyladenosine-3'-phosphate
  modified_base 16: mod_base = OTHER; note = 2'-O-methyladenosine-3'-phosphate
  misc_difference 17: note 2-hydroxymethyl-tetrahydrofurane-4-methoxy-3-phosphate (abasic 2'-OMe furanose)
  modified_base 18: mod_base = OTHER; note = 2'-O-methyluridine-3'-phosphate
  modified_base 19: mod_base = OTHER; note = 2'-O-methyladenosine-3'-phosphate
  modified_base 20: mod_base = OTHER; note = 2'-O-methyluridine-3'-phosphate
  modified_base 21: mod_base = OTHER; note = 2'-O-methyladenosine-3'-phosphate N-[tris(GalNAc-alkyl)-amidodecanoyl)]-4-hydroxyprolinol Hyp-(GalNAc-alkyl)3
  misc_feature 1..10: note = RNA
  misc_feature 11: note = DNA
  misc_feature 12..21: note = RNA
gactttcatcctggaantata

SEQ ID NO: 226 - DNA, 21 bp, synthetic construct
  source 1..21: mol_type = other DNA; note = Description of Artificial Sequence: Synthetic oligonucleotide; note = Description of Combined DNA/RNA Molecule: Synthetic oligonucleotide
  modified_base 1: mod_base = OTHER; note = 2'-O-methylguanosine-3'-phosphorothioate
  modified_base 2: mod_base = OTHER; note = 2'-O-methyladenosine-3'-phosphorothioate
  modified_base 3: mod_base = OTHER; note = 2'-O-methylcytidine-3'-phosphate
  modified_base 4: mod_base = OTHER; note = 2'-O-methyluridine-3'-phosphate
  modified_base 5: mod_base = OTHER; note = 2'-O-methyluridine-3'-phosphate
  modified_base 6: mod_base = OTHER; note = 2'-O-methyluridine-3'-phosphate
  modified_base 7: mod_base = OTHER; note = 2'-O-methylcytidine-3'-phosphate
  modified_base 8: mod_base = OTHER; note = 2'-O-methyladenosine-3'-phosphate
  modified_base 9: mod_base = OTHER; note = 2'-O-methyluridine-3'-phosphate
  modified_base 10: mod_base = OTHER; note = 2'-O-methylcytidine-3'-phosphate
  modified_base 12: mod_base = OTHER; note = 2'-O-methyluridine-3'-phosphate
  modified_base 13: mod_base = OTHER; note = 2'-O-methylguanosine-3'-phosphate
  modified_base 14: mod_base = OTHER; note = 2'-O-methylguanosine-3'-phosphate
  modified_base 16: mod_base = OTHER; note = 2'-O-methyladenosine-3'-phosphate
  modified_base 18: mod_base = OTHER; note = 2'-O-methyluridine-3'-phosphate
  modified_base 19: mod_base = OTHER; note = 2'-O-methyladenosine-3'-phosphate
  modified_base 20: mod_base = OTHER; note = 2'-O-methyluridine-3'-phosphate
  modified_base 21: mod_base = OTHER; note = 2'-O-methyladenosine-3'-phosphate N-[tris(GalNAc-alkyl)-amidodecanoyl)]-4-hydroxyprolinol Hyp-(GalNAc-alkyl)3
  misc_feature 1..10: note = RNA
  misc_feature 11: note = DNA
  misc_feature 12..14: note = RNA
  misc_feature 15: note = DNA
  misc_feature 16: note = RNA
  misc_feature 17: note = DNA
  misc_feature 18..21: note = RNA
gactttcatcctggaattata

SEQ ID NO: 227 - DNA, 21 bp, synthetic construct
  source 1..21: mol_type = other DNA; note = Description of Artificial Sequence: Synthetic oligonucleotide; note = Description of Combined DNA/RNA Molecule: Synthetic oligonucleotide
  modified_base 1: mod_base = OTHER; note = 2'-O-methylguanosine-3'-phosphorothioate
  modified_base 2: mod_base = OTHER; note = 2'-O-methyladenosine-3'-phosphorothioate
  modified_base 3: mod_base = OTHER; note = 2'-O-methylcytidine-3'-phosphate
  modified_base 4: mod_base = OTHER; note = 2'-O-methyluridine-3'-phosphate
  modified_base 5: mod_base = OTHER; note = 2'-O-methyluridine-3'-phosphate
  modified_base 6: mod_base = OTHER; note = 2'-O-methyluridine-3'-phosphate
  modified_base 7: mod_base = OTHER; note = 2'-O-methylcytidine-3'-phosphate
  modified_base 8: mod_base = OTHER; note = 2'-O-methyladenosine-3'-phosphate
  modified_base 9: mod_base = OTHER; note = 2'-O-methyluridine-3'-phosphate
  modified_base 10: mod_base = OTHER; note = 2'-O-methylcytidine-3'-phosphate
  modified_base 12: mod_base = OTHER; note = 2'-O-methyluridine-3'-phosphate
  modified_base 13: mod_base = OTHER; note = 2'-O-methylguanosine-3'-phosphate
  modified_base 14: mod_base = OTHER; note = 2'-O-methylguanosine-3'-phosphate
  modified_base 15: mod_base = OTHER; note = 2'-O-methyladenosine-3'-phosphate
  modified_base 16: mod_base = OTHER; note = 2'-O-methyladenosine-3'-phosphate
  modified_base 18: mod_base = OTHER; note = 2'-O-methyluridine-3'-phosphate
  modified_base 20: mod_base = OTHER; note = 2'-O-methyluridine-3'-phosphate
  modified_base 21: mod_base = OTHER; note = 2'-O-methyladenosine-3'-phosphate N-[tris(GalNAc-alkyl)-amidodecanoyl)]-4-hydroxyprolinol Hyp-(GalNAc-alkyl)3
  misc_feature 1..10: note = RNA
  misc_feature 11: note = DNA
  misc_feature 12..16: note = RNA
  misc_feature 17: note = DNA
  misc_feature 18: note = RNA
  misc_feature 19: note = DNA
  misc_feature 20..21: note = RNA
gactttcatcctggaattata

SEQ ID NO: 228 - DNA, 21 bp, synthetic construct
  source 1..21: mol_type = other DNA; note = Description of Artificial Sequence: Synthetic oligonucleotide; note = Description of Combined DNA/RNA Molecule: Synthetic oligonucleotide
  modified_base 1: mod_base = OTHER; note = 2'-O-methylguanosine-3'-phosphorothioate
  modified_base 2: mod_base = OTHER; note = 2'-O-methyladenosine-3'-phosphorothioate
  modified_base 3: mod_base = OTHER; note = 2'-O-methylcytidine-3'-phosphate
  modified_base 4: mod_base = OTHER; note = 2'-O-methyluridine-3'-phosphate
  modified_base 5: mod_base = OTHER; note = 2'-O-methyluridine-3'-phosphate
  modified_base 6: mod_base = OTHER; note = 2'-O-methyluridine-3'-phosphate
  modified_base 7: mod_base = OTHER; note = 2'-O-methylcytidine-3'-phosphate
  modified_base 8: mod_base = OTHER; note = 2'-O-methyladenosine-3'-phosphate
  modified_base 9: mod_base = OTHER; note = 2'-O-methyluridine-3'-phosphate
  modified_base 10: mod_base = OTHER; note = 2'-O-methylcytidine-3'-phosphate
  modified_base 12: mod_base = OTHER; note = 2'-O-methyluridine-3'-phosphate
  modified_base 13: mod_base = OTHER; note = 2'-O-methylguanosine-3'-phosphate
  modified_base 14: mod_base = OTHER; note = 2'-O-methylguanosine-3'-phosphate
  modified_base 15: mod_base = OTHER; note = 2'-O-methyladenosine-3'-phosphate
  modified_base 16: mod_base = OTHER; note = 2'-O-methyladenosine-3'-phosphate
  modified_base 17: mod_base = OTHER; note = Adenosine-glycol nucleic acid (GNA)
  modified_base 18: mod_base = OTHER; note = 2'-O-methyluridine-3'-phosphate
  modified_base 20: mod_base = OTHER; note = 2'-O-methyluridine-3'-phosphate
  modified_base 21: mod_base = OTHER; note = 2'-O-methyladenosine-3'-phosphate N-[tris(GalNAc-alkyl)-amidodecanoyl)]-4-hydroxyprolinol Hyp-(GalNAc-alkyl)3
  misc_feature 1..10: note = RNA
  misc_feature 11: note = DNA
  misc_feature 12..18: note = RNA
  misc_feature 19: note = DNA
  misc_feature 20..21: note = RNA
gactttcatcctggaaatata

SEQ ID NO: 229 - DNA, 21 bp, synthetic construct
  source 1..21: mol_type = other DNA; note = Description of Artificial Sequence: Synthetic oligonucleotide; note = Description of Combined DNA/RNA Molecule: Synthetic oligonucleotide
  modified_base 1: mod_base = OTHER; note = 2'-O-methylguanosine-3'-phosphorothioate
  modified_base 2: mod_base = OTHER; note = 2'-O-methyladenosine-3'-phosphorothioate
  modified_base 3: mod_base = OTHER; note = 2'-O-methylcytidine-3'-phosphate
  modified_base 4: mod_base = OTHER; note = 2'-O-methyluridine-3'-phosphate
  modified_base 5: mod_base = OTHER; note = 2'-O-methyluridine-3'-phosphate
  modified_base 7: mod_base = OTHER; note = 2'-O-methylcytidine-3'-phosphate
  modified_base 8: mod_base = OTHER; note = 2'-O-methyladenosine-3'-phosphate
  modified_base 9: mod_base = OTHER; note = 2'-O-methyluridine-3'-phosphate
  modified_base 10: mod_base = OTHER; note = 2'-O-methylcytidine-3'-phosphate
  modified_base 12: mod_base = OTHER; note = 2'-O-methyluridine-3'-phosphate
  modified_base 13: mod_base = OTHER; note = 2'-O-methylguanosine-3'-phosphate
  modified_base 14: mod_base = OTHER; note = 2'-O-methylguanosine-3'-phosphate
  modified_base 15: mod_base = OTHER; note = 2'-O-methyladenosine-3'-phosphate
  modified_base 16: mod_base = OTHER; note = 2'-O-methyladenosine-3'-phosphate
  modified_base 18: mod_base = OTHER; note = 2'-O-methyluridine-3'-phosphate
  modified_base 20: mod_base = OTHER; note = 2'-O-methyluridine-3'-phosphate
  modified_base 21: mod_base = OTHER; note = 2'-O-methyladenosine-3'-phosphate N-[tris(GalNAc-alkyl)-amidodecanoyl)]-4-hydroxyprolinol Hyp-(GalNAc-alkyl)3
  misc_feature 1..5: note = RNA
  misc_feature 6: note = DNA
  misc_feature 7..10: note = RNA
  misc_feature 11: note = DNA
  misc_feature 12..16: note = RNA
  misc_feature 17: note = DNA
  misc_feature 18: note = RNA
  misc_feature 19: note = DNA
  misc_feature 20..21: note = RNA
gactttcatcctggaaatata

SEQ ID NO: 230 - RNA, 21 nt, synthetic construct
  source 1..21: mol_type = other RNA; note = Description of Artificial Sequence: Synthetic oligonucleotide
  modified_base 1: mod_base = OTHER; note = 2'-fluoroguanosine-3'-phosphorothioate
  modified_base 2: mod_base = OTHER; note = 2'-O-methyladenosine-3'-phosphorothioate
  modified_base 3: mod_base = OTHER; note = 2'-fluorocytidine-3'-phosphate
  modified_base 4: mod_base = OTHER; note = 2'-O-methyluridine-3'-phosphate
  modified_base 5: mod_base = OTHER; note = 2'-fluorouridine-3'-phosphate
  modified_base 6: mod_base = OTHER; note = 2'-O-methyluridine-3'-phosphate
  modified_base 7: mod_base = OTHER; note = 2'-fluorocytidine-3'-phosphate
  modified_base 8: mod_base = OTHER; note = 2'-O-methyladenosine-3'-phosphate
  modified_base 9: mod_base = OTHER; note = 2'-fluorouridine-3'-phosphate
  modified_base 10: mod_base = OTHER; note = 2'-fluorocytidine-3'-phosphate
  modified_base 11: mod_base = OTHER; note = 2'-fluorocytidine-3'-phosphate
  modified_base 12: mod_base = OTHER; note = 2'-O-methyluridine-3'-phosphate
  modified_base 13: mod_base = OTHER; note = 2'-fluoroguanosine-3'-phosphate
  modified_base 14: mod_base = OTHER; note = 2'-O-methylguanosine-3'-phosphate
  modified_base 15: mod_base = OTHER; note = 2'-fluoroadenosine-3'-phosphate
  modified_base 16: mod_base = OTHER; note = 2'-O-methyladenosine-3'-phosphate
  modified_base 17: mod_base = OTHER; note = 2'-fluoroadenosine-3'-phosphate
  modified_base 18: mod_base = OTHER; note = 2'-O-methyluridine-3'-phosphate
  modified_base 19: mod_base = OTHER; note = 2'-fluoroadenosine-3'-phosphate
  modified_base 20: mod_base = OTHER; note = 2'-O-methyluridine-3'-phosphate
  modified_base 21: mod_base = OTHER; note = 2'-fluoroadenosine-3'-phosphate N-[tris(GalNAc-alkyl)-amidodecanoyl)]-4-hydroxyprolinol Hyp-(GalNAc-alkyl)3
gactttcatcctggaaatata

SEQ ID NO: 231 - RNA, 21 nt, synthetic construct
  source 1..21: mol_type = other RNA; note = Description of Artificial Sequence: Synthetic oligonucleotide
  modified_base 1: mod_base = OTHER; note = 2'-fluoroguanosine-3'-phosphorothioate
  modified_base 2: mod_base = OTHER; note = 2'-O-methyladenosine-3'-phosphorothioate
  modified_base 3: mod_base = OTHER; note = 2'-fluorocytidine-3'-phosphate
  modified_base 4: mod_base = OTHER; note = 2'-O-methyluridine-3'-phosphate
  modified_base 5: mod_base = OTHER; note = 2'-fluorouridine-3'-phosphate
  modified_base 6: mod_base = OTHER; note = 2'-O-methyluridine-3'-phosphate
  modified_base 7: mod_base = OTHER; note = 2'-fluorocytidine-3'-phosphate
  modified_base 8: mod_base = OTHER; note = 2'-O-methyladenosine-3'-phosphate
  modified_base 9: mod_base = OTHER; note = 2'-fluorouridine-3'-phosphate
  modified_base 10: mod_base = OTHER; note = 2'-fluorocytidine-3'-phosphate
  modified_base 11: mod_base = OTHER; note = 2'-fluorocytidine-3'-phosphate
  modified_base 12: mod_base = OTHER; note = 2'-O-methyluridine-3'-phosphate
  modified_base 13: mod_base = OTHER; note = 2'-fluoroguanosine-3'-phosphate
  modified_base 14: mod_base = OTHER; note = 2'-O-methylguanosine-3'-phosphate
  modified_base 15: mod_base = OTHER; note = 2'-fluoroadenosine-3'-phosphate
  modified_base 16: mod_base = OTHER; note = 2'-O-methyladenosine-3'-phosphate
  modified_base 17: mod_base = OTHER; note = 2'-fluoroadenosine-3'-phosphate
  modified_base 18: mod_base = OTHER; note = 2'-O-methyluridine-3'-phosphate
  modified_base 19: mod_base = OTHER; note = 2'-fluoroadenosine-3'-phosphate
  modified_base 20: mod_base = OTHER; note = 2'-O-methyluridine-3'-phosphate
  modified_base 21: mod_base = OTHER; note = 2'-fluoroadenosine-3'-phosphate N-[tris(GalNAc-alkyl)-amidodecanoyl)]-4-hydroxyprolinol Hyp-(GalNAc-alkyl)3
gactttcatcctggaaatata

SEQ ID NO: 232 - RNA, 21 nt, synthetic construct
  source 1..21: mol_type = other RNA; note = Description of Artificial Sequence: Synthetic oligonucleotide
  modified_base 1: mod_base = OTHER; note = 2'-fluoroguanosine-3'-phosphorothioate
  modified_base 2: mod_base = OTHER; note = 2'-O-methyladenosine-3'-phosphorothioate
  modified_base 3: mod_base = OTHER; note = 2'-fluorocytidine-3'-phosphate
  modified_base 4: mod_base = OTHER; note = 2'-O-methyluridine-3'-phosphate
  modified_base 5: mod_base = OTHER; note = 2'-fluorouridine-3'-phosphate
  modified_base 6: mod_base = OTHER; note = 2'-O-methyluridine-3'-phosphate
  modified_base 7: mod_base = OTHER; note = 2'-fluorocytidine-3'-phosphate
  modified_base 8: mod_base = OTHER; note = 2'-O-methyladenosine-3'-phosphate
  modified_base 9: mod_base = OTHER; note = 2'-fluorouridine-3'-phosphate
  modified_base 10: mod_base = OTHER; note = 2'-fluorocytidine-3'-phosphate
  modified_base 11: mod_base = OTHER; note = 2'-fluorocytidine-3'-phosphate
  modified_base 12: mod_base = OTHER; note = 2'-O-methyluridine-3'-phosphate
  modified_base 13: mod_base = OTHER; note = 2'-fluoroguanosine-3'-phosphate
  modified_base 14: mod_base = OTHER; note = 2'-O-methylguanosine-3'-phosphate
  modified_base 15: mod_base = OTHER; note = 2'-fluoroadenosine-3'-phosphate
  modified_base 16: mod_base = OTHER; note = 2'-O-methyladenosine-3'-phosphate
  modified_base 17: mod_base = OTHER; note = 2'-fluoroadenosine-3'-phosphate
  modified_base 18: mod_base = OTHER; note = 2'-O-methyluridine-3'-phosphate
  modified_base 19: mod_base = OTHER; note = 2'-fluoroadenosine-3'-phosphate
  modified_base 20: mod_base = OTHER; note = 2'-O-methyluridine-3'-phosphate
  modified_base 21: mod_base = OTHER; note = 2'-fluoroadenosine-3'-phosphate N-[tris(GalNAc-alkyl)-amidodecanoyl)]-4-hydroxyprolinol Hyp-(GalNAc-alkyl)3
gactttcatcctggaaatata

SEQ ID NO: 233 - RNA, 21 nt, synthetic construct
  source 1..21: mol_type = other RNA; note = Description of Artificial Sequence: Synthetic oligonucleotide
  modified_base 1: mod_base = OTHER; note = 2'-fluoroguanosine-3'-phosphorothioate
  modified_base 2: mod_base = OTHER; note = 2'-O-methyladenosine-3'-phosphorothioate
  modified_base 3: mod_base = OTHER; note = 2'-fluorocytidine-3'-phosphate
  modified_base 4: mod_base = OTHER; note = 2'-O-methyluridine-3'-phosphate
  modified_base 5: mod_base = OTHER; note = 2'-fluorouridine-3'-phosphate
  modified_base 6: mod_base = OTHER; note = 2'-O-methyluridine-3'-phosphate
  modified_base 7: mod_base = OTHER; note = 2'-fluorocytidine-3'-phosphate
  modified_base 8: mod_base = OTHER; note = 2'-O-methyladenosine-3'-phosphate
  modified_base 9: mod_base = OTHER; note = 2'-fluorouridine-3'-phosphate
  modified_base 10: mod_base = OTHER; note = 2'-fluorocytidine-3'-phosphate
  modified_base 11: mod_base = OTHER; note = 2'-fluorocytidine-3'-phosphate
  modified_base 12: mod_base = OTHER; note = 2'-O-methyluridine-3'-phosphate
  modified_base 13: mod_base = OTHER; note = 2'-fluoroguanosine-3'-phosphate
  modified_base 14: mod_base = OTHER; note = 2'-O-methylguanosine-3'-phosphate
  modified_base 15: mod_base = OTHER; note = 2'-fluoroadenosine-3'-phosphate
  modified_base 16: mod_base = OTHER; note = 2'-O-methyladenosine-3'-phosphate
  modified_base 17: mod_base = OTHER; note = 2'-fluoroadenosine-3'-phosphate
  modified_base 18: mod_base = OTHER; note = 2'-O-methyluridine-3'-phosphate
  modified_base 19: mod_base = OTHER; note = 2'-fluoroadenosine-3'-phosphate
  modified_base 20: mod_base = OTHER; note = 2'-O-methyluridine-3'-phosphate
  modified_base 21: mod_base = OTHER; note = 2'-fluoroadenosine-3'-phosphate N-[tris(GalNAc-alkyl)-amidodecanoyl)]-4-hydroxyprolinol Hyp-(GalNAc-alkyl)3
gactttcatcctggaaatata

SEQ ID NO: 234 - RNA, 21 nt, synthetic construct
  source 1..21: mol_type = other RNA; note = Description of Artificial Sequence: Synthetic oligonucleotide
  modified_base 1: mod_base = OTHER; note = 2'-fluoroguanosine-3'-phosphorothioate
  modified_base 2: mod_base = OTHER; note = 2'-O-methyladenosine-3'-phosphorothioate
  modified_base 3: mod_base = OTHER; note = 2'-fluorocytidine-3'-phosphate
  modified_base 4: mod_base = OTHER; note = 2'-O-methyluridine-3'-phosphate
  modified_base 5: mod_base = OTHER; note = 2'-fluorouridine-3'-phosphate
  modified_base 6: mod_base = OTHER; note = 2'-O-methyluridine-3'-phosphate
  modified_base 7: mod_base = OTHER; note = 2'-fluorocytidine-3'-phosphate
  modified_base 8: mod_base = OTHER; note = 2'-O-methyladenosine-3'-phosphate
  modified_base 9: mod_base = OTHER; note = 2'-fluorouridine-3'-phosphate
  modified_base 10: mod_base = OTHER; note = 2'-fluorocytidine-3'-phosphate
  modified_base 11: mod_base = OTHER; note = 2'-fluorocytidine-3'-phosphate
  modified_base 12: mod_base = OTHER; note = 2'-O-methyluridine-3'-phosphate
  modified_base 13: mod_base = OTHER; note = 2'-fluoroguanosine-3'-phosphate
  modified_base 14: mod_base = OTHER; note = 2'-O-methylguanosine-3'-phosphate
  modified_base 15: mod_base = OTHER; note = 2'-fluoroadenosine-3'-phosphate
  modified_base 16: mod_base = OTHER; note = 2'-O-methyladenosine-3'-phosphate
  modified_base 17: mod_base = OTHER; note = 2'-fluoroadenosine-3'-phosphate
  modified_base 18: mod_base = OTHER; note = 2'-O-methyluridine-3'-phosphate
  modified_base 19: mod_base = OTHER; note = 2'-fluoroadenosine-3'-phosphate
  modified_base 20: mod_base = OTHER; note = 2'-O-methyluridine-3'-phosphate
  modified_base 21: mod_base = OTHER; note = 2'-fluoroadenosine-3'-phosphate N-[tris(GalNAc-alkyl)-amidodecanoyl)]-4-hydroxyprolinol Hyp-(GalNAc-alkyl)3
gactttcatcctggaaatata

SEQ ID NO: 235 - RNA, 21 nt, synthetic construct
  source 1..21: mol_type = other RNA; note = Description of Artificial Sequence: Synthetic oligonucleotide
  modified_base 1: mod_base = OTHER; note = 2'-fluoroguanosine-3'-phosphorothioate
  modified_base 2: mod_base = OTHER; note = 2'-O-methyladenosine-3'-phosphorothioate
  modified_base 3: mod_base = OTHER; note = 2'-fluorocytidine-3'-phosphate
  modified_base 4: mod_base = OTHER; note = 2'-O-methyluridine-3'-phosphate
  modified_base 5: mod_base = OTHER; note = 2'-fluorouridine-3'-phosphate
  modified_base 6: mod_base = OTHER; note = 2'-O-methyluridine-3'-phosphate
  modified_base 7: mod_base = OTHER; note = 2'-fluorocytidine-3'-phosphate
  modified_base 8: mod_base = OTHER; note = 2'-O-methyladenosine-3'-phosphate
  modified_base 9: mod_base = OTHER; note = 2'-fluorouridine-3'-phosphate
  modified_base 10: mod_base = OTHER; note = 2'-fluorocytidine-3'-phosphate
  modified_base 11: mod_base = OTHER; note = 2'-fluorocytidine-3'-phosphate
  modified_base 12: mod_base = OTHER; note = 2'-O-methyluridine-3'-phosphate
  modified_base 13: mod_base = OTHER; note = 2'-fluoroguanosine-3'-phosphate
  modified_base 14: mod_base = OTHER; note = 2'-O-methylguanosine-3'-phosphate
  modified_base 15: mod_base = OTHER; note = 2'-fluoroadenosine-3'-phosphate
  modified_base 16: mod_base = OTHER; note = 2'-O-methyladenosine-3'-phosphate
  modified_base 17: mod_base = OTHER; note = 2'-fluoroadenosine-3'-phosphate
  modified_base 18: mod_base = OTHER; note = 2'-O-methyluridine-3'-phosphate
  modified_base 19: mod_base = OTHER; note = 2'-fluoroadenosine-3'-phosphate
  modified_base 20: mod_base = OTHER; note = 2'-O-methyluridine-3'-phosphate
  modified_base 21: mod_base = OTHER; note = 2'-fluoroadenosine-3'-phosphate N-[tris(GalNAc-alkyl)-amidodecanoyl)]-4-hydroxyprolinol Hyp-(GalNAc-alkyl)3
gactttcatcctggaaatata

SEQ ID NO: 236 - RNA, 21 nt, synthetic construct
  source 1..21: mol_type = other RNA; note = Description of Artificial Sequence: Synthetic oligonucleotide
  modified_base 1: mod_base = OTHER; note = 2'-fluoroguanosine-3'-phosphorothioate
  modified_base 2: mod_base = OTHER; note = 2'-O-methyladenosine-3'-phosphorothioate
  modified_base 3: mod_base = OTHER; note = 2'-fluorocytidine-3'-phosphate
  modified_base 4: mod_base = OTHER; note = 2'-O-methyluridine-3'-phosphate
  modified_base 5: mod_base = OTHER; note = 2'-fluorouridine-3'-phosphate
  modified_base 6: mod_base = OTHER; note = 2'-O-methyluridine-3'-phosphate
  modified_base 7: mod_base = OTHER; note = 2'-fluorocytidine-3'-phosphate
  modified_base 8: mod_base = OTHER; note = 2'-O-methyladenosine-3'-phosphate
  modified_base 9: mod_base = OTHER; note = 2'-fluorouridine-3'-phosphate
  modified_base 10: mod_base = OTHER; note = 2'-fluorocytidine-3'-phosphate
  modified_base 11: mod_base = OTHER; note = 2'-fluorocytidine-3'-phosphate
  modified_base 12: mod_base = OTHER; note = 2'-O-methyluridine-3'-phosphate
  modified_base 13: mod_base = OTHER; note = 2'-fluoroguanosine-3'-phosphate
  modified_base 14: mod_base = OTHER; note = 2'-O-methylguanosine-3'-phosphate
  modified_base 15: mod_base = OTHER; note = 2'-fluoroadenosine-3'-phosphate
  modified_base 16: mod_base = OTHER; note = 2'-O-methyladenosine-3'-phosphate
  modified_base 17: mod_base = OTHER; note = 2'-fluoroadenosine-3'-phosphate
  modified_base 18: mod_base = OTHER; note = 2'-O-methyluridine-3'-phosphate
  modified_base 19: mod_base = OTHER; note = 2'-fluoroadenosine-3'-phosphate
  modified_base 20: mod_base = OTHER; note = 2'-O-methyluridine-3'-phosphate
  modified_base 21: mod_base = OTHER; note = 2'-fluoroadenosine-3'-phosphate N-[tris(GalNAc-alkyl)-amidodecanoyl)]-4-hydroxyprolinol Hyp-(GalNAc-alkyl)3
gactttcatcctggaaatata

SEQ ID NO: 237 - DNA, 21 bp, synthetic construct
  source 1..21: mol_type = other DNA; note = Description of Artificial Sequence: Synthetic oligonucleotide; note = Description of Combined DNA/RNA Molecule: Synthetic oligonucleotide
  modified_base 1: mod_base = OTHER; note = 2'-O-methylguanosine-3'-phosphorothioate
  modified_base 2: mod_base = OTHER; note = 2'-O-methyladenosine-3'-phosphorothioate
  modified_base 3: mod_base = OTHER; note = 2'-O-methylcytidine-3'-phosphate
  modified_base 4: mod_base = OTHER; note = 2'-O-methyluridine-3'-phosphate
  modified_base 5: mod_base = OTHER; note = 2'-O-methyluridine-3'-phosphate
  modified_base 6: mod_base = OTHER; note = 2'-O-methyluridine-3'-phosphate
  modified_base 7: mod_base = OTHER; note = 2'-O-methylcytidine-3'-phosphate
  modified_base 8: mod_base = OTHER; note = 2'-O-methyladenosine-3'-phosphate
  modified_base 9: mod_base = OTHER; note = 2'-O-methyluridine-3'-phosphate
  modified_base 10: mod_base = OTHER; note = 2'-O-methylcytidine-3'-phosphate
  modified_base 12: mod_base = OTHER; note = 2'-O-methyluridine-3'-phosphate
  modified_base 13: mod_base = OTHER; note = 2'-O-methylguanosine-3'-phosphate
  modified_base 14: mod_base = OTHER; note = 2'-O-methylguanosine-3'-phosphate
  modified_base 15: mod_base = OTHER; note = 2'-O-methyladenosine-3'-phosphate
  modified_base 16: mod_base = OTHER; note = 2'-O-methyladenosine-3'-phosphate
  modified_base 17: mod_base = OTHER; note = Adenosine-glycol nucleic acid (GNA)
  modified_base 18: mod_base = OTHER; note = 2'-O-methyluridine-3'-phosphate
  modified_base 19: mod_base = OTHER; note = 2'-O-methyladenosine-3'-phosphate
  modified_base 20: mod_base = OTHER; note = 2'-O-methyluridine-3'-phosphate
  modified_base 21: mod_base = OTHER; note = 2'-O-methyladenosine-3'-phosphate N-[tris(GalNAc-alkyl)-amidodecanoyl)]-4-hydroxyprolinol Hyp-(GalNAc-alkyl)3
  misc_feature 1..10: note = RNA
  misc_feature 11: note = DNA
  misc_feature 12..21: note = RNA
gactttcatcctggaaatata

SEQ ID NO: 238 - RNA, 21 nt, synthetic construct
  source 1..21: mol_type = other RNA; note = Description of Artificial Sequence: Synthetic oligonucleotide
  modified_base 1: mod_base = OTHER; note = 2'-O-methyladenosine-3'-phosphorothioate
  modified_base 2: mod_base = OTHER; note = 2'-O-methylguanosine-3'-phosphorothioate
  modified_base 3: mod_base = OTHER; note = 2'-O-methyladenosine-3'-phosphate
  modified_base 4: mod_base = OTHER; note = 2'-O-methyladenosine-3'-phosphate
  modified_base 5: mod_base = OTHER; note = 2'-O-methyladenosine-3'-phosphate
  modified_base 6: mod_base = OTHER; note = 2'-O-methylguanosine-3'-phosphate
  modified_base 7: mod_base = OTHER; note = 2'-fluoroguanosine-3'-phosphate
  modified_base 8: mod_base = OTHER; note = 2'-O-methyluridine-3'-phosphate
  modified_base 9: mod_base = OTHER; note = 2'-fluoroguanosine-3'-phosphate
  modified_base 10: mod_base = OTHER; note = 2'-fluorouridine-3'-phosphate
  modified_base 11: mod_base = OTHER; note = 2'-fluorouridine-3'-phosphate
  modified_base 12: mod_base = OTHER; note = 2'-O-methylcytidine-3'-phosphate
  modified_base 13: mod_base = OTHER; note = 2'-O-methyladenosine-3'-phosphate
  modified_base 14: mod_base = OTHER; note = 2'-O-methyladenosine-3'-phosphate
  modified_base 15: mod_base = OTHER; note = 2'-O-methylguanosine-3'-phosphate
  modified_base 16: mod_base = OTHER; note = 2'-O-methyladenosine-3'-phosphate
  modified_base 17: mod_base = OTHER; note = 2'-O-methyluridine-3'-phosphate
  modified_base 18: mod_base = OTHER; note = 2'-O-methylguanosine-3'-phosphate
  modified_base 19: mod_base = OTHER; note = 2'-O-methyluridine-3'-phosphate
  modified_base 20: mod_base = OTHER; note = 2'-O-methylcytidine-3'-phosphate
  modified_base 21: mod_base = OTHER; note = 2'-O-methyladenosine-3'-phosphate N-[tris(GalNAc-alkyl)-amidodecanoyl)]-4-hydroxyprolinol Hyp-(GalNAc-alkyl)3
agaaaggtgttcaagatgtca

SEQ ID NO: 239 - RNA, 21 nt, synthetic construct
  source 1..21: mol_type = other RNA; note = Description of Artificial Sequence: Synthetic oligonucleotide
  modified_base 1: mod_base = OTHER; note = 2'-O-methylcytidine-3'-phosphorothioate
  modified_base 2: mod_base = OTHER; note = 2'-O-methyladenosine-3'-phosphorothioate
  modified_base 3: mod_base = OTHER; note = 2'-O-methyluridine-3'-phosphate
  modified_base 4: mod_base = OTHER; note = 2'-O-methylcytidine-3'-phosphate
  modified_base 5: mod_base = OTHER; note = 2'-O-methylcytidine-3'-phosphate
  modified_base 6: mod_base = OTHER; note = 2'-O-methyluridine-3'-phosphate
  modified_base 7: mod_base = OTHER; note = 2'-fluoroguanosine-3'-phosphate
  modified_base 8: mod_base = OTHER; note = 2'-O-methylguanosine-3'-phosphate
  modified_base 9: mod_base = OTHER; note = 2'-fluoroadenosine-3'-phosphate
  modified_base 10: mod_base = OTHER; note = 2'-fluoroadenosine-3'-phosphate
  modified_base 11: mod_base = OTHER; note = 2'-fluoroadenosine-3'-phosphate
  modified_base 12: mod_base = OTHER; note = 2'-O-methyluridine-3'-phosphate
  modified_base 13: mod_base = OTHER; note = 2'-O-methyladenosine-3'-phosphate
  modified_base 14: mod_base = OTHER; note = 2'-O-methyluridine-3'-phosphate
  modified_base 15: mod_base = OTHER; note = 2'-O-methyladenosine-3'-phosphate
  modified_base 16: mod_base = OTHER; note = 2'-O-methyluridine-3'-phosphate
  modified_base 17: mod_base = OTHER; note = 2'-O-methyluridine-3'-phosphate
  modified_base 18: mod_base = OTHER; note = 2'-O-methyladenosine-3'-phosphate
  modified_base 19: mod_base = OTHER; note = 2'-O-methyladenosine-3'-phosphate
  modified_base 20: mod_base = OTHER; note = 2'-O-methylcytidine-3'-phosphate
  modified_base 21: mod_base = OTHER; note = 2'-O-methyluridine-3'-phosphate N-[tris(GalNAc-alkyl)-amidodecanoyl)]-4-hydroxyprolinol Hyp-(GalNAc-alkyl)3
catcctggaaatatattaact

SEQ ID NO: 240 - RNA, 21 nt, synthetic construct
  source 1..21: mol_type = other RNA; note = Description of Artificial Sequence: Synthetic oligonucleotide
  modified_base 1: mod_base = OTHER; note = 2'-O-methylguanosine-3'-phosphorothioate
  modified_base 2: mod_base = OTHER; note = 2'-O-methyladenosine-3'-phosphorothioate
  modified_base 3: mod_base = OTHER; note = 2'-O-methyladenosine-3'-phosphate
  modified_base 4: mod_base = OTHER; note = 2'-O-methyluridine-3'-phosphate
  modified_base 5: mod_base = OTHER; note = 2'-O-methylguanosine-3'-phosphate
  modified_base 6: mod_base = OTHER; note = 2'-O-methyluridine-3'-phosphate
  modified_base 7: mod_base = OTHER; note = 2'-fluoroguanosine-3'-phosphate
  modified_base 8: mod_base = OTHER; note = 2'-O-methyladenosine-3'-phosphate
  modified_base 9: mod_base = OTHER; note = 2'-fluoroadenosine-3'-phosphate
  modified_base 10: mod_base = OTHER; note = 2'-fluoroadenosine-3'-phosphate
  modified_base 11: mod_base = OTHER; note = 2'-fluoroguanosine-3'-phosphate
  modified_base 12: mod_base = OTHER; note = 2'-O-methyluridine-3'-phosphate
  modified_base 13: mod_base = OTHER; note = 2'-O-methylcytidine-3'-phosphate
  modified_base 14: mod_base = OTHER; note = 2'-O-methyladenosine-3'-phosphate
  modified_base 15: mod_base = OTHER; note = 2'-O-methyluridine-3'-phosphate
  modified_base 16: mod_base = OTHER; note = 2'-O-methylcytidine-3'-phosphate
  modified_base 17: mod_base = OTHER; note = 2'-O-methylguanosine-3'-phosphate
  modified_base 18: mod_base = OTHER; note = 2'-O-methyladenosine-3'-phosphate
  modified_base 19: mod_base = OTHER; note = 2'-O-methylcytidine-3'-phosphate
  modified_base 20: mod_base = OTHER; note = 2'-O-methyladenosine-3'-phosphate
  modified_base 21: mod_base = OTHER; note = 2'-O-methyladenosine-3'-phosphate N-[tris(GalNAc-alkyl)-amidodecanoyl)]-4-hydroxyprolinol Hyp-(GalNAc-alkyl)3
gaatgtgaaagtcatcgacaa

SEQ ID NO: 241 - RNA, 21 nt, synthetic construct
  source 1..21: mol_type = other RNA; note = Description of Artificial Sequence: Synthetic oligonucleotide
  modified_base 1: mod_base = OTHER; note = 2'-O-methyladenosine-3'-phosphorothioate
  modified_base 2: mod_base = OTHER; note = 2'-O-methylguanosine-3'-phosphorothioate
  modified_base 3: mod_base = OTHER; note = 2'-O-methyluridine-3'-phosphate
  modified_base 4: mod_base = OTHER; note = 2'-O-methylguanosine-3'-phosphate
  modified_base 5: mod_base = OTHER; note = 2'-O-methylcytidine-3'-phosphate
  modified_base 6: mod_base = OTHER; note = 2'-O-methyladenosine-3'-phosphate
  modified_base 7: mod_base = OTHER; note = 2'-fluorocytidine-3'-phosphate
  modified_base 8: mod_base = OTHER; note = 2'-O-methyladenosine-3'-phosphate
  modified_base 9: mod_base = OTHER; note = 2'-fluoroadenosine-3'-phosphate
  modified_base 10: mod_base = OTHER; note = 2'-fluorouridine-3'-phosphate
  modified_base 11: mod_base = OTHER; note = 2'-fluoroadenosine-3'-phosphate
  modified_base 12: mod_base = OTHER; note = 2'-O-methyluridine-3'-phosphate
  modified_base 13: mod_base = OTHER; note = 2'-O-methyluridine-3'-phosphate
  modified_base 14: mod_base = OTHER; note = 2'-O-methyluridine-3'-phosphate
  modified_base 15: mod_base = OTHER; note = 2'-O-methyluridine-3'-phosphate
  modified_base 16: mod_base = OTHER; note = 2'-O-methylcytidine-3'-phosphate
  modified_base 17: mod_base = OTHER; note = 2'-O-methylcytidine-3'-phosphate
  modified_base 18: mod_base = OTHER; note = 2'-O-methylcytidine-3'-phosphate
  modified_base 19: mod_base = OTHER; note = 2'-O-methyladenosine-3'-phosphate
  modified_base 20: mod_base = OTHER; note = 2'-O-methyluridine-3'-phosphate
  modified_base 21: mod_base = OTHER; note = 2'-O-methyladenosine-3'-phosphate N-[tris(GalNAc-alkyl)-amidodecanoyl)]-4-hydroxyprolinol Hyp-(GalNAc-alkyl)3
agtgcacaatattttcccata

SEQ ID NO: 242 - RNA, 21 nt, synthetic construct
  source 1..21: mol_type = other RNA; note = Description of Artificial Sequence: Synthetic oligonucleotide
  modified_base 1: mod_base = OTHER; note = 2'-O-methylguanosine-3'-phosphorothioate
  modified_base 2: mod_base = OTHER; note = 2'-O-methyladenosine-3'-phosphorothioate
  modified_base 3: mod_base = OTHER; note = 2'-O-methyladenosine-3'-phosphate
  modified_base 4: mod_base = OTHER; note = 2'-O-methyladenosine-3'-phosphate
  modified_base 5: mod_base = OTHER; note = 2'-O-methylguanosine-3'-phosphate
  modified_base 6: mod_base = OTHER; note = 2'-O-methyluridine-3'-phosphate
  modified_base 7: mod_base = OTHER; note = 2'-fluorocytidine-3'-phosphate
  modified_base 8: mod_base = OTHER; note = 2'-O-methyladenosine-3'-phosphate
  modified_base 9: mod_base = OTHER; note = 2'-fluorouridine-3'-phosphate
  modified_base 10: mod_base = OTHER; note = 2'-fluorocytidine-3'-phosphate
  modified_base 11: mod_base = OTHER; note = 2'-fluoroguanosine-3'-phosphate
  modified_base 12: mod_base = OTHER; note = 2'-O-methyladenosine-3'-phosphate
  modified_base 13: mod_base = OTHER; note = 2'-O-methylcytidine-3'-phosphate
  modified_base 14: mod_base = OTHER; note = 2'-O-methyladenosine-3'-phosphate
  modified_base 15: mod_base = OTHER; note = 2'-O-methyladenosine-3'-phosphate
  modified_base 16: mod_base = OTHER; note = 2'-O-methylguanosine-3'-phosphate
  modified_base 17: mod_base = OTHER; note = 2'-O-methyladenosine-3'-phosphate
  modified_base 18: mod_base = OTHER; note = 2'-O-methylcytidine-3'-phosphate
  modified_base 19: mod_base = OTHER; note = 2'-O-methyladenosine-3'-phosphate
  modified_base 20: mod_base = OTHER; note = 2'-O-methyluridine-3'-phosphate
  modified_base 21: mod_base = OTHER; note = 2'-O-methyluridine-3'-phosphate N-[tris(GalNAc-alkyl)-amidodecanoyl)]-4-hydroxyprolinol Hyp-(GalNAc-alkyl)3
gaaagtcatcgacaagacatt

SEQ ID NO: 243 - RNA, 21 nt, synthetic construct
  source 1..21: mol_type = other RNA; note = Description of Artificial Sequence: Synthetic oligonucleotide
  modified_base 1: mod_base = OTHER; note = 2'-O-methyladenosine-3'-phosphorothioate
  modified_base 2: mod_base = OTHER; note = 2'-O-methyladenosine-3'-phosphorothioate
  modified_base 3: mod_base = OTHER; note = 2'-O-methyluridine-3'-phosphate
  modified_base 4: mod_base = OTHER; note = 2'-O-methylguanosine-3'-phosphate
  modified_base 5: mod_base = OTHER; note = 2'-O-methyluridine-3'-phosphate
  modified_base 6: mod_base = OTHER; note = 2'-O-methylguanosine-3'-phosphate
  modified_base 7: mod_base = OTHER; note = 2'-fluoroadenosine-3'-phosphate
  modified_base 8: mod_base = OTHER; note = 2'-O-methyladenosine-3'-phosphate
  modified_base 9: mod_base = OTHER; note = 2'-fluoroadenosine-3'-phosphate
  modified_base 10: mod_base = OTHER; note = 2'-fluoroguanosine-3'-phosphate
  modified_base 11: mod_base = OTHER; note = 2'-fluorouridine-3'-phosphate
  modified_base 12: mod_base = OTHER; note = 2'-O-methylcytidine-3'-phosphate
  modified_base 13: mod_base = OTHER; note = 2'-O-methyladenosine-3'-phosphate
  modified_base 14: mod_base = OTHER; note = 2'-O-methyluridine-3'-phosphate
  modified_base 15: mod_base = OTHER; note = 2'-O-methylcytidine-3'-phosphate
  modified_base 16: mod_base = OTHER; note = 2'-O-methylguanosine-3'-phosphate
  modified_base 17: mod_base = OTHER; note = 2'-O-methyladenosine-3'-phosphate
  modified_base 18: mod_base = OTHER; note = 2'-O-methylcytidine-3'-phosphate
  modified_base 19: mod_base = OTHER; note = 2'-O-methyladenosine-3'-phosphate
  modified_base 20: mod_base = OTHER; note = 2'-O-methyladenosine-3'-phosphate
  modified_base 21: mod_base = OTHER; note = 2'-O-methyladenosine-3'-phosphate N-[tris(GalNAc-alkyl)-amidodecanoyl)]-4-hydroxyprolinol Hyp-(GalNAc-alkyl)3
aatgtgaaagtcatcgacaaa

SEQ ID NO: 244 - RNA, 21 nt, synthetic construct
  source 1..21: mol_type = other RNA; note = Description of Artificial Sequence: Synthetic oligonucleotide
  modified_base 1: mod_base = OTHER; note = 2'-O-methylcytidine-3'-phosphorothioate
  modified_base 2: mod_base = OTHER; note = 2'-O-methyluridine-3'-phosphorothioate
  modified_base 3: mod_base = OTHER; note = 2'-O-methylguanosine-3'-phosphate
  modified_base 4: mod_base = OTHER; note = 2'-O-methylguanosine-3'-phosphate
  modified_base 5: mod_base = OTHER; note = 2'-O-methyladenosine-3'-phosphate
  modified_base 6: mod_base = OTHER; note = 2'-O-methyladenosine-3'-phosphate
  modified_base 7: mod_base = OTHER; note = 2'-fluoroadenosine-3'-phosphate
  modified_base 8: mod_base = OTHER; note = 2'-O-methyluridine-3'-phosphate
  modified_base 9: mod_base = OTHER; note = 2'-fluoroadenosine-3'-phosphate
  modified_base 10: mod_base = OTHER; note = 2'-fluorouridine-3'-phosphate
  modified_base 11: mod_base = OTHER; note = 2'-fluoroadenosine-3'-phosphate
  modified_base 12: mod_base = OTHER; note = 2'-O-methyluridine-3'-phosphate
  modified_base 13: mod_base = OTHER; note = 2'-O-methyluridine-3'-phosphate
  modified_base 14: mod_base = OTHER; note = 2'-O-methyladenosine-3'-phosphate
  modified_base 15: mod_base = OTHER; note = 2'-O-methyladenosine-3'-phosphate
  modified_base 16: mod_base = OTHER; note = 2'-O-methylcytidine-3'-phosphate
  modified_base 17: mod_base = OTHER; note = 2'-O-methyluridine-3'-phosphate
  modified_base 18: mod_base = OTHER; note = 2'-O-methylguanosine-3'-phosphate
  modified_base 19: mod_base = OTHER; note = 2'-O-methyluridine-3'-phosphate
  modified_base 20: mod_base = OTHER; note = 2'-O-methyluridine-3'-phosphate
  modified_base 21: mod_base = OTHER; note = 2'-O-methyladenosine-3'-phosphate N-[tris(GalNAc-alkyl)-amidodecanoyl)]-4-hydroxyprolinol Hyp-(GalNAc-alkyl)3
ctggaaatatattaactgtta

SEQ ID NO: 245 - RNA, 21 nt, synthetic construct
  source 1..21: mol_type = other RNA; note = Description of Artificial Sequence: Synthetic oligonucleotide
  modified_base 1: mod_base = OTHER; note = 2'-O-methyladenosine-3'-phosphorothioate
  modified_base 2: mod_base = OTHER; note = 2'-O-methyluridine-3'-phosphorothioate
  modified_base 3: mod_base = OTHER; note = 2'-O-methyluridine-3'-phosphate
  modified_base 4: mod_base = OTHER; note = 2'-O-methyluridine-3'-phosphate
  modified_base 5: mod_base = OTHER; note = 2'-O-methyluridine-3'-phosphate
  modified_base 6: mod_base = OTHER; note = 2'-O-methylcytidine-3'-phosphate
  modified_base 7: mod_base = OTHER; note = 2'-fluorocytidine-3'-phosphate
  modified_base 8: mod_base = OTHER; note = 2'-O-methylcytidine-3'-phosphate
  modified_base 9: mod_base = OTHER; note = 2'-fluoroadenosine-3'-phosphate
  modified_base 10: mod_base = OTHER; note = 2'-fluorouridine-3'-phosphate
  modified_base 11: mod_base = OTHER; note = 2'-fluorocytidine-3'-phosphate
  modified_base 12: mod_base = OTHER; note = 2'-O-methyluridine-3'-phosphate
  modified_base 13: mod_base = OTHER; note = 2'-O-methylguanosine-3'-phosphate
  modified_base 14: mod_base = OTHER; note = 2'-O-methyluridine-3'-phosphate
  modified_base 15: mod_base = OTHER; note = 2'-O-methyladenosine-3'-phosphate
  modified_base 16: mod_base = OTHER; note = 2'-O-methyluridine-3'-phosphate
  modified_base 17: mod_base = OTHER; note = 2'-O-methyluridine-3'-phosphate
  modified_base 18: mod_base = OTHER; note = 2'-O-methyladenosine-3'-phosphate
  modified_base 19: mod_base = OTHER; note = 2'-O-methyluridine-3'-phosphate
  modified_base 20: mod_base = OTHER; note = 2'-O-methyluridine-3'-phosphate
  modified_base 21: mod_base = OTHER; note = 2'-O-methyluridine-3'-phosphate N-[tris(GalNAc-alkyl)-amidodecanoyl)]-4-hydroxyprolinol Hyp-(GalNAc-alkyl)3
attttcccatctgtattattt

SEQ ID NO: 246 - RNA, 21 nt, synthetic construct
  source 1..21: mol_type = other RNA; note = Description of Artificial Sequence: Synthetic oligonucleotide
  modified_base 1: mod_base = OTHER; note = 2'-O-methyluridine-3'-phosphorothioate
  modified_base 2: mod_base = OTHER; note = 2'-O-methylguanosine-3'-phosphorothioate
  modified_base 3: mod_base = OTHER; note = 2'-O-methyluridine-3'-phosphate
  modified_base 4: mod_base = OTHER; note = 2'-O-methylcytidine-3'-phosphate
  modified_base 5: mod_base = OTHER; note = 2'-O-methylguanosine-3'-phosphate
  modified_base 6: mod_base = OTHER; note = 2'-O-methyluridine-3'-phosphate
  modified_base 7: mod_base = OTHER; note = 2'-fluorouridine-3'-phosphate
  modified_base 8: mod_base = OTHER; note = 2'-O-methylcytidine-3'-phosphate
  modified_base 9: mod_base = OTHER; note = 2'-fluorouridine-3'-phosphate
  modified_base 10: mod_base = OTHER; note = 2'-fluorouridine-3'-phosphate
  modified_base 11: mod_base = OTHER; note = 2'-fluorouridine-3'-phosphate
  modified_base 12: mod_base = OTHER; note = 2'-O-methyluridine-3'-phosphate
  modified_base 13: mod_base = OTHER; note = 2'-O-methylcytidine-3'-phosphate
  modified_base 14: mod_base = OTHER; note = 2'-O-methylcytidine-3'-phosphate
  modified_base 15: mod_base = OTHER; note = 2'-O-methyladenosine-3'-phosphate
  modified_base 16: mod_base = OTHER; note = 2'-O-methyladenosine-3'-phosphate
  modified_base 17: mod_base = OTHER; note = 2'-O-methylcytidine-3'-phosphate
  modified_base 18: mod_base = OTHER; note = 2'-O-methyladenosine-3'-phosphate
  modified_base 19: mod_base = OTHER; note = 2'-O-methyladenosine-3'-phosphate
  modified_base 20: mod_base = OTHER; note = 2'-O-methyladenosine-3'-phosphate
  modified_base 21: mod_base = OTHER; note = 2'-O-methyladenosine-3'-phosphate N-[tris(GalNAc-alkyl)-amidodecanoyl)]-4-hydroxyprolinol Hyp-(GalNAc-alkyl)3
tgtcgttcttttccaacaaaa

SEQ ID NO: 247 - RNA, 21 nt, synthetic construct
  source 1..21: mol_type = other RNA; note = Description of Artificial Sequence: Synthetic oligonucleotide
  modified_base 1: mod_base = OTHER; note = 2'-O-methyladenosine-3'-phosphorothioate
  modified_base 2: mod_base = OTHER; note = 2'-O-methyluridine-3'-phosphorothioate
  modified_base 3: mod_base = OTHER; note = 2'-O-methylcytidine-3'-phosphate
  modified_base 4: mod_base = OTHER; note = 2'-O-methylcytidine-3'-phosphate
  modified_base 5: mod_base = OTHER; note = 2'-O-methyluridine-3'-phosphate
  modified_base 6: mod_base = OTHER; note = 2'-O-methylguanosine-3'-phosphate
  modified_base 7: mod_base = OTHER; note = 2'-fluoroguanosine-3'-phosphate
  modified_base 8: mod_base = OTHER; note = 2'-O-methyladenosine-3'-phosphate
  modified_base 9: mod_base = OTHER; note = 2'-fluoroadenosine-3'-phosphate
  modified_base 10: mod_base = OTHER; note = 2'-fluoroadenosine-3'-phosphate
  modified_base 11: mod_base = OTHER; note = 2'-fluorouridine-3'-phosphate
  modified_base 12: mod_base = OTHER; note = 2'-O-methyladenosine-3'-phosphate
  modified_base 13: mod_base = OTHER; note = 2'-O-methyluridine-3'-phosphate
  modified_base 14: mod_base = OTHER; note = 2'-O-methyladenosine-3'-phosphate
  modified_base 15: mod_base = OTHER; note = 2'-O-methyluridine-3'-phosphate
  modified_base 16: mod_base = OTHER; note = 2'-O-methyluridine-3'-phosphate
  modified_base 17: mod_base = OTHER; note = 2'-O-methyladenosine-3'-phosphate
  modified_base 18: mod_base = OTHER; note = 2'-O-methyladenosine-3'-phosphate
  modified_base 19: mod_base = OTHER; note = 2'-O-methylcytidine-3'-phosphate
  modified_base 20: mod_base = OTHER; note = 2'-O-methyluridine-3'-phosphate
  modified_base 21: mod_base = OTHER; note = 2'-O-methyladenosine-3'-phosphate N-[tris(GalNAc-alkyl)-amidodecanoyl)]-4-hydroxyprolinol Hyp-(GalNAc-alkyl)3
atcctggaaatatattaacta

SEQ ID NO: 248 - RNA, 21 nt, synthetic construct
  source 1..21: mol_type = other RNA; note = Description of Artificial Sequence: Synthetic oligonucleotide
  modified_base 1: mod_base = OTHER; note = 2'-O-methylguanosine-3'-phosphorothioate
  modified_base 2: mod_base = OTHER; note = 2'-O-methylcytidine-3'-phosphorothioate
  modified_base 3: mod_base = OTHER; note = 2'-O-methyladenosine-3'-phosphate
  modified_base 4: mod_base = OTHER; note = 2'-O-methyluridine-3'-phosphate
  modified_base 5: mod_base = OTHER; note = 2'-O-methyluridine-3'-phosphate
  modified_base 6: mod_base = OTHER; note = 2'-O-methyluridine-3'-phosphate
  modified_base 7: mod_base = OTHER; note = 2'-fluorouridine-3'-phosphate
  modified_base 8: mod_base = OTHER; note = 2'-O-methylguanosine-3'-phosphate
  modified_base 9: mod_base = OTHER; note = 2'-fluoroadenosine-3'-phosphate
  modified_base 10: mod_base = OTHER; note = 2'-fluoroguanosine-3'-phosphate
  modified_base 11: mod_base = OTHER; note = 2'-fluoroadenosine-3'-phosphate
  modified_base 12: mod_base = OTHER; note = 2'-O-methylguanosine-3'-phosphate
  modified_base 13: mod_base = OTHER; note = 2'-O-methylguanosine-3'-phosphate
  modified_base 14: mod_base = OTHER; note = 2'-O-methyluridine-3'-phosphate
  modified_base 15: mod_base = OTHER; note = 2'-O-methylguanosine-3'-phosphate
  modified_base 16: mod_base = OTHER; note = 2'-O-methyladenosine-3'-phosphate
  modified_base 17: mod_base = OTHER; note = 2'-O-methyluridine-3'-phosphate
  modified_base 18: mod_base = OTHER; note = 2'-O-methylguanosine-3'-phosphate
  modified_base 19: mod_base = OTHER; note = 2'-O-methyladenosine-3'-phosphate
  modified_base 20: mod_base = OTHER; note = 2'-O-methyluridine-3'-phosphate
  modified_base 21: mod_base = OTHER; note = 2'-O-methyladenosine-3'-phosphate N-[tris(GalNAc-alkyl)-amidodecanoyl)]-4-hydroxyprolinol Hyp-(GalNAc-alkyl)3
gcattttgagaggtgatgata

SEQ ID NO: 249 - RNA, 21 nt, synthetic construct
  source 1..21: mol_type = other RNA; note = Description of Artificial Sequence: Synthetic oligonucleotide
  modified_base 1: mod_base = OTHER; note = 2'-O-methylcytidine-3'-phosphorothioate
  modified_base 2: mod_base = OTHER; note = 2'-O-methyladenosine-3'-phosphorothioate
  modified_base 3: mod_base = OTHER; note = 2'-O-methylguanosine-3'-phosphate
  modified_base 4: mod_base = OTHER; note = 2'-O-methylguanosine-3'-phosphate
  modified_base 5: mod_base = OTHER; note = 2'-O-methylguanosine-3'-phosphate
  modified_base 6: mod_base = OTHER; note = 2'-O-methylguanosine-3'-phosphate
  modified_base 7: mod_base = OTHER; note = 2'-fluoroguanosine-3'-phosphate
  modified_base 8: mod_base = OTHER; note = 2'-O-methyladenosine-3'-phosphate
  modified_base 9: mod_base = OTHER; note = 2'-fluoroguanosine-3'-phosphate
  modified_base 10: mod_base = OTHER; note = 2'-fluoroadenosine-3'-phosphate
  modified_base 11: mod_base = OTHER; note = 2'-fluoroadenosine-3'-phosphate
  modified_base 12: mod_base = OTHER; note = 2'-O-methyladenosine-3'-phosphate
  modified_base 13: mod_base = OTHER; note = 2'-O-methylguanosine-3'-phosphate
  modified_base 14: mod_base = OTHER; note = 2'-O-methylguanosine-3'-phosphate
  modified_base 15: mod_base = OTHER; note = 2'-O-methyluridine-3'-phosphate
  modified_base 16: mod_base = OTHER; note = 2'-O-methylguanosine-3'-phosphate
  modified_base 17: mod_base = OTHER; note = 2'-O-methyluridine-3'-phosphate
  modified_base 18: mod_base = OTHER; note = 2'-O-methyluridine-3'-phosphate
  modified_base 19: mod_base = OTHER; note = 2'-O-methylcytidine-3'-phosphate
  modified_base 20: mod_base = OTHER; note = 2'-O-methyladenosine-3'-phosphate
  modified_base 21: mod_base = OTHER; note = 2'-O-methyladenosine-3'-phosphate N-[tris(GalNAc-alkyl)-amidodecanoyl)]-4-hydroxyprolinol Hyp-(GalNAc-alkyl)3
cagggggagaaaggtgttcaa

SEQ ID NO: 250 - RNA, 21 nt, synthetic construct
  source 1..21: mol_type = other RNA; note = Description of Artificial Sequence: Synthetic oligonucleotide
  modified_base 1: mod_base = OTHER; note = 2'-O-methylguanosine-3'-phosphorothioate
  modified_base 2: mod_base = OTHER; note = 2'-O-methylguanosine-3'-phosphorothioate
  modified_base 3: mod_base = OTHER; note = 2'-O-methyladenosine-3'-phosphate
  modified_base 4: mod_base = OTHER; note = 2'-O-methyladenosine-3'-phosphate
  modified_base 5: mod_base = OTHER; note = 2'-O-methyladenosine-3'-phosphate
  modified_base 6: mod_base = OTHER; note = 2'-O-methyluridine-3'-phosphate
  modified_base 7: mod_base = OTHER; note = 2'-fluoroadenosine-3'-phosphate
  modified_base 8: mod_base = OTHER; note = 2'-O-methyluridine-3'-phosphate
  modified_base 9: mod_base = OTHER; note = 2'-fluoroadenosine-3'-phosphate
  modified_base 10: mod_base = OTHER; note = 2'-fluorouridine-3'-phosphate
  modified_base 11: mod_base = OTHER; note = 2'-fluorouridine-3'-phosphate
  modified_base 12: mod_base = OTHER; note = 2'-O-methyladenosine-3'-phosphate
  modified_base 13: mod_base = OTHER; note = 2'-O-methyladenosine-3'-phosphate
  modified_base 14: mod_base = OTHER; note = 2'-O-methylcytidine-3'-phosphate
  modified_base 15: mod_base = OTHER; note = 2'-O-methyluridine-3'-phosphate
  modified_base 16: mod_base = OTHER; note = 2'-O-methylguanosine-3'-phosphate
  modified_base 17: mod_base = OTHER; note = 2'-O-methyluridine-3'-phosphate
  modified_base 18: mod_base = OTHER; note = 2'-O-methyluridine-3'-phosphate
  modified_base 19: mod_base = OTHER; note = 2'-O-methyladenosine-3'-phosphate
  modified_base 20: mod_base = OTHER; note = 2'-O-methyladenosine-3'-phosphate
  modified_base 21: mod_base = OTHER; note = 2'-O-methyladenosine-3'-phosphate N-[tris(GalNAc-alkyl)-amidodecanoyl)]-4-hydroxyprolinol Hyp-(GalNAc-alkyl)3
ggaaatatattaactgttaaa

SEQ ID NO: 251 - RNA, 21 nt, synthetic construct
  source 1..21: mol_type = other RNA; note = Description of Artificial Sequence: Synthetic oligonucleotide
  modified_base 1: mod_base = OTHER; note = 2'-O-methylcytidine-3'-phosphorothioate
  modified_base 2: mod_base = OTHER; note = 2'-O-methyladenosine-3'-phosphorothioate
  modified_base 3: mod_base = OTHER; note = 2'-O-methyluridine-3'-phosphate
  modified_base 4: mod_base = OTHER; note = 2'-O-methyluridine-3'-phosphate
  modified_base 5: mod_base = OTHER; note = 2'-O-methylguanosine-3'-phosphate
  modified_base 6: mod_base = OTHER; note = 2'-O-methylguanosine-3'-phosphate
  modified_base 7: mod_base = OTHER; note = 2'-fluorouridine-3'-phosphate
  modified_base 8: mod_base = OTHER; note = 2'-O-methylguanosine-3'-phosphate
  modified_base 9: mod_base = OTHER; note = 2'-fluoroadenosine-3'-phosphate
  modified_base 10: mod_base = OTHER; note = 2'-fluoroguanosine-3'-phosphate
  modified_base 11: mod_base = OTHER; note = 2'-fluoroguanosine-3'-phosphate
  modified_base 12: mod_base = OTHER; note = 2'-O-methyladenosine-3'-phosphate
  modified_base 13: mod_base = OTHER; note = 2'-O-methyladenosine-3'-phosphate
  modified_base 14: mod_base = OTHER; note = 2'-O-methyladenosine-3'-phosphate
  modified_base 15: mod_base = OTHER; note = 2'-O-methyladenosine-3'-phosphate
  modified_base 16: mod_base = OTHER; note = 2'-O-methyladenosine-3'-phosphate
  modified_base 17: mod_base = OTHER; note = 2'-O-methyluridine-3'-phosphate
  modified_base 18: mod_base = OTHER; note = 2'-O-methylcytidine-3'-phosphate
  modified_base 19: mod_base = OTHER; note = 2'-O-methylcytidine-3'-phosphate
  modified_base 20: mod_base = OTHER; note = 2'-O-methyluridine-3'-phosphate
  modified_base 21: mod_base = OTHER; note = 2'-O-methyluridine-3'-phosphate N-[tris(GalNAc-alkyl)-amidodecanoyl)]-4-hydroxyprolinol Hyp-(GalNAc-alkyl)3
cattggtgaggaaaaatcctt

SEQ ID NO: 252 - RNA, 21 nt, synthetic construct
  source 1..21: mol_type = other RNA; note = Description of Artificial Sequence: Synthetic oligonucleotide
  modified_base 1: mod_base = OTHER; note = 2'-O-methylguanosine-3'-phosphorothioate
  modified_base 2: mod_base = OTHER; note = 2'-O-methylguanosine-3'-phosphorothioate
  modified_base 3: mod_base = OTHER; note = 2'-O-methylguanosine-3'-phosphate
  modified_base 4: mod_base = OTHER; note = 2'-O-methyladenosine-3'-phosphate
  modified_base 5: mod_base = OTHER; note = 2'-O-methylguanosine-3'-phosphate
  modified_base 6: mod_base = OTHER; note = 2'-O-methyladenosine-3'-phosphate
  modified_base 7: mod_base = OTHER; note = 2'-fluoroadenosine-3'-phosphate
  modified_base 8: mod_base = OTHER; note = 2'-O-methyladenosine-3'-phosphate
  modified_base 9: mod_base = OTHER; note = 2'-fluoroguanosine-3'-phosphate
  modified_base 10: mod_base = OTHER; note = 2'-fluoroguanosine-3'-phosphate
  modified_base 11: mod_base = OTHER; note = 2'-fluorouridine-3'-phosphate
  modified_base 12: mod_base = OTHER; note = 2'-O-methylguanosine-3'-phosphate
  modified_base 13: mod_base = OTHER; note = 2'-O-methyluridine-3'-phosphate
  modified_base 14: mod_base = OTHER; note = 2'-O-methyluridine-3'-phosphate
  modified_base 15: mod_base = OTHER; note = 2'-O-methylcytidine-3'-phosphate
  modified_base 16: mod_base = OTHER; note = 2'-O-methyladenosine-3'-phosphate
  modified_base 17: mod_base = OTHER; note = 2'-O-methyladenosine-3'-phosphate
  modified_base 18: mod_base = OTHER; note = 2'-O-methylguanosine-3'-phosphate
  modified_base 19: mod_base = OTHER; note = 2'-O-methyladenosine-3'-phosphate
  modified_base 20: mod_base = OTHER; note = 2'-O-methyluridine-3'-phosphate
  modified_base 21: mod_base = OTHER; note = 2'-O-methyladenosine-3'-phosphate N-[tris(GalNAc-alkyl)-amidodecanoyl)]-4-hydroxyprolinol Hyp-(GalNAc-alkyl)3
gggagaaaggtgttcaagata

SEQ ID NO: 253 - RNA, 21 nt, synthetic construct
  source 1..21: mol_type = other RNA; note = Description of Artificial Sequence: Synthetic oligonucleotide
  modified_base 1: mod_base = OTHER; note = 2'-O-methylguanosine-3'-phosphorothioate
  modified_base 2: mod_base = OTHER; note = 2'-O-methylguanosine-3'-phosphorothioate
  modified_base 3: mod_base = OTHER; note = 2'-O-methylcytidine-3'-phosphate
  modified_base 4: mod_base = OTHER; note = 2'-O-methyladenosine-3'-phosphate
  modified_base 5: mod_base = OTHER; note = 2'-O-methyluridine-3'-phosphate
  modified_base 6: mod_base = OTHER; note = 2'-O-methyluridine-3'-phosphate
  modified_base 7: mod_base = OTHER; note = 2'-fluorouridine-3'-phosphate
  modified_base 8: mod_base = OTHER; note = 2'-O-methyluridine-3'-phosphate
  modified_base 9: mod_base = OTHER; note = 2'-fluoroguanosine-3'-phosphate
  modified_base 10: mod_base = OTHER; note = 2'-fluoroadenosine-3'-phosphate
  modified_base 11: mod_base = OTHER; note = 2'-fluoroguanosine-3'-phosphate
  modified_base 12: mod_base = OTHER; note = 2'-O-methyladenosine-3'-phosphate
  modified_base 13: mod_base = OTHER; note = 2'-O-methylguanosine-3'-phosphate
  modified_base 14: mod_base = OTHER; note = 2'-O-methylguanosine-3'-phosphate
  modified_base 15: mod_base = OTHER; note = 2'-O-methyluridine-3'-phosphate
  modified_base 16: mod_base = OTHER; note = 2'-O-methylguanosine-3'-phosphate
  modified_base 17: mod_base = OTHER; note = 2'-O-methyladenosine-3'-phosphate
  modified_base 18: mod_base = OTHER; note = 2'-O-methyluridine-3'-phosphate
  modified_base 19: mod_base = OTHER; note = 2'-O-methylguanosine-3'-phosphate
  modified_base 20: mod_base = OTHER; note = 2'-O-methyladenosine-3'-phosphate
  modified_base 21: mod_base = OTHER; note = 2'-O-methyluridine-3'-phosphate N-[tris(GalNAc-alkyl)-amidodecanoyl)]-4-hydroxyprolinol Hyp-(GalNAc-alkyl)3
ggcattttgagaggtgatgat

SEQ ID NO: 254 - RNA, 21 nt, synthetic construct
  source 1..21: mol_type = other RNA; note = Description of Artificial Sequence: Synthetic oligonucleotide
  modified_base 1: mod_base = OTHER; note = 2'-O-methyluridine-3'-phosphorothioate
  modified_base 2: mod_base = OTHER; note = 2'-O-methyladenosine-3'-phosphorothioate
  modified_base 3: mod_base = OTHER; note = 2'-O-methylcytidine-3'-phosphate
  modified_base 4: mod_base = OTHER; note = 2'-O-methyladenosine-3'-phosphate
  modified_base 5: mod_base = OTHER; note = 2'-O-methyladenosine-3'-phosphate
  modified_base 6: mod_base = OTHER; note = 2'-O-methyladenosine-3'-phosphate
  modified_base 7: mod_base = OTHER; note = 2'-fluoroguanosine-3'-phosphate
  modified_base 8: mod_base = OTHER; note = 2'-O-methylguanosine-3'-phosphate
  modified_base 9: mod_base = OTHER; note = 2'-fluoroguanosine-3'-phosphate
  modified_base 10: mod_base = OTHER; note = 2'-fluorouridine-3'-phosphate
  modified_base 11: mod_base = OTHER; note = 2'-fluoroguanosine-3'-phosphate
  modified_base 12: mod_base = OTHER; note = 2'-O-methyluridine-3'-phosphate
  modified_base 13: mod_base = OTHER; note = 2'-O-methylcytidine-3'-phosphate
  modified_base 14: mod_base = OTHER; note = 2'-O-methylguanosine-3'-phosphate
  modified_base 15: mod_base = OTHER; note = 2'-O-methyluridine-3'-phosphate
  modified_base 16: mod_base = OTHER; note = 2'-O-methyluridine-3'-phosphate
  modified_base 17: mod_base = OTHER; note = 2'-O-methylcytidine-3'-phosphate
  modified_base 18: mod_base = OTHER; note = 2'-O-methyluridine-3'-phosphate
  modified_base 19: mod_base = OTHER; note = 2'-O-methyluridine-3'-phosphate
  modified_base 20: mod_base = OTHER; note = 2'-O-methyluridine-3'-phosphate
  modified_base 21: mod_base = OTHER; note = 2'-O-methyluridine-3'-phosphate N-[tris(GalNAc-alkyl)-amidodecanoyl)]-4-hydroxyprolinol Hyp-(GalNAc-alkyl)3
tacaaagggtgtcgttctttt

SEQ ID NO: 255 - RNA, 21 nt, synthetic construct
  source 1..21: mol_type = other RNA; note = Description of Artificial Sequence: Synthetic oligonucleotide
  modified_base 1: mod_base = OTHER; note = 2'-O-methyluridine-3'-phosphorothioate
  modified_base 2: mod_base = OTHER; note = 2'-O-methylguanosine-3'-phosphorothioate
  modified_base 3: mod_base = OTHER; note = 2'-O-methylguanosine-3'-phosphate
  modified_base 4: mod_base = OTHER; note = 2'-O-methylguanosine-3'-phosphate
  modified_base 5: mod_base = OTHER; note = 2'-O-methyladenosine-3'-phosphate
  modified_base 6: mod_base = OTHER; note = 2'-O-methyluridine-3'-phosphate
  modified_base 7: mod_base = OTHER; note = 2'-fluorocytidine-3'-phosphate
  modified_base 8: mod_base = OTHER; note = 2'-O-methyluridine-3'-phosphate
  modified_base 9: mod_base = OTHER; note = 2'-fluorouridine-3'-phosphate
  modified_base 10: mod_base = OTHER; note = 2'-fluoroguanosine-3'-phosphate
  modified_base 11: mod_base = OTHER; note = 2'-fluoroguanosine-3'-phosphate
  modified_base 12: mod_base = OTHER; note = 2'-O-methyluridine-3'-phosphate
  modified_base 13: mod_base = OTHER; note = 2'-O-methylguanosine-3'-phosphate
  modified_base 14: mod_base = OTHER; note = 2'-O-methyluridine-3'-phosphate
  modified_base 15: mod_base = OTHER; note = 2'-O-methylcytidine-3'-phosphate
  modified_base 16: mod_base = OTHER; note = 2'-O-methylguanosine-3'-phosphate
  modified_base 17: mod_base = OTHER; note = 2'-O-methyladenosine-3'-phosphate
  modified_base 18: mod_base = OTHER; note = 2'-O-methyladenosine-3'-phosphate
  modified_base 19: mod_base = OTHER; note = 2'-O-methyluridine-3'-phosphate
  modified_base 20: mod_base = OTHER; note = 2'-O-methylcytidine-3'-phosphate
  modified_base 21: mod_base = OTHER; note = 2'-O-methyladenosine-3'-phosphate N-[tris(GalNAc-alkyl)-amidodecanoyl)]-4-hydroxyprolinol Hyp-(GalNAc-alkyl)3
tgggatcttggtgtcgaatca

SEQ ID NO: 256 - RNA, 21 nt, synthetic construct
  source 1..21: mol_type = other RNA; note = Description of Artificial Sequence: Synthetic oligonucleotide
  modified_base 1: mod_base = OTHER; note = 2'-O-methylcytidine-3'-phosphorothioate
  modified_base 2: mod_base = OTHER; note = 2'-O-methyluridine-3'-phosphorothioate
  modified_base 3: mod_base = OTHER; note = 2'-O-methylguanosine-3'-phosphate
  modified_base 4: mod_base = OTHER; note = 2'-O-methyladenosine-3'-phosphate
  modified_base 5: mod_base = OTHER; note = 2'-O-methylcytidine-3'-phosphate
  modified_base 6: mod_base = OTHER; note = 2'-O-methyladenosine-3'-phosphate
  modified_base 7: mod_base = OTHER; note = 2'-fluoroguanosine-3'-phosphate
  modified_base 8: mod_base = OTHER; note = 2'-O-methyluridine-3'-phosphate
  modified_base 9: mod_base = OTHER; note = 2'-fluoroguanosine-3'-phosphate
  modified_base 10: mod_base = OTHER; note = 2'-fluorocytidine-3'-phosphate
  modified_base 11: mod_base = OTHER; note = 2'-fluoroadenosine-3'-phosphate
  modified_base 12: mod_base = OTHER; note = 2'-O-methylcytidine-3'-phosphate
  modified_base 13: mod_base = OTHER; note = 2'-O-methyladenosine-3'-phosphate
  modified_base 14: mod_base = OTHER; note = 2'-O-methyladenosine-3'-phosphate
  modified_base 15: mod_base = OTHER; note = 2'-O-methyluridine-3'-phosphate
  modified_base 16: mod_base = OTHER; note = 2'-O-methyladenosine-3'-phosphate
  modified_base 17: mod_base = OTHER; note = 2'-O-methyluridine-3'-phosphate
  modified_base 18: mod_base = OTHER; note = 2'-O-methyluridine-3'-phosphate
  modified_base 19: mod_base = OTHER; note = 2'-O-methyluridine-3'-phosphate
  modified_base 20: mod_base = OTHER; note = 2'-O-methyluridine-3'-phosphate
  modified_base 21: mod_base = OTHER; note = 2'-O-methyladenosine-3'-phosphate N-[tris(GalNAc-alkyl)-amidodecanoyl)]-4-hydroxyprolinol Hyp-(GalNAc-alkyl)3
ctgacagtgcacaatatttta

SEQ ID NO: 257 - RNA, 21 nt, synthetic construct
  source 1..21: mol_type = other RNA; note = Description of Artificial Sequence: Synthetic oligonucleotide
  modified_base 1: mod_base = OTHER; note = 2'-O-methylcytidine-3'-phosphorothioate
  modified_base 2: mod_base = OTHER; note = 2'-O-methyladenosine-3'-phosphorothioate
  modified_base 3: mod_base = OTHER; note = 2'-O-methylguanosine-3'-phosphate
  modified_base 4: mod_base = OTHER; note = 2'-O-methyluridine-3'-phosphate
  modified_base 5: mod_base = OTHER; note = 2'-O-methylguanosine-3'-phosphate
  modified_base 6: mod_base = OTHER; note = 2'-O-methylcytidine-3'-phosphate
  modified_base 7: mod_base = OTHER; note = 2'-fluoroadenosine-3'-phosphate
  modified_base 8: mod_base = OTHER; note = 2'-O-methylcytidine-3'-phosphate
  modified_base 9: mod_base = OTHER; note = 2'-fluoroadenosine-3'-phosphate
  modified_base 10: mod_base = OTHER; note = 2'-fluoroadenosine-3'-phosphate
  modified_base 11: mod_base = OTHER; note = 2'-fluorouridine-3'-phosphate
  modified_base 12: mod_base = OTHER; note = 2'-O-methyladenosine-3'-phosphate
  modified_base 13: mod_base = OTHER; note = 2'-O-methyluridine-3'-phosphate
  modified_base 14: mod_base = OTHER; note = 2'-O-methyluridine-3'-phosphate
  modified_base 15: mod_base = OTHER; note = 2'-O-methyluridine-3'-phosphate
  modified_base 16: mod_base = OTHER; note = 2'-O-methyluridine-3'-phosphate
  modified_base 17: mod_base = OTHER; note = 2'-O-methylcytidine-3'-phosphate
  modified_base 18: mod_base = OTHER; note = 2'-O-methylcytidine-3'-phosphate
  modified_base 19: mod_base = OTHER; note = 2'-O-methylcytidine-3'-phosphate
  modified_base 20: mod_base = OTHER; note = 2'-O-methyladenosine-3'-phosphate
  modified_base 21: mod_base = OTHER; note = 2'-O-methyluridine-3'-phosphate N-[tris(GalNAc-alkyl)-amidodecanoyl)]-4-hydroxyprolinol Hyp-(GalNAc-alkyl)3
cagtgcacaatattttcccat

SEQ ID NO: 258 - RNA, 21 nt, synthetic construct
  source 1..21: mol_type = other RNA; note = Description of Artificial Sequence: Synthetic oligonucleotide
  modified_base 1: mod_base = OTHER; note = 2'-O-methyladenosine-3'-phosphorothioate
  modified_base 2: mod_base = OTHER; note = 2'-O-methylcytidine-3'-phosphorothioate
  modified_base 3: mod_base = OTHER; note = 2'-O-methyluridine-3'-phosphate
  modified_base 4: mod_base = OTHER; note = 2'-O-methyluridine-3'-phosphate
  modified_base 5: mod_base = OTHER; note = 2'-O-methyluridine-3'-phosphate
  modified_base 6: mod_base = OTHER; note = 2'-O-methyluridine-3'-phosphate
  modified_base 7: mod_base = OTHER; note = 2'-fluorocytidine-3'-phosphate
  modified_base 8: mod_base = OTHER; note = 2'-O-methyladenosine-3'-phosphate
  modified_base 9: mod_base = OTHER; note = 2'-fluoroadenosine-3'-phosphate
  modified_base 10: mod_base = OTHER; note = 2'-fluorouridine-3'-phosphate
  modified_base 11: mod_base = OTHER; note = 2'-fluoroguanosine-3'-phosphate
  modified_base 12: mod_base = OTHER; note = 2'-O-methylguanosine-3'-phosphate
  modified_base 13: mod_base = OTHER; note = 2'-O-methylguanosine-3'-phosphate
  modified_base 14: mod_base = OTHER; note = 2'-O-methyluridine-3'-phosphate
  modified_base 15: mod_base = OTHER; note = 2'-O-methylguanosine-3'-phosphate
  modified_base 16: mod_base = OTHER; note = 2'-O-methyluridine-3'-phosphate
  modified_base 17: mod_base = OTHER; note = 2'-O-methylcytidine-3'-phosphate
  modified_base 18: mod_base = OTHER; note = 2'-O-methylcytidine-3'-phosphate
  modified_base 19: mod_base = OTHER; note = 2'-O-methyluridine-3'-phosphate
  modified_base 20: mod_base = OTHER; note = 2'-O-methyladenosine-3'-phosphate
  modified_base 21: mod_base = OTHER; note = 2'-O-methyladenosine-3'-phosphate N-[tris(GalNAc-alkyl)-amidodecanoyl)]-4-hydroxyprolinol Hyp-(GalNAc-alkyl)3
acttttcaatgggtgtcctaa

SEQ ID NO: 259 - RNA, 21 nt, synthetic construct
  source 1..21: mol_type = other RNA; note = Description of Artificial Sequence: Synthetic oligonucleotide
  modified_base 1: mod_base = OTHER; note = 2'-O-methyladenosine-3'-phosphorothioate
  modified_base 2: mod_base = OTHER; note = 2'-O-methylcytidine-3'-phosphorothioate
  modified_base 3: mod_base = OTHER; note = 2'-O-methyladenosine-3'-phosphate
  modified_base 4: mod_base = OTHER; note = 2'-O-methyluridine-3'-phosphate
  modified_base 5: mod_base = OTHER; note = 2'-O-methyluridine-3'-phosphate
  modified_base 6: mod_base = OTHER; note = 2'-O-methylguanosine-3'-phosphate
  modified_base 7: mod_base = OTHER; note = 2'-fluoroguanosine-3'-phosphate
  modified_base 8: mod_base = OTHER; note = 2'-O-methyluridine-3'-phosphate
  modified_base 9: mod_base = OTHER; note = 2'-fluoroguanosine-3'-phosphate
  modified_base 10: mod_base = OTHER; note = 2'-fluoroadenosine-3'-phosphate
  modified_base 11: mod_base = OTHER; note = 2'-fluoroguanosine-3'-phosphate
  modified_base 12: mod_base = OTHER; note = 2'-O-methylguanosine-3'-phosphate
  modified_base 13: mod_base = OTHER; note = 2'-O-methyladenosine-3'-phosphate
  modified_base 14: mod_base = OTHER; note = 2'-O-methyladenosine-3'-phosphate
  modified_base 15: mod_base = OTHER; note = 2'-O-methyladenosine-3'-phosphate
  modified_base 16: mod_base = OTHER; note = 2'-O-methyladenosine-3'-phosphate
  modified_base 17: mod_base = OTHER; note = 2'-O-methyladenosine-3'-phosphate
  modified_base 18: mod_base = OTHER; note = 2'-O-methyluridine-3'-phosphate
  modified_base 19: mod_base = OTHER; note = 2'-O-methylcytidine-3'-phosphate
  modified_base 20: mod_base = OTHER; note = 2'-O-methylcytidine-3'-phosphate
  modified_base 21: mod_base = OTHER; note = 2'-O-methyluridine-3'-phosphate N-[tris(GalNAc-alkyl)-amidodecanoyl)]-4-hydroxyprolinol Hyp-(GalNAc-alkyl)3
acattggtgaggaaaaatcct

SEQ ID NO: 260 - RNA, 21 nt, synthetic construct
  source 1..21: mol_type = other RNA; note = Description of Artificial Sequence: Synthetic oligonucleotide
  modified_base 1: mod_base = OTHER; note = 2'-O-methyluridine-3'-phosphorothioate
  modified_base 2: mod_base = OTHER; note = 2'-O-methyluridine-3'-phosphorothioate
  modified_base 3: mod_base = OTHER; note = 2'-O-methylguanosine-3'-phosphate
  modified_base 4: mod_base = OTHER; note = 2'-O-methylcytidine-3'-phosphate
  modified_base 5: mod_base = OTHER; note = 2'-O-methyluridine-3'-phosphate
  modified_base 6: mod_base = OTHER; note = 2'-O-methyluridine-3'-phosphate
  modified_base 7: mod_base = OTHER; note = 2'-fluorouridine-3'-phosphate
  modified_base 8: mod_base = OTHER; note = 2'-O-methyluridine-3'-phosphate
  modified_base 9: mod_base = OTHER; note = 2'-fluoroguanosine-3'-phosphate
  modified_base 10: mod_base = OTHER; note = 2'-fluoroadenosine-3'-phosphate
  modified_base 11: mod_base = OTHER; note = 2'-fluorocytidine-3'-phosphate
  modified_base 12: mod_base = OTHER; note = 2'-O-methyluridine-3'-phosphate
  modified_base 13: mod_base = OTHER; note = 2'-O-methyluridine-3'-phosphate
  modified_base 14: mod_base = OTHER; note = 2'-O-methyluridine-3'-phosphate
  modified_base 15: mod_base = OTHER; note = 2'-O-methyluridine-3'-phosphate
  modified_base 16: mod_base = OTHER; note = 2'-O-methylcytidine-3'-phosphate
  modified_base 17: mod_base = OTHER; note = 2'-O-methyladenosine-3'-phosphate
  modified_base 18: mod_base = OTHER; note = 2'-O-methyladenosine-3'-phosphate
  modified_base 19: mod_base = OTHER; note = 2'-O-methyluridine-3'-phosphate
  modified_base 20: mod_base = OTHER; note = 2'-O-methylguanosine-3'-phosphate
  modified_base 21: mod_base = OTHER; note = 2'-O-methyladenosine-3'-phosphate N-[tris(GalNAc-alkyl)-amidodecanoyl)]-4-hydroxyprolinol Hyp-(GalNAc-alkyl)3
ttgcttttgacttttcaatga

SEQ ID NO: 261 - RNA, 21 nt, synthetic construct
  source 1..21: mol_type = other RNA; note = Description of Artificial Sequence: Synthetic oligonucleotide
  modified_base 1: mod_base = OTHER; note = 2'-O-methylcytidine-3'-phosphorothioate
  modified_base 2: mod_base = OTHER; note = 2'-O-methyladenosine-3'-phosphorothioate
  modified_base 3: mod_base = OTHER; note = 2'-O-methyluridine-3'-phosphate
  modified_base 4: mod_base = OTHER; note = 2'-O-methyluridine-3'-phosphate
  modified_base 5: mod_base = OTHER; note = 2'-O-methyluridine-3'-phosphate
  modified_base 6: mod_base = OTHER; note = 2'-O-methyluridine-3'-phosphate
  modified_base 7: mod_base = OTHER; note = 2'-fluoroguanosine-3'-phosphate
  modified_base 8: mod_base = OTHER; note = 2'-O-methyladenosine-3'-phosphate
  modified_base 9: mod_base = OTHER; note = 2'-fluoroguanosine-3'-phosphate
  modified_base 10: mod_base = OTHER; note = 2'-fluoroadenosine-3'-phosphate
  modified_base 11: mod_base = OTHER; note = 2'-fluoroguanosine-3'-phosphate
  modified_base 12: mod_base = OTHER; note = 2'-O-methylguanosine-3'-phosphate
  modified_base 13: mod_base = OTHER; note = 2'-O-methyluridine-3'-phosphate
  modified_base 14: mod_base = OTHER; note = 2'-O-methylguanosine-3'-phosphate
  modified_base 15: mod_base = OTHER; note = 2'-O-methyladenosine-3'-phosphate
  modified_base 16: mod_base = OTHER; note = 2'-O-methyluridine-3'-phosphate
  modified_base 17: mod_base = OTHER; note = 2'-O-methylguanosine-3'-phosphate
  modified_base 18: mod_base = OTHER; note = 2'-O-methyladenosine-3'-phosphate
  modified_base 19: mod_base = OTHER; note = 2'-O-methyluridine-3'-phosphate
  modified_base 20: mod_base = OTHER; note = 2'-O-methylguanosine-3'-phosphate
  modified_base 21: mod_base = OTHER; note = 2'-O-methyladenosine-3'-phosphate N-[tris(GalNAc-alkyl)-amidodecanoyl)]-4-hydroxyprolinol Hyp-(GalNAc-alkyl)3
cattttgagaggtgatgatga

SEQ ID NO: 262 - RNA, 21 nt, synthetic construct
  source 1..21: mol_type = other RNA; note = Description of Artificial Sequence: Synthetic oligonucleotide
  modified_base 1: mod_base = OTHER; note = 2'-O-methyluridine-3'-phosphorothioate
  modified_base 2: mod_base = OTHER; note = 2'-O-methyluridine-3'-phosphorothioate
  modified_base 3: mod_base = OTHER; note = 2'-O-methylguanosine-3'-phosphate
  modified_base 4: mod_base = OTHER; note = 2'-O-methyladenosine-3'-phosphate
  modified_base 5: mod_base = OTHER; note = 2'-O-methylcytidine-3'-phosphate
  modified_base 6: mod_base = OTHER; note = 2'-O-methyluridine-3'-phosphate
  modified_base 7: mod_base = OTHER; note = 2'-fluorouridine-3'-phosphate
  modified_base 8: mod_base = OTHER; note = 2'-O-methyluridine-3'-phosphate
  modified_base 9: mod_base = OTHER; note = 2'-fluorouridine-3'-phosphate
  modified_base 10: mod_base = OTHER; note = 2'-fluorocytidine-3'-phosphate
  modified_base 11: mod_base = OTHER; note = 2'-fluoroadenosine-3'-phosphate
  modified_base 12: mod_base = OTHER; note = 2'-O-methyladenosine-3'-phosphate
  modified_base 13: mod_base = OTHER; note = 2'-O-methyluridine-3'-phosphate
  modified_base 14: mod_base = OTHER; note = 2'-O-methylguanosine-3'-phosphate
  modified_base 15: mod_base = OTHER; note = 2'-O-methylguanosine-3'-phosphate
  modified_base 16: mod_base = OTHER; note = 2'-O-methylguanosine-3'-phosphate
  modified_base 17: mod_base = OTHER; note = 2'-O-methyluridine-3'-phosphate
  modified_base 18: mod_base = OTHER; note = 2'-O-methylguanosine-3'-phosphate
  modified_base 19: mod_base = OTHER; note = 2'-O-methyluridine-3'-phosphate
  modified_base 20: mod_base = OTHER; note = 2'-O-methylcytidine-3'-phosphate
  modified_base 21: mod_base = OTHER; note = 2'-O-methyladenosine-3'-phosphate N-[tris(GalNAc-alkyl)-amidodecanoyl)]-4-hydroxyprolinol Hyp-(GalNAc-alkyl)3
ttgacttttcaatgggtgtca

SEQ ID NO: 263 - RNA, 21 nt, synthetic construct
  source 1..21: mol_type = other RNA; note = Description of Artificial Sequence: Synthetic oligonucleotide
  modified_base 1: mod_base = OTHER; note = 2'-O-methylcytidine-3'-phosphorothioate
  modified_base 2: mod_base = OTHER; note = 2'-O-methylguanosine-3'-phosphorothioate
  modified_base 3: mod_base = OTHER; note = 2'-O-methyladenosine-3'-phosphate
  modified_base 4: mod_base = OTHER; note = 2'-O-methylcytidine-3'-phosphate
  modified_base 5: mod_base = OTHER; note = 2'-O-methyluridine-3'-phosphate
  modified_base 6: mod_base = OTHER; note = 2'-O-methyluridine-3'-phosphate
  modified_base 7: mod_base = OTHER; note = 2'-fluorocytidine-3'-phosphate
  modified_base 8: mod_base = OTHER; note = 2'-O-methyluridine-3'-phosphate
  modified_base 9: mod_base = OTHER; note = 2'-fluoroguanosine-3'-phosphate
  modified_base 10: mod_base = OTHER; note = 2'-fluorouridine-3'-phosphate
  modified_base 11: mod_base = OTHER; note = 2'-fluorouridine-3'-phosphate
  modified_base 12: mod_base = OTHER; note = 2'-O-methyluridine-3'-phosphate
  modified_base 13: mod_base = OTHER; note = 2'-O-methyluridine-3'-phosphate
  modified_base 14: mod_base = OTHER; note = 2'-O-methyladenosine-3'-phosphate
  modified_base 15: mod_base = OTHER; note = 2'-O-methylguanosine-3'-phosphate
  modified_base 16: mod_base = OTHER; note = 2'-O-methylguanosine-3'-phosphate
  modified_base 17: mod_base = OTHER; note = 2'-O-methyladenosine-3'-phosphate
  modified_base 18: mod_base = OTHER; note = 2'-O-methylcytidine-3'-phosphate
  modified_base 19: mod_base = OTHER; note = 2'-O-methyladenosine-3'-phosphate
  modified_base 20: mod_base = OTHER; note = 2'-O-methylguanosine-3'-phosphate
  modified_base 21: mod_base = OTHER; note = 2'-O-methyladenosine-3'-phosphate N-[tris(GalNAc-alkyl)-amidodecanoyl)]-4-hydroxyprolinol Hyp-(GalNAc-alkyl)3
cgacttctgttttaggacaga

SEQ ID NO: 264 - RNA, 21 nt, synthetic construct
  source 1..21: mol_type = other RNA; note = Description of Artificial Sequence: Synthetic oligonucleotide
  modified_base 1: mod_base = OTHER; note = 2'-O-methylcytidine-3'-phosphorothioate
  modified_base 2: mod_base = OTHER; note = 2'-O-methyluridine-3'-phosphorothioate
  modified_base 3: mod_base = OTHER; note = 2'-O-methylcytidine-3'-phosphate
  modified_base 4: mod_base = OTHER; note = 2'-O-methyluridine-3'-phosphate
  modified_base 5: mod_base = OTHER; note = 2'-O-methylguanosine-3'-phosphate
  modified_base 6: mod_base = OTHER; note = 2'-O-methyladenosine-3'-phosphate
  modified_base 7: mod_base = OTHER; note = 2'-fluoroguanosine-3'-phosphate
  modified_base 8: mod_base = OTHER; note = 2'-O-methyluridine-3'-phosphate
  modified_base 9: mod_base = OTHER; note = 2'-fluoroguanosine-3'-phosphate
  modified_base 10: mod_base = OTHER; note = 2'-fluoroguanosine-3'-phosphate
  modified_base 11: mod_base = OTHER; note = 2'-fluoroguanosine-3'-phosphate
  modified_base 12: mod_base = OTHER; note = 2'-O-methyluridine-3'-phosphate
  modified_base 13: mod_base = OTHER; note = 2'-O-methylguanosine-3'-phosphate
  modified_base 14: mod_base = OTHER; note = 2'-O-methylcytidine-3'-phosphate
  modified_base 15: mod_base = OTHER; note = 2'-O-methylcytidine-3'-phosphate
  modified_base 16: mod_base = OTHER; note = 2'-O-methyladenosine-3'-phosphate
  modified_base 17: mod_base = OTHER; note = 2'-O-methylguanosine-3'-phosphate
  modified_base 18: mod_base = OTHER; note = 2'-O-methyladenosine-3'-phosphate
  modified_base 19: mod_base = OTHER; note = 2'-O-methyladenosine-3'-phosphate
  modified_base 20: mod_base = OTHER; note = 2'-O-methyluridine-3'-phosphate
  modified_base 21: mod_base = OTHER; note = 2'-O-methyladenosine-3'-phosphate N-[tris(GalNAc-alkyl)-amidodecanoyl)]-4-hydroxyprolinol Hyp-(GalNAc-alkyl)3
ctctgagtgggtgccagaata

SEQ ID NO: 265 - RNA, 21 nt, synthetic construct
  source 1..21: mol_type = other RNA; note = Description of Artificial Sequence: Synthetic oligonucleotide
  modified_base 1: mod_base = OTHER; note = 2'-O-methylguanosine-3'-phosphorothioate
  modified_base 2: mod_base = OTHER; note = 2'-O-methylguanosine-3'-phosphorothioate
  modified_base 3: mod_base = OTHER; note = 2'-O-methylguanosine-3'-phosphate
  modified_base 4: mod_base = OTHER; note = 2'-O-methyluridine-3'-phosphate
  modified_base 5: mod_base = OTHER; note = 2'-O-methylguanosine-3'-phosphate
  modified_base 6: mod_base = OTHER; note = 2'-O-methylcytidine-3'-phosphate
  modified_base 7: mod_base = OTHER; note = 2'-fluorocytidine-3'-phosphate
  modified_base 8: mod_base = OTHER; note = 2'-O-methyladenosine-3'-phosphate
  modified_base 9: mod_base = OTHER; note = 2'-fluoroguanosine-3'-phosphate
  modified_base 10: mod_base = OTHER; note = 2'-fluoroadenosine-3'-phosphate
  modified_base 11: mod_base = OTHER; note = 2'-fluoroadenosine-3'-phosphate
  modified_base 12: mod_base = OTHER; note = 2'-O-methyluridine-3'-phosphate
  modified_base 13: mod_base = OTHER; note = 2'-O-methylguanosine-3'-phosphate
  modified_base 14: mod_base = OTHER; note = 2'-O-methyluridine-3'-phosphate
  modified_base 15: mod_base = OTHER; note = 2'-O-methylguanosine-3'-phosphate
  modified_base 16: mod_base = OTHER; note = 2'-O-methyladenosine-3'-phosphate
  modified_base 17: mod_base = OTHER; note = 2'-O-methyladenosine-3'-phosphate
  modified_base 18: mod_base = OTHER; note = 2'-O-methyladenosine-3'-phosphate
  modified_base 19: mod_base = OTHER; note = 2'-O-methylguanosine-3'-phosphate
  modified_base 20: mod_base = OTHER; note = 2'-O-methyluridine-3'-phosphate
  modified_base 21: mod_base = OTHER; note = 2'-O-methyladenosine-3'-phosphate N-[tris(GalNAc-alkyl)-amidodecanoyl)]-4-hydroxyprolinol Hyp-(GalNAc-alkyl)3
gggtgccagaatgtgaaagta

SEQ ID NO: 266 - RNA, 21 nt, synthetic construct
  source 1..21: mol_type = other RNA; note = Description of Artificial Sequence: Synthetic oligonucleotide
  modified_base 1: mod_base = OTHER; note = 2'-O-methyluridine-3'-phosphorothioate
  modified_base 2: mod_base = OTHER; note = 2'-O-methylcytidine-3'-phosphorothioate
  modified_base 3: mod_base = OTHER; note = 2'-O-methyladenosine-3'-phosphate
  modified_base 4: mod_base = OTHER; note = 2'-O-methyladenosine-3'-phosphate
  modified_base 5: mod_base = OTHER; note = 2'-O-methyluridine-3'-phosphate
  modified_base 6: mod_base = OTHER; note = 2'-O-methylguanosine-3'-phosphate
  modified_base 7: mod_base = OTHER; note = 2'-fluoroguanosine-3'-phosphate
  modified_base 8: mod_base = OTHER; note = 2'-O-methylguanosine-3'-phosphate
  modified_base 9: mod_base = OTHER; note = 2'-fluorouridine-3'-phosphate
  modified_base 10: mod_base = OTHER; note = 2'-fluoroguanosine-3'-phosphate
  modified_base 11: mod_base = OTHER; note = 2'-fluorouridine-3'-phosphate
  modified_base 12: mod_base = OTHER; note = 2'-O-methylcytidine-3'-phosphate
  modified_base 13: mod_base = OTHER; note = 2'-O-methylcytidine-3'-phosphate
  modified_base 14: mod_base = OTHER; note = 2'-O-methyluridine-3'-phosphate
  modified_base 15: mod_base = OTHER; note = 2'-O-methyladenosine-3'-phosphate
  modified_base 16: mod_base = OTHER; note = 2'-O-methylguanosine-3'-phosphate
  modified_base 17: mod_base = OTHER; note = 2'-O-methylguanosine-3'-phosphate
  modified_base 18: mod_base = OTHER; note = 2'-O-methyladenosine-3'-phosphate
  modified_base 19: mod_base = OTHER; note = 2'-O-methyladenosine-3'-phosphate
  modified_base 20: mod_base = OTHER; note = 2'-O-methylcytidine-3'-phosphate
  modified_base 21: mod_base = OTHER; note = 2'-O-methyladenosine-3'-phosphate N-[tris(GalNAc-alkyl)-amidodecanoyl)]-4-hydroxyprolinol Hyp-(GalNAc-alkyl)3
tcaatgggtgtcctaggaaca

SEQ ID NO: 267 - RNA, 21 nt, synthetic construct
  source 1..21: mol_type = other RNA; note = Description of Artificial Sequence: Synthetic oligonucleotide
  modified_base 1: mod_base = OTHER; note = 2'-O-methyladenosine-3'-phosphorothioate
  modified_base 2: mod_base = OTHER; note = 2'-O-methyladenosine-3'-phosphorothioate
  modified_base 3: mod_base = OTHER; note = 2'-O-methyladenosine-3'-phosphate
  modified_base 4: mod_base = OTHER; note = 2'-O-methylguanosine-3'-phosphate
  modified_base 5: mod_base = OTHER; note = 2'-O-methyluridine-3'-phosphate
  modified_base 6: mod_base = OTHER; note = 2'-O-methylcytidine-3'-phosphate
  modified_base 7: mod_base = OTHER; note = 2'-fluoroadenosine-3'-phosphate
  modified_base 8: mod_base = OTHER; note = 2'-O-methyluridine-3'-phosphate
  modified_base 9: mod_base = OTHER; note = 2'-fluorocytidine-3'-phosphate
  modified_base 10: mod_base = OTHER; note = 2'-fluoroguanosine-3'-phosphate
  modified_base 11: mod_base = OTHER; note = 2'-fluoroadenosine-3'-phosphate
  modified_base 12: mod_base = OTHER; note = 2'-O-methylcytidine-3'-phosphate
  modified_base 13: mod_base = OTHER; note = 2'-O-methyladenosine-3'-phosphate
  modified_base 14: mod_base = OTHER; note = 2'-O-methyladenosine-3'-phosphate
  modified_base 15: mod_base = OTHER; note = 2'-O-methylguanosine-3'-phosphate
  modified_base 16: mod_base = OTHER; note = 2'-O-methyladenosine-3'-phosphate
  modified_base 17: mod_base = OTHER; note = 2'-O-methylcytidine-3'-phosphate
  modified_base 18: mod_base = OTHER; note = 2'-O-methyladenosine-3'-phosphate
  modified_base 19: mod_base = OTHER; note = 2'-O-methyluridine-3'-phosphate
  modified_base 20: mod_base = OTHER; note = 2'-O-methyluridine-3'-phosphate
  modified_base 21: mod_base = OTHER; note = 2'-O-methyladenosine-3'-phosphate N-[tris(GalNAc-alkyl)-amidodecanoyl)]-4-hydroxyprolinol Hyp-(GalNAc-alkyl)3
aaagtcatcgacaagacatta

SEQ ID NO: 268 - RNA, 21 nt, synthetic construct
  source 1..21: mol_type = other RNA; note = Description of Artificial Sequence: Synthetic oligonucleotide
  modified_base 1: mod_base = OTHER; note = 2'-O-methyladenosine-3'-phosphorothioate
  modified_base 2: mod_base = OTHER; note = 2'-O-methyluridine-3'-phosphorothioate
  modified_base 3: mod_base = OTHER; note = 2'-O-methyluridine-3'-phosphate
  modified_base 4: mod_base = OTHER; note = 2'-O-methyluridine-3'-phosphate
  modified_base 5: mod_base = OTHER; note = 2'-O-methyluridine-3'-phosphate
  modified_base 6: mod_base = OTHER; note = 2'-O-methylguanosine-3'-phosphate
  modified_base 7: mod_base = OTHER; note = 2'-fluoroadenosine-3'-phosphate
  modified_base 8: mod_base = OTHER; note = 2'-O-methylguanosine-3'-phosphate
  modified_base 9: mod_base = OTHER; note = 2'-fluoroadenosine-3'-phosphate
  modified_base 10: mod_base = OTHER; note = 2'-fluoroguanosine-3'-phosphate
  modified_base 11: mod_base = OTHER; note = 2'-fluoroguanosine-3'-phosphate
  modified_base 12: mod_base = OTHER; note = 2'-O-methyluridine-3'-phosphate
  modified_base 13: mod_base = OTHER; note = 2'-O-methylguanosine-3'-phosphate
  modified_base 14: mod_base = OTHER; note = 2'-O-methyladenosine-3'-phosphate
  modified_base 15: mod_base = OTHER; note = 2'-O-methyluridine-3'-phosphate
  modified_base 16: mod_base = OTHER; note = 2'-O-methylguanosine-3'-phosphate
  modified_base 17: mod_base = OTHER; note = 2'-O-methyladenosine-3'-phosphate
  modified_base 18: mod_base = OTHER; note = 2'-O-methyluridine-3'-phosphate
  modified_base 19: mod_base = OTHER; note = 2'-O-methylguanosine-3'-phosphate
  modified_base 20: mod_base = OTHER; note = 2'-O-methylcytidine-3'-phosphate
  modified_base 21: mod_base = OTHER; note = 2'-O-methyladenosine-3'-phosphate N-[tris(GalNAc-alkyl)-amidodecanoyl)]-4-hydroxyprolinol Hyp-(GalNAc-alkyl)3
attttgagaggtgatgatgca

SEQ ID NO: 269 - RNA, 21 nt, synthetic construct
  source 1..21: mol_type = other RNA; note = Description of Artificial Sequence: Synthetic oligonucleotide
  modified_base 1: mod_base = OTHER; note = 2'-O-methyladenosine-3'-phosphorothioate
  modified_base 2: mod_base = OTHER; note = 2'-O-methyluridine-3'-phosphorothioate
  modified_base 3: mod_base = OTHER; note = 2'-O-methylcytidine-3'-phosphate
  modified_base 4: mod_base = OTHER; note = 2'-O-methylguanosine-3'-phosphate
  modified_base 5: mod_base = OTHER; note = 2'-O-methyladenosine-3'-phosphate
  modified_base 6: mod_base = OTHER; note = 2'-O-methylcytidine-3'-phosphate
  modified_base 7: mod_base = OTHER; note = 2'-fluoroadenosine-3'-phosphate
  modified_base 8: mod_base = OTHER; note = 2'-O-methyladenosine-3'-phosphate
  modified_base 9: mod_base = OTHER; note = 2'-fluoroguanosine-3'-phosphate
  modified_base 10: mod_base = OTHER; note = 2'-fluoroadenosine-3'-phosphate
  modified_base 11: mod_base = OTHER; note = 2'-fluorocytidine-3'-phosphate
  modified_base 12: mod_base = OTHER; note = 2'-O-methyladenosine-3'-phosphate
  modified_base 13: mod_base = OTHER; note = 2'-O-methyluridine-3'-phosphate
  modified_base 14: mod_base = OTHER; note = 2'-O-methyluridine-3'-phosphate
  modified_base 15: mod_base = OTHER; note = 2'-O-methylguanosine-3'-phosphate
  modified_base 16: mod_base = OTHER; note = 2'-O-methylguanosine-3'-phosphate
  modified_base 17: mod_base = OTHER; note = 2'-O-methyluridine-3'-phosphate
  modified_base 18: mod_base = OTHER; note = 2'-O-methylguanosine-3'-phosphate
  modified_base 19: mod_base = OTHER; note = 2'-O-methyladenosine-3'-phosphate
  modified_base 20: mod_base = OTHER; note = 2'-O-methylguanosine-3'-phosphate
  modified_base 21: mod_base = OTHER; note = 2'-O-methyladenosine-3'-phosphate N-[tris(GalNAc-alkyl)-amidodecanoyl)]-4-hydroxyprolinol Hyp-(GalNAc-alkyl)3
atcgacaagacattggtgaga

SEQ ID NO: 270 - RNA, 21 nt, synthetic construct
  source 1..21: mol_type = other RNA; note = Description of Artificial Sequence: Synthetic oligonucleotide
  modified_base 1: mod_base = OTHER; note = 2'-O-methylguanosine-3'-phosphorothioate
  modified_base 2: mod_base = OTHER; note = 2'-O-methylguanosine-3'-phosphorothioate
  modified_base 3: mod_base = OTHER; note = 2'-O-methyluridine-3'-phosphate
  modified_base 4: mod_base = OTHER; note = 2'-O-methylguanosine-3'-phosphate
  modified_base 5: mod_base = OTHER; note = 2'-O-methylcytidine-3'-phosphate
  modified_base 6: mod_base = OTHER; note = 2'-O-methylcytidine-3'-phosphate
  modified_base 7: mod_base = OTHER; note = 2'-fluoroadenosine-3'-phosphate
  modified_base 8: mod_base = OTHER; note = 2'-O-methylguanosine-3'-phosphate
  modified_base 9: mod_base = OTHER; note = 2'-fluoroadenosine-3'-phosphate
  modified_base 10: mod_base = OTHER; note = 2'-fluoroadenosine-3'-phosphate
  modified_base 11: mod_base = OTHER; note = 2'-fluorouridine-3'-phosphate
  modified_base 12: mod_base = OTHER; note = 2'-O-methylguanosine-3'-phosphate
  modified_base 13: mod_base = OTHER; note = 2'-O-methyluridine-3'-phosphate
  modified_base 14: mod_base = OTHER; note = 2'-O-methylguanosine-3'-phosphate
  modified_base 15: mod_base = OTHER; note = 2'-O-methyladenosine-3'-phosphate
  modified_base 16: mod_base = OTHER; note = 2'-O-methyladenosine-3'-phosphate
  modified_base 17: mod_base = OTHER; note = 2'-O-methyladenosine-3'-phosphate
  modified_base 18: mod_base = OTHER; note = 2'-O-methylguanosine-3'-phosphate
  modified_base 19: mod_base = OTHER; note = 2'-O-methyluridine-3'-phosphate
  modified_base 20: mod_base = OTHER; note = 2'-O-methylcytidine-3'-phosphate
  modified_base 21: mod_base = OTHER; note = 2'-O-methyladenosine-3'-phosphate N-[tris(GalNAc-alkyl)-amidodecanoyl)]-4-hydroxyprolinol Hyp-(GalNAc-alkyl)3
ggtgccagaatgtgaaagtca

SEQ ID NO: 271 - RNA, 21 nt, synthetic construct
  source 1..21: mol_type = other RNA; note = Description of Artificial Sequence: Synthetic oligonucleotide
  modified_base 1: mod_base = OTHER; note = 2'-O-methylguanosine-3'-phosphorothioate
  modified_base 2: mod_base = OTHER; note = 2'-O-methyladenosine-3'-phosphorothioate
  modified_base 3: mod_base = OTHER; note = 2'-O-methylcytidine-3'-phosphate
  modified_base 4: mod_base = OTHER; note = 2'-O-methyladenosine-3'-phosphate
  modified_base 5: mod_base = OTHER; note = 2'-O-methylguanosine-3'-phosphate
  modified_base 6: mod_base = OTHER; note = 2'-O-methyluridine-3'-phosphate
  modified_base 7: mod_base = OTHER; note = 2'-fluoroguanosine-3'-phosphate
  modified_base 8: mod_base = OTHER; note = 2'-O-methylcytidine-3'-phosphate
  modified_base 9: mod_base = OTHER; note = 2'-fluoroadenosine-3'-phosphate
  modified_base 10: mod_base = OTHER; note = 2'-fluorocytidine-3'-phosphate
  modified_base 11: mod_base = OTHER; note = 2'-fluoroadenosine-3'-phosphate
  modified_base 12: mod_base = OTHER; note = 2'-O-methyladenosine-3'-phosphate
  modified_base 13: mod_base = OTHER; note = 2'-O-methyluridine-3'-phosphate
  modified_base 14: mod_base = OTHER; note = 2'-O-methyladenosine-3'-phosphate
  modified_base 15: mod_base = OTHER; note = 2'-O-methyluridine-3'-phosphate
  modified_base 16: mod_base = OTHER; note = 2'-O-methyluridine-3'-phosphate
  modified_base 17: mod_base = OTHER; note = 2'-O-methyluridine-3'-phosphate
  modified_base 18: mod_base = OTHER; note = 2'-O-methyluridine-3'-phosphate
  modified_base 19: mod_base = OTHER; note = 2'-O-methylcytidine-3'-phosphate
  modified_base 20: mod_base = OTHER; note = 2'-O-methylcytidine-3'-phosphate
  modified_base 21: mod_base = OTHER; note = 2'-O-methyladenosine-3'-phosphate N-[tris(GalNAc-alkyl)-amidodecanoyl)]-4-hydroxyprolinol Hyp-(GalNAc-alkyl)3
gacagtgcacaatattttcca

SEQ ID NO: 272 - RNA, 21 nt, synthetic construct
  source 1..21: mol_type = other RNA; note = Description of Artificial Sequence: Synthetic oligonucleotide
  modified_base 1: mod_base = OTHER; note = 2'-O-methyladenosine-3'-phosphorothioate
  modified_base 2: mod_base = OTHER; note = 2'-O-methylcytidine-3'-phosphorothioate
  modified_base 3: mod_base = OTHER; note = 2'-O-methyladenosine-3'-phosphate
  modified_base 4: mod_base = OTHER; note = 2'-O-methyladenosine-3'-phosphate
  modified_base 5: mod_base = OTHER; note = 2'-O-methyladenosine-3'-phosphate
  modified_base 6: mod_base = OTHER; note = 2'-O-methylguanosine-3'-phosphate
  modified_base 7: mod_base = OTHER; note = 2'-fluoroadenosine-3'-phosphate
  modified_base 8: mod_base = OTHER; note = 2'-O-methylguanosine-3'-phosphate
  modified_base 9: mod_base = OTHER; note = 2'-fluoroadenosine-3'-phosphate
  modified_base 10: mod_base = OTHER; note = 2'-fluorocytidine-3'-phosphate
  modified_base 11: mod_base = OTHER; note = 2'-fluoroadenosine-3'-phosphate
  modified_base 12: mod_base = OTHER; note = 2'-O-methylcytidine-3'-phosphate
  modified_base 13: mod_base = OTHER; note = 2'-O-methyluridine-3'-phosphate
  modified_base 14: mod_base = OTHER; note = 2'-O-methylguanosine-3'-phosphate
  modified_base 15: mod_base = OTHER; note = 2'-O-methyluridine-3'-phosphate
  modified_base 16: mod_base = OTHER; note = 2'-O-methylguanosine-3'-phosphate
  modified_base 17: mod_base = OTHER; note = 2'-O-methylcytidine-3'-phosphate
  modified_base 18: mod_base = OTHER; note = 2'-O-methyladenosine-3'-phosphate
  modified_base 19: mod_base = OTHER; note = 2'-O-methylguanosine-3'-phosphate
  modified_base 20: mod_base = OTHER; note = 2'-O-methyladenosine-3'-phosphate
  modified_base 21: mod_base = OTHER; note = 2'-O-methyladenosine-3'-phosphate N-[tris(GalNAc-alkyl)-amidodecanoyl)]-4-hydroxyprolinol Hyp-(GalNAc-alkyl)3
acaaagagacactgtgcagaa

SEQ ID NO: 273 - RNA, 21 nt, synthetic construct
  source 1..21: mol_type = other RNA; note = Description of Artificial Sequence: Synthetic oligonucleotide
  modified_base 1: mod_base = OTHER; note = 2'-O-methyluridine-3'-phosphorothioate
  modified_base 2: mod_base = OTHER; note = 2'-O-methyluridine-3'-phosphorothioate
  modified_base 3: mod_base = OTHER; note = 2'-O-methyluridine-3'-phosphate
  modified_base 4: mod_base = OTHER; note = 2'-O-methyluridine-3'-phosphate
  modified_base 5: mod_base = OTHER; note = 2'-O-methylcytidine-3'-phosphate
  modified_base 6: mod_base = OTHER; note = 2'-O-methyladenosine-3'-phosphate
  modified_base 7: mod_base = OTHER; note = 2'-fluoroadenosine-3'-phosphate
  modified_base 8: mod_base = OTHER; note = 2'-O-methyluridine-3'-phosphate
  modified_base 9: mod_base = OTHER; note = 2'-fluoroguanosine-3'-phosphate
  modified_base 10: mod_base = OTHER; note = 2'-fluoroguanosine-3'-phosphate
  modified_base 11: mod_base = OTHER; note = 2'-fluoroguanosine-3'-phosphate
  modified_base 12: mod_base = OTHER; note = 2'-O-methyluridine-3'-phosphate
  modified_base 13: mod_base = OTHER; note = 2'-O-methylguanosine-3'-phosphate
  modified_base 14: mod_base = OTHER; note = 2'-O-methyluridine-3'-phosphate
  modified_base 15: mod_base = OTHER; note = 2'-O-methylcytidine-3'-phosphate
  modified_base 16: mod_base = OTHER; note = 2'-O-methylcytidine-3'-phosphate
  modified_base 17: mod_base = OTHER; note = 2'-O-methyluridine-3'-phosphate
  modified_base 18: mod_base = OTHER; note = 2'-O-methyladenosine-3'-phosphate
  modified_base 19: mod_base = OTHER; note = 2'-O-methylguanosine-3'-phosphate
  modified_base 20: mod_base = OTHER; note = 2'-O-methylguanosine-3'-phosphate
  modified_base 21: mod_base = OTHER; note = 2'-O-methyladenosine-3'-phosphate N-[tris(GalNAc-alkyl)-amidodecanoyl)]-4-hydroxyprolinol Hyp-(GalNAc-alkyl)3
ttttcaatgggtgtcctagga

SEQ ID NO: 274 - RNA, 21 nt, synthetic construct
  source 1..21: mol_type = other RNA; note = Description of Artificial Sequence: Synthetic oligonucleotide
  modified_base 1: mod_base = OTHER; note = 2'-O-methylcytidine-3'-phosphorothioate
  modified_base 2: mod_base = OTHER; note = 2'-O-methylcytidine-3'-phosphorothioate
  modified_base 3: mod_base = OTHER; note = 2'-O-methylguanosine-3'-phosphate
  modified_base 4: mod_base = OTHER; note = 2'-O-methyluridine-3'-phosphate
  modified_base 5: mod_base = OTHER; note = 2'-O-methyluridine-3'-phosphate
  modified_base 6: mod_base = OTHER; note = 2'-O-methyluridine-3'-phosphate
  modified_base 7: mod_base = OTHER; note = 2'-fluorocytidine-3'-phosphate
  modified_base 8: mod_base = OTHER; note = 2'-O-methylcytidine-3'-phosphate
  modified_base 9: mod_base = OTHER; note = 2'-fluoroadenosine-3'-phosphate
  modified_base 10: mod_base = OTHER; note = 2'-fluoroadenosine-3'-phosphate
  modified_base 11: mod_base = OTHER; note = 2'-fluoroguanosine-3'-phosphate
  modified_base 12: mod_base = OTHER; note = 2'-O-methyladenosine-3'-phosphate
  modified_base 13: mod_base = OTHER; note = 2'-O-methyluridine-3'-phosphate
  modified_base 14: mod_base = OTHER; note = 2'-O-methylcytidine-3'-phosphate
  modified_base 15: mod_base = OTHER; note = 2'-O-methyluridine-3'-phosphate
  modified_base 16: mod_base = OTHER; note = 2'-O-methylguanosine-3'-phosphate
  modified_base 17: mod_base = OTHER; note = 2'-O-methyladenosine-3'-phosphate
  modified_base 18: mod_base = OTHER; note = 2'-O-methylcytidine-3'-phosphate
  modified_base 19: mod_base = OTHER; note = 2'-O-methyladenosine-3'-phosphate
  modified_base 20: mod_base = OTHER; note = 2'-O-methylguanosine-3'-phosphate
  modified_base 21: mod_base = OTHER; note = 2'-O-methyluridine-3'-phosphate N-[tris(GalNAc-alkyl)-amidodecanoyl)]-4-hydroxyprolinol Hyp-(GalNAc-alkyl)3
ccgtttccaagatctgacagt

SEQ ID NO: 275 - RNA, 21 nt, synthetic construct
  source 1..21: mol_type = other RNA; note = Description of Artificial Sequence: Synthetic oligonucleotide
  modified_base 1: mod_base = OTHER; note = 2'-O-methyladenosine-3'-phosphorothioate
  modified_base 2: mod_base = OTHER; note = 2'-O-methylguanosine-3'-phosphorothioate
  modified_base 3: mod_base = OTHER; note = 2'-O-methylguanosine-3'-phosphate
  modified_base 4: mod_base = OTHER; note = 2'-O-methylguanosine-3'-phosphate
  modified_base 5: mod_base = OTHER; note = 2'-O-methylguanosine-3'-phosphate
  modified_base 6: mod_base = OTHER; note = 2'-O-methylguanosine-3'-phosphate
  modified_base 7: mod_base = OTHER; note = 2'-fluoroadenosine-3'-phosphate
  modified_base 8: mod_base = OTHER; note = 2'-O-methylguanosine-3'-phosphate
  modified_base 9: mod_base = OTHER; note = 2'-fluoroadenosine-3'-phosphate
  modified_base 10: mod_base = OTHER; note = 2'-fluoroadenosine-3'-phosphate
  modified_base 11: mod_base = OTHER; note = 2'-fluoroadenosine-3'-phosphate
  modified_base 12: mod_base = OTHER; note = 2'-O-methylguanosine-3'-phosphate
  modified_base 13: mod_base = OTHER; note = 2'-O-methylguanosine-3'-phosphate
  modified_base 14: mod_base = OTHER; note = 2'-O-methyluridine-3'-phosphate
  modified_base 15: mod_base = OTHER; note = 2'-O-methylguanosine-3'-phosphate
  modified_base 16: mod_base = OTHER; note = 2'-O-methyluridine-3'-phosphate
  modified_base 17: mod_base = OTHER; note = 2'-O-methyluridine-3'-phosphate
  modified_base 18: mod_base = OTHER; note = 2'-O-methylcytidine-3'-phosphate
  modified_base 19: mod_base = OTHER; note = 2'-O-methyladenosine-3'-phosphate
  modified_base 20: mod_base = OTHER; note = 2'-O-methyladenosine-3'-phosphate
  modified_base 21: mod_base = OTHER; note = 2'-O-methyladenosine-3'-phosphate N-[tris(GalNAc-alkyl)-amidodecanoyl)]-4-hydroxyprolinol Hyp-(GalNAc-alkyl)3
agggggagaaaggtgttcaaa

SEQ ID NO: 276 - RNA, 21 nt, synthetic construct
  source 1..21: mol_type = other RNA; note = Description of Artificial Sequence: Synthetic oligonucleotide
  modified_base 1: mod_base = OTHER; note = 2'-O-methyladenosine-3'-phosphorothioate
  modified_base 2: mod_base = OTHER; note = 2'-O-methylguanosine-3'-phosphorothioate
  modified_base 3: mod_base = OTHER; note = 2'-O-methyluridine-3'-phosphate
  modified_base 4: mod_base = OTHER; note = 2'-O-methylcytidine-3'-phosphate
  modified_base 5: mod_base = OTHER; note = 2'-O-methyladenosine-3'-phosphate
  modified_base 6: mod_base = OTHER; note = 2'-O-methyluridine-3'-phosphate
  modified_base 7: mod_base = OTHER; note = 2'-fluorocytidine-3'-phosphate
  modified_base 8: mod_base = OTHER; note = 2'-O-methylguanosine-3'-phosphate
  modified_base 9: mod_base = OTHER; note = 2'-fluoroadenosine-3'-phosphate
  modified_base 10: mod_base = OTHER; note = 2'-fluorocytidine-3'-phosphate
  modified_base 11: mod_base = OTHER; note = 2'-fluoroadenosine-3'-phosphate
  modified_base 12: mod_base = OTHER; note = 2'-O-methyladenosine-3'-phosphate
  modified_base 13: mod_base = OTHER; note = 2'-O-methylguanosine-3'-phosphate
  modified_base 14: mod_base = OTHER; note = 2'-O-methyladenosine-3'-phosphate
  modified_base 15: mod_base = OTHER; note = 2'-O-methylcytidine-3'-phosphate
  modified_base 16: mod_base = OTHER; note = 2'-O-methyladenosine-3'-phosphate
  modified_base 17: mod_base = OTHER; note = 2'-O-methyluridine-3'-phosphate
  modified_base 18: mod_base = OTHER; note = 2'-O-methyluridine-3'-phosphate
  modified_base 19: mod_base = OTHER; note = 2'-O-methylguanosine-3'-phosphate
  modified_base 20: mod_base = OTHER; note = 2'-O-methylguanosine-3'-phosphate
  modified_base 21: mod_base = OTHER; note = 2'-O-methyluridine-3'-phosphate N-[tris(GalNAc-alkyl)-amidodecanoyl)]-4-hydroxyprolinol Hyp-(GalNAc-alkyl)3
agtcatcgacaagacattggt

SEQ ID NO: 277 - RNA, 23 nt, synthetic construct
  source 1..23: mol_type = other RNA; note = Description of Artificial Sequence: Synthetic oligonucleotide
  modified_base 1: mod_base = OTHER; note = 2'-O-methyluridine-3'-phosphorothioate
  modified_base 2: mod_base = OTHER; note = 2'-fluorouridine -3'-phosphorothioate
  modified_base 3: mod_base = OTHER; note = 2'-O-methylguanosine-3'-phosphate
  modified_base 4: mod_base = OTHER; note = 2'-fluorouridine-3'-phosphate
  modified_base 5: mod_base = OTHER; note = 2'-O-methylcytidine-3'-phosphate
  modified_base 6: mod_base = OTHER; note = 2'-fluoroguanosine-3'-phosphate
  modified_base 7: mod_base = OTHER; note = 2'-O-methyladenosine-3'-phosphate
  modified_base 8: mod_base = OTHER; note = 2'-fluorouridine-3'-phosphate
  modified_base 9: mod_base = OTHER; note = 2'-O-methylguanosine-3'-phosphate
  modified_base 10: mod_base = OTHER; note = 2'-fluoroadenosine-3'-phosphate
  modified_base 11: mod_base = OTHER; note = 2'-O-methylcytidine-3'-phosphate
  modified_base 12: mod_base = OTHER; note = 2'-O-methyluridine-3'-phosphate
  modified_base 13: mod_base = OTHER; note = 2'-O-methyluridine-3'-phosphate
  modified_base 14: mod_base = OTHER; note = 2'-fluorouridine-3'-phosphate
  modified_base 15: mod_base = OTHER; note = 2'-O-methylcytidine-3'-phosphate
  modified_base 16: mod_base = OTHER; note = 2'-fluoroadenosine-3'-phosphate
  modified_base 17: mod_base = OTHER; note = 2'-O-methylcytidine-3'-phosphate
  modified_base 18: mod_base = OTHER; note = 2'-fluoroadenosine-3'-phosphate
  modified_base 19: mod_base = OTHER; note = 2'-O-methyluridine-3'-phosphate
  modified_base 20: mod_base = OTHER; note = 2'-fluorouridine-3'-phosphate
  modified_base 21: mod_base = OTHER; note = 2'-O-methylcytidine-3'-phosphorothioate
  modified_base 22: mod_base = OTHER; note = 2'-O-methyluridine-3'-phosphorothioate
  modified_base 23: mod_base = OTHER; note = 2'-O-methylguanosine-3'-phosphate
ttgtcgatgactttcacattctg

SEQ ID NO: 278 - RNA, 23 nt, synthetic construct
  source 1..23: mol_type = other RNA; note = Description of Artificial Sequence: Synthetic oligonucleotide
  modified_base 1: mod_base = OTHER; note = Phosphate 2'-O-methyluridine-3'-phosphorothioate
  modified_base 2: mod_base = OTHER; note = 2'-fluorouridine -3'-phosphorothioate
  modified_base 3: mod_base = OTHER; note = 2'-O-methylguanosine-3'-phosphate
  modified_base 4: mod_base = OTHER; note = 2'-fluorouridine-3'-phosphate
  modified_base 5: mod_base = OTHER; note = 2'-O-methylcytidine-3'-phosphate
  modified_base 6: mod_base = OTHER; note = 2'-fluoroguanosine-3'-phosphate
  modified_base 7: mod_base = OTHER; note = 2'-O-methyladenosine-3'-phosphate
  modified_base 8: mod_base = OTHER; note = 2'-fluorouridine-3'-phosphate
  modified_base 9: mod_base = OTHER; note = 2'-O-methylguanosine-3'-phosphate
  modified_base 10: mod_base = OTHER; note = 2'-fluoroadenosine-3'-phosphate
  modified_base 11: mod_base = OTHER; note = 2'-O-methylcytidine-3'-phosphate
  modified_base 12: mod_base = OTHER; note = 2'-O-methyluridine-3'-phosphate
  modified_base 13: mod_base = OTHER; note = 2'-O-methyluridine-3'-phosphate
  modified_base 14: mod_base = OTHER; note = 2'-fluorouridine-3'-phosphate
  modified_base 15: mod_base = OTHER; note = 2'-O-methylcytidine-3'-phosphate
  modified_base 16: mod_base = OTHER; note = 2'-fluoroadenosine-3'-phosphate
  modified_base 17: mod_base = OTHER; note = 2'-O-methylcytidine-3'-phosphate
  modified_base 18: mod_base = OTHER; note = 2'-fluoroadenosine-3'-phosphate
  modified_base 19: mod_base = OTHER; note = 2'-O-methyluridine-3'-phosphate
  modified_base 20: mod_base = OTHER; note = 2'-fluorouridine-3'-phosphate
  modified_base 21: mod_base = OTHER; note = 2'-O-methylcytidine-3'-phosphorothioate
  modified_base 22: mod_base = OTHER; note = 2'-O-methyluridine-3'-phosphorothioate
  modified_base 23: mod_base = OTHER; note = 2'-O-methylguanosine-3'-phosphate
ttgtcgatgactttcacattctg

SEQ ID NO: 279 - RNA, 23 nt, synthetic construct
  source 1..23: mol_type = other RNA; note = Description of Artificial Sequence: Synthetic oligonucleotide
  modified_base 1: mod_base = OTHER; note = 2'-O-methyluridine-3'-phosphorothioate
  modified_base 2: mod_base = OTHER; note = 2'-fluorouridine -3'-phosphorothioate
  modified_base 3: mod_base = OTHER; note = 2'-O-methylguanosine-3'-phosphate
  modified_base 4: mod_base = OTHER; note = 2'-fluorouridine-3'-phosphate
  modified_base 5: mod_base = OTHER; note = 2'-O-methylcytidine-3'-phosphate
  modified_base 6: mod_base = OTHER; note = 2'-fluoroguanosine-3'-phosphate
  modified_base 7: mod_base = OTHER; note = 2'-O-methyladenosine-3'-phosphate
  modified_base 8: mod_base = OTHER; note = 2'-fluorouridine-3'-phosphate
  modified_base 9: mod_base = OTHER; note = 2'-O-methylguanosine-3'-phosphate
  modified_base 10: mod_base = OTHER; note = 2'-fluoroadenosine-3'-phosphate
  modified_base 11: mod_base = OTHER; note = 2'-O-methylcytidine-3'-phosphate
  modified_base 12: mod_base = OTHER; note = 2'-O-methyluridine-3'-phosphate
  modified_base 13: mod_base = OTHER; note = 2'-O-methyluridine-3'-phosphate
  modified_base 14: mod_base = OTHER; note = 2'-fluorouridine-3'-phosphate
  modified_base 15: mod_base = OTHER; note = 2'-O-methylcytidine-3'-phosphate
  modified_base 16: mod_base = OTHER; note = 2'-fluoroadenosine-3'-phosphate
  modified_base 17: mod_base = OTHER; note = 2'-O-methylcytidine-3'-phosphate
  modified_base 18: mod_base = OTHER; note = 2'-fluoroadenosine-3'-phosphate
  modified_base 19: mod_base = OTHER; note = 2'-O-methyluridine-3'-phosphate
  modified_base 20: mod_base = OTHER; note = 2'-fluorouridine-3'-phosphate
  modified_base 21: mod_base = OTHER; note = 2'-O-methylcytidine-3'-phosphorothioate
  modified_base 22: mod_base = OTHER; note = 2'-O-methyluridine-3'-phosphorothioate
  modified_base 23: mod_base = OTHER; note = 2'-O-methylguanosine-3'-phosphate
ttgtcgatgactttcacattctg

SEQ ID NO: 280 - RNA, 23 nt, synthetic construct
  source 1..23: mol_type = other RNA; note = Description of Artificial Sequence: Synthetic oligonucleotide
  modified_base 1: mod_base = OTHER; note = 2'-O-methyluridine-3'-phosphorothioate
  modified_base 2: mod_base = OTHER; note = 2'-fluorouridine -3'-phosphorothioate
  modified_base 3: mod_base = OTHER; note = 2'-O-methylguanosine-3'-phosphate
  modified_base 4: mod_base = OTHER; note = 2'-fluorouridine-3'-phosphate
  modified_base 5: mod_base = OTHER; note = 2'-O-methylcytidine-3'-phosphate
  modified_base 6: mod_base = OTHER; note = 2'-fluoroguanosine-3'-phosphate
  modified_base 7: mod_base = OTHER; note = 2'-O-methyladenosine-3'-phosphate
  modified_base 8: mod_base = OTHER; note = 2'-fluorouridine-3'-phosphate
  modified_base 9: mod_base = OTHER; note = 2'-O-methylguanosine-3'-phosphate
  modified_base 10: mod_base = OTHER; note = 2'-fluoroadenosine-3'-phosphate
  modified_base 11: mod_base = OTHER; note = 2'-O-methylcytidine-3'-phosphate
  modified_base 12: mod_base = OTHER; note = 2'-O-methyluridine-3'-phosphate
  modified_base 13: mod_base = OTHER; note = 2'-O-methyluridine-3'-phosphate
  modified_base 14: mod_base = OTHER; note = 2'-fluorouridine-3'-phosphate
  modified_base 15: mod_base = OTHER; note = 2'-O-methylcytidine-3'-phosphate
  modified_base 16: mod_base = OTHER; note = 2'-fluoroadenosine-3'-phosphate
  modified_base 17: mod_base = OTHER; note = 2'-O-methylcytidine-3'-phosphate
  modified_base 18: mod_base = OTHER; note = 2'-fluoroadenosine-3'-phosphate
  modified_base 19: mod_base = OTHER; note = 2'-O-methyluridine-3'-phosphate
  modified_base 20: mod_base = OTHER; note = 2'-fluorouridine-3'-phosphate
  modified_base 21: mod_base = OTHER; note = 2'-O-methylcytidine-3'-phosphorothioate
  modified_base 22: mod_base = OTHER; note = 2'-O-methyluridine-3'-phosphorothioate
  modified_base 23: mod_base = OTHER; note = 2'-O-methylguanosine-3'-phosphate
ttgtcgatgactttcacattctg

SEQ ID NO: 281 - RNA, 23 nt, synthetic construct
  source 1..23: mol_type = other RNA; note = Description of Artificial Sequence: Synthetic oligonucleotide
  modified_base 1: mod_base = OTHER; note = 2'-O-methyluridine-3'-phosphorothioate
  modified_base 2: mod_base = OTHER; note = 2'-fluorouridine -3'-phosphorothioate
  modified_base 3: mod_base = OTHER; note = 2'-O-methylguanosine-3'-phosphate
  modified_base 4: mod_base = OTHER; note = 2'-fluorouridine-3'-phosphate
  modified_base 5: mod_base = OTHER; note = 2'-O-methylcytidine-3'-phosphate
  modified_base 6: mod_base = OTHER; note = 2'-fluoroguanosine-3'-phosphate
  modified_base 7: mod_base = OTHER; note = 2'-O-methyladenosine-3'-phosphate
  modified_base 8: mod_base = OTHER; note = 2'-fluorouridine-3'-phosphate
  modified_base 9: mod_base = OTHER; note = 2'-O-methylguanosine-3'-phosphate
  modified_base 10: mod_base = OTHER; note = 2'-fluoroadenosine-3'-phosphate
  modified_base 11: mod_base = OTHER; note = 2'-O-methylcytidine-3'-phosphate
  modified_base 12: mod_base = OTHER; note = 2'-O-methyluridine-3'-phosphate
  modified_base 13: mod_base = OTHER; note = 2'-O-methyluridine-3'-phosphate
  modified_base 14: mod_base = OTHER; note = 2'-fluorouridine-3'-phosphate
  modified_base 15: mod_base = OTHER; note = 2'-O-methylcytidine-3'-phosphate
  modified_base 16: mod_base = OTHER; note = 2'-fluoroadenosine-3'-phosphate
  modified_base 17: mod_base = OTHER; note = 2'-O-methylcytidine-3'-phosphate
  modified_base 18: mod_base = OTHER; note = 2'-fluoroadenosine-3'-phosphate
  modified_base 19: mod_base = OTHER; note = 2'-O-methyluridine-3'-phosphate
  modified_base 20: mod_base = OTHER; note = 2'-fluorouridine-3'-phosphate
  modified_base 21: mod_base = OTHER; note = 2'-O-methylcytidine-3'-phosphorothioate
  modified_base 22: mod_base = OTHER; note = 2'-O-methyluridine-3'-phosphorothioate
  modified_base 23: mod_base = OTHER; note = 2'-O-methylguanosine-3'-phosphate
ttgtcgatgactttcacattctg

SEQ ID NO: 282 - RNA, 23 nt, synthetic construct
  source 1..23: mol_type = other RNA; note = Description of Artificial Sequence: Synthetic oligonucleotide
  modified_base 1: mod_base = OTHER; note = 2'-O-methyluridine-3'-phosphorothioate
  modified_base 2: mod_base = OTHER; note = 2'-fluorouridine -3'-phosphorothioate
  modified_base 3: mod_base = OTHER; note = 2'-O-methylguanosine-3'-phosphate
  modified_base 4: mod_base = OTHER; note = 2'-fluorouridine-3'-phosphate
  modified_base 5: mod_base = OTHER; note = 2'-O-methylcytidine-3'-phosphate
  modified_base 6: mod_base = OTHER; note = 2'-fluoroguanosine-3'-phosphate
  modified_base 7: mod_base = OTHER; note = 2'-O-methyladenosine-3'-phosphate
  modified_base 8: mod_base = OTHER; note = 2'-fluorouridine-3'-phosphate
  modified_base 9: mod_base = OTHER; note = 2'-O-methylguanosine-3'-phosphate
  modified_base 10: mod_base = OTHER; note = 2'-fluoroadenosine-3'-phosphate
  modified_base 11: mod_base = OTHER; note = 2'-O-methylcytidine-3'-phosphate
  modified_base 12: mod_base = OTHER; note = 2'-O-methyluridine-3'-phosphate
  modified_base 13: mod_base = OTHER; note = 2'-O-methyluridine-3'-phosphate
  modified_base 14: mod_base = OTHER; note = 2'-fluorouridine-3'-phosphate
  modified_base 15: mod_base = OTHER; note = 2'-O-methylcytidine-3'-phosphate
  modified_base 16: mod_base = OTHER; note = 2'-fluoroadenosine-3'-phosphate
  modified_base 17: mod_base = OTHER; note = 2'-O-methylcytidine-3'-phosphate
  modified_base 18: mod_base = OTHER; note = 2'-fluoroadenosine-3'-phosphate
  modified_base 19: mod_base = OTHER; note = 2'-O-methyluridine-3'-phosphate
  modified_base 20: mod_base = OTHER; note = 2'-fluorouridine-3'-phosphate
  modified_base 21: mod_base = OTHER; note = 2'-O-methylcytidine-3'-phosphorothioate
  modified_base 22: mod_base = OTHER; note = 2'-O-methyluridine-3'-phosphorothioate
  modified_base 23: mod_base = OTHER; note = 2'-O-methylguanosine-3'-phosphate
ttgtcgatgactttcacattctg

SEQ ID NO: 283 - RNA, 23 nt, synthetic construct
  source 1..23: mol_type = other RNA; note = Description of Artificial Sequence: Synthetic oligonucleotide
  modified_base 1: mod_base = OTHER; note = 2'-O-methyluridine-3'-phosphorothioate
  modified_base 2: mod_base = OTHER; note = 2'-fluorouridine -3'-phosphorothioate
  modified_base 3: mod_base = OTHER; note = 2'-O-methylguanosine-3'-phosphate
  modified_base 4: mod_base = OTHER; note = 2'-fluorouridine-3'-phosphate
  modified_base 5: mod_base = OTHER; note = 2'-O-methylcytidine-3'-phosphate
  modified_base 6: mod_base = OTHER; note = 2'-fluoroguanosine-3'-phosphate
  modified_base 7: mod_base = OTHER; note = 2'-O-methyladenosine-3'-phosphate
  modified_base 8: mod_base = OTHER; note = 2'-fluorouridine-3'-phosphate
  modified_base 9: mod_base = OTHER; note = 2'-O-methylguanosine-3'-phosphate
  modified_base 10: mod_base = OTHER; note = 2'-fluoroadenosine-3'-phosphate
  modified_base 11: mod_base = OTHER; note = 2'-O-methylcytidine-3'-phosphate
  modified_base 12: mod_base = OTHER; note = 2'-O-methyluridine-3'-phosphate
  modified_base 13: mod_base = OTHER; note = 2'-O-methyluridine-3'-phosphate
  modified_base 14: mod_base = OTHER; note = 2'-fluorouridine-3'-phosphate
  modified_base 15: mod_base = OTHER; note = 2'-O-methylcytidine-3'-phosphate
  modified_base 16: mod_base = OTHER; note = 2'-fluoroadenosine-3'-phosphate
  modified_base 17: mod_base = OTHER; note = 2'-O-methylcytidine-3'-phosphate
  modified_base 18: mod_base = OTHER; note = 2'-fluoroadenosine-3'-phosphate
  modified_base 19: mod_base = OTHER; note = 2'-O-methyluridine-3'-phosphate
  modified_base 20: mod_base = OTHER; note = 2'-fluorouridine-3'-phosphate
  modified_base 21: mod_base = OTHER; note = 2'-O-methylcytidine-3'-phosphorothioate
  modified_base 22: mod_base = OTHER; note = 2'-O-methyluridine-3'-phosphorothioate
  modified_base 23: mod_base = OTHER; note = 2'-O-methylguanosine-3'-phosphate
ttgtcgatgactttcacattctg

SEQ ID NO: 284 - RNA, 23 nt, synthetic construct
  source 1..23: mol_type = other RNA; note = Description of Artificial Sequence: Synthetic oligonucleotide
  modified_base 1: mod_base = OTHER; note = 2'-O-methyluridine-3'-phosphorothioate
  modified_base 2: mod_base = OTHER; note = 2'-fluorouridine -3'-phosphorothioate
  modified_base 3: mod_base = OTHER; note = 2'-O-methylguanosine-3'-phosphate
  modified_base 4: mod_base = OTHER; note = 2'-fluorouridine-3'-phosphate
  modified_base 5: mod_base = OTHER; note = 2'-O-methylcytidine-3'-phosphate
  modified_base 6: mod_base = OTHER; note = 2'-fluoroguanosine-3'-phosphate
  modified_base 7: mod_base = OTHER; note = 2'-O-methyladenosine-3'-phosphate
  modified_base 8: mod_base = OTHER; note = 2'-fluorouridine-3'-phosphate
  modified_base 9: mod_base = OTHER; note = 2'-O-methylguanosine-3'-phosphate
  modified_base 10: mod_base = OTHER; note = 2'-fluoroadenosine-3'-phosphate
  modified_base 11: mod_base = OTHER; note = 2'-O-methylcytidine-3'-phosphate
  modified_base 12: mod_base = OTHER; note = 2'-O-methyluridine-3'-phosphate
  modified_base 13: mod_base = OTHER; note = 2'-O-methyluridine-3'-phosphate
  modified_base 14: mod_base = OTHER; note = 2'-fluorouridine-3'-phosphate
  modified_base 15: mod_base = OTHER; note = 2'-O-methylcytidine-3'-phosphate
  modified_base 16: mod_base = OTHER; note = 2'-fluoroadenosine-3'-phosphate
  modified_base 17: mod_base = OTHER; note = 2'-O-methylcytidine-3'-phosphate
  modified_base 18: mod_base = OTHER; note = 2'-fluoroadenosine-3'-phosphate
  modified_base 19: mod_base = OTHER; note = 2'-O-methyluridine-3'-phosphate
  modified_base 20: mod_base = OTHER; note = 2'-fluorouridine-3'-phosphate
  modified_base 21: mod_base = OTHER; note = 2'-O-methylcytidine-3'-phosphorothioate
  modified_base 22: mod_base = OTHER; note = 2'-O-methyluridine-3'-phosphorothioate
  modified_base 23: mod_base = OTHER; note = 2'-O-methylguanosine-3'-phosphate
ttgtcgatgactttcacattctg

SEQ ID NO: 285 - RNA, 21 nt, synthetic construct
  source 1..21: mol_type = other RNA; note = Description of Artificial Sequence: Synthetic oligonucleotide
  modified_base 1: mod_base = OTHER; note = 2'-O-methyluridine-3'-phosphorothioate
  modified_base 2: mod_base = OTHER; note = 2'-fluorouridine -3'-phosphorothioate
  modified_base 3: mod_base = OTHER; note = 2'-O-methylguanosine-3'-phosphate
  modified_base 4: mod_base = OTHER; note = 2'-fluorouridine-3'-phosphate
  modified_base 5: mod_base = OTHER; note = 2'-O-methylcytidine-3'-phosphate
  modified_base 6: mod_base = OTHER; note = 2'-fluoroguanosine-3'-phosphate
  modified_base 7: mod_base = OTHER; note = 2'-O-methyladenosine-3'-phosphate
  modified_base 8: mod_base = OTHER; note = 2'-fluorouridine-3'-phosphate
  modified_base 9: mod_base = OTHER; note = 2'-O-methylguanosine-3'-phosphate
  modified_base 10: mod_base = OTHER; note = 2'-fluoroadenosine-3'-phosphate
  modified_base 11: mod_base = OTHER; note = 2'-O-methylcytidine-3'-phosphate
  modified_base 12: mod_base = OTHER; note = 2'-O-methyluridine-3'-phosphate
  modified_base 13: mod_base = OTHER; note = 2'-O-methyluridine-3'-phosphate
  modified_base 14: mod_base = OTHER; note = 2'-fluorouridine-3'-phosphate
  modified_base 15: mod_base = OTHER; note = 2'-O-methylcytidine-3'-phosphate
  modified_base 16: mod_base = OTHER; note = 2'-fluoroadenosine-3'-phosphate
  modified_base 17: mod_base = OTHER; note = 2'-O-methylcytidine-3'-phosphate
  modified_base 18: mod_base = OTHER; note = 2'-fluoroadenosine-3'-phosphate
  modified_base 19: mod_base = OTHER; note = 2'-O-methyluridine-3'-phosphorothioate
  modified_base 20: mod_base = OTHER; note = 2'-O-methyluridine-3'-phosphorothioate
  modified_base 21: mod_base = OTHER; note = 2'-O-methylcytidine-3'-phosphate
ttgtcgatgactttcacattc

SEQ ID NO: 286 - RNA, 21 nt, synthetic construct
  source 1..21: mol_type = other RNA; note = Description of Artificial Sequence: Synthetic oligonucleotide
  modified_base 1: mod_base = OTHER; note = 2'-O-methyluridine-3'-phosphorothioate
  modified_base 2: mod_base = OTHER; note = 2'-fluorouridine -3'-phosphorothioate
  modified_base 3: mod_base = OTHER; note = 2'-O-methylguanosine-3'-phosphate
  modified_base 4: mod_base = OTHER; note = 2'-O-methyluridine-3'-phosphate
  modified_base 5: mod_base = OTHER; note = 2'-O-methylcytidine-3'-phosphate
  modified_base 6: mod_base = OTHER; note = 2'-fluoroguanosine-3'-phosphate
  modified_base 7: mod_base = OTHER; note = 2'-O-methyladenosine-3'-phosphate
  modified_base 8: mod_base = OTHER; note = 2'-O-methyluridine-3'-phosphate
  modified_base 9: mod_base = OTHER; note = 2'-O-methylguanosine-3'-phosphate
  modified_base 10: mod_base = OTHER; note = 2'-O-methyladenosine-3'-phosphate
  modified_base 11: mod_base = OTHER; note = 2'-O-methylcytidine-3'-phosphate
  modified_base 12: mod_base = OTHER; note = 2'-O-methyluridine-3'-phosphate
  modified_base 13: mod_base = OTHER; note = 2'-O-methyluridine-3'-phosphate
  modified_base 14: mod_base = OTHER; note = 2'-fluorouridine-3'-phosphate
  modified_base 15: mod_base = OTHER; note = 2'-O-methylcytidine-3'-phosphate
  modified_base 16: mod_base = OTHER; note = 2'-fluoroadenosine-3'-phosphate
  modified_base 17: mod_base = OTHER; note = 2'-O-methylcytidine-3'-phosphate
  modified_base 18: mod_base = OTHER; note = 2'-O-methyladenosine-3'-phosphate
  modified_base 19: mod_base = OTHER; note = 2'-O-methyluridine-3'-phosphorothioate
  modified_base 20: mod_base = OTHER; note = 2'-O-methyluridine-3'-phosphorothioate
  modified_base 21: mod_base = OTHER; note = 2'-O-methylcytidine-3'-phosphate
ttgtcgatgactttcacattc

SEQ ID NO: 287 - RNA, 23 nt, synthetic construct
  source 1..23: mol_type = other RNA; note = Description of Artificial Sequence: Synthetic oligonucleotide
  modified_base 1: mod_base = OTHER; note = 2'-O-methyluridine-3'-phosphorothioate
  modified_base 2: mod_base = OTHER; note = 2'-fluorouridine -3'-phosphorothioate
  modified_base 3: mod_base = OTHER; note = 2'-O-methylguanosine-3'-phosphate
  modified_base 4: mod_base = OTHER; note = 2'-O-methyluridine-3'-phosphate
  modified_base 5: mod_base = OTHER; note = 2'-O-methylcytidine-3'-phosphate
  modified_base 6: mod_base = OTHER; note = 2'-fluoroguanosine-3'-phosphate
  modified_base 7: mod_base = OTHER; note = 2'-O-methyladenosine-3'-phosphate
  modified_base 8: mod_base = OTHER; note = 2'-fluorouridine-3'-phosphate
  modified_base 9: mod_base = OTHER; note = 2'-O-methylguanosine-3'-phosphate
  modified_base 10: mod_base = OTHER; note = 2'-fluoroadenosine-3'-phosphate
  modified_base 11: mod_base = OTHER; note = 2'-O-methylcytidine-3'-phosphate
  modified_base 12: mod_base = OTHER; note = 2'-O-methyluridine-3'-phosphate
  modified_base 13: mod_base = OTHER; note = 2'-O-methyluridine-3'-phosphate
  modified_base 14: mod_base = OTHER; note = 2'-fluorouridine-3'-phosphate
  modified_base 15: mod_base = OTHER; note = 2'-O-methylcytidine-3'-phosphate
  modified_base 16: mod_base = OTHER; note = 2'-fluoroadenosine-3'-phosphate
  modified_base 17: mod_base = OTHER; note = 2'-O-methylcytidine-3'-phosphate
  modified_base 18: mod_base = OTHER; note = 2'-O-methyladenosine-3'-phosphate
  modified_base 19: mod_base = OTHER; note = 2'-O-methyluridine-3'-phosphate
  modified_base 20: mod_base = OTHER; note = 2'-O-methyluridine-3'-phosphate
  modified_base 21: mod_base = OTHER; note = 2'-O-methylcytidine-3'-phosphorothioate
  modified_base 22: mod_base = OTHER; note = 2'-O-methyluridine-3'-phosphorothioate
  modified_base 23: mod_base = OTHER; note = 2'-O-methylguanosine-3'-phosphate
ttgtcgatgactttcacattctg

SEQ ID NO: 288 - RNA, 23 nt, synthetic construct
  source 1..23: mol_type = other RNA; note = Description of Artificial Sequence: Synthetic oligonucleotide
  modified_base 1: mod_base = OTHER; note = 2'-O-methyluridine-3'-phosphorothioate
  modified_base 2: mod_base = OTHER; note = 2'-fluorouridine -3'-phosphorothioate
  modified_base 3: mod_base = OTHER; note = 2'-O-methylguanosine-3'-phosphate
  modified_base 4: mod_base = OTHER; note = 2'-O-methyluridine-3'-phosphate
  modified_base 5: mod_base = OTHER; note = 2'-O-methylcytidine-3'-phosphate
  modified_base 6: mod_base = OTHER; note = 2'-fluoroguanosine-3'-phosphate
  modified_base 7: mod_base = OTHER; note = 2'-O-methyladenosine-3'-phosphate
  modified_base 8: mod_base = OTHER; note = 2'-fluorouridine-3'-phosphate
  modified_base 9: mod_base = OTHER; note = 2'-fluoroguanosine-3'-phosphate
  modified_base 10: mod_base = OTHER; note = 2'-O-methyladenosine-3'-phosphate
  modified_base 11: mod_base = OTHER; note = 2'-O-methylcytidine-3'-phosphate
  modified_base 12: mod_base = OTHER; note = 2'-O-methyluridine-3'-phosphate
  modified_base 13: mod_base = OTHER; note = 2'-O-methyluridine-3'-phosphate
  modified_base 14: mod_base = OTHER; note = 2'-fluorouridine-3'-phosphate
  modified_base 15: mod_base = OTHER; note = 2'-O-methylcytidine-3'-phosphate
  modified_base 16: mod_base = OTHER; note = 2'-fluoroadenosine-3'-phosphate
  modified_base 17: mod_base = OTHER; note = 2'-O-methylcytidine-3'-phosphate
  modified_base 18: mod_base = OTHER; note = 2'-O-methyladenosine-3'-phosphate
  modified_base 19: mod_base = OTHER; note = 2'-O-methyluridine-3'-phosphate
  modified_base 20: mod_base = OTHER; note = 2'-O-methyluridine-3'-phosphate
  modified_base 21: mod_base = OTHER; note = 2'-O-methylcytidine-3'-phosphorothioate
  modified_base 22: mod_base = OTHER; note = 2'-O-methyluridine-3'-phosphorothioate
  modified_base 23: mod_base = OTHER; note = 2'-O-methylguanosine-3'-phosphate
ttgtcgatgactttcacattctg

SEQ ID NO: 289 - RNA, 23 nt, synthetic construct
  source 1..23: mol_type = other RNA; note = Description of Artificial Sequence: Synthetic oligonucleotide
  modified_base 1: mod_base = OTHER; note = 2'-O-methyluridine-3'-phosphorothioate
  modified_base 2: mod_base = OTHER; note = 2'-fluorouridine -3'-phosphorothioate
  modified_base 3: mod_base = OTHER; note = 2'-O-methylguanosine-3'-phosphate
  modified_base 4: mod_base = OTHER; note = 2'-O-methyluridine-3'-phosphate
  modified_base 5: mod_base = OTHER; note = 2'-O-methylcytidine-3'-phosphate
  modified_base 6: mod_base = OTHER; note = 2'-fluoroguanosine-3'-phosphate
  modified_base 7: mod_base = OTHER; note = 2'-O-methyladenosine-3'-phosphate
  modified_base 8: mod_base = OTHER; note = 2'-O-methyluridine-3'-phosphate
  modified_base 9: mod_base = OTHER; note = 2'-O-methylguanosine-3'-phosphate
  modified_base 10: mod_base = OTHER; note = 2'-O-methyladenosine-3'-phosphate
  modified_base 11: mod_base = OTHER; note = 2'-O-methylcytidine-3'-phosphate
  modified_base 12: mod_base = OTHER; note = 2'-O-methyluridine-3'-phosphate
  modified_base 13: mod_base = OTHER; note = 2'-O-methyluridine-3'-phosphate
  modified_base 14: mod_base = OTHER; note = 2'-fluorouridine-3'-phosphate
  modified_base 15: mod_base = OTHER; note = 2'-O-methylcytidine-3'-phosphate
  modified_base 16: mod_base = OTHER; note = 2'-fluoroadenosine-3'-phosphate
  modified_base 17: mod_base = OTHER; note = 2'-O-methylcytidine-3'-phosphate
  modified_base 18: mod_base = OTHER; note = 2'-O-methyladenosine-3'-phosphate
  modified_base 19: mod_base = OTHER; note = 2'-O-methyluridine-3'-phosphate
  modified_base 20: mod_base = OTHER; note = 2'-O-methyluridine-3'-phosphate
  modified_base 21: mod_base = OTHER; note = 2'-O-methylcytidine-3'-phosphorothioate
  modified_base 22: mod_base = OTHER; note = 2'-O-methyluridine-3'-phosphorothioate
  modified_base 23: mod_base = OTHER; note = 2'-O-methylguanosine-3'-phosphate
ttgtcgatgactttcacattctg

SEQ ID NO: 290 - RNA, 23 nt, synthetic construct
  source 1..23: mol_type = other RNA; note = Description of Artificial Sequence: Synthetic oligonucleotide
  modified_base 1: mod_base = OTHER; note = 2'-O-methyluridine-3'-phosphorothioate
  modified_base 2: mod_base = OTHER; note = 2'-fluorouridine -3'-phosphorothioate
  modified_base 3: mod_base = OTHER; note = 2'-O-methylguanosine-3'-phosphate
  modified_base 4: mod_base = OTHER; note = 2'-O-methyluridine-3'-phosphate
  modified_base 5: mod_base = OTHER; note = 2'-O-methylcytidine-3'-phosphate
  modified_base 6: mod_base = OTHER; note = 2'-fluoroguanosine-3'-phosphate
  modified_base 7: mod_base = OTHER; note = 2'-O-methyladenosine-3'-phosphate
  modified_base 8: mod_base = OTHER; note = 2'-O-methyluridine-3'-phosphate
  modified_base 9: mod_base = OTHER; note = 2'-O-methylguanosine-3'-phosphate
  modified_base 10: mod_base = OTHER; note = 2'-O-methyladenosine-3'-phosphate
  modified_base 11: mod_base = OTHER; note = 2'-O-methylcytidine-3'-phosphate
  modified_base 12: mod_base = OTHER; note = 2'-O-methyluridine-3'-phosphate
  modified_base 13: mod_base = OTHER; note = 2'-O-methyluridine-3'-phosphate
  modified_base 14: mod_base = OTHER; note = 2'-fluorouridine-3'-phosphate
  modified_base 15: mod_base = OTHER; note = 2'-O-methylcytidine-3'-phosphate
  modified_base 16: mod_base = OTHER; note = 2'-O-methyladenosine-3'-phosphate
  modified_base 17: mod_base = OTHER; note = 2'-O-methylcytidine-3'-phosphate
  modified_base 18: mod_base = OTHER; note = 2'-O-methyladenosine-3'-phosphate
  modified_base 19: mod_base = OTHER; note = 2'-O-methyluridine-3'-phosphate
  modified_base 20: mod_base = OTHER; note = 2'-O-methyluridine-3'-phosphate
  modified_base 21: mod_base = OTHER; note = 2'-O-methylcytidine-3'-phosphorothioate
  modified_base 22: mod_base = OTHER; note = 2'-O-methyluridine-3'-phosphorothioate
  modified_base 23: mod_base = OTHER; note = 2'-O-methylguanosine-3'-phosphate
ttgtcgatgactttcacattctg

SEQ ID NO: 291 - RNA, 23 nt, synthetic construct
  source 1..23: mol_type = other RNA; note = Description of Artificial Sequence: Synthetic oligonucleotide
  modified_base 1: mod_base = OTHER; note = 2'-O-methyluridine-3'-phosphorothioate
  modified_base 2: mod_base = OTHER; note = 2'-fluorouridine -3'-phosphorothioate
  modified_base 3: mod_base = OTHER; note = 2'-O-methylguanosine-3'-phosphate
  modified_base 4: mod_base = OTHER; note = 2'-O-methyluridine-3'-phosphate
  modified_base 5: mod_base = OTHER; note = 2'-O-methylcytidine-3'-phosphate
  modified_base 6: mod_base = OTHER; note = 2'-O-methylguanosine-3'-phosphate
  modified_base 7: mod_base = OTHER; note = 2'-O-methyladenosine-3'-phosphate
  modified_base 8: mod_base = OTHER; note = 2'-O-methyluridine-3'-phosphate
  modified_base 9: mod_base = OTHER; note = 2'-O-methylguanosine-3'-phosphate
  modified_base 10: mod_base = OTHER; note = 2'-O-methyladenosine-3'-phosphate
  modified_base 11: mod_base = OTHER; note = 2'-O-methylcytidine-3'-phosphate
  modified_base 12: mod_base = OTHER; note = 2'-O-methyluridine-3'-phosphate
  modified_base 13: mod_base = OTHER; note = 2'-O-methyluridine-3'-phosphate
  modified_base 14: mod_base = OTHER; note = 2'-fluorouridine-3'-phosphate
  modified_base 15: mod_base = OTHER; note = 2'-O-methylcytidine-3'-phosphate
  modified_base 16: mod_base = OTHER; note = 2'-O-methyladenosine-3'-phosphate
  modified_base 17: mod_base = OTHER; note = 2'-O-methylcytidine-3'-phosphate
  modified_base 18: mod_base = OTHER; note = 2'-O-methyladenosine-3'-phosphate
  modified_base 19: mod_base = OTHER; note = 2'-O-methyluridine-3'-phosphate
  modified_base 20: mod_base = OTHER; note = 2'-O-methyluridine-3'-phosphate
  modified_base 21: mod_base = OTHER; note = 2'-O-methylcytidine-3'-phosphorothioate
  modified_base 22: mod_base = OTHER; note = 2'-O-methyluridine-3'-phosphorothioate
  modified_base 23: mod_base = OTHER; note = 2'-O-methylguanosine-3'-phosphate
ttgtcgatgactttcacattctg

SEQ ID NO: 292 - RNA, 23 nt, synthetic construct
  source 1..23: mol_type = other RNA; note = Description of Artificial Sequence: Synthetic oligonucleotide
  modified_base 1: mod_base = OTHER; note = 2'-O-methyluridine-3'-phosphorothioate
  modified_base 2: mod_base = OTHER; note = 2'-fluorouridine -3'-phosphorothioate
  modified_base 3: mod_base = OTHER; note = 2'-O-methylguanosine-3'-phosphate
  modified_base 4: mod_base = OTHER; note = 2'-O-methyluridine-3'-phosphate
  modified_base 5: mod_base = OTHER; note = 2'-O-methylcytidine-3'-phosphate
  modified_base 6: mod_base = OTHER; note = 2'-fluoroguanosine-3'-phosphate
  modified_base 7: mod_base = OTHER; note = 2'-O-methyladenosine-3'-phosphate
  modified_base 8: mod_base = OTHER; note = 2'-fluorouridine-3'-phosphate
  modified_base 9: mod_base = OTHER; note = 2'-O-methylguanosine-3'-phosphate
  modified_base 10: mod_base = OTHER; note = 2'-fluoroadenosine-3'-phosphate
  modified_base 11: mod_base = OTHER; note = 2'-O-methylcytidine-3'-phosphate
  modified_base 12: mod_base = OTHER; note = 2'-O-methyluridine-3'-phosphate
  modified_base 13: mod_base = OTHER; note = 2'-O-methyluridine-3'-phosphate
  modified_base 14: mod_base = OTHER; note = 2'-fluorouridine-3'-phosphate
  modified_base 15: mod_base = OTHER; note = 2'-O-methylcytidine-3'-phosphate
  modified_base 16: mod_base = OTHER; note = 2'-fluoroadenosine-3'-phosphate
  modified_base 17: mod_base = OTHER; note = 2'-O-methylcytidine-3'-phosphate
  modified_base 18: mod_base = OTHER; note = 2'-O-methyladenosine-3'-phosphate
  modified_base 19: mod_base = OTHER; note = 2'-O-methyluridine-3'-phosphate
  modified_base 20: mod_base = OTHER; note = 2'-O-methyluridine-3'-phosphate
  modified_base 21: mod_base = OTHER; note = 2'-O-methylcytidine-3'-phosphorothioate
  modified_base 22: mod_base = OTHER; note = 2'-O-methyluridine-3'-phosphorothioate
  modified_base 23: mod_base = OTHER; note = 2'-O-methylguanosine-3'-phosphate
ttgtcgatgactttcacattctg

SEQ ID NO: 293 - RNA, 23 nt, synthetic construct
  source 1..23: mol_type = other RNA; note = Description of Artificial Sequence: Synthetic oligonucleotide
  modified_base 1: mod_base = OTHER; note = 2'-O-methyluridine-3'-phosphorothioate
  modified_base 2: mod_base = OTHER; note = 2'-fluorouridine -3'-phosphorothioate
  modified_base 3: mod_base = OTHER; note = 2'-O-methylguanosine-3'-phosphate
  modified_base 4: mod_base = OTHER; note = 2'-O-methyluridine-3'-phosphate
  modified_base 5: mod_base = OTHER; note = 2'-O-methylcytidine-3'-phosphate
  modified_base 6: mod_base = OTHER; note = 2'-fluoroguanosine-3'-phosphate
  modified_base 7: mod_base = OTHER; note = 2'-O-methyladenosine-3'-phosphate
  modified_base 8: mod_base = OTHER; note = 2'-fluorouridine-3'-phosphate
  modified_base 9: mod_base = OTHER; note = 2'-fluoroguanosine-3'-phosphate
  modified_base 10: mod_base = OTHER; note = 2'-O-methyladenosine-3'-phosphate
  modified_base 11: mod_base = OTHER; note = 2'-O-methylcytidine-3'-phosphate
  modified_base 12: mod_base = OTHER; note = 2'-O-methyluridine-3'-phosphate
  modified_base 13: mod_base = OTHER; note = 2'-O-methyluridine-3'-phosphate
  modified_base 14: mod_base = OTHER; note = 2'-fluorouridine-3'-phosphate
  modified_base 15: mod_base = OTHER; note = 2'-O-methylcytidine-3'-phosphate
  modified_base 16: mod_base = OTHER; note = 2'-fluoroadenosine-3'-phosphate
  modified_base 17: mod_base = OTHER; note = 2'-O-methylcytidine-3'-phosphate
  modified_base 18: mod_base = OTHER; note = 2'-O-methyladenosine-3'-phosphate
  modified_base 19: mod_base = OTHER; note = 2'-O-methyluridine-3'-phosphate
  modified_base 20: mod_base = OTHER; note = 2'-O-methyluridine-3'-phosphate
  modified_base 21: mod_base = OTHER; note = 2'-O-methylcytidine-3'-phosphorothioate
  modified_base 22: mod_base = OTHER; note = 2'-O-methyluridine-3'-phosphorothioate
  modified_base 23: mod_base = OTHER; note = 2'-O-methylguanosine-3'-phosphate
ttgtcgatgactttcacattctg

SEQ ID NO: 294 - RNA, 23 nt, synthetic construct
  source 1..23: mol_type = other RNA; note = Description of Artificial Sequence: Synthetic oligonucleotide
  modified_base 1: mod_base = OTHER; note = 2'-O-methyluridine-3'-phosphorothioate
  modified_base 2: mod_base = OTHER; note = 2'-fluorouridine -3'-phosphorothioate
  modified_base 3: mod_base = OTHER; note = 2'-O-methylguanosine-3'-phosphate
  modified_base 4: mod_base = OTHER; note = 2'-O-methyluridine-3'-phosphate
  modified_base 5: mod_base = OTHER; note = 2'-O-methylcytidine-3'-phosphate
  modified_base 6: mod_base = OTHER; note = 2'-fluoroguanosine-3'-phosphate
  modified_base 7: mod_base = OTHER; note = 2'-O-methyladenosine-3'-phosphate
  modified_base 8: mod_base = OTHER; note = 2'-fluorouridine-3'-phosphate
  modified_base 9: mod_base = OTHER; note = 2'-O-methylguanosine-3'-phosphate
  modified_base 10: mod_base = OTHER; note = 2'-fluoroadenosine-3'-phosphate
  modified_base 11: mod_base = OTHER; note = 2'-O-methylcytidine-3'-phosphate
  modified_base 12: mod_base = OTHER; note = 2'-O-methyluridine-3'-phosphate
  modified_base 13: mod_base = OTHER; note = 2'-O-methyluridine-3'-phosphate
  modified_base 14: mod_base = OTHER; note = 2'-fluorouridine-3'-phosphate
  modified_base 15: mod_base = OTHER; note = 2'-O-methylcytidine-3'-phosphate
  modified_base 16: mod_base = OTHER; note = 2'-fluoroadenosine-3'-phosphate
  modified_base 17: mod_base = OTHER; note = 2'-O-methylcytidine-3'-phosphate
  modified_base 18: mod_base = OTHER; note = 2'-O-methyladenosine-3'-phosphate
  modified_base 19: mod_base = OTHER; note = 2'-O-methyluridine-3'-phosphate
  modified_base 20: mod_base = OTHER; note = 2'-O-methyluridine-3'-phosphate
  modified_base 21: mod_base = OTHER; note = 2'-O-methylcytidine-3'-phosphorothioate
  modified_base 22: mod_base = OTHER; note = 2'-O-methyluridine-3'-phosphorothioate
  modified_base 23: mod_base = OTHER; note = 2'-O-methylguanosine-3'-phosphate
ttgtcgatgactttcacattctg

SEQ ID NO: 295 - RNA, 23 nt, synthetic construct
  source 1..23: mol_type = other RNA; note = Description of Artificial Sequence: Synthetic oligonucleotide
  modified_base 1: mod_base = OTHER; note = 2'-O-methyluridine-3'-phosphorothioate
  modified_base 2: mod_base = OTHER; note = 2'-fluorouridine -3'-phosphorothioate
  modified_base 3: mod_base = OTHER; note = 2'-O-methylguanosine-3'-phosphate
  modified_base 4: mod_base = OTHER; note = 2'-O-methyluridine-3'-phosphate
  modified_base 5: mod_base = OTHER; note = 2'-O-methylcytidine-3'-phosphate
  modified_base 6: mod_base = OTHER; note = 2'-fluoroguanosine-3'-phosphate
  modified_base 7: mod_base = OTHER; note = 2'-O-methyladenosine-3'-phosphate
  modified_base 8: mod_base = OTHER; note = 2'-fluorouridine-3'-phosphate
  modified_base 9: mod_base = OTHER; note = 2'-fluoroguanosine-3'-phosphate
  modified_base 10: mod_base = OTHER; note = 2'-O-methyladenosine-3'-phosphate
  modified_base 11: mod_base = OTHER; note = 2'-O-methylcytidine-3'-phosphate
  modified_base 12: mod_base = OTHER; note = 2'-O-methyluridine-3'-phosphate
  modified_base 13: mod_base = OTHER; note = 2'-O-methyluridine-3'-phosphate
  modified_base 14: mod_base = OTHER; note = 2'-fluorouridine-3'-phosphate
  modified_base 15: mod_base = OTHER; note = 2'-O-methylcytidine-3'-phosphate
  modified_base 16: mod_base = OTHER; note = 2'-fluoroadenosine-3'-phosphate
  modified_base 17: mod_base = OTHER; note = 2'-O-methylcytidine-3'-phosphate
  modified_base 18: mod_base = OTHER; note = 2'-O-methyladenosine-3'-phosphate
  modified_base 19: mod_base = OTHER; note = 2'-O-methyluridine-3'-phosphate
  modified_base 20: mod_base = OTHER; note = 2'-O-methyluridine-3'-phosphate
  modified_base 21: mod_base = OTHER; note = 2'-O-methylcytidine-3'-phosphorothioate
  modified_base 22: mod_base = OTHER; note = 2'-O-methyluridine-3'-phosphorothioate
  modified_base 23: mod_base = OTHER; note = 2'-O-methylguanosine-3'-phosphate
ttgtcgatgactttcacattctg

SEQ ID NO: 296 - RNA, 23 nt, synthetic construct
  source 1..23: mol_type = other RNA; note = Description of Artificial Sequence: Synthetic oligonucleotide
  modified_base 1: mod_base = OTHER; note = 2'-O-methyluridine-3'-phosphorothioate
  modified_base 2: mod_base = OTHER; note = 2'-fluorouridine -3'-phosphorothioate
  modified_base 3: mod_base = OTHER; note = 2'-O-methylguanosine-3'-phosphate
  modified_base 4: mod_base = OTHER; note = 2'-O-methyluridine-3'-phosphate
  modified_base 5: mod_base = OTHER; note = 2'-O-methylcytidine-3'-phosphate
  modified_base 6: mod_base = OTHER; note = 2'-fluoroguanosine-3'-phosphate
  modified_base 7: mod_base = OTHER; note = 2'-O-methyladenosine-3'-phosphate
  modified_base 8: mod_base = OTHER; note = 2'-O-methyluridine-3'-phosphate
  modified_base 9: mod_base = OTHER; note = 2'-O-methylguanosine-3'-phosphate
  modified_base 10: mod_base = OTHER; note = 2'-O-methyladenosine-3'-phosphate
  modified_base 11: mod_base = OTHER; note = 2'-O-methylcytidine-3'-phosphate
  modified_base 12: mod_base = OTHER; note = 2'-O-methyluridine-3'-phosphate
  modified_base 13: mod_base = OTHER; note = 2'-O-methyluridine-3'-phosphate
  modified_base 14: mod_base = OTHER; note = 2'-fluorouridine-3'-phosphate
  modified_base 15: mod_base = OTHER; note = 2'-O-methylcytidine-3'-phosphate
  modified_base 16: mod_base = OTHER; note = 2'-fluoroadenosine-3'-phosphate
  modified_base 17: mod_base = OTHER; note = 2'-O-methylcytidine-3'-phosphate
  modified_base 18: mod_base = OTHER; note = 2'-O-methyladenosine-3'-phosphate
  modified_base 19: mod_base = OTHER; note = 2'-O-methyluridine-3'-phosphate
  modified_base 20: mod_base = OTHER; note = 2'-O-methyluridine-3'-phosphate
  modified_base 21: mod_base = OTHER; note = 2'-O-methylcytidine-3'-phosphorothioate
  modified_base 22: mod_base = OTHER; note = 2'-O-methyluridine-3'-phosphorothioate
  modified_base 23: mod_base = OTHER; note = 2'-O-methylguanosine-3'-phosphate
ttgtcgatgactttcacattctg

SEQ ID NO: 297 - RNA, 23 nt, synthetic construct
  source 1..23: mol_type = other RNA; note = Description of Artificial Sequence: Synthetic oligonucleotide
  modified_base 1: mod_base = OTHER; note = 2'-O-methyluridine-3'-phosphorothioate
  modified_base 2: mod_base = OTHER; note = 2'-fluorouridine -3'-phosphorothioate
  modified_base 3: mod_base = OTHER; note = 2'-O-methylguanosine-3'-phosphate
  modified_base 4: mod_base = OTHER; note = 2'-fluorouridine-3'-phosphate
  modified_base 5: mod_base = OTHER; note = 2'-O-methylcytidine-3'-phosphate
  modified_base 6: mod_base = OTHER; note = 2'-fluoroguanosine-3'-phosphate
  modified_base 7: mod_base = OTHER; note = 2'-O-methyladenosine-3'-phosphate
  modified_base 8: mod_base = OTHER; note = 2'-fluorouridine-3'-phosphate
  modified_base 9: mod_base = OTHER; note = 2'-O-methylguanosine-3'-phosphate
  modified_base 10: mod_base = OTHER; note = 2'-fluoroadenosine-3'-phosphate
  modified_base 11: mod_base = OTHER; note = 2'-O-methylcytidine-3'-phosphate
  modified_base 12: mod_base = OTHER; note = 2'-O-methyluridine-3'-phosphate
  modified_base 13: mod_base = OTHER; note = 2'-O-methyluridine-3'-phosphate
  modified_base 14: mod_base = OTHER; note = 2'-fluorouridine-3'-phosphate
  modified_base 15: mod_base = OTHER; note = 2'-O-methylcytidine-3'-phosphate
  modified_base 16: mod_base = OTHER; note = 2'-fluoroadenosine-3'-phosphate
  modified_base 17: mod_base = OTHER; note = 2'-O-methylcytidine-3'-phosphate
  modified_base 18: mod_base = OTHER; note = 2'-fluoroadenosine-3'-phosphate
  modified_base 19: mod_base = OTHER; note = 2'-O-methyluridine-3'-phosphate
  modified_base 20: mod_base = OTHER; note = 2'-fluorouridine-3'-phosphate
  modified_base 21: mod_base = OTHER; note = 2'-O-methylcytidine-3'-phosphorothioate
  modified_base 22: mod_base = OTHER; note = 2'-O-methyluridine-3'-phosphorothioate
  modified_base 23: mod_base = OTHER; note = 2'-O-methylguanosine-3'-phosphate
ttgtcgatgactttcacattctg

SEQ ID NO: 298 - RNA, 23 nt, synthetic construct
  source 1..23: mol_type = other RNA; note = Description of Artificial Sequence: Synthetic oligonucleotide
  modified_base 1: mod_base = OTHER; note = 2'-O-methyluridine-3'-phosphorothioate
  modified_base 2: mod_base = OTHER; note = 2'-fluorouridine -3'-phosphorothioate
  modified_base 3: mod_base = OTHER; note = 2'-O-methylguanosine-3'-phosphate
  modified_base 4: mod_base = OTHER; note = 2'-fluorouridine-3'-phosphate
  modified_base 5: mod_base = OTHER; note = 2'-O-methylcytidine-3'-phosphate
  modified_base 6: mod_base = OTHER; note = 2'-fluoroguanosine-3'-phosphate
  modified_base 7: mod_base = OTHER; note = 2'-O-methyladenosine-3'-phosphate
  modified_base 8: mod_base = OTHER; note = 2'-fluorouridine-3'-phosphate
  modified_base 9: mod_base = OTHER; note = 2'-O-methylguanosine-3'-phosphate
  modified_base 10: mod_base = OTHER; note = 2'-fluoroadenosine-3'-phosphate
  modified_base 11: mod_base = OTHER; note = 2'-O-methylcytidine-3'-phosphate
  modified_base 12: mod_base = OTHER; note = 2'-O-methyluridine-3'-phosphate
  modified_base 13: mod_base = OTHER; note = 2'-O-methyluridine-3'-phosphate
  modified_base 14: mod_base = OTHER; note = 2'-fluorouridine-3'-phosphate
  modified_base 15: mod_base = OTHER; note = 2'-O-methylcytidine-3'-phosphate
  modified_base 16: mod_base = OTHER; note = 2'-fluoroadenosine-3'-phosphate
  modified_base 17: mod_base = OTHER; note = 2'-O-methylcytidine-3'-phosphate
  modified_base 18: mod_base = OTHER; note = 2'-fluoroadenosine-3'-phosphate
  modified_base 19: mod_base = OTHER; note = 2'-O-methyluridine-3'-phosphate
  modified_base 20: mod_base = OTHER; note = 2'-fluorouridine-3'-phosphate
  modified_base 21: mod_base = OTHER; note = 2'-O-methylcytidine-3'-phosphorothioate
  modified_base 22: mod_base = OTHER; note = 2'-O-methyluridine-3'-phosphorothioate
  modified_base 23: mod_base = OTHER; note = 2'-O-methylguanosine-3'-phosphate
ttgtcgatgactttcacattctg

SEQ ID NO: 299 - RNA, 23 nt, synthetic construct
  source 1..23: mol_type = other RNA; note = Description of Artificial Sequence: Synthetic oligonucleotide
  modified_base 1: mod_base = OTHER; note = 2'-O-methyluridine-3'-phosphorothioate
  modified_base 2: mod_base = OTHER; note = 2'-fluorouridine -3'-phosphorothioate
  modified_base 3: mod_base = OTHER; note = 2'-O-methylguanosine-3'-phosphate
  modified_base 4: mod_base = OTHER; note = 2'-fluorouridine-3'-phosphate
  modified_base 5: mod_base = OTHER; note = 2'-O-methylcytidine-3'-phosphate
  modified_base 6: mod_base = OTHER; note = 2'-fluoroguanosine-3'-phosphate
  modified_base 7: mod_base = OTHER; note = 2'-O-methyladenosine-3'-phosphate
  modified_base 8: mod_base = OTHER; note = 2'-fluorouridine-3'-phosphate
  modified_base 9: mod_base = OTHER; note = 2'-O-methylguanosine-3'-phosphate
  modified_base 10: mod_base = OTHER; note = 2'-fluoroadenosine-3'-phosphate
  modified_base 11: mod_base = OTHER; note = 2'-O-methylcytidine-3'-phosphate
  modified_base 12: mod_base = OTHER; note = 2'-O-methyluridine-3'-phosphate
  modified_base 13: mod_base = OTHER; note = 2'-O-methyluridine-3'-phosphate
  modified_base 14: mod_base = OTHER; note = 2'-fluorouridine-3'-phosphate
  modified_base 15: mod_base = OTHER; note = 2'-O-methylcytidine-3'-phosphate
  modified_base 16: mod_base = OTHER; note = 2'-fluoroadenosine-3'-phosphate
  modified_base 17: mod_base = OTHER; note = 2'-O-methylcytidine-3'-phosphate
  modified_base 18: mod_base = OTHER; note = 2'-fluoroadenosine-3'-phosphate
  modified_base 19: mod_base = OTHER; note = 2'-O-methyluridine-3'-phosphate
  modified_base 20: mod_base = OTHER; note = 2'-fluorouridine-3'-phosphate
  modified_base 21: mod_base = OTHER; note = 2'-O-methylcytidine-3'-phosphorothioate
  modified_base 22: mod_base = OTHER; note = 2'-O-methyluridine-3'-phosphorothioate
  modified_base 23: mod_base = OTHER; note = 2'-O-methylguanosine-3'-phosphate
ttgtcgatgactttcacattctg

SEQ ID NO: 300 - RNA, 23 nt, synthetic construct
  source 1..23: mol_type = other RNA; note = Description of Artificial Sequence: Synthetic oligonucleotide
  modified_base 1: mod_base = OTHER; note = 2'-O-methyluridine-3'-phosphorothioate
  modified_base 2: mod_base = OTHER; note = 2'-fluorouridine -3'-phosphorothioate
  modified_base 3: mod_base = OTHER; note = 2'-O-methylguanosine-3'-phosphate
  modified_base 4: mod_base = OTHER; note = 2'-fluorouridine-3'-phosphate
  modified_base 5: mod_base = OTHER; note = 2'-O-methylcytidine-3'-phosphate
  modified_base 6: mod_base = OTHER; note = 2'-fluoroguanosine-3'-phosphate
  modified_base 7: mod_base = OTHER; note = 2'-O-methyladenosine-3'-phosphate
  modified_base 8: mod_base = OTHER; note = 2'-fluorouridine-3'-phosphate
  modified_base 9: mod_base = OTHER; note = 2'-O-methylguanosine-3'-phosphate
  modified_base 10: mod_base = OTHER; note = 2'-fluoroadenosine-3'-phosphate
  modified_base 11: mod_base = OTHER; note = 2'-O-methylcytidine-3'-phosphate
  modified_base 12: mod_base = OTHER; note = 2'-O-methyluridine-3'-phosphate
  modified_base 13: mod_base = OTHER; note = 2'-O-methyluridine-3'-phosphate
  modified_base 14: mod_base = OTHER; note = 2'-fluorouridine-3'-phosphate
  modified_base 15: mod_base = OTHER; note = 2'-O-methylcytidine-3'-phosphate
  modified_base 16: mod_base = OTHER; note = 2'-fluoroadenosine-3'-phosphate
  modified_base 17: mod_base = OTHER; note = 2'-O-methylcytidine-3'-phosphate
  modified_base 18: mod_base = OTHER; note = 2'-fluoroadenosine-3'-phosphate
  modified_base 19: mod_base = OTHER; note = 2'-O-methyluridine-3'-phosphate
  modified_base 20: mod_base = OTHER; note = 2'-fluorouridine-3'-phosphate
  modified_base 21: mod_base = OTHER; note = 2'-O-methylcytidine-3'-phosphorothioate
  modified_base 22: mod_base = OTHER; note = 2'-O-methyluridine-3'-phosphorothioate
  modified_base 23: mod_base = OTHER; note = 2'-O-methylguanosine-3'-phosphate
ttgtcgatgactttcacattctg

SEQ ID NO: 301 - RNA, 23 nt, synthetic construct
  source 1..23: mol_type = other RNA; note = Description of Artificial Sequence: Synthetic oligonucleotide
  modified_base 1: mod_base = OTHER; note = 2'-O-methyluridine-3'-phosphorothioate
  modified_base 2: mod_base = OTHER; note = 2'-fluorouridine -3'-phosphorothioate
  modified_base 3: mod_base = OTHER; note = 2'-O-methylguanosine-3'-phosphate
  modified_base 4: mod_base = OTHER; note = 2'-fluorouridine-3'-phosphate
  modified_base 5: mod_base = OTHER; note = 2'-O-methylcytidine-3'-phosphate
  modified_base 6: mod_base = OTHER; note = 2'-fluoroguanosine-3'-phosphate
  modified_base 7: mod_base = OTHER; note = 2'-O-methyladenosine-3'-phosphate
  modified_base 8: mod_base = OTHER; note = 2'-fluorouridine-3'-phosphate
  modified_base 9: mod_base = OTHER; note = 2'-O-methylguanosine-3'-phosphate
  modified_base 10: mod_base = OTHER; note = 2'-fluoroadenosine-3'-phosphate
  modified_base 11: mod_base = OTHER; note = 2'-O-methylcytidine-3'-phosphate
  modified_base 12: mod_base = OTHER; note = 2'-O-methyluridine-3'-phosphate
  modified_base 13: mod_base = OTHER; note = 2'-O-methyluridine-3'-phosphate
  modified_base 14: mod_base = OTHER; note = 2'-fluorouridine-3'-phosphate
  modified_base 15: mod_base = OTHER; note = 2'-O-methylcytidine-3'-phosphate
  modified_base 16: mod_base = OTHER; note = 2'-fluoroadenosine-3'-phosphate
  modified_base 17: mod_base = OTHER; note = 2'-O-methylcytidine-3'-phosphate
  modified_base 18: mod_base = OTHER; note = 2'-fluoroadenosine-3'-phosphate
  modified_base 19: mod_base = OTHER; note = 2'-O-methyluridine-3'-phosphate
  modified_base 20: mod_base = OTHER; note = 2'-fluorouridine-3'-phosphate
  modified_base 21: mod_base = OTHER; note = 2'-O-methylcytidine-3'-phosphorothioate
  modified_base 22: mod_base = OTHER; note = 2'-O-methyluridine-3'-phosphorothioate
  modified_base 23: mod_base = OTHER; note = 2'-O-methylguanosine-3'-phosphate
ttgtcgatgactttcacattctg

SEQ ID NO: 302 - RNA, 23 nt, synthetic construct
  source 1..23: mol_type = other RNA; note = Description of Artificial Sequence: Synthetic oligonucleotide
  modified_base 1: mod_base = OTHER; note = 2'-O-methyluridine-3'-phosphorothioate
  modified_base 2: mod_base = OTHER; note = 2'-fluorouridine -3'-phosphorothioate
  modified_base 3: mod_base = OTHER; note = 2'-O-methylguanosine-3'-phosphate
  modified_base 4: mod_base = OTHER; note = 2'-fluorouridine-3'-phosphate
  modified_base 5: mod_base = OTHER; note = 2'-O-methylcytidine-3'-phosphate
  modified_base 6: mod_base = OTHER; note = 2'-fluoroguanosine-3'-phosphate
  modified_base 7: mod_base = OTHER; note = 2'-O-methyladenosine-3'-phosphate
  modified_base 8: mod_base = OTHER; note = 2'-fluorouridine-3'-phosphate
  modified_base 9: mod_base = OTHER; note = 2'-O-methylguanosine-3'-phosphate
  modified_base 10: mod_base = OTHER; note = 2'-fluoroadenosine-3'-phosphate
  modified_base 11: mod_base = OTHER; note = 2'-O-methylcytidine-3'-phosphate
  modified_base 12: mod_base = OTHER; note = 2'-O-methyluridine-3'-phosphate
  modified_base 13: mod_base = OTHER; note = 2'-O-methyluridine-3'-phosphate
  modified_base 14: mod_base = OTHER; note = 2'-fluorouridine-3'-phosphate
  modified_base 15: mod_base = OTHER; note = 2'-O-methylcytidine-3'-phosphate
  modified_base 16: mod_base = OTHER; note = 2'-fluoroadenosine-3'-phosphate
  modified_base 17: mod_base = OTHER; note = 2'-O-methylcytidine-3'-phosphate
  modified_base 18: mod_base = OTHER; note = 2'-fluoroadenosine-3'-phosphate
  modified_base 19: mod_base = OTHER; note = 2'-O-methyluridine-3'-phosphate
  modified_base 20: mod_base = OTHER; note = 2'-fluorouridine-3'-phosphate
  modified_base 21: mod_base = OTHER; note = 2'-O-methylcytidine-3'-phosphorothioate
  modified_base 22: mod_base = OTHER; note = 2'-O-methyluridine-3'-phosphorothioate
  modified_base 23: mod_base = OTHER; note = 2'-O-methylguanosine-3'-phosphate
ttgtcgatgactttcacattctg

SEQ ID NO: 303 - RNA, 23 nt, synthetic construct
  source 1..23: mol_type = other RNA; note = Description of Artificial Sequence: Synthetic oligonucleotide
  modified_base 1: mod_base = OTHER; note = 2'-O-methyluridine-3'-phosphorothioate
  modified_base 2: mod_base = OTHER; note = 2'-fluorouridine -3'-phosphorothioate
  modified_base 3: mod_base = OTHER; note = 2'-O-methylguanosine-3'-phosphate
  modified_base 4: mod_base = OTHER; note = 2'-fluorouridine-3'-phosphate
  modified_base 5: mod_base = OTHER; note = 2'-O-methylcytidine-3'-phosphate
  modified_base 6: mod_base = OTHER; note = 2'-fluoroguanosine-3'-phosphate
  modified_base 7: mod_base = OTHER; note = 2'-O-methyladenosine-3'-phosphate
  modified_base 8: mod_base = OTHER; note = 2'-fluorouridine-3'-phosphate
  modified_base 9: mod_base = OTHER; note = 2'-O-methylguanosine-3'-phosphate
  modified_base 10: mod_base = OTHER; note = 2'-fluoroadenosine-3'-phosphate
  modified_base 11: mod_base = OTHER; note = 2'-O-methylcytidine-3'-phosphate
  modified_base 12: mod_base = OTHER; note = 2'-O-methyluridine-3'-phosphate
  modified_base 13: mod_base = OTHER; note = 2'-O-methyluridine-3'-phosphate
  modified_base 14: mod_base = OTHER; note = 2'-fluorouridine-3'-phosphate
  modified_base 15: mod_base = OTHER; note = 2'-O-methylcytidine-3'-phosphate
  modified_base 16: mod_base = OTHER; note = 2'-fluoroadenosine-3'-phosphate
  modified_base 17: mod_base = OTHER; note = 2'-O-methylcytidine-3'-phosphate
  modified_base 18: mod_base = OTHER; note = 2'-fluoroadenosine-3'-phosphate
  modified_base 19: mod_base = OTHER; note = 2'-O-methyluridine-3'-phosphate
  modified_base 20: mod_base = OTHER; note = 2'-fluorouridine-3'-phosphate
  modified_base 21: mod_base = OTHER; note = 2'-O-methylcytidine-3'-phosphorothioate
  modified_base 22: mod_base = OTHER; note = 2'-O-methyluridine-3'-phosphorothioate
  modified_base 23: mod_base = OTHER; note = 2'-O-methylguanosine-3'-phosphate
ttgtcgatgactttcacattctg

SEQ ID NO: 304 - RNA, 23 nt, synthetic construct
  source 1..23: mol_type = other RNA; note = Description of Artificial Sequence: Synthetic oligonucleotide
  modified_base 1: mod_base = OTHER; note = 2'-O-methyluridine-3'-phosphorothioate
  modified_base 2: mod_base = OTHER; note = 2'-fluorouridine -3'-phosphorothioate
  modified_base 3: mod_base = OTHER; note = 2'-O-methylguanosine-3'-phosphate
  modified_base 4: mod_base = OTHER; note = 2'-fluorouridine-3'-phosphate
  modified_base 5: mod_base = OTHER; note = 2'-O-methylcytidine-3'-phosphate
  modified_base 6: mod_base = OTHER; note = 2'-fluoroguanosine-3'-phosphate
  modified_base 7: mod_base = OTHER; note = 2'-O-methyladenosine-3'-phosphate
  modified_base 8: mod_base = OTHER; note = 2'-fluorouridine-3'-phosphate
  modified_base 9: mod_base = OTHER; note = 2'-O-methylguanosine-3'-phosphate
  modified_base 10: mod_base = OTHER; note = 2'-fluoroadenosine-3'-phosphate
  modified_base 11: mod_base = OTHER; note = 2'-O-methylcytidine-3'-phosphate
  modified_base 12: mod_base = OTHER; note = 2'-O-methyluridine-3'-phosphate
  modified_base 13: mod_base = OTHER; note = 2'-O-methyluridine-3'-phosphate
  modified_base 14: mod_base = OTHER; note = 2'-fluorouridine-3'-phosphate
  modified_base 15: mod_base = OTHER; note = 2'-O-methylcytidine-3'-phosphate
  modified_base 16: mod_base = OTHER; note = 2'-fluoroadenosine-3'-phosphate
  modified_base 17: mod_base = OTHER; note = 2'-O-methylcytidine-3'-phosphate
  modified_base 18: mod_base = OTHER; note = 2'-fluoroadenosine-3'-phosphate
  modified_base 19: mod_base = OTHER; note = 2'-O-methyluridine-3'-phosphate
  modified_base 20: mod_base = OTHER; note = 2'-fluorouridine-3'-phosphate
  modified_base 21: mod_base = OTHER; note = 2'-O-methylcytidine-3'-phosphorothioate
  modified_base 22: mod_base = OTHER; note = 2'-O-methyluridine-3'-phosphorothioate
  modified_base 23: mod_base = OTHER; note = 2'-O-methylguanosine-3'-phosphate
ttgtcgatgactttcacattctg

SEQ ID NO: 305 - RNA, 23 nt, synthetic construct
  source 1..23: mol_type = other RNA; note = Description of Artificial Sequence: Synthetic oligonucleotide
  modified_base 1: mod_base = OTHER; note = 2'-O-methyluridine-3'-phosphorothioate
  modified_base 2: mod_base = OTHER; note = 2'-fluorouridine -3'-phosphorothioate
  modified_base 3: mod_base = OTHER; note = 2'-O-methylguanosine-3'-phosphate
  modified_base 4: mod_base = OTHER; note = 2'-fluorouridine-3'-phosphate
  modified_base 5: mod_base = OTHER; note = 2'-O-methylcytidine-3'-phosphate
  modified_base 6: mod_base = OTHER; note = 2'-fluoroguanosine-3'-phosphate
  modified_base 7: mod_base = OTHER; note = 2'-O-methyladenosine-3'-phosphate
  modified_base 8: mod_base = OTHER; note = 2'-fluorouridine-3'-phosphate
  modified_base 9: mod_base = OTHER; note = 2'-O-methylguanosine-3'-phosphate
  modified_base 10: mod_base = OTHER; note = 2'-fluoroadenosine-3'-phosphate
  modified_base 11: mod_base = OTHER; note = 2'-O-methylcytidine-3'-phosphate
  modified_base 12: mod_base = OTHER; note = 2'-O-methyluridine-3'-phosphate
  modified_base 13: mod_base = OTHER; note = 2'-O-methyluridine-3'-phosphate
  modified_base 14: mod_base = OTHER; note = 2'-fluorouridine-3'-phosphate
  modified_base 15: mod_base = OTHER; note = 2'-O-methylcytidine-3'-phosphate
  modified_base 16: mod_base = OTHER; note = 2'-fluoroadenosine-3'-phosphate
  modified_base 17: mod_base = OTHER; note = 2'-O-methylcytidine-3'-phosphate
  modified_base 18: mod_base = OTHER; note = 2'-fluoroadenosine-3'-phosphate
  modified_base 19: mod_base = OTHER; note = 2'-O-methyluridine-3'-phosphate
  modified_base 20: mod_base = OTHER; note = 2'-fluorouridine-3'-phosphate
  modified_base 21: mod_base = OTHER; note = 2'-O-methylcytidine-3'-phosphorothioate
  modified_base 22: mod_base = OTHER; note = 2'-O-methyluridine-3'-phosphorothioate
  modified_base 23: mod_base = OTHER; note = 2'-O-methylguanosine-3'-phosphate
ttgtcgatgactttcacattctg

SEQ ID NO: 306 - RNA, 23 nt, synthetic construct
  source 1..23: mol_type = other RNA; note = Description of Artificial Sequence: Synthetic oligonucleotide
  modified_base 1: mod_base = OTHER; note = 2'-O-methyluridine-3'-phosphorothioate
  modified_base 2: mod_base = OTHER; note = 2'-fluorouridine -3'-phosphorothioate
  modified_base 3: mod_base = OTHER; note = 2'-O-methylguanosine-3'-phosphate
  modified_base 4: mod_base = OTHER; note = 2'-fluorouridine-3'-phosphate
  modified_base 5: mod_base = OTHER; note = 2'-O-methylcytidine-3'-phosphate
  modified_base 6: mod_base = OTHER; note = 2'-fluoroguanosine-3'-phosphate
  modified_base 7: mod_base = OTHER; note = 2'-O-methyladenosine-3'-phosphate
  modified_base 8: mod_base = OTHER; note = 2'-fluorouridine-3'-phosphate
  modified_base 9: mod_base = OTHER; note = 2'-O-methylguanosine-3'-phosphate
  modified_base 10: mod_base = OTHER; note = 2'-fluoroadenosine-3'-phosphate
  modified_base 11: mod_base = OTHER; note = 2'-O-methylcytidine-3'-phosphate
  modified_base 12: mod_base = OTHER; note = 2'-O-methyluridine-3'-phosphate
  modified_base 13: mod_base = OTHER; note = 2'-O-methyluridine-3'-phosphate
  modified_base 14: mod_base = OTHER; note = 2'-fluorouridine-3'-phosphate
  modified_base 15: mod_base = OTHER; note = 2'-O-methylcytidine-3'-phosphate
  modified_base 16: mod_base = OTHER; note = 2'-fluoroadenosine-3'-phosphate
  modified_base 17: mod_base = OTHER; note = 2'-O-methylcytidine-3'-phosphate
  modified_base 18: mod_base = OTHER; note = 2'-fluoroadenosine-3'-phosphate
  modified_base 19: mod_base = OTHER; note = 2'-O-methyluridine-3'-phosphate
  modified_base 20: mod_base = OTHER; note = 2'-fluorouridine-3'-phosphate
  modified_base 21: mod_base = OTHER; note = 2'-O-methylcytidine-3'-phosphorothioate
  modified_base 22: mod_base = OTHER; note = 2'-O-methyluridine-3'-phosphorothioate
  modified_base 23: mod_base = OTHER; note = 2'-O-methylguanosine-3'-phosphate
ttgtcgatgactttcacattctg

SEQ ID NO: 307 - RNA, 23 nt, synthetic construct
  source 1..23: mol_type = other RNA; note = Description of Artificial Sequence: Synthetic oligonucleotide
  modified_base 1: mod_base = OTHER; note = 2'-O-methyluridine-3'-phosphorothioate
  modified_base 2: mod_base = OTHER; note = 2'-fluorouridine -3'-phosphorothioate
  modified_base 3: mod_base = OTHER; note = 2'-O-methylguanosine-3'-phosphate
  modified_base 4: mod_base = OTHER; note = 2'-fluorouridine-3'-phosphate
  modified_base 5: mod_base = OTHER; note = 2'-O-methylcytidine-3'-phosphate
  modified_base 6: mod_base = OTHER; note = 2'-fluoroguanosine-3'-phosphate
  modified_base 7: mod_base = OTHER; note = 2'-O-methyladenosine-3'-phosphate
  modified_base 8: mod_base = OTHER; note = 2'-fluorouridine-3'-phosphate
  modified_base 9: mod_base = OTHER; note = 2'-O-methylguanosine-3'-phosphate
  modified_base 10: mod_base = OTHER; note = 2'-fluoroadenosine-3'-phosphate
  modified_base 11: mod_base = OTHER; note = 2'-O-methylcytidine-3'-phosphate
  modified_base 12: mod_base = OTHER; note = 2'-O-methyluridine-3'-phosphate
  modified_base 13: mod_base = OTHER; note = 2'-O-methyluridine-3'-phosphate
  modified_base 14: mod_base = OTHER; note = 2'-fluorouridine-3'-phosphate
  modified_base 15: mod_base = OTHER; note = 2'-O-methylcytidine-3'-phosphate
  modified_base 16: mod_base = OTHER; note = 2'-fluoroadenosine-3'-phosphate
  modified_base 17: mod_base = OTHER; note = 2'-O-methylcytidine-3'-phosphate
  modified_base 18: mod_base = OTHER; note = 2'-fluoroadenosine-3'-phosphate
  modified_base 19: mod_base = OTHER; note = 2'-O-methyluridine-3'-phosphate
  modified_base 20: mod_base = OTHER; note = 2'-fluorouridine-3'-phosphate
  modified_base 21: mod_base = OTHER; note = 2'-O-methylcytidine-3'-phosphorothioate
  modified_base 22: mod_base = OTHER; note = 2'-O-methyluridine-3'-phosphorothioate
  modified_base 23: mod_base = OTHER; note = 2'-O-methylguanosine-3'-phosphate
ttgtcgatgactttcacattctg

SEQ ID NO: 308 - RNA, 23 nt, synthetic construct
  source 1..23: mol_type = other RNA; note = Description of Artificial Sequence: Synthetic oligonucleotide
  modified_base 1: mod_base = OTHER; note = 2'-O-methyluridine-3'-phosphorothioate
  modified_base 2: mod_base = OTHER; note = 2'-fluorouridine -3'-phosphorothioate
  modified_base 3: mod_base = OTHER; note = 2'-O-methylguanosine-3'-phosphate
  modified_base 4: mod_base = OTHER; note = 2'-fluorouridine-3'-phosphate
  modified_base 5: mod_base = OTHER; note = 2'-O-methylcytidine-3'-phosphate
  modified_base 6: mod_base = OTHER; note = 2'-fluoroguanosine-3'-phosphate
  modified_base 7: mod_base = OTHER; note = 2'-O-methyladenosine-3'-phosphate
  modified_base 8: mod_base = OTHER; note = 2'-fluorouridine-3'-phosphate
  modified_base 9: mod_base = OTHER; note = 2'-O-methylguanosine-3'-phosphate
  modified_base 10: mod_base = OTHER; note = 2'-fluoroadenosine-3'-phosphate
  modified_base 11: mod_base = OTHER; note = 2'-O-methylcytidine-3'-phosphate
  modified_base 12: mod_base = OTHER; note = 2'-O-methyluridine-3'-phosphate
  modified_base 13: mod_base = OTHER; note = 2'-O-methyluridine-3'-phosphate
  modified_base 14: mod_base = OTHER; note = 2'-fluorouridine-3'-phosphate
  modified_base 15: mod_base = OTHER; note = 2'-O-methylcytidine-3'-phosphate
  modified_base 16: mod_base = OTHER; note = 2'-fluoroadenosine-3'-phosphate
  modified_base 17: mod_base = OTHER; note = 2'-O-methylcytidine-3'-phosphate
  modified_base 18: mod_base = OTHER; note = 2'-fluoroadenosine-3'-phosphate
  modified_base 19: mod_base = OTHER; note = 2'-O-methyluridine-3'-phosphate
  modified_base 20: mod_base = OTHER; note = 2'-fluorouridine-3'-phosphate
  modified_base 21: mod_base = OTHER; note = 2'-O-methylcytidine-3'-phosphorothioate
  modified_base 22: mod_base = OTHER; note = 2'-O-methyluridine-3'-phosphorothioate
  modified_base 23: mod_base = OTHER; note = 2'-O-methylguanosine-3'-phosphate
ttgtcgatgactttcacattctg

SEQ ID NO: 309 - DNA, 23 bp, synthetic construct
  source 1..23: mol_type = other DNA; note = Description of Artificial Sequence: Synthetic oligonucleotide; note = Description of Combined DNA/RNA Molecule: Synthetic oligonucleotide
  modified_base 1: mod_base = OTHER; note = 2'-O-methyluridine-3'-phosphorothioate
  modified_base 2: mod_base = OTHER; note = 2'-deoxythymidine-3'-phosphorothioate
  modified_base 3: mod_base = OTHER; note = 2'-O-methylguanosine-3'-phosphate
  modified_base 4: mod_base = OTHER; note = 2'-O-methyluridine-3'-phosphate
  modified_base 5: mod_base = OTHER; note = 2'-O-methylcytidine-3'-phosphate
  modified_base 6: mod_base = OTHER; note = 2'-O-methylguanosine-3'-phosphate
  modified_base 7: mod_base = OTHER; note = 2'-O-methyladenosine-3'-phosphate
  modified_base 8: mod_base = OTHER; note = 2'-O-methyluridine-3'-phosphate
  modified_base 9: mod_base = OTHER; note = 2'-O-methylguanosine-3'-phosphate
  modified_base 11: mod_base = OTHER; note = 2'-O-methylcytidine-3'-phosphate
  modified_base 12: mod_base = OTHER; note = 2'-O-methyluridine-3'-phosphate
  modified_base 13: mod_base = OTHER; note = 2'-O-methyluridine-3'-phosphate
  modified_base 15: mod_base = OTHER; note = 2'-O-methylcytidine-3'-phosphate
  modified_base 16: mod_base = OTHER; note = 2'-O-methyladenosine-3'-phosphate
  modified_base 17: mod_base = OTHER; note = 2'-O-methylcytidine-3'-phosphate
  modified_base 18: mod_base = OTHER; note = 2'-O-methyladenosine-3'-phosphate
  modified_base 19: mod_base = OTHER; note = 2'-O-methyluridine-3'-phosphate
  modified_base 20: mod_base = OTHER; note = 2'-O-methyluridine-3'-phosphate
  modified_base 21: mod_base = OTHER; note = 2'-O-methylcytidine-3'-phosphorothioate
  modified_base 22: mod_base = OTHER; note = 2'-O-methyluridine-3'-phosphorothioate
  modified_base 23: mod_base = OTHER; note = 2'-O-methylguanosine-3'-phosphate
  misc_feature 1: note = RNA
  misc_feature 2: note = DNA
  misc_feature 3..9: note = RNA
  misc_feature 10: note = DNA
  misc_feature 11..13: note = RNA
  misc_feature 14: note = DNA
  misc_feature 15..23: note = RNA
ttgtcgatgactttcacattctg

SEQ ID NO: 310 - DNA, 23 bp, synthetic construct
  source 1..23: mol_type = other DNA; note = Description of Artificial Sequence: Synthetic oligonucleotide; note = Description of Combined DNA/RNA Molecule: Synthetic oligonucleotide
  modified_base 1: mod_base = OTHER; note = 2'-O-methyluridine-3'-phosphorothioate
  modified_base 2: mod_base = OTHER; note = uridine -3'-phosphorothioate
  modified_base 3: mod_base = OTHER; note = 2'-O-methylguanosine-3'-phosphate
  modified_base 4: mod_base = OTHER; note = 2'-O-methyluridine-3'-phosphate
  modified_base 5: mod_base = OTHER; note = 2'-O-methylcytidine-3'-phosphate
  modified_base 6: mod_base = OTHER; note = 2'-O-methylguanosine-3'-phosphate
  modified_base 7: mod_base = OTHER; note = 2'-O-methyladenosine-3'-phosphate
  modified_base 8: mod_base = OTHER; note = 2'-O-methyluridine-3'-phosphate
  modified_base 9: mod_base = OTHER; note = 2'-O-methylguanosine-3'-phosphate
  modified_base 10: mod_base = OTHER; note = 2'-O-methyladenosine-3'-phosphate
  modified_base 11: mod_base = OTHER; note = 2'-O-methylcytidine-3'-phosphate
  modified_base 12: mod_base = OTHER; note = 2'-O-methyluridine-3'-phosphate
  modified_base 13: mod_base = OTHER; note = 2'-O-methyluridine-3'-phosphate
  modified_base 15: mod_base = OTHER; note = 2'-O-methylcytidine-3'-phosphate
  modified_base 16: mod_base = OTHER; note = 2'-O-methyladenosine-3'-phosphate
  modified_base 17: mod_base = OTHER; note = 2'-O-methylcytidine-3'-phosphate
  modified_base 18: mod_base = OTHER; note = 2'-O-methyladenosine-3'-phosphate
  modified_base 19: mod_base = OTHER; note = 2'-O-methyluridine-3'-phosphate
  modified_base 20: mod_base = OTHER; note = 2'-O-methyluridine-3'-phosphate
  modified_base 21: mod_base = OTHER; note = 2'-O-methylcytidine-3'-phosphorothioate
  modified_base 22: mod_base = OTHER; note = 2'-O-methyluridine-3'-phosphorothioate
  modified_base 23: mod_base = OTHER; note = 2'-O-methylguanosine-3'-phosphate
  misc_feature 1..13: note = RNA
  misc_feature 14: note = DNA
  misc_feature 15..23: note = RNA
ttgtcgatgactttcacattctg

SEQ ID NO: 311 - DNA, 23 bp, synthetic construct
  source 1..23: mol_type = other DNA; note = Description of Artificial Sequence: Synthetic oligonucleotide; note = Description of Combined DNA/RNA Molecule: Synthetic oligonucleotide
  modified_base 1: mod_base = OTHER; note = 2'-O-methyluridine-3'-phosphorothioate
  modified_base 2: mod_base = OTHER; note = 2'-deoxythymidine-3'-phosphorothioate
  modified_base 3: mod_base = OTHER; note = 2'-O-methylguanosine-3'-phosphate
  modified_base 4: mod_base = OTHER; note = 2'-O-methyluridine-3'-phosphate
  modified_base 5: mod_base = OTHER; note = 2'-O-methylcytidine-3'-phosphate
  modified_base 7: mod_base = OTHER; note = 2'-O-methyladenosine-3'-phosphate
  modified_base 8: mod_base = OTHER; note = 2'-O-methyluridine-3'-phosphate
  modified_base 9: mod_base = OTHER; note = 2'-O-methylguanosine-3'-phosphate
  modified_base 10: mod_base = OTHER; note = 2'-O-methyladenosine-3'-phosphate
  modified_base 11: mod_base = OTHER; note = 2'-O-methylcytidine-3'-phosphate
  modified_base 12: mod_base = OTHER; note = 2'-O-methyluridine-3'-phosphate
  modified_base 13: mod_base = OTHER; note = 2'-O-methyluridine-3'-phosphate
  modified_base 15: mod_base = OTHER; note = 2'-O-methylcytidine-3'-phosphate
  modified_base 16: mod_base = OTHER; note = 2'-O-methyladenosine-3'-phosphate
  modified_base 17: mod_base = OTHER; note = 2'-O-methylcytidine-3'-phosphate
  modified_base 18: mod_base = OTHER; note = 2'-O-methyladenosine-3'-phosphate
  modified_base 19: mod_base = OTHER; note = 2'-O-methyluridine-3'-phosphate
  modified_base 20: mod_base = OTHER; note = 2'-O-methyluridine-3'-phosphate
  modified_base 21: mod_base = OTHER; note = 2'-O-methylcytidine-3'-phosphorothioate
  modified_base 22: mod_base = OTHER; note = 2'-O-methyluridine-3'-phosphorothioate
  modified_base 23: mod_base = OTHER; note = 2'-O-methylguanosine-3'-phosphate
  misc_feature 1: note = RNA
  misc_feature 2: note = DNA
  misc_feature 3..5: note = RNA
  misc_feature 6: note = DNA
  misc_feature 7..13: note = RNA
  misc_feature 14: note = DNA
  misc_feature 15..23: note = RNA
ttgtcgatgactttcacattctg

SEQ ID NO: 312 - DNA, 23 bp, synthetic construct
  source 1..23: mol_type = other DNA; note = Description of Artificial Sequence: Synthetic oligonucleotide; note = Description of Combined DNA/RNA Molecule: Synthetic oligonucleotide
  modified_base 1: mod_base = OTHER; note = 2'-O-methyluridine-3'-phosphorothioate
  modified_base 2: mod_base = OTHER; note = uridine -3'-phosphorothioate
  modified_base 3: mod_base = OTHER; note = 2'-O-methylguanosine-3'-phosphate
  modified_base 4: mod_base = OTHER; note = 2'-O-methyluridine-3'-phosphate
  modified_base 5: mod_base = OTHER; note = 2'-O-methylcytidine-3'-phosphate
  modified_base 7: mod_base = OTHER; note = 2'-O-methyladenosine-3'-phosphate
  modified_base 8: mod_base = OTHER; note = 2'-O-methyluridine-3'-phosphate
  modified_base 9: mod_base = OTHER; note = 2'-O-methylguanosine-3'-phosphate
  modified_base 10: mod_base = OTHER; note = 2'-O-methyladenosine-3'-phosphate
  modified_base 11: mod_base = OTHER; note = 2'-O-methylcytidine-3'-phosphate
  modified_base 12: mod_base = OTHER; note = 2'-O-methyluridine-3'-phosphate
  modified_base 13: mod_base = OTHER; note = 2'-O-methyluridine-3'-phosphate
  modified_base 15: mod_base = OTHER; note = 2'-O-methylcytidine-3'-phosphate
  modified_base 16: mod_base = OTHER; note = 2'-O-methyladenosine-3'-phosphate
  modified_base 17: mod_base = OTHER; note = 2'-O-methylcytidine-3'-phosphate
  modified_base 18: mod_base = OTHER; note = 2'-O-methyladenosine-3'-phosphate
  modified_base 19: mod_base = OTHER; note = 2'-O-methyluridine-3'-phosphate
  modified_base 20: mod_base = OTHER; note = 2'-O-methyluridine-3'-phosphate
  modified_base 21: mod_base = OTHER; note = 2'-O-methylcytidine-3'-phosphorothioate
  modified_base 22: mod_base = OTHER; note = 2'-O-methyluridine-3'-phosphorothioate
  modified_base 23: mod_base = OTHER; note = 2'-O-methylguanosine-3'-phosphate
  misc_feature 1..5: note = RNA
  misc_feature 6: note = DNA
  misc_feature 7..13: note = RNA
  misc_feature 14: note = DNA
  misc_feature 15..23: note = RNA
ttgtcgatgactttcacattctg

SEQ ID NO: 313 - DNA, 23 bp, synthetic construct
  source 1..23: mol_type = other DNA; note = Description of Artificial Sequence: Synthetic oligonucleotide; note = Description of Combined DNA/RNA Molecule: Synthetic oligonucleotide
  modified_base 1: mod_base = OTHER; note = 2'-O-methyluridine-3'-phosphorothioate
  modified_base 2: mod_base = OTHER; note = 2'-deoxythymidine-3'-phosphorothioate
  modified_base 3: mod_base = OTHER; note = 2'-O-methylguanosine-3'-phosphate
  modified_base 4: mod_base = OTHER; note = 2'-O-methyluridine-3'-phosphate
  modified_base 5: mod_base = OTHER; note = 2'-O-methylcytidine-3'-phosphate
  modified_base 6: mod_base = OTHER; note = 2'-O-methylguanosine-3'-phosphate
  modified_base 7: mod_base = OTHER; note = 2'-O-methyladenosine-3'-phosphate
  modified_base 8: mod_base = OTHER; note = 2'-O-methyluridine-3'-phosphate
  modified_base 9: mod_base = OTHER; note = 2'-O-methylguanosine-3'-phosphate
  modified_base 10: mod_base = OTHER; note = 2'-O-methyladenosine-3'-phosphate
  modified_base 11: mod_base = OTHER; note = 2'-O-methylcytidine-3'-phosphate
  modified_base 12: mod_base = OTHER; note = 2'-O-methyluridine-3'-phosphate
  modified_base 13: mod_base = OTHER; note = 2'-O-methyluridine-3'-phosphate
  modified_base 15: mod_base = OTHER; note = 2'-O-methylcytidine-3'-phosphate
  modified_base 17: mod_base = OTHER; note = 2'-O-methylcytidine-3'-phosphate
  modified_base 18: mod_base = OTHER; note = 2'-O-methyladenosine-3'-phosphate
  modified_base 19: mod_base = OTHER; note = 2'-O-methyluridine-3'-phosphate
  modified_base 20: mod_base = OTHER; note = 2'-O-methyluridine-3'-phosphate
  modified_base 21: mod_base = OTHER; note = 2'-O-methylcytidine-3'-phosphorothioate
  modified_base 22: mod_base = OTHER; note = 2'-O-methyluridine-3'-phosphorothioate
  modified_base 23: mod_base = OTHER; note = 2'-O-methylguanosine-3'-phosphate
  misc_feature 1: note = RNA
  misc_feature 2: note = DNA
  misc_feature 3..13: note = RNA
  misc_feature 14: note = DNA
  misc_feature 15: note = RNA
  misc_feature 16: note = DNA
  misc_feature 17..23: note = RNA
ttgtcgatgactttcacattctg

SEQ ID NO: 314 - DNA, 23 bp, synthetic construct
  source 1..23: mol_type = other DNA; note = Description of Artificial Sequence: Synthetic oligonucleotide; note = Description of Combined DNA/RNA Molecule: Synthetic oligonucleotide
  modified_base 1: mod_base = OTHER; note = 2'-O-methyluridine-3'-phosphorothioate
  modified_base 2: mod_base = OTHER; note = 2'-deoxythymidine-3'-phosphorothioate
  modified_base 3: mod_base = OTHER; note = 2'-O-methylguanosine-3'-phosphate
  modified_base 4: mod_base = OTHER; note = 2'-O-methyluridine-3'-phosphate
  modified_base 5: mod_base = OTHER; note = 2'-O-methylcytidine-3'-phosphate
  modified_base 7: mod_base = OTHER; note = 2'-O-methyladenosine-3'-phosphate
  modified_base 8: mod_base = OTHER; note = 2'-O-methyluridine-3'-phosphate
  modified_base 9: mod_base = OTHER; note = 2'-O-methylguanosine-3'-phosphate
  modified_base 10: mod_base = OTHER; note = 2'-O-methyladenosine-3'-phosphate
  modified_base 11: mod_base = OTHER; note = 2'-O-methylcytidine-3'-phosphate
  modified_base 12: mod_base = OTHER; note = 2'-O-methyluridine-3'-phosphate
  modified_base 13: mod_base = OTHER; note = 2'-O-methyluridine-3'-phosphate
  modified_base 15: mod_base = OTHER; note = 2'-O-methylcytidine-3'-phosphate
  modified_base 17: mod_base = OTHER; note = 2'-O-methylcytidine-3'-phosphate
  modified_base 18: mod_base = OTHER; note = 2'-O-methyladenosine-3'-phosphate
  modified_base 19: mod_base = OTHER; note = 2'-O-methyluridine-3'-phosphate
  modified_base 20: mod_base = OTHER; note = 2'-O-methyluridine-3'-phosphate
  modified_base 21: mod_base = OTHER; note = 2'-O-methylcytidine-3'-phosphorothioate
  modified_base 22: mod_base = OTHER; note = 2'-O-methyluridine-3'-phosphorothioate
  modified_base 23: mod_base = OTHER; note = 2'-O-methylguanosine-3'-phosphate
  misc_feature 1: note = RNA
  misc_feature 2: note = DNA
  misc_feature 3..5: note = RNA
  misc_feature 6: note = DNA
  misc_feature 7..13: note = RNA
  misc_feature 14: note = DNA
  misc_feature 15: note = RNA
  misc_feature 16: note = DNA
  misc_feature 17..23: note = RNA
ttgtcgatgactttcacattctg

SEQ ID NO: 315 - DNA, 23 bp, synthetic construct
  source 1..23: mol_type = other DNA; note = Description of Artificial Sequence: Synthetic oligonucleotide; note = Description of Combined DNA/RNA Molecule: Synthetic oligonucleotide
  modified_base 1: mod_base = OTHER; note = 2'-O-methyluridine-3'-phosphorothioate
  modified_base 2: mod_base = OTHER; note = 2'-deoxythymidine-3'-phosphorothioate
  modified_base 3: mod_base = OTHER; note = 2'-O-methylguanosine-3'-phosphate
  modified_base 4: mod_base = OTHER; note = 2'-O-methyluridine-3'-phosphate
  modified_base 5: mod_base = OTHER; note = 2'-O-methylcytidine-3'-phosphate
  modified_base 6: mod_base = OTHER; note = 2'-O-methylguanosine-3'-phosphate
  modified_base 7: mod_base = OTHER; note = 2'-O-methyladenosine-3'-phosphate
  modified_base 8: mod_base = OTHER; note = 2'-O-methyluridine-3'-phosphate
  modified_base 9: mod_base = OTHER; note = 2'-O-methylguanosine-3'-phosphate
  modified_base 11: mod_base = OTHER; note = 2'-O-methylcytidine-3'-phosphate
  modified_base 12: mod_base = OTHER; note = 2'-O-methyluridine-3'-phosphate
  modified_base 13: mod_base = OTHER; note = 2'-O-methyluridine-3'-phosphate
  modified_base 15: mod_base = OTHER; note = 2'-O-methylcytidine-3'-phosphate
  modified_base 16: mod_base = OTHER; note = 2'-O-methyladenosine-3'-phosphate
  modified_base 17: mod_base = OTHER; note = 2'-O-methylcytidine-3'-phosphate
  modified_base 18: mod_base = OTHER; note = 2'-O-methyladenosine-3'-phosphate
  modified_base 19: mod_base = OTHER; note = 2'-O-methyluridine-3'-phosphate
  modified_base 20: mod_base = OTHER; note = 2'-O-methyluridine-3'-phosphate
  modified_base 21: mod_base = OTHER; note = 2'-O-methylcytidine-3'-phosphorothioate
  modified_base 22: mod_base = OTHER; note = 2'-O-methyluridine-3'-phosphorothioate
  modified_base 23: mod_base = OTHER; note = 2'-O-methylguanosine-3'-phosphate
  misc_feature 1: note = RNA
  misc_feature 2: note = DNA
  misc_feature 3..9: note = RNA
  misc_feature 10: note = DNA
  misc_feature 11..13: note = RNA
  misc_feature 14: note = DNA
  misc_feature 15..23: note = RNA
ttgtcgatgactttcacattctg

SEQ ID NO: 316 - RNA, 23 nt, synthetic construct
  source 1..23: mol_type = other RNA; note = Description of Artificial Sequence: Synthetic oligonucleotide
  modified_base 1: mod_base = OTHER; note = 2'-O-methyluridine-3'-phosphorothioate
  modified_base 2: mod_base = OTHER; note = 2'-fluoroadenosine-3'-phosphorothioate
  modified_base 3: mod_base = OTHER; note = 2'-O-methyluridine-3'-phosphate
  modified_base 4: mod_base = OTHER; note = 2'-fluoroadenosine-3'-phosphate
  modified_base 5: mod_base = OTHER; note = 2'-O-methyluridine-3'-phosphate
  modified_base 6: mod_base = OTHER; note = 2'-fluorouridine-3'-phosphate
  modified_base 7: mod_base = OTHER; note = 2'-O-methyluridine-3'-phosphate
  modified_base 8: mod_base = OTHER; note = 2'-fluorocytidine-3'-phosphate
  modified_base 9: mod_base = OTHER; note = 2'-O-methylcytidine-3'-phosphate
  modified_base 10: mod_base = OTHER; note = 2'-fluoroadenosine-3'-phosphate
  modified_base 11: mod_base = OTHER; note = 2'-O-methylguanosine-3'-phosphate
  modified_base 12: mod_base = OTHER; note = 2'-O-methylguanosine-3'-phosphate
  modified_base 13: mod_base = OTHER; note = 2'-O-methyladenosine-3'-phosphate
  modified_base 14: mod_base = OTHER; note = 2'-fluorouridine-3'-phosphate
  modified_base 15: mod_base = OTHER; note = 2'-O-methylguanosine-3'-phosphate
  modified_base 16: mod_base = OTHER; note = 2'-fluoroadenosine-3'-phosphate
  modified_base 17: mod_base = OTHER; note = 2'-O-methyladenosine-3'-phosphate
  modified_base 18: mod_base = OTHER; note = 2'-fluoroadenosine-3'-phosphate
  modified_base 19: mod_base = OTHER; note = 2'-O-methylguanosine-3'-phosphate
  modified_base 20: mod_base = OTHER; note = 2'-fluorouridine-3'-phosphate
  modified_base 21: mod_base = OTHER; note = 2'-O-methylcytidine-3'-phosphorothioate
  modified_base 22: mod_base = OTHER; note = 2'-O-methylcytidine-3'-phosphorothioate
  modified_base 23: mod_base = OTHER; note = 2'-O-methyladenosine-3'-phosphate
tatatttccaggatgaaagtcca

SEQ ID NO: 317 - RNA, 23 nt, synthetic construct
  source 1..23: mol_type = other RNA; note = Description of Artificial Sequence: Synthetic oligonucleotide
  modified_base 1: mod_base = OTHER; note = 2'-O-methyluridine-3'-phosphorothioate
  modified_base 2: mod_base = OTHER; note = 2'-fluoroadenosine-3'-phosphorothioate
  modified_base 3: mod_base = OTHER; note = 2'-O-methyluridine-3'-phosphate
  modified_base 4: mod_base = OTHER; note = 2'-fluoroadenosine-3'-phosphate
  modified_base 5: mod_base = OTHER; note = 2'-O-methyluridine-3'-phosphate
  modified_base 6: mod_base = OTHER; note = 2'-fluorouridine-3'-phosphate
  modified_base 7: mod_base = OTHER; note = 2'-O-methyluridine-3'-phosphate
  modified_base 8: mod_base = OTHER; note = 2'-fluorocytidine-3'-phosphate
  modified_base 9: mod_base = OTHER; note = 2'-O-methylcytidine-3'-phosphate
  modified_base 10: mod_base = OTHER; note = 2'-fluoroadenosine-3'-phosphate
  modified_base 11: mod_base = OTHER; note = 2'-O-methylguanosine-3'-phosphate
  modified_base 12: mod_base = OTHER; note = 2'-O-methylguanosine-3'-phosphate
  modified_base 13: mod_base = OTHER; note = 2'-O-methyladenosine-3'-phosphate
  modified_base 14: mod_base = OTHER; note = 2'-fluorouridine-3'-phosphate
  modified_base 15: mod_base = OTHER; note = 2'-O-methylguanosine-3'-phosphate
  modified_base 16: mod_base = OTHER; note = 2'-fluoroadenosine-3'-phosphate
  modified_base 17: mod_base = OTHER; note = 2'-O-methyladenosine-3'-phosphate
  modified_base 18: mod_base = OTHER; note = 2'-fluoroadenosine-3'-phosphate
  modified_base 19: mod_base = OTHER; note = 2'-O-methylguanosine-3'-phosphate
  modified_base 20: mod_base = OTHER; note = 2'-fluorouridine-3'-phosphate
  modified_base 21: mod_base = OTHER; note = 2'-O-methylcytidine-3'-phosphorothioate
  modified_base 22: mod_base = OTHER; note = 2'-O-methylcytidine-3'-phosphorothioate
  modified_base 23: mod_base = OTHER; note = 2'-O-methyladenosine-3'-phosphate
tatatttccaggatgaaagtcca

SEQ ID NO: 318 - RNA, 23 nt, synthetic construct
  source 1..23: mol_type = other RNA; note = Description of Artificial Sequence: Synthetic oligonucleotide
  modified_base 1: mod_base = OTHER; note = 2'-O-methyluridine-3'-phosphorothioate
  modified_base 2: mod_base = OTHER; note = 2'-fluoroadenosine-3'-phosphorothioate
  modified_base 3: mod_base = OTHER; note = 2'-O-methyluridine-3'-phosphate
  modified_base 4: mod_base = OTHER; note = 2'-fluoroadenosine-3'-phosphate
  modified_base 5: mod_base = OTHER; note = 2'-O-methyluridine-3'-phosphate
  modified_base 6: mod_base = OTHER; note = 2'-fluorouridine-3'-phosphate
  modified_base 7: mod_base = OTHER; note = 2'-O-methyluridine-3'-phosphate
  modified_base 8: mod_base = OTHER; note = 2'-fluorocytidine-3'-phosphate
  modified_base 9: mod_base = OTHER; note = 2'-O-methylcytidine-3'-phosphate
  modified_base 10: mod_base = OTHER; note = 2'-fluoroadenosine-3'-phosphate
  modified_base 11: mod_base = OTHER; note = 2'-O-methylguanosine-3'-phosphate
  modified_base 12: mod_base = OTHER; note = 2'-O-methylguanosine-3'-phosphate
  modified_base 13: mod_base = OTHER; note = 2'-O-methyladenosine-3'-phosphate
  modified_base 14: mod_base = OTHER; note = 2'-fluorouridine-3'-phosphate
  modified_base 15: mod_base = OTHER; note = 2'-O-methylguanosine-3'-phosphate
  modified_base 16: mod_base = OTHER; note = 2'-fluoroadenosine-3'-phosphate
  modified_base 17: mod_base = OTHER; note = 2'-O-methyladenosine-3'-phosphate
  modified_base 18: mod_base = OTHER; note = 2'-fluoroadenosine-3'-phosphate
  modified_base 19: mod_base = OTHER; note = 2'-O-methylguanosine-3'-phosphate
  modified_base 20: mod_base = OTHER; note = 2'-fluorouridine-3'-phosphate
  modified_base 21: mod_base = OTHER; note = 2'-O-methylcytidine-3'-phosphorothioate
  modified_base 22: mod_base = OTHER; note = 2'-O-methylcytidine-3'-phosphorothioate
  modified_base 23: mod_base = OTHER; note = 2'-O-methyladenosine-3'-phosphate
tatatttccaggatgaaagtcca

SEQ ID NO: 319 - RNA, 23 nt, synthetic construct
  source 1..23: mol_type = other RNA; note = Description of Artificial Sequence: Synthetic oligonucleotide
  modified_base 1: mod_base = OTHER; note = 2'-O-methyluridine-3'-phosphorothioate
  modified_base 2: mod_base = OTHER; note = 2'-fluoroadenosine-3'-phosphorothioate
  modified_base 3: mod_base = OTHER; note = 2'-O-methyluridine-3'-phosphate
  modified_base 4: mod_base = OTHER; note = 2'-fluoroadenosine-3'-phosphate
  modified_base 5: mod_base = OTHER; note = 2'-O-methyluridine-3'-phosphate
  modified_base 6: mod_base = OTHER; note = 2'-fluorouridine-3'-phosphate
  modified_base 7: mod_base = OTHER; note = 2'-O-methyluridine-3'-phosphate
  modified_base 8: mod_base = OTHER; note = 2'-fluorocytidine-3'-phosphate
  modified_base 9: mod_base = OTHER; note = 2'-O-methylcytidine-3'-phosphate
  modified_base 10: mod_base = OTHER; note = 2'-fluoroadenosine-3'-phosphate
  modified_base 11: mod_base = OTHER; note = 2'-O-methylguanosine-3'-phosphate
  modified_base 12: mod_base = OTHER; note = 2'-O-methylguanosine-3'-phosphate
  modified_base 13: mod_base = OTHER; note = 2'-O-methyladenosine-3'-phosphate
  modified_base 14: mod_base = OTHER; note = 2'-fluorouridine-3'-phosphate
  modified_base 15: mod_base = OTHER; note = 2'-O-methylguanosine-3'-phosphate
  modified_base 16: mod_base = OTHER; note = 2'-fluoroadenosine-3'-phosphate
  modified_base 17: mod_base = OTHER; note = 2'-O-methyladenosine-3'-phosphate
  modified_base 18: mod_base = OTHER; note = 2'-fluoroadenosine-3'-phosphate
  modified_base 19: mod_base = OTHER; note = 2'-O-methylguanosine-3'-phosphate
  modified_base 20: mod_base = OTHER; note = 2'-fluorouridine-3'-phosphate
  modified_base 21: mod_base = OTHER; note = 2'-O-methylcytidine-3'-phosphorothioate
  modified_base 22: mod_base = OTHER; note = 2'-O-methylcytidine-3'-phosphorothioate
  modified_base 23: mod_base = OTHER; note = 2'-O-methyladenosine-3'-phosphate
tatatttccaggatgaaagtcca

SEQ ID NO: 320 - RNA, 23 nt, synthetic construct
  source 1..23: mol_type = other RNA; note = Description of Artificial Sequence: Synthetic oligonucleotide
  modified_base 1: mod_base = OTHER; note = 2'-O-methyluridine-3'-phosphorothioate
  modified_base 2: mod_base = OTHER; note = 2'-fluoroadenosine-3'-phosphorothioate
  modified_base 3: mod_base = OTHER; note = 2'-O-methyluridine-3'-phosphate
  modified_base 4: mod_base = OTHER; note = 2'-fluoroadenosine-3'-phosphate
  modified_base 5: mod_base = OTHER; note = 2'-O-methyluridine-3'-phosphate
  modified_base 6: mod_base = OTHER; note = 2'-fluorouridine-3'-phosphate
  modified_base 7: mod_base = OTHER; note = 2'-O-methyluridine-3'-phosphate
  modified_base 8: mod_base = OTHER; note = 2'-fluorocytidine-3'-phosphate
  modified_base 9: mod_base = OTHER; note = 2'-O-methylcytidine-3'-phosphate
  modified_base 10: mod_base = OTHER; note = 2'-fluoroadenosine-3'-phosphate
  modified_base 11: mod_base = OTHER; note = 2'-O-methylguanosine-3'-phosphate
  modified_base 12: mod_base = OTHER; note = 2'-O-methylguanosine-3'-phosphate
  modified_base 13: mod_base = OTHER; note = 2'-O-methyladenosine-3'-phosphate
  modified_base 14: mod_base = OTHER; note = 2'-fluorouridine-3'-phosphate
  modified_base 15: mod_base = OTHER; note = 2'-O-methylguanosine-3'-phosphate
  modified_base 16: mod_base = OTHER; note = 2'-fluoroadenosine-3'-phosphate
  modified_base 17: mod_base = OTHER; note = 2'-O-methyladenosine-3'-phosphate
  modified_base 18: mod_base = OTHER; note = 2'-fluoroadenosine-3'-phosphate
  modified_base 19: mod_base = OTHER; note = 2'-O-methylguanosine-3'-phosphate
  modified_base 20: mod_base = OTHER; note = 2'-fluorouridine-3'-phosphate
  modified_base 21: mod_base = OTHER; note = 2'-O-methylcytidine-3'-phosphorothioate
  modified_base 22: mod_base = OTHER; note = 2'-O-methylcytidine-3'-phosphorothioate
  modified_base 23: mod_base = OTHER; note = 2'-O-methyladenosine-3'-phosphate
tatatttccaggatgaaagtcca

SEQ ID NO: 321 - RNA, 23 nt, synthetic construct
  source 1..23: mol_type = other RNA; note = Description of Artificial Sequence: Synthetic oligonucleotide
  modified_base 1: mod_base = OTHER; note = 2'-O-methyluridine-3'-phosphorothioate
  modified_base 2: mod_base = OTHER; note = 2'-fluoroadenosine-3'-phosphorothioate
  modified_base 3: mod_base = OTHER; note = 2'-O-methyluridine-3'-phosphate
  modified_base 4: mod_base = OTHER; note = 2'-fluoroadenosine-3'-phosphate
  modified_base 5: mod_base = OTHER; note = 2'-O-methyluridine-3'-phosphate
  modified_base 6: mod_base = OTHER; note = 2'-fluorouridine-3'-phosphate
  modified_base 7: mod_base = OTHER; note = 2'-O-methyluridine-3'-phosphate
  modified_base 8: mod_base = OTHER; note = 2'-fluorocytidine-3'-phosphate
  modified_base 9: mod_base = OTHER; note = 2'-O-methylcytidine-3'-phosphate
  modified_base 10: mod_base = OTHER; note = 2'-fluoroadenosine-3'-phosphate
  modified_base 11: mod_base = OTHER; note = 2'-O-methylguanosine-3'-phosphate
  modified_base 12: mod_base = OTHER; note = 2'-O-methylguanosine-3'-phosphate
  modified_base 13: mod_base = OTHER; note = 2'-O-methyladenosine-3'-phosphate
  modified_base 14: mod_base = OTHER; note = 2'-fluorouridine-3'-phosphate
  modified_base 15: mod_base = OTHER; note = 2'-O-methylguanosine-3'-phosphate
  modified_base 16: mod_base = OTHER; note = 2'-fluoroadenosine-3'-phosphate
  modified_base 17: mod_base = OTHER; note = 2'-O-methyladenosine-3'-phosphate
  modified_base 18: mod_base = OTHER; note = 2'-fluoroadenosine-3'-phosphate
  modified_base 19: mod_base = OTHER; note = 2'-O-methylguanosine-3'-phosphate
  modified_base 20: mod_base = OTHER; note = 2'-fluorouridine-3'-phosphate
  modified_base 21: mod_base = OTHER; note = 2'-O-methylcytidine-3'-phosphorothioate
  modified_base 22: mod_base = OTHER; note = 2'-O-methylcytidine-3'-phosphorothioate
  modified_base 23: mod_base = OTHER; note = 2'-O-methyladenosine-3'-phosphate
tatatttccaggatgaaagtcca

SEQ ID NO: 322 - RNA, 21 nt, synthetic construct
  source 1..21: mol_type = other RNA; note = Description of Artificial Sequence: Synthetic oligonucleotide
  modified_base 1: mod_base = OTHER; note = 2'-O-methyluridine-3'-phosphorothioate
  modified_base 2: mod_base = OTHER; note = 2'-fluoroadenosine-3'-phosphorothioate
  modified_base 3: mod_base = OTHER; note = 2'-O-methyluridine-3'-phosphate
  modified_base 4: mod_base = OTHER; note = 2'-fluoroadenosine-3'-phosphate
  modified_base 5: mod_base = OTHER; note = 2'-O-methyluridine-3'-phosphate
  modified_base 6: mod_base = OTHER; note = 2'-fluorouridine-3'-phosphate
  modified_base 7: mod_base = OTHER; note = 2'-O-methyluridine-3'-phosphate
  modified_base 8: mod_base = OTHER; note = 2'-fluorocytidine-3'-phosphate
  modified_base 9: mod_base = OTHER; note = 2'-O-methylcytidine-3'-phosphate
  modified_base 10: mod_base = OTHER; note = 2'-fluoroadenosine-3'-phosphate
  modified_base 11: mod_base = OTHER; note = 2'-O-methylguanosine-3'-phosphate
  modified_base 12: mod_base = OTHER; note = 2'-O-methylguanosine-3'-phosphate
  modified_base 13: mod_base = OTHER; note = 2'-O-methyladenosine-3'-phosphate
  modified_base 14: mod_base = OTHER; note = 2'-fluorouridine-3'-phosphate
  modified_base 15: mod_base = OTHER; note = 2'-O-methylguanosine-3'-phosphate
  modified_base 16: mod_base = OTHER; note = 2'-fluoroadenosine-3'-phosphate
  modified_base 17: mod_base = OTHER; note = 2'-O-methyladenosine-3'-phosphate
  modified_base 18: mod_base = OTHER; note = 2'-fluoroadenosine-3'-phosphate
  modified_base 19: mod_base = OTHER; note = 2'-O-methylguanosine-3'-phosphorothioate
  modified_base 20: mod_base = OTHER; note = 2'-O-methyluridine-3'-phosphorothioate
  modified_base 21: mod_base = OTHER; note = 2'-O-methylcytidine-3'-phosphate
tatatttccaggatgaaagtc

SEQ ID NO: 323 - RNA, 21 nt, synthetic construct
  source 1..21: mol_type = other RNA; note = Description of Artificial Sequence: Synthetic oligonucleotide
  modified_base 1: mod_base = OTHER; note = 2'-O-methyluridine-3'-phosphorothioate
  modified_base 2: mod_base = OTHER; note = 2'-fluoroadenosine-3'-phosphorothioate
  modified_base 3: mod_base = OTHER; note = 2'-O-methyluridine-3'-phosphate
  modified_base 4: mod_base = OTHER; note = 2'-O-methyladenosine-3'-phosphate
  modified_base 5: mod_base = OTHER; note = 2'-O-methyluridine-3'-phosphate
  modified_base 6: mod_base = OTHER; note = 2'-fluorouridine-3'-phosphate
  modified_base 7: mod_base = OTHER; note = 2'-O-methyluridine-3'-phosphate
  modified_base 8: mod_base = OTHER; note = 2'-O-methylcytidine-3'-phosphate
  modified_base 9: mod_base = OTHER; note = 2'-O-methylcytidine-3'-phosphate
  modified_base 10: mod_base = OTHER; note = 2'-O-methyladenosine-3'-phosphate
  modified_base 11: mod_base = OTHER; note = 2'-O-methylguanosine-3'-phosphate
  modified_base 12: mod_base = OTHER; note = 2'-O-methylguanosine-3'-phosphate
  modified_base 13: mod_base = OTHER; note = 2'-O-methyladenosine-3'-phosphate
  modified_base 14: mod_base = OTHER; note = 2'-fluorouridine-3'-phosphate
  modified_base 15: mod_base = OTHER; note = 2'-O-methylguanosine-3'-phosphate
  modified_base 16: mod_base = OTHER; note = 2'-fluoroadenosine-3'-phosphate
  modified_base 17: mod_base = OTHER; note = 2'-O-methyladenosine-3'-phosphate
  modified_base 18: mod_base = OTHER; note = 2'-O-methyladenosine-3'-phosphate
  modified_base 19: mod_base = OTHER; note = 2'-O-methylguanosine-3'-phosphorothioate
  modified_base 20: mod_base = OTHER; note = 2'-O-methyluridine-3'-phosphorothioate
  modified_base 21: mod_base = OTHER; note = 2'-O-methylcytidine-3'-phosphate
tatatttccaggatgaaagtc

SEQ ID NO: 324 - RNA, 23 nt, synthetic construct
  source 1..23: mol_type = other RNA; note = Description of Artificial Sequence: Synthetic oligonucleotide
  modified_base 1: mod_base = OTHER; note = 2'-O-methyluridine-3'-phosphorothioate
  modified_base 2: mod_base = OTHER; note = 2'-fluoroadenosine-3'-phosphorothioate
  modified_base 3: mod_base = OTHER; note = 2'-O-methyluridine-3'-phosphate
  modified_base 4: mod_base = OTHER; note = 2'-O-methyladenosine-3'-phosphate
  modified_base 5: mod_base = OTHER; note = 2'-O-methyluridine-3'-phosphate
  modified_base 6: mod_base = OTHER; note = 2'-fluorouridine-3'-phosphate
  modified_base 7: mod_base = OTHER; note = 2'-O-methyluridine-3'-phosphate
  modified_base 8: mod_base = OTHER; note = 2'-fluorocytidine-3'-phosphate
  modified_base 9: mod_base = OTHER; note = 2'-O-methylcytidine-3'-phosphate
  modified_base 10: mod_base = OTHER; note = 2'-fluoroadenosine-3'-phosphate
  modified_base 11: mod_base = OTHER; note = 2'-O-methylguanosine-3'-phosphate
  modified_base 12: mod_base = OTHER; note = 2'-O-methylguanosine-3'-phosphate
  modified_base 13: mod_base = OTHER; note = 2'-O-methyladenosine-3'-phosphate
  modified_base 14: mod_base = OTHER; note = 2'-fluorouridine-3'-phosphate
  modified_base 15: mod_base = OTHER; note = 2'-O-methylguanosine-3'-phosphate
  modified_base 16: mod_base = OTHER; note = 2'-fluoroadenosine-3'-phosphate
  modified_base 17: mod_base = OTHER; note = 2'-O-methyladenosine-3'-phosphate
  modified_base 18: mod_base = OTHER; note = 2'-O-methyladenosine-3'-phosphate
  modified_base 19: mod_base = OTHER; note = 2'-O-methylguanosine-3'-phosphate
  modified_base 20: mod_base = OTHER; note = 2'-O-methyluridine-3'-phosphate
  modified_base 21: mod_base = OTHER; note = 2'-O-methylcytidine-3'-phosphorothioate
  modified_base 22: mod_base = OTHER; note = 2'-O-methylcytidine-3'-phosphorothioate
  modified_base 23: mod_base = OTHER; note = 2'-O-methyladenosine-3'-phosphate
tatatttccaggatgaaagtcca

SEQ ID NO: 325 - RNA, 23 nt, synthetic construct
  source 1..23: mol_type = other RNA; note = Description of Artificial Sequence: Synthetic oligonucleotide
  modified_base 1: mod_base = OTHER; note = 2'-O-methyluridine-3'-phosphorothioate
  modified_base 2: mod_base = OTHER; note = 2'-fluoroadenosine-3'-phosphorothioate
  modified_base 3: mod_base = OTHER; note = 2'-O-methyluridine-3'-phosphate
  modified_base 4: mod_base = OTHER; note = 2'-O-methyladenosine-3'-phosphate
  modified_base 5: mod_base = OTHER; note = 2'-O-methyluridine-3'-phosphate
  modified_base 6: mod_base = OTHER; note = 2'-fluorouridine-3'-phosphate
  modified_base 7: mod_base = OTHER; note = 2'-O-methyluridine-3'-phosphate
  modified_base 8: mod_base = OTHER; note = 2'-fluorocytidine-3'-phosphate
  modified_base 9: mod_base = OTHER; note = 2'-fluorocytidine-3'-phosphate
  modified_base 10: mod_base = OTHER; note = 2'-O-methyladenosine-3'-phosphate
  modified_base 11: mod_base = OTHER; note = 2'-O-methylguanosine-3'-phosphate
  modified_base 12: mod_base = OTHER; note = 2'-O-methylguanosine-3'-phosphate
  modified_base 13: mod_base = OTHER; note = 2'-O-methyladenosine-3'-phosphate
  modified_base 14: mod_base = OTHER; note = 2'-fluorouridine-3'-phosphate
  modified_base 15: mod_base = OTHER; note = 2'-O-methylguanosine-3'-phosphate
  modified_base 16: mod_base = OTHER; note = 2'-fluoroadenosine-3'-phosphate
  modified_base 17: mod_base = OTHER; note = 2'-O-methyladenosine-3'-phosphate
  modified_base 18: mod_base = OTHER; note = 2'-O-methyladenosine-3'-phosphate
  modified_base 19: mod_base = OTHER; note = 2'-O-methylguanosine-3'-phosphate
  modified_base 20: mod_base = OTHER; note = 2'-O-methyluridine-3'-phosphate
  modified_base 21: mod_base = OTHER; note = 2'-O-methylcytidine-3'-phosphorothioate
  modified_base 22: mod_base = OTHER; note = 2'-O-methylcytidine-3'-phosphorothioate
  modified_base 23: mod_base = OTHER; note = 2'-O-methyladenosine-3'-phosphate
tatatttccaggatgaaagtcca

SEQ ID NO: 326 - RNA, 23 nt, synthetic construct
  source 1..23: mol_type = other RNA; note = Description of Artificial Sequence: Synthetic oligonucleotide
  modified_base 1: mod_base = OTHER; note = 2'-O-methyluridine-3'-phosphorothioate
  modified_base 2: mod_base = OTHER; note = 2'-fluoroadenosine-3'-phosphorothioate
  modified_base 3: mod_base = OTHER; note = 2'-O-methyluridine-3'-phosphate
  modified_base 4: mod_base = OTHER; note = 2'-O-methyladenosine-3'-phosphate
  modified_base 5: mod_base = OTHER; note = 2'-O-methyluridine-3'-phosphate
  modified_base 6: mod_base = OTHER; note = 2'-fluorouridine-3'-phosphate
  modified_base 7: mod_base = OTHER; note = 2'-O-methyluridine-3'-phosphate
  modified_base 8: mod_base = OTHER; note = 2'-O-methylcytidine-3'-phosphate
  modified_base 9: mod_base = OTHER; note = 2'-O-methylcytidine-3'-phosphate
  modified_base 10: mod_base = OTHER; note = 2'-O-methyladenosine-3'-phosphate
  modified_base 11: mod_base = OTHER; note = 2'-O-methylguanosine-3'-phosphate
  modified_base 12: mod_base = OTHER; note = 2'-O-methylguanosine-3'-phosphate
  modified_base 13: mod_base = OTHER; note = 2'-O-methyladenosine-3'-phosphate
  modified_base 14: mod_base = OTHER; note = 2'-fluorouridine-3'-phosphate
  modified_base 15: mod_base = OTHER; note = 2'-O-methylguanosine-3'-phosphate
  modified_base 16: mod_base = OTHER; note = 2'-fluoroadenosine-3'-phosphate
  modified_base 17: mod_base = OTHER; note = 2'-O-methyladenosine-3'-phosphate
  modified_base 18: mod_base = OTHER; note = 2'-O-methyladenosine-3'-phosphate
  modified_base 19: mod_base = OTHER; note = 2'-O-methylguanosine-3'-phosphate
  modified_base 20: mod_base = OTHER; note = 2'-O-methyluridine-3'-phosphate
  modified_base 21: mod_base = OTHER; note = 2'-O-methylcytidine-3'-phosphorothioate
  modified_base 22: mod_base = OTHER; note = 2'-O-methylcytidine-3'-phosphorothioate
  modified_base 23: mod_base = OTHER; note = 2'-O-methyladenosine-3'-phosphate
tatatttccaggatgaaagtcca

SEQ ID NO: 327 - RNA, 23 nt, synthetic construct
  source 1..23: mol_type = other RNA; note = Description of Artificial Sequence: Synthetic oligonucleotide
  modified_base 1: mod_base = OTHER; note = 2'-O-methyluridine-3'-phosphorothioate
  modified_base 2: mod_base = OTHER; note = 2'-fluoroadenosine-3'-phosphorothioate
  modified_base 3: mod_base = OTHER; note = 2'-O-methyluridine-3'-phosphate
  modified_base 4: mod_base = OTHER; note = 2'-O-methyladenosine-3'-phosphate
  modified_base 5: mod_base = OTHER; note = 2'-O-methyluridine-3'-phosphate
  modified_base 6: mod_base = OTHER; note = 2'-fluorouridine-3'-phosphate
  modified_base 7: mod_base = OTHER; note = 2'-O-methyluridine-3'-phosphate
  modified_base 8: mod_base = OTHER; note = 2'-O-methylcytidine-3'-phosphate
  modified_base 9: mod_base = OTHER; note = 2'-O-methylcytidine-3'-phosphate
  modified_base 10: mod_base = OTHER; note = 2'-O-methyladenosine-3'-phosphate
  modified_base 11: mod_base = OTHER; note = 2'-O-methylguanosine-3'-phosphate
  modified_base 12: mod_base = OTHER; note = 2'-O-methylguanosine-3'-phosphate
  modified_base 13: mod_base = OTHER; note = 2'-O-methyladenosine-3'-phosphate
  modified_base 14: mod_base = OTHER; note = 2'-fluorouridine-3'-phosphate
  modified_base 15: mod_base = OTHER; note = 2'-O-methylguanosine-3'-phosphate
  modified_base 16: mod_base = OTHER; note = 2'-O-methyladenosine-3'-phosphate
  modified_base 17: mod_base = OTHER; note = 2'-O-methyladenosine-3'-phosphate
  modified_base 18: mod_base = OTHER; note = 2'-O-methyladenosine-3'-phosphate
  modified_base 19: mod_base = OTHER; note = 2'-O-methylguanosine-3'-phosphate
  modified_base 20: mod_base = OTHER; note = 2'-O-methyluridine-3'-phosphate
  modified_base 21: mod_base = OTHER; note = 2'-O-methylcytidine-3'-phosphorothioate
  modified_base 22: mod_base = OTHER; note = 2'-O-methylcytidine-3'-phosphorothioate
  modified_base 23: mod_base = OTHER; note = 2'-O-methyladenosine-3'-phosphate
tatatttccaggatgaaagtcca

SEQ ID NO: 328 - RNA, 23 nt, synthetic construct
  source 1..23: mol_type = other RNA; note = Description of Artificial Sequence: Synthetic oligonucleotide
  modified_base 1: mod_base = OTHER; note = 2'-O-methyluridine-3'-phosphorothioate
  modified_base 2: mod_base = OTHER; note = 2'-fluoroadenosine-3'-phosphorothioate
  modified_base 3: mod_base = OTHER; note = 2'-O-methyluridine-3'-phosphate
  modified_base 4: mod_base = OTHER; note = 2'-O-methyladenosine-3'-phosphate
  modified_base 5: mod_base = OTHER; note = 2'-O-methyluridine-3'-phosphate
  modified_base 6: mod_base = OTHER; note = 2'-O-methyluridine-3'-phosphate
  modified_base 7: mod_base = OTHER; note = 2'-O-methyluridine-3'-phosphate
  modified_base 8: mod_base = OTHER; note = 2'-O-methylcytidine-3'-phosphate
  modified_base 9: mod_base = OTHER; note = 2'-O-methylcytidine-3'-phosphate
  modified_base 10: mod_base = OTHER; note = 2'-O-methyladenosine-3'-phosphate
  modified_base 11: mod_base = OTHER; note = 2'-O-methylguanosine-3'-phosphate
  modified_base 12: mod_base = OTHER; note = 2'-O-methylguanosine-3'-phosphate
  modified_base 13: mod_base = OTHER; note = 2'-O-methyladenosine-3'-phosphate
  modified_base 14: mod_base = OTHER; note = 2'-fluorouridine-3'-phosphate
  modified_base 15: mod_base = OTHER; note = 2'-O-methylguanosine-3'-phosphate
  modified_base 16: mod_base = OTHER; note = 2'-O-methyladenosine-3'-phosphate
  modified_base 17: mod_base = OTHER; note = 2'-O-methyladenosine-3'-phosphate
  modified_base 18: mod_base = OTHER; note = 2'-O-methyladenosine-3'-phosphate
  modified_base 19: mod_base = OTHER; note = 2'-O-methylguanosine-3'-phosphate
  modified_base 20: mod_base = OTHER; note = 2'-O-methyluridine-3'-phosphate
  modified_base 21: mod_base = OTHER; note = 2'-O-methylcytidine-3'-phosphorothioate
  modified_base 22: mod_base = OTHER; note = 2'-O-methylcytidine-3'-phosphorothioate
  modified_base 23: mod_base = OTHER; note = 2'-O-methyladenosine-3'-phosphate
tatatttccaggatgaaagtcca

SEQ ID NO: 329 - RNA, 23 nt, synthetic construct
  source 1..23: mol_type = other RNA; note = Description of Artificial Sequence: Synthetic oligonucleotide
  modified_base 1: mod_base = OTHER; note = 2'-O-methyluridine-3'-phosphorothioate
  modified_base 2: mod_base = OTHER; note = 2'-fluoroadenosine-3'-phosphorothioate
  modified_base 3: mod_base = OTHER; note = 2'-O-methyluridine-3'-phosphate
  modified_base 4: mod_base = OTHER; note = 2'-O-methyladenosine-3'-phosphate
  modified_base 5: mod_base = OTHER; note = 2'-O-methyluridine-3'-phosphate
  modified_base 6: mod_base = OTHER; note = 2'-fluorouridine-3'-phosphate
  modified_base 7: mod_base = OTHER; note = 2'-O-methyluridine-3'-phosphate
  modified_base 8: mod_base = OTHER; note = 2'-fluorocytidine-3'-phosphate
  modified_base 9: mod_base = OTHER; note = 2'-O-methylcytidine-3'-phosphate
  modified_base 10: mod_base = OTHER; note = 2'-fluoroadenosine-3'-phosphate
  modified_base 11: mod_base = OTHER; note = 2'-O-methylguanosine-3'-phosphate
  modified_base 12: mod_base = OTHER; note = 2'-O-methylguanosine-3'-phosphate
  modified_base 13: mod_base = OTHER; note = 2'-O-methyladenosine-3'-phosphate
  modified_base 14: mod_base = OTHER; note = 2'-fluorouridine-3'-phosphate
  modified_base 15: mod_base = OTHER; note = 2'-O-methylguanosine-3'-phosphate
  modified_base 16: mod_base = OTHER; note = 2'-fluoroadenosine-3'-phosphate
  modified_base 17: mod_base = OTHER; note = 2'-O-methyladenosine-3'-phosphate
  modified_base 18: mod_base = OTHER; note = 2'-O-methyladenosine-3'-phosphate
  modified_base 19: mod_base = OTHER; note = 2'-O-methylguanosine-3'-phosphate
  modified_base 20: mod_base = OTHER; note = 2'-O-methyluridine-3'-phosphate
  modified_base 21: mod_base = OTHER; note = 2'-O-methylcytidine-3'-phosphorothioate
  modified_base 22: mod_base = OTHER; note = 2'-O-methylcytidine-3'-phosphorothioate
  modified_base 23: mod_base = OTHER; note = 2'-O-methyladenosine-3'-phosphate
tatatttccaggatgaaagtcca

SEQ ID NO: 330 - RNA, 23 nt, synthetic construct
  source 1..23: mol_type = other RNA; note = Description of Artificial Sequence: Synthetic oligonucleotide
  modified_base 1: mod_base = OTHER; note = 2'-O-methyluridine-3'-phosphorothioate
  modified_base 2: mod_base = OTHER; note = 2'-fluoroadenosine-3'-phosphorothioate
  modified_base 3: mod_base = OTHER; note = 2'-O-methyluridine-3'-phosphate
  modified_base 4: mod_base = OTHER; note = 2'-O-methyladenosine-3'-phosphate
  modified_base 5: mod_base = OTHER; note = 2'-O-methyluridine-3'-phosphate
  modified_base 6: mod_base = OTHER; note = 2'-fluorouridine-3'-phosphate
  modified_base 7: mod_base = OTHER; note = 2'-O-methyluridine-3'-phosphate
  modified_base 8: mod_base = OTHER; note = 2'-fluorocytidine-3'-phosphate
  modified_base 9: mod_base = OTHER; note = 2'-fluorocytidine-3'-phosphate
  modified_base 10: mod_base = OTHER; note = 2'-O-methyladenosine-3'-phosphate
  modified_base 11: mod_base = OTHER; note = 2'-O-methylguanosine-3'-phosphate
  modified_base 12: mod_base = OTHER; note = 2'-O-methylguanosine-3'-phosphate
  modified_base 13: mod_base = OTHER; note = 2'-O-methyladenosine-3'-phosphate
  modified_base 14: mod_base = OTHER; note = 2'-fluorouridine-3'-phosphate
  modified_base 15: mod_base = OTHER; note = 2'-O-methylguanosine-3'-phosphate
  modified_base 16: mod_base = OTHER; note = 2'-fluoroadenosine-3'-phosphate
  modified_base 17: mod_base = OTHER; note = 2'-O-methyladenosine-3'-phosphate
  modified_base 18: mod_base = OTHER; note = 2'-O-methyladenosine-3'-phosphate
  modified_base 19: mod_base = OTHER; note = 2'-O-methylguanosine-3'-phosphate
  modified_base 20: mod_base = OTHER; note = 2'-O-methyluridine-3'-phosphate
  modified_base 21: mod_base = OTHER; note = 2'-O-methylcytidine-3'-phosphorothioate
  modified_base 22: mod_base = OTHER; note = 2'-O-methylcytidine-3'-phosphorothioate
  modified_base 23: mod_base = OTHER; note = 2'-O-methyladenosine-3'-phosphate
tatatttccaggatgaaagtcca

SEQ ID NO: 331 - RNA, 23 nt, synthetic construct
  source 1..23: mol_type = other RNA; note = Description of Artificial Sequence: Synthetic oligonucleotide
  modified_base 1: mod_base = OTHER; note = 2'-O-methyluridine-3'-phosphorothioate
  modified_base 2: mod_base = OTHER; note = 2'-fluoroadenosine-3'-phosphorothioate
  modified_base 3: mod_base = OTHER; note = 2'-O-methyluridine-3'-phosphate
  modified_base 4: mod_base = OTHER; note = 2'-O-methyladenosine-3'-phosphate
  modified_base 5: mod_base = OTHER; note = 2'-O-methyluridine-3'-phosphate
  modified_base 6: mod_base = OTHER; note = 2'-fluorouridine-3'-phosphate
  modified_base 7: mod_base = OTHER; note = 2'-O-methyluridine-3'-phosphate
  modified_base 8: mod_base = OTHER; note = 2'-O-methylcytidine-3'-phosphate
  modified_base 9: mod_base = OTHER; note = 2'-O-methylcytidine-3'-phosphate
  modified_base 10: mod_base = OTHER; note = 2'-O-methyladenosine-3'-phosphate
  modified_base 11: mod_base = OTHER; note = 2'-O-methylguanosine-3'-phosphate
  modified_base 12: mod_base = OTHER; note = 2'-O-methylguanosine-3'-phosphate
  modified_base 13: mod_base = OTHER; note = 2'-O-methyladenosine-3'-phosphate
  modified_base 14: mod_base = OTHER; note = 2'-fluorouridine-3'-phosphate
  modified_base 15: mod_base = OTHER; note = 2'-O-methylguanosine-3'-phosphate
  modified_base 16: mod_base = OTHER; note = 2'-fluoroadenosine-3'-phosphate
  modified_base 17: mod_base = OTHER; note = 2'-O-methyladenosine-3'-phosphate
  modified_base 18: mod_base = OTHER; note = 2'-O-methyladenosine-3'-phosphate
  modified_base 19: mod_base = OTHER; note = 2'-O-methylguanosine-3'-phosphate
  modified_base 20: mod_base = OTHER; note = 2'-O-methyluridine-3'-phosphate
  modified_base 21: mod_base = OTHER; note = 2'-O-methylcytidine-3'-phosphorothioate
  modified_base 22: mod_base = OTHER; note = 2'-O-methylcytidine-3'-phosphorothioate
  modified_base 23: mod_base = OTHER; note = 2'-O-methyladenosine-3'-phosphate
tatatttccaggatgaaagtcca

SEQ ID NO: 332 - RNA, 23 nt, synthetic construct
  source 1..23: mol_type = other RNA; note = Description of Artificial Sequence: Synthetic oligonucleotide
  modified_base 1: mod_base = OTHER; note = 2'-O-methyluridine-3'-phosphorothioate
  modified_base 2: mod_base = OTHER; note = 2'-fluoroadenosine-3'-phosphorothioate
  modified_base 3: mod_base = OTHER; note = 2'-O-methyluridine-3'-phosphate
  modified_base 4: mod_base = OTHER; note = 2'-O-methyladenosine-3'-phosphate
  modified_base 5: mod_base = OTHER; note = 2'-O-methyluridine-3'-phosphate
  modified_base 6: mod_base = OTHER; note = 2'-fluorouridine-3'-phosphate
  modified_base 7: mod_base = OTHER; note = 2'-O-methyluridine-3'-phosphate
  modified_base 8: mod_base = OTHER; note = 2'-fluorocytidine-3'-phosphate
  modified_base 9: mod_base = OTHER; note = 2'-O-methylcytidine-3'-phosphate
  modified_base 10: mod_base = OTHER; note = 2'-fluoroadenosine-3'-phosphate
  modified_base 11: mod_base = OTHER; note = 2'-O-methylguanosine-3'-phosphate
  modified_base 12: mod_base = OTHER; note = 2'-O-methylguanosine-3'-phosphate
  modified_base 13: mod_base = OTHER; note = 2'-O-methyladenosine-3'-phosphate
  modified_base 14: mod_base = OTHER; note = 2'-fluorouridine-3'-phosphate
  modified_base 15: mod_base = OTHER; note = 2'-O-methylguanosine-3'-phosphate
  modified_base 16: mod_base = OTHER; note = 2'-fluoroadenosine-3'-phosphate
  modified_base 17: mod_base = OTHER; note = 2'-O-methyladenosine-3'-phosphate
  modified_base 18: mod_base = OTHER; note = 2'-O-methyladenosine-3'-phosphate
  modified_base 19: mod_base = OTHER; note = 2'-O-methylguanosine-3'-phosphate
  modified_base 20: mod_base = OTHER; note = 2'-O-methyluridine-3'-phosphate
  modified_base 21: mod_base = OTHER; note = 2'-O-methylcytidine-3'-phosphorothioate
  modified_base 22: mod_base = OTHER; note = 2'-O-methylcytidine-3'-phosphorothioate
  modified_base 23: mod_base = OTHER; note = 2'-O-methyladenosine-3'-phosphate
tatatttccaggatgaaagtcca

SEQ ID NO: 333 - RNA, 23 nt, synthetic construct
  source 1..23: mol_type = other RNA; note = Description of Artificial Sequence: Synthetic oligonucleotide
  modified_base 1: mod_base = OTHER; note = 2'-O-methyluridine-3'-phosphorothioate
  modified_base 2: mod_base = OTHER; note = 2'-fluoroadenosine-3'-phosphorothioate
  modified_base 3: mod_base = OTHER; note = 2'-O-methyluridine-3'-phosphate
  modified_base 4: mod_base = OTHER; note = 2'-O-methyladenosine-3'-phosphate
  modified_base 5: mod_base = OTHER; note = 2'-O-methyluridine-3'-phosphate
  modified_base 6: mod_base = OTHER; note = 2'-fluorouridine-3'-phosphate
  modified_base 7: mod_base = OTHER; note = 2'-O-methyluridine-3'-phosphate
  modified_base 8: mod_base = OTHER; note = 2'-fluorocytidine-3'-phosphate
  modified_base 9: mod_base = OTHER; note = 2'-fluorocytidine-3'-phosphate
  modified_base 10: mod_base = OTHER; note = 2'-O-methyladenosine-3'-phosphate
  modified_base 11: mod_base = OTHER; note = 2'-O-methylguanosine-3'-phosphate
  modified_base 12: mod_base = OTHER; note = 2'-O-methylguanosine-3'-phosphate
  modified_base 13: mod_base = OTHER; note = 2'-O-methyladenosine-3'-phosphate
  modified_base 14: mod_base = OTHER; note = 2'-fluorouridine-3'-phosphate
  modified_base 15: mod_base = OTHER; note = 2'-O-methylguanosine-3'-phosphate
  modified_base 16: mod_base = OTHER; note = 2'-fluoroadenosine-3'-phosphate
  modified_base 17: mod_base = OTHER; note = 2'-O-methyladenosine-3'-phosphate
  modified_base 18: mod_base = OTHER; note = 2'-O-methyladenosine-3'-phosphate
  modified_base 19: mod_base = OTHER; note = 2'-O-methylguanosine-3'-phosphate
  modified_base 20: mod_base = OTHER; note = 2'-O-methyluridine-3'-phosphate
  modified_base 21: mod_base = OTHER; note = 2'-O-methylcytidine-3'-phosphorothioate
  modified_base 22: mod_base = OTHER; note = 2'-O-methylcytidine-3'-phosphorothioate
  modified_base 23: mod_base = OTHER; note = 2'-O-methyladenosine-3'-phosphate
tatatttccaggatgaaagtcca

SEQ ID NO: 334 - RNA, 23 nt, synthetic construct
  source 1..23: mol_type = other RNA; note = Description of Artificial Sequence: Synthetic oligonucleotide
  modified_base 1: mod_base = OTHER; note = 2'-O-methyluridine-3'-phosphorothioate
  modified_base 2: mod_base = OTHER; note = 2'-fluoroadenosine-3'-phosphorothioate
  modified_base 3: mod_base = OTHER; note = 2'-O-methyluridine-3'-phosphate
  modified_base 4: mod_base = OTHER; note = 2'-O-methyladenosine-3'-phosphate
  modified_base 5: mod_base = OTHER; note = 2'-O-methyluridine-3'-phosphate
  modified_base 6: mod_base = OTHER; note = 2'-fluorouridine-3'-phosphate
  modified_base 7: mod_base = OTHER; note = 2'-O-methyluridine-3'-phosphate
  modified_base 8: mod_base = OTHER; note = 2'-O-methylcytidine-3'-phosphate
  modified_base 9: mod_base = OTHER; note = 2'-O-methylcytidine-3'-phosphate
  modified_base 10: mod_base = OTHER; note = 2'-O-methyladenosine-3'-phosphate
  modified_base 11: mod_base = OTHER; note = 2'-O-methylguanosine-3'-phosphate
  modified_base 12: mod_base = OTHER; note = 2'-O-methylguanosine-3'-phosphate
  modified_base 13: mod_base = OTHER; note = 2'-O-methyladenosine-3'-phosphate
  modified_base 14: mod_base = OTHER; note = 2'-fluorouridine-3'-phosphate
  modified_base 15: mod_base = OTHER; note = 2'-O-methylguanosine-3'-phosphate
  modified_base 16: mod_base = OTHER; note = 2'-fluoroadenosine-3'-phosphate
  modified_base 17: mod_base = OTHER; note = 2'-O-methyladenosine-3'-phosphate
  modified_base 18: mod_base = OTHER; note = 2'-O-methyladenosine-3'-phosphate
  modified_base 19: mod_base = OTHER; note = 2'-O-methylguanosine-3'-phosphate
  modified_base 20: mod_base = OTHER; note = 2'-O-methyluridine-3'-phosphate
  modified_base 21: mod_base = OTHER; note = 2'-O-methylcytidine-3'-phosphorothioate
  modified_base 22: mod_base = OTHER; note = 2'-O-methylcytidine-3'-phosphorothioate
  modified_base 23: mod_base = OTHER; note = 2'-O-methyladenosine-3'-phosphate
tatatttccaggatgaaagtcca

SEQ ID NO: 335 - RNA, 23 nt, synthetic construct
  source 1..23: mol_type = other RNA; note = Description of Artificial Sequence: Synthetic oligonucleotide
  modified_base 1: mod_base = OTHER; note = 2'-O-methyluridine-3'-phosphorothioate
  modified_base 2: mod_base = OTHER; note = 2'-fluoroadenosine-3'-phosphorothioate
  modified_base 3: mod_base = OTHER; note = 2'-O-methyluridine-3'-phosphate
  modified_base 4: mod_base = OTHER; note = 2'-fluoroadenosine-3'-phosphate
  modified_base 5: mod_base = OTHER; note = 2'-O-methyluridine-3'-phosphate
  modified_base 6: mod_base = OTHER; note = 2'-fluorouridine-3'-phosphate
  modified_base 7: mod_base = OTHER; note = 2'-O-methyluridine-3'-phosphate
  modified_base 8: mod_base = OTHER; note = 2'-fluorocytidine-3'-phosphate
  modified_base 9: mod_base = OTHER; note = 2'-O-methylcytidine-3'-phosphate
  modified_base 10: mod_base = OTHER; note = 2'-fluoroadenosine-3'-phosphate
  modified_base 11: mod_base = OTHER; note = 2'-O-methylguanosine-3'-phosphate
  modified_base 12: mod_base = OTHER; note = 2'-O-methylguanosine-3'-phosphate
  modified_base 13: mod_base = OTHER; note = 2'-O-methyladenosine-3'-phosphate
  modified_base 14: mod_base = OTHER; note = 2'-fluorouridine-3'-phosphate
  modified_base 15: mod_base = OTHER; note = 2'-O-methylguanosine-3'-phosphate
  modified_base 16: mod_base = OTHER; note = 2'-fluoroadenosine-3'-phosphate
  modified_base 17: mod_base = OTHER; note = 2'-O-methyladenosine-3'-phosphate
  modified_base 18: mod_base = OTHER; note = 2'-fluoroadenosine-3'-phosphate
  modified_base 19: mod_base = OTHER; note = 2'-O-methylguanosine-3'-phosphate
  modified_base 20: mod_base = OTHER; note = 2'-fluorouridine-3'-phosphate
  modified_base 21: mod_base = OTHER; note = 2'-O-methylcytidine-3'-phosphorothioate
  modified_base 22: mod_base = OTHER; note = 2'-O-methylcytidine-3'-phosphorothioate
  modified_base 23: mod_base = OTHER; note = 2'-O-methyladenosine-3'-phosphate
tatatttccaggatgaaagtcca

SEQ ID NO: 336 - RNA, 23 nt, synthetic construct
  source 1..23: mol_type = other RNA; note = Description of Artificial Sequence: Synthetic oligonucleotide
  modified_base 1: mod_base = OTHER; note = 2'-O-methyluridine-3'-phosphorothioate
  modified_base 2: mod_base = OTHER; note = 2'-fluoroadenosine-3'-phosphorothioate
  modified_base 3: mod_base = OTHER; note = 2'-O-methyluridine-3'-phosphate
  modified_base 4: mod_base = OTHER; note = 2'-fluoroadenosine-3'-phosphate
  modified_base 5: mod_base = OTHER; note = 2'-O-methyluridine-3'-phosphate
  modified_base 6: mod_base = OTHER; note = 2'-fluorouridine-3'-phosphate
  modified_base 7: mod_base = OTHER; note = 2'-O-methyluridine-3'-phosphate
  modified_base 8: mod_base = OTHER; note = 2'-fluorocytidine-3'-phosphate
  modified_base 9: mod_base = OTHER; note = 2'-O-methylcytidine-3'-phosphate
  modified_base 10: mod_base = OTHER; note = 2'-fluoroadenosine-3'-phosphate
  modified_base 11: mod_base = OTHER; note = 2'-O-methylguanosine-3'-phosphate
  modified_base 12: mod_base = OTHER; note = 2'-O-methylguanosine-3'-phosphate
  modified_base 13: mod_base = OTHER; note = 2'-O-methyladenosine-3'-phosphate
  modified_base 14: mod_base = OTHER; note = 2'-fluorouridine-3'-phosphate
  modified_base 15: mod_base = OTHER; note = 2'-O-methylguanosine-3'-phosphate
  modified_base 16: mod_base = OTHER; note = 2'-fluoroadenosine-3'-phosphate
  modified_base 17: mod_base = OTHER; note = 2'-O-methyladenosine-3'-phosphate
  modified_base 18: mod_base = OTHER; note = 2'-fluoroadenosine-3'-phosphate
  modified_base 19: mod_base = OTHER; note = 2'-O-methylguanosine-3'-phosphate
  modified_base 20: mod_base = OTHER; note = 2'-fluorouridine-3'-phosphate
  modified_base 21: mod_base = OTHER; note = 2'-O-methylcytidine-3'-phosphorothioate
  modified_base 22: mod_base = OTHER; note = 2'-O-methylcytidine-3'-phosphorothioate
  modified_base 23: mod_base = OTHER; note = 2'-O-methyladenosine-3'-phosphate
tatatttccaggatgaaagtcca

SEQ ID NO: 337 - RNA, 23 nt, synthetic construct
  source 1..23: mol_type = other RNA; note = Description of Artificial Sequence: Synthetic oligonucleotide
  modified_base 1: mod_base = OTHER; note = 2'-O-methyluridine-3'-phosphorothioate
  modified_base 2: mod_base = OTHER; note = 2'-fluoroadenosine-3'-phosphorothioate
  modified_base 3: mod_base = OTHER; note = 2'-O-methyluridine-3'-phosphate
  modified_base 4: mod_base = OTHER; note = 2'-fluoroadenosine-3'-phosphate
  modified_base 5: mod_base = OTHER; note = 2'-O-methyluridine-3'-phosphate
  modified_base 6: mod_base = OTHER; note = 2'-fluorouridine-3'-phosphate
  modified_base 7: mod_base = OTHER; note = 2'-O-methyluridine-3'-phosphate
  modified_base 8: mod_base = OTHER; note = 2'-fluorocytidine-3'-phosphate
  modified_base 9: mod_base = OTHER; note = 2'-O-methylcytidine-3'-phosphate
  modified_base 10: mod_base = OTHER; note = 2'-fluoroadenosine-3'-phosphate
  modified_base 11: mod_base = OTHER; note = 2'-O-methylguanosine-3'-phosphate
  modified_base 12: mod_base = OTHER; note = 2'-O-methylguanosine-3'-phosphate
  modified_base 13: mod_base = OTHER; note = 2'-O-methyladenosine-3'-phosphate
  modified_base 14: mod_base = OTHER; note = 2'-fluorouridine-3'-phosphate
  modified_base 15: mod_base = OTHER; note = 2'-O-methylguanosine-3'-phosphate
  modified_base 16: mod_base = OTHER; note = 2'-fluoroadenosine-3'-phosphate
  modified_base 17: mod_base = OTHER; note = 2'-O-methyladenosine-3'-phosphate
  modified_base 18: mod_base = OTHER; note = 2'-fluoroadenosine-3'-phosphate
  modified_base 19: mod_base = OTHER; note = 2'-O-methylguanosine-3'-phosphate
  modified_base 20: mod_base = OTHER; note = 2'-fluorouridine-3'-phosphate
  modified_base 21: mod_base = OTHER; note = 2'-O-methylcytidine-3'-phosphorothioate
  modified_base 22: mod_base = OTHER; note = 2'-O-methylcytidine-3'-phosphorothioate
  modified_base 23: mod_base = OTHER; note = 2'-O-methyladenosine-3'-phosphate
tatatttccaggatgaaagtcca

SEQ ID NO: 338 - RNA, 23 nt, synthetic construct
  source 1..23: mol_type = other RNA; note = Description of Artificial Sequence: Synthetic oligonucleotide
  modified_base 1: mod_base = OTHER; note = 2'-O-methyluridine-3'-phosphorothioate
  modified_base 2: mod_base = OTHER; note = 2'-fluoroadenosine-3'-phosphorothioate
  modified_base 3: mod_base = OTHER; note = 2'-O-methyluridine-3'-phosphate
  modified_base 4: mod_base = OTHER; note = 2'-fluoroadenosine-3'-phosphate
  modified_base 5: mod_base = OTHER; note = 2'-O-methyluridine-3'-phosphate
  modified_base 6: mod_base = OTHER; note = 2'-fluorouridine-3'-phosphate
  modified_base 7: mod_base = OTHER; note = 2'-O-methyluridine-3'-phosphate
  modified_base 8: mod_base = OTHER; note = 2'-fluorocytidine-3'-phosphate
  modified_base 9: mod_base = OTHER; note = 2'-O-methylcytidine-3'-phosphate
  modified_base 10: mod_base = OTHER; note = 2'-fluoroadenosine-3'-phosphate
  modified_base 11: mod_base = OTHER; note = 2'-O-methylguanosine-3'-phosphate
  modified_base 12: mod_base = OTHER; note = 2'-O-methylguanosine-3'-phosphate
  modified_base 13: mod_base = OTHER; note = 2'-O-methyladenosine-3'-phosphate
  modified_base 14: mod_base = OTHER; note = 2'-fluorouridine-3'-phosphate
  modified_base 15: mod_base = OTHER; note = 2'-O-methylguanosine-3'-phosphate
  modified_base 16: mod_base = OTHER; note = 2'-fluoroadenosine-3'-phosphate
  modified_base 17: mod_base = OTHER; note = 2'-O-methyladenosine-3'-phosphate
  modified_base 18: mod_base = OTHER; note = 2'-fluoroadenosine-3'-phosphate
  modified_base 19: mod_base = OTHER; note = 2'-O-methylguanosine-3'-phosphate
  modified_base 20: mod_base = OTHER; note = 2'-fluorouridine-3'-phosphate
  modified_base 21: mod_base = OTHER; note = 2'-O-methylcytidine-3'-phosphorothioate
  modified_base 22: mod_base = OTHER; note = 2'-O-methylcytidine-3'-phosphorothioate
  modified_base 23: mod_base = OTHER; note = 2'-O-methyladenosine-3'-phosphate
tatatttccaggatgaaagtcca

SEQ ID NO: 339 - RNA, 23 nt, synthetic construct
  source 1..23: mol_type = other RNA; note = Description of Artificial Sequence: Synthetic oligonucleotide
  modified_base 1: mod_base = OTHER; note = 2'-O-methyluridine-3'-phosphorothioate
  modified_base 2: mod_base = OTHER; note = 2'-fluoroadenosine-3'-phosphorothioate
  modified_base 3: mod_base = OTHER; note = 2'-O-methyluridine-3'-phosphate
  modified_base 4: mod_base = OTHER; note = 2'-fluoroadenosine-3'-phosphate
  modified_base 5: mod_base = OTHER; note = 2'-O-methyluridine-3'-phosphate
  modified_base 6: mod_base = OTHER; note = 2'-fluorouridine-3'-phosphate
  modified_base 7: mod_base = OTHER; note = 2'-O-methyluridine-3'-phosphate
  modified_base 8: mod_base = OTHER; note = 2'-fluorocytidine-3'-phosphate
  modified_base 9: mod_base = OTHER; note = 2'-O-methylcytidine-3'-phosphate
  modified_base 10: mod_base = OTHER; note = 2'-fluoroadenosine-3'-phosphate
  modified_base 11: mod_base = OTHER; note = 2'-O-methylguanosine-3'-phosphate
  modified_base 12: mod_base = OTHER; note = 2'-O-methylguanosine-3'-phosphate
  modified_base 13: mod_base = OTHER; note = 2'-O-methyladenosine-3'-phosphate
  modified_base 14: mod_base = OTHER; note = 2'-fluorouridine-3'-phosphate
  modified_base 15: mod_base = OTHER; note = 2'-O-methylguanosine-3'-phosphate
  modified_base 16: mod_base = OTHER; note = 2'-fluoroadenosine-3'-phosphate
  modified_base 17: mod_base = OTHER; note = 2'-O-methyladenosine-3'-phosphate
  modified_base 18: mod_base = OTHER; note = 2'-fluoroadenosine-3'-phosphate
  modified_base 19: mod_base = OTHER; note = 2'-O-methylguanosine-3'-phosphate
  modified_base 20: mod_base = OTHER; note = 2'-fluorouridine-3'-phosphate
  modified_base 21: mod_base = OTHER; note = 2'-O-methylcytidine-3'-phosphorothioate
  modified_base 22: mod_base = OTHER; note = 2'-O-methylcytidine-3'-phosphorothioate
  modified_base 23: mod_base = OTHER; note = 2'-O-methyladenosine-3'-phosphate
tatatttccaggatgaaagtcca

SEQ ID NO: 340 - RNA, 23 nt, synthetic construct
  source 1..23: mol_type = other RNA; note = Description of Artificial Sequence: Synthetic oligonucleotide
  modified_base 1: mod_base = OTHER; note = 2'-O-methyluridine-3'-phosphorothioate
  modified_base 2: mod_base = OTHER; note = 2'-fluoroadenosine-3'-phosphorothioate
  modified_base 3: mod_base = OTHER; note = 2'-O-methyluridine-3'-phosphate
  modified_base 4: mod_base = OTHER; note = 2'-fluoroadenosine-3'-phosphate
  modified_base 5: mod_base = OTHER; note = 2'-O-methyluridine-3'-phosphate
  modified_base 6: mod_base = OTHER; note = 2'-fluorouridine-3'-phosphate
  modified_base 7: mod_base = OTHER; note = 2'-O-methyluridine-3'-phosphate
  modified_base 8: mod_base = OTHER; note = 2'-fluorocytidine-3'-phosphate
  modified_base 9: mod_base = OTHER; note = 2'-O-methylcytidine-3'-phosphate
  modified_base 10: mod_base = OTHER; note = 2'-fluoroadenosine-3'-phosphate
  modified_base 11: mod_base = OTHER; note = 2'-O-methylguanosine-3'-phosphate
  modified_base 12: mod_base = OTHER; note = 2'-O-methylguanosine-3'-phosphate
  modified_base 13: mod_base = OTHER; note = 2'-O-methyladenosine-3'-phosphate
  modified_base 14: mod_base = OTHER; note = 2'-fluorouridine-3'-phosphate
  modified_base 15: mod_base = OTHER; note = 2'-O-methylguanosine-3'-phosphate
  modified_base 16: mod_base = OTHER; note = 2'-fluoroadenosine-3'-phosphate
  modified_base 17: mod_base = OTHER; note = 2'-O-methyladenosine-3'-phosphate
  modified_base 18: mod_base = OTHER; note = 2'-fluoroadenosine-3'-phosphate
  modified_base 19: mod_base = OTHER; note = 2'-O-methylguanosine-3'-phosphate
  modified_base 20: mod_base = OTHER; note = 2'-fluorouridine-3'-phosphate
  modified_base 21: mod_base = OTHER; note = 2'-O-methylcytidine-3'-phosphorothioate
  modified_base 22: mod_base = OTHER; note = 2'-O-methylcytidine-3'-phosphorothioate
  modified_base 23: mod_base = OTHER; note = 2'-O-methyladenosine-3'-phosphate
tatatttccaggatgaaagtcca

SEQ ID NO: 341 - RNA, 23 nt, synthetic construct
  source 1..23: mol_type = other RNA; note = Description of Artificial Sequence: Synthetic oligonucleotide
  modified_base 1: mod_base = OTHER; note = 2'-O-methyluridine-3'-phosphorothioate
  modified_base 2: mod_base = OTHER; note = 2'-fluoroadenosine-3'-phosphorothioate
  modified_base 3: mod_base = OTHER; note = 2'-O-methyluridine-3'-phosphate
  modified_base 4: mod_base = OTHER; note = 2'-fluoroadenosine-3'-phosphate
  modified_base 5: mod_base = OTHER; note = 2'-O-methyluridine-3'-phosphate
  modified_base 6: mod_base = OTHER; note = 2'-fluorouridine-3'-phosphate
  modified_base 7: mod_base = OTHER; note = 2'-O-methyluridine-3'-phosphate
  modified_base 8: mod_base = OTHER; note = 2'-fluorocytidine-3'-phosphate
  modified_base 9: mod_base = OTHER; note = 2'-O-methylcytidine-3'-phosphate
  modified_base 10: mod_base = OTHER; note = 2'-fluoroadenosine-3'-phosphate
  modified_base 11: mod_base = OTHER; note = 2'-O-methylguanosine-3'-phosphate
  modified_base 12: mod_base = OTHER; note = 2'-O-methylguanosine-3'-phosphate
  modified_base 13: mod_base = OTHER; note = 2'-O-methyladenosine-3'-phosphate
  modified_base 14: mod_base = OTHER; note = 2'-fluorouridine-3'-phosphate
  modified_base 15: mod_base = OTHER; note = 2'-O-methylguanosine-3'-phosphate
  modified_base 16: mod_base = OTHER; note = 2'-fluoroadenosine-3'-phosphate
  modified_base 17: mod_base = OTHER; note = 2'-O-methyladenosine-3'-phosphate
  modified_base 18: mod_base = OTHER; note = 2'-fluoroadenosine-3'-phosphate
  modified_base 19: mod_base = OTHER; note = 2'-O-methylguanosine-3'-phosphate
  modified_base 20: mod_base = OTHER; note = 2'-fluorouridine-3'-phosphate
  modified_base 21: mod_base = OTHER; note = 2'-O-methylcytidine-3'-phosphorothioate
  modified_base 22: mod_base = OTHER; note = 2'-O-methylcytidine-3'-phosphorothioate
  modified_base 23: mod_base = OTHER; note = 2'-O-methyladenosine-3'-phosphate
tatatttccaggatgaaagtcca

SEQ ID NO: 342 - RNA, 23 nt, synthetic construct
  source 1..23: mol_type = other RNA; note = Description of Artificial Sequence: Synthetic oligonucleotide
  modified_base 1: mod_base = OTHER; note = 2'-O-methyluridine-3'-phosphorothioate
  modified_base 2: mod_base = OTHER; note = 2'-fluoroadenosine-3'-phosphorothioate
  modified_base 3: mod_base = OTHER; note = 2'-O-methyluridine-3'-phosphate
  modified_base 4: mod_base = OTHER; note = 2'-fluoroadenosine-3'-phosphate
  modified_base 5: mod_base = OTHER; note = 2'-O-methyluridine-3'-phosphate
  modified_base 6: mod_base = OTHER; note = 2'-fluorouridine-3'-phosphate
  modified_base 7: mod_base = OTHER; note = 2'-O-methyluridine-3'-phosphate
  modified_base 8: mod_base = OTHER; note = 2'-fluorocytidine-3'-phosphate
  modified_base 9: mod_base = OTHER; note = 2'-O-methylcytidine-3'-phosphate
  modified_base 10: mod_base = OTHER; note = 2'-fluoroadenosine-3'-phosphate
  modified_base 11: mod_base = OTHER; note = 2'-O-methylguanosine-3'-phosphate
  modified_base 12: mod_base = OTHER; note = 2'-O-methylguanosine-3'-phosphate
  modified_base 13: mod_base = OTHER; note = 2'-O-methyladenosine-3'-phosphate
  modified_base 14: mod_base = OTHER; note = 2'-fluorouridine-3'-phosphate
  modified_base 15: mod_base = OTHER; note = 2'-O-methylguanosine-3'-phosphate
  modified_base 16: mod_base = OTHER; note = 2'-fluoroadenosine-3'-phosphate
  modified_base 17: mod_base = OTHER; note = 2'-O-methyladenosine-3'-phosphate
  modified_base 18: mod_base = OTHER; note = 2'-fluoroadenosine-3'-phosphate
  modified_base 19: mod_base = OTHER; note = 2'-O-methylguanosine-3'-phosphate
  modified_base 20: mod_base = OTHER; note = 2'-fluorouridine-3'-phosphate
  modified_base 21: mod_base = OTHER; note = 2'-O-methylcytidine-3'-phosphorothioate
  modified_base 22: mod_base = OTHER; note = 2'-O-methylcytidine-3'-phosphorothioate
  modified_base 23: mod_base = OTHER; note = 2'-O-methyladenosine-3'-phosphate
tatatttccaggatgaaagtcca

SEQ ID NO: 343 - RNA, 23 nt, synthetic construct
  source 1..23: mol_type = other RNA; note = Description of Artificial Sequence: Synthetic oligonucleotide
  modified_base 1: mod_base = OTHER; note = 2'-O-methyluridine-3'-phosphorothioate
  modified_base 2: mod_base = OTHER; note = 2'-fluoroadenosine-3'-phosphorothioate
  modified_base 3: mod_base = OTHER; note = 2'-O-methyluridine-3'-phosphate
  modified_base 4: mod_base = OTHER; note = 2'-fluoroadenosine-3'-phosphate
  modified_base 5: mod_base = OTHER; note = 2'-O-methyluridine-3'-phosphate
  modified_base 6: mod_base = OTHER; note = 2'-fluorouridine-3'-phosphate
  modified_base 7: mod_base = OTHER; note = 2'-O-methyluridine-3'-phosphate
  modified_base 8: mod_base = OTHER; note = 2'-fluorocytidine-3'-phosphate
  modified_base 9: mod_base = OTHER; note = 2'-O-methylcytidine-3'-phosphate
  modified_base 10: mod_base = OTHER; note = 2'-fluoroadenosine-3'-phosphate
  modified_base 11: mod_base = OTHER; note = 2'-O-methylguanosine-3'-phosphate
  modified_base 12: mod_base = OTHER; note = 2'-O-methylguanosine-3'-phosphate
  modified_base 13: mod_base = OTHER; note = 2'-O-methyladenosine-3'-phosphate
  modified_base 14: mod_base = OTHER; note = 2'-fluorouridine-3'-phosphate
  modified_base 15: mod_base = OTHER; note = 2'-O-methylguanosine-3'-phosphate
  modified_base 16: mod_base = OTHER; note = 2'-fluoroadenosine-3'-phosphate
  modified_base 17: mod_base = OTHER; note = 2'-O-methyladenosine-3'-phosphate
  modified_base 18: mod_base = OTHER; note = 2'-fluoroadenosine-3'-phosphate
  modified_base 19: mod_base = OTHER; note = 2'-O-methylguanosine-3'-phosphate
  modified_base 20: mod_base = OTHER; note = 2'-fluorouridine-3'-phosphate
  modified_base 21: mod_base = OTHER; note = 2'-O-methylcytidine-3'-phosphorothioate
  modified_base 22: mod_base = OTHER; note = 2'-O-methylcytidine-3'-phosphorothioate
  modified_base 23: mod_base = OTHER; note = 2'-O-methyladenosine-3'-phosphate
tatatttccaggatgaaagtcca

SEQ ID NO: 344 - RNA, 23 nt, synthetic construct
  source 1..23: mol_type = other RNA; note = Description of Artificial Sequence: Synthetic oligonucleotide
  modified_base 1: mod_base = OTHER; note = 2'-O-methyluridine-3'-phosphorothioate
  modified_base 2: mod_base = OTHER; note = 2'-fluoroadenosine-3'-phosphorothioate
  modified_base 3: mod_base = OTHER; note = 2'-O-methyluridine-3'-phosphate
  modified_base 4: mod_base = OTHER; note = 2'-fluoroadenosine-3'-phosphate
  modified_base 5: mod_base = OTHER; note = 2'-O-methyluridine-3'-phosphate
  modified_base 6: mod_base = OTHER; note = 2'-fluorouridine-3'-phosphate
  modified_base 7: mod_base = OTHER; note = 2'-O-methyluridine-3'-phosphate
  modified_base 8: mod_base = OTHER; note = 2'-fluorocytidine-3'-phosphate
  modified_base 9: mod_base = OTHER; note = 2'-O-methylcytidine-3'-phosphate
  modified_base 10: mod_base = OTHER; note = 2'-fluoroadenosine-3'-phosphate
  modified_base 11: mod_base = OTHER; note = 2'-O-methylguanosine-3'-phosphate
  modified_base 12: mod_base = OTHER; note = 2'-O-methylguanosine-3'-phosphate
  modified_base 13: mod_base = OTHER; note = 2'-O-methyladenosine-3'-phosphate
  modified_base 14: mod_base = OTHER; note = 2'-fluorouridine-3'-phosphate
  modified_base 15: mod_base = OTHER; note = 2'-O-methylguanosine-3'-phosphate
  modified_base 16: mod_base = OTHER; note = 2'-fluoroadenosine-3'-phosphate
  modified_base 17: mod_base = OTHER; note = 2'-O-methyladenosine-3'-phosphate
  modified_base 18: mod_base = OTHER; note = 2'-fluoroadenosine-3'-phosphate
  modified_base 19: mod_base = OTHER; note = 2'-O-methylguanosine-3'-phosphate
  modified_base 20: mod_base = OTHER; note = 2'-fluorouridine-3'-phosphate
  modified_base 21: mod_base = OTHER; note = 2'-O-methylcytidine-3'-phosphorothioate
  modified_base 22: mod_base = OTHER; note = 2'-O-methylcytidine-3'-phosphorothioate
  modified_base 23: mod_base = OTHER; note = 2'-O-methyladenosine-3'-phosphate
tatatttccaggatgaaagtcca

SEQ ID NO: 345 - RNA, 23 nt, synthetic construct
  source 1..23: mol_type = other RNA; note = Description of Artificial Sequence: Synthetic oligonucleotide
  modified_base 1: mod_base = OTHER; note = 2'-O-methyluridine-3'-phosphorothioate
  modified_base 2: mod_base = OTHER; note = 2'-fluoroadenosine-3'-phosphorothioate
  modified_base 3: mod_base = OTHER; note = 2'-O-methyluridine-3'-phosphate
  modified_base 4: mod_base = OTHER; note = 2'-fluoroadenosine-3'-phosphate
  modified_base 5: mod_base = OTHER; note = 2'-O-methyluridine-3'-phosphate
  modified_base 6: mod_base = OTHER; note = 2'-fluorouridine-3'-phosphate
  modified_base 7: mod_base = OTHER; note = 2'-O-methyluridine-3'-phosphate
  modified_base 8: mod_base = OTHER; note = 2'-fluorocytidine-3'-phosphate
  modified_base 9: mod_base = OTHER; note = 2'-O-methylcytidine-3'-phosphate
  modified_base 10: mod_base = OTHER; note = 2'-fluoroadenosine-3'-phosphate
  modified_base 11: mod_base = OTHER; note = 2'-O-methylguanosine-3'-phosphate
  modified_base 12: mod_base = OTHER; note = 2'-O-methylguanosine-3'-phosphate
  modified_base 13: mod_base = OTHER; note = 2'-O-methyladenosine-3'-phosphate
  modified_base 14: mod_base = OTHER; note = 2'-fluorouridine-3'-phosphate
  modified_base 15: mod_base = OTHER; note = 2'-O-methylguanosine-3'-phosphate
  modified_base 16: mod_base = OTHER; note = 2'-fluoroadenosine-3'-phosphate
  modified_base 17: mod_base = OTHER; note = 2'-O-methyladenosine-3'-phosphate
  modified_base 18: mod_base = OTHER; note = 2'-fluoroadenosine-3'-phosphate
  modified_base 19: mod_base = OTHER; note = 2'-O-methylguanosine-3'-phosphate
  modified_base 20: mod_base = OTHER; note = 2'-fluorouridine-3'-phosphate
  modified_base 21: mod_base = OTHER; note = 2'-O-methylcytidine-3'-phosphorothioate
  modified_base 22: mod_base = OTHER; note = 2'-O-methylcytidine-3'-phosphorothioate
  modified_base 23: mod_base = OTHER; note = 2'-O-methyladenosine-3'-phosphate
tatatttccaggatgaaagtcca

SEQ ID NO: 346 - RNA, 23 nt, synthetic construct
  source 1..23: mol_type = other RNA; note = Description of Artificial Sequence: Synthetic oligonucleotide
  modified_base 1: mod_base = OTHER; note = 2'-O-methyluridine-3'-phosphorothioate
  modified_base 2: mod_base = OTHER; note = 2'-fluoroadenosine-3'-phosphorothioate
  modified_base 3: mod_base = OTHER; note = 2'-O-methyluridine-3'-phosphate
  modified_base 4: mod_base = OTHER; note = 2'-fluoroadenosine-3'-phosphate
  modified_base 5: mod_base = OTHER; note = 2'-O-methyluridine-3'-phosphate
  modified_base 6: mod_base = OTHER; note = 2'-fluorouridine-3'-phosphate
  modified_base 7: mod_base = OTHER; note = 2'-O-methyluridine-3'-phosphate
  modified_base 8: mod_base = OTHER; note = 2'-fluorocytidine-3'-phosphate
  modified_base 9: mod_base = OTHER; note = 2'-O-methylcytidine-3'-phosphate
  modified_base 10: mod_base = OTHER; note = 2'-fluoroadenosine-3'-phosphate
  modified_base 11: mod_base = OTHER; note = 2'-O-methylguanosine-3'-phosphate
  modified_base 12: mod_base = OTHER; note = 2'-O-methylguanosine-3'-phosphate
  modified_base 13: mod_base = OTHER; note = 2'-O-methyladenosine-3'-phosphate
  modified_base 14: mod_base = OTHER; note = 2'-fluorouridine-3'-phosphate
  modified_base 15: mod_base = OTHER; note = 2'-O-methylguanosine-3'-phosphate
  modified_base 16: mod_base = OTHER; note = 2'-fluoroadenosine-3'-phosphate
  modified_base 17: mod_base = OTHER; note = 2'-O-methyladenosine-3'-phosphate
  modified_base 18: mod_base = OTHER; note = 2'-fluoroadenosine-3'-phosphate
  modified_base 19: mod_base = OTHER; note = 2'-O-methylguanosine-3'-phosphate
  modified_base 20: mod_base = OTHER; note = 2'-fluorouridine-3'-phosphate
  modified_base 21: mod_base = OTHER; note = 2'-O-methylcytidine-3'-phosphorothioate
  modified_base 22: mod_base = OTHER; note = 2'-O-methylcytidine-3'-phosphorothioate
  modified_base 23: mod_base = OTHER; note = 2'-O-methyladenosine-3'-phosphate
tatatttccaggatgaaagtcca

SEQ ID NO: 347 - DNA, 23 bp, synthetic construct
  source 1..23: mol_type = other DNA; note = Description of Artificial Sequence: Synthetic oligonucleotide; note = Description of Combined DNA/RNA Molecule: Synthetic oligonucleotide
  modified_base 1: mod_base = OTHER; note = 2'-O-methyluridine-3'-phosphorothioate
  modified_base 2: mod_base = OTHER; note = 2'-deoxyadenosine-3'-phosphorothioate
  modified_base 3: mod_base = OTHER; note = 2'-O-methyluridine-3'-phosphate
  modified_base 4: mod_base = OTHER; note = 2'-O-methyladenosine-3'-phosphate
  modified_base 5: mod_base = OTHER; note = 2'-O-methyluridine-3'-phosphate
  modified_base 6: mod_base = OTHER; note = 2'-O-methyluridine-3'-phosphate
  modified_base 7: mod_base = OTHER; note = 2'-O-methyluridine-3'-phosphate
  modified_base 8: mod_base = OTHER; note = 2'-O-methylcytidine-3'-phosphate
  modified_base 9: mod_base = OTHER; note = 2'-O-methylcytidine-3'-phosphate
  modified_base 11: mod_base = OTHER; note = 2'-O-methylguanosine-3'-phosphate
  modified_base 12: mod_base = OTHER; note = 2'-O-methylguanosine-3'-phosphate
  modified_base 13: mod_base = OTHER; note = 2'-O-methyladenosine-3'-phosphate
  modified_base 15: mod_base = OTHER; note = 2'-O-methylguanosine-3'-phosphate
  modified_base 16: mod_base = OTHER; note = 2'-O-methyladenosine-3'-phosphate
  modified_base 17: mod_base = OTHER; note = 2'-O-methyladenosine-3'-phosphate
  modified_base 18: mod_base = OTHER; note = 2'-O-methyladenosine-3'-phosphate
  modified_base 19: mod_base = OTHER; note = 2'-O-methylguanosine-3'-phosphate
  modified_base 20: mod_base = OTHER; note = 2'-O-methyluridine-3'-phosphate
  modified_base 21: mod_base = OTHER; note = 2'-O-methylcytidine-3'-phosphorothioate
  modified_base 22: mod_base = OTHER; note = 2'-O-methylcytidine-3'-phosphorothioate
  modified_base 23: mod_base = OTHER; note = 2'-O-methyladenosine-3'-phosphate
  misc_feature 1: note = RNA
  misc_feature 2: note = DNA
  misc_feature 3..9: note = RNA
  misc_feature 10: note = DNA
  misc_feature 11..13: note = RNA
  misc_feature 14: note = DNA
  misc_feature 15..23: note = RNA
tatatttccaggatgaaagtcca

SEQ ID NO: 348 - DNA, 23 bp, synthetic construct
  source 1..23: mol_type = other DNA; note = Description of Artificial Sequence: Synthetic oligonucleotide; note = Description of Combined DNA/RNA Molecule: Synthetic oligonucleotide
  modified_base 1: mod_base = OTHER; note = 2'-O-methyluridine-3'-phosphorothioate
  modified_base 2: mod_base = OTHER; note = 2'-deoxyadenosine-3'-phosphorothioate
  modified_base 3: mod_base = OTHER; note = 2'-O-methyluridine-3'-phosphate
  modified_base 4: mod_base = OTHER; note = 2'-O-methyladenosine-3'-phosphate
  modified_base 5: mod_base = OTHER; note = 2'-O-methyluridine-3'-phosphate
  modified_base 6: mod_base = OTHER; note = 2'-O-methyluridine-3'-phosphate
  modified_base 7: mod_base = OTHER; note = 2'-O-methyluridine-3'-phosphate
  modified_base 8: mod_base = OTHER; note = 2'-O-methylcytidine-3'-phosphate
  modified_base 9: mod_base = OTHER; note = 2'-O-methylcytidine-3'-phosphate
  modified_base 10: mod_base = OTHER; note = 2'-O-methyladenosine-3'-phosphate
  modified_base 11: mod_base = OTHER; note = 2'-O-methylguanosine-3'-phosphate
  modified_base 12: mod_base = OTHER; note = 2'-O-methylguanosine-3'-phosphate
  modified_base 13: mod_base = OTHER; note = 2'-O-methyladenosine-3'-phosphate
  modified_base 15: mod_base = OTHER; note = 2'-O-methylguanosine-3'-phosphate
  modified_base 16: mod_base = OTHER; note = 2'-O-methyladenosine-3'-phosphate
  modified_base 17: mod_base = OTHER; note = 2'-O-methyladenosine-3'-phosphate
  modified_base 18: mod_base = OTHER; note = 2'-O-methyladenosine-3'-phosphate
  modified_base 19: mod_base = OTHER; note = 2'-O-methylguanosine-3'-phosphate
  modified_base 20: mod_base = OTHER; note = 2'-O-methyluridine-3'-phosphate
  modified_base 21: mod_base = OTHER; note = 2'-O-methylcytidine-3'-phosphorothioate
  modified_base 22: mod_base = OTHER; note = 2'-O-methylcytidine-3'-phosphorothioate
  modified_base 23: mod_base = OTHER; note = 2'-O-methyladenosine-3'-phosphate
  misc_feature 1: note = RNA
  misc_feature 2: note = DNA
  misc_feature 3..13: note = RNA
  misc_feature 14: note = DNA
  misc_feature 15..23: note = RNA
tatatttccaggatgaaagtcca

SEQ ID NO: 349 - DNA, 23 bp, synthetic construct
  source 1..23: mol_type = other DNA; note = Description of Artificial Sequence: Synthetic oligonucleotide; note = Description of Combined DNA/RNA Molecule: Synthetic oligonucleotide
  modified_base 1: mod_base = OTHER; note = 2'-O-methyluridine-3'-phosphorothioate
  modified_base 2: mod_base = OTHER; note = adenosine-3'-phosphorothioate
  modified_base 3: mod_base = OTHER; note = 2'-O-methyluridine-3'-phosphate
  modified_base 4: mod_base = OTHER; note = 2'-O-methyladenosine-3'-phosphate
  modified_base 5: mod_base = OTHER; note = 2'-O-methyluridine-3'-phosphate
  modified_base 6: mod_base = OTHER; note = 2'-O-methyluridine-3'-phosphate
  modified_base 7: mod_base = OTHER; note = 2'-O-methyluridine-3'-phosphate
  modified_base 8: mod_base = OTHER; note = 2'-O-methylcytidine-3'-phosphate
  modified_base 9: mod_base = OTHER; note = 2'-O-methylcytidine-3'-phosphate
  modified_base 10: mod_base = OTHER; note = 2'-O-methyladenosine-3'-phosphate
  modified_base 11: mod_base = OTHER; note = 2'-O-methylguanosine-3'-phosphate
  modified_base 12: mod_base = OTHER; note = 2'-O-methylguanosine-3'-phosphate
  modified_base 13: mod_base = OTHER; note = 2'-O-methyladenosine-3'-phosphate
  modified_base 15: mod_base = OTHER; note = 2'-O-methylguanosine-3'-phosphate
  modified_base 16: mod_base = OTHER; note = 2'-O-methyladenosine-3'-phosphate
  modified_base 17: mod_base = OTHER; note = 2'-O-methyladenosine-3'-phosphate
  modified_base 18: mod_base = OTHER; note = 2'-O-methyladenosine-3'-phosphate
  modified_base 19: mod_base = OTHER; note = 2'-O-methylguanosine-3'-phosphate
  modified_base 20: mod_base = OTHER; note = 2'-O-methyluridine-3'-phosphate
  modified_base 21: mod_base = OTHER; note = 2'-O-methylcytidine-3'-phosphorothioate
  modified_base 22: mod_base = OTHER; note = 2'-O-methylcytidine-3'-phosphorothioate
  modified_base 23: mod_base = OTHER; note = 2'-O-methyladenosine-3'-phosphate
  misc_feature 1..13: note = RNA
  misc_feature 14: note = DNA
  misc_feature 15..23: note = RNA
tatatttccaggatgaaagtcca

SEQ ID NO: 350 - DNA, 23 bp, synthetic construct
  source 1..23: mol_type = other DNA; note = Description of Artificial Sequence: Synthetic oligonucleotide; note = Description of Combined DNA/RNA Molecule: Synthetic oligonucleotide
  modified_base 1: mod_base = OTHER; note = 2'-O-methyluridine-3'-phosphorothioate
  modified_base 2: mod_base = OTHER; note = 2'-deoxyadenosine-3'-phosphorothioate
  modified_base 3: mod_base = OTHER; note = 2'-O-methyluridine-3'-phosphate
  modified_base 4: mod_base = OTHER; note = 2'-O-methyladenosine-3'-phosphate
  modified_base 5: mod_base = OTHER; note = 2'-O-methyluridine-3'-phosphate
  modified_base 7: mod_base = OTHER; note = 2'-O-methyluridine-3'-phosphate
  modified_base 8: mod_base = OTHER; note = 2'-O-methylcytidine-3'-phosphate
  modified_base 9: mod_base = OTHER; note = 2'-O-methylcytidine-3'-phosphate
  modified_base 10: mod_base = OTHER; note = 2'-O-methyladenosine-3'-phosphate
  modified_base 11: mod_base = OTHER; note = 2'-O-methylguanosine-3'-phosphate
  modified_base 12: mod_base = OTHER; note = 2'-O-methylguanosine-3'-phosphate
  modified_base 13: mod_base = OTHER; note = 2'-O-methyladenosine-3'-phosphate
  modified_base 15: mod_base = OTHER; note = 2'-O-methylguanosine-3'-phosphate
  modified_base 16: mod_base = OTHER; note = 2'-O-methyladenosine-3'-phosphate
  modified_base 17: mod_base = OTHER; note = 2'-O-methyladenosine-3'-phosphate
  modified_base 18: mod_base = OTHER; note = 2'-O-methyladenosine-3'-phosphate
  modified_base 19: mod_base = OTHER; note = 2'-O-methylguanosine-3'-phosphate
  modified_base 20: mod_base = OTHER; note = 2'-O-methyluridine-3'-phosphate
  modified_base 21: mod_base = OTHER; note = 2'-O-methylcytidine-3'-phosphorothioate
  modified_base 22: mod_base = OTHER; note = 2'-O-methylcytidine-3'-phosphorothioate
  modified_base 23: mod_base = OTHER; note = 2'-O-methyladenosine-3'-phosphate
  misc_feature 1: note = RNA
  misc_feature 2: note = DNA
  misc_feature 3..5: note = RNA
  misc_feature 6: note = DNA
  misc_feature 7..13: note = RNA
  misc_feature 14: note = DNA
  misc_feature 15..23: note = RNA
tatatttccaggatgaaagtcca

SEQ ID NO: 351 - DNA, 23 bp, synthetic construct
  source 1..23: mol_type = other DNA; note = Description of Artificial Sequence: Synthetic oligonucleotide; note = Description of Combined DNA/RNA Molecule: Synthetic oligonucleotide
  modified_base 1: mod_base = OTHER; note = 2'-O-methyluridine-3'-phosphorothioate
  modified_base 2: mod_base = OTHER; note = adenosine-3'-phosphorothioate
  modified_base 3: mod_base = OTHER; note = 2'-O-methyluridine-3'-phosphate
  modified_base 4: mod_base = OTHER; note = 2'-O-methyladenosine-3'-phosphate
  modified_base 5: mod_base = OTHER; note = 2'-O-methyluridine-3'-phosphate
  modified_base 7: mod_base = OTHER; note = 2'-O-methyluridine-3'-phosphate
  modified_base 8: mod_base = OTHER; note = 2'-O-methylcytidine-3'-phosphate
  modified_base 9: mod_base = OTHER; note = 2'-O-methylcytidine-3'-phosphate
  modified_base 10: mod_base = OTHER; note = 2'-O-methyladenosine-3'-phosphate
  modified_base 11: mod_base = OTHER; note = 2'-O-methylguanosine-3'-phosphate
  modified_base 12: mod_base = OTHER; note = 2'-O-methylguanosine-3'-phosphate
  modified_base 13: mod_base = OTHER; note = 2'-O-methyladenosine-3'-phosphate
  modified_base 15: mod_base = OTHER; note = 2'-O-methylguanosine-3'-phosphate
  modified_base 16: mod_base = OTHER; note = 2'-O-methyladenosine-3'-phosphate
  modified_base 17: mod_base = OTHER; note = 2'-O-methyladenosine-3'-phosphate
  modified_base 18: mod_base = OTHER; note = 2'-O-methyladenosine-3'-phosphate
  modified_base 19: mod_base = OTHER; note = 2'-O-methylguanosine-3'-phosphate
  modified_base 20: mod_base = OTHER; note = 2'-O-methyluridine-3'-phosphate
  modified_base 21: mod_base = OTHER; note = 2'-O-methylcytidine-3'-phosphorothioate
  modified_base 22: mod_base = OTHER; note = 2'-O-methylcytidine-3'-phosphorothioate
  modified_base 23: mod_base = OTHER; note = 2'-O-methyladenosine-3'-phosphate
  misc_feature 1..5: note = RNA
  misc_feature 6: note = DNA
  misc_feature 7..13: note = RNA
  misc_feature 14: note = DNA
  misc_feature 15..23: note = RNA
tatatttccaggatgaaagtcca

SEQ ID NO: 352 - DNA, 23 bp, synthetic construct
  source 1..23: mol_type = other DNA; note = Description of Artificial Sequence: Synthetic oligonucleotide; note = Description of Combined DNA/RNA Molecule: Synthetic oligonucleotide
  modified_base 1: mod_base = OTHER; note = 2'-O-methyluridine-3'-phosphorothioate
  modified_base 2: mod_base = OTHER; note = 2'-deoxyadenosine-3'-phosphorothioate
  modified_base 3: mod_base = OTHER; note = 2'-O-methyluridine-3'-phosphate
  modified_base 4: mod_base = OTHER; note = 2'-O-methyladenosine-3'-phosphate
  modified_base 5: mod_base = OTHER; note = 2'-O-methyluridine-3'-phosphate
  modified_base 6: mod_base = OTHER; note = 2'-O-methyluridine-3'-phosphate
  modified_base 7: mod_base = OTHER; note = 2'-O-methyluridine-3'-phosphate
  modified_base 8: mod_base = OTHER; note = 2'-O-methylcytidine-3'-phosphate
  modified_base 9: mod_base = OTHER; note = 2'-O-methylcytidine-3'-phosphate
  modified_base 10: mod_base = OTHER; note = 2'-O-methyladenosine-3'-phosphate
  modified_base 11: mod_base = OTHER; note = 2'-O-methylguanosine-3'-phosphate
  modified_base 12: mod_base = OTHER; note = 2'-O-methylguanosine-3'-phosphate
  modified_base 13: mod_base = OTHER; note = 2'-O-methyladenosine-3'-phosphate
  modified_base 15: mod_base = OTHER; note = 2'-O-methylguanosine-3'-phosphate
  modified_base 17: mod_base = OTHER; note = 2'-O-methyladenosine-3'-phosphate
  modified_base 18: mod_base = OTHER; note = 2'-O-methyladenosine-3'-phosphate
  modified_base 19: mod_base = OTHER; note = 2'-O-methylguanosine-3'-phosphate
  modified_base 20: mod_base = OTHER; note = 2'-O-methyluridine-3'-phosphate
  modified_base 21: mod_base = OTHER; note = 2'-O-methylcytidine-3'-phosphorothioate
  modified_base 22: mod_base = OTHER; note = 2'-O-methylcytidine-3'-phosphorothioate
  modified_base 23: mod_base = OTHER; note = 2'-O-methyladenosine-3'-phosphate
  misc_feature 1: note = RNA
  misc_feature 2: note = DNA
  misc_feature 3..13: note = RNA
  misc_feature 14: note = DNA
  misc_feature 15: note = RNA
  misc_feature 16: note = DNA
  misc_feature 17..23: note = RNA
tatatttccaggatgaaagtcca

SEQ ID NO: 353 - DNA, 23 bp, synthetic construct
  source 1..23: mol_type = other DNA; note = Description of Artificial Sequence: Synthetic oligonucleotide; note = Description of Combined DNA/RNA Molecule: Synthetic oligonucleotide
  modified_base 1: mod_base = OTHER; note = 2'-O-methyluridine-3'-phosphorothioate
  modified_base 2: mod_base = OTHER; note = 2'-deoxyadenosine-3'-phosphorothioate
  modified_base 3: mod_base = OTHER; note = 2'-O-methyluridine-3'-phosphate
  modified_base 4: mod_base = OTHER; note = 2'-O-methyladenosine-3'-phosphate
  modified_base 5: mod_base = OTHER; note = 2'-O-methyluridine-3'-phosphate
  modified_base 7: mod_base = OTHER; note = 2'-O-methyluridine-3'-phosphate
  modified_base 8: mod_base = OTHER; note = 2'-O-methylcytidine-3'-phosphate
  modified_base 9: mod_base = OTHER; note = 2'-O-methylcytidine-3'-phosphate
  modified_base 10: mod_base = OTHER; note = 2'-O-methyladenosine-3'-phosphate
  modified_base 11: mod_base = OTHER; note = 2'-O-methylguanosine-3'-phosphate
  modified_base 12: mod_base = OTHER; note = 2'-O-methylguanosine-3'-phosphate
  modified_base 13: mod_base = OTHER; note = 2'-O-methyladenosine-3'-phosphate
  modified_base 15: mod_base = OTHER; note = 2'-O-methylguanosine-3'-phosphate
  modified_base 17: mod_base = OTHER; note = 2'-O-methyladenosine-3'-phosphate
  modified_base 18: mod_base = OTHER; note = 2'-O-methyladenosine-3'-phosphate
  modified_base 19: mod_base = OTHER; note = 2'-O-methylguanosine-3'-phosphate
  modified_base 20: mod_base = OTHER; note = 2'-O-methyluridine-3'-phosphate
  modified_base 21: mod_base = OTHER; note = 2'-O-methylcytidine-3'-phosphorothioate
  modified_base 22: mod_base = OTHER; note = 2'-O-methylcytidine-3'-phosphorothioate
  modified_base 23: mod_base = OTHER; note = 2'-O-methyladenosine-3'-phosphate
  misc_feature 1: note = RNA
  misc_feature 2: note = DNA
  misc_feature 3..5: note = RNA
  misc_feature 6: note = DNA
  misc_feature 7..13: note = RNA
  misc_feature 14: note = DNA
  misc_feature 15: note = RNA
  misc_feature 16: note = DNA
  misc_feature 17..23: note = RNA
tatatttccaggatgaaagtcca

SEQ ID NO: 354 - DNA, 23 bp, synthetic construct
  source 1..23: mol_type = other DNA; note = Description of Artificial Sequence: Synthetic oligonucleotide; note = Description of Combined DNA/RNA Molecule: Synthetic oligonucleotide
  modified_base 1: mod_base = OTHER; note = 2'-O-methyluridine-3'-phosphorothioate
  modified_base 2: mod_base = OTHER; note = 2'-deoxyadenosine-3'-phosphorothioate
  modified_base 3: mod_base = OTHER; note = 2'-O-methyluridine-3'-phosphate
  modified_base 4: mod_base = OTHER; note = 2'-O-methyladenosine-3'-phosphate
  modified_base 5: mod_base = OTHER; note = 2'-O-methyluridine-3'-phosphate
  modified_base 6: mod_base = OTHER; note = 2'-O-methyluridine-3'-phosphate
  modified_base 7: mod_base = OTHER; note = 2'-O-methyluridine-3'-phosphate
  modified_base 8: mod_base = OTHER; note = 2'-O-methylcytidine-3'-phosphate
  modified_base 9: mod_base = OTHER; note = 2'-O-methylcytidine-3'-phosphate
  modified_base 11: mod_base = OTHER; note = 2'-O-methylguanosine-3'-phosphate
  modified_base 12: mod_base = OTHER; note = 2'-O-methylguanosine-3'-phosphate
  modified_base 13: mod_base = OTHER; note = 2'-O-methyladenosine-3'-phosphate
  modified_base 15: mod_base = OTHER; note = 2'-O-methylguanosine-3'-phosphate
  modified_base 16: mod_base = OTHER; note = 2'-O-methyladenosine-3'-phosphate
  modified_base 17: mod_base = OTHER; note = 2'-O-methyladenosine-3'-phosphate
  modified_base 18: mod_base = OTHER; note = 2'-O-methyladenosine-3'-phosphate
  modified_base 19: mod_base = OTHER; note = 2'-O-methylguanosine-3'-phosphate
  modified_base 20: mod_base = OTHER; note = 2'-O-methyluridine-3'-phosphate
  modified_base 21: mod_base = OTHER; note = 2'-O-methylcytidine-3'-phosphorothioate
  modified_base 22: mod_base = OTHER; note = 2'-O-methylcytidine-3'-phosphorothioate
  modified_base 23: mod_base = OTHER; note = 2'-O-methyladenosine-3'-phosphate
  misc_feature 1: note = RNA
  misc_feature 2: note = DNA
  misc_feature 3..9: note = RNA
  misc_feature 10: note = DNA
  misc_feature 11..13: note = RNA
  misc_feature 14: note = DNA
  misc_feature 15..23: note = RNA
tatatttccaggatgaaagtcca

SEQ ID NO: 355 - RNA, 23 nt, synthetic construct
  source 1..23: mol_type = other RNA; note = Description of Artificial Sequence: Synthetic oligonucleotide
  modified_base 1: mod_base = OTHER; note = 2'-O-methyluridine-3'-phosphorothioate
  modified_base 2: mod_base = OTHER; note = 2'-fluoroguanosine-3'-phosphorothioate
  modified_base 3: mod_base = OTHER; note = 2'-O-methyladenosine-3'-phosphate
  modified_base 4: mod_base = OTHER; note = 2'-O-methylcytidine-3'-phosphate
  modified_base 5: mod_base = OTHER; note = 2'-O-methyladenosine-3'-phosphate
  modified_base 6: mod_base = OTHER; note = 2'-fluorouridine-3'-phosphate
  modified_base 7: mod_base = OTHER; note = 2'-O-methylcytidine-3'-phosphate
  modified_base 8: mod_base = OTHER; note = 2'-fluorouridine-3'-phosphate
  modified_base 9: mod_base = OTHER; note = 2'-fluorouridine-3'-phosphate
  modified_base 10: mod_base = OTHER; note = 2'-O-methylguanosine-3'-phosphate
  modified_base 11: mod_base = OTHER; note = 2'-O-methyladenosine-3'-phosphate
  modified_base 12: mod_base = OTHER; note = 2'-O-methyladenosine-3'-phosphate
  modified_base 13: mod_base = OTHER; note = 2'-O-methylcytidine-3'-phosphate
  modified_base 14: mod_base = OTHER; note = 2'-fluoroadenosine-3'-phosphate
  modified_base 15: mod_base = OTHER; note = 2'-O-methylcytidine-3'-phosphate
  modified_base 16: mod_base = OTHER; note = 2'-fluorocytidine-3'-phosphate
  modified_base 17: mod_base = OTHER; note = 2'-O-methyluridine-3'-phosphate
  modified_base 18: mod_base = OTHER; note = 2'-O-methyluridine-3'-phosphate
  modified_base 19: mod_base = OTHER; note = 2'-O-methyluridine-3'-phosphate
  modified_base 20: mod_base = OTHER; note = 2'-O-methylcytidine-3'-phosphate
  modified_base 21: mod_base = OTHER; note = 2'-O-methyluridine-3'-phosphorothioate
  modified_base 22: mod_base = OTHER; note = 2'-O-methylcytidine-3'-phosphorothioate
  modified_base 23: mod_base = OTHER; note = 2'-O-methylcytidine-3'-phosphate
tgacatcttgaacacctttctcc

SEQ ID NO: 356 - RNA, 23 nt, synthetic construct
  source 1..23: mol_type = other RNA; note = Description of Artificial Sequence: Synthetic oligonucleotide
  modified_base 1: mod_base = OTHER; note = 2'-O-methyladenosine-3'-phosphorothioate
  modified_base 2: mod_base = OTHER; note = 2'-fluoroguanosine-3'-phosphorothioate
  modified_base 3: mod_base = OTHER; note = 2'-O-methyluridine-3'-phosphate
  modified_base 4: mod_base = OTHER; note = 2'-O-methyluridine-3'-phosphate
  modified_base 5: mod_base = OTHER; note = 2'-O-methyladenosine-3'-phosphate
  modified_base 6: mod_base = OTHER; note = 2'-fluoroadenosine-3'-phosphate
  modified_base 7: mod_base = OTHER; note = 2'-O-methyluridine-3'-phosphate
  modified_base 8: mod_base = OTHER; note = 2'-fluoroadenosine-3'-phosphate
  modified_base 9: mod_base = OTHER; note = 2'-fluorouridine-3'-phosphate
  modified_base 10: mod_base = OTHER; note = 2'-O-methyladenosine-3'-phosphate
  modified_base 11: mod_base = OTHER; note = 2'-O-methyluridine-3'-phosphate
  modified_base 12: mod_base = OTHER; note = 2'-O-methyluridine-3'-phosphate
  modified_base 13: mod_base = OTHER; note = 2'-O-methyluridine-3'-phosphate
  modified_base 14: mod_base = OTHER; note = 2'-fluorocytidine-3'-phosphate
  modified_base 15: mod_base = OTHER; note = 2'-O-methylcytidine-3'-phosphate
  modified_base 16: mod_base = OTHER; note = 2'-fluoroadenosine-3'-phosphate
  modified_base 17: mod_base = OTHER; note = 2'-O-methylguanosine-3'-phosphate
  modified_base 18: mod_base = OTHER; note = 2'-O-methylguanosine-3'-phosphate
  modified_base 19: mod_base = OTHER; note = 2'-O-methyladenosine-3'-phosphate
  modified_base 20: mod_base = OTHER; note = 2'-O-methyluridine-3'-phosphate
  modified_base 21: mod_base = OTHER; note = 2'-O-methylguanosine-3'-phosphorothioate
  modified_base 22: mod_base = OTHER; note = 2'-O-methyladenosine-3'-phosphorothioate
  modified_base 23: mod_base = OTHER; note = 2'-O-methyladenosine-3'-phosphate
agttaatatatttccaggatgaa

SEQ ID NO: 357 - RNA, 23 nt, synthetic construct
  source 1..23: mol_type = other RNA; note = Description of Artificial Sequence: Synthetic oligonucleotide
  modified_base 1: mod_base = OTHER; note = 2'-O-methyluridine-3'-phosphorothioate
  modified_base 2: mod_base = OTHER; note = 2'-fluorouridine -3'-phosphorothioate
  modified_base 3: mod_base = OTHER; note = 2'-O-methylguanosine-3'-phosphate
  modified_base 4: mod_base = OTHER; note = 2'-O-methyluridine-3'-phosphate
  modified_base 5: mod_base = OTHER; note = 2'-O-methylcytidine-3'-phosphate
  modified_base 6: mod_base = OTHER; note = 2'-fluoroguanosine-3'-phosphate
  modified_base 7: mod_base = OTHER; note = 2'-O-methyladenosine-3'-phosphate
  modified_base 8: mod_base = OTHER; note = 2'-fluorouridine-3'-phosphate
  modified_base 9: mod_base = OTHER; note = 2'-fluoroguanosine-3'-phosphate
  modified_base 10: mod_base = OTHER; note = 2'-O-methyladenosine-3'-phosphate
  modified_base 11: mod_base = OTHER; note = 2'-O-methylcytidine-3'-phosphate
  modified_base 12: mod_base = OTHER; note = 2'-O-methyluridine-3'-phosphate
  modified_base 13: mod_base = OTHER; note = 2'-O-methyluridine-3'-phosphate
  modified_base 14: mod_base = OTHER; note = 2'-fluorouridine-3'-phosphate
  modified_base 15: mod_base = OTHER; note = 2'-O-methylcytidine-3'-phosphate
  modified_base 16: mod_base = OTHER; note = 2'-fluoroadenosine-3'-phosphate
  modified_base 17: mod_base = OTHER; note = 2'-O-methylcytidine-3'-phosphate
  modified_base 18: mod_base = OTHER; note = 2'-O-methyladenosine-3'-phosphate
  modified_base 19: mod_base = OTHER; note = 2'-O-methyluridine-3'-phosphate
  modified_base 20: mod_base = OTHER; note = 2'-O-methyluridine-3'-phosphate
  modified_base 21: mod_base = OTHER; note = 2'-O-methylcytidine-3'-phosphorothioate
  modified_base 22: mod_base = OTHER; note = 2'-O-methyluridine-3'-phosphorothioate
  modified_base 23: mod_base = OTHER; note = 2'-O-methylguanosine-3'-phosphate
ttgtcgatgactttcacattctg

SEQ ID NO: 358 - RNA, 23 nt, synthetic construct
  source 1..23: mol_type = other RNA; note = Description of Artificial Sequence: Synthetic oligonucleotide
  modified_base 1: mod_base = OTHER; note = 2'-O-methyluridine-3'-phosphorothioate
  modified_base 2: mod_base = OTHER; note = 2'-fluoroadenosine-3'-phosphorothioate
  modified_base 3: mod_base = OTHER; note = 2'-O-methyluridine-3'-phosphate
  modified_base 4: mod_base = OTHER; note = 2'-O-methylguanosine-3'-phosphate
  modified_base 5: mod_base = OTHER; note = 2'-O-methylguanosine-3'-phosphate
  modified_base 6: mod_base = OTHER; note = 2'-fluoroguanosine-3'-phosphate
  modified_base 7: mod_base = OTHER; note = 2'-O-methyladenosine-3'-phosphate
  modified_base 8: mod_base = OTHER; note = 2'-fluoroadenosine-3'-phosphate
  modified_base 9: mod_base = OTHER; note = 2'-fluoroadenosine-3'-phosphate
  modified_base 10: mod_base = OTHER; note = 2'-O-methyladenosine-3'-phosphate
  modified_base 11: mod_base = OTHER; note = 2'-O-methyluridine-3'-phosphate
  modified_base 12: mod_base = OTHER; note = 2'-O-methyladenosine-3'-phosphate
  modified_base 13: mod_base = OTHER; note = 2'-O-methyluridine-3'-phosphate
  modified_base 14: mod_base = OTHER; note = 2'-fluorouridine-3'-phosphate
  modified_base 15: mod_base = OTHER; note = 2'-O-methylguanosine-3'-phosphate
  modified_base 16: mod_base = OTHER; note = 2'-fluorouridine-3'-phosphate
  modified_base 17: mod_base = OTHER; note = 2'-O-methylguanosine-3'-phosphate
  modified_base 18: mod_base = OTHER; note = 2'-O-methylcytidine-3'-phosphate
  modified_base 19: mod_base = OTHER; note = 2'-O-methyladenosine-3'-phosphate
  modified_base 20: mod_base = OTHER; note = 2'-O-methylcytidine-3'-phosphate
  modified_base 21: mod_base = OTHER; note = 2'-O-methyluridine-3'-phosphorothioate
  modified_base 22: mod_base = OTHER; note = 2'-O-methylguanosine-3'-phosphorothioate
  modified_base 23: mod_base = OTHER; note = 2'-O-methyluridine-3'-phosphate
tatgggaaaatattgtgcactgt

SEQ ID NO: 359 - RNA, 23 nt, synthetic construct
  source 1..23: mol_type = other RNA; note = Description of Artificial Sequence: Synthetic oligonucleotide
  modified_base 1: mod_base = OTHER; note = 2'-O-methyladenosine-3'-phosphorothioate
  modified_base 2: mod_base = OTHER; note = 2'-fluoroadenosine-3'-phosphorothioate
  modified_base 3: mod_base = OTHER; note = 2'-O-methyluridine-3'-phosphate
  modified_base 4: mod_base = OTHER; note = 2'-O-methylguanosine-3'-phosphate
  modified_base 5: mod_base = OTHER; note = 2'-O-methyluridine-3'-phosphate
  modified_base 6: mod_base = OTHER; note = 2'-fluorocytidine-3'-phosphate
  modified_base 7: mod_base = OTHER; note = 2'-O-methyluridine-3'-phosphate
  modified_base 8: mod_base = OTHER; note = 2'-fluorouridine-3'-phosphate
  modified_base 9: mod_base = OTHER; note = 2'-fluoroguanosine-3'-phosphate
  modified_base 10: mod_base = OTHER; note = 2'-O-methyluridine-3'-phosphate
  modified_base 11: mod_base = OTHER; note = 2'-O-methylcytidine-3'-phosphate
  modified_base 12: mod_base = OTHER; note = 2'-O-methylguanosine-3'-phosphate
  modified_base 13: mod_base = OTHER; note = 2'-O-methyladenosine-3'-phosphate
  modified_base 14: mod_base = OTHER; note = 2'-fluorouridine-3'-phosphate
  modified_base 15: mod_base = OTHER; note = 2'-O-methylguanosine-3'-phosphate
  modified_base 16: mod_base = OTHER; note = 2'-fluoroadenosine-3'-phosphate
  modified_base 17: mod_base = OTHER; note = 2'-O-methylcytidine-3'-phosphate
  modified_base 18: mod_base = OTHER; note = 2'-O-methyluridine-3'-phosphate
  modified_base 19: mod_base = OTHER; note = 2'-O-methyluridine-3'-phosphate
  modified_base 20: mod_base = OTHER; note = 2'-O-methyluridine-3'-phosphate
  modified_base 21: mod_base = OTHER; note = 2'-O-methylcytidine-3'-phosphorothioate
  modified_base 22: mod_base = OTHER; note = 2'-O-methyladenosine-3'-phosphorothioate
  modified_base 23: mod_base = OTHER; note = 2'-O-methylcytidine-3'-phosphate
aatgtcttgtcgatgactttcac

SEQ ID NO: 360 - RNA, 23 nt, synthetic construct
  source 1..23: mol_type = other RNA; note = Description of Artificial Sequence: Synthetic oligonucleotide
  modified_base 1: mod_base = OTHER; note = 2'-O-methyluridine-3'-phosphorothioate
  modified_base 2: mod_base = OTHER; note = 2'-fluorouridine -3'-phosphorothioate
  modified_base 3: mod_base = OTHER; note = 2'-O-methyluridine-3'-phosphate
  modified_base 4: mod_base = OTHER; note = 2'-O-methylguanosine-3'-phosphate
  modified_base 5: mod_base = OTHER; note = 2'-O-methyluridine-3'-phosphate
  modified_base 6: mod_base = OTHER; note = 2'-fluorocytidine-3'-phosphate
  modified_base 7: mod_base = OTHER; note = 2'-O-methylguanosine-3'-phosphate
  modified_base 8: mod_base = OTHER; note = 2'-fluoroadenosine-3'-phosphate
  modified_base 9: mod_base = OTHER; note = 2'-fluorouridine-3'-phosphate
  modified_base 10: mod_base = OTHER; note = 2'-O-methylguanosine-3'-phosphate
  modified_base 11: mod_base = OTHER; note = 2'-O-methyladenosine-3'-phosphate
  modified_base 12: mod_base = OTHER; note = 2'-O-methylcytidine-3'-phosphate
  modified_base 13: mod_base = OTHER; note = 2'-O-methyluridine-3'-phosphate
  modified_base 14: mod_base = OTHER; note = 2'-fluorouridine-3'-phosphate
  modified_base 15: mod_base = OTHER; note = 2'-O-methyluridine-3'-phosphate
  modified_base 16: mod_base = OTHER; note = 2'-fluorocytidine-3'-phosphate
  modified_base 17: mod_base = OTHER; note = 2'-O-methyladenosine-3'-phosphate
  modified_base 18: mod_base = OTHER; note = 2'-O-methylcytidine-3'-phosphate
  modified_base 19: mod_base = OTHER; note = 2'-O-methyladenosine-3'-phosphate
  modified_base 20: mod_base = OTHER; note = 2'-O-methyluridine-3'-phosphate
  modified_base 21: mod_base = OTHER; note = 2'-O-methyluridine-3'-phosphorothioate
  modified_base 22: mod_base = OTHER; note = 2'-O-methylcytidine-3'-phosphorothioate
  modified_base 23: mod_base = OTHER; note = 2'-O-methyluridine-3'-phosphate
tttgtcgatgactttcacattct

SEQ ID NO: 361 - RNA, 23 nt, synthetic construct
  source 1..23: mol_type = other RNA; note = Description of Artificial Sequence: Synthetic oligonucleotide
  modified_base 1: mod_base = OTHER; note = 2'-O-methyluridine-3'-phosphorothioate
  modified_base 2: mod_base = OTHER; note = 2'-fluoroadenosine-3'-phosphorothioate
  modified_base 3: mod_base = OTHER; note = 2'-O-methyladenosine-3'-phosphate
  modified_base 4: mod_base = OTHER; note = 2'-O-methylcytidine-3'-phosphate
  modified_base 5: mod_base = OTHER; note = 2'-O-methyladenosine-3'-phosphate
  modified_base 6: mod_base = OTHER; note = 2'-fluoroguanosine-3'-phosphate
  modified_base 7: mod_base = OTHER; note = 2'-O-methyluridine-3'-phosphate
  modified_base 8: mod_base = OTHER; note = 2'-fluorouridine-3'-phosphate
  modified_base 9: mod_base = OTHER; note = 2'-fluoroadenosine-3'-phosphate
  modified_base 10: mod_base = OTHER; note = 2'-O-methyladenosine-3'-phosphate
  modified_base 11: mod_base = OTHER; note = 2'-O-methyluridine-3'-phosphate
  modified_base 12: mod_base = OTHER; note = 2'-O-methyladenosine-3'-phosphate
  modified_base 13: mod_base = OTHER; note = 2'-O-methyluridine-3'-phosphate
  modified_base 14: mod_base = OTHER; note = 2'-fluoroadenosine-3'-phosphate
  modified_base 15: mod_base = OTHER; note = 2'-O-methyluridine-3'-phosphate
  modified_base 16: mod_base = OTHER; note = 2'-fluorouridine-3'-phosphate
  modified_base 17: mod_base = OTHER; note = 2'-O-methyluridine-3'-phosphate
  modified_base 18: mod_base = OTHER; note = 2'-O-methylcytidine-3'-phosphate
  modified_base 19: mod_base = OTHER; note = 2'-O-methylcytidine-3'-phosphate
  modified_base 20: mod_base = OTHER; note = 2'-O-methyladenosine-3'-phosphate
  modified_base 21: mod_base = OTHER; note = 2'-O-methylguanosine-3'-phosphorothioate
  modified_base 22: mod_base = OTHER; note = 2'-O-methylguanosine-3'-phosphorothioate
  modified_base 23: mod_base = OTHER; note = 2'-O-methyladenosine-3'-phosphate
taacagttaatatatttccagga

SEQ ID NO: 362 - RNA, 23 nt, synthetic construct
  source 1..23: mol_type = other RNA; note = Description of Artificial Sequence: Synthetic oligonucleotide
  modified_base 1: mod_base = OTHER; note = 2'-O-methyladenosine-3'-phosphorothioate
  modified_base 2: mod_base = OTHER; note = 2'-fluoroadenosine-3'-phosphorothioate
  modified_base 3: mod_base = OTHER; note = 2'-O-methyladenosine-3'-phosphate
  modified_base 4: mod_base = OTHER; note = 2'-O-methyluridine-3'-phosphate
  modified_base 5: mod_base = OTHER; note = 2'-O-methyladenosine-3'-phosphate
  modified_base 6: mod_base = OTHER; note = 2'-fluoroadenosine-3'-phosphate
  modified_base 7: mod_base = OTHER; note = 2'-O-methyluridine-3'-phosphate
  modified_base 8: mod_base = OTHER; note = 2'-fluoroadenosine-3'-phosphate
  modified_base 9: mod_base = OTHER; note = 2'-fluorocytidine-3'-phosphate
  modified_base 10: mod_base = OTHER; note = 2'-O-methyladenosine-3'-phosphate
  modified_base 11: mod_base = OTHER; note = 2'-O-methylguanosine-3'-phosphate
  modified_base 12: mod_base = OTHER; note = 2'-O-methyladenosine-3'-phosphate
  modified_base 13: mod_base = OTHER; note = 2'-O-methyluridine-3'-phosphate
  modified_base 14: mod_base = OTHER; note = 2'-fluoroguanosine-3'-phosphate
  modified_base 15: mod_base = OTHER; note = 2'-O-methylguanosine-3'-phosphate
  modified_base 16: mod_base = OTHER; note = 2'-fluoroguanosine-3'-phosphate
  modified_base 17: mod_base = OTHER; note = 2'-O-methyladenosine-3'-phosphate
  modified_base 18: mod_base = OTHER; note = 2'-O-methyladenosine-3'-phosphate
  modified_base 19: mod_base = OTHER; note = 2'-O-methyladenosine-3'-phosphate
  modified_base 20: mod_base = OTHER; note = 2'-O-methyladenosine-3'-phosphate
  modified_base 21: mod_base = OTHER; note = 2'-O-methyluridine-3'-phosphorothioate
  modified_base 22: mod_base = OTHER; note = 2'-O-methyladenosine-3'-phosphorothioate
  modified_base 23: mod_base = OTHER; note = 2'-O-methyluridine-3'-phosphate
aaataatacagatgggaaaatat

SEQ ID NO: 363 - RNA, 23 nt, synthetic construct
  source 1..23: mol_type = other RNA; note = Description of Artificial Sequence: Synthetic oligonucleotide
  modified_base 1: mod_base = OTHER; note = 2'-O-methyluridine-3'-phosphorothioate
  modified_base 2: mod_base = OTHER; note = 2'-fluorouridine -3'-phosphorothioate
  modified_base 3: mod_base = OTHER; note = 2'-O-methyluridine-3'-phosphate
  modified_base 4: mod_base = OTHER; note = 2'-O-methyluridine-3'-phosphate
  modified_base 5: mod_base = OTHER; note = 2'-O-methylguanosine-3'-phosphate
  modified_base 6: mod_base = OTHER; note = 2'-fluorouridine-3'-phosphate
  modified_base 7: mod_base = OTHER; note = 2'-O-methyluridine-3'-phosphate
  modified_base 8: mod_base = OTHER; note = 2'-fluoroguanosine-3'-phosphate
  modified_base 9: mod_base = OTHER; note = 2'-fluoroguanosine-3'-phosphate
  modified_base 10: mod_base = OTHER; note = 2'-O-methyladenosine-3'-phosphate
  modified_base 11: mod_base = OTHER; note = 2'-O-methyladenosine-3'-phosphate
  modified_base 12: mod_base = OTHER; note = 2'-O-methyladenosine-3'-phosphate
  modified_base 13: mod_base = OTHER; note = 2'-O-methyladenosine-3'-phosphate
  modified_base 14: mod_base = OTHER; note = 2'-fluoroguanosine-3'-phosphate
  modified_base 15: mod_base = OTHER; note = 2'-O-methyladenosine-3'-phosphate
  modified_base 16: mod_base = OTHER; note = 2'-fluoroadenosine-3'-phosphate
  modified_base 17: mod_base = OTHER; note = 2'-O-methylcytidine-3'-phosphate
  modified_base 18: mod_base = OTHER; note = 2'-O-methylguanosine-3'-phosphate
  modified_base 19: mod_base = OTHER; note = 2'-O-methyladenosine-3'-phosphate
  modified_base 20: mod_base = OTHER; note = 2'-O-methylcytidine-3'-phosphate
  modified_base 21: mod_base = OTHER; note = 2'-O-methyladenosine-3'-phosphorothioate
  modified_base 22: mod_base = OTHER; note = 2'-O-methylcytidine-3'-phosphorothioate
  modified_base 23: mod_base = OTHER; note = 2'-O-methylcytidine-3'-phosphate
ttttgttggaaaagaacgacacc

SEQ ID NO: 364 - RNA, 23 nt, synthetic construct
  source 1..23: mol_type = other RNA; note = Description of Artificial Sequence: Synthetic oligonucleotide
  modified_base 1: mod_base = OTHER; note = 2'-O-methyluridine-3'-phosphorothioate
  modified_base 2: mod_base = OTHER; note = 2'-fluoroadenosine-3'-phosphorothioate
  modified_base 3: mod_base = OTHER; note = 2'-O-methylguanosine-3'-phosphate
  modified_base 4: mod_base = OTHER; note = 2'-O-methyluridine-3'-phosphate
  modified_base 5: mod_base = OTHER; note = 2'-O-methyluridine-3'-phosphate
  modified_base 6: mod_base = OTHER; note = 2'-fluoroadenosine-3'-phosphate
  modified_base 7: mod_base = OTHER; note = 2'-O-methyladenosine-3'-phosphate
  modified_base 8: mod_base = OTHER; note = 2'-fluorouridine-3'-phosphate
  modified_base 9: mod_base = OTHER; note = 2'-fluoroadenosine-3'-phosphate
  modified_base 10: mod_base = OTHER; note = 2'-O-methyluridine-3'-phosphate
  modified_base 11: mod_base = OTHER; note = 2'-O-methyladenosine-3'-phosphate
  modified_base 12: mod_base = OTHER; note = 2'-O-methyluridine-3'-phosphate
  modified_base 13: mod_base = OTHER; note = 2'-O-methyluridine-3'-phosphate
  modified_base 14: mod_base = OTHER; note = 2'-fluorouridine-3'-phosphate
  modified_base 15: mod_base = OTHER; note = 2'-O-methylcytidine-3'-phosphate
  modified_base 16: mod_base = OTHER; note = 2'-fluorocytidine-3'-phosphate
  modified_base 17: mod_base = OTHER; note = 2'-O-methyladenosine-3'-phosphate
  modified_base 18: mod_base = OTHER; note = 2'-O-methylguanosine-3'-phosphate
  modified_base 19: mod_base = OTHER; note = 2'-O-methylguanosine-3'-phosphate
  modified_base 20: mod_base = OTHER; note = 2'-O-methyladenosine-3'-phosphate
  modified_base 21: mod_base = OTHER; note = 2'-O-methyluridine-3'-phosphorothioate
  modified_base 22: mod_base = OTHER; note = 2'-O-methylguanosine-3'-phosphorothioate
  modified_base 23: mod_base = OTHER; note = 2'-O-methyladenosine-3'-phosphate
tagttaatatatttccaggatga

SEQ ID NO: 365 - RNA, 23 nt, synthetic construct
  source 1..23: mol_type = other RNA; note = Description of Artificial Sequence: Synthetic oligonucleotide
  modified_base 1: mod_base = OTHER; note = 2'-O-methyluridine-3'-phosphorothioate
  modified_base 2: mod_base = OTHER; note = 2'-fluoroadenosine-3'-phosphorothioate
  modified_base 3: mod_base = OTHER; note = 2'-O-methyluridine-3'-phosphate
  modified_base 4: mod_base = OTHER; note = 2'-O-methylcytidine-3'-phosphate
  modified_base 5: mod_base = OTHER; note = 2'-O-methyladenosine-3'-phosphate
  modified_base 6: mod_base = OTHER; note = 2'-fluorouridine-3'-phosphate
  modified_base 7: mod_base = OTHER; note = 2'-O-methylcytidine-3'-phosphate
  modified_base 8: mod_base = OTHER; note = 2'-fluoroadenosine-3'-phosphate
  modified_base 9: mod_base = OTHER; note = 2'-fluorocytidine-3'-phosphate
  modified_base 10: mod_base = OTHER; note = 2'-O-methylcytidine-3'-phosphate
  modified_base 11: mod_base = OTHER; note = 2'-O-methyluridine-3'-phosphate
  modified_base 12: mod_base = OTHER; note = 2'-O-methylcytidine-3'-phosphate
  modified_base 13: mod_base = OTHER; note = 2'-O-methyluridine-3'-phosphate
  modified_base 14: mod_base = OTHER; note = 2'-fluorocytidine-3'-phosphate
  modified_base 15: mod_base = OTHER; note = 2'-O-methyladenosine-3'-phosphate
  modified_base 16: mod_base = OTHER; note = 2'-fluoroadenosine-3'-phosphate
  modified_base 17: mod_base = OTHER; note = 2'-O-methyladenosine-3'-phosphate
  modified_base 18: mod_base = OTHER; note = 2'-O-methyladenosine-3'-phosphate
  modified_base 19: mod_base = OTHER; note = 2'-O-methyluridine-3'-phosphate
  modified_base 20: mod_base = OTHER; note = 2'-O-methylguanosine-3'-phosphate
  modified_base 21: mod_base = OTHER; note = 2'-O-methylcytidine-3'-phosphorothioate
  modified_base 22: mod_base = OTHER; note = 2'-O-methylcytidine-3'-phosphorothioate
  modified_base 23: mod_base = OTHER; note = 2'-O-methylcytidine-3'-phosphate
tatcatcacctctcaaaatgccc

SEQ ID NO: 366 - RNA, 23 nt, synthetic construct
  source 1..23: mol_type = other RNA; note = Description of Artificial Sequence: Synthetic oligonucleotide
  modified_base 1: mod_base = OTHER; note = 2'-O-methyluridine-3'-phosphorothioate
  modified_base 2: mod_base = OTHER; note = 2'-fluorouridine -3'-phosphorothioate
  modified_base 3: mod_base = OTHER; note = 2'-O-methylguanosine-3'-phosphate
  modified_base 4: mod_base = OTHER; note = 2'-O-methyladenosine-3'-phosphate
  modified_base 5: mod_base = OTHER; note = 2'-O-methyladenosine-3'-phosphate
  modified_base 6: mod_base = OTHER; note = 2'-fluorocytidine-3'-phosphate
  modified_base 7: mod_base = OTHER; note = 2'-O-methyladenosine-3'-phosphate
  modified_base 8: mod_base = OTHER; note = 2'-fluorocytidine-3'-phosphate
  modified_base 9: mod_base = OTHER; note = 2'-fluorocytidine-3'-phosphate
  modified_base 10: mod_base = OTHER; note = 2'-O-methyluridine-3'-phosphate
  modified_base 11: mod_base = OTHER; note = 2'-O-methyluridine-3'-phosphate
  modified_base 12: mod_base = OTHER; note = 2'-O-methyluridine-3'-phosphate
  modified_base 13: mod_base = OTHER; note = 2'-O-methylcytidine-3'-phosphate
  modified_base 14: mod_base = OTHER; note = 2'-fluorouridine-3'-phosphate
  modified_base 15: mod_base = OTHER; note = 2'-O-methylcytidine-3'-phosphate
  modified_base 16: mod_base = OTHER; note = 2'-fluorocytidine-3'-phosphate
  modified_base 17: mod_base = OTHER; note = 2'-O-methylcytidine-3'-phosphate
  modified_base 18: mod_base = OTHER; note = 2'-O-methylcytidine-3'-phosphate
  modified_base 19: mod_base = OTHER; note = 2'-O-methylcytidine-3'-phosphate
  modified_base 20: mod_base = OTHER; note = 2'-O-methyluridine-3'-phosphate
  modified_base 21: mod_base = OTHER; note = 2'-O-methylguanosine-3'-phosphorothioate
  modified_base 22: mod_base = OTHER; note = 2'-O-methylguanosine-3'-phosphorothioate
  modified_base 23: mod_base = OTHER; note = 2'-O-methyladenosine-3'-phosphate
ttgaacacctttctccccctgga

SEQ ID NO: 367 - RNA, 23 nt, synthetic construct
  source 1..23: mol_type = other RNA; note = Description of Artificial Sequence: Synthetic oligonucleotide
  modified_base 1: mod_base = OTHER; note = 2'-O-methyluridine-3'-phosphorothioate
  modified_base 2: mod_base = OTHER; note = 2'-fluorouridine -3'-phosphorothioate
  modified_base 3: mod_base = OTHER; note = 2'-O-methyluridine-3'-phosphate
  modified_base 4: mod_base = OTHER; note = 2'-O-methyladenosine-3'-phosphate
  modified_base 5: mod_base = OTHER; note = 2'-O-methyladenosine-3'-phosphate
  modified_base 6: mod_base = OTHER; note = 2'-fluorocytidine-3'-phosphate
  modified_base 7: mod_base = OTHER; note = 2'-O-methyladenosine-3'-phosphate
  modified_base 8: mod_base = OTHER; note = 2'-fluoroguanosine-3'-phosphate
  modified_base 9: mod_base = OTHER; note = 2'-fluorouridine-3'-phosphate
  modified_base 10: mod_base = OTHER; note = 2'-O-methyluridine-3'-phosphate
  modified_base 11: mod_base = OTHER; note = 2'-O-methyladenosine-3'-phosphate
  modified_base 12: mod_base = OTHER; note = 2'-O-methyladenosine-3'-phosphate
  modified_base 13: mod_base = OTHER; note = 2'-O-methyluridine-3'-phosphate
  modified_base 14: mod_base = OTHER; note = 2'-fluoroadenosine-3'-phosphate
  modified_base 15: mod_base = OTHER; note = 2'-O-methyluridine-3'-phosphate
  modified_base 16: mod_base = OTHER; note = 2'-fluoroadenosine-3'-phosphate
  modified_base 17: mod_base = OTHER; note = 2'-O-methyluridine-3'-phosphate
  modified_base 18: mod_base = OTHER; note = 2'-O-methyluridine-3'-phosphate
  modified_base 19: mod_base = OTHER; note = 2'-O-methyluridine-3'-phosphate
  modified_base 20: mod_base = OTHER; note = 2'-O-methylcytidine-3'-phosphate
  modified_base 21: mod_base = OTHER; note = 2'-O-methylcytidine-3'-phosphorothioate
  modified_base 22: mod_base = OTHER; note = 2'-O-methyladenosine-3'-phosphorothioate
  modified_base 23: mod_base = OTHER; note = 2'-O-methylguanosine-3'-phosphate
tttaacagttaatatatttccag

SEQ ID NO: 368 - RNA, 23 nt, synthetic construct
  source 1..23: mol_type = other RNA; note = Description of Artificial Sequence: Synthetic oligonucleotide
  modified_base 1: mod_base = OTHER; note = 2'-O-methyladenosine-3'-phosphorothioate
  modified_base 2: mod_base = OTHER; note = 2'-fluoroadenosine-3'-phosphorothioate
  modified_base 3: mod_base = OTHER; note = 2'-O-methylguanosine-3'-phosphate
  modified_base 4: mod_base = OTHER; note = 2'-O-methylguanosine-3'-phosphate
  modified_base 5: mod_base = OTHER; note = 2'-O-methyladenosine-3'-phosphate
  modified_base 6: mod_base = OTHER; note = 2'-fluorouridine-3'-phosphate
  modified_base 7: mod_base = OTHER; note = 2'-O-methyluridine-3'-phosphate
  modified_base 8: mod_base = OTHER; note = 2'-fluorouridine-3'-phosphate
  modified_base 9: mod_base = OTHER; note = 2'-fluorouridine-3'-phosphate
  modified_base 10: mod_base = OTHER; note = 2'-O-methyluridine-3'-phosphate
  modified_base 11: mod_base = OTHER; note = 2'-O-methylcytidine-3'-phosphate
  modified_base 12: mod_base = OTHER; note = 2'-O-methylcytidine-3'-phosphate
  modified_base 13: mod_base = OTHER; note = 2'-O-methyluridine-3'-phosphate
  modified_base 14: mod_base = OTHER; note = 2'-fluorocytidine-3'-phosphate
  modified_base 15: mod_base = OTHER; note = 2'-O-methyladenosine-3'-phosphate
  modified_base 16: mod_base = OTHER; note = 2'-fluorocytidine-3'-phosphate
  modified_base 17: mod_base = OTHER; note = 2'-O-methylcytidine-3'-phosphate
  modified_base 18: mod_base = OTHER; note = 2'-O-methyladenosine-3'-phosphate
  modified_base 19: mod_base = OTHER; note = 2'-O-methyladenosine-3'-phosphate
  modified_base 20: mod_base = OTHER; note = 2'-O-methyluridine-3'-phosphate
  modified_base 21: mod_base = OTHER; note = 2'-O-methylguanosine-3'-phosphorothioate
  modified_base 22: mod_base = OTHER; note = 2'-O-methyluridine-3'-phosphorothioate
  modified_base 23: mod_base = OTHER; note = 2'-O-methylcytidine-3'-phosphate
aaggatttttcctcaccaatgtc

SEQ ID NO: 369 - RNA, 23 nt, synthetic construct
  source 1..23: mol_type = other RNA; note = Description of Artificial Sequence: Synthetic oligonucleotide
  modified_base 1: mod_base = OTHER; note = 2'-O-methyluridine-3'-phosphorothioate
  modified_base 2: mod_base = OTHER; note = 2'-fluoroadenosine-3'-phosphorothioate
  modified_base 3: mod_base = OTHER; note = 2'-O-methyluridine-3'-phosphate
  modified_base 4: mod_base = OTHER; note = 2'-O-methylcytidine-3'-phosphate
  modified_base 5: mod_base = OTHER; note = 2'-O-methyluridine-3'-phosphate
  modified_base 6: mod_base = OTHER; note = 2'-fluorouridine-3'-phosphate
  modified_base 7: mod_base = OTHER; note = 2'-O-methylguanosine-3'-phosphate
  modified_base 8: mod_base = OTHER; note = 2'-fluoroadenosine-3'-phosphate
  modified_base 9: mod_base = OTHER; note = 2'-fluoroadenosine-3'-phosphate
  modified_base 10: mod_base = OTHER; note = 2'-O-methylcytidine-3'-phosphate
  modified_base 11: mod_base = OTHER; note = 2'-O-methyladenosine-3'-phosphate
  modified_base 12: mod_base = OTHER; note = 2'-O-methylcytidine-3'-phosphate
  modified_base 13: mod_base = OTHER; note = 2'-O-methylcytidine-3'-phosphate
  modified_base 14: mod_base = OTHER; note = 2'-fluorouridine-3'-phosphate
  modified_base 15: mod_base = OTHER; note = 2'-O-methyluridine-3'-phosphate
  modified_base 16: mod_base = OTHER; note = 2'-fluorouridine-3'-phosphate
  modified_base 17: mod_base = OTHER; note = 2'-O-methylcytidine-3'-phosphate
  modified_base 18: mod_base = OTHER; note = 2'-O-methyluridine-3'-phosphate
  modified_base 19: mod_base = OTHER; note = 2'-O-methylcytidine-3'-phosphate
  modified_base 20: mod_base = OTHER; note = 2'-O-methylcytidine-3'-phosphate
  modified_base 21: mod_base = OTHER; note = 2'-O-methylcytidine-3'-phosphorothioate
  modified_base 22: mod_base = OTHER; note = 2'-O-methylcytidine-3'-phosphorothioate
  modified_base 23: mod_base = OTHER; note = 2'-O-methylcytidine-3'-phosphate
tatcttgaacacctttctccccc

SEQ ID NO: 370 - RNA, 23 nt, synthetic construct
  source 1..23: mol_type = other RNA; note = Description of Artificial Sequence: Synthetic oligonucleotide
  modified_base 1: mod_base = OTHER; note = 2'-O-methyladenosine-3'-phosphorothioate
  modified_base 2: mod_base = OTHER; note = 2'-fluorouridine -3'-phosphorothioate
  modified_base 3: mod_base = OTHER; note = 2'-O-methylcytidine-3'-phosphate
  modified_base 4: mod_base = OTHER; note = 2'-O-methyladenosine-3'-phosphate
  modified_base 5: mod_base = OTHER; note = 2'-O-methyluridine-3'-phosphate
  modified_base 6: mod_base = OTHER; note = 2'-fluorocytidine-3'-phosphate
  modified_base 7: mod_base = OTHER; note = 2'-O-methyladenosine-3'-phosphate
  modified_base 8: mod_base = OTHER; note = 2'-fluorocytidine-3'-phosphate
  modified_base 9: mod_base = OTHER; note = 2'-fluorocytidine-3'-phosphate
  modified_base 10: mod_base = OTHER; note = 2'-O-methyluridine-3'-phosphate
  modified_base 11: mod_base = OTHER; note = 2'-O-methylcytidine-3'-phosphate
  modified_base 12: mod_base = OTHER; note = 2'-O-methyluridine-3'-phosphate
  modified_base 13: mod_base = OTHER; note = 2'-O-methylcytidine-3'-phosphate
  modified_base 14: mod_base = OTHER; note = 2'-fluoroadenosine-3'-phosphate
  modified_base 15: mod_base = OTHER; note = 2'-O-methyladenosine-3'-phosphate
  modified_base 16: mod_base = OTHER; note = 2'-fluoroadenosine-3'-phosphate
  modified_base 17: mod_base = OTHER; note = 2'-O-methyladenosine-3'-phosphate
  modified_base 18: mod_base = OTHER; note = 2'-O-methyluridine-3'-phosphate
  modified_base 19: mod_base = OTHER; note = 2'-O-methylguanosine-3'-phosphate
  modified_base 20: mod_base = OTHER; note = 2'-O-methylcytidine-3'-phosphate
  modified_base 21: mod_base = OTHER; note = 2'-O-methylcytidine-3'-phosphorothioate
  modified_base 22: mod_base = OTHER; note = 2'-O-methylcytidine-3'-phosphorothioate
  modified_base 23: mod_base = OTHER; note = 2'-O-methyluridine-3'-phosphate
atcatcacctctcaaaatgccct

SEQ ID NO: 371 - RNA, 23 nt, synthetic construct
  source 1..23: mol_type = other RNA; note = Description of Artificial Sequence: Synthetic oligonucleotide
  modified_base 1: mod_base = OTHER; note = 2'-O-methyladenosine-3'-phosphorothioate
  modified_base 2: mod_base = OTHER; note = 2'-fluoroadenosine-3'-phosphorothioate
  modified_base 3: mod_base = OTHER; note = 2'-O-methyladenosine-3'-phosphate
  modified_base 4: mod_base = OTHER; note = 2'-O-methyladenosine-3'-phosphate
  modified_base 5: mod_base = OTHER; note = 2'-O-methylguanosine-3'-phosphate
  modified_base 6: mod_base = OTHER; note = 2'-fluoroadenosine-3'-phosphate
  modified_base 7: mod_base = OTHER; note = 2'-O-methyladenosine-3'-phosphate
  modified_base 8: mod_base = OTHER; note = 2'-fluorocytidine-3'-phosphate
  modified_base 9: mod_base = OTHER; note = 2'-fluoroguanosine-3'-phosphate
  modified_base 10: mod_base = OTHER; note = 2'-O-methyladenosine-3'-phosphate
  modified_base 11: mod_base = OTHER; note = 2'-O-methylcytidine-3'-phosphate
  modified_base 12: mod_base = OTHER; note = 2'-O-methyladenosine-3'-phosphate
  modified_base 13: mod_base = OTHER; note = 2'-O-methylcytidine-3'-phosphate
  modified_base 14: mod_base = OTHER; note = 2'-fluorocytidine-3'-phosphate
  modified_base 15: mod_base = OTHER; note = 2'-O-methylcytidine-3'-phosphate
  modified_base 16: mod_base = OTHER; note = 2'-fluorouridine-3'-phosphate
  modified_base 17: mod_base = OTHER; note = 2'-O-methyluridine-3'-phosphate
  modified_base 18: mod_base = OTHER; note = 2'-O-methyluridine-3'-phosphate
  modified_base 19: mod_base = OTHER; note = 2'-O-methylguanosine-3'-phosphate
  modified_base 20: mod_base = OTHER; note = 2'-O-methyluridine-3'-phosphate
  modified_base 21: mod_base = OTHER; note = 2'-O-methyladenosine-3'-phosphorothioate
  modified_base 22: mod_base = OTHER; note = 2'-O-methyluridine-3'-phosphorothioate
  modified_base 23: mod_base = OTHER; note = 2'-O-methyluridine-3'-phosphate
aaaagaacgacaccctttgtatt

SEQ ID NO: 372 - RNA, 23 nt, synthetic construct
  source 1..23: mol_type = other RNA; note = Description of Artificial Sequence: Synthetic oligonucleotide
  modified_base 1: mod_base = OTHER; note = 2'-O-methyluridine-3'-phosphorothioate
  modified_base 2: mod_base = OTHER; note = 2'-fluoroguanosine-3'-phosphorothioate
  modified_base 3: mod_base = OTHER; note = 2'-O-methyladenosine-3'-phosphate
  modified_base 4: mod_base = OTHER; note = 2'-O-methyluridine-3'-phosphate
  modified_base 5: mod_base = OTHER; note = 2'-O-methyluridine-3'-phosphate
  modified_base 6: mod_base = OTHER; note = 2'-fluorocytidine-3'-phosphate
  modified_base 7: mod_base = OTHER; note = 2'-O-methylguanosine-3'-phosphate
  modified_base 8: mod_base = OTHER; note = 2'-fluoroadenosine-3'-phosphate
  modified_base 9: mod_base = OTHER; note = 2'-fluorocytidine-3'-phosphate
  modified_base 10: mod_base = OTHER; note = 2'-O-methyladenosine-3'-phosphate
  modified_base 11: mod_base = OTHER; note = 2'-O-methylcytidine-3'-phosphate
  modified_base 12: mod_base = OTHER; note = 2'-O-methylcytidine-3'-phosphate
  modified_base 13: mod_base = OTHER; note = 2'-O-methyladenosine-3'-phosphate
  modified_base 14: mod_base = OTHER; note = 2'-fluoroadenosine-3'-phosphate
  modified_base 15: mod_base = OTHER; note = 2'-O-methylguanosine-3'-phosphate
  modified_base 16: mod_base = OTHER; note = 2'-fluoroadenosine-3'-phosphate
  modified_base 17: mod_base = OTHER; note = 2'-O-methyluridine-3'-phosphate
  modified_base 18: mod_base = OTHER; note = 2'-O-methylcytidine-3'-phosphate
  modified_base 19: mod_base = OTHER; note = 2'-O-methylcytidine-3'-phosphate
  modified_base 20: mod_base = OTHER; note = 2'-O-methylcytidine-3'-phosphate
  modified_base 21: mod_base = OTHER; note = 2'-O-methyladenosine-3'-phosphorothioate
  modified_base 22: mod_base = OTHER; note = 2'-O-methyluridine-3'-phosphorothioate
  modified_base 23: mod_base = OTHER; note = 2'-O-methyluridine-3'-phosphate
tgattcgacaccaagatcccatt

SEQ ID NO: 373 - RNA, 23 nt, synthetic construct
  source 1..23: mol_type = other RNA; note = Description of Artificial Sequence: Synthetic oligonucleotide
  modified_base 1: mod_base = OTHER; note = 2'-O-methyluridine-3'-phosphorothioate
  modified_base 2: mod_base = OTHER; note = 2'-fluoroadenosine-3'-phosphorothioate
  modified_base 3: mod_base = OTHER; note = 2'-O-methyladenosine-3'-phosphate
  modified_base 4: mod_base = OTHER; note = 2'-O-methyladenosine-3'-phosphate
  modified_base 5: mod_base = OTHER; note = 2'-O-methyladenosine-3'-phosphate
  modified_base 6: mod_base = OTHER; note = 2'-fluorouridine-3'-phosphate
  modified_base 7: mod_base = OTHER; note = 2'-O-methyladenosine-3'-phosphate
  modified_base 8: mod_base = OTHER; note = 2'-fluorouridine-3'-phosphate
  modified_base 9: mod_base = OTHER; note = 2'-fluorouridine-3'-phosphate
  modified_base 10: mod_base = OTHER; note = 2'-O-methylguanosine-3'-phosphate
  modified_base 11: mod_base = OTHER; note = 2'-O-methyluridine-3'-phosphate
  modified_base 12: mod_base = OTHER; note = 2'-O-methylguanosine-3'-phosphate
  modified_base 13: mod_base = OTHER; note = 2'-O-methylcytidine-3'-phosphate
  modified_base 14: mod_base = OTHER; note = 2'-fluoroadenosine-3'-phosphate
  modified_base 15: mod_base = OTHER; note = 2'-O-methylcytidine-3'-phosphate
  modified_base 16: mod_base = OTHER; note = 2'-fluorouridine-3'-phosphate
  modified_base 17: mod_base = OTHER; note = 2'-O-methylguanosine-3'-phosphate
  modified_base 18: mod_base = OTHER; note = 2'-O-methyluridine-3'-phosphate
  modified_base 19: mod_base = OTHER; note = 2'-O-methylcytidine-3'-phosphate
  modified_base 20: mod_base = OTHER; note = 2'-O-methyladenosine-3'-phosphate
  modified_base 21: mod_base = OTHER; note = 2'-O-methylguanosine-3'-phosphorothioate
  modified_base 22: mod_base = OTHER; note = 2'-O-methyladenosine-3'-phosphorothioate
  modified_base 23: mod_base = OTHER; note = 2'-O-methyluridine-3'-phosphate
taaaatattgtgcactgtcagat

SEQ ID NO: 374 - RNA, 23 nt, synthetic construct
  source 1..23: mol_type = other RNA; note = Description of Artificial Sequence: Synthetic oligonucleotide
  modified_base 1: mod_base = OTHER; note = 2'-O-methyladenosine-3'-phosphorothioate
  modified_base 2: mod_base = OTHER; note = 2'-fluorouridine -3'-phosphorothioate
  modified_base 3: mod_base = OTHER; note = 2'-O-methylguanosine-3'-phosphate
  modified_base 4: mod_base = OTHER; note = 2'-O-methylguanosine-3'-phosphate
  modified_base 5: mod_base = OTHER; note = 2'-O-methylguanosine-3'-phosphate
  modified_base 6: mod_base = OTHER; note = 2'-fluoroadenosine-3'-phosphate
  modified_base 7: mod_base = OTHER; note = 2'-O-methyladenosine-3'-phosphate
  modified_base 8: mod_base = OTHER; note = 2'-fluoroadenosine-3'-phosphate
  modified_base 9: mod_base = OTHER; note = 2'-fluoroadenosine-3'-phosphate
  modified_base 10: mod_base = OTHER; note = 2'-O-methyluridine-3'-phosphate
  modified_base 11: mod_base = OTHER; note = 2'-O-methyladenosine-3'-phosphate
  modified_base 12: mod_base = OTHER; note = 2'-O-methyluridine-3'-phosphate
  modified_base 13: mod_base = OTHER; note = 2'-O-methyluridine-3'-phosphate
  modified_base 14: mod_base = OTHER; note = 2'-fluoroguanosine-3'-phosphate
  modified_base 15: mod_base = OTHER; note = 2'-O-methyluridine-3'-phosphate
  modified_base 16: mod_base = OTHER; note = 2'-fluoroguanosine-3'-phosphate
  modified_base 17: mod_base = OTHER; note = 2'-O-methylcytidine-3'-phosphate
  modified_base 18: mod_base = OTHER; note = 2'-O-methyladenosine-3'-phosphate
  modified_base 19: mod_base = OTHER; note = 2'-O-methylcytidine-3'-phosphate
  modified_base 20: mod_base = OTHER; note = 2'-O-methyluridine-3'-phosphate
  modified_base 21: mod_base = OTHER; note = 2'-O-methylguanosine-3'-phosphorothioate
  modified_base 22: mod_base = OTHER; note = 2'-O-methyluridine-3'-phosphorothioate
  modified_base 23: mod_base = OTHER; note = 2'-O-methylcytidine-3'-phosphate
atgggaaaatattgtgcactgtc

SEQ ID NO: 375 - RNA, 23 nt, synthetic construct
  source 1..23: mol_type = other RNA; note = Description of Artificial Sequence: Synthetic oligonucleotide
  modified_base 1: mod_base = OTHER; note = 2'-O-methyluridine-3'-phosphorothioate
  modified_base 2: mod_base = OTHER; note = 2'-fluorouridine -3'-phosphorothioate
  modified_base 3: mod_base = OTHER; note = 2'-O-methyladenosine-3'-phosphate
  modified_base 4: mod_base = OTHER; note = 2'-O-methylguanosine-3'-phosphate
  modified_base 5: mod_base = OTHER; note = 2'-O-methylguanosine-3'-phosphate
  modified_base 6: mod_base = OTHER; note = 2'-fluoroadenosine-3'-phosphate
  modified_base 7: mod_base = OTHER; note = 2'-O-methylcytidine-3'-phosphate
  modified_base 8: mod_base = OTHER; note = 2'-fluoroadenosine-3'-phosphate
  modified_base 9: mod_base = OTHER; note = 2'-fluorocytidine-3'-phosphate
  modified_base 10: mod_base = OTHER; note = 2'-O-methylcytidine-3'-phosphate
  modified_base 11: mod_base = OTHER; note = 2'-O-methylcytidine-3'-phosphate
  modified_base 12: mod_base = OTHER; note = 2'-O-methyladenosine-3'-phosphate
  modified_base 13: mod_base = OTHER; note = 2'-O-methyluridine-3'-phosphate
  modified_base 14: mod_base = OTHER; note = 2'-fluorouridine-3'-phosphate
  modified_base 15: mod_base = OTHER; note = 2'-O-methylguanosine-3'-phosphate
  modified_base 16: mod_base = OTHER; note = 2'-fluoroadenosine-3'-phosphate
  modified_base 17: mod_base = OTHER; note = 2'-O-methyladenosine-3'-phosphate
  modified_base 18: mod_base = OTHER; note = 2'-O-methyladenosine-3'-phosphate
  modified_base 19: mod_base = OTHER; note = 2'-O-methyladenosine-3'-phosphate
  modified_base 20: mod_base = OTHER; note = 2'-O-methylguanosine-3'-phosphate
  modified_base 21: mod_base = OTHER; note = 2'-O-methyluridine-3'-phosphorothioate
  modified_base 22: mod_base = OTHER; note = 2'-O-methylcytidine-3'-phosphorothioate
  modified_base 23: mod_base = OTHER; note = 2'-O-methyladenosine-3'-phosphate
ttaggacacccattgaaaagtca

SEQ ID NO: 376 - RNA, 23 nt, synthetic construct
  source 1..23: mol_type = other RNA; note = Description of Artificial Sequence: Synthetic oligonucleotide
  modified_base 1: mod_base = OTHER; note = 2'-O-methyladenosine-3'-phosphorothioate
  modified_base 2: mod_base = OTHER; note = 2'-fluoroguanosine-3'-phosphorothioate
  modified_base 3: mod_base = OTHER; note = 2'-O-methylguanosine-3'-phosphate
  modified_base 4: mod_base = OTHER; note = 2'-O-methyladenosine-3'-phosphate
  modified_base 5: mod_base = OTHER; note = 2'-O-methyluridine-3'-phosphate
  modified_base 6: mod_base = OTHER; note = 2'-fluorouridine-3'-phosphate
  modified_base 7: mod_base = OTHER; note = 2'-O-methyluridine-3'-phosphate
  modified_base 8: mod_base = OTHER; note = 2'-fluorouridine-3'-phosphate
  modified_base 9: mod_base = OTHER; note = 2'-fluorouridine-3'-phosphate
  modified_base 10: mod_base = OTHER; note = 2'-O-methylcytidine-3'-phosphate
  modified_base 11: mod_base = OTHER; note = 2'-O-methylcytidine-3'-phosphate
  modified_base 12: mod_base = OTHER; note = 2'-O-methyluridine-3'-phosphate
  modified_base 13: mod_base = OTHER; note = 2'-O-methylcytidine-3'-phosphate
  modified_base 14: mod_base = OTHER; note = 2'-fluoroadenosine-3'-phosphate
  modified_base 15: mod_base = OTHER; note = 2'-O-methylcytidine-3'-phosphate
  modified_base 16: mod_base = OTHER; note = 2'-fluorocytidine-3'-phosphate
  modified_base 17: mod_base = OTHER; note = 2'-O-methyladenosine-3'-phosphate
  modified_base 18: mod_base = OTHER; note = 2'-O-methyladenosine-3'-phosphate
  modified_base 19: mod_base = OTHER; note = 2'-O-methyluridine-3'-phosphate
  modified_base 20: mod_base = OTHER; note = 2'-O-methylguanosine-3'-phosphate
  modified_base 21: mod_base = OTHER; note = 2'-O-methyluridine-3'-phosphorothioate
  modified_base 22: mod_base = OTHER; note = 2'-O-methylcytidine-3'-phosphorothioate
  modified_base 23: mod_base = OTHER; note = 2'-O-methyluridine-3'-phosphate
aggatttttcctcaccaatgtct

SEQ ID NO: 377 - RNA, 23 nt, synthetic construct
  source 1..23: mol_type = other RNA; note = Description of Artificial Sequence: Synthetic oligonucleotide
  modified_base 1: mod_base = OTHER; note = 2'-O-methyluridine-3'-phosphorothioate
  modified_base 2: mod_base = OTHER; note = 2'-fluorocytidine-3'-phosphorothioate
  modified_base 3: mod_base = OTHER; note = 2'-O-methyladenosine-3'-phosphate
  modified_base 4: mod_base = OTHER; note = 2'-O-methyluridine-3'-phosphate
  modified_base 5: mod_base = OTHER; note = 2'-O-methyluridine-3'-phosphate
  modified_base 6: mod_base = OTHER; note = 2'-fluoroguanosine-3'-phosphate
  modified_base 7: mod_base = OTHER; note = 2'-O-methyladenosine-3'-phosphate
  modified_base 8: mod_base = OTHER; note = 2'-fluoroadenosine-3'-phosphate
  modified_base 9: mod_base = OTHER; note = 2'-fluoroadenosine-3'-phosphate
  modified_base 10: mod_base = OTHER; note = 2'-O-methyladenosine-3'-phosphate
  modified_base 11: mod_base = OTHER; note = 2'-O-methylguanosine-3'-phosphate
  modified_base 12: mod_base = OTHER; note = 2'-O-methyluridine-3'-phosphate
  modified_base 13: mod_base = OTHER; note = 2'-O-methylcytidine-3'-phosphate
  modified_base 14: mod_base = OTHER; note = 2'-fluoroadenosine-3'-phosphate
  modified_base 15: mod_base = OTHER; note = 2'-O-methyladenosine-3'-phosphate
  modified_base 16: mod_base = OTHER; note = 2'-fluoroadenosine-3'-phosphate
  modified_base 17: mod_base = OTHER; note = 2'-O-methyladenosine-3'-phosphate
  modified_base 18: mod_base = OTHER; note = 2'-O-methylguanosine-3'-phosphate
  modified_base 19: mod_base = OTHER; note = 2'-O-methylcytidine-3'-phosphate
  modified_base 20: mod_base = OTHER; note = 2'-O-methyladenosine-3'-phosphate
  modified_base 21: mod_base = OTHER; note = 2'-O-methyladenosine-3'-phosphorothioate
  modified_base 22: mod_base = OTHER; note = 2'-O-methyluridine-3'-phosphorothioate
  modified_base 23: mod_base = OTHER; note = 2'-O-methylguanosine-3'-phosphate
tcattgaaaagtcaaaagcaatg

SEQ ID NO: 378 - RNA, 23 nt, synthetic construct
  source 1..23: mol_type = other RNA; note = Description of Artificial Sequence: Synthetic oligonucleotide
  modified_base 1: mod_base = OTHER; note = 2'-O-methyluridine-3'-phosphorothioate
  modified_base 2: mod_base = OTHER; note = 2'-fluorocytidine-3'-phosphorothioate
  modified_base 3: mod_base = OTHER; note = 2'-O-methyladenosine-3'-phosphate
  modified_base 4: mod_base = OTHER; note = 2'-O-methyluridine-3'-phosphate
  modified_base 5: mod_base = OTHER; note = 2'-O-methylcytidine-3'-phosphate
  modified_base 6: mod_base = OTHER; note = 2'-fluoroadenosine-3'-phosphate
  modified_base 7: mod_base = OTHER; note = 2'-O-methyluridine-3'-phosphate
  modified_base 8: mod_base = OTHER; note = 2'-fluorocytidine-3'-phosphate
  modified_base 9: mod_base = OTHER; note = 2'-fluoroadenosine-3'-phosphate
  modified_base 10: mod_base = OTHER; note = 2'-O-methylcytidine-3'-phosphate
  modified_base 11: mod_base = OTHER; note = 2'-O-methylcytidine-3'-phosphate
  modified_base 12: mod_base = OTHER; note = 2'-O-methyluridine-3'-phosphate
  modified_base 13: mod_base = OTHER; note = 2'-O-methylcytidine-3'-phosphate
  modified_base 14: mod_base = OTHER; note = 2'-fluorouridine-3'-phosphate
  modified_base 15: mod_base = OTHER; note = 2'-O-methylcytidine-3'-phosphate
  modified_base 16: mod_base = OTHER; note = 2'-fluoroadenosine-3'-phosphate
  modified_base 17: mod_base = OTHER; note = 2'-O-methyladenosine-3'-phosphate
  modified_base 18: mod_base = OTHER; note = 2'-O-methyladenosine-3'-phosphate
  modified_base 19: mod_base = OTHER; note = 2'-O-methyladenosine-3'-phosphate
  modified_base 20: mod_base = OTHER; note = 2'-O-methyluridine-3'-phosphate
  modified_base 21: mod_base = OTHER; note = 2'-O-methylguanosine-3'-phosphorothioate
  modified_base 22: mod_base = OTHER; note = 2'-O-methylcytidine-3'-phosphorothioate
  modified_base 23: mod_base = OTHER; note = 2'-O-methylcytidine-3'-phosphate
tcatcatcacctctcaaaatgcc

SEQ ID NO: 379 - RNA, 23 nt, synthetic construct
  source 1..23: mol_type = other RNA; note = Description of Artificial Sequence: Synthetic oligonucleotide
  modified_base 1: mod_base = OTHER; note = 2'-O-methyluridine-3'-phosphorothioate
  modified_base 2: mod_base = OTHER; note = 2'-fluoroguanosine-3'-phosphorothioate
  modified_base 3: mod_base = OTHER; note = 2'-O-methyladenosine-3'-phosphate
  modified_base 4: mod_base = OTHER; note = 2'-O-methylcytidine-3'-phosphate
  modified_base 5: mod_base = OTHER; note = 2'-O-methyladenosine-3'-phosphate
  modified_base 6: mod_base = OTHER; note = 2'-fluorocytidine-3'-phosphate
  modified_base 7: mod_base = OTHER; note = 2'-O-methylcytidine-3'-phosphate
  modified_base 8: mod_base = OTHER; note = 2'-fluorocytidine-3'-phosphate
  modified_base 9: mod_base = OTHER; note = 2'-fluoroadenosine-3'-phosphate
  modified_base 10: mod_base = OTHER; note = 2'-O-methyluridine-3'-phosphate
  modified_base 11: mod_base = OTHER; note = 2'-O-methyluridine-3'-phosphate
  modified_base 12: mod_base = OTHER; note = 2'-O-methylguanosine-3'-phosphate
  modified_base 13: mod_base = OTHER; note = 2'-O-methyladenosine-3'-phosphate
  modified_base 14: mod_base = OTHER; note = 2'-fluoroadenosine-3'-phosphate
  modified_base 15: mod_base = OTHER; note = 2'-O-methyladenosine-3'-phosphate
  modified_base 16: mod_base = OTHER; note = 2'-fluoroadenosine-3'-phosphate
  modified_base 17: mod_base = OTHER; note = 2'-O-methylguanosine-3'-phosphate
  modified_base 18: mod_base = OTHER; note = 2'-O-methyluridine-3'-phosphate
  modified_base 19: mod_base = OTHER; note = 2'-O-methylcytidine-3'-phosphate
  modified_base 20: mod_base = OTHER; note = 2'-O-methyladenosine-3'-phosphate
  modified_base 21: mod_base = OTHER; note = 2'-O-methyladenosine-3'-phosphorothioate
  modified_base 22: mod_base = OTHER; note = 2'-O-methyladenosine-3'-phosphorothioate
  modified_base 23: mod_base = OTHER; note = 2'-O-methyladenosine-3'-phosphate
tgacacccattgaaaagtcaaaa

SEQ ID NO: 380 - RNA, 23 nt, synthetic construct
  source 1..23: mol_type = other RNA; note = Description of Artificial Sequence: Synthetic oligonucleotide
  modified_base 1: mod_base = OTHER; note = 2'-O-methyluridine-3'-phosphorothioate
  modified_base 2: mod_base = OTHER; note = 2'-fluorocytidine-3'-phosphorothioate
  modified_base 3: mod_base = OTHER; note = 2'-O-methyluridine-3'-phosphate
  modified_base 4: mod_base = OTHER; note = 2'-O-methylguanosine-3'-phosphate
  modified_base 5: mod_base = OTHER; note = 2'-O-methyluridine-3'-phosphate
  modified_base 6: mod_base = OTHER; note = 2'-fluorocytidine-3'-phosphate
  modified_base 7: mod_base = OTHER; note = 2'-O-methylcytidine-3'-phosphate
  modified_base 8: mod_base = OTHER; note = 2'-fluorouridine-3'-phosphate
  modified_base 9: mod_base = OTHER; note = 2'-fluoroadenosine-3'-phosphate
  modified_base 10: mod_base = OTHER; note = 2'-O-methyladenosine-3'-phosphate
  modified_base 11: mod_base = OTHER; note = 2'-O-methyladenosine-3'-phosphate
  modified_base 12: mod_base = OTHER; note = 2'-O-methyladenosine-3'-phosphate
  modified_base 13: mod_base = OTHER; note = 2'-O-methylcytidine-3'-phosphate
  modified_base 14: mod_base = OTHER; note = 2'-fluoroadenosine-3'-phosphate
  modified_base 15: mod_base = OTHER; note = 2'-O-methylguanosine-3'-phosphate
  modified_base 16: mod_base = OTHER; note = 2'-fluoroadenosine-3'-phosphate
  modified_base 17: mod_base = OTHER; note = 2'-O-methyladenosine-3'-phosphate
  modified_base 18: mod_base = OTHER; note = 2'-O-methylguanosine-3'-phosphate
  modified_base 19: mod_base = OTHER; note = 2'-O-methyluridine-3'-phosphate
  modified_base 20: mod_base = OTHER; note = 2'-O-methylcytidine-3'-phosphate
  modified_base 21: mod_base = OTHER; note = 2'-O-methylguanosine-3'-phosphorothioate
  modified_base 22: mod_base = OTHER; note = 2'-O-methyladenosine-3'-phosphorothioate
  modified_base 23: mod_base = OTHER; note = 2'-O-methylcytidine-3'-phosphate
tctgtcctaaaacagaagtcgac

SEQ ID NO: 381 - RNA, 23 nt, synthetic construct
  source 1..23: mol_type = other RNA; note = Description of Artificial Sequence: Synthetic oligonucleotide
  modified_base 1: mod_base = OTHER; note = 2'-O-methyluridine-3'-phosphorothioate
  modified_base 2: mod_base = OTHER; note = 2'-fluoroadenosine-3'-phosphorothioate
  modified_base 3: mod_base = OTHER; note = 2'-O-methyluridine-3'-phosphate
  modified_base 4: mod_base = OTHER; note = 2'-O-methyluridine-3'-phosphate
  modified_base 5: mod_base = OTHER; note = 2'-O-methylcytidine-3'-phosphate
  modified_base 6: mod_base = OTHER; note = 2'-fluorouridine-3'-phosphate
  modified_base 7: mod_base = OTHER; note = 2'-O-methylguanosine-3'-phosphate
  modified_base 8: mod_base = OTHER; note = 2'-fluoroguanosine-3'-phosphate
  modified_base 9: mod_base = OTHER; note = 2'-fluorocytidine-3'-phosphate
  modified_base 10: mod_base = OTHER; note = 2'-O-methyladenosine-3'-phosphate
  modified_base 11: mod_base = OTHER; note = 2'-O-methylcytidine-3'-phosphate
  modified_base 12: mod_base = OTHER; note = 2'-O-methylcytidine-3'-phosphate
  modified_base 13: mod_base = OTHER; note = 2'-O-methylcytidine-3'-phosphate
  modified_base 14: mod_base = OTHER; note = 2'-fluoroadenosine-3'-phosphate
  modified_base 15: mod_base = OTHER; note = 2'-O-methylcytidine-3'-phosphate
  modified_base 16: mod_base = OTHER; note = 2'-fluorouridine-3'-phosphate
  modified_base 17: mod_base = OTHER; note = 2'-O-methylcytidine-3'-phosphate
  modified_base 18: mod_base = OTHER; note = 2'-O-methyladenosine-3'-phosphate
  modified_base 19: mod_base = OTHER; note = 2'-O-methylguanosine-3'-phosphate
  modified_base 20: mod_base = OTHER; note = 2'-O-methyladenosine-3'-phosphate
  modified_base 21: mod_base = OTHER; note = 2'-O-methylguanosine-3'-phosphorothioate
  modified_base 22: mod_base = OTHER; note = 2'-O-methylcytidine-3'-phosphorothioate
  modified_base 23: mod_base = OTHER; note = 2'-O-methylcytidine-3'-phosphate
tattctggcacccactcagagcc

SEQ ID NO: 382 - RNA, 23 nt, synthetic construct
  source 1..23: mol_type = other RNA; note = Description of Artificial Sequence: Synthetic oligonucleotide
  modified_base 1: mod_base = OTHER; note = 2'-O-methyluridine-3'-phosphorothioate
  modified_base 2: mod_base = OTHER; note = 2'-fluoroadenosine-3'-phosphorothioate
  modified_base 3: mod_base = OTHER; note = 2'-O-methylcytidine-3'-phosphate
  modified_base 4: mod_base = OTHER; note = 2'-O-methyluridine-3'-phosphate
  modified_base 5: mod_base = OTHER; note = 2'-O-methyluridine-3'-phosphate
  modified_base 6: mod_base = OTHER; note = 2'-fluorouridine-3'-phosphate
  modified_base 7: mod_base = OTHER; note = 2'-O-methylcytidine-3'-phosphate
  modified_base 8: mod_base = OTHER; note = 2'-fluoroadenosine-3'-phosphate
  modified_base 9: mod_base = OTHER; note = 2'-fluorocytidine-3'-phosphate
  modified_base 10: mod_base = OTHER; note = 2'-O-methyladenosine-3'-phosphate
  modified_base 11: mod_base = OTHER; note = 2'-O-methyluridine-3'-phosphate
  modified_base 12: mod_base = OTHER; note = 2'-O-methyluridine-3'-phosphate
  modified_base 13: mod_base = OTHER; note = 2'-O-methylcytidine-3'-phosphate
  modified_base 14: mod_base = OTHER; note = 2'-fluorouridine-3'-phosphate
  modified_base 15: mod_base = OTHER; note = 2'-O-methylguanosine-3'-phosphate
  modified_base 16: mod_base = OTHER; note = 2'-fluoroguanosine-3'-phosphate
  modified_base 17: mod_base = OTHER; note = 2'-O-methylcytidine-3'-phosphate
  modified_base 18: mod_base = OTHER; note = 2'-O-methyladenosine-3'-phosphate
  modified_base 19: mod_base = OTHER; note = 2'-O-methylcytidine-3'-phosphate
  modified_base 20: mod_base = OTHER; note = 2'-O-methylcytidine-3'-phosphate
  modified_base 21: mod_base = OTHER; note = 2'-O-methylcytidine-3'-phosphorothioate
  modified_base 22: mod_base = OTHER; note = 2'-O-methyladenosine-3'-phosphorothioate
  modified_base 23: mod_base = OTHER; note = 2'-O-methylcytidine-3'-phosphate
tactttcacattctggcacccac

SEQ ID NO: 383 - RNA, 23 nt, synthetic construct
  source 1..23: mol_type = other RNA; note = Description of Artificial Sequence: Synthetic oligonucleotide
  modified_base 1: mod_base = OTHER; note = 2'-O-methyluridine-3'-phosphorothioate
  modified_base 2: mod_base = OTHER; note = 2'-fluoroguanosine-3'-phosphorothioate
  modified_base 3: mod_base = OTHER; note = 2'-O-methyluridine-3'-phosphate
  modified_base 4: mod_base = OTHER; note = 2'-O-methyluridine-3'-phosphate
  modified_base 5: mod_base = OTHER; note = 2'-O-methylcytidine-3'-phosphate
  modified_base 6: mod_base = OTHER; note = 2'-fluorocytidine-3'-phosphate
  modified_base 7: mod_base = OTHER; note = 2'-O-methyluridine-3'-phosphate
  modified_base 8: mod_base = OTHER; note = 2'-fluoroadenosine-3'-phosphate
  modified_base 9: mod_base = OTHER; note = 2'-fluoroguanosine-3'-phosphate
  modified_base 10: mod_base = OTHER; note = 2'-O-methylguanosine-3'-phosphate
  modified_base 11: mod_base = OTHER; note = 2'-O-methyladenosine-3'-phosphate
  modified_base 12: mod_base = OTHER; note = 2'-O-methylcytidine-3'-phosphate
  modified_base 13: mod_base = OTHER; note = 2'-O-methyladenosine-3'-phosphate
  modified_base 14: mod_base = OTHER; note = 2'-fluorocytidine-3'-phosphate
  modified_base 15: mod_base = OTHER; note = 2'-O-methylcytidine-3'-phosphate
  modified_base 16: mod_base = OTHER; note = 2'-fluorocytidine-3'-phosphate
  modified_base 17: mod_base = OTHER; note = 2'-O-methyladenosine-3'-phosphate
  modified_base 18: mod_base = OTHER; note = 2'-O-methyluridine-3'-phosphate
  modified_base 19: mod_base = OTHER; note = 2'-O-methyluridine-3'-phosphate
  modified_base 20: mod_base = OTHER; note = 2'-O-methylguanosine-3'-phosphate
  modified_base 21: mod_base = OTHER; note = 2'-O-methyladenosine-3'-phosphorothioate
  modified_base 22: mod_base = OTHER; note = 2'-O-methyladenosine-3'-phosphorothioate
  modified_base 23: mod_base = OTHER; note = 2'-O-methyladenosine-3'-phosphate
tgttcctaggacacccattgaaa

SEQ ID NO: 384 - RNA, 23 nt, synthetic construct
  source 1..23: mol_type = other RNA; note = Description of Artificial Sequence: Synthetic oligonucleotide
  modified_base 1: mod_base = OTHER; note = 2'-O-methyluridine-3'-phosphorothioate
  modified_base 2: mod_base = OTHER; note = 2'-fluoroadenosine-3'-phosphorothioate
  modified_base 3: mod_base = OTHER; note = 2'-O-methyladenosine-3'-phosphate
  modified_base 4: mod_base = OTHER; note = 2'-O-methyluridine-3'-phosphate
  modified_base 5: mod_base = OTHER; note = 2'-O-methylguanosine-3'-phosphate
  modified_base 6: mod_base = OTHER; note = 2'-fluorouridine-3'-phosphate
  modified_base 7: mod_base = OTHER; note = 2'-O-methylcytidine-3'-phosphate
  modified_base 8: mod_base = OTHER; note = 2'-fluorouridine-3'-phosphate
  modified_base 9: mod_base = OTHER; note = 2'-fluorouridine-3'-phosphate
  modified_base 10: mod_base = OTHER; note = 2'-O-methylguanosine-3'-phosphate
  modified_base 11: mod_base = OTHER; note = 2'-O-methyluridine-3'-phosphate
  modified_base 12: mod_base = OTHER; note = 2'-O-methylcytidine-3'-phosphate
  modified_base 13: mod_base = OTHER; note = 2'-O-methylguanosine-3'-phosphate
  modified_base 14: mod_base = OTHER; note = 2'-fluoroadenosine-3'-phosphate
  modified_base 15: mod_base = OTHER; note = 2'-O-methyluridine-3'-phosphate
  modified_base 16: mod_base = OTHER; note = 2'-fluoroguanosine-3'-phosphate
  modified_base 17: mod_base = OTHER; note = 2'-O-methyladenosine-3'-phosphate
  modified_base 18: mod_base = OTHER; note = 2'-O-methylcytidine-3'-phosphate
  modified_base 19: mod_base = OTHER; note = 2'-O-methyluridine-3'-phosphate
  modified_base 20: mod_base = OTHER; note = 2'-O-methyluridine-3'-phosphate
  modified_base 21: mod_base = OTHER; note = 2'-O-methyluridine-3'-phosphorothioate
  modified_base 22: mod_base = OTHER; note = 2'-O-methylcytidine-3'-phosphorothioate
  modified_base 23: mod_base = OTHER; note = 2'-O-methyladenosine-3'-phosphate
taatgtcttgtcgatgactttca

SEQ ID NO: 385 - RNA, 23 nt, synthetic construct
  source 1..23: mol_type = other RNA; note = Description of Artificial Sequence: Synthetic oligonucleotide
  modified_base 1: mod_base = OTHER; note = 2'-O-methyluridine-3'-phosphorothioate
  modified_base 2: mod_base = OTHER; note = 2'-fluoroguanosine-3'-phosphorothioate
  modified_base 3: mod_base = OTHER; note = 2'-O-methylcytidine-3'-phosphate
  modified_base 4: mod_base = OTHER; note = 2'-O-methyladenosine-3'-phosphate
  modified_base 5: mod_base = OTHER; note = 2'-O-methyluridine-3'-phosphate
  modified_base 6: mod_base = OTHER; note = 2'-fluorocytidine-3'-phosphate
  modified_base 7: mod_base = OTHER; note = 2'-O-methyladenosine-3'-phosphate
  modified_base 8: mod_base = OTHER; note = 2'-fluorouridine-3'-phosphate
  modified_base 9: mod_base = OTHER; note = 2'-fluorocytidine-3'-phosphate
  modified_base 10: mod_base = OTHER; note = 2'-O-methyladenosine-3'-phosphate
  modified_base 11: mod_base = OTHER; note = 2'-O-methylcytidine-3'-phosphate
  modified_base 12: mod_base = OTHER; note = 2'-O-methylcytidine-3'-phosphate
  modified_base 13: mod_base = OTHER; note = 2'-O-methyluridine-3'-phosphate
  modified_base 14: mod_base = OTHER; note = 2'-fluorocytidine-3'-phosphate
  modified_base 15: mod_base = OTHER; note = 2'-O-methyluridine-3'-phosphate
  modified_base 16: mod_base = OTHER; note = 2'-fluorocytidine-3'-phosphate
  modified_base 17: mod_base = OTHER; note = 2'-O-methyladenosine-3'-phosphate
  modified_base 18: mod_base = OTHER; note = 2'-O-methyladenosine-3'-phosphate
  modified_base 19: mod_base = OTHER; note = 2'-O-methyladenosine-3'-phosphate
  modified_base 20: mod_base = OTHER; note = 2'-O-methyladenosine-3'-phosphate
  modified_base 21: mod_base = OTHER; note = 2'-O-methyluridine-3'-phosphorothioate
  modified_base 22: mod_base = OTHER; note = 2'-O-methylguanosine-3'-phosphorothioate
  modified_base 23: mod_base = OTHER; note = 2'-O-methylcytidine-3'-phosphate
tgcatcatcacctctcaaaatgc

SEQ ID NO: 386 - RNA, 23 nt, synthetic construct
  source 1..23: mol_type = other RNA; note = Description of Artificial Sequence: Synthetic oligonucleotide
  modified_base 1: mod_base = OTHER; note = 2'-O-methyluridine-3'-phosphorothioate
  modified_base 2: mod_base = OTHER; note = 2'-fluorocytidine-3'-phosphorothioate
  modified_base 3: mod_base = OTHER; note = 2'-O-methyluridine-3'-phosphate
  modified_base 4: mod_base = OTHER; note = 2'-O-methylcytidine-3'-phosphate
  modified_base 5: mod_base = OTHER; note = 2'-O-methyladenosine-3'-phosphate
  modified_base 6: mod_base = OTHER; note = 2'-fluorocytidine-3'-phosphate
  modified_base 7: mod_base = OTHER; note = 2'-O-methylcytidine-3'-phosphate
  modified_base 8: mod_base = OTHER; note = 2'-fluoroadenosine-3'-phosphate
  modified_base 9: mod_base = OTHER; note = 2'-fluoroadenosine-3'-phosphate
  modified_base 10: mod_base = OTHER; note = 2'-O-methyluridine-3'-phosphate
  modified_base 11: mod_base = OTHER; note = 2'-O-methylguanosine-3'-phosphate
  modified_base 12: mod_base = OTHER; note = 2'-O-methyluridine-3'-phosphate
  modified_base 13: mod_base = OTHER; note = 2'-O-methylcytidine-3'-phosphate
  modified_base 14: mod_base = OTHER; note = 2'-fluorouridine-3'-phosphate
  modified_base 15: mod_base = OTHER; note = 2'-O-methyluridine-3'-phosphate
  modified_base 16: mod_base = OTHER; note = 2'-fluoroguanosine-3'-phosphate
  modified_base 17: mod_base = OTHER; note = 2'-O-methyluridine-3'-phosphate
  modified_base 18: mod_base = OTHER; note = 2'-O-methylcytidine-3'-phosphate
  modified_base 19: mod_base = OTHER; note = 2'-O-methylguanosine-3'-phosphate
  modified_base 20: mod_base = OTHER; note = 2'-O-methyladenosine-3'-phosphate
  modified_base 21: mod_base = OTHER; note = 2'-O-methyluridine-3'-phosphorothioate
  modified_base 22: mod_base = OTHER; note = 2'-O-methylguanosine-3'-phosphorothioate
  modified_base 23: mod_base = OTHER; note = 2'-O-methyladenosine-3'-phosphate
tctcaccaatgtcttgtcgatga

SEQ ID NO: 387 - RNA, 23 nt, synthetic construct
  source 1..23: mol_type = other RNA; note = Description of Artificial Sequence: Synthetic oligonucleotide
  modified_base 1: mod_base = OTHER; note = 2'-O-methyluridine-3'-phosphorothioate
  modified_base 2: mod_base = OTHER; note = 2'-fluoroguanosine-3'-phosphorothioate
  modified_base 3: mod_base = OTHER; note = 2'-O-methyladenosine-3'-phosphate
  modified_base 4: mod_base = OTHER; note = 2'-O-methylcytidine-3'-phosphate
  modified_base 5: mod_base = OTHER; note = 2'-O-methyluridine-3'-phosphate
  modified_base 6: mod_base = OTHER; note = 2'-fluorouridine-3'-phosphate
  modified_base 7: mod_base = OTHER; note = 2'-O-methyluridine-3'-phosphate
  modified_base 8: mod_base = OTHER; note = 2'-fluorocytidine-3'-phosphate
  modified_base 9: mod_base = OTHER; note = 2'-fluoroadenosine-3'-phosphate
  modified_base 10: mod_base = OTHER; note = 2'-O-methylcytidine-3'-phosphate
  modified_base 11: mod_base = OTHER; note = 2'-O-methyladenosine-3'-phosphate
  modified_base 12: mod_base = OTHER; note = 2'-O-methyluridine-3'-phosphate
  modified_base 13: mod_base = OTHER; note = 2'-O-methyluridine-3'-phosphate
  modified_base 14: mod_base = OTHER; note = 2'-fluorocytidine-3'-phosphate
  modified_base 15: mod_base = OTHER; note = 2'-O-methyluridine-3'-phosphate
  modified_base 16: mod_base = OTHER; note = 2'-fluoroguanosine-3'-phosphate
  modified_base 17: mod_base = OTHER; note = 2'-O-methylguanosine-3'-phosphate
  modified_base 18: mod_base = OTHER; note = 2'-O-methylcytidine-3'-phosphate
  modified_base 19: mod_base = OTHER; note = 2'-O-methyladenosine-3'-phosphate
  modified_base 20: mod_base = OTHER; note = 2'-O-methylcytidine-3'-phosphate
  modified_base 21: mod_base = OTHER; note = 2'-O-methylcytidine-3'-phosphorothioate
  modified_base 22: mod_base = OTHER; note = 2'-O-methylcytidine-3'-phosphorothioate
  modified_base 23: mod_base = OTHER; note = 2'-O-methyladenosine-3'-phosphate
tgactttcacattctggcaccca

SEQ ID NO: 388 - RNA, 23 nt, synthetic construct
  source 1..23: mol_type = other RNA; note = Description of Artificial Sequence: Synthetic oligonucleotide
  modified_base 1: mod_base = OTHER; note = 2'-O-methyluridine-3'-phosphorothioate
  modified_base 2: mod_base = OTHER; note = 2'-fluoroguanosine-3'-phosphorothioate
  modified_base 3: mod_base = OTHER; note = 2'-O-methylguanosine-3'-phosphate
  modified_base 4: mod_base = OTHER; note = 2'-O-methyladenosine-3'-phosphate
  modified_base 5: mod_base = OTHER; note = 2'-O-methyladenosine-3'-phosphate
  modified_base 6: mod_base = OTHER; note = 2'-fluoroadenosine-3'-phosphate
  modified_base 7: mod_base = OTHER; note = 2'-O-methyladenosine-3'-phosphate
  modified_base 8: mod_base = OTHER; note = 2'-fluorouridine-3'-phosphate
  modified_base 9: mod_base = OTHER; note = 2'-fluoroadenosine-3'-phosphate
  modified_base 10: mod_base = OTHER; note = 2'-O-methyluridine-3'-phosphate
  modified_base 11: mod_base = OTHER; note = 2'-O-methyluridine-3'-phosphate
  modified_base 12: mod_base = OTHER; note = 2'-O-methylguanosine-3'-phosphate
  modified_base 13: mod_base = OTHER; note = 2'-O-methyluridine-3'-phosphate
  modified_base 14: mod_base = OTHER; note = 2'-fluoroguanosine-3'-phosphate
  modified_base 15: mod_base = OTHER; note = 2'-O-methylcytidine-3'-phosphate
  modified_base 16: mod_base = OTHER; note = 2'-fluoroadenosine-3'-phosphate
  modified_base 17: mod_base = OTHER; note = 2'-O-methylcytidine-3'-phosphate
  modified_base 18: mod_base = OTHER; note = 2'-O-methyluridine-3'-phosphate
  modified_base 19: mod_base = OTHER; note = 2'-O-methylguanosine-3'-phosphate
  modified_base 20: mod_base = OTHER; note = 2'-O-methyluridine-3'-phosphate
  modified_base 21: mod_base = OTHER; note = 2'-O-methylcytidine-3'-phosphorothioate
  modified_base 22: mod_base = OTHER; note = 2'-O-methyladenosine-3'-phosphorothioate
  modified_base 23: mod_base = OTHER; note = 2'-O-methylguanosine-3'-phosphate
tggaaaatattgtgcactgtcag

SEQ ID NO: 389 - RNA, 23 nt, synthetic construct
  source 1..23: mol_type = other RNA; note = Description of Artificial Sequence: Synthetic oligonucleotide
  modified_base 1: mod_base = OTHER; note = 2'-O-methyluridine-3'-phosphorothioate
  modified_base 2: mod_base = OTHER; note = 2'-fluorouridine -3'-phosphorothioate
  modified_base 3: mod_base = OTHER; note = 2'-O-methylcytidine-3'-phosphate
  modified_base 4: mod_base = OTHER; note = 2'-O-methyluridine-3'-phosphate
  modified_base 5: mod_base = OTHER; note = 2'-O-methylguanosine-3'-phosphate
  modified_base 6: mod_base = OTHER; note = 2'-fluorocytidine-3'-phosphate
  modified_base 7: mod_base = OTHER; note = 2'-O-methyladenosine-3'-phosphate
  modified_base 8: mod_base = OTHER; note = 2'-fluorocytidine-3'-phosphate
  modified_base 9: mod_base = OTHER; note = 2'-fluoroadenosine-3'-phosphate
  modified_base 10: mod_base = OTHER; note = 2'-O-methylguanosine-3'-phosphate
  modified_base 11: mod_base = OTHER; note = 2'-O-methyluridine-3'-phosphate
  modified_base 12: mod_base = OTHER; note = 2'-O-methylguanosine-3'-phosphate
  modified_base 13: mod_base = OTHER; note = 2'-O-methyluridine-3'-phosphate
  modified_base 14: mod_base = OTHER; note = 2'-fluorocytidine-3'-phosphate
  modified_base 15: mod_base = OTHER; note = 2'-O-methyluridine-3'-phosphate
  modified_base 16: mod_base = OTHER; note = 2'-fluorocytidine-3'-phosphate
  modified_base 17: mod_base = OTHER; note = 2'-O-methyluridine-3'-phosphate
  modified_base 18: mod_base = OTHER; note = 2'-O-methyluridine-3'-phosphate
  modified_base 19: mod_base = OTHER; note = 2'-O-methyluridine-3'-phosphate
  modified_base 20: mod_base = OTHER; note = 2'-O-methylguanosine-3'-phosphate
  modified_base 21: mod_base = OTHER; note = 2'-O-methyluridine-3'-phosphorothioate
  modified_base 22: mod_base = OTHER; note = 2'-O-methylcytidine-3'-phosphorothioate
  modified_base 23: mod_base = OTHER; note = 2'-O-methyladenosine-3'-phosphate
ttctgcacagtgtctctttgtca

SEQ ID NO: 390 - RNA, 23 nt, synthetic construct
  source 1..23: mol_type = other RNA; note = Description of Artificial Sequence: Synthetic oligonucleotide
  modified_base 1: mod_base = OTHER; note = 2'-O-methyluridine-3'-phosphorothioate
  modified_base 2: mod_base = OTHER; note = 2'-fluorocytidine-3'-phosphorothioate
  modified_base 3: mod_base = OTHER; note = 2'-O-methylcytidine-3'-phosphate
  modified_base 4: mod_base = OTHER; note = 2'-O-methyluridine-3'-phosphate
  modified_base 5: mod_base = OTHER; note = 2'-O-methyladenosine-3'-phosphate
  modified_base 6: mod_base = OTHER; note = 2'-fluoroguanosine-3'-phosphate
  modified_base 7: mod_base = OTHER; note = 2'-O-methylguanosine-3'-phosphate
  modified_base 8: mod_base = OTHER; note = 2'-fluoroadenosine-3'-phosphate
  modified_base 9: mod_base = OTHER; note = 2'-fluorocytidine-3'-phosphate
  modified_base 10: mod_base = OTHER; note = 2'-O-methyladenosine-3'-phosphate
  modified_base 11: mod_base = OTHER; note = 2'-O-methylcytidine-3'-phosphate
  modified_base 12: mod_base = OTHER; note = 2'-O-methylcytidine-3'-phosphate
  modified_base 13: mod_base = OTHER; note = 2'-O-methylcytidine-3'-phosphate
  modified_base 14: mod_base = OTHER; note = 2'-fluoroadenosine-3'-phosphate
  modified_base 15: mod_base = OTHER; note = 2'-O-methyluridine-3'-phosphate
  modified_base 16: mod_base = OTHER; note = 2'-fluorouridine-3'-phosphate
  modified_base 17: mod_base = OTHER; note = 2'-O-methylguanosine-3'-phosphate
  modified_base 18: mod_base = OTHER; note = 2'-O-methyladenosine-3'-phosphate
  modified_base 19: mod_base = OTHER; note = 2'-O-methyladenosine-3'-phosphate
  modified_base 20: mod_base = OTHER; note = 2'-O-methyladenosine-3'-phosphate
  modified_base 21: mod_base = OTHER; note = 2'-O-methyladenosine-3'-phosphorothioate
  modified_base 22: mod_base = OTHER; note = 2'-O-methylguanosine-3'-phosphorothioate
  modified_base 23: mod_base = OTHER; note = 2'-O-methyluridine-3'-phosphate
tcctaggacacccattgaaaagt

SEQ ID NO: 391 - RNA, 23 nt, synthetic construct
  source 1..23: mol_type = other RNA; note = Description of Artificial Sequence: Synthetic oligonucleotide
  modified_base 1: mod_base = OTHER; note = 2'-O-methyladenosine-3'-phosphorothioate
  modified_base 2: mod_base = OTHER; note = 2'-fluorocytidine-3'-phosphorothioate
  modified_base 3: mod_base = OTHER; note = 2'-O-methyluridine-3'-phosphate
  modified_base 4: mod_base = OTHER; note = 2'-O-methylguanosine-3'-phosphate
  modified_base 5: mod_base = OTHER; note = 2'-O-methyluridine-3'-phosphate
  modified_base 6: mod_base = OTHER; note = 2'-fluorocytidine-3'-phosphate
  modified_base 7: mod_base = OTHER; note = 2'-O-methyladenosine-3'-phosphate
  modified_base 8: mod_base = OTHER; note = 2'-fluoroguanosine-3'-phosphate
  modified_base 9: mod_base = OTHER; note = 2'-fluoroadenosine-3'-phosphate
  modified_base 10: mod_base = OTHER; note = 2'-O-methyluridine-3'-phosphate
  modified_base 11: mod_base = OTHER; note = 2'-O-methylcytidine-3'-phosphate
  modified_base 12: mod_base = OTHER; note = 2'-O-methyluridine-3'-phosphate
  modified_base 13: mod_base = OTHER; note = 2'-O-methyluridine-3'-phosphate
  modified_base 14: mod_base = OTHER; note = 2'-fluoroguanosine-3'-phosphate
  modified_base 15: mod_base = OTHER; note = 2'-O-methylguanosine-3'-phosphate
  modified_base 16: mod_base = OTHER; note = 2'-fluoroadenosine-3'-phosphate
  modified_base 17: mod_base = OTHER; note = 2'-O-methyladenosine-3'-phosphate
  modified_base 18: mod_base = OTHER; note = 2'-O-methyladenosine-3'-phosphate
  modified_base 19: mod_base = OTHER; note = 2'-O-methylcytidine-3'-phosphate
  modified_base 20: mod_base = OTHER; note = 2'-O-methylguanosine-3'-phosphate
  modified_base 21: mod_base = OTHER; note = 2'-O-methylguanosine-3'-phosphorothioate
  modified_base 22: mod_base = OTHER; note = 2'-O-methylcytidine-3'-phosphorothioate
  modified_base 23: mod_base = OTHER; note = 2'-O-methylcytidine-3'-phosphate
actgtcagatcttggaaacggcc

SEQ ID NO: 392 - RNA, 23 nt, synthetic construct
  source 1..23: mol_type = other RNA; note = Description of Artificial Sequence: Synthetic oligonucleotide
  modified_base 1: mod_base = OTHER; note = 2'-O-methyluridine-3'-phosphorothioate
  modified_base 2: mod_base = OTHER; note = 2'-fluorouridine -3'-phosphorothioate
  modified_base 3: mod_base = OTHER; note = 2'-O-methyluridine-3'-phosphate
  modified_base 4: mod_base = OTHER; note = 2'-O-methylguanosine-3'-phosphate
  modified_base 5: mod_base = OTHER; note = 2'-O-methyladenosine-3'-phosphate
  modified_base 6: mod_base = OTHER; note = 2'-fluoroadenosine-3'-phosphate
  modified_base 7: mod_base = OTHER; note = 2'-O-methylcytidine-3'-phosphate
  modified_base 8: mod_base = OTHER; note = 2'-fluoroadenosine-3'-phosphate
  modified_base 9: mod_base = OTHER; note = 2'-fluorocytidine-3'-phosphate
  modified_base 10: mod_base = OTHER; note = 2'-O-methylcytidine-3'-phosphate
  modified_base 11: mod_base = OTHER; note = 2'-O-methyluridine-3'-phosphate
  modified_base 12: mod_base = OTHER; note = 2'-O-methyluridine-3'-phosphate
  modified_base 13: mod_base = OTHER; note = 2'-O-methyluridine-3'-phosphate
  modified_base 14: mod_base = OTHER; note = 2'-fluorocytidine-3'-phosphate
  modified_base 15: mod_base = OTHER; note = 2'-O-methyluridine-3'-phosphate
  modified_base 16: mod_base = OTHER; note = 2'-fluorocytidine-3'-phosphate
  modified_base 17: mod_base = OTHER; note = 2'-O-methylcytidine-3'-phosphate
  modified_base 18: mod_base = OTHER; note = 2'-O-methylcytidine-3'-phosphate
  modified_base 19: mod_base = OTHER; note = 2'-O-methylcytidine-3'-phosphate
  modified_base 20: mod_base = OTHER; note = 2'-O-methylcytidine-3'-phosphate
  modified_base 21: mod_base = OTHER; note = 2'-O-methyluridine-3'-phosphorothioate
  modified_base 22: mod_base = OTHER; note = 2'-O-methylguanosine-3'-phosphorothioate
  modified_base 23: mod_base = OTHER; note = 2'-O-methylguanosine-3'-phosphate
tttgaacacctttctccccctgg

SEQ ID NO: 393 - RNA, 23 nt, synthetic construct
  source 1..23: mol_type = other RNA; note = Description of Artificial Sequence: Synthetic oligonucleotide
  modified_base 1: mod_base = OTHER; note = 2'-O-methyladenosine-3'-phosphorothioate
  modified_base 2: mod_base = OTHER; note = 2'-fluorocytidine-3'-phosphorothioate
  modified_base 3: mod_base = OTHER; note = 2'-O-methylcytidine-3'-phosphate
  modified_base 4: mod_base = OTHER; note = 2'-O-methyladenosine-3'-phosphate
  modified_base 5: mod_base = OTHER; note = 2'-O-methyladenosine-3'-phosphate
  modified_base 6: mod_base = OTHER; note = 2'-fluorouridine-3'-phosphate
  modified_base 7: mod_base = OTHER; note = 2'-O-methylguanosine-3'-phosphate
  modified_base 8: mod_base = OTHER; note = 2'-fluorouridine-3'-phosphate
  modified_base 9: mod_base = OTHER; note = 2'-fluorocytidine-3'-phosphate
  modified_base 10: mod_base = OTHER; note = 2'-O-methyluridine-3'-phosphate
  modified_base 11: mod_base = OTHER; note = 2'-O-methyluridine-3'-phosphate
  modified_base 12: mod_base = OTHER; note = 2'-O-methylguanosine-3'-phosphate
  modified_base 13: mod_base = OTHER; note = 2'-O-methyluridine-3'-phosphate
  modified_base 14: mod_base = OTHER; note = 2'-fluorocytidine-3'-phosphate
  modified_base 15: mod_base = OTHER; note = 2'-O-methylguanosine-3'-phosphate
  modified_base 16: mod_base = OTHER; note = 2'-fluoroadenosine-3'-phosphate
  modified_base 17: mod_base = OTHER; note = 2'-O-methyluridine-3'-phosphate
  modified_base 18: mod_base = OTHER; note = 2'-O-methylguanosine-3'-phosphate
  modified_base 19: mod_base = OTHER; note = 2'-O-methyladenosine-3'-phosphate
  modified_base 20: mod_base = OTHER; note = 2'-O-methylcytidine-3'-phosphate
  modified_base 21: mod_base = OTHER; note = 2'-O-methyluridine-3'-phosphorothioate
  modified_base 22: mod_base = OTHER; note = 2'-O-methyluridine-3'-phosphorothioate
  modified_base 23: mod_base = OTHER; note = 2'-O-methyluridine-3'-phosphate
accaatgtcttgtcgatgacttt

SEQ ID NO: 394 - RNA, 21 nt, synthetic construct
  source 1..21: mol_type = other RNA; note = Description of Artificial Sequence: Synthetic oligonucleotide
gaatgtgaaagtcatcgacaa

SEQ ID NO: 395 - RNA, 21 nt, synthetic construct
  source 1..21: mol_type = other RNA; note = Description of Artificial Sequence: Synthetic oligonucleotide
ttttcaatgggtgtcctagga

SEQ ID NO: 396 - RNA, 21 nt, synthetic construct
  source 1..21: mol_type = other RNA; note = Description of Artificial Sequence: Synthetic oligonucleotide
gaaagtcatcgacaagacatt

SEQ ID NO: 397 - RNA, 21 nt, synthetic construct
  source 1..21: mol_type = other RNA; note = Description of Artificial Sequence: Synthetic oligonucleotide
tcatcgacaagacattggtga

SEQ ID NO: 398 - RNA, 21 nt, synthetic construct
  source 1..21: mol_type = other RNA; note = Description of Artificial Sequence: Synthetic oligonucleotide
tttcaatgggtgtcctaggaa

SEQ ID NO: 399 - RNA, 21 nt, synthetic construct
  source 1..21: mol_type = other RNA; note = Description of Artificial Sequence: Synthetic oligonucleotide
aatgggtgtcctaggaacctt

SEQ ID NO: 400 - RNA, 21 nt, synthetic construct
  source 1..21: mol_type = other RNA; note = Description of Artificial Sequence: Synthetic oligonucleotide
gacagtgcacaatattttcca

SEQ ID NO: 401 - RNA, 21 nt, synthetic construct
  source 1..21: mol_type = other RNA; note = Description of Artificial Sequence: Synthetic oligonucleotide
acttttcaatgggtgtcctaa

SEQ ID NO: 402 - RNA, 21 nt, synthetic construct
  source 1..21: mol_type = other RNA; note = Description of Artificial Sequence: Synthetic oligonucleotide
aagtcatcgacaagacattga

SEQ ID NO: 403 - RNA, 21 nt, synthetic construct
  source 1..21: mol_type = other RNA; note = Description of Artificial Sequence: Synthetic oligonucleotide
atcgacaagacattggtgaga

SEQ ID NO: 404 - RNA, 21 nt, synthetic construct
  source 1..21: mol_type = other RNA; note = Description of Artificial Sequence: Synthetic oligonucleotide
gggagaaaggtgttcaagata

SEQ ID NO: 405 - RNA, 21 nt, synthetic construct
  source 1..21: mol_type = other RNA; note = Description of Artificial Sequence: Synthetic oligonucleotide
cttttcaatgggtgtcctaga

SEQ ID NO: 406 - RNA, 21 nt, synthetic construct
  source 1..21: mol_type = other RNA; note = Description of Artificial Sequence: Synthetic oligonucleotide
tcaatgggtgtcctaggaaca

SEQ ID NO: 407 - RNA, 21 nt, synthetic construct
  source 1..21: mol_type = other RNA; note = Description of Artificial Sequence: Synthetic oligonucleotide
ttgacttttcaatgggtgtca

SEQ ID NO: 408 - RNA, 21 nt, synthetic construct
  source 1..21: mol_type = other RNA; note = Description of Artificial Sequence: Synthetic oligonucleotide
aaagtcatcgacaagacatta

SEQ ID NO: 409 - RNA, 21 nt, synthetic construct
  source 1..21: mol_type = other RNA; note = Description of Artificial Sequence: Synthetic oligonucleotide
cagggggagaaaggtgttcaa

SEQ ID NO: 410 - RNA, 21 nt, synthetic construct
  source 1..21: mol_type = other RNA; note = Description of Artificial Sequence: Synthetic oligonucleotide
cattggtgaggaaaaatcctt

SEQ ID NO: 411 - RNA, 21 nt, synthetic construct
  source 1..21: mol_type = other RNA; note = Description of Artificial Sequence: Synthetic oligonucleotide
acattggtgaggaaaaatcct

SEQ ID NO: 412 - RNA, 21 nt, synthetic construct
  source 1..21: mol_type = other RNA; note = Description of Artificial Sequence: Synthetic oligonucleotide
agggggagaaaggtgttcaaa

SEQ ID NO: 413 - RNA, 21 nt, synthetic construct
  source 1..21: mol_type = other RNA; note = Description of Artificial Sequence: Synthetic oligonucleotide
ctcaggatgaaaaattttgaa

SEQ ID NO: 414 - RNA, 21 nt, synthetic construct
  source 1..21: mol_type = other RNA; note = Description of Artificial Sequence: Synthetic oligonucleotide
cagcatgtattacttgacaaa

SEQ ID NO: 415 - RNA, 21 nt, synthetic construct
  source 1..21: mol_type = other RNA; note = Description of Artificial Sequence: Synthetic oligonucleotide
tatgaacaacatgctaaatca

SEQ ID NO: 416 - RNA, 21 nt, synthetic construct
  source 1..21: mol_type = other RNA; note = Description of Artificial Sequence: Synthetic oligonucleotide
atatatccaaatgttttagga

SEQ ID NO: 417 - RNA, 21 nt, synthetic construct
  source 1..21: mol_type = other RNA; note = Description of Artificial Sequence: Synthetic oligonucleotide
ccagatggaagctgtatccaa

SEQ ID NO: 418 - RNA, 21 nt, synthetic construct
  source 1..21: mol_type = other RNA; note = Description of Artificial Sequence: Synthetic oligonucleotide
gactttcatcctggaaatata

SEQ ID NO: 419 - RNA, 21 nt, synthetic construct
  source 1..21: mol_type = other RNA; note = Description of Artificial Sequence: Synthetic oligonucleotide
ccccggctaatttgtatcaat

SEQ ID NO: 420 - RNA, 21 nt, synthetic construct
  source 1..21: mol_type = other RNA; note = Description of Artificial Sequence: Synthetic oligonucleotide
ttaaacatggcttgaatggga

SEQ ID NO: 421 - RNA, 21 nt, synthetic construct
  source 1..21: mol_type = other RNA; note = Description of Artificial Sequence: Synthetic oligonucleotide
aatgtgtttagacaacgtcat

SEQ ID NO: 422 - RNA, 21 nt, synthetic construct
  source 1..21: mol_type = other RNA; note = Description of Artificial Sequence: Synthetic oligonucleotide
actaaaggaagaattccggtt

SEQ ID NO: 423 - RNA, 21 nt, synthetic construct
  source 1..21: mol_type = other RNA; note = Description of Artificial Sequence: Synthetic oligonucleotide
tatatccaaatgttttaggat

SEQ ID NO: 424 - RNA, 21 nt, synthetic construct
  source 1..21: mol_type = other RNA; note = Description of Artificial Sequence: Synthetic oligonucleotide
gtgcggaaaggcactgatgtt

SEQ ID NO: 425 - RNA, 21 nt, synthetic construct
  source 1..21: mol_type = other RNA; note = Description of Artificial Sequence: Synthetic oligonucleotide
taaaacagtggttcttaaatt

SEQ ID NO: 426 - RNA, 21 nt, synthetic construct
  source 1..21: mol_type = other RNA; note = Description of Artificial Sequence: Synthetic oligonucleotide
atgaaaaattttgaaaccagt

SEQ ID NO: 427 - RNA, 21 nt, synthetic construct
  source 1..21: mol_type = other RNA; note = Description of Artificial Sequence: Synthetic oligonucleotide
aacaaaatagcaatccctttt

SEQ ID NO: 428 - RNA, 21 nt, synthetic construct
  source 1..21: mol_type = other RNA; note = Description of Artificial Sequence: Synthetic oligonucleotide
ctgaaacagatctgtcgactt

SEQ ID NO: 429 - RNA, 21 nt, synthetic construct
  source 1..21: mol_type = other RNA; note = Description of Artificial Sequence: Synthetic oligonucleotide
ttgttgcaaagggcattttga

SEQ ID NO: 430 - RNA, 21 nt, synthetic construct
  source 1..21: mol_type = other RNA; note = Description of Artificial Sequence: Synthetic oligonucleotide
ctcattgtttattaacctgta

SEQ ID NO: 431 - RNA, 21 nt, synthetic construct
  source 1..21: mol_type = other RNA; note = Description of Artificial Sequence: Synthetic oligonucleotide
caacaaaatagcaatcccttt

SEQ ID NO: 432 - RNA, 21 nt, synthetic construct
  source 1..21: mol_type = other RNA; note = Description of Artificial Sequence: Synthetic oligonucleotide
cattgtttattaacctgtatt

SEQ ID NO: 433 - RNA, 21 nt, synthetic construct
  source 1..21: mol_type = other RNA; note = Description of Artificial Sequence: Synthetic oligonucleotide
tatcagctgggaagatatcaa

SEQ ID NO: 434 - RNA, 21 nt, synthetic construct
  source 1..21: mol_type = other RNA; note = Description of Artificial Sequence: Synthetic oligonucleotide
tgtcctaggaaccttttagaa

SEQ ID NO: 435 - RNA, 21 nt, synthetic construct
  source 1..21: mol_type = other RNA; note = Description of Artificial Sequence: Synthetic oligonucleotide
tccaacaaaatagcaatccct

SEQ ID NO: 436 - RNA, 21 nt, synthetic construct
  source 1..21: mol_type = other RNA; note = Description of Artificial Sequence: Synthetic oligonucleotide
ggtgtgcggaaaggcactgat

SEQ ID NO: 437 - RNA, 21 nt, synthetic construct
  source 1..21: mol_type = other RNA; note = Description of Artificial Sequence: Synthetic oligonucleotide
ttgaaaccagtactttatcat

SEQ ID NO: 438 - RNA, 21 nt, synthetic construct
  source 1..21: mol_type = other RNA; note = Description of Artificial Sequence: Synthetic oligonucleotide
tacttccaaagtctatatata

SEQ ID NO: 439 - RNA, 21 nt, synthetic construct
  source 1..21: mol_type = other RNA; note = Description of Artificial Sequence: Synthetic oligonucleotide
tcctaggaaccttttagaaat

SEQ ID NO: 440 - RNA, 21 nt, synthetic construct
  source 1..21: mol_type = other RNA; note = Description of Artificial Sequence: Synthetic oligonucleotide
ctcctgaggaaaattttggaa

SEQ ID NO: 441 - RNA, 21 nt, synthetic construct
  source 1..21: mol_type = other RNA; note = Description of Artificial Sequence: Synthetic oligonucleotide
gctccggaatgttgctgaaat

SEQ ID NO: 442 - RNA, 21 nt, synthetic construct
  source 1..21: mol_type = other RNA; note = Description of Artificial Sequence: Synthetic oligonucleotide
gtgtttgtggggagaccaata

SEQ ID NO: 443 - RNA, 23 nt, synthetic construct
  source 1..23: mol_type = other RNA; note = Description of Artificial Sequence: Synthetic oligonucleotide
ttgtcgatgactttcacattctg

SEQ ID NO: 444 - RNA, 23 nt, synthetic construct
  source 1..23: mol_type = other RNA; note = Description of Artificial Sequence: Synthetic oligonucleotide
tcctaggacacccattgaaaagt

SEQ ID NO: 445 - RNA, 23 nt, synthetic construct
  source 1..23: mol_type = other RNA; note = Description of Artificial Sequence: Synthetic oligonucleotide
aatgtcttgtcgatgactttcac

SEQ ID NO: 446 - RNA, 23 nt, synthetic construct
  source 1..23: mol_type = other RNA; note = Description of Artificial Sequence: Synthetic oligonucleotide
tcaccaatgtcttgtcgatgact

SEQ ID NO: 447 - RNA, 23 nt, synthetic construct
  source 1..23: mol_type = other RNA; note = Description of Artificial Sequence: Synthetic oligonucleotide
ttcctaggacacccattgaaaag

SEQ ID NO: 448 - RNA, 23 nt, synthetic construct
  source 1..23: mol_type = other RNA; note = Description of Artificial Sequence: Synthetic oligonucleotide
aaggttcctaggacacccattga

SEQ ID NO: 449 - RNA, 23 nt, synthetic construct
  source 1..23: mol_type = other RNA; note = Description of Artificial Sequence: Synthetic oligonucleotide
tggaaaatattgtgcactgtcag

SEQ ID NO: 450 - RNA, 23 nt, synthetic construct
  source 1..23: mol_type = other RNA; note = Description of Artificial Sequence: Synthetic oligonucleotide
ttaggacacccattgaaaagtca

SEQ ID NO: 451 - RNA, 23 nt, synthetic construct
  source 1..23: mol_type = other RNA; note = Description of Artificial Sequence: Synthetic oligonucleotide
tcaatgtcttgtcgatgactttc

SEQ ID NO: 452 - RNA, 23 nt, synthetic construct
  source 1..23: mol_type = other RNA; note = Description of Artificial Sequence: Synthetic oligonucleotide
tctcaccaatgtcttgtcgatga

SEQ ID NO: 453 - RNA, 23 nt, synthetic construct
  source 1..23: mol_type = other RNA; note = Description of Artificial Sequence: Synthetic oligonucleotide
tatcttgaacacctttctccccc

SEQ ID NO: 454 - RNA, 23 nt, synthetic construct
  source 1..23: mol_type = other RNA; note = Description of Artificial Sequence: Synthetic oligonucleotide
tctaggacacccattgaaaagtc

SEQ ID NO: 455 - RNA, 23 nt, synthetic construct
  source 1..23: mol_type = other RNA; note = Description of Artificial Sequence: Synthetic oligonucleotide
tgttcctaggacacccattgaaa

SEQ ID NO: 456 - RNA, 23 nt, synthetic construct
  source 1..23: mol_type = other RNA; note = Description of Artificial Sequence: Synthetic oligonucleotide
tgacacccattgaaaagtcaaaa

SEQ ID NO: 457 - RNA, 23 nt, synthetic construct
  source 1..23: mol_type = other RNA; note = Description of Artificial Sequence: Synthetic oligonucleotide
taatgtcttgtcgatgactttca

SEQ ID NO: 458 - RNA, 23 nt, synthetic construct
  source 1..23: mol_type = other RNA; note = Description of Artificial Sequence: Synthetic oligonucleotide
ttgaacacctttctccccctgga

SEQ ID NO: 459 - RNA, 23 nt, synthetic construct
  source 1..23: mol_type = other RNA; note = Description of Artificial Sequence: Synthetic oligonucleotide
aaggatttttcctcaccaatgtc

SEQ ID NO: 460 - RNA, 23 nt, synthetic construct
  source 1..23: mol_type = other RNA; note = Description of Artificial Sequence: Synthetic oligonucleotide
aggatttttcctcaccaatgtct

SEQ ID NO: 461 - RNA, 23 nt, synthetic construct
  source 1..23: mol_type = other RNA; note = Description of Artificial Sequence: Synthetic oligonucleotide
tttgaacacctttctccccctgg

SEQ ID NO: 462 - RNA, 23 nt, synthetic construct
  source 1..23: mol_type = other RNA; note = Description of Artificial Sequence: Synthetic oligonucleotide
ttcaaaatttttcatcctgagtt

SEQ ID NO: 463 - RNA, 23 nt, synthetic construct
  source 1..23: mol_type = other RNA; note = Description of Artificial Sequence: Synthetic oligonucleotide
tttgtcaagtaatacatgctgaa

SEQ ID NO: 464 - RNA, 23 nt, synthetic construct
  source 1..23: mol_type = other RNA; note = Description of Artificial Sequence: Synthetic oligonucleotide
tgatttagcatgttgttcataat

SEQ ID NO: 465 - RNA, 23 nt, synthetic construct
  source 1..23: mol_type = other RNA; note = Description of Artificial Sequence: Synthetic oligonucleotide
tcctaaaacatttggatatattc

SEQ ID NO: 466 - RNA, 23 nt, synthetic construct
  source 1..23: mol_type = other RNA; note = Description of Artificial Sequence: Synthetic oligonucleotide
ttggatacagcttccatctggaa

SEQ ID NO: 467 - RNA, 23 nt, synthetic construct
  source 1..23: mol_type = other RNA; note = Description of Artificial Sequence: Synthetic oligonucleotide
tatatttccaggatgaaagtcca

SEQ ID NO: 468 - RNA, 23 nt, synthetic construct
  source 1..23: mol_type = other RNA; note = Description of Artificial Sequence: Synthetic oligonucleotide
attgatacaaattagccggggga

SEQ ID NO: 469 - RNA, 23 nt, synthetic construct
  source 1..23: mol_type = other RNA; note = Description of Artificial Sequence: Synthetic oligonucleotide
tcccattcaagccatgtttaaca

SEQ ID NO: 470 - RNA, 23 nt, synthetic construct
  source 1..23: mol_type = other RNA; note = Description of Artificial Sequence: Synthetic oligonucleotide
atgacgttgtctaaacacatttt

SEQ ID NO: 471 - RNA, 23 nt, synthetic construct
  source 1..23: mol_type = other RNA; note = Description of Artificial Sequence: Synthetic oligonucleotide
aaccggaattcttcctttagtat

SEQ ID NO: 472 - RNA, 23 nt, synthetic construct
  source 1..23: mol_type = other RNA; note = Description of Artificial Sequence: Synthetic oligonucleotide
atcctaaaacatttggatatatt

SEQ ID NO: 473 - RNA, 23 nt, synthetic construct
  source 1..23: mol_type = other RNA; note = Description of Artificial Sequence: Synthetic oligonucleotide
aacatcagtgcctttccgcacac

SEQ ID NO: 474 - RNA, 23 nt, synthetic construct
  source 1..23: mol_type = other RNA; note = Description of Artificial Sequence: Synthetic oligonucleotide
aatttaagaaccactgttttaaa

SEQ ID NO: 475 - RNA, 23 nt, synthetic construct
  source 1..23: mol_type = other RNA; note = Description of Artificial Sequence: Synthetic oligonucleotide
actggtttcaaaatttttcatcc

SEQ ID NO: 476 - RNA, 23 nt, synthetic construct
  source 1..23: mol_type = other RNA; note = Description of Artificial Sequence: Synthetic oligonucleotide
aaaagggattgctattttgttgg

SEQ ID NO: 477 - RNA, 23 nt, synthetic construct
  source 1..23: mol_type = other RNA; note = Description of Artificial Sequence: Synthetic oligonucleotide
aagtcgacagatctgtttcagca

SEQ ID NO: 478 - RNA, 23 nt, synthetic construct
  source 1..23: mol_type = other RNA; note = Description of Artificial Sequence: Synthetic oligonucleotide
tcaaaatgccctttgcaacaatt

SEQ ID NO: 479 - RNA, 23 nt, synthetic construct
  source 1..23: mol_type = other RNA; note = Description of Artificial Sequence: Synthetic oligonucleotide
tacaggttaataaacaatgagat

SEQ ID NO: 480 - RNA, 23 nt, synthetic construct
  source 1..23: mol_type = other RNA; note = Description of Artificial Sequence: Synthetic oligonucleotide
aaagggattgctattttgttgga

SEQ ID NO: 481 - RNA, 23 nt, synthetic construct
  source 1..23: mol_type = other RNA; note = Description of Artificial Sequence: Synthetic oligonucleotide
aatacaggttaataaacaatgag

SEQ ID NO: 482 - RNA, 23 nt, synthetic construct
  source 1..23: mol_type = other RNA; note = Description of Artificial Sequence: Synthetic oligonucleotide
ttgatatcttcccagctgataga

SEQ ID NO: 483 - RNA, 23 nt, synthetic construct
  source 1..23: mol_type = other RNA; note = Description of Artificial Sequence: Synthetic oligonucleotide
ttctaaaaggttcctaggacacc

SEQ ID NO: 484 - RNA, 23 nt, synthetic construct
  source 1..23: mol_type = other RNA; note = Description of Artificial Sequence: Synthetic oligonucleotide
agggattgctattttgttggaaa

SEQ ID NO: 485 - RNA, 23 nt, synthetic construct
  source 1..23: mol_type = other RNA; note = Description of Artificial Sequence: Synthetic oligonucleotide
atcagtgcctttccgcacacccc

SEQ ID NO: 486 - RNA, 23 nt, synthetic construct
  source 1..23: mol_type = other RNA; note = Description of Artificial Sequence: Synthetic oligonucleotide
atgataaagtactggtttcaaaa

SEQ ID NO: 487 - RNA, 23 nt, synthetic construct
  source 1..23: mol_type = other RNA; note = Description of Artificial Sequence: Synthetic oligonucleotide
tatatatagactttggaagtact

SEQ ID NO: 488 - RNA, 23 nt, synthetic construct
  source 1..23: mol_type = other RNA; note = Description of Artificial Sequence: Synthetic oligonucleotide
atttctaaaaggttcctaggaca

SEQ ID NO: 489 - RNA, 23 nt, synthetic construct
  source 1..23: mol_type = other RNA; note = Description of Artificial Sequence: Synthetic oligonucleotide
ttccaaaattttcctcaggagaa

SEQ ID NO: 490 - RNA, 23 nt, synthetic construct
  source 1..23: mol_type = other RNA; note = Description of Artificial Sequence: Synthetic oligonucleotide
atttcagcaacattccggagcat

SEQ ID NO: 491 - RNA, 23 nt, synthetic construct
  source 1..23: mol_type = other RNA; note = Description of Artificial Sequence: Synthetic oligonucleotide
tattggtctccccacaaacacag

SEQ ID NO: 492 - RNA, 21 nt, synthetic construct
  source 1..21: mol_type = other RNA; note = Description of Artificial Sequence: Synthetic oligonucleotide
atggtggtaatttgtgatttt

SEQ ID NO: 493 - RNA, 21 nt, synthetic construct
  source 1..21: mol_type = other RNA; note = Description of Artificial Sequence: Synthetic oligonucleotide
gacttgcatcctggaaatata

SEQ ID NO: 494 - RNA, 21 nt, synthetic construct
  source 1..21: mol_type = other RNA; note = Description of Artificial Sequence: Synthetic oligonucleotide
ggaagggaaggtagaagtctt

SEQ ID NO: 495 - RNA, 21 nt, synthetic construct
  source 1..21: mol_type = other RNA; note = Description of Artificial Sequence: Synthetic oligonucleotide
tgtcttctgtttagatttcct

SEQ ID NO: 496 - RNA, 21 nt, synthetic construct
  source 1..21: mol_type = other RNA; note = Description of Artificial Sequence: Synthetic oligonucleotide
ctttggctgtttccaagatct

SEQ ID NO: 497 - RNA, 21 nt, synthetic construct
  source 1..21: mol_type = other RNA; note = Description of Artificial Sequence: Synthetic oligonucleotide
aatgtgtttgggcaacgtcat

SEQ ID NO: 498 - RNA, 21 nt, synthetic construct
  source 1..21: mol_type = other RNA; note = Description of Artificial Sequence: Synthetic oligonucleotide
tgtgactgtggacacccctta

SEQ ID NO: 499 - RNA, 21 nt, synthetic construct
  source 1..21: mol_type = other RNA; note = Description of Artificial Sequence: Synthetic oligonucleotide
gatggggtgccagctactatt

SEQ ID NO: 500 - RNA, 21 nt, synthetic construct
  source 1..21: mol_type = other RNA; note = Description of Artificial Sequence: Synthetic oligonucleotide
gaaaatgtgtttgggcaacgt

SEQ ID NO: 501 - RNA, 21 nt, synthetic construct
  source 1..21: mol_type = other RNA; note = Description of Artificial Sequence: Synthetic oligonucleotide
ggctgtttccaagatctgaca

SEQ ID NO: 502 - RNA, 21 nt, synthetic construct
  source 1..21: mol_type = other RNA; note = Description of Artificial Sequence: Synthetic oligonucleotide
tccaacaaaatagccacccct

SEQ ID NO: 503 - RNA, 21 nt, synthetic construct
  source 1..21: mol_type = other RNA; note = Description of Artificial Sequence: Synthetic oligonucleotide
gtcttctgtttagatttcctt

SEQ ID NO: 504 - RNA, 21 nt, synthetic construct
  source 1..21: mol_type = other RNA; note = Description of Artificial Sequence: Synthetic oligonucleotide
tggaagggaaggtagaagtct

SEQ ID NO: 505 - RNA, 21 nt, synthetic construct
  source 1..21: mol_type = other RNA; note = Description of Artificial Sequence: Synthetic oligonucleotide
tcctttggctgtttccaagat

SEQ ID NO: 506 - RNA, 21 nt, synthetic construct
  source 1..21: mol_type = other RNA; note = Description of Artificial Sequence: Synthetic oligonucleotide
catctctcagctgggatgata

SEQ ID NO: 507 - RNA, 21 nt, synthetic construct
  source 1..21: mol_type = other RNA; note = Description of Artificial Sequence: Synthetic oligonucleotide
ggggtgccagctactattgat

SEQ ID NO: 508 - RNA, 21 nt, synthetic construct
  source 1..21: mol_type = other RNA; note = Description of Artificial Sequence: Synthetic oligonucleotide
atgtgtttgggcaacgtcata

SEQ ID NO: 509 - RNA, 21 nt, synthetic construct
  source 1..21: mol_type = other RNA; note = Description of Artificial Sequence: Synthetic oligonucleotide
ctgtttagatttccttaagaa

SEQ ID NO: 510 - RNA, 21 nt, synthetic construct
  source 1..21: mol_type = other RNA; note = Description of Artificial Sequence: Synthetic oligonucleotide
agaaagaaatggacttgcata

SEQ ID NO: 511 - RNA, 21 nt, synthetic construct
  source 1..21: mol_type = other RNA; note = Description of Artificial Sequence: Synthetic oligonucleotide
gcatcctggaaatatattaaa

SEQ ID NO: 512 - RNA, 21 nt, synthetic construct
  source 1..21: mol_type = other RNA; note = Description of Artificial Sequence: Synthetic oligonucleotide
cctgtcagaccatgggaacta

SEQ ID NO: 513 - RNA, 21 nt, synthetic construct
  source 1..21: mol_type = other RNA; note = Description of Artificial Sequence: Synthetic oligonucleotide
aaacatggtgtggatgggata

SEQ ID NO: 514 - RNA, 23 nt, synthetic construct
  source 1..23: mol_type = other RNA; note = Description of Artificial Sequence: Synthetic oligonucleotide
aaaatcacaaattaccaccatcc

SEQ ID NO: 515 - RNA, 23 nt, synthetic construct
  source 1..23: mol_type = other RNA; note = Description of Artificial Sequence: Synthetic oligonucleotide
tatatttccaggatgcaagtcca

SEQ ID NO: 516 - RNA, 23 nt, synthetic construct
  source 1..23: mol_type = other RNA; note = Description of Artificial Sequence: Synthetic oligonucleotide
aagacttctaccttcccttccac

SEQ ID NO: 517 - RNA, 23 nt, synthetic construct
  source 1..23: mol_type = other RNA; note = Description of Artificial Sequence: Synthetic oligonucleotide
aggaaatctaaacagaagacagg

SEQ ID NO: 518 - RNA, 23 nt, synthetic construct
  source 1..23: mol_type = other RNA; note = Description of Artificial Sequence: Synthetic oligonucleotide
agatcttggaaacagccaaagga

SEQ ID NO: 519 - RNA, 23 nt, synthetic construct
  source 1..23: mol_type = other RNA; note = Description of Artificial Sequence: Synthetic oligonucleotide
atgacgttgcccaaacacatttt

SEQ ID NO: 520 - RNA, 23 nt, synthetic construct
  source 1..23: mol_type = other RNA; note = Description of Artificial Sequence: Synthetic oligonucleotide
taaggggtgtccacagtcacaaa

SEQ ID NO: 521 - RNA, 23 nt, synthetic construct
  source 1..23: mol_type = other RNA; note = Description of Artificial Sequence: Synthetic oligonucleotide
aatagtagctggcaccccatcca

SEQ ID NO: 522 - RNA, 23 nt, synthetic construct
  source 1..23: mol_type = other RNA; note = Description of Artificial Sequence: Synthetic oligonucleotide
acgttgcccaaacacattttcaa

SEQ ID NO: 523 - RNA, 23 nt, synthetic construct
  source 1..23: mol_type = other RNA; note = Description of Artificial Sequence: Synthetic oligonucleotide
tgtcagatcttggaaacagccaa

SEQ ID NO: 524 - RNA, 23 nt, synthetic construct
  source 1..23: mol_type = other RNA; note = Description of Artificial Sequence: Synthetic oligonucleotide
aggggtggctattttgttggaaa

SEQ ID NO: 525 - RNA, 23 nt, synthetic construct
  source 1..23: mol_type = other RNA; note = Description of Artificial Sequence: Synthetic oligonucleotide
aaggaaatctaaacagaagacag

SEQ ID NO: 526 - RNA, 23 nt, synthetic construct
  source 1..23: mol_type = other RNA; note = Description of Artificial Sequence: Synthetic oligonucleotide
agacttctaccttcccttccaca

SEQ ID NO: 527 - RNA, 23 nt, synthetic construct
  source 1..23: mol_type = other RNA; note = Description of Artificial Sequence: Synthetic oligonucleotide
atcttggaaacagccaaaggatt

SEQ ID NO: 528 - RNA, 23 nt, synthetic construct
  source 1..23: mol_type = other RNA; note = Description of Artificial Sequence: Synthetic oligonucleotide
tatcatcccagctgagagatggg

SEQ ID NO: 529 - RNA, 23 nt, synthetic construct
  source 1..23: mol_type = other RNA; note = Description of Artificial Sequence: Synthetic oligonucleotide
atcaatagtagctggcaccccat

SEQ ID NO: 530 - RNA, 23 nt, synthetic construct
  source 1..23: mol_type = other RNA; note = Description of Artificial Sequence: Synthetic oligonucleotide
tatgacgttgcccaaacacattt

SEQ ID NO: 531 - RNA, 23 nt, synthetic construct
  source 1..23: mol_type = other RNA; note = Description of Artificial Sequence: Synthetic oligonucleotide
ttcttaaggaaatctaaacagaa

SEQ ID NO: 532 - RNA, 23 nt, synthetic construct
  source 1..23: mol_type = other RNA; note = Description of Artificial Sequence: Synthetic oligonucleotide
tatgcaagtccatttctttctag

SEQ ID NO: 533 - RNA, 23 nt, synthetic construct
  source 1..23: mol_type = other RNA; note = Description of Artificial Sequence: Synthetic oligonucleotide
tttaatatatttccaggatgcaa

SEQ ID NO: 534 - RNA, 23 nt, synthetic construct
  source 1..23: mol_type = other RNA; note = Description of Artificial Sequence: Synthetic oligonucleotide
tagttcccatggtctgacaggct

SEQ ID NO: 535 - RNA, 23 nt, synthetic construct
  source 1..23: mol_type = other RNA; note = Description of Artificial Sequence: Synthetic oligonucleotide
tatcccatccacaccatgtttaa

SEQ ID NO: 536 - RNA, 21 nt, synthetic construct
  source 1..21: mol_type = other RNA; note = Description of Artificial Sequence: Synthetic oligonucleotide
gaatgtgaaagtcatcgacaa

SEQ ID NO: 537 - RNA, 21 nt, synthetic construct
  source 1..21: mol_type = other RNA; note = Description of Artificial Sequence: Synthetic oligonucleotide
gaatgtgaaagtcatcgacaa

SEQ ID NO: 538 - RNA, 21 nt, synthetic construct
  source 1..21: mol_type = other RNA; note = Description of Artificial Sequence: Synthetic oligonucleotide
gaatgtgaaagtcatcgacaa

SEQ ID NO: 539 - RNA, 21 nt, synthetic construct
  source 1..21: mol_type = other RNA; note = Description of Artificial Sequence: Synthetic oligonucleotide
gaatgtgaaagtcatcgacaa

SEQ ID NO: 540 - RNA, 21 nt, synthetic construct
  source 1..21: mol_type = other RNA; note = Description of Artificial Sequence: Synthetic oligonucleotide
gaatgtgaaagtcatcgacaa

SEQ ID NO: 541 - RNA, 21 nt, synthetic construct
  source 1..21: mol_type = other RNA; note = Description of Artificial Sequence: Synthetic oligonucleotide
gaatgtgaaagtcatcgacaa

SEQ ID NO: 542 - RNA, 21 nt, synthetic construct
  source 1..21: mol_type = other RNA; note = Description of Artificial Sequence: Synthetic oligonucleotide
gaatgtgaaagtcatcgacaa

SEQ ID NO: 543 - RNA, 21 nt, synthetic construct
  source 1..21: mol_type = other RNA; note = Description of Artificial Sequence: Synthetic oligonucleotide
gaatgtgaaagtcatcgacaa

SEQ ID NO: 544 - RNA, 19 nt, synthetic construct
  source 1..19: mol_type = other RNA; note = Description of Artificial Sequence: Synthetic oligonucleotide
atgtgaaagtcatcgacaa

SEQ ID NO: 545 - RNA, 19 nt, synthetic construct
  source 1..19: mol_type = other RNA; note = Description of Artificial Sequence: Synthetic oligonucleotide
atgtgaaagtcatcgacaa

SEQ ID NO: 546 - RNA, 21 nt, synthetic construct
  source 1..21: mol_type = other RNA; note = Description of Artificial Sequence: Synthetic oligonucleotide
gaatgtgaaagtcatcgacaa

SEQ ID NO: 547 - RNA, 21 nt, synthetic construct
  source 1..21: mol_type = other RNA; note = Description of Artificial Sequence: Synthetic oligonucleotide
gaatgtgaaagtcatcgacaa

SEQ ID NO: 548 - RNA, 21 nt, synthetic construct
  source 1..21: mol_type = other RNA; note = Description of Artificial Sequence: Synthetic oligonucleotide
gaatgtgaaagtcatcgacaa

SEQ ID NO: 549 - RNA, 21 nt, synthetic construct
  source 1..21: mol_type = other RNA; note = Description of Artificial Sequence: Synthetic oligonucleotide
gaatgtgaaagtcatcgacaa

SEQ ID NO: 550 - RNA, 21 nt, synthetic construct
  source 1..21: mol_type = other RNA; note = Description of Artificial Sequence: Synthetic oligonucleotide
gaatgtgaaagtcatcgacaa

SEQ ID NO: 551 - RNA, 21 nt, synthetic construct
  source 1..21: mol_type = other RNA; note = Description of Artificial Sequence: Synthetic oligonucleotide
gaatgtgaaagtcatcgacaa

SEQ ID NO: 552 - RNA, 21 nt, synthetic construct
  source 1..21: mol_type = other RNA; note = Description of Artificial Sequence: Synthetic oligonucleotide
gaatgtgaaagtcatcgacaa

SEQ ID NO: 553 - RNA, 21 nt, synthetic construct
  source 1..21: mol_type = other RNA; note = Description of Artificial Sequence: Synthetic oligonucleotide
gaatgtgaaagtcatcgacaa

SEQ ID NO: 554 - RNA, 21 nt, synthetic construct
  source 1..21: mol_type = other RNA; note = Description of Artificial Sequence: Synthetic oligonucleotide
gaatgtgaaagtcatcgacaa

SEQ ID NO: 555 - RNA, 21 nt, synthetic construct
  source 1..21: mol_type = other RNA; note = Description of Artificial Sequence: Synthetic oligonucleotide
gaatgtgaaagtcatcgacaa

SEQ ID NO: 556 - RNA, 21 nt, synthetic construct
  source 1..21: mol_type = other RNA; note = Description of Artificial Sequence: Synthetic oligonucleotide
gaatgtgaaagtcatcgacaa

SEQ ID NO: 557 - RNA, 21 nt, synthetic construct
  source 1..21: mol_type = other RNA; note = Description of Artificial Sequence: Synthetic oligonucleotide; note = Description of Combined DNA/RNA Molecule: Synthetic oligonucleotide
  modified_base 6: mod_base = OTHER; note = Thymine
gaatgtgaaagtcatcgacaa

SEQ ID NO: 558 - RNA, 21 nt, synthetic construct
  source 1..21: mol_type = other RNA; note = Description of Artificial Sequence: Synthetic oligonucleotide
gaatgtgaaagtcatcgacaa

SEQ ID NO: 559 - RNA, 21 nt, synthetic construct
  source 1..21: mol_type = other RNA; note = Description of Artificial Sequence: Synthetic oligonucleotide; note = Description of Combined DNA/RNA Molecule: Synthetic oligonucleotide
  modified_base 6: mod_base = OTHER; note = Thymine
gaatgtgaaagtcatcgacaa

SEQ ID NO: 560 - RNA, 21 nt, synthetic construct
  source 1..21: mol_type = other RNA; note = Description of Artificial Sequence: Synthetic oligonucleotide
gaatgtgaaagtcatcgacaa

SEQ ID NO: 561 - RNA, 21 nt, synthetic construct
  source 1..21: mol_type = other RNA; note = Description of Artificial Sequence: Synthetic oligonucleotide
gaatgtgaaagtcatcgacaa

SEQ ID NO: 562 - RNA, 21 nt, synthetic construct
  source 1..21: mol_type = other RNA; note = Description of Artificial Sequence: Synthetic oligonucleotide; note = Description of Combined DNA/RNA Molecule: Synthetic oligonucleotide
  modified_base 17: mod_base = OTHER; note = Thymine
gaatgtgaaagtcatctacaa

SEQ ID NO: 563 - RNA, 20 nt, synthetic construct
  source 1..20: mol_type = other RNA; note = Description of Artificial Sequence: Synthetic oligonucleotide
gaatgtgaaagtcatcacaa

SEQ ID NO: 564 - RNA, 21 nt, synthetic construct
  source 1..21: mol_type = other RNA; note = Description of Artificial Sequence: Synthetic oligonucleotide; note = Description of Combined DNA/RNA Molecule: Synthetic oligonucleotide
  modified_base 15: mod_base = OTHER; note = Thymine
  modified_base 17: mod_base = OTHER; note = Thymine
gaatgtgaaagtcatctacaa

SEQ ID NO: 565 - RNA, 21 nt, synthetic construct
  source 1..21: mol_type = other RNA; note = Description of Artificial Sequence: Synthetic oligonucleotide
gaatgtgaaagtcatcgacaa

SEQ ID NO: 566 - RNA, 21 nt, synthetic construct
  source 1..21: mol_type = other RNA; note = Description of Artificial Sequence: Synthetic oligonucleotide; note = Description of Combined DNA/RNA Molecule: Synthetic oligonucleotide
  modified_base 17: mod_base = OTHER; note = Thymine
gaatgtgaaagtcatctacaa

SEQ ID NO: 567 - RNA, 20 nt, synthetic construct
  source 1..20: mol_type = other RNA; note = Description of Artificial Sequence: Synthetic oligonucleotide
gaatgtgaaagtcatcacaa

SEQ ID NO: 568 - RNA, 21 nt, synthetic construct
  source 1..21: mol_type = other RNA; note = Description of Artificial Sequence: Synthetic oligonucleotide
gaatgtgaaagtcatcgacaa

SEQ ID NO: 569 - RNA, 21 nt, synthetic construct
  source 1..21: mol_type = other RNA; note = Description of Artificial Sequence: Synthetic oligonucleotide
gaatgtgaaagtcatcgacaa

SEQ ID NO: 570 - RNA, 21 nt, synthetic construct
  source 1..21: mol_type = other RNA; note = Description of Artificial Sequence: Synthetic oligonucleotide
gaatgtgaaagtcatcgacaa

SEQ ID NO: 571 - RNA, 21 nt, synthetic construct
  source 1..21: mol_type = other RNA; note = Description of Artificial Sequence: Synthetic oligonucleotide
gaatgtgaaagtcatcgacaa

SEQ ID NO: 572 - RNA, 21 nt, synthetic construct
  source 1..21: mol_type = other RNA; note = Description of Artificial Sequence: Synthetic oligonucleotide
gaatgtgaaagtcatcgacaa

SEQ ID NO: 573 - RNA, 21 nt, synthetic construct
  source 1..21: mol_type = other RNA; note = Description of Artificial Sequence: Synthetic oligonucleotide
gaatgtgaaagtcatcgacaa

SEQ ID NO: 574 - RNA, 21 nt, synthetic construct
  source 1..21: mol_type = other RNA; note = Description of Artificial Sequence: Synthetic oligonucleotide
gaatgtgaaagtcatcgacaa

SEQ ID NO: 575 - RNA, 21 nt, synthetic construct
  source 1..21: mol_type = other RNA; note = Description of Artificial Sequence: Synthetic oligonucleotide
gactttcatcctggaaatata

SEQ ID NO: 576 - RNA, 21 nt, synthetic construct
  source 1..21: mol_type = other RNA; note = Description of Artificial Sequence: Synthetic oligonucleotide
gactttcatcctggaaatata

SEQ ID NO: 577 - RNA, 21 nt, synthetic construct
  source 1..21: mol_type = other RNA; note = Description of Artificial Sequence: Synthetic oligonucleotide
gactttcatcctggaaatata

SEQ ID NO: 578 - RNA, 21 nt, synthetic construct
  source 1..21: mol_type = other RNA; note = Description of Artificial Sequence: Synthetic oligonucleotide
gactttcatcctggaaatata

SEQ ID NO: 579 - RNA, 21 nt, synthetic construct
  source 1..21: mol_type = other RNA; note = Description of Artificial Sequence: Synthetic oligonucleotide
gactttcatcctggaaatata

SEQ ID NO: 580 - RNA, 21 nt, synthetic construct
  source 1..21: mol_type = other RNA; note = Description of Artificial Sequence: Synthetic oligonucleotide
gactttcatcctggaaatata

SEQ ID NO: 581 - RNA, 19 nt, synthetic construct
  source 1..19: mol_type = other RNA; note = Description of Artificial Sequence: Synthetic oligonucleotide
ctttcatcctggaaatata

SEQ ID NO: 582 - RNA, 19 nt, synthetic construct
  source 1..19: mol_type = other RNA; note = Description of Artificial Sequence: Synthetic oligonucleotide
ctttcatcctggaaatata

SEQ ID NO: 583 - RNA, 21 nt, synthetic construct
  source 1..21: mol_type = other RNA; note = Description of Artificial Sequence: Synthetic oligonucleotide
gactttcatcctggaaatata

SEQ ID NO: 584 - RNA, 21 nt, synthetic construct
  source 1..21: mol_type = other RNA; note = Description of Artificial Sequence: Synthetic oligonucleotide
gactttcatcctggaaatata

SEQ ID NO: 585 - RNA, 21 nt, synthetic construct
  source 1..21: mol_type = other RNA; note = Description of Artificial Sequence: Synthetic oligonucleotide
gactttcatcctggaaatata

SEQ ID NO: 586 - RNA, 21 nt, synthetic construct
  source 1..21: mol_type = other RNA; note = Description of Artificial Sequence: Synthetic oligonucleotide
gactttcatcctggaaatata

SEQ ID NO: 587 - RNA, 21 nt, synthetic construct
  source 1..21: mol_type = other RNA; note = Description of Artificial Sequence: Synthetic oligonucleotide
gactttcatcctggaaatata

SEQ ID NO: 588 - RNA, 21 nt, synthetic construct
  source 1..21: mol_type = other RNA; note = Description of Artificial Sequence: Synthetic oligonucleotide
gactttcatcctggaaatata

SEQ ID NO: 589 - RNA, 21 nt, synthetic construct
  source 1..21: mol_type = other RNA; note = Description of Artificial Sequence: Synthetic oligonucleotide
gactttcatcctggaaatata

SEQ ID NO: 590 - RNA, 21 nt, synthetic construct
  source 1..21: mol_type = other RNA; note = Description of Artificial Sequence: Synthetic oligonucleotide
gactttcatcctggaaatata

SEQ ID NO: 591 - RNA, 21 nt, synthetic construct
  source 1..21: mol_type = other RNA; note = Description of Artificial Sequence: Synthetic oligonucleotide
gactttcatcctggaaatata

SEQ ID NO: 592 - RNA, 21 nt, synthetic construct
  source 1..21: mol_type = other RNA; note = Description of Artificial Sequence: Synthetic oligonucleotide
gactttcatcctggaaatata

SEQ ID NO: 593 - RNA, 21 nt, synthetic construct
  source 1..21: mol_type = other RNA; note = Description of Artificial Sequence: Synthetic oligonucleotide
gactttcatcctggaaatata

SEQ ID NO: 594 - RNA, 21 nt, synthetic construct
  source 1..21: mol_type = other RNA; note = Description of Artificial Sequence: Synthetic oligonucleotide
gactttcatcctggaaatata

SEQ ID NO: 595 - RNA, 21 nt, synthetic construct
  source 1..21: mol_type = other RNA; note = Description of Artificial Sequence: Synthetic oligonucleotide
gactttcatcctggaaatata

SEQ ID NO: 596 - RNA, 21 nt, synthetic construct
  source 1..21: mol_type = other RNA; note = Description of Artificial Sequence: Synthetic oligonucleotide; note = Description of Combined DNA/RNA Molecule: Synthetic oligonucleotide
  modified_base 5: mod_base = OTHER; note = Thymine
gactttcatcctggaaatata

SEQ ID NO: 597 - RNA, 21 nt, synthetic construct
  source 1..21: mol_type = other RNA; note = Description of Artificial Sequence: Synthetic oligonucleotide; note = Description of Combined DNA/RNA Molecule: Synthetic oligonucleotide
  modified_base 6: mod_base = OTHER; note = Thymine
gactttcatcctggaaatata

SEQ ID NO: 598 - RNA, 21 nt, synthetic construct
  source 1..21: mol_type = other RNA; note = Description of Artificial Sequence: Synthetic oligonucleotide
gactttcatcctggaaatata

SEQ ID NO: 599 - RNA, 21 nt, synthetic construct
  source 1..21: mol_type = other RNA; note = Description of Artificial Sequence: Synthetic oligonucleotide
gactttcatcctggaaatata

SEQ ID NO: 600 - RNA, 21 nt, synthetic construct
  source 1..21: mol_type = other RNA; note = Description of Artificial Sequence: Synthetic oligonucleotide; note = Description of Combined DNA/RNA Molecule: Synthetic oligonucleotide
  modified_base 17: mod_base = OTHER; note = Thymine
gactttcatcctggaattata

SEQ ID NO: 601 - RNA, 20 nt, synthetic construct
  source 1..20: mol_type = other RNA; note = Description of Artificial Sequence: Synthetic oligonucleotide
gactttcatcctggaatata

SEQ ID NO: 602 - RNA, 21 nt, synthetic construct
  source 1..21: mol_type = other RNA; note = Description of Artificial Sequence: Synthetic oligonucleotide; note = Description of Combined DNA/RNA Molecule: Synthetic oligonucleotide
  modified_base 17: mod_base = OTHER; note = Thymine
gactttcatcctggaattata

SEQ ID NO: 603 - RNA, 21 nt, synthetic construct
  source 1..21: mol_type = other RNA; note = Description of Artificial Sequence: Synthetic oligonucleotide; note = Description of Combined DNA/RNA Molecule: Synthetic oligonucleotide
  modified_base 17: mod_base = OTHER; note = Thymine
gactttcatcctggaattata

SEQ ID NO: 604 - RNA, 21 nt, synthetic construct
  source 1..21: mol_type = other RNA; note = Description of Artificial Sequence: Synthetic oligonucleotide
gactttcatcctggaaatata

SEQ ID NO: 605 - RNA, 21 nt, synthetic construct
  source 1..21: mol_type = other RNA; note = Description of Artificial Sequence: Synthetic oligonucleotide; note = Description of Combined DNA/RNA Molecule: Synthetic oligonucleotide
  modified_base 6: mod_base = OTHER; note = Thymine
gactttcatcctggaaatata

SEQ ID NO: 606 - RNA, 21 nt, synthetic construct
  source 1..21: mol_type = other RNA; note = Description of Artificial Sequence: Synthetic oligonucleotide
gactttcatcctggaaatata

SEQ ID NO: 607 - RNA, 21 nt, synthetic construct
  source 1..21: mol_type = other RNA; note = Description of Artificial Sequence: Synthetic oligonucleotide
gactttcatcctggaaatata

SEQ ID NO: 608 - RNA, 21 nt, synthetic construct
  source 1..21: mol_type = other RNA; note = Description of Artificial Sequence: Synthetic oligonucleotide
gactttcatcctggaaatata

SEQ ID NO: 609 - RNA, 21 nt, synthetic construct
  source 1..21: mol_type = other RNA; note = Description of Artificial Sequence: Synthetic oligonucleotide
gactttcatcctggaaatata

SEQ ID NO: 610 - RNA, 21 nt, synthetic construct
  source 1..21: mol_type = other RNA; note = Description of Artificial Sequence: Synthetic oligonucleotide
gactttcatcctggaaatata

SEQ ID NO: 611 - RNA, 21 nt, synthetic construct
  source 1..21: mol_type = other RNA; note = Description of Artificial Sequence: Synthetic oligonucleotide
gactttcatcctggaaatata

SEQ ID NO: 612 - RNA, 21 nt, synthetic construct
  source 1..21: mol_type = other RNA; note = Description of Artificial Sequence: Synthetic oligonucleotide
gactttcatcctggaaatata

SEQ ID NO: 613 - RNA, 21 nt, synthetic construct
  source 1..21: mol_type = other RNA; note = Description of Artificial Sequence: Synthetic oligonucleotide
gactttcatcctggaaatata

SEQ ID NO: 614 - RNA, 21 nt, synthetic construct
  source 1..21: mol_type = other RNA; note = Description of Artificial Sequence: Synthetic oligonucleotide
agaaaggtgttcaagatgtca

SEQ ID NO: 615 - RNA, 21 nt, synthetic construct
  source 1..21: mol_type = other RNA; note = Description of Artificial Sequence: Synthetic oligonucleotide
catcctggaaatatattaact

SEQ ID NO: 616 - RNA, 21 nt, synthetic construct
  source 1..21: mol_type = other RNA; note = Description of Artificial Sequence: Synthetic oligonucleotide
gaatgtgaaagtcatcgacaa

SEQ ID NO: 617 - RNA, 21 nt, synthetic construct
  source 1..21: mol_type = other RNA; note = Description of Artificial Sequence: Synthetic oligonucleotide
agtgcacaatattttcccata

SEQ ID NO: 618 - RNA, 21 nt, synthetic construct
  source 1..21: mol_type = other RNA; note = Description of Artificial Sequence: Synthetic oligonucleotide
gaaagtcatcgacaagacatt

SEQ ID NO: 619 - RNA, 21 nt, synthetic construct
  source 1..21: mol_type = other RNA; note = Description of Artificial Sequence: Synthetic oligonucleotide
aatgtgaaagtcatcgacaaa

SEQ ID NO: 620 - RNA, 21 nt, synthetic construct
  source 1..21: mol_type = other RNA; note = Description of Artificial Sequence: Synthetic oligonucleotide
ctggaaatatattaactgtta

SEQ ID NO: 621 - RNA, 21 nt, synthetic construct
  source 1..21: mol_type = other RNA; note = Description of Artificial Sequence: Synthetic oligonucleotide
attttcccatctgtattattt

SEQ ID NO: 622 - RNA, 21 nt, synthetic construct
  source 1..21: mol_type = other RNA; note = Description of Artificial Sequence: Synthetic oligonucleotide
tgtcgttcttttccaacaaaa

SEQ ID NO: 623 - RNA, 21 nt, synthetic construct
  source 1..21: mol_type = other RNA; note = Description of Artificial Sequence: Synthetic oligonucleotide
atcctggaaatatattaacta

SEQ ID NO: 624 - RNA, 21 nt, synthetic construct
  source 1..21: mol_type = other RNA; note = Description of Artificial Sequence: Synthetic oligonucleotide
gcattttgagaggtgatgata

SEQ ID NO: 625 - RNA, 21 nt, synthetic construct
  source 1..21: mol_type = other RNA; note = Description of Artificial Sequence: Synthetic oligonucleotide
cagggggagaaaggtgttcaa

SEQ ID NO: 626 - RNA, 21 nt, synthetic construct
  source 1..21: mol_type = other RNA; note = Description of Artificial Sequence: Synthetic oligonucleotide
ggaaatatattaactgttaaa

SEQ ID NO: 627 - RNA, 21 nt, synthetic construct
  source 1..21: mol_type = other RNA; note = Description of Artificial Sequence: Synthetic oligonucleotide
cattggtgaggaaaaatcctt

SEQ ID NO: 628 - RNA, 21 nt, synthetic construct
  source 1..21: mol_type = other RNA; note = Description of Artificial Sequence: Synthetic oligonucleotide
gggagaaaggtgttcaagata

SEQ ID NO: 629 - RNA, 21 nt, synthetic construct
  source 1..21: mol_type = other RNA; note = Description of Artificial Sequence: Synthetic oligonucleotide
ggcattttgagaggtgatgat

SEQ ID NO: 630 - RNA, 21 nt, synthetic construct
  source 1..21: mol_type = other RNA; note = Description of Artificial Sequence: Synthetic oligonucleotide
tacaaagggtgtcgttctttt

SEQ ID NO: 631 - RNA, 21 nt, synthetic construct
  source 1..21: mol_type = other RNA; note = Description of Artificial Sequence: Synthetic oligonucleotide
tgggatcttggtgtcgaatca

SEQ ID NO: 632 - RNA, 21 nt, synthetic construct
  source 1..21: mol_type = other RNA; note = Description of Artificial Sequence: Synthetic oligonucleotide
ctgacagtgcacaatatttta

SEQ ID NO: 633 - RNA, 21 nt, synthetic construct
  source 1..21: mol_type = other RNA; note = Description of Artificial Sequence: Synthetic oligonucleotide
cagtgcacaatattttcccat

SEQ ID NO: 634 - RNA, 21 nt, synthetic construct
  source 1..21: mol_type = other RNA; note = Description of Artificial Sequence: Synthetic oligonucleotide
acttttcaatgggtgtcctaa

SEQ ID NO: 635 - RNA, 21 nt, synthetic construct
  source 1..21: mol_type = other RNA; note = Description of Artificial Sequence: Synthetic oligonucleotide
acattggtgaggaaaaatcct

SEQ ID NO: 636 - RNA, 21 nt, synthetic construct
  source 1..21: mol_type = other RNA; note = Description of Artificial Sequence: Synthetic oligonucleotide
ttgcttttgacttttcaatga

SEQ ID NO: 637 - RNA, 21 nt, synthetic construct
  source 1..21: mol_type = other RNA; note = Description of Artificial Sequence: Synthetic oligonucleotide
cattttgagaggtgatgatga

SEQ ID NO: 638 - RNA, 21 nt, synthetic construct
  source 1..21: mol_type = other RNA; note = Description of Artificial Sequence: Synthetic oligonucleotide
ttgacttttcaatgggtgtca

SEQ ID NO: 639 - RNA, 21 nt, synthetic construct
  source 1..21: mol_type = other RNA; note = Description of Artificial Sequence: Synthetic oligonucleotide
cgacttctgttttaggacaga

SEQ ID NO: 640 - RNA, 21 nt, synthetic construct
  source 1..21: mol_type = other RNA; note = Description of Artificial Sequence: Synthetic oligonucleotide
ctctgagtgggtgccagaata

SEQ ID NO: 641 - RNA, 21 nt, synthetic construct
  source 1..21: mol_type = other RNA; note = Description of Artificial Sequence: Synthetic oligonucleotide
gggtgccagaatgtgaaagta

SEQ ID NO: 642 - RNA, 21 nt, synthetic construct
  source 1..21: mol_type = other RNA; note = Description of Artificial Sequence: Synthetic oligonucleotide
tcaatgggtgtcctaggaaca

SEQ ID NO: 643 - RNA, 21 nt, synthetic construct
  source 1..21: mol_type = other RNA; note = Description of Artificial Sequence: Synthetic oligonucleotide
aaagtcatcgacaagacatta

SEQ ID NO: 644 - RNA, 21 nt, synthetic construct
  source 1..21: mol_type = other RNA; note = Description of Artificial Sequence: Synthetic oligonucleotide
attttgagaggtgatgatgca

SEQ ID NO: 645 - RNA, 21 nt, synthetic construct
  source 1..21: mol_type = other RNA; note = Description of Artificial Sequence: Synthetic oligonucleotide
atcgacaagacattggtgaga

SEQ ID NO: 646 - RNA, 21 nt, synthetic construct
  source 1..21: mol_type = other RNA; note = Description of Artificial Sequence: Synthetic oligonucleotide
ggtgccagaatgtgaaagtca

SEQ ID NO: 647 - RNA, 21 nt, synthetic construct
  source 1..21: mol_type = other RNA; note = Description of Artificial Sequence: Synthetic oligonucleotide
gacagtgcacaatattttcca

SEQ ID NO: 648 - RNA, 21 nt, synthetic construct
  source 1..21: mol_type = other RNA; note = Description of Artificial Sequence: Synthetic oligonucleotide
acaaagagacactgtgcagaa

SEQ ID NO: 649 - RNA, 21 nt, synthetic construct
  source 1..21: mol_type = other RNA; note = Description of Artificial Sequence: Synthetic oligonucleotide
ttttcaatgggtgtcctagga

SEQ ID NO: 650 - RNA, 21 nt, synthetic construct
  source 1..21: mol_type = other RNA; note = Description of Artificial Sequence: Synthetic oligonucleotide
ccgtttccaagatctgacagt

SEQ ID NO: 651 - RNA, 21 nt, synthetic construct
  source 1..21: mol_type = other RNA; note = Description of Artificial Sequence: Synthetic oligonucleotide
agggggagaaaggtgttcaaa

SEQ ID NO: 652 - RNA, 21 nt, synthetic construct
  source 1..21: mol_type = other RNA; note = Description of Artificial Sequence: Synthetic oligonucleotide
agtcatcgacaagacattggt

SEQ ID NO: 653 - RNA, 23 nt, synthetic construct
  source 1..23: mol_type = other RNA; note = Description of Artificial Sequence: Synthetic oligonucleotide
ttgtcgatgactttcacattctg

SEQ ID NO: 654 - RNA, 23 nt, synthetic construct
  source 1..23: mol_type = other RNA; note = Description of Artificial Sequence: Synthetic oligonucleotide
ttgtcgatgactttcacattctg

SEQ ID NO: 655 - RNA, 23 nt, synthetic construct
  source 1..23: mol_type = other RNA; note = Description of Artificial Sequence: Synthetic oligonucleotide
ttgtcgatgactttcacattctg

SEQ ID NO: 656 - RNA, 23 nt, synthetic construct
  source 1..23: mol_type = other RNA; note = Description of Artificial Sequence: Synthetic oligonucleotide
ttgtcgatgactttcacattctg

SEQ ID NO: 657 - RNA, 23 nt, synthetic construct
  source 1..23: mol_type = other RNA; note = Description of Artificial Sequence: Synthetic oligonucleotide
ttgtcgatgactttcacattctg

SEQ ID NO: 658 - RNA, 23 nt, synthetic construct
  source 1..23: mol_type = other RNA; note = Description of Artificial Sequence: Synthetic oligonucleotide
ttgtcgatgactttcacattctg

SEQ ID NO: 659 - RNA, 23 nt, synthetic construct
  source 1..23: mol_type = other RNA; note = Description of Artificial Sequence: Synthetic oligonucleotide
ttgtcgatgactttcacattctg

SEQ ID NO: 660 - RNA, 23 nt, synthetic construct
  source 1..23: mol_type = other RNA; note = Description of Artificial Sequence: Synthetic oligonucleotide
ttgtcgatgactttcacattctg

SEQ ID NO: 661 - RNA, 21 nt, synthetic construct
  source 1..21: mol_type = other RNA; note = Description of Artificial Sequence: Synthetic oligonucleotide
ttgtcgatgactttcacattc

SEQ ID NO: 662 - RNA, 21 nt, synthetic construct
  source 1..21: mol_type = other RNA; note = Description of Artificial Sequence: Synthetic oligonucleotide
ttgtcgatgactttcacattc

SEQ ID NO: 663 - RNA, 23 nt, synthetic construct
  source 1..23: mol_type = other RNA; note = Description of Artificial Sequence: Synthetic oligonucleotide
ttgtcgatgactttcacattctg

SEQ ID NO: 664 - RNA, 23 nt, synthetic construct
  source 1..23: mol_type = other RNA; note = Description of Artificial Sequence: Synthetic oligonucleotide
ttgtcgatgactttcacattctg

SEQ ID NO: 665 - RNA, 23 nt, synthetic construct
  source 1..23: mol_type = other RNA; note = Description of Artificial Sequence: Synthetic oligonucleotide
ttgtcgatgactttcacattctg

SEQ ID NO: 666 - RNA, 23 nt, synthetic construct
  source 1..23: mol_type = other RNA; note = Description of Artificial Sequence: Synthetic oligonucleotide
ttgtcgatgactttcacattctg

SEQ ID NO: 667 - RNA, 23 nt, synthetic construct
  source 1..23: mol_type = other RNA; note = Description of Artificial Sequence: Synthetic oligonucleotide
ttgtcgatgactttcacattctg

SEQ ID NO: 668 - RNA, 23 nt, synthetic construct
  source 1..23: mol_type = other RNA; note = Description of Artificial Sequence: Synthetic oligonucleotide
ttgtcgatgactttcacattctg

SEQ ID NO: 669 - RNA, 23 nt, synthetic construct
  source 1..23: mol_type = other RNA; note = Description of Artificial Sequence: Synthetic oligonucleotide
ttgtcgatgactttcacattctg

SEQ ID NO: 670 - RNA, 23 nt, synthetic construct
  source 1..23: mol_type = other RNA; note = Description of Artificial Sequence: Synthetic oligonucleotide
ttgtcgatgactttcacattctg

SEQ ID NO: 671 - RNA, 23 nt, synthetic construct
  source 1..23: mol_type = other RNA; note = Description of Artificial Sequence: Synthetic oligonucleotide
ttgtcgatgactttcacattctg

SEQ ID NO: 672 - RNA, 23 nt, synthetic construct
  source 1..23: mol_type = other RNA; note = Description of Artificial Sequence: Synthetic oligonucleotide
ttgtcgatgactttcacattctg

SEQ ID NO: 673 - RNA, 23 nt, synthetic construct
  source 1..23: mol_type = other RNA; note = Description of Artificial Sequence: Synthetic oligonucleotide
ttgtcgatgactttcacattctg

SEQ ID NO: 674 - RNA, 23 nt, synthetic construct
  source 1..23: mol_type = other RNA; note = Description of Artificial Sequence: Synthetic oligonucleotide
ttgtcgatgactttcacattctg

SEQ ID NO: 675 - RNA, 23 nt, synthetic construct
  source 1..23: mol_type = other RNA; note = Description of Artificial Sequence: Synthetic oligonucleotide
ttgtcgatgactttcacattctg

SEQ ID NO: 676 - RNA, 23 nt, synthetic construct
  source 1..23: mol_type = other RNA; note = Description of Artificial Sequence: Synthetic oligonucleotide
ttgtcgatgactttcacattctg

SEQ ID NO: 677 - RNA, 23 nt, synthetic construct
  source 1..23: mol_type = other RNA; note = Description of Artificial Sequence: Synthetic oligonucleotide
ttgtcgatgactttcacattctg

SEQ ID NO: 678 - RNA, 23 nt, synthetic construct
  source 1..23: mol_type = other RNA; note = Description of Artificial Sequence: Synthetic oligonucleotide
ttgtcgatgactttcacattctg

SEQ ID NO: 679 - RNA, 23 nt, synthetic construct
  source 1..23: mol_type = other RNA; note = Description of Artificial Sequence: Synthetic oligonucleotide
ttgtcgatgactttcacattctg

SEQ ID NO: 680 - RNA, 23 nt, synthetic construct
  source 1..23: mol_type = other RNA; note = Description of Artificial Sequence: Synthetic oligonucleotide
ttgtcgatgactttcacattctg

SEQ ID NO: 681 - RNA, 23 nt, synthetic construct
  source 1..23: mol_type = other RNA; note = Description of Artificial Sequence: Synthetic oligonucleotide
ttgtcgatgactttcacattctg

SEQ ID NO: 682 - RNA, 23 nt, synthetic construct
  source 1..23: mol_type = other RNA; note = Description of Artificial Sequence: Synthetic oligonucleotide
ttgtcgatgactttcacattctg

SEQ ID NO: 683 - RNA, 23 nt, synthetic construct
  source 1..23: mol_type = other RNA; note = Description of Artificial Sequence: Synthetic oligonucleotide
ttgtcgatgactttcacattctg

SEQ ID NO: 684 - RNA, 23 nt, synthetic construct
  source 1..23: mol_type = other RNA; note = Description of Artificial Sequence: Synthetic oligonucleotide
ttgtcgatgactttcacattctg

SEQ ID NO: 685 - RNA, 23 nt, synthetic construct
  source 1..23: mol_type = other RNA; note = Description of Artificial Sequence: Synthetic oligonucleotide; note = Description of Combined DNA/RNA Molecule: Synthetic oligonucleotide
  modified_base 2: mod_base = OTHER; note = Thymine
  modified_base 14: mod_base = OTHER; note = Thymine
ttgtcgatgactttcacattctg

SEQ ID NO: 686 - RNA, 23 nt, synthetic construct
  source 1..23: mol_type = other RNA; note = Description of Artificial Sequence: Synthetic oligonucleotide; note = Description of Combined DNA/RNA Molecule: Synthetic oligonucleotide
  modified_base 14: mod_base = OTHER; note = Thymine
ttgtcgatgactttcacattctg

SEQ ID NO: 687 - RNA, 23 nt, synthetic construct
  source 1..23: mol_type = other RNA; note = Description of Artificial Sequence: Synthetic oligonucleotide; note = Description of Combined DNA/RNA Molecule: Synthetic oligonucleotide
  modified_base 2: mod_base = OTHER; note = Thymine
  modified_base 14: mod_base = OTHER; note = Thymine
ttgtcgatgactttcacattctg

SEQ ID NO: 688 - RNA, 23 nt, synthetic construct
  source 1..23: mol_type = other RNA; note = Description of Artificial Sequence: Synthetic oligonucleotide; note = Description of Combined DNA/RNA Molecule: Synthetic oligonucleotide
  modified_base 14: mod_base = OTHER; note = Thymine
ttgtcgatgactttcacattctg

SEQ ID NO: 689 - RNA, 23 nt, synthetic construct
  source 1..23: mol_type = other RNA; note = Description of Artificial Sequence: Synthetic oligonucleotide; note = Description of Combined DNA/RNA Molecule: Synthetic oligonucleotide
  modified_base 2: mod_base = OTHER; note = Thymine
  modified_base 14: mod_base = OTHER; note = Thymine
ttgtcgatgactttcacattctg

SEQ ID NO: 690 - RNA, 23 nt, synthetic construct
  source 1..23: mol_type = other RNA; note = Description of Artificial Sequence: Synthetic oligonucleotide; note = Description of Combined DNA/RNA Molecule: Synthetic oligonucleotide
  modified_base 2: mod_base = OTHER; note = Thymine
  modified_base 14: mod_base = OTHER; note = Thymine
ttgtcgatgactttcacattctg

SEQ ID NO: 691 - RNA, 23 nt, synthetic construct
  source 1..23: mol_type = other RNA; note = Description of Artificial Sequence: Synthetic oligonucleotide; note = Description of Combined DNA/RNA Molecule: Synthetic oligonucleotide
  modified_base 2: mod_base = OTHER; note = Thymine
  modified_base 14: mod_base = OTHER; note = Thymine
ttgtcgatgactttcacattctg

SEQ ID NO: 692 - RNA, 23 nt, synthetic construct
  source 1..23: mol_type = other RNA; note = Description of Artificial Sequence: Synthetic oligonucleotide
tatatttccaggatgaaagtcca

SEQ ID NO: 693 - RNA, 23 nt, synthetic construct
  source 1..23: mol_type = other RNA; note = Description of Artificial Sequence: Synthetic oligonucleotide
tatatttccaggatgaaagtcca

SEQ ID NO: 694 - RNA, 23 nt, synthetic construct
  source 1..23: mol_type = other RNA; note = Description of Artificial Sequence: Synthetic oligonucleotide
tatatttccaggatgaaagtcca

SEQ ID NO: 695 - RNA, 23 nt, synthetic construct
  source 1..23: mol_type = other RNA; note = Description of Artificial Sequence: Synthetic oligonucleotide
tatatttccaggatgaaagtcca

SEQ ID NO: 696 - RNA, 23 nt, synthetic construct
  source 1..23: mol_type = other RNA; note = Description of Artificial Sequence: Synthetic oligonucleotide
tatatttccaggatgaaagtcca

SEQ ID NO: 697 - RNA, 23 nt, synthetic construct
  source 1..23: mol_type = other RNA; note = Description of Artificial Sequence: Synthetic oligonucleotide
tatatttccaggatgaaagtcca

SEQ ID NO: 698 - RNA, 21 nt, synthetic construct
  source 1..21: mol_type = other RNA; note = Description of Artificial Sequence: Synthetic oligonucleotide
tatatttccaggatgaaagtc

SEQ ID NO: 699 - RNA, 21 nt, synthetic construct
  source 1..21: mol_type = other RNA; note = Description of Artificial Sequence: Synthetic oligonucleotide
tatatttccaggatgaaagtc

SEQ ID NO: 700 - RNA, 23 nt, synthetic construct
  source 1..23: mol_type = other RNA; note = Description of Artificial Sequence: Synthetic oligonucleotide
tatatttccaggatgaaagtcca

SEQ ID NO: 701 - RNA, 23 nt, synthetic construct
  source 1..23: mol_type = other RNA; note = Description of Artificial Sequence: Synthetic oligonucleotide
tatatttccaggatgaaagtcca

SEQ ID NO: 702 - RNA, 23 nt, synthetic construct
  source 1..23: mol_type = other RNA; note = Description of Artificial Sequence: Synthetic oligonucleotide
tatatttccaggatgaaagtcca

SEQ ID NO: 703 - RNA, 23 nt, synthetic construct
  source 1..23: mol_type = other RNA; note = Description of Artificial Sequence: Synthetic oligonucleotide
tatatttccaggatgaaagtcca

SEQ ID NO: 704 - RNA, 23 nt, synthetic construct
  source 1..23: mol_type = other RNA; note = Description of Artificial Sequence: Synthetic oligonucleotide
tatatttccaggatgaaagtcca

SEQ ID NO: 705 - RNA, 23 nt, synthetic construct
  source 1..23: mol_type = other RNA; note = Description of Artificial Sequence: Synthetic oligonucleotide
tatatttccaggatgaaagtcca

SEQ ID NO: 706 - RNA, 23 nt, synthetic construct
  source 1..23: mol_type = other RNA; note = Description of Artificial Sequence: Synthetic oligonucleotide
tatatttccaggatgaaagtcca

SEQ ID NO: 707 - RNA, 23 nt, synthetic construct
  source 1..23: mol_type = other RNA; note = Description of Artificial Sequence: Synthetic oligonucleotide
tatatttccaggatgaaagtcca

SEQ ID NO: 708 - RNA, 23 nt, synthetic construct
  source 1..23: mol_type = other RNA; note = Description of Artificial Sequence: Synthetic oligonucleotide
tatatttccaggatgaaagtcca

SEQ ID NO: 709 - RNA, 23 nt, synthetic construct
  source 1..23: mol_type = other RNA; note = Description of Artificial Sequence: Synthetic oligonucleotide
tatatttccaggatgaaagtcca

SEQ ID NO: 710 - RNA, 23 nt, synthetic construct
  source 1..23: mol_type = other RNA; note = Description of Artificial Sequence: Synthetic oligonucleotide
tatatttccaggatgaaagtcca

SEQ ID NO: 711 - RNA, 23 nt, synthetic construct
  source 1..23: mol_type = other RNA; note = Description of Artificial Sequence: Synthetic oligonucleotide
tatatttccaggatgaaagtcca

SEQ ID NO: 712 - RNA, 23 nt, synthetic construct
  source 1..23: mol_type = other RNA; note = Description of Artificial Sequence: Synthetic oligonucleotide
tatatttccaggatgaaagtcca

SEQ ID NO: 713 - RNA, 23 nt, synthetic construct
  source 1..23: mol_type = other RNA; note = Description of Artificial Sequence: Synthetic oligonucleotide
tatatttccaggatgaaagtcca

SEQ ID NO: 714 - RNA, 23 nt, synthetic construct
  source 1..23: mol_type = other RNA; note = Description of Artificial Sequence: Synthetic oligonucleotide
tatatttccaggatgaaagtcca

SEQ ID NO: 715 - RNA, 23 nt, synthetic construct
  source 1..23: mol_type = other RNA; note = Description of Artificial Sequence: Synthetic oligonucleotide
tatatttccaggatgaaagtcca

SEQ ID NO: 716 - RNA, 23 nt, synthetic construct
  source 1..23: mol_type = other RNA; note = Description of Artificial Sequence: Synthetic oligonucleotide
tatatttccaggatgaaagtcca

SEQ ID NO: 717 - RNA, 23 nt, synthetic construct
  source 1..23: mol_type = other RNA; note = Description of Artificial Sequence: Synthetic oligonucleotide
tatatttccaggatgaaagtcca

SEQ ID NO: 718 - RNA, 23 nt, synthetic construct
  source 1..23: mol_type = other RNA; note = Description of Artificial Sequence: Synthetic oligonucleotide
tatatttccaggatgaaagtcca

SEQ ID NO: 719 - RNA, 23 nt, synthetic construct
  source 1..23: mol_type = other RNA; note = Description of Artificial Sequence: Synthetic oligonucleotide
tatatttccaggatgaaagtcca

SEQ ID NO: 720 - RNA, 23 nt, synthetic construct
  source 1..23: mol_type = other RNA; note = Description of Artificial Sequence: Synthetic oligonucleotide
tatatttccaggatgaaagtcca

SEQ ID NO: 721 - RNA, 23 nt, synthetic construct
  source 1..23: mol_type = other RNA; note = Description of Artificial Sequence: Synthetic oligonucleotide
tatatttccaggatgaaagtcca

SEQ ID NO: 722 - RNA, 23 nt, synthetic construct
  source 1..23: mol_type = other RNA; note = Description of Artificial Sequence: Synthetic oligonucleotide
tatatttccaggatgaaagtcca

SEQ ID NO: 723 - RNA, 23 nt, synthetic construct
  source 1..23: mol_type = other RNA; note = Description of Artificial Sequence: Synthetic oligonucleotide; note = Description of Combined DNA/RNA Molecule: Synthetic oligonucleotide
  modified_base 14: mod_base = OTHER; note = Thymine
tatatttccaggatgaaagtcca

SEQ ID NO: 724 - RNA, 23 nt, synthetic construct
  source 1..23: mol_type = other RNA; note = Description of Artificial Sequence: Synthetic oligonucleotide; note = Description of Combined DNA/RNA Molecule: Synthetic oligonucleotide
  modified_base 14: mod_base = OTHER; note = Thymine
tatatttccaggatgaaagtcca

SEQ ID NO: 725 - RNA, 23 nt, synthetic construct
  source 1..23: mol_type = other RNA; note = Description of Artificial Sequence: Synthetic oligonucleotide; note = Description of Combined DNA/RNA Molecule: Synthetic oligonucleotide
  modified_base 14: mod_base = OTHER; note = Thymine
tatatttccaggatgaaagtcca

SEQ ID NO: 726 - RNA, 23 nt, synthetic construct
  source 1..23: mol_type = other RNA; note = Description of Artificial Sequence: Synthetic oligonucleotide; note = Description of Combined DNA/RNA Molecule: Synthetic oligonucleotide
  modified_base 6: mod_base = OTHER; note = Thymine
  modified_base 14: mod_base = OTHER; note = Thymine
tatatttccaggatgaaagtcca

SEQ ID NO: 727 - RNA, 23 nt, synthetic construct
  source 1..23: mol_type = other RNA; note = Description of Artificial Sequence: Synthetic oligonucleotide; note = Description of Combined DNA/RNA Molecule: Synthetic oligonucleotide
  modified_base 6: mod_base = OTHER; note = Thymine
  modified_base 14: mod_base = OTHER; note = Thymine
tatatttccaggatgaaagtcca

SEQ ID NO: 728 - RNA, 23 nt, synthetic construct
  source 1..23: mol_type = other RNA; note = Description of Artificial Sequence: Synthetic oligonucleotide; note = Description of Combined DNA/RNA Molecule: Synthetic oligonucleotide
  modified_base 14: mod_base = OTHER; note = Thymine
tatatttccaggatgaaagtcca

SEQ ID NO: 729 - RNA, 23 nt, synthetic construct
  source 1..23: mol_type = other RNA; note = Description of Artificial Sequence: Synthetic oligonucleotide; note = Description of Combined DNA/RNA Molecule: Synthetic oligonucleotide
  modified_base 6: mod_base = OTHER; note = Thymine
  modified_base 14: mod_base = OTHER; note = Thymine
tatatttccaggatgaaagtcca

SEQ ID NO: 730 - RNA, 23 nt, synthetic construct
  source 1..23: mol_type = other RNA; note = Description of Artificial Sequence: Synthetic oligonucleotide; note = Description of Combined DNA/RNA Molecule: Synthetic oligonucleotide
  modified_base 14: mod_base = OTHER; note = Thymine
tatatttccaggatgaaagtcca

SEQ ID NO: 731 - RNA, 23 nt, synthetic construct
  source 1..23: mol_type = other RNA; note = Description of Artificial Sequence: Synthetic oligonucleotide
tgacatcttgaacacctttctcc

SEQ ID NO: 732 - RNA, 23 nt, synthetic construct
  source 1..23: mol_type = other RNA; note = Description of Artificial Sequence: Synthetic oligonucleotide
agttaatatatttccaggatgaa

SEQ ID NO: 733 - RNA, 23 nt, synthetic construct
  source 1..23: mol_type = other RNA; note = Description of Artificial Sequence: Synthetic oligonucleotide
ttgtcgatgactttcacattctg

SEQ ID NO: 734 - RNA, 23 nt, synthetic construct
  source 1..23: mol_type = other RNA; note = Description of Artificial Sequence: Synthetic oligonucleotide
tatgggaaaatattgtgcactgt

SEQ ID NO: 735 - RNA, 23 nt, synthetic construct
  source 1..23: mol_type = other RNA; note = Description of Artificial Sequence: Synthetic oligonucleotide
aatgtcttgtcgatgactttcac

SEQ ID NO: 736 - RNA, 23 nt, synthetic construct
  source 1..23: mol_type = other RNA; note = Description of Artificial Sequence: Synthetic oligonucleotide
tttgtcgatgactttcacattct

SEQ ID NO: 737 - RNA, 23 nt, synthetic construct
  source 1..23: mol_type = other RNA; note = Description of Artificial Sequence: Synthetic oligonucleotide
taacagttaatatatttccagga

SEQ ID NO: 738 - RNA, 23 nt, synthetic construct
  source 1..23: mol_type = other RNA; note = Description of Artificial Sequence: Synthetic oligonucleotide
aaataatacagatgggaaaatat

SEQ ID NO: 739 - RNA, 23 nt, synthetic construct
  source 1..23: mol_type = other RNA; note = Description of Artificial Sequence: Synthetic oligonucleotide
ttttgttggaaaagaacgacacc

SEQ ID NO: 740 - RNA, 23 nt, synthetic construct
  source 1..23: mol_type = other RNA; note = Description of Artificial Sequence: Synthetic oligonucleotide
tagttaatatatttccaggatga

SEQ ID NO: 741 - RNA, 23 nt, synthetic construct
  source 1..23: mol_type = other RNA; note = Description of Artificial Sequence: Synthetic oligonucleotide
tatcatcacctctcaaaatgccc

SEQ ID NO: 742 - RNA, 23 nt, synthetic construct
  source 1..23: mol_type = other RNA; note = Description of Artificial Sequence: Synthetic oligonucleotide
ttgaacacctttctccccctgga

SEQ ID NO: 743 - RNA, 23 nt, synthetic construct
  source 1..23: mol_type = other RNA; note = Description of Artificial Sequence: Synthetic oligonucleotide
tttaacagttaatatatttccag

SEQ ID NO: 744 - RNA, 23 nt, synthetic construct
  source 1..23: mol_type = other RNA; note = Description of Artificial Sequence: Synthetic oligonucleotide
aaggatttttcctcaccaatgtc

SEQ ID NO: 745 - RNA, 23 nt, synthetic construct
  source 1..23: mol_type = other RNA; note = Description of Artificial Sequence: Synthetic oligonucleotide
tatcttgaacacctttctccccc

SEQ ID NO: 746 - RNA, 23 nt, synthetic construct
  source 1..23: mol_type = other RNA; note = Description of Artificial Sequence: Synthetic oligonucleotide
atcatcacctctcaaaatgccct

SEQ ID NO: 747 - RNA, 23 nt, synthetic construct
  source 1..23: mol_type = other RNA; note = Description of Artificial Sequence: Synthetic oligonucleotide
aaaagaacgacaccctttgtatt

SEQ ID NO: 748 - RNA, 23 nt, synthetic construct
  source 1..23: mol_type = other RNA; note = Description of Artificial Sequence: Synthetic oligonucleotide
tgattcgacaccaagatcccatt

SEQ ID NO: 749 - RNA, 23 nt, synthetic construct
  source 1..23: mol_type = other RNA; note = Description of Artificial Sequence: Synthetic oligonucleotide
taaaatattgtgcactgtcagat

SEQ ID NO: 750 - RNA, 23 nt, synthetic construct
  source 1..23: mol_type = other RNA; note = Description of Artificial Sequence: Synthetic oligonucleotide
atgggaaaatattgtgcactgtc

SEQ ID NO: 751 - RNA, 23 nt, synthetic construct
  source 1..23: mol_type = other RNA; note = Description of Artificial Sequence: Synthetic oligonucleotide
ttaggacacccattgaaaagtca

SEQ ID NO: 752 - RNA, 23 nt, synthetic construct
  source 1..23: mol_type = other RNA; note = Description of Artificial Sequence: Synthetic oligonucleotide
aggatttttcctcaccaatgtct

SEQ ID NO: 753 - RNA, 23 nt, synthetic construct
  source 1..23: mol_type = other RNA; note = Description of Artificial Sequence: Synthetic oligonucleotide
tcattgaaaagtcaaaagcaatg

SEQ ID NO: 754 - RNA, 23 nt, synthetic construct
  source 1..23: mol_type = other RNA; note = Description of Artificial Sequence: Synthetic oligonucleotide
tcatcatcacctctcaaaatgcc

SEQ ID NO: 755 - RNA, 23 nt, synthetic construct
  source 1..23: mol_type = other RNA; note = Description of Artificial Sequence: Synthetic oligonucleotide
tgacacccattgaaaagtcaaaa

SEQ ID NO: 756 - RNA, 23 nt, synthetic construct
  source 1..23: mol_type = other RNA; note = Description of Artificial Sequence: Synthetic oligonucleotide
tctgtcctaaaacagaagtcgac

SEQ ID NO: 757 - RNA, 23 nt, synthetic construct
  source 1..23: mol_type = other RNA; note = Description of Artificial Sequence: Synthetic oligonucleotide
tattctggcacccactcagagcc

SEQ ID NO: 758 - RNA, 23 nt, synthetic construct
  source 1..23: mol_type = other RNA; note = Description of Artificial Sequence: Synthetic oligonucleotide
tactttcacattctggcacccac

SEQ ID NO: 759 - RNA, 23 nt, synthetic construct
  source 1..23: mol_type = other RNA; note = Description of Artificial Sequence: Synthetic oligonucleotide
tgttcctaggacacccattgaaa

SEQ ID NO: 760 - RNA, 23 nt, synthetic construct
  source 1..23: mol_type = other RNA; note = Description of Artificial Sequence: Synthetic oligonucleotide
taatgtcttgtcgatgactttca

SEQ ID NO: 761 - RNA, 23 nt, synthetic construct
  source 1..23: mol_type = other RNA; note = Description of Artificial Sequence: Synthetic oligonucleotide
tgcatcatcacctctcaaaatgc

SEQ ID NO: 762 - RNA, 23 nt, synthetic construct
  source 1..23: mol_type = other RNA; note = Description of Artificial Sequence: Synthetic oligonucleotide
tctcaccaatgtcttgtcgatga

SEQ ID NO: 763 - RNA, 23 nt, synthetic construct
  source 1..23: mol_type = other RNA; note = Description of Artificial Sequence: Synthetic oligonucleotide
tgactttcacattctggcaccca

SEQ ID NO: 764 - RNA, 23 nt, synthetic construct
  source 1..23: mol_type = other RNA; note = Description of Artificial Sequence: Synthetic oligonucleotide
tggaaaatattgtgcactgtcag

SEQ ID NO: 765 - RNA, 23 nt, synthetic construct
  source 1..23: mol_type = other RNA; note = Description of Artificial Sequence: Synthetic oligonucleotide
ttctgcacagtgtctctttgtca

SEQ ID NO: 766 - RNA, 23 nt, synthetic construct
  source 1..23: mol_type = other RNA; note = Description of Artificial Sequence: Synthetic oligonucleotide
tcctaggacacccattgaaaagt

SEQ ID NO: 767 - RNA, 23 nt, synthetic construct
  source 1..23: mol_type = other RNA; note = Description of Artificial Sequence: Synthetic oligonucleotide
actgtcagatcttggaaacggcc

SEQ ID NO: 768 - RNA, 23 nt, synthetic construct
  source 1..23: mol_type = other RNA; note = Description of Artificial Sequence: Synthetic oligonucleotide
tttgaacacctttctccccctgg

SEQ ID NO: 769 - RNA, 23 nt, synthetic construct
  source 1..23: mol_type = other RNA; note = Description of Artificial Sequence: Synthetic oligonucleotide
accaatgtcttgtcgatgacttt

SEQ ID NO: 770 - DNA, 21 bp, synthetic construct
  source 1..21: mol_type = other DNA; note = Description of Artificial Sequence: Synthetic oligonucleotide; note = Description of Combined DNA/RNA Molecule: Synthetic oligonucleotide
  modified_base 1: mod_base = OTHER; note = 2'-O-methyluridine-3'-phosphate
  modified_base 2: mod_base = OTHER; note = 2'-O-methyluridine-3'-phosphate
  modified_base 3: mod_base = OTHER; note = 2'-O-methylcytidine-3'-phosphate
  modified_base 6: mod_base = OTHER; note = 2'-O-methyluridine-3'-phosphate
  modified_base 10: mod_base = OTHER; note = 2'-O-methyluridine-3'-phosphate
  modified_base 12: mod_base = OTHER; note = 2'-O-methyluridine-3'-phosphate
  modified_base 13: mod_base = OTHER; note = 2'-O-methylcytidine-3'-phosphate
  modified_base 14: mod_base = OTHER; note = 2'-O-methylcytidine-3'-phosphate
  modified_base 15: mod_base = OTHER; note = 2'-O-methyluridine-3'-phosphate
  modified_base 20: mod_base = OTHER; note = 2'-deoxythymidine-3'-phosphorothioate
  misc_feature 1..19: note = RNA
  misc_feature 20..21: note = DNA
ttcaatgggtgtcctaggatt

SEQ ID NO: 771 - RNA, 19 nt, synthetic construct
  source 1..19: mol_type = other RNA; note = Description of Artificial Sequence: Synthetic oligonucleotide
ttcaatgggtgtcctagga

SEQ ID NO: 772 - DNA, 21 bp, synthetic construct
  source 1..21: mol_type = other DNA; note = Description of Artificial Sequence: Synthetic oligonucleotide; note = Description of Combined DNA/RNA Molecule: Synthetic oligonucleotide
  modified_base 2: mod_base = OTHER; note = 2'-O-methylcytidine-3'-phosphate
  modified_base 5: mod_base = OTHER; note = 2'-O-methylcytidine-3'-phosphate
  modified_base 6: mod_base = OTHER; note = 2'-O-methyluridine-3'-phosphate
  modified_base 14: mod_base = OTHER; note = 2'-O-methylcytidine-3'-phosphate
  modified_base 16: mod_base = OTHER; note = 2'-O-methyluridine-3'-phosphate
  modified_base 17: mod_base = OTHER; note = 2'-O-methylcytidine-3'-phosphate
  modified_base 19: mod_base = OTHER; note = 2'-O-methyluridine-3'-phosphate
  modified_base 20: mod_base = OTHER; note = 2'-deoxythymidine-3'-phosphorothioate
  misc_feature 1..19: note = RNA
  misc_feature 20..21: note = DNA
acaactggagggacatcgttt

SEQ ID NO: 773 - RNA, 19 nt, synthetic construct
  source 1..19: mol_type = other RNA; note = Description of Artificial Sequence: Synthetic oligonucleotide
acaactggagggacatcgt

SEQ ID NO: 774 - DNA, 21 bp, synthetic construct
  source 1..21: mol_type = other DNA; note = Description of Artificial Sequence: Synthetic oligonucleotide; note = Description of Combined DNA/RNA Molecule: Synthetic oligonucleotide
  modified_base 4: mod_base = OTHER; note = 2'-O-methyluridine-3'-phosphate
  modified_base 9: mod_base = OTHER; note = 2'-O-methylcytidine-3'-phosphate
  modified_base 13: mod_base = OTHER; note = 2'-O-methylcytidine-3'-phosphate
  modified_base 20: mod_base = OTHER; note = 2'-deoxythymidine-3'-phosphorothioate
  misc_feature 1..19: note = RNA
  misc_feature 20..21: note = DNA
tcctaggacacccattgaatt

SEQ ID NO: 775 - RNA, 19 nt, synthetic construct
  source 1..19: mol_type = other RNA; note = Description of Artificial Sequence: Synthetic oligonucleotide
tcctaggacacccattgaa

SEQ ID NO: 776 - DNA, 21 bp, synthetic construct
  source 1..21: mol_type = other DNA; note = Description of Artificial Sequence: Synthetic oligonucleotide; note = Description of Combined DNA/RNA Molecule: Synthetic oligonucleotide
  modified_base 13: mod_base = OTHER; note = 2'-O-methylcytidine-3'-phosphate
  modified_base 20: mod_base = OTHER; note = 2'-deoxythymidine-3'-phosphorothioate
  misc_feature 1..19: note = RNA
  misc_feature 20..21: note = DNA
acgatgtccctccagttgttt

SEQ ID NO: 777 - RNA, 19 nt, synthetic construct
  source 1..19: mol_type = other RNA; note = Description of Artificial Sequence: Synthetic oligonucleotide
acgatgtccctccagttgt

SEQ ID NO: 778 - RNA, 21 nt, synthetic construct
  source 1..21: mol_type = other RNA; note = Description of Artificial Sequence: Synthetic oligonucleotide
  modified_base 1: mod_base = OTHER; note = 2'-fluorouridine -3'-phosphorothioate
  modified_base 2: mod_base = OTHER; note = 2'-O-methylcytidine-3'-phosphorothioate
  modified_base 3: mod_base = OTHER; note = 2'-fluorocytidine-3'-phosphate
  modified_base 4: mod_base = OTHER; note = 2'-O-methyluridine-3'-phosphate
  modified_base 5: mod_base = OTHER; note = 2'-fluoroadenosine-3'-phosphate
  modified_base 6: mod_base = OTHER; note = 2'-O-methylguanosine-3'-phosphate
  modified_base 7: mod_base = OTHER; note = 2'-fluoroguanosine-3'-phosphate
  modified_base 8: mod_base = OTHER; note = 2'-O-methyladenosine-3'-phosphate
  modified_base 9: mod_base = OTHER; note = 2'-fluoroadenosine-3'-phosphate
  modified_base 10: mod_base = OTHER; note = 2'-fluorocytidine-3'-phosphate
  modified_base 11: mod_base = OTHER; note = 2'-fluorocytidine-3'-phosphate
  modified_base 12: mod_base = OTHER; note = 2'-O-methyluridine-3'-phosphate
  modified_base 13: mod_base = OTHER; note = 2'-fluorouridine-3'-phosphate
  modified_base 14: mod_base = OTHER; note = 2'-O-methyluridine-3'-phosphate
  modified_base 15: mod_base = OTHER; note = 2'-fluorouridine-3'-phosphate
  modified_base 16: mod_base = OTHER; note = 2'-O-methyladenosine-3'-phosphate
  modified_base 17: mod_base = OTHER; note = 2'-fluoroguanosine-3'-phosphate
  modified_base 18: mod_base = OTHER; note = 2'-O-methyladenosine-3'-phosphate
  modified_base 19: mod_base = OTHER; note = 2'-fluoroadenosine-3'-phosphate
  modified_base 20: mod_base = OTHER; note = 2'-O-methyladenosine-3'-phosphate
  modified_base 21: mod_base = OTHER; note = 2'-fluorouridine-3'-phosphate N-[tris(GalNAc-alkyl)-amidodecanoyl)]-4-hydroxyprolinol Hyp-(GalNAc-alkyl)3
tcctaggaaccttttagaaat

SEQ ID NO: 779 - RNA, 21 nt, synthetic construct
  source 1..21: mol_type = other RNA; note = Description of Artificial Sequence: Synthetic oligonucleotide
  modified_base 1: mod_base = OTHER; note = 2'-fluoroguanosine-3'-phosphorothioate
  modified_base 2: mod_base = OTHER; note = 2'-O-methyladenosine-3'-phosphorothioate
  modified_base 3: mod_base = OTHER; note = 2'-fluorocytidine-3'-phosphate
  modified_base 4: mod_base = OTHER; note = 2'-O-methyluridine-3'-phosphate
  modified_base 5: mod_base = OTHER; note = 2'-fluorouridine-3'-phosphate
  modified_base 6: mod_base = OTHER; note = 2'-O-methyluridine-3'-phosphate
  modified_base 7: mod_base = OTHER; note = 2'-fluorocytidine-3'-phosphate
  modified_base 8: mod_base = OTHER; note = 2'-O-methyladenosine-3'-phosphate
  modified_base 9: mod_base = OTHER; note = 2'-fluorouridine-3'-phosphate
  modified_base 10: mod_base = OTHER; note = 2'-fluorocytidine-3'-phosphate
  modified_base 11: mod_base = OTHER; note = 2'-fluorocytidine-3'-phosphate
  modified_base 12: mod_base = OTHER; note = 2'-O-methyluridine-3'-phosphate
  modified_base 13: mod_base = OTHER; note = 2'-fluoroguanosine-3'-phosphate
  modified_base 14: mod_base = OTHER; note = 2'-O-methylguanosine-3'-phosphate
  modified_base 15: mod_base = OTHER; note = 2'-fluoroadenosine-3'-phosphate
  modified_base 16: mod_base = OTHER; note = 2'-O-methyladenosine-3'-phosphate
  modified_base 17: mod_base = OTHER; note = 2'-fluoroadenosine-3'-phosphate
  modified_base 18: mod_base = OTHER; note = 2'-O-methyluridine-3'-phosphate
  modified_base 19: mod_base = OTHER; note = 2'-fluoroadenosine-3'-phosphate
  modified_base 20: mod_base = OTHER; note = 2'-O-methyluridine-3'-phosphate
  modified_base 21: mod_base = OTHER; note = 2'-fluoroadenosine-3'-phosphate N-[tris(GalNAc-alkyl)-amidodecanoyl)]-4-hydroxyprolinol Hyp-(GalNAc-alkyl)3
gactttcatcctggaaatata

SEQ ID NO: 780 - RNA, 21 nt, synthetic construct
  source 1..21: mol_type = other RNA; note = Description of Artificial Sequence: Synthetic oligonucleotide
  modified_base 1: mod_base = OTHER; note = 2'-fluoroguanosine-3'-phosphorothioate
  modified_base 2: mod_base = OTHER; note = 2'-O-methyladenosine-3'-phosphorothioate
  modified_base 3: mod_base = OTHER; note = 2'-fluoroadenosine-3'-phosphate
  modified_base 4: mod_base = OTHER; note = 2'-O-methyluridine-3'-phosphate
  modified_base 5: mod_base = OTHER; note = 2'-fluoroguanosine-3'-phosphate
  modified_base 6: mod_base = OTHER; note = 2'-O-methyluridine-3'-phosphate
  modified_base 7: mod_base = OTHER; note = 2'-fluoroguanosine-3'-phosphate
  modified_base 8: mod_base = OTHER; note = 2'-O-methyladenosine-3'-phosphate
  modified_base 9: mod_base = OTHER; note = 2'-fluoroadenosine-3'-phosphate
  modified_base 10: mod_base = OTHER; note = 2'-fluoroadenosine-3'-phosphate
  modified_base 11: mod_base = OTHER; note = 2'-fluoroguanosine-3'-phosphate
  modified_base 12: mod_base = OTHER; note = 2'-O-methyluridine-3'-phosphate
  modified_base 13: mod_base = OTHER; note = 2'-fluorocytidine-3'-phosphate
  modified_base 14: mod_base = OTHER; note = 2'-O-methyladenosine-3'-phosphate
  modified_base 15: mod_base = OTHER; note = 2'-fluorouridine-3'-phosphate
  modified_base 16: mod_base = OTHER; note = 2'-O-methylcytidine-3'-phosphate
  modified_base 17: mod_base = OTHER; note = 2'-fluoroguanosine-3'-phosphate
  modified_base 18: mod_base = OTHER; note = 2'-O-methyladenosine-3'-phosphate
  modified_base 19: mod_base = OTHER; note = 2'-fluorocytidine-3'-phosphate
  modified_base 20: mod_base = OTHER; note = 2'-O-methyladenosine-3'-phosphate
  modified_base 21: mod_base = OTHER; note = 2'-fluoroadenosine-3'-phosphate N-[tris(GalNAc-alkyl)-amidodecanoyl)]-4-hydroxyprolinol Hyp-(GalNAc-alkyl)3
gaatgtgaaagtcatcgacaa

SEQ ID NO: 781 - RNA, 21 nt, synthetic construct
  source 1..21: mol_type = other RNA; note = Description of Artificial Sequence: Synthetic oligonucleotide
  modified_base 1: mod_base = OTHER; note = 2'-fluorocytidine-3'-phosphorothioate
  modified_base 2: mod_base = OTHER; note = 2'-O-methyladenosine-3'-phosphorothioate
  modified_base 3: mod_base = OTHER; note = 2'-fluorouridine-3'-phosphate
  modified_base 4: mod_base = OTHER; note = 2'-O-methyluridine-3'-phosphate
  modified_base 5: mod_base = OTHER; note = 2'-fluoroguanosine-3'-phosphate
  modified_base 6: mod_base = OTHER; note = 2'-O-methylguanosine-3'-phosphate
  modified_base 7: mod_base = OTHER; note = 2'-fluorouridine-3'-phosphate
  modified_base 8: mod_base = OTHER; note = 2'-O-methylguanosine-3'-phosphate
  modified_base 9: mod_base = OTHER; note = 2'-fluoroadenosine-3'-phosphate
  modified_base 10: mod_base = OTHER; note = 2'-fluoroguanosine-3'-phosphate
  modified_base 11: mod_base = OTHER; note = 2'-fluoroguanosine-3'-phosphate
  modified_base 12: mod_base = OTHER; note = 2'-O-methyladenosine-3'-phosphate
  modified_base 13: mod_base = OTHER; note = 2'-fluoroadenosine-3'-phosphate
  modified_base 14: mod_base = OTHER; note = 2'-O-methyladenosine-3'-phosphate
  modified_base 15: mod_base = OTHER; note = 2'-fluoroadenosine-3'-phosphate
  modified_base 16: mod_base = OTHER; note = 2'-O-methyladenosine-3'-phosphate
  modified_base 17: mod_base = OTHER; note = 2'-fluorouridine-3'-phosphate
  modified_base 18: mod_base = OTHER; note = 2'-O-methylcytidine-3'-phosphate
  modified_base 19: mod_base = OTHER; note = 2'-fluorocytidine-3'-phosphate
  modified_base 20: mod_base = OTHER; note = 2'-O-methyluridine-3'-phosphate
  modified_base 21: mod_base = OTHER; note = 2'-fluorouridine-3'-phosphate N-[tris(GalNAc-alkyl)-amidodecanoyl)]-4-hydroxyprolinol Hyp-(GalNAc-alkyl)3
cattggtgaggaaaaatcctt

SEQ ID NO: 782 - RNA, 21 nt, synthetic construct
  source 1..21: mol_type = other RNA; note = Description of Artificial Sequence: Synthetic oligonucleotide
  modified_base 1: mod_base = OTHER; note = 2'-fluoroadenosine-3'-phosphorothioate
  modified_base 2: mod_base = OTHER; note = 2'-O-methyluridine-3'-phosphorothioate
  modified_base 3: mod_base = OTHER; note = 2'-fluorocytidine-3'-phosphate
  modified_base 4: mod_base = OTHER; note = 2'-O-methylguanosine-3'-phosphate
  modified_base 5: mod_base = OTHER; note = 2'-fluoroadenosine-3'-phosphate
  modified_base 6: mod_base = OTHER; note = 2'-O-methylcytidine-3'-phosphate
  modified_base 7: mod_base = OTHER; note = 2'-fluoroadenosine-3'-phosphate
  modified_base 8: mod_base = OTHER; note = 2'-O-methyladenosine-3'-phosphate
  modified_base 9: mod_base = OTHER; note = 2'-fluoroguanosine-3'-phosphate
  modified_base 10: mod_base = OTHER; note = 2'-fluoroadenosine-3'-phosphate
  modified_base 11: mod_base = OTHER; note = 2'-fluorocytidine-3'-phosphate
  modified_base 12: mod_base = OTHER; note = 2'-O-methyladenosine-3'-phosphate
  modified_base 13: mod_base = OTHER; note = 2'-fluorouridine-3'-phosphate
  modified_base 14: mod_base = OTHER; note = 2'-O-methyluridine-3'-phosphate
  modified_base 15: mod_base = OTHER; note = 2'-fluoroguanosine-3'-phosphate
  modified_base 16: mod_base = OTHER; note = 2'-O-methylguanosine-3'-phosphate
  modified_base 17: mod_base = OTHER; note = 2'-fluorouridine-3'-phosphate
  modified_base 18: mod_base = OTHER; note = 2'-O-methylguanosine-3'-phosphate
  modified_base 19: mod_base = OTHER; note = 2'-fluoroadenosine-3'-phosphate
  modified_base 20: mod_base = OTHER; note = 2'-O-methylguanosine-3'-phosphate
  modified_base 21: mod_base = OTHER; note = 2'-fluoroadenosine-3'-phosphate N-[tris(GalNAc-alkyl)-amidodecanoyl)]-4-hydroxyprolinol Hyp-(GalNAc-alkyl)3
atcgacaagacattggtgaga

SEQ ID NO: 783 - RNA, 21 nt, synthetic construct
  source 1..21: mol_type = other RNA; note = Description of Artificial Sequence: Synthetic oligonucleotide
  modified_base 1: mod_base = OTHER; note = 2'-fluoroadenosine-3'-phosphorothioate
  modified_base 2: mod_base = OTHER; note = 2'-O-methylcytidine-3'-phosphorothioate
  modified_base 3: mod_base = OTHER; note = 2'-fluoroadenosine-3'-phosphate
  modified_base 4: mod_base = OTHER; note = 2'-O-methyluridine-3'-phosphate
  modified_base 5: mod_base = OTHER; note = 2'-fluorouridine-3'-phosphate
  modified_base 6: mod_base = OTHER; note = 2'-O-methylguanosine-3'-phosphate
  modified_base 7: mod_base = OTHER; note = 2'-fluoroguanosine-3'-phosphate
  modified_base 8: mod_base = OTHER; note = 2'-O-methyluridine-3'-phosphate
  modified_base 9: mod_base = OTHER; note = 2'-fluoroguanosine-3'-phosphate
  modified_base 10: mod_base = OTHER; note = 2'-fluoroadenosine-3'-phosphate
  modified_base 11: mod_base = OTHER; note = 2'-fluoroguanosine-3'-phosphate
  modified_base 12: mod_base = OTHER; note = 2'-O-methylguanosine-3'-phosphate
  modified_base 13: mod_base = OTHER; note = 2'-fluoroadenosine-3'-phosphate
  modified_base 14: mod_base = OTHER; note = 2'-O-methyladenosine-3'-phosphate
  modified_base 15: mod_base = OTHER; note = 2'-fluoroadenosine-3'-phosphate
  modified_base 16: mod_base = OTHER; note = 2'-O-methyladenosine-3'-phosphate
  modified_base 17: mod_base = OTHER; note = 2'-fluoroadenosine-3'-phosphate
  modified_base 18: mod_base = OTHER; note = 2'-O-methyluridine-3'-phosphate
  modified_base 19: mod_base = OTHER; note = 2'-fluorocytidine-3'-phosphate
  modified_base 20: mod_base = OTHER; note = 2'-O-methylcytidine-3'-phosphate
  modified_base 21: mod_base = OTHER; note = 2'-fluorouridine-3'-phosphate N-[tris(GalNAc-alkyl)-amidodecanoyl)]-4-hydroxyprolinol Hyp-(GalNAc-alkyl)3
acattggtgaggaaaaatcct

SEQ ID NO: 784 - RNA, 21 nt, synthetic construct
  source 1..21: mol_type = other RNA; note = Description of Artificial Sequence: Synthetic oligonucleotide
  modified_base 1: mod_base = OTHER; note = 2'-fluoroguanosine-3'-phosphorothioate
  modified_base 2: mod_base = OTHER; note = 2'-O-methyladenosine-3'-phosphorothioate
  modified_base 3: mod_base = OTHER; note = 2'-fluoroadenosine-3'-phosphate
  modified_base 4: mod_base = OTHER; note = 2'-O-methyladenosine-3'-phosphate
  modified_base 5: mod_base = OTHER; note = 2'-fluoroguanosine-3'-phosphate
  modified_base 6: mod_base = OTHER; note = 2'-O-methyluridine-3'-phosphate
  modified_base 7: mod_base = OTHER; note = 2'-fluorocytidine-3'-phosphate
  modified_base 8: mod_base = OTHER; note = 2'-O-methyladenosine-3'-phosphate
  modified_base 9: mod_base = OTHER; note = 2'-fluorouridine-3'-phosphate
  modified_base 10: mod_base = OTHER; note = 2'-fluorocytidine-3'-phosphate
  modified_base 11: mod_base = OTHER; note = 2'-fluoroguanosine-3'-phosphate
  modified_base 12: mod_base = OTHER; note = 2'-O-methyladenosine-3'-phosphate
  modified_base 13: mod_base = OTHER; note = 2'-fluorocytidine-3'-phosphate
  modified_base 14: mod_base = OTHER; note = 2'-O-methyladenosine-3'-phosphate
  modified_base 15: mod_base = OTHER; note = 2'-fluoroadenosine-3'-phosphate
  modified_base 16: mod_base = OTHER; note = 2'-O-methylguanosine-3'-phosphate
  modified_base 17: mod_base = OTHER; note = 2'-fluoroadenosine-3'-phosphate
  modified_base 18: mod_base = OTHER; note = 2'-O-methylcytidine-3'-phosphate
  modified_base 19: mod_base = OTHER; note = 2'-fluoroadenosine-3'-phosphate
  modified_base 20: mod_base = OTHER; note = 2'-O-methyluridine-3'-phosphate
  modified_base 21: mod_base = OTHER; note = 2'-fluorouridine-3'-phosphate N-[tris(GalNAc-alkyl)-amidodecanoyl)]-4-hydroxyprolinol Hyp-(GalNAc-alkyl)3
gaaagtcatcgacaagacatt

SEQ ID NO: 785 - RNA, 21 nt, synthetic construct
  source 1..21: mol_type = other RNA; note = Description of Artificial Sequence: Synthetic oligonucleotide
  modified_base 1: mod_base = OTHER; note = 2'-fluoroadenosine-3'-phosphorothioate
  modified_base 2: mod_base = OTHER; note = 2'-O-methyladenosine-3'-phosphorothioate
  modified_base 3: mod_base = OTHER; note = 2'-fluoroadenosine-3'-phosphate
  modified_base 4: mod_base = OTHER; note = 2'-O-methylguanosine-3'-phosphate
  modified_base 5: mod_base = OTHER; note = 2'-fluorouridine-3'-phosphate
  modified_base 6: mod_base = OTHER; note = 2'-O-methylcytidine-3'-phosphate
  modified_base 7: mod_base = OTHER; note = 2'-fluoroadenosine-3'-phosphate
  modified_base 8: mod_base = OTHER; note = 2'-O-methyluridine-3'-phosphate
  modified_base 9: mod_base = OTHER; note = 2'-fluorocytidine-3'-phosphate
  modified_base 10: mod_base = OTHER; note = 2'-fluoroguanosine-3'-phosphate
  modified_base 11: mod_base = OTHER; note = 2'-fluoroadenosine-3'-phosphate
  modified_base 12: mod_base = OTHER; note = 2'-O-methylcytidine-3'-phosphate
  modified_base 13: mod_base = OTHER; note = 2'-fluoroadenosine-3'-phosphate
  modified_base 14: mod_base = OTHER; note = 2'-O-methyladenosine-3'-phosphate
  modified_base 15: mod_base = OTHER; note = 2'-fluoroguanosine-3'-phosphate
  modified_base 16: mod_base = OTHER; note = 2'-O-methyladenosine-3'-phosphate
  modified_base 17: mod_base = OTHER; note = 2'-fluorocytidine-3'-phosphate
  modified_base 18: mod_base = OTHER; note = 2'-O-methyladenosine-3'-phosphate
  modified_base 19: mod_base = OTHER; note = 2'-fluorouridine-3'-phosphate
  modified_base 20: mod_base = OTHER; note = 2'-O-methyluridine-3'-phosphate
  modified_base 21: mod_base = OTHER; note = 2'-fluoroadenosine-3'-phosphate N-[tris(GalNAc-alkyl)-amidodecanoyl)]-4-hydroxyprolinol Hyp-(GalNAc-alkyl)3
aaagtcatcgacaagacatta

SEQ ID NO: 786 - RNA, 23 nt, synthetic construct
  source 1..23: mol_type = other RNA; note = Description of Artificial Sequence: Synthetic oligonucleotide
  modified_base 1: mod_base = OTHER; note = 2'-O-methyladenosine-3'-phosphorothioate
  modified_base 2: mod_base = OTHER; note = 2'-fluorouridine -3'-phosphorothioate
  modified_base 3: mod_base = OTHER; note = 2'-O-methyluridine-3'-phosphate
  modified_base 4: mod_base = OTHER; note = 2'-fluorouridine-3'-phosphate
  modified_base 5: mod_base = OTHER; note = 2'-O-methylcytidine-3'-phosphate
  modified_base 6: mod_base = OTHER; note = 2'-fluorouridine-3'-phosphate
  modified_base 7: mod_base = OTHER; note = 2'-O-methyladenosine-3'-phosphate
  modified_base 8: mod_base = OTHER; note = 2'-fluoroadenosine-3'-phosphate
  modified_base 9: mod_base = OTHER; note = 2'-O-methyladenosine-3'-phosphate
  modified_base 10: mod_base = OTHER; note = 2'-fluoroadenosine-3'-phosphate
  modified_base 11: mod_base = OTHER; note = 2'-O-methylguanosine-3'-phosphate
  modified_base 12: mod_base = OTHER; note = 2'-O-methylguanosine-3'-phosphate
  modified_base 13: mod_base = OTHER; note = 2'-O-methyluridine-3'-phosphate
  modified_base 14: mod_base = OTHER; note = 2'-fluorouridine-3'-phosphate
  modified_base 15: mod_base = OTHER; note = 2'-O-methylcytidine-3'-phosphate
  modified_base 16: mod_base = OTHER; note = 2'-fluorocytidine-3'-phosphate
  modified_base 17: mod_base = OTHER; note = 2'-O-methyluridine-3'-phosphate
  modified_base 18: mod_base = OTHER; note = 2'-fluoroadenosine-3'-phosphate
  modified_base 19: mod_base = OTHER; note = 2'-O-methylguanosine-3'-phosphate
  modified_base 20: mod_base = OTHER; note = 2'-fluoroguanosine-3'-phosphate
  modified_base 21: mod_base = OTHER; note = 2'-O-methyladenosine-3'-phosphorothioate
  modified_base 22: mod_base = OTHER; note = 2'-O-methylcytidine-3'-phosphorothioate
  modified_base 23: mod_base = OTHER; note = 2'-O-methyladenosine-3'-phosphate
atttctaaaaggttcctaggaca

SEQ ID NO: 787 - RNA, 23 nt, synthetic construct
  source 1..23: mol_type = other RNA; note = Description of Artificial Sequence: Synthetic oligonucleotide
  modified_base 1: mod_base = OTHER; note = 2'-O-methyluridine-3'-phosphorothioate
  modified_base 2: mod_base = OTHER; note = 2'-fluoroadenosine-3'-phosphorothioate
  modified_base 3: mod_base = OTHER; note = 2'-O-methyluridine-3'-phosphate
  modified_base 4: mod_base = OTHER; note = 2'-fluoroadenosine-3'-phosphate
  modified_base 5: mod_base = OTHER; note = 2'-O-methyluridine-3'-phosphate
  modified_base 6: mod_base = OTHER; note = 2'-fluorouridine-3'-phosphate
  modified_base 7: mod_base = OTHER; note = 2'-O-methyluridine-3'-phosphate
  modified_base 8: mod_base = OTHER; note = 2'-fluorocytidine-3'-phosphate
  modified_base 9: mod_base = OTHER; note = 2'-O-methylcytidine-3'-phosphate
  modified_base 10: mod_base = OTHER; note = 2'-fluoroadenosine-3'-phosphate
  modified_base 11: mod_base = OTHER; note = 2'-O-methylguanosine-3'-phosphate
  modified_base 12: mod_base = OTHER; note = 2'-O-methylguanosine-3'-phosphate
  modified_base 13: mod_base = OTHER; note = 2'-O-methyladenosine-3'-phosphate
  modified_base 14: mod_base = OTHER; note = 2'-fluorouridine-3'-phosphate
  modified_base 15: mod_base = OTHER; note = 2'-O-methylguanosine-3'-phosphate
  modified_base 16: mod_base = OTHER; note = 2'-fluoroadenosine-3'-phosphate
  modified_base 17: mod_base = OTHER; note = 2'-O-methyladenosine-3'-phosphate
  modified_base 18: mod_base = OTHER; note = 2'-fluoroadenosine-3'-phosphate
  modified_base 19: mod_base = OTHER; note = 2'-O-methylguanosine-3'-phosphate
  modified_base 20: mod_base = OTHER; note = 2'-fluorouridine-3'-phosphate
  modified_base 21: mod_base = OTHER; note = 2'-O-methylcytidine-3'-phosphorothioate
  modified_base 22: mod_base = OTHER; note = 2'-O-methylcytidine-3'-phosphorothioate
  modified_base 23: mod_base = OTHER; note = 2'-O-methyladenosine-3'-phosphate
tatatttccaggatgaaagtcca

SEQ ID NO: 788 - RNA, 23 nt, synthetic construct
  source 1..23: mol_type = other RNA; note = Description of Artificial Sequence: Synthetic oligonucleotide
  modified_base 1: mod_base = OTHER; note = 2'-O-methyluridine-3'-phosphorothioate
  modified_base 2: mod_base = OTHER; note = 2'-fluorouridine -3'-phosphorothioate
  modified_base 3: mod_base = OTHER; note = 2'-O-methylguanosine-3'-phosphate
  modified_base 4: mod_base = OTHER; note = 2'-fluorouridine-3'-phosphate
  modified_base 5: mod_base = OTHER; note = 2'-O-methylcytidine-3'-phosphate
  modified_base 6: mod_base = OTHER; note = 2'-fluoroguanosine-3'-phosphate
  modified_base 7: mod_base = OTHER; note = 2'-O-methyladenosine-3'-phosphate
  modified_base 8: mod_base = OTHER; note = 2'-fluorouridine-3'-phosphate
  modified_base 9: mod_base = OTHER; note = 2'-O-methylguanosine-3'-phosphate
  modified_base 10: mod_base = OTHER; note = 2'-fluoroadenosine-3'-phosphate
  modified_base 11: mod_base = OTHER; note = 2'-O-methylcytidine-3'-phosphate
  modified_base 12: mod_base = OTHER; note = 2'-O-methyluridine-3'-phosphate
  modified_base 13: mod_base = OTHER; note = 2'-O-methyluridine-3'-phosphate
  modified_base 14: mod_base = OTHER; note = 2'-fluorouridine-3'-phosphate
  modified_base 15: mod_base = OTHER; note = 2'-O-methylcytidine-3'-phosphate
  modified_base 16: mod_base = OTHER; note = 2'-fluoroadenosine-3'-phosphate
  modified_base 17: mod_base = OTHER; note = 2'-O-methylcytidine-3'-phosphate
  modified_base 18: mod_base = OTHER; note = 2'-fluoroadenosine-3'-phosphate
  modified_base 19: mod_base = OTHER; note = 2'-O-methyluridine-3'-phosphate
  modified_base 20: mod_base = OTHER; note = 2'-fluorouridine-3'-phosphate
  modified_base 21: mod_base = OTHER; note = 2'-O-methylcytidine-3'-phosphorothioate
  modified_base 22: mod_base = OTHER; note = 2'-O-methyluridine-3'-phosphorothioate
  modified_base 23: mod_base = OTHER; note = 2'-O-methylguanosine-3'-phosphate
ttgtcgatgactttcacattctg

SEQ ID NO: 789 - RNA, 23 nt, synthetic construct
  source 1..23: mol_type = other RNA; note = Description of Artificial Sequence: Synthetic oligonucleotide
  modified_base 1: mod_base = OTHER; note = 2'-O-methyladenosine-3'-phosphorothioate
  modified_base 2: mod_base = OTHER; note = 2'-fluoroadenosine-3'-phosphorothioate
  modified_base 3: mod_base = OTHER; note = 2'-O-methylguanosine-3'-phosphate
  modified_base 4: mod_base = OTHER; note = 2'-fluoroguanosine-3'-phosphate
  modified_base 5: mod_base = OTHER; note = 2'-O-methyladenosine-3'-phosphate
  modified_base 6: mod_base = OTHER; note = 2'-fluorouridine-3'-phosphate
  modified_base 7: mod_base = OTHER; note = 2'-O-methyluridine-3'-phosphate
  modified_base 8: mod_base = OTHER; note = 2'-fluorouridine-3'-phosphate
  modified_base 9: mod_base = OTHER; note = 2'-O-methyluridine-3'-phosphate
  modified_base 10: mod_base = OTHER; note = 2'-fluorouridine-3'-phosphate
  modified_base 11: mod_base = OTHER; note = 2'-O-methylcytidine-3'-phosphate
  modified_base 12: mod_base = OTHER; note = 2'-O-methylcytidine-3'-phosphate
  modified_base 13: mod_base = OTHER; note = 2'-O-methyluridine-3'-phosphate
  modified_base 14: mod_base = OTHER; note = 2'-fluorocytidine-3'-phosphate
  modified_base 15: mod_base = OTHER; note = 2'-O-methyladenosine-3'-phosphate
  modified_base 16: mod_base = OTHER; note = 2'-fluorocytidine-3'-phosphate
  modified_base 17: mod_base = OTHER; note = 2'-O-methylcytidine-3'-phosphate
  modified_base 18: mod_base = OTHER; note = 2'-fluoroadenosine-3'-phosphate
  modified_base 19: mod_base = OTHER; note = 2'-O-methyladenosine-3'-phosphate
  modified_base 20: mod_base = OTHER; note = 2'-fluorouridine-3'-phosphate
  modified_base 21: mod_base = OTHER; note = 2'-O-methylguanosine-3'-phosphorothioate
  modified_base 22: mod_base = OTHER; note = 2'-O-methyluridine-3'-phosphorothioate
  modified_base 23: mod_base = OTHER; note = 2'-O-methylcytidine-3'-phosphate
aaggatttttcctcaccaatgtc

SEQ ID NO: 790 - RNA, 23 nt, synthetic construct
  source 1..23: mol_type = other RNA; note = Description of Artificial Sequence: Synthetic oligonucleotide
  modified_base 1: mod_base = OTHER; note = 2'-O-methyluridine-3'-phosphorothioate
  modified_base 2: mod_base = OTHER; note = 2'-fluorocytidine-3'-phosphorothioate
  modified_base 3: mod_base = OTHER; note = 2'-O-methyluridine-3'-phosphate
  modified_base 4: mod_base = OTHER; note = 2'-fluorocytidine-3'-phosphate
  modified_base 5: mod_base = OTHER; note = 2'-O-methyladenosine-3'-phosphate
  modified_base 6: mod_base = OTHER; note = 2'-fluorocytidine-3'-phosphate
  modified_base 7: mod_base = OTHER; note = 2'-O-methylcytidine-3'-phosphate
  modified_base 8: mod_base = OTHER; note = 2'-fluoroadenosine-3'-phosphate
  modified_base 9: mod_base = OTHER; note = 2'-O-methyladenosine-3'-phosphate
  modified_base 10: mod_base = OTHER; note = 2'-fluorouridine-3'-phosphate
  modified_base 11: mod_base = OTHER; note = 2'-O-methylguanosine-3'-phosphate
  modified_base 12: mod_base = OTHER; note = 2'-O-methyluridine-3'-phosphate
  modified_base 13: mod_base = OTHER; note = 2'-O-methylcytidine-3'-phosphate
  modified_base 14: mod_base = OTHER; note = 2'-fluorouridine-3'-phosphate
  modified_base 15: mod_base = OTHER; note = 2'-O-methyluridine-3'-phosphate
  modified_base 16: mod_base = OTHER; note = 2'-fluoroguanosine-3'-phosphate
  modified_base 17: mod_base = OTHER; note = 2'-O-methyluridine-3'-phosphate
  modified_base 18: mod_base = OTHER; note = 2'-fluorocytidine-3'-phosphate
  modified_base 19: mod_base = OTHER; note = 2'-O-methylguanosine-3'-phosphate
  modified_base 20: mod_base = OTHER; note = 2'-fluoroadenosine-3'-phosphate
  modified_base 21: mod_base = OTHER; note = 2'-O-methyluridine-3'-phosphorothioate
  modified_base 22: mod_base = OTHER; note = 2'-O-methylguanosine-3'-phosphorothioate
  modified_base 23: mod_base = OTHER; note = 2'-O-methyladenosine-3'-phosphate
tctcaccaatgtcttgtcgatga

SEQ ID NO: 791 - RNA, 23 nt, synthetic construct
  source 1..23: mol_type = other RNA; note = Description of Artificial Sequence: Synthetic oligonucleotide
  modified_base 1: mod_base = OTHER; note = 2'-O-methyladenosine-3'-phosphorothioate
  modified_base 2: mod_base = OTHER; note = 2'-fluoroguanosine-3'-phosphorothioate
  modified_base 3: mod_base = OTHER; note = 2'-O-methylguanosine-3'-phosphate
  modified_base 4: mod_base = OTHER; note = 2'-fluoroadenosine-3'-phosphate
  modified_base 5: mod_base = OTHER; note = 2'-O-methyluridine-3'-phosphate
  modified_base 6: mod_base = OTHER; note = 2'-fluorouridine-3'-phosphate
  modified_base 7: mod_base = OTHER; note = 2'-O-methyluridine-3'-phosphate
  modified_base 8: mod_base = OTHER; note = 2'-fluorouridine-3'-phosphate
  modified_base 9: mod_base = OTHER; note = 2'-O-methyluridine-3'-phosphate
  modified_base 10: mod_base = OTHER; note = 2'-fluorocytidine-3'-phosphate
  modified_base 11: mod_base = OTHER; note = 2'-O-methylcytidine-3'-phosphate
  modified_base 12: mod_base = OTHER; note = 2'-O-methyluridine-3'-phosphate
  modified_base 13: mod_base = OTHER; note = 2'-O-methylcytidine-3'-phosphate
  modified_base 14: mod_base = OTHER; note = 2'-fluoroadenosine-3'-phosphate
  modified_base 15: mod_base = OTHER; note = 2'-O-methylcytidine-3'-phosphate
  modified_base 16: mod_base = OTHER; note = 2'-fluorocytidine-3'-phosphate
  modified_base 17: mod_base = OTHER; note = 2'-O-methyladenosine-3'-phosphate
  modified_base 18: mod_base = OTHER; note = 2'-fluoroadenosine-3'-phosphate
  modified_base 19: mod_base = OTHER; note = 2'-O-methyluridine-3'-phosphate
  modified_base 20: mod_base = OTHER; note = 2'-fluoroguanosine-3'-phosphate
  modified_base 21: mod_base = OTHER; note = 2'-O-methyluridine-3'-phosphorothioate
  modified_base 22: mod_base = OTHER; note = 2'-O-methylcytidine-3'-phosphorothioate
  modified_base 23: mod_base = OTHER; note = 2'-O-methyluridine-3'-phosphate
aggatttttcctcaccaatgtct

SEQ ID NO: 792 - RNA, 23 nt, synthetic construct
  source 1..23: mol_type = other RNA; note = Description of Artificial Sequence: Synthetic oligonucleotide
  modified_base 1: mod_base = OTHER; note = 2'-O-methyladenosine-3'-phosphorothioate
  modified_base 2: mod_base = OTHER; note = 2'-fluoroadenosine-3'-phosphorothioate
  modified_base 3: mod_base = OTHER; note = 2'-O-methyluridine-3'-phosphate
  modified_base 4: mod_base = OTHER; note = 2'-fluoroguanosine-3'-phosphate
  modified_base 5: mod_base = OTHER; note = 2'-O-methyluridine-3'-phosphate
  modified_base 6: mod_base = OTHER; note = 2'-fluorocytidine-3'-phosphate
  modified_base 7: mod_base = OTHER; note = 2'-O-methyluridine-3'-phosphate
  modified_base 8: mod_base = OTHER; note = 2'-fluorouridine-3'-phosphate
  modified_base 9: mod_base = OTHER; note = 2'-O-methylguanosine-3'-phosphate
  modified_base 10: mod_base = OTHER; note = 2'-fluorouridine-3'-phosphate
  modified_base 11: mod_base = OTHER; note = 2'-O-methylcytidine-3'-phosphate
  modified_base 12: mod_base = OTHER; note = 2'-O-methylguanosine-3'-phosphate
  modified_base 13: mod_base = OTHER; note = 2'-O-methyladenosine-3'-phosphate
  modified_base 14: mod_base = OTHER; note = 2'-fluorouridine-3'-phosphate
  modified_base 15: mod_base = OTHER; note = 2'-O-methylguanosine-3'-phosphate
  modified_base 16: mod_base = OTHER; note = 2'-fluoroadenosine-3'-phosphate
  modified_base 17: mod_base = OTHER; note = 2'-O-methylcytidine-3'-phosphate
  modified_base 18: mod_base = OTHER; note = 2'-fluorouridine-3'-phosphate
  modified_base 19: mod_base = OTHER; note = 2'-O-methyluridine-3'-phosphate
  modified_base 20: mod_base = OTHER; note = 2'-fluorouridine-3'-phosphate
  modified_base 21: mod_base = OTHER; note = 2'-O-methylcytidine-3'-phosphorothioate
  modified_base 22: mod_base = OTHER; note = 2'-O-methyladenosine-3'-phosphorothioate
  modified_base 23: mod_base = OTHER; note = 2'-O-methylcytidine-3'-phosphate
aatgtcttgtcgatgactttcac

SEQ ID NO: 793 - RNA, 23 nt, synthetic construct
  source 1..23: mol_type = other RNA; note = Description of Artificial Sequence: Synthetic oligonucleotide
  modified_base 1: mod_base = OTHER; note = 2'-O-methyluridine-3'-phosphorothioate
  modified_base 2: mod_base = OTHER; note = 2'-fluoroadenosine-3'-phosphorothioate
  modified_base 3: mod_base = OTHER; note = 2'-O-methyladenosine-3'-phosphate
  modified_base 4: mod_base = OTHER; note = 2'-fluorouridine-3'-phosphate
  modified_base 5: mod_base = OTHER; note = 2'-O-methylguanosine-3'-phosphate
  modified_base 6: mod_base = OTHER; note = 2'-fluorouridine-3'-phosphate
  modified_base 7: mod_base = OTHER; note = 2'-O-methylcytidine-3'-phosphate
  modified_base 8: mod_base = OTHER; note = 2'-fluorouridine-3'-phosphate
  modified_base 9: mod_base = OTHER; note = 2'-O-methyluridine-3'-phosphate
  modified_base 10: mod_base = OTHER; note = 2'-fluoroguanosine-3'-phosphate
  modified_base 11: mod_base = OTHER; note = 2'-O-methyluridine-3'-phosphate
  modified_base 12: mod_base = OTHER; note = 2'-O-methylcytidine-3'-phosphate
  modified_base 13: mod_base = OTHER; note = 2'-O-methylguanosine-3'-phosphate
  modified_base 14: mod_base = OTHER; note = 2'-fluoroadenosine-3'-phosphate
  modified_base 15: mod_base = OTHER; note = 2'-O-methyluridine-3'-phosphate
  modified_base 16: mod_base = OTHER; note = 2'-fluoroguanosine-3'-phosphate
  modified_base 17: mod_base = OTHER; note = 2'-O-methyladenosine-3'-phosphate
  modified_base 18: mod_base = OTHER; note = 2'-fluorocytidine-3'-phosphate
  modified_base 19: mod_base = OTHER; note = 2'-O-methyluridine-3'-phosphate
  modified_base 20: mod_base = OTHER; note = 2'-fluorouridine-3'-phosphate
  modified_base 21: mod_base = OTHER; note = 2'-O-methyluridine-3'-phosphorothioate
  modified_base 22: mod_base = OTHER; note = 2'-O-methylcytidine-3'-phosphorothioate
  modified_base 23: mod_base = OTHER; note = 2'-O-methyladenosine-3'-phosphate
taatgtcttgtcgatgactttca

SEQ ID NO: 794 - RNA, 21 nt, synthetic construct
  source 1..21: mol_type = other RNA; note = Description of Artificial Sequence: Synthetic oligonucleotide
atgtatgttacttcttagaga

SEQ ID NO: 795 - RNA, 23 nt, synthetic construct
  source 1..23: mol_type = other RNA; note = Description of Artificial Sequence: Synthetic oligonucleotide
tctctaagaagtaacatacatcc

SEQ ID NO: 796 - RNA, 21 nt, synthetic construct
  source 1..21: mol_type = other RNA; note = Description of Artificial Sequence: Synthetic oligonucleotide
tgtatgttacttcttagagag

SEQ ID NO: 797 - RNA, 23 nt, synthetic construct
  source 1..23: mol_type = other RNA; note = Description of Artificial Sequence: Synthetic oligonucleotide
ctctctaagaagtaacatacatc

SEQ ID NO: 798 - RNA, 21 nt, synthetic construct
  source 1..21: mol_type = other RNA; note = Description of Artificial Sequence: Synthetic oligonucleotide
taggatgtatgttacttctta

SEQ ID NO: 799 - RNA, 23 nt, synthetic construct
  source 1..23: mol_type = other RNA; note = Description of Artificial Sequence: Synthetic oligonucleotide
taagaagtaacatacatcctaaa

SEQ ID NO: 800 - RNA, 21 nt, synthetic construct
  source 1..21: mol_type = other RNA; note = Description of Artificial Sequence: Synthetic oligonucleotide
ttaggatgtatgttacttctt

SEQ ID NO: 801 - RNA, 23 nt, synthetic construct
  source 1..23: mol_type = other RNA; note = Description of Artificial Sequence: Synthetic oligonucleotide
aagaagtaacatacatcctaaaa

SEQ ID NO: 802 - RNA, 21 nt, synthetic construct
  source 1..21: mol_type = other RNA; note = Description of Artificial Sequence: Synthetic oligonucleotide
agaaaggtgttcaagatgtcc

SEQ ID NO: 803 - RNA, 23 nt, synthetic construct
  source 1..23: mol_type = other RNA; note = Description of Artificial Sequence: Synthetic oligonucleotide
ggacatcttgaacacctttctcc

SEQ ID NO: 804 - RNA, 21 nt, synthetic construct
  source 1..21: mol_type = other RNA; note = Description of Artificial Sequence: Synthetic oligonucleotide
gaaaggtgttcaagatgtcct

SEQ ID NO: 805 - RNA, 23 nt, synthetic construct
  source 1..23: mol_type = other RNA; note = Description of Artificial Sequence: Synthetic oligonucleotide
aggacatcttgaacacctttctc

SEQ ID NO: 806 - RNA, 21 nt, synthetic construct
  source 1..21: mol_type = other RNA; note = Description of Artificial Sequence: Synthetic oligonucleotide
ggggagaaaggtgttcaagat

SEQ ID NO: 807 - RNA, 23 nt, synthetic construct
  source 1..23: mol_type = other RNA; note = Description of Artificial Sequence: Synthetic oligonucleotide
atcttgaacacctttctccccct

SEQ ID NO: 808 - RNA, 21 nt, synthetic construct
  source 1..21: mol_type = other RNA; note = Description of Artificial Sequence: Synthetic oligonucleotide
gggggagaaaggtgttcaaga

SEQ ID NO: 809 - RNA, 23 nt, synthetic construct
  source 1..23: mol_type = other RNA; note = Description of Artificial Sequence: Synthetic oligonucleotide
tcttgaacacctttctccccctg

SEQ ID NO: 810 - RNA, 21 nt, synthetic construct
  source 1..21: mol_type = other RNA; note = Description of Artificial Sequence: Synthetic oligonucleotide
agaaactttggctgataatat

SEQ ID NO: 811 - RNA, 23 nt, synthetic construct
  source 1..23: mol_type = other RNA; note = Description of Artificial Sequence: Synthetic oligonucleotide
atattatcagccaaagtttcttc

SEQ ID NO: 812 - RNA, 21 nt, synthetic construct
  source 1..21: mol_type = other RNA; note = Description of Artificial Sequence: Synthetic oligonucleotide
gaaactttggctgataatatt

SEQ ID NO: 813 - RNA, 23 nt, synthetic construct
  source 1..23: mol_type = other RNA; note = Description of Artificial Sequence: Synthetic oligonucleotide
aatattatcagccaaagtttctt

SEQ ID NO: 814 - RNA, 21 nt, synthetic construct
  source 1..21: mol_type = other RNA; note = Description of Artificial Sequence: Synthetic oligonucleotide
atgaagaaactttggctgata

SEQ ID NO: 815 - RNA, 23 nt, synthetic construct
  source 1..23: mol_type = other RNA; note = Description of Artificial Sequence: Synthetic oligonucleotide
tatcagccaaagtttcttcatca

SEQ ID NO: 816 - RNA, 21 nt, synthetic construct
  source 1..21: mol_type = other RNA; note = Description of Artificial Sequence: Synthetic oligonucleotide
gatgaagaaactttggctgat

SEQ ID NO: 817 - RNA, 23 nt, synthetic construct
  source 1..23: mol_type = other RNA; note = Description of Artificial Sequence: Synthetic oligonucleotide
atcagccaaagtttcttcatcat

SEQ ID NO: 818 - RNA, 21 nt, synthetic construct
  source 1..21: mol_type = other RNA; note = Description of Artificial Sequence: Synthetic oligonucleotide
aaggcactgatgttctgaaag

SEQ ID NO: 819 - RNA, 23 nt, synthetic construct
  source 1..23: mol_type = other RNA; note = Description of Artificial Sequence: Synthetic oligonucleotide
ctttcagaacatcagtgcctttc

SEQ ID NO: 820 - RNA, 21 nt, synthetic construct
  source 1..21: mol_type = other RNA; note = Description of Artificial Sequence: Synthetic oligonucleotide
aggcactgatgttctgaaagc

SEQ ID NO: 821 - RNA, 23 nt, synthetic construct
  source 1..23: mol_type = other RNA; note = Description of Artificial Sequence: Synthetic oligonucleotide
gctttcagaacatcagtgccttt

SEQ ID NO: 822 - RNA, 21 nt, synthetic construct
  source 1..21: mol_type = other RNA; note = Description of Artificial Sequence: Synthetic oligonucleotide
cggaaaggcactgatgttctg

SEQ ID NO: 823 - RNA, 23 nt, synthetic construct
  source 1..23: mol_type = other RNA; note = Description of Artificial Sequence: Synthetic oligonucleotide
cagaacatcagtgcctttccgca

SEQ ID NO: 824 - RNA, 21 nt, synthetic construct
  source 1..21: mol_type = other RNA; note = Description of Artificial Sequence: Synthetic oligonucleotide
gcggaaaggcactgatgttct

SEQ ID NO: 825 - RNA, 23 nt, synthetic construct
  source 1..23: mol_type = other RNA; note = Description of Artificial Sequence: Synthetic oligonucleotide
agaacatcagtgcctttccgcac

SEQ ID NO: 826 - RNA, 21 nt, synthetic construct
  source 1..21: mol_type = other RNA; note = Description of Artificial Sequence: Synthetic oligonucleotide
agaagactgacatcattgcca

SEQ ID NO: 827 - RNA, 23 nt, synthetic construct
  source 1..23: mol_type = other RNA; note = Description of Artificial Sequence: Synthetic oligonucleotide
tggcaatgatgtcagtcttctca

SEQ ID NO: 828 - RNA, 21 nt, synthetic construct
  source 1..21: mol_type = other RNA; note = Description of Artificial Sequence: Synthetic oligonucleotide
gaagactgacatcattgccaa

SEQ ID NO: 829 - RNA, 23 nt, synthetic construct
  source 1..23: mol_type = other RNA; note = Description of Artificial Sequence: Synthetic oligonucleotide
ttggcaatgatgtcagtcttctc

SEQ ID NO: 830 - RNA, 21 nt, synthetic construct
  source 1..21: mol_type = other RNA; note = Description of Artificial Sequence: Synthetic oligonucleotide
gctgagaagactgacatcatt

SEQ ID NO: 831 - RNA, 23 nt, synthetic construct
  source 1..23: mol_type = other RNA; note = Description of Artificial Sequence: Synthetic oligonucleotide
aatgatgtcagtcttctcagcca

SEQ ID NO: 832 - RNA, 21 nt, synthetic construct
  source 1..21: mol_type = other RNA; note = Description of Artificial Sequence: Synthetic oligonucleotide
ggctgagaagactgacatcat

SEQ ID NO: 833 - RNA, 23 nt, synthetic construct
  source 1..23: mol_type = other RNA; note = Description of Artificial Sequence: Synthetic oligonucleotide
atgatgtcagtcttctcagccat

SEQ ID NO: 834 - RNA, 21 nt, synthetic construct
  source 1..21: mol_type = other RNA; note = Description of Artificial Sequence: Synthetic oligonucleotide
taatgcctgattcacaacttt

SEQ ID NO: 835 - RNA, 23 nt, synthetic construct
  source 1..23: mol_type = other RNA; note = Description of Artificial Sequence: Synthetic oligonucleotide
aaagttgtgaatcaggcattacc

SEQ ID NO: 836 - RNA, 21 nt, synthetic construct
  source 1..21: mol_type = other RNA; note = Description of Artificial Sequence: Synthetic oligonucleotide
aatgcctgattcacaactttg

SEQ ID NO: 837 - RNA, 23 nt, synthetic construct
  source 1..23: mol_type = other RNA; note = Description of Artificial Sequence: Synthetic oligonucleotide
caaagttgtgaatcaggcattac

SEQ ID NO: 838 - RNA, 21 nt, synthetic construct
  source 1..21: mol_type = other RNA; note = Description of Artificial Sequence: Synthetic oligonucleotide
ttggtaatgcctgattcacaa

SEQ ID NO: 839 - RNA, 23 nt, synthetic construct
  source 1..23: mol_type = other RNA; note = Description of Artificial Sequence: Synthetic oligonucleotide
ttgtgaatcaggcattaccaaca

SEQ ID NO: 840 - RNA, 21 nt, synthetic construct
  source 1..21: mol_type = other RNA; note = Description of Artificial Sequence: Synthetic oligonucleotide
gttggtaatgcctgattcaca

SEQ ID NO: 841 - RNA, 23 nt, synthetic construct
  source 1..23: mol_type = other RNA; note = Description of Artificial Sequence: Synthetic oligonucleotide
tgtgaatcaggcattaccaacac

SEQ ID NO: 842 - RNA, 21 nt, synthetic construct
  source 1..21: mol_type = other RNA; note = Description of Artificial Sequence: Synthetic oligonucleotide
tatcaaatggctgagaagact

SEQ ID NO: 843 - RNA, 23 nt, synthetic construct
  source 1..23: mol_type = other RNA; note = Description of Artificial Sequence: Synthetic oligonucleotide
agtcttctcagccatttgatatc

SEQ ID NO: 844 - RNA, 21 nt, synthetic construct
  source 1..21: mol_type = other RNA; note = Description of Artificial Sequence: Synthetic oligonucleotide
atcaaatggctgagaagactg

SEQ ID NO: 845 - RNA, 23 nt, synthetic construct
  source 1..23: mol_type = other RNA; note = Description of Artificial Sequence: Synthetic oligonucleotide
cagtcttctcagccatttgatat

SEQ ID NO: 846 - RNA, 21 nt, synthetic construct
  source 1..21: mol_type = other RNA; note = Description of Artificial Sequence: Synthetic oligonucleotide
aagatatcaaatggctgagaa

SEQ ID NO: 847 - RNA, 23 nt, synthetic construct
  source 1..23: mol_type = other RNA; note = Description of Artificial Sequence: Synthetic oligonucleotide
ttctcagccatttgatatcttcc

SEQ ID NO: 848 - RNA, 21 nt, synthetic construct
  source 1..21: mol_type = other RNA; note = Description of Artificial Sequence: Synthetic oligonucleotide
gaagatatcaaatggctgaga

SEQ ID NO: 849 - RNA, 23 nt, synthetic construct
  source 1..23: mol_type = other RNA; note = Description of Artificial Sequence: Synthetic oligonucleotide
tctcagccatttgatatcttccc

SEQ ID NO: 850 - RNA, 21 nt, synthetic construct
  source 1..21: mol_type = other RNA; note = Description of Artificial Sequence: Synthetic oligonucleotide
tctgacagtgcacaatatttt

SEQ ID NO: 851 - RNA, 23 nt, synthetic construct
  source 1..23: mol_type = other RNA; note = Description of Artificial Sequence: Synthetic oligonucleotide
aaaatattgtgcactgtcagatc

SEQ ID NO: 852 - RNA, 21 nt, synthetic construct
  source 1..21: mol_type = other RNA; note = Description of Artificial Sequence: Synthetic oligonucleotide
ctgacagtgcacaatattttc

SEQ ID NO: 853 - RNA, 23 nt, synthetic construct
  source 1..23: mol_type = other RNA; note = Description of Artificial Sequence: Synthetic oligonucleotide
gaaaatattgtgcactgtcagat

SEQ ID NO: 854 - RNA, 21 nt, synthetic construct
  source 1..21: mol_type = other RNA; note = Description of Artificial Sequence: Synthetic oligonucleotide
aagatctgacagtgcacaata

SEQ ID NO: 855 - RNA, 23 nt, synthetic construct
  source 1..23: mol_type = other RNA; note = Description of Artificial Sequence: Synthetic oligonucleotide
tattgtgcactgtcagatcttgg

SEQ ID NO: 856 - RNA, 21 nt, synthetic construct
  source 1..21: mol_type = other RNA; note = Description of Artificial Sequence: Synthetic oligonucleotide
caagatctgacagtgcacaat

SEQ ID NO: 857 - RNA, 23 nt, synthetic construct
  source 1..23: mol_type = other RNA; note = Description of Artificial Sequence: Synthetic oligonucleotide
attgtgcactgtcagatcttgga

SEQ ID NO: 858 - RNA, 21 nt, synthetic construct
  source 1..21: mol_type = other RNA; note = Description of Artificial Sequence: Synthetic oligonucleotide
actgatgttctgaaagctctg

SEQ ID NO: 859 - RNA, 23 nt, synthetic construct
  source 1..23: mol_type = other RNA; note = Description of Artificial Sequence: Synthetic oligonucleotide
cagagctttcagaacatcagtgc

SEQ ID NO: 860 - RNA, 21 nt, synthetic construct
  source 1..21: mol_type = other RNA; note = Description of Artificial Sequence: Synthetic oligonucleotide
ctgatgttctgaaagctctgg

SEQ ID NO: 861 - RNA, 23 nt, synthetic construct
  source 1..23: mol_type = other RNA; note = Description of Artificial Sequence: Synthetic oligonucleotide
ccagagctttcagaacatcagtg

SEQ ID NO: 862 - RNA, 21 nt, synthetic construct
  source 1..21: mol_type = other RNA; note = Description of Artificial Sequence: Synthetic oligonucleotide
aggcactgatgttctgaaagc

SEQ ID NO: 863 - RNA, 23 nt, synthetic construct
  source 1..23: mol_type = other RNA; note = Description of Artificial Sequence: Synthetic oligonucleotide
gctttcagaacatcagtgccttt

SEQ ID NO: 864 - RNA, 21 nt, synthetic construct
  source 1..21: mol_type = other RNA; note = Description of Artificial Sequence: Synthetic oligonucleotide
aaggcactgatgttctgaaag

SEQ ID NO: 865 - RNA, 23 nt, synthetic construct
  source 1..23: mol_type = other RNA; note = Description of Artificial Sequence: Synthetic oligonucleotide
ctttcagaacatcagtgcctttc

SEQ ID NO: 866 - RNA, 21 nt, synthetic construct
  source 1..21: mol_type = other RNA; note = Description of Artificial Sequence: Synthetic oligonucleotide
aacaacatgctaaatcagtac

SEQ ID NO: 867 - RNA, 23 nt, synthetic construct
  source 1..23: mol_type = other RNA; note = Description of Artificial Sequence: Synthetic oligonucleotide
gtactgatttagcatgttgttca

SEQ ID NO: 868 - RNA, 21 nt, synthetic construct
  source 1..21: mol_type = other RNA; note = Description of Artificial Sequence: Synthetic oligonucleotide
acaacatgctaaatcagtact

SEQ ID NO: 869 - RNA, 23 nt, synthetic construct
  source 1..23: mol_type = other RNA; note = Description of Artificial Sequence: Synthetic oligonucleotide
agtactgatttagcatgttgttc

SEQ ID NO: 870 - RNA, 21 nt, synthetic construct
  source 1..21: mol_type = other RNA; note = Description of Artificial Sequence: Synthetic oligonucleotide
tatgaacaacatgctaaatca

SEQ ID NO: 871 - RNA, 23 nt, synthetic construct
  source 1..23: mol_type = other RNA; note = Description of Artificial Sequence: Synthetic oligonucleotide
tgatttagcatgttgttcataat

SEQ ID NO: 872 - RNA, 21 nt, synthetic construct
  source 1..21: mol_type = other RNA; note = Description of Artificial Sequence: Synthetic oligonucleotide
ttatgaacaacatgctaaatc

SEQ ID NO: 873 - RNA, 23 nt, synthetic construct
  source 1..23: mol_type = other RNA; note = Description of Artificial Sequence: Synthetic oligonucleotide
gatttagcatgttgttcataatc

SEQ ID NO: 874 - RNA, 21 nt, synthetic construct
  source 1..21: mol_type = other RNA; note = Description of Artificial Sequence: Synthetic oligonucleotide
tctttagtgtctgaatatatc

SEQ ID NO: 875 - RNA, 23 nt, synthetic construct
  source 1..23: mol_type = other RNA; note = Description of Artificial Sequence: Synthetic oligonucleotide
gatatattcagacactaaagatg

SEQ ID NO: 876 - RNA, 21 nt, synthetic construct
  source 1..21: mol_type = other RNA; note = Description of Artificial Sequence: Synthetic oligonucleotide
ctttagtgtctgaatatatcc

SEQ ID NO: 877 - RNA, 23 nt, synthetic construct
  source 1..23: mol_type = other RNA; note = Description of Artificial Sequence: Synthetic oligonucleotide
ggatatattcagacactaaagat

SEQ ID NO: 878 - RNA, 21 nt, synthetic construct
  source 1..21: mol_type = other RNA; note = Description of Artificial Sequence: Synthetic oligonucleotide
cacatctttagtgtctgaata

SEQ ID NO: 879 - RNA, 23 nt, synthetic construct
  source 1..23: mol_type = other RNA; note = Description of Artificial Sequence: Synthetic oligonucleotide
tattcagacactaaagatgtgat

SEQ ID NO: 880 - RNA, 21 nt, synthetic construct
  source 1..21: mol_type = other RNA; note = Description of Artificial Sequence: Synthetic oligonucleotide
tcacatctttagtgtctgaat

SEQ ID NO: 881 - RNA, 23 nt, synthetic construct
  source 1..23: mol_type = other RNA; note = Description of Artificial Sequence: Synthetic oligonucleotide
attcagacactaaagatgtgatt

SEQ ID NO: 882 - RNA, 21 nt, synthetic construct
  source 1..21: mol_type = other RNA; note = Description of Artificial Sequence: Synthetic oligonucleotide
tgatacttctttgaatgtaga

SEQ ID NO: 883 - RNA, 23 nt, synthetic construct
  source 1..23: mol_type = other RNA; note = Description of Artificial Sequence: Synthetic oligonucleotide
tctacattcaaagaagtatcacc

SEQ ID NO: 884 - RNA, 21 nt, synthetic construct
  source 1..21: mol_type = other RNA; note = Description of Artificial Sequence: Synthetic oligonucleotide
gatacttctttgaatgtagat

SEQ ID NO: 885 - RNA, 23 nt, synthetic construct
  source 1..23: mol_type = other RNA; note = Description of Artificial Sequence: Synthetic oligonucleotide
atctacattcaaagaagtatcac

SEQ ID NO: 886 - RNA, 21 nt, synthetic construct
  source 1..21: mol_type = other RNA; note = Description of Artificial Sequence: Synthetic oligonucleotide
ttggtgatacttctttgaatg

SEQ ID NO: 887 - RNA, 23 nt, synthetic construct
  source 1..23: mol_type = other RNA; note = Description of Artificial Sequence: Synthetic oligonucleotide
cattcaaagaagtatcaccaatt

SEQ ID NO: 888 - RNA, 21 nt, synthetic construct
  source 1..21: mol_type = other RNA; note = Description of Artificial Sequence: Synthetic oligonucleotide
attggtgatacttctttgaat

SEQ ID NO: 889 - RNA, 23 nt, synthetic construct
  source 1..23: mol_type = other RNA; note = Description of Artificial Sequence: Synthetic oligonucleotide
attcaaagaagtatcaccaatta

SEQ ID NO: 890 - RNA, 21 nt, synthetic construct
  source 1..21: mol_type = other RNA; note = Description of Artificial Sequence: Synthetic oligonucleotide
aataacctgtgaaaatgctcc

SEQ ID NO: 891 - RNA, 23 nt, synthetic construct
  source 1..23: mol_type = other RNA; note = Description of Artificial Sequence: Synthetic oligonucleotide
ggagcattttcacaggttattgc

SEQ ID NO: 892 - RNA, 21 nt, synthetic construct
  source 1..21: mol_type = other RNA; note = Description of Artificial Sequence: Synthetic oligonucleotide
ataacctgtgaaaatgctccc

SEQ ID NO: 893 - RNA, 23 nt, synthetic construct
  source 1..23: mol_type = other RNA; note = Description of Artificial Sequence: Synthetic oligonucleotide
gggagcattttcacaggttattg

SEQ ID NO: 894 - RNA, 21 nt, synthetic construct
  source 1..21: mol_type = other RNA; note = Description of Artificial Sequence: Synthetic oligonucleotide
tagcaataacctgtgaaaatg

SEQ ID NO: 895 - RNA, 23 nt, synthetic construct
  source 1..23: mol_type = other RNA; note = Description of Artificial Sequence: Synthetic oligonucleotide
cattttcacaggttattgctatc

SEQ ID NO: 896 - RNA, 21 nt, synthetic construct
  source 1..21: mol_type = other RNA; note = Description of Artificial Sequence: Synthetic oligonucleotide
atagcaataacctgtgaaaat

SEQ ID NO: 897 - RNA, 23 nt, synthetic construct
  source 1..23: mol_type = other RNA; note = Description of Artificial Sequence: Synthetic oligonucleotide
attttcacaggttattgctatcc

SEQ ID NO: 898 - RNA, 21 nt, synthetic construct
  source 1..21: mol_type = other RNA; note = Description of Artificial Sequence: Synthetic oligonucleotide
aatcacatctttagtgtctga

SEQ ID NO: 899 - RNA, 23 nt, synthetic construct
  source 1..23: mol_type = other RNA; note = Description of Artificial Sequence: Synthetic oligonucleotide
tcagacactaaagatgtgattgg

SEQ ID NO: 900 - RNA, 21 nt, synthetic construct
  source 1..21: mol_type = other RNA; note = Description of Artificial Sequence: Synthetic oligonucleotide
atcacatctttagtgtctgaa

SEQ ID NO: 901 - RNA, 23 nt, synthetic construct
  source 1..23: mol_type = other RNA; note = Description of Artificial Sequence: Synthetic oligonucleotide
ttcagacactaaagatgtgattg

SEQ ID NO: 902 - RNA, 21 nt, synthetic construct
  source 1..21: mol_type = other RNA; note = Description of Artificial Sequence: Synthetic oligonucleotide
ttccaatcacatctttagtgt

SEQ ID NO: 903 - RNA, 23 nt, synthetic construct
  source 1..23: mol_type = other RNA; note = Description of Artificial Sequence: Synthetic oligonucleotide
acactaaagatgtgattggaaat

SEQ ID NO: 904 - RNA, 21 nt, synthetic construct
  source 1..21: mol_type = other RNA; note = Description of Artificial Sequence: Synthetic oligonucleotide
tttccaatcacatctttagtg

SEQ ID NO: 905 - RNA, 23 nt, synthetic construct
  source 1..23: mol_type = other RNA; note = Description of Artificial Sequence: Synthetic oligonucleotide
cactaaagatgtgattggaaatc

SEQ ID NO: 906 - RNA, 21 nt, synthetic construct
  source 1..21: mol_type = other RNA; note = Description of Artificial Sequence: Synthetic oligonucleotide
acgggcatgatgttgagttcc

SEQ ID NO: 907 - RNA, 23 nt, synthetic construct
  source 1..23: mol_type = other RNA; note = Description of Artificial Sequence: Synthetic oligonucleotide
ggaactcaacatcatgcccgttc

SEQ ID NO: 908 - RNA, 21 nt, synthetic construct
  source 1..21: mol_type = other RNA; note = Description of Artificial Sequence: Synthetic oligonucleotide
cgggcatgatgttgagttcct

SEQ ID NO: 909 - RNA, 23 nt, synthetic construct
  source 1..23: mol_type = other RNA; note = Description of Artificial Sequence: Synthetic oligonucleotide
aggaactcaacatcatgcccgtt

SEQ ID NO: 910 - RNA, 21 nt, synthetic construct
  source 1..21: mol_type = other RNA; note = Description of Artificial Sequence: Synthetic oligonucleotide
gggaacgggcatgatgttgag

SEQ ID NO: 911 - RNA, 23 nt, synthetic construct
  source 1..23: mol_type = other RNA; note = Description of Artificial Sequence: Synthetic oligonucleotide
ctcaacatcatgcccgttcccag

SEQ ID NO: 912 - RNA, 21 nt, synthetic construct
  source 1..21: mol_type = other RNA; note = Description of Artificial Sequence: Synthetic oligonucleotide
tgggaacgggcatgatgttga

SEQ ID NO: 913 - RNA, 23 nt, synthetic construct
  source 1..23: mol_type = other RNA; note = Description of Artificial Sequence: Synthetic oligonucleotide
tcaacatcatgcccgttcccagg

SEQ ID NO: 914 - RNA, 21 nt, synthetic construct
  source 1..21: mol_type = other RNA; note = Description of Artificial Sequence: Synthetic oligonucleotide
actaaggtgaaaagataatga

SEQ ID NO: 915 - RNA, 23 nt, synthetic construct
  source 1..23: mol_type = other RNA; note = Description of Artificial Sequence: Synthetic oligonucleotide
tcattatcttttcaccttagtgt

SEQ ID NO: 916 - RNA, 21 nt, synthetic construct
  source 1..21: mol_type = other RNA; note = Description of Artificial Sequence: Synthetic oligonucleotide
ctaaggtgaaaagataatgat

SEQ ID NO: 917 - RNA, 23 nt, synthetic construct
  source 1..23: mol_type = other RNA; note = Description of Artificial Sequence: Synthetic oligonucleotide
atcattatcttttcaccttagtg

SEQ ID NO: 918 - RNA, 21 nt, synthetic construct
  source 1..21: mol_type = other RNA; note = Description of Artificial Sequence: Synthetic oligonucleotide
aaacactaaggtgaaaagata

SEQ ID NO: 919 - RNA, 23 nt, synthetic construct
  source 1..23: mol_type = other RNA; note = Description of Artificial Sequence: Synthetic oligonucleotide
tatcttttcaccttagtgtttgc

SEQ ID NO: 920 - RNA, 21 nt, synthetic construct
  source 1..21: mol_type = other RNA; note = Description of Artificial Sequence: Synthetic oligonucleotide
caaacactaaggtgaaaagat

SEQ ID NO: 921 - RNA, 23 nt, synthetic construct
  source 1..23: mol_type = other RNA; note = Description of Artificial Sequence: Synthetic oligonucleotide
atcttttcaccttagtgtttgct

SEQ ID NO: 922 - RNA, 21 nt, synthetic construct
  source 1..21: mol_type = other RNA; note = Description of Artificial Sequence: Synthetic oligonucleotide
aggtagcactggagagaattg

SEQ ID NO: 923 - RNA, 23 nt, synthetic construct
  source 1..23: mol_type = other RNA; note = Description of Artificial Sequence: Synthetic oligonucleotide
caattctctccagtgctaccttc

SEQ ID NO: 924 - RNA, 21 nt, synthetic construct
  source 1..21: mol_type = other RNA; note = Description of Artificial Sequence: Synthetic oligonucleotide
ggtagcactggagagaattgg

SEQ ID NO: 925 - RNA, 23 nt, synthetic construct
  source 1..23: mol_type = other RNA; note = Description of Artificial Sequence: Synthetic oligonucleotide
ccaattctctccagtgctacctt

SEQ ID NO: 926 - RNA, 21 nt, synthetic construct
  source 1..21: mol_type = other RNA; note = Description of Artificial Sequence: Synthetic oligonucleotide
gagaaggtagcactggagaga

SEQ ID NO: 927 - RNA, 23 nt, synthetic construct
  source 1..23: mol_type = other RNA; note = Description of Artificial Sequence: Synthetic oligonucleotide
tctctccagtgctaccttctcaa

SEQ ID NO: 928 - RNA, 21 nt, synthetic construct
  source 1..21: mol_type = other RNA; note = Description of Artificial Sequence: Synthetic oligonucleotide
tgagaaggtagcactggagag

SEQ ID NO: 929 - RNA, 23 nt, synthetic construct
  source 1..23: mol_type = other RNA; note = Description of Artificial Sequence: Synthetic oligonucleotide
ctctccagtgctaccttctcaaa

SEQ ID NO: 930 - RNA, 21 nt, synthetic construct
  source 1..21: mol_type = other RNA; note = Description of Artificial Sequence: Synthetic oligonucleotide
agtggacttgctgcatatgtg

SEQ ID NO: 931 - RNA, 23 nt, synthetic construct
  source 1..23: mol_type = other RNA; note = Description of Artificial Sequence: Synthetic oligonucleotide
cacatatgcagcaagtccactgt

SEQ ID NO: 932 - RNA, 21 nt, synthetic construct
  source 1..21: mol_type = other RNA; note = Description of Artificial Sequence: Synthetic oligonucleotide
gtggacttgctgcatatgtgg

SEQ ID NO: 933 - RNA, 23 nt, synthetic construct
  source 1..23: mol_type = other RNA; note = Description of Artificial Sequence: Synthetic oligonucleotide
ccacatatgcagcaagtccactg

SEQ ID NO: 934 - RNA, 21 nt, synthetic construct
  source 1..21: mol_type = other RNA; note = Description of Artificial Sequence: Synthetic oligonucleotide
cgacagtggacttgctgcata

SEQ ID NO: 935 - RNA, 23 nt, synthetic construct
  source 1..23: mol_type = other RNA; note = Description of Artificial Sequence: Synthetic oligonucleotide
tatgcagcaagtccactgtcgtc

SEQ ID NO: 936 - RNA, 21 nt, synthetic construct
  source 1..21: mol_type = other RNA; note = Description of Artificial Sequence: Synthetic oligonucleotide
acgacagtggacttgctgcat

SEQ ID NO: 937 - RNA, 23 nt, synthetic construct
  source 1..23: mol_type = other RNA; note = Description of Artificial Sequence: Synthetic oligonucleotide
atgcagcaagtccactgtcgtct

SEQ ID NO: 938 - RNA, 21 nt, synthetic construct
  source 1..21: mol_type = other RNA; note = Description of Artificial Sequence: Synthetic oligonucleotide
aaggtgttcaagatgtcctcg

SEQ ID NO: 939 - RNA, 23 nt, synthetic construct
  source 1..23: mol_type = other RNA; note = Description of Artificial Sequence: Synthetic oligonucleotide
cgaggacatcttgaacacctttc

SEQ ID NO: 940 - RNA, 21 nt, synthetic construct
  source 1..21: mol_type = other RNA; note = Description of Artificial Sequence: Synthetic oligonucleotide
aggtgttcaagatgtcctcga

SEQ ID NO: 941 - RNA, 23 nt, synthetic construct
  source 1..23: mol_type = other RNA; note = Description of Artificial Sequence: Synthetic oligonucleotide
tcgaggacatcttgaacaccttt

SEQ ID NO: 942 - RNA, 21 nt, synthetic construct
  source 1..21: mol_type = other RNA; note = Description of Artificial Sequence: Synthetic oligonucleotide
gagaaaggtgttcaagatgtc

SEQ ID NO: 943 - RNA, 23 nt, synthetic construct
  source 1..23: mol_type = other RNA; note = Description of Artificial Sequence: Synthetic oligonucleotide
gacatcttgaacacctttctccc

SEQ ID NO: 944 - RNA, 21 nt, synthetic construct
  source 1..21: mol_type = other RNA; note = Description of Artificial Sequence: Synthetic oligonucleotide
ggagaaaggtgttcaagatgt

SEQ ID NO: 945 - RNA, 23 nt, synthetic construct
  source 1..23: mol_type = other RNA; note = Description of Artificial Sequence: Synthetic oligonucleotide
acatcttgaacacctttctcccc

SEQ ID NO: 946 - RNA, 21 nt, synthetic construct
  source 1..21: mol_type = other RNA; note = Description of Artificial Sequence: Synthetic oligonucleotide
aaccgtctggatgatgtgcgt

SEQ ID NO: 947 - RNA, 23 nt, synthetic construct
  source 1..23: mol_type = other RNA; note = Description of Artificial Sequence: Synthetic oligonucleotide
acgcacatcatccagacggttgc

SEQ ID NO: 948 - RNA, 21 nt, synthetic construct
  source 1..21: mol_type = other RNA; note = Description of Artificial Sequence: Synthetic oligonucleotide
accgtctggatgatgtgcgta

SEQ ID NO: 949 - RNA, 23 nt, synthetic construct
  source 1..23: mol_type = other RNA; note = Description of Artificial Sequence: Synthetic oligonucleotide
tacgcacatcatccagacggttg

SEQ ID NO: 950 - RNA, 21 nt, synthetic construct
  source 1..21: mol_type = other RNA; note = Description of Artificial Sequence: Synthetic oligonucleotide
gggcaaccgtctggatgatgt

SEQ ID NO: 951 - RNA, 23 nt, synthetic construct
  source 1..23: mol_type = other RNA; note = Description of Artificial Sequence: Synthetic oligonucleotide
acatcatccagacggttgcccag

SEQ ID NO: 952 - RNA, 21 nt, synthetic construct
  source 1..21: mol_type = other RNA; note = Description of Artificial Sequence: Synthetic oligonucleotide
tgggcaaccgtctggatgatg

SEQ ID NO: 953 - RNA, 23 nt, synthetic construct
  source 1..23: mol_type = other RNA; note = Description of Artificial Sequence: Synthetic oligonucleotide
catcatccagacggttgcccagg

SEQ ID NO: 954 - RNA, 21 nt, synthetic construct
  source 1..21: mol_type = other RNA; note = Description of Artificial Sequence: Synthetic oligonucleotide
gaaactttggctgataatatt

SEQ ID NO: 955 - RNA, 23 nt, synthetic construct
  source 1..23: mol_type = other RNA; note = Description of Artificial Sequence: Synthetic oligonucleotide
aatattatcagccaaagtttctt

SEQ ID NO: 956 - RNA, 21 nt, synthetic construct
  source 1..21: mol_type = other RNA; note = Description of Artificial Sequence: Synthetic oligonucleotide
aaactttggctgataatattg

SEQ ID NO: 957 - RNA, 23 nt, synthetic construct
  source 1..23: mol_type = other RNA; note = Description of Artificial Sequence: Synthetic oligonucleotide
caatattatcagccaaagtttct

SEQ ID NO: 958 - RNA, 21 nt, synthetic construct
  source 1..21: mol_type = other RNA; note = Description of Artificial Sequence: Synthetic oligonucleotide
tgaagaaactttggctgataa

SEQ ID NO: 959 - RNA, 23 nt, synthetic construct
  source 1..23: mol_type = other RNA; note = Description of Artificial Sequence: Synthetic oligonucleotide
ttatcagccaaagtttcttcatc

SEQ ID NO: 960 - RNA, 21 nt, synthetic construct
  source 1..21: mol_type = other RNA; note = Description of Artificial Sequence: Synthetic oligonucleotide
atgaagaaactttggctgata

SEQ ID NO: 961 - RNA, 23 nt, synthetic construct
  source 1..23: mol_type = other RNA; note = Description of Artificial Sequence: Synthetic oligonucleotide
tatcagccaaagtttcttcatca

SEQ ID NO: 962 - RNA, 21 nt, synthetic construct
  source 1..21: mol_type = other RNA; note = Description of Artificial Sequence: Synthetic oligonucleotide
aaaggtgttcaagatgtcctc

SEQ ID NO: 963 - RNA, 23 nt, synthetic construct
  source 1..23: mol_type = other RNA; note = Description of Artificial Sequence: Synthetic oligonucleotide
gaggacatcttgaacacctttct

SEQ ID NO: 964 - RNA, 21 nt, synthetic construct
  source 1..21: mol_type = other RNA; note = Description of Artificial Sequence: Synthetic oligonucleotide
aaggtgttcaagatgtcctcg

SEQ ID NO: 965 - RNA, 23 nt, synthetic construct
  source 1..23: mol_type = other RNA; note = Description of Artificial Sequence: Synthetic oligonucleotide
cgaggacatcttgaacacctttc

SEQ ID NO: 966 - RNA, 21 nt, synthetic construct
  source 1..21: mol_type = other RNA; note = Description of Artificial Sequence: Synthetic oligonucleotide
ggagaaaggtgttcaagatgt

SEQ ID NO: 967 - RNA, 23 nt, synthetic construct
  source 1..23: mol_type = other RNA; note = Description of Artificial Sequence: Synthetic oligonucleotide
acatcttgaacacctttctcccc

SEQ ID NO: 968 - RNA, 21 nt, synthetic construct
  source 1..21: mol_type = other RNA; note = Description of Artificial Sequence: Synthetic oligonucleotide
gggagaaaggtgttcaagatg

SEQ ID NO: 969 - RNA, 23 nt, synthetic construct
  source 1..23: mol_type = other RNA; note = Description of Artificial Sequence: Synthetic oligonucleotide
catcttgaacacctttctccccc

SEQ ID NO: 970 - RNA, 21 nt, synthetic construct
  source 1..21: mol_type = other RNA; note = Description of Artificial Sequence: Synthetic oligonucleotide
aaatcagtacttccaaagtct

SEQ ID NO: 971 - RNA, 23 nt, synthetic construct
  source 1..23: mol_type = other RNA; note = Description of Artificial Sequence: Synthetic oligonucleotide
agactttggaagtactgatttag

SEQ ID NO: 972 - RNA, 21 nt, synthetic construct
  source 1..21: mol_type = other RNA; note = Description of Artificial Sequence: Synthetic oligonucleotide
aatcagtacttccaaagtcta

SEQ ID NO: 973 - RNA, 23 nt, synthetic construct
  source 1..23: mol_type = other RNA; note = Description of Artificial Sequence: Synthetic oligonucleotide
tagactttggaagtactgattta

SEQ ID NO: 974 - RNA, 21 nt, synthetic construct
  source 1..21: mol_type = other RNA; note = Description of Artificial Sequence: Synthetic oligonucleotide
tgctaaatcagtacttccaaa

SEQ ID NO: 975 - RNA, 23 nt, synthetic construct
  source 1..23: mol_type = other RNA; note = Description of Artificial Sequence: Synthetic oligonucleotide
tttggaagtactgatttagcatg

SEQ ID NO: 976 - RNA, 21 nt, synthetic construct
  source 1..21: mol_type = other RNA; note = Description of Artificial Sequence: Synthetic oligonucleotide
atgctaaatcagtacttccaa

SEQ ID NO: 977 - RNA, 23 nt, synthetic construct
  source 1..23: mol_type = other RNA; note = Description of Artificial Sequence: Synthetic oligonucleotide
ttggaagtactgatttagcatgt

SEQ ID NO: 978 - RNA, 21 nt, synthetic construct
  source 1..21: mol_type = other RNA; note = Description of Artificial Sequence: Synthetic oligonucleotide
acatctttagtgtctgaatat

SEQ ID NO: 979 - RNA, 23 nt, synthetic construct
  source 1..23: mol_type = other RNA; note = Description of Artificial Sequence: Synthetic oligonucleotide
atattcagacactaaagatgtga

SEQ ID NO: 980 - RNA, 21 nt, synthetic construct
  source 1..21: mol_type = other RNA; note = Description of Artificial Sequence: Synthetic oligonucleotide
catctttagtgtctgaatata

SEQ ID NO: 981 - RNA, 23 nt, synthetic construct
  source 1..23: mol_type = other RNA; note = Description of Artificial Sequence: Synthetic oligonucleotide
tatattcagacactaaagatgtg

SEQ ID NO: 982 - RNA, 21 nt, synthetic construct
  source 1..21: mol_type = other RNA; note = Description of Artificial Sequence: Synthetic oligonucleotide
aatcacatctttagtgtctga

SEQ ID NO: 983 - RNA, 23 nt, synthetic construct
  source 1..23: mol_type = other RNA; note = Description of Artificial Sequence: Synthetic oligonucleotide
tcagacactaaagatgtgattgg

SEQ ID NO: 984 - RNA, 21 nt, synthetic construct
  source 1..21: mol_type = other RNA; note = Description of Artificial Sequence: Synthetic oligonucleotide
caatcacatctttagtgtctg

SEQ ID NO: 985 - RNA, 23 nt, synthetic construct
  source 1..23: mol_type = other RNA; note = Description of Artificial Sequence: Synthetic oligonucleotide
cagacactaaagatgtgattgga

SEQ ID NO: 986 - RNA, 21 nt, synthetic construct
  source 1..21: mol_type = other RNA; note = Description of Artificial Sequence: Synthetic oligonucleotide
gcatgtattacttgacaaaga

SEQ ID NO: 987 - RNA, 23 nt, synthetic construct
  source 1..23: mol_type = other RNA; note = Description of Artificial Sequence: Synthetic oligonucleotide
tctttgtcaagtaatacatgctg

SEQ ID NO: 988 - RNA, 21 nt, synthetic construct
  source 1..21: mol_type = other RNA; note = Description of Artificial Sequence: Synthetic oligonucleotide
catgtattacttgacaaagag

SEQ ID NO: 989 - RNA, 23 nt, synthetic construct
  source 1..23: mol_type = other RNA; note = Description of Artificial Sequence: Synthetic oligonucleotide
ctctttgtcaagtaatacatgct

SEQ ID NO: 990 - RNA, 21 nt, synthetic construct
  source 1..21: mol_type = other RNA; note = Description of Artificial Sequence: Synthetic oligonucleotide
ttcagcatgtattacttgaca

SEQ ID NO: 991 - RNA, 23 nt, synthetic construct
  source 1..23: mol_type = other RNA; note = Description of Artificial Sequence: Synthetic oligonucleotide
tgtcaagtaatacatgctgaaaa

SEQ ID NO: 992 - RNA, 21 nt, synthetic construct
  source 1..21: mol_type = other RNA; note = Description of Artificial Sequence: Synthetic oligonucleotide
tttcagcatgtattacttgac

SEQ ID NO: 993 - RNA, 23 nt, synthetic construct
  source 1..23: mol_type = other RNA; note = Description of Artificial Sequence: Synthetic oligonucleotide
gtcaagtaatacatgctgaaaaa

SEQ ID NO: 994 - RNA, 21 nt, synthetic construct
  source 1..21: mol_type = other RNA; note = Description of Artificial Sequence: Synthetic oligonucleotide
atgttacttcttagagagaaa

SEQ ID NO: 995 - RNA, 23 nt, synthetic construct
  source 1..23: mol_type = other RNA; note = Description of Artificial Sequence: Synthetic oligonucleotide
tttctctctaagaagtaacatac

SEQ ID NO: 996 - RNA, 21 nt, synthetic construct
  source 1..21: mol_type = other RNA; note = Description of Artificial Sequence: Synthetic oligonucleotide
tgttacttcttagagagaaat

SEQ ID NO: 997 - RNA, 23 nt, synthetic construct
  source 1..23: mol_type = other RNA; note = Description of Artificial Sequence: Synthetic oligonucleotide
atttctctctaagaagtaacata

SEQ ID NO: 998 - RNA, 21 nt, synthetic construct
  source 1..21: mol_type = other RNA; note = Description of Artificial Sequence: Synthetic oligonucleotide
atgtatgttacttcttagaga

SEQ ID NO: 999 - RNA, 23 nt, synthetic construct
  source 1..23: mol_type = other RNA; note = Description of Artificial Sequence: Synthetic oligonucleotide
tctctaagaagtaacatacatcc

SEQ ID NO: 1000 - RNA, 21 nt, synthetic construct
  source 1..21: mol_type = other RNA; note = Description of Artificial Sequence: Synthetic oligonucleotide
gatgtatgttacttcttagag

SEQ ID NO: 1001 - RNA, 23 nt, synthetic construct
  source 1..23: mol_type = other RNA; note = Description of Artificial Sequence: Synthetic oligonucleotide
ctctaagaagtaacatacatcct

SEQ ID NO: 1002 - RNA, 21 nt, synthetic construct
  source 1..21: mol_type = other RNA; note = Description of Artificial Sequence: Synthetic oligonucleotide
acaactttgagaaggtagcac

SEQ ID NO: 1003 - RNA, 23 nt, synthetic construct
  source 1..23: mol_type = other RNA; note = Description of Artificial Sequence: Synthetic oligonucleotide
gtgctaccttctcaaagttgtga

SEQ ID NO: 1004 - RNA, 21 nt, synthetic construct
  source 1..21: mol_type = other RNA; note = Description of Artificial Sequence: Synthetic oligonucleotide
caactttgagaaggtagcact

SEQ ID NO: 1005 - RNA, 23 nt, synthetic construct
  source 1..23: mol_type = other RNA; note = Description of Artificial Sequence: Synthetic oligonucleotide
agtgctaccttctcaaagttgtg

SEQ ID NO: 1006 - RNA, 21 nt, synthetic construct
  source 1..21: mol_type = other RNA; note = Description of Artificial Sequence: Synthetic oligonucleotide
attcacaactttgagaaggta

SEQ ID NO: 1007 - RNA, 23 nt, synthetic construct
  source 1..23: mol_type = other RNA; note = Description of Artificial Sequence: Synthetic oligonucleotide
taccttctcaaagttgtgaatca

SEQ ID NO: 1008 - RNA, 21 nt, synthetic construct
  source 1..21: mol_type = other RNA; note = Description of Artificial Sequence: Synthetic oligonucleotide
gattcacaactttgagaaggt

SEQ ID NO: 1009 - RNA, 23 nt, synthetic construct
  source 1..23: mol_type = other RNA; note = Description of Artificial Sequence: Synthetic oligonucleotide
accttctcaaagttgtgaatcag

SEQ ID NO: 1010 - RNA, 21 nt, synthetic construct
  source 1..21: mol_type = other RNA; note = Description of Artificial Sequence: Synthetic oligonucleotide
aacatgctaaatcagtacttc

SEQ ID NO: 1011 - RNA, 23 nt, synthetic construct
  source 1..23: mol_type = other RNA; note = Description of Artificial Sequence: Synthetic oligonucleotide
gaagtactgatttagcatgttgt

SEQ ID NO: 1012 - RNA, 21 nt, synthetic construct
  source 1..21: mol_type = other RNA; note = Description of Artificial Sequence: Synthetic oligonucleotide
acatgctaaatcagtacttcc

SEQ ID NO: 1013 - RNA, 23 nt, synthetic construct
  source 1..23: mol_type = other RNA; note = Description of Artificial Sequence: Synthetic oligonucleotide
ggaagtactgatttagcatgttg

SEQ ID NO: 1014 - RNA, 21 nt, synthetic construct
  source 1..21: mol_type = other RNA; note = Description of Artificial Sequence: Synthetic oligonucleotide
gaacaacatgctaaatcagta

SEQ ID NO: 1015 - RNA, 23 nt, synthetic construct
  source 1..23: mol_type = other RNA; note = Description of Artificial Sequence: Synthetic oligonucleotide
tactgatttagcatgttgttcat

SEQ ID NO: 1016 - RNA, 21 nt, synthetic construct
  source 1..21: mol_type = other RNA; note = Description of Artificial Sequence: Synthetic oligonucleotide
tgaacaacatgctaaatcagt

SEQ ID NO: 1017 - RNA, 23 nt, synthetic construct
  source 1..23: mol_type = other RNA; note = Description of Artificial Sequence: Synthetic oligonucleotide
actgatttagcatgttgttcata

SEQ ID NO: 1018 - RNA, 21 nt, synthetic construct
  source 1..21: mol_type = other RNA; note = Description of Artificial Sequence: Synthetic oligonucleotide
aaaccagtactttatcatttt

SEQ ID NO: 1019 - RNA, 23 nt, synthetic construct
  source 1..23: mol_type = other RNA; note = Description of Artificial Sequence: Synthetic oligonucleotide
aaaatgataaagtactggtttca

SEQ ID NO: 1020 - RNA, 21 nt, synthetic construct
  source 1..21: mol_type = other RNA; note = Description of Artificial Sequence: Synthetic oligonucleotide
aaccagtactttatcattttc

SEQ ID NO: 1021 - RNA, 23 nt, synthetic construct
  source 1..23: mol_type = other RNA; note = Description of Artificial Sequence: Synthetic oligonucleotide
gaaaatgataaagtactggtttc

SEQ ID NO: 1022 - RNA, 21 nt, synthetic construct
  source 1..21: mol_type = other RNA; note = Description of Artificial Sequence: Synthetic oligonucleotide
tttgaaaccagtactttatca

SEQ ID NO: 1023 - RNA, 23 nt, synthetic construct
  source 1..23: mol_type = other RNA; note = Description of Artificial Sequence: Synthetic oligonucleotide
tgataaagtactggtttcaaaat

SEQ ID NO: 1024 - RNA, 21 nt, synthetic construct
  source 1..21: mol_type = other RNA; note = Description of Artificial Sequence: Synthetic oligonucleotide
ttttgaaaccagtactttatc

SEQ ID NO: 1025 - RNA, 23 nt, synthetic construct
  source 1..23: mol_type = other RNA; note = Description of Artificial Sequence: Synthetic oligonucleotide
gataaagtactggtttcaaaatt

SEQ ID NO: 1026 - RNA, 21 nt, synthetic construct
  source 1..21: mol_type = other RNA; note = Description of Artificial Sequence: Synthetic oligonucleotide
gagaagatgggctacaaggcc

SEQ ID NO: 1027 - RNA, 23 nt, synthetic construct
  source 1..23: mol_type = other RNA; note = Description of Artificial Sequence: Synthetic oligonucleotide
ggccttgtagcccatcttctctg

SEQ ID NO: 1028 - RNA, 21 nt, synthetic construct
  source 1..21: mol_type = other RNA; note = Description of Artificial Sequence: Synthetic oligonucleotide
agaagatgggctacaaggcca

SEQ ID NO: 1029 - RNA, 23 nt, synthetic construct
  source 1..23: mol_type = other RNA; note = Description of Artificial Sequence: Synthetic oligonucleotide
tggccttgtagcccatcttctct

SEQ ID NO: 1030 - RNA, 21 nt, synthetic construct
  source 1..21: mol_type = other RNA; note = Description of Artificial Sequence: Synthetic oligonucleotide
ggcagagaagatgggctacaa

SEQ ID NO: 1031 - RNA, 23 nt, synthetic construct
  source 1..23: mol_type = other RNA; note = Description of Artificial Sequence: Synthetic oligonucleotide
ttgtagcccatcttctctgcctg

SEQ ID NO: 1032 - RNA, 21 nt, synthetic construct
  source 1..21: mol_type = other RNA; note = Description of Artificial Sequence: Synthetic oligonucleotide
aggcagagaagatgggctaca

SEQ ID NO: 1033 - RNA, 23 nt, synthetic construct
  source 1..23: mol_type = other RNA; note = Description of Artificial Sequence: Synthetic oligonucleotide
tgtagcccatcttctctgcctgc

SEQ ID NO: 1034 - RNA, 21 nt, synthetic construct
  source 1..21: mol_type = other RNA; note = Description of Artificial Sequence: Synthetic oligonucleotide
aacgggcatgatgttgagttc

SEQ ID NO: 1035 - RNA, 23 nt, synthetic construct
  source 1..23: mol_type = other RNA; note = Description of Artificial Sequence: Synthetic oligonucleotide
gaactcaacatcatgcccgttcc

SEQ ID NO: 1036 - RNA, 21 nt, synthetic construct
  source 1..21: mol_type = other RNA; note = Description of Artificial Sequence: Synthetic oligonucleotide
acgggcatgatgttgagttcc

SEQ ID NO: 1037 - RNA, 23 nt, synthetic construct
  source 1..23: mol_type = other RNA; note = Description of Artificial Sequence: Synthetic oligonucleotide
ggaactcaacatcatgcccgttc

SEQ ID NO: 1038 - RNA, 21 nt, synthetic construct
  source 1..21: mol_type = other RNA; note = Description of Artificial Sequence: Synthetic oligonucleotide
tgggaacgggcatgatgttga

SEQ ID NO: 1039 - RNA, 23 nt, synthetic construct
  source 1..23: mol_type = other RNA; note = Description of Artificial Sequence: Synthetic oligonucleotide
tcaacatcatgcccgttcccagg

SEQ ID NO: 1040 - RNA, 21 nt, synthetic construct
  source 1..21: mol_type = other RNA; note = Description of Artificial Sequence: Synthetic oligonucleotide
ctgggaacgggcatgatgttg

SEQ ID NO: 1041 - RNA, 23 nt, synthetic construct
  source 1..23: mol_type = other RNA; note = Description of Artificial Sequence: Synthetic oligonucleotide
caacatcatgcccgttcccaggg

SEQ ID NO: 1042 - RNA, 21 nt, synthetic construct
  source 1..21: mol_type = other RNA; note = Description of Artificial Sequence: Synthetic oligonucleotide
atgtggctaaagcaatagacc

SEQ ID NO: 1043 - RNA, 23 nt, synthetic construct
  source 1..23: mol_type = other RNA; note = Description of Artificial Sequence: Synthetic oligonucleotide
ggtctattgctttagccacatat

SEQ ID NO: 1044 - RNA, 21 nt, synthetic construct
  source 1..21: mol_type = other RNA; note = Description of Artificial Sequence: Synthetic oligonucleotide
tgtggctaaagcaatagaccc

SEQ ID NO: 1045 - RNA, 23 nt, synthetic construct
  source 1..23: mol_type = other RNA; note = Description of Artificial Sequence: Synthetic oligonucleotide
gggtctattgctttagccacata

SEQ ID NO: 1046 - RNA, 21 nt, synthetic construct
  source 1..21: mol_type = other RNA; note = Description of Artificial Sequence: Synthetic oligonucleotide
gcatatgtggctaaagcaata

SEQ ID NO: 1047 - RNA, 23 nt, synthetic construct
  source 1..23: mol_type = other RNA; note = Description of Artificial Sequence: Synthetic oligonucleotide
tattgctttagccacatatgcag

SEQ ID NO: 1048 - RNA, 21 nt, synthetic construct
  source 1..21: mol_type = other RNA; note = Description of Artificial Sequence: Synthetic oligonucleotide
tgcatatgtggctaaagcaat

SEQ ID NO: 1049 - RNA, 23 nt, synthetic construct
  source 1..23: mol_type = other RNA; note = Description of Artificial Sequence: Synthetic oligonucleotide
attgctttagccacatatgcagc

SEQ ID NO: 1050 - RNA, 21 nt, synthetic construct
  source 1..21: mol_type = other RNA; note = Description of Artificial Sequence: Synthetic oligonucleotide
aggatgctccggaatgttgct

SEQ ID NO: 1051 - RNA, 23 nt, synthetic construct
  source 1..23: mol_type = other RNA; note = Description of Artificial Sequence: Synthetic oligonucleotide
agcaacattccggagcatccttg

SEQ ID NO: 1052 - RNA, 21 nt, synthetic construct
  source 1..21: mol_type = other RNA; note = Description of Artificial Sequence: Synthetic oligonucleotide
ggatgctccggaatgttgctg

SEQ ID NO: 1053 - RNA, 23 nt, synthetic construct
  source 1..23: mol_type = other RNA; note = Description of Artificial Sequence: Synthetic oligonucleotide
cagcaacattccggagcatcctt

SEQ ID NO: 1054 - RNA, 21 nt, synthetic construct
  source 1..21: mol_type = other RNA; note = Description of Artificial Sequence: Synthetic oligonucleotide
tccaaggatgctccggaatgt

SEQ ID NO: 1055 - RNA, 23 nt, synthetic construct
  source 1..23: mol_type = other RNA; note = Description of Artificial Sequence: Synthetic oligonucleotide
acattccggagcatccttggata

SEQ ID NO: 1056 - RNA, 21 nt, synthetic construct
  source 1..21: mol_type = other RNA; note = Description of Artificial Sequence: Synthetic oligonucleotide
atccaaggatgctccggaatg

SEQ ID NO: 1057 - RNA, 23 nt, synthetic construct
  source 1..23: mol_type = other RNA; note = Description of Artificial Sequence: Synthetic oligonucleotide
cattccggagcatccttggatac

SEQ ID NO: 1058 - RNA, 21 nt, synthetic construct
  source 1..21: mol_type = other RNA; note = Description of Artificial Sequence: Synthetic oligonucleotide
tcacatctttagtgtctgaat

SEQ ID NO: 1059 - RNA, 23 nt, synthetic construct
  source 1..23: mol_type = other RNA; note = Description of Artificial Sequence: Synthetic oligonucleotide
attcagacactaaagatgtgatt

SEQ ID NO: 1060 - RNA, 21 nt, synthetic construct
  source 1..21: mol_type = other RNA; note = Description of Artificial Sequence: Synthetic oligonucleotide
cacatctttagtgtctgaata

SEQ ID NO: 1061 - RNA, 23 nt, synthetic construct
  source 1..23: mol_type = other RNA; note = Description of Artificial Sequence: Synthetic oligonucleotide
tattcagacactaaagatgtgat

SEQ ID NO: 1062 - RNA, 21 nt, synthetic construct
  source 1..21: mol_type = other RNA; note = Description of Artificial Sequence: Synthetic oligonucleotide
ccaatcacatctttagtgtct

SEQ ID NO: 1063 - RNA, 23 nt, synthetic construct
  source 1..23: mol_type = other RNA; note = Description of Artificial Sequence: Synthetic oligonucleotide
agacactaaagatgtgattggaa

SEQ ID NO: 1064 - RNA, 21 nt, synthetic construct
  source 1..21: mol_type = other RNA; note = Description of Artificial Sequence: Synthetic oligonucleotide
tccaatcacatctttagtgtc

SEQ ID NO: 1065 - RNA, 23 nt, synthetic construct
  source 1..23: mol_type = other RNA; note = Description of Artificial Sequence: Synthetic oligonucleotide
gacactaaagatgtgattggaaa

SEQ ID NO: 1066 - RNA, 21 nt, synthetic construct
  source 1..21: mol_type = other RNA; note = Description of Artificial Sequence: Synthetic oligonucleotide
aaatgtgtttagacaacgtca

SEQ ID NO: 1067 - RNA, 23 nt, synthetic construct
  source 1..23: mol_type = other RNA; note = Description of Artificial Sequence: Synthetic oligonucleotide
tgacgttgtctaaacacattttc

SEQ ID NO: 1068 - RNA, 21 nt, synthetic construct
  source 1..21: mol_type = other RNA; note = Description of Artificial Sequence: Synthetic oligonucleotide
aatgtgtttagacaacgtcat

SEQ ID NO: 1069 - RNA, 23 nt, synthetic construct
  source 1..23: mol_type = other RNA; note = Description of Artificial Sequence: Synthetic oligonucleotide
atgacgttgtctaaacacatttt

SEQ ID NO: 1070 - RNA, 21 nt, synthetic construct
  source 1..21: mol_type = other RNA; note = Description of Artificial Sequence: Synthetic oligonucleotide
ttgaaaatgtgtttagacaac

SEQ ID NO: 1071 - RNA, 23 nt, synthetic construct
  source 1..23: mol_type = other RNA; note = Description of Artificial Sequence: Synthetic oligonucleotide
gttgtctaaacacattttcaatg

SEQ ID NO: 1072 - RNA, 21 nt, synthetic construct
  source 1..21: mol_type = other RNA; note = Description of Artificial Sequence: Synthetic oligonucleotide
attgaaaatgtgtttagacaa

SEQ ID NO: 1073 - RNA, 23 nt, synthetic construct
  source 1..23: mol_type = other RNA; note = Description of Artificial Sequence: Synthetic oligonucleotide
ttgtctaaacacattttcaatgt

SEQ ID NO: 1074 - RNA, 21 nt, synthetic construct
  source 1..21: mol_type = other RNA; note = Description of Artificial Sequence: Synthetic oligonucleotide
tactaaaggaagaattccggt

SEQ ID NO: 1075 - RNA, 23 nt, synthetic construct
  source 1..23: mol_type = other RNA; note = Description of Artificial Sequence: Synthetic oligonucleotide
accggaattcttcctttagtatc

SEQ ID NO: 1076 - RNA, 21 nt, synthetic construct
  source 1..21: mol_type = other RNA; note = Description of Artificial Sequence: Synthetic oligonucleotide
actaaaggaagaattccggtt

SEQ ID NO: 1077 - RNA, 23 nt, synthetic construct
  source 1..23: mol_type = other RNA; note = Description of Artificial Sequence: Synthetic oligonucleotide
aaccggaattcttcctttagtat

SEQ ID NO: 1078 - RNA, 21 nt, synthetic construct
  source 1..21: mol_type = other RNA; note = Description of Artificial Sequence: Synthetic oligonucleotide
gagatactaaaggaagaattc

SEQ ID NO: 1079 - RNA, 23 nt, synthetic construct
  source 1..23: mol_type = other RNA; note = Description of Artificial Sequence: Synthetic oligonucleotide
gaattcttcctttagtatctcga

SEQ ID NO: 1080 - RNA, 21 nt, synthetic construct
  source 1..21: mol_type = other RNA; note = Description of Artificial Sequence: Synthetic oligonucleotide
cgagatactaaaggaagaatt

SEQ ID NO: 1081 - RNA, 23 nt, synthetic construct
  source 1..23: mol_type = other RNA; note = Description of Artificial Sequence: Synthetic oligonucleotide
aattcttcctttagtatctcgag

SEQ ID NO: 1082 - RNA, 21 nt, synthetic construct
  source 1..21: mol_type = other RNA; note = Description of Artificial Sequence: Synthetic oligonucleotide
aactttggctgataatattgc

SEQ ID NO: 1083 - RNA, 23 nt, synthetic construct
  source 1..23: mol_type = other RNA; note = Description of Artificial Sequence: Synthetic oligonucleotide
gcaatattatcagccaaagtttc

SEQ ID NO: 1084 - RNA, 21 nt, synthetic construct
  source 1..21: mol_type = other RNA; note = Description of Artificial Sequence: Synthetic oligonucleotide
actttggctgataatattgca

SEQ ID NO: 1085 - RNA, 23 nt, synthetic construct
  source 1..23: mol_type = other RNA; note = Description of Artificial Sequence: Synthetic oligonucleotide
tgcaatattatcagccaaagttt

SEQ ID NO: 1086 - RNA, 21 nt, synthetic construct
  source 1..21: mol_type = other RNA; note = Description of Artificial Sequence: Synthetic oligonucleotide
aagaaactttggctgataata

SEQ ID NO: 1087 - RNA, 23 nt, synthetic construct
  source 1..23: mol_type = other RNA; note = Description of Artificial Sequence: Synthetic oligonucleotide
tattatcagccaaagtttcttca

SEQ ID NO: 1088 - RNA, 21 nt, synthetic construct
  source 1..21: mol_type = other RNA; note = Description of Artificial Sequence: Synthetic oligonucleotide
gaagaaactttggctgataat

SEQ ID NO: 1089 - RNA, 23 nt, synthetic construct
  source 1..23: mol_type = other RNA; note = Description of Artificial Sequence: Synthetic oligonucleotide
attatcagccaaagtttcttcat

SEQ ID NO: 1090 - RNA, 21 nt, synthetic construct
  source 1..21: mol_type = other RNA; note = Description of Artificial Sequence: Synthetic oligonucleotide
aaatggctgagaagactgaca

SEQ ID NO: 1091 - RNA, 23 nt, synthetic construct
  source 1..23: mol_type = other RNA; note = Description of Artificial Sequence: Synthetic oligonucleotide
tgtcagtcttctcagccatttga

SEQ ID NO: 1092 - RNA, 21 nt, synthetic construct
  source 1..21: mol_type = other RNA; note = Description of Artificial Sequence: Synthetic oligonucleotide
aatggctgagaagactgacat

SEQ ID NO: 1093 - RNA, 23 nt, synthetic construct
  source 1..23: mol_type = other RNA; note = Description of Artificial Sequence: Synthetic oligonucleotide
atgtcagtcttctcagccatttg

SEQ ID NO: 1094 - RNA, 21 nt, synthetic construct
  source 1..21: mol_type = other RNA; note = Description of Artificial Sequence: Synthetic oligonucleotide
tatcaaatggctgagaagact

SEQ ID NO: 1095 - RNA, 23 nt, synthetic construct
  source 1..23: mol_type = other RNA; note = Description of Artificial Sequence: Synthetic oligonucleotide
agtcttctcagccatttgatatc

SEQ ID NO: 1096 - RNA, 21 nt, synthetic construct
  source 1..21: mol_type = other RNA; note = Description of Artificial Sequence: Synthetic oligonucleotide
atatcaaatggctgagaagac

SEQ ID NO: 1097 - RNA, 23 nt, synthetic construct
  source 1..23: mol_type = other RNA; note = Description of Artificial Sequence: Synthetic oligonucleotide
gtcttctcagccatttgatatct

SEQ ID NO: 1098 - RNA, 21 nt, synthetic construct
  source 1..21: mol_type = other RNA; note = Description of Artificial Sequence: Synthetic oligonucleotide
gtggttcttaaattgtaagct

SEQ ID NO: 1099 - RNA, 23 nt, synthetic construct
  source 1..23: mol_type = other RNA; note = Description of Artificial Sequence: Synthetic oligonucleotide
agcttacaatttaagaaccactg

SEQ ID NO: 1100 - RNA, 21 nt, synthetic construct
  source 1..21: mol_type = other RNA; note = Description of Artificial Sequence: Synthetic oligonucleotide
tggttcttaaattgtaagctc

SEQ ID NO: 1101 - RNA, 23 nt, synthetic construct
  source 1..23: mol_type = other RNA; note = Description of Artificial Sequence: Synthetic oligonucleotide
gagcttacaatttaagaaccact

SEQ ID NO: 1102 - RNA, 21 nt, synthetic construct
  source 1..21: mol_type = other RNA; note = Description of Artificial Sequence: Synthetic oligonucleotide
aacagtggttcttaaattgta

SEQ ID NO: 1103 - RNA, 23 nt, synthetic construct
  source 1..23: mol_type = other RNA; note = Description of Artificial Sequence: Synthetic oligonucleotide
tacaatttaagaaccactgtttt

SEQ ID NO: 1104 - RNA, 21 nt, synthetic construct
  source 1..21: mol_type = other RNA; note = Description of Artificial Sequence: Synthetic oligonucleotide
aaacagtggttcttaaattgt

SEQ ID NO: 1105 - RNA, 23 nt, synthetic construct
  source 1..23: mol_type = other RNA; note = Description of Artificial Sequence: Synthetic oligonucleotide
acaatttaagaaccactgtttta

SEQ ID NO: 1106 - RNA, 21 nt, synthetic construct
  source 1..21: mol_type = other RNA; note = Description of Artificial Sequence: Synthetic oligonucleotide
aagtcatcgacaagacattgg

SEQ ID NO: 1107 - RNA, 23 nt, synthetic construct
  source 1..23: mol_type = other RNA; note = Description of Artificial Sequence: Synthetic oligonucleotide
ccaatgtcttgtcgatgactttc

SEQ ID NO: 1108 - RNA, 21 nt, synthetic construct
  source 1..21: mol_type = other RNA; note = Description of Artificial Sequence: Synthetic oligonucleotide
agtcatcgacaagacattggt

SEQ ID NO: 1109 - RNA, 23 nt, synthetic construct
  source 1..23: mol_type = other RNA; note = Description of Artificial Sequence: Synthetic oligonucleotide
accaatgtcttgtcgatgacttt

SEQ ID NO: 1110 - RNA, 21 nt, synthetic construct
  source 1..21: mol_type = other RNA; note = Description of Artificial Sequence: Synthetic oligonucleotide
gtgaaagtcatcgacaagaca

SEQ ID NO: 1111 - RNA, 23 nt, synthetic construct
  source 1..23: mol_type = other RNA; note = Description of Artificial Sequence: Synthetic oligonucleotide
tgtcttgtcgatgactttcacat

SEQ ID NO: 1112 - RNA, 21 nt, synthetic construct
  source 1..21: mol_type = other RNA; note = Description of Artificial Sequence: Synthetic oligonucleotide
tgtgaaagtcatcgacaagac

SEQ ID NO: 1113 - RNA, 23 nt, synthetic construct
  source 1..23: mol_type = other RNA; note = Description of Artificial Sequence: Synthetic oligonucleotide
gtcttgtcgatgactttcacatt

SEQ ID NO: 1114 - RNA, 21 nt, synthetic construct
  source 1..21: mol_type = other RNA; note = Description of Artificial Sequence: Synthetic oligonucleotide
gataatattgcagcattttcc

SEQ ID NO: 1115 - RNA, 23 nt, synthetic construct
  source 1..23: mol_type = other RNA; note = Description of Artificial Sequence: Synthetic oligonucleotide
ggaaaatgctgcaatattatcag

SEQ ID NO: 1116 - RNA, 21 nt, synthetic construct
  source 1..21: mol_type = other RNA; note = Description of Artificial Sequence: Synthetic oligonucleotide
ataatattgcagcattttcca

SEQ ID NO: 1117 - RNA, 23 nt, synthetic construct
  source 1..23: mol_type = other RNA; note = Description of Artificial Sequence: Synthetic oligonucleotide
tggaaaatgctgcaatattatca

SEQ ID NO: 1118 - RNA, 21 nt, synthetic construct
  source 1..21: mol_type = other RNA; note = Description of Artificial Sequence: Synthetic oligonucleotide
ggctgataatattgcagcatt

SEQ ID NO: 1119 - RNA, 23 nt, synthetic construct
  source 1..23: mol_type = other RNA; note = Description of Artificial Sequence: Synthetic oligonucleotide
aatgctgcaatattatcagccaa

SEQ ID NO: 1120 - RNA, 21 nt, synthetic construct
  source 1..21: mol_type = other RNA; note = Description of Artificial Sequence: Synthetic oligonucleotide
tggctgataatattgcagcat

SEQ ID NO: 1121 - RNA, 23 nt, synthetic construct
  source 1..23: mol_type = other RNA; note = Description of Artificial Sequence: Synthetic oligonucleotide
atgctgcaatattatcagccaaa

SEQ ID NO: 1122 - RNA, 21 nt, synthetic construct
  source 1..21: mol_type = other RNA; note = Description of Artificial Sequence: Synthetic oligonucleotide
gctaatttgtatcaatgatta

SEQ ID NO: 1123 - RNA, 23 nt, synthetic construct
  source 1..23: mol_type = other RNA; note = Description of Artificial Sequence: Synthetic oligonucleotide
taatcattgatacaaattagccg

SEQ ID NO: 1124 - RNA, 21 nt, synthetic construct
  source 1..21: mol_type = other RNA; note = Description of Artificial Sequence: Synthetic oligonucleotide
ctaatttgtatcaatgattat

SEQ ID NO: 1125 - RNA, 23 nt, synthetic construct
  source 1..23: mol_type = other RNA; note = Description of Artificial Sequence: Synthetic oligonucleotide
ataatcattgatacaaattagcc

SEQ ID NO: 1126 - RNA, 21 nt, synthetic construct
  source 1..21: mol_type = other RNA; note = Description of Artificial Sequence: Synthetic oligonucleotide
cccggctaatttgtatcaatg

SEQ ID NO: 1127 - RNA, 23 nt, synthetic construct
  source 1..23: mol_type = other RNA; note = Description of Artificial Sequence: Synthetic oligonucleotide
cattgatacaaattagccggggg

SEQ ID NO: 1128 - RNA, 21 nt, synthetic construct
  source 1..21: mol_type = other RNA; note = Description of Artificial Sequence: Synthetic oligonucleotide
ccccggctaatttgtatcaat

SEQ ID NO: 1129 - RNA, 23 nt, synthetic construct
  source 1..23: mol_type = other RNA; note = Description of Artificial Sequence: Synthetic oligonucleotide
attgatacaaattagccggggga

SEQ ID NO: 1130 - RNA, 21 nt, synthetic construct
  source 1..21: mol_type = other RNA; note = Description of Artificial Sequence: Synthetic oligonucleotide
taattggtgatacttctttga

SEQ ID NO: 1131 - RNA, 23 nt, synthetic construct
  source 1..23: mol_type = other RNA; note = Description of Artificial Sequence: Synthetic oligonucleotide
tcaaagaagtatcaccaattacc

SEQ ID NO: 1132 - RNA, 21 nt, synthetic construct
  source 1..21: mol_type = other RNA; note = Description of Artificial Sequence: Synthetic oligonucleotide
aattggtgatacttctttgaa

SEQ ID NO: 1133 - RNA, 23 nt, synthetic construct
  source 1..23: mol_type = other RNA; note = Description of Artificial Sequence: Synthetic oligonucleotide
ttcaaagaagtatcaccaattac

SEQ ID NO: 1134 - RNA, 21 nt, synthetic construct
  source 1..21: mol_type = other RNA; note = Description of Artificial Sequence: Synthetic oligonucleotide
gcggtaattggtgatacttct

SEQ ID NO: 1135 - RNA, 23 nt, synthetic construct
  source 1..23: mol_type = other RNA; note = Description of Artificial Sequence: Synthetic oligonucleotide
agaagtatcaccaattaccgcca

SEQ ID NO: 1136 - RNA, 21 nt, synthetic construct
  source 1..21: mol_type = other RNA; note = Description of Artificial Sequence: Synthetic oligonucleotide
ggcggtaattggtgatacttc

SEQ ID NO: 1137 - RNA, 23 nt, synthetic construct
  source 1..23: mol_type = other RNA; note = Description of Artificial Sequence: Synthetic oligonucleotide
gaagtatcaccaattaccgccac

SEQ ID NO: 1138 - RNA, 21 nt, synthetic construct
  source 1..21: mol_type = other RNA; note = Description of Artificial Sequence: Synthetic oligonucleotide
cagtggttcttaaattgtaag

SEQ ID NO: 1139 - RNA, 23 nt, synthetic construct
  source 1..23: mol_type = other RNA; note = Description of Artificial Sequence: Synthetic oligonucleotide
cttacaatttaagaaccactgtt

SEQ ID NO: 1140 - RNA, 21 nt, synthetic construct
  source 1..21: mol_type = other RNA; note = Description of Artificial Sequence: Synthetic oligonucleotide
agtggttcttaaattgtaagc

SEQ ID NO: 1141 - RNA, 23 nt, synthetic construct
  source 1..23: mol_type = other RNA; note = Description of Artificial Sequence: Synthetic oligonucleotide
gcttacaatttaagaaccactgt

SEQ ID NO: 1142 - RNA, 21 nt, synthetic construct
  source 1..21: mol_type = other RNA; note = Description of Artificial Sequence: Synthetic oligonucleotide
aaaacagtggttcttaaattg

SEQ ID NO: 1143 - RNA, 23 nt, synthetic construct
  source 1..23: mol_type = other RNA; note = Description of Artificial Sequence: Synthetic oligonucleotide
caatttaagaaccactgttttaa

SEQ ID NO: 1144 - RNA, 21 nt, synthetic construct
  source 1..21: mol_type = other RNA; note = Description of Artificial Sequence: Synthetic oligonucleotide
taaaacagtggttcttaaatt

SEQ ID NO: 1145 - RNA, 23 nt, synthetic construct
  source 1..23: mol_type = other RNA; note = Description of Artificial Sequence: Synthetic oligonucleotide
aatttaagaaccactgttttaaa

SEQ ID NO: 1146 - RNA, 21 nt, synthetic construct
  source 1..21: mol_type = other RNA; note = Description of Artificial Sequence: Synthetic oligonucleotide
acctgtattctgtttacatgt

SEQ ID NO: 1147 - RNA, 23 nt, synthetic construct
  source 1..23: mol_type = other RNA; note = Description of Artificial Sequence: Synthetic oligonucleotide
acatgtaaacagaatacaggtta

SEQ ID NO: 1148 - RNA, 21 nt, synthetic construct
  source 1..21: mol_type = other RNA; note = Description of Artificial Sequence: Synthetic oligonucleotide
cctgtattctgtttacatgtc

SEQ ID NO: 1149 - RNA, 23 nt, synthetic construct
  source 1..23: mol_type = other RNA; note = Description of Artificial Sequence: Synthetic oligonucleotide
gacatgtaaacagaatacaggtt

SEQ ID NO: 1150 - RNA, 21 nt, synthetic construct
  source 1..21: mol_type = other RNA; note = Description of Artificial Sequence: Synthetic oligonucleotide
attaacctgtattctgtttac

SEQ ID NO: 1151 - RNA, 23 nt, synthetic construct
  source 1..23: mol_type = other RNA; note = Description of Artificial Sequence: Synthetic oligonucleotide
gtaaacagaatacaggttaataa

SEQ ID NO: 1152 - RNA, 21 nt, synthetic construct
  source 1..21: mol_type = other RNA; note = Description of Artificial Sequence: Synthetic oligonucleotide
tattaacctgtattctgttta

SEQ ID NO: 1153 - RNA, 23 nt, synthetic construct
  source 1..23: mol_type = other RNA; note = Description of Artificial Sequence: Synthetic oligonucleotide
taaacagaatacaggttaataaa

SEQ ID NO: 1154 - RNA, 21 nt, synthetic construct
  source 1..21: mol_type = other RNA; note = Description of Artificial Sequence: Synthetic oligonucleotide
aagaaactttggctgataata

SEQ ID NO: 1155 - RNA, 23 nt, synthetic construct
  source 1..23: mol_type = other RNA; note = Description of Artificial Sequence: Synthetic oligonucleotide
tattatcagccaaagtttcttca

SEQ ID NO: 1156 - RNA, 21 nt, synthetic construct
  source 1..21: mol_type = other RNA; note = Description of Artificial Sequence: Synthetic oligonucleotide
agaaactttggctgataatat

SEQ ID NO: 1157 - RNA, 23 nt, synthetic construct
  source 1..23: mol_type = other RNA; note = Description of Artificial Sequence: Synthetic oligonucleotide
atattatcagccaaagtttcttc

SEQ ID NO: 1158 - RNA, 21 nt, synthetic construct
  source 1..21: mol_type = other RNA; note = Description of Artificial Sequence: Synthetic oligonucleotide
gatgaagaaactttggctgat

SEQ ID NO: 1159 - RNA, 23 nt, synthetic construct
  source 1..23: mol_type = other RNA; note = Description of Artificial Sequence: Synthetic oligonucleotide
atcagccaaagtttcttcatcat

SEQ ID NO: 1160 - RNA, 21 nt, synthetic construct
  source 1..21: mol_type = other RNA; note = Description of Artificial Sequence: Synthetic oligonucleotide
tgatgaagaaactttggctga

SEQ ID NO: 1161 - RNA, 23 nt, synthetic construct
  source 1..23: mol_type = other RNA; note = Description of Artificial Sequence: Synthetic oligonucleotide
tcagccaaagtttcttcatcatt

SEQ ID NO: 1162 - RNA, 21 nt, synthetic construct
  source 1..21: mol_type = other RNA; note = Description of Artificial Sequence: Synthetic oligonucleotide
gaaaggtgttcaagatgtcct

SEQ ID NO: 1163 - RNA, 23 nt, synthetic construct
  source 1..23: mol_type = other RNA; note = Description of Artificial Sequence: Synthetic oligonucleotide
aggacatcttgaacacctttctc

SEQ ID NO: 1164 - RNA, 21 nt, synthetic construct
  source 1..21: mol_type = other RNA; note = Description of Artificial Sequence: Synthetic oligonucleotide
aaaggtgttcaagatgtcctc

SEQ ID NO: 1165 - RNA, 23 nt, synthetic construct
  source 1..23: mol_type = other RNA; note = Description of Artificial Sequence: Synthetic oligonucleotide
gaggacatcttgaacacctttct

SEQ ID NO: 1166 - RNA, 21 nt, synthetic construct
  source 1..21: mol_type = other RNA; note = Description of Artificial Sequence: Synthetic oligonucleotide
gggagaaaggtgttcaagatg

SEQ ID NO: 1167 - RNA, 23 nt, synthetic construct
  source 1..23: mol_type = other RNA; note = Description of Artificial Sequence: Synthetic oligonucleotide
catcttgaacacctttctccccc

SEQ ID NO: 1168 - RNA, 21 nt, synthetic construct
  source 1..21: mol_type = other RNA; note = Description of Artificial Sequence: Synthetic oligonucleotide
ggggagaaaggtgttcaagat

SEQ ID NO: 1169 - RNA, 23 nt, synthetic construct
  source 1..23: mol_type = other RNA; note = Description of Artificial Sequence: Synthetic oligonucleotide
atcttgaacacctttctccccct

SEQ ID NO: 1170 - RNA, 21 nt, synthetic construct
  source 1..21: mol_type = other RNA; note = Description of Artificial Sequence: Synthetic oligonucleotide
atcttggtgtcgaatcatggg

SEQ ID NO: 1171 - RNA, 23 nt, synthetic construct
  source 1..23: mol_type = other RNA; note = Description of Artificial Sequence: Synthetic oligonucleotide
cccatgattcgacaccaagatcc

SEQ ID NO: 1172 - RNA, 21 nt, synthetic construct
  source 1..21: mol_type = other RNA; note = Description of Artificial Sequence: Synthetic oligonucleotide
tcttggtgtcgaatcatgggg

SEQ ID NO: 1173 - RNA, 23 nt, synthetic construct
  source 1..23: mol_type = other RNA; note = Description of Artificial Sequence: Synthetic oligonucleotide
ccccatgattcgacaccaagatc

SEQ ID NO: 1174 - RNA, 21 nt, synthetic construct
  source 1..21: mol_type = other RNA; note = Description of Artificial Sequence: Synthetic oligonucleotide
tgggatcttggtgtcgaatca

SEQ ID NO: 1175 - RNA, 23 nt, synthetic construct
  source 1..23: mol_type = other RNA; note = Description of Artificial Sequence: Synthetic oligonucleotide
tgattcgacaccaagatcccatt

SEQ ID NO: 1176 - RNA, 21 nt, synthetic construct
  source 1..21: mol_type = other RNA; note = Description of Artificial Sequence: Synthetic oligonucleotide
atgggatcttggtgtcgaatc

SEQ ID NO: 1177 - RNA, 23 nt, synthetic construct
  source 1..23: mol_type = other RNA; note = Description of Artificial Sequence: Synthetic oligonucleotide
gattcgacaccaagatcccattc

SEQ ID NO: 1178 - RNA, 21 nt, synthetic construct
  source 1..21: mol_type = other RNA; note = Description of Artificial Sequence: Synthetic oligonucleotide
gctacaaggccatatttgtga

SEQ ID NO: 1179 - RNA, 23 nt, synthetic construct
  source 1..23: mol_type = other RNA; note = Description of Artificial Sequence: Synthetic oligonucleotide
tcacaaatatggccttgtagccc

SEQ ID NO: 1180 - RNA, 21 nt, synthetic construct
  source 1..21: mol_type = other RNA; note = Description of Artificial Sequence: Synthetic oligonucleotide
ctacaaggccatatttgtgac

SEQ ID NO: 1181 - RNA, 23 nt, synthetic construct
  source 1..23: mol_type = other RNA; note = Description of Artificial Sequence: Synthetic oligonucleotide
gtcacaaatatggccttgtagcc

SEQ ID NO: 1182 - RNA, 21 nt, synthetic construct
  source 1..21: mol_type = other RNA; note = Description of Artificial Sequence: Synthetic oligonucleotide
atgggctacaaggccatattt

SEQ ID NO: 1183 - RNA, 23 nt, synthetic construct
  source 1..23: mol_type = other RNA; note = Description of Artificial Sequence: Synthetic oligonucleotide
aaatatggccttgtagcccatct

SEQ ID NO: 1184 - RNA, 21 nt, synthetic construct
  source 1..21: mol_type = other RNA; note = Description of Artificial Sequence: Synthetic oligonucleotide
gatgggctacaaggccatatt

SEQ ID NO: 1185 - RNA, 23 nt, synthetic construct
  source 1..23: mol_type = other RNA; note = Description of Artificial Sequence: Synthetic oligonucleotide
aatatggccttgtagcccatctt

SEQ ID NO: 1186 - RNA, 21 nt, synthetic construct
  source 1..21: mol_type = other RNA; note = Description of Artificial Sequence: Synthetic oligonucleotide
actggagagaattggaatggg

SEQ ID NO: 1187 - RNA, 23 nt, synthetic construct
  source 1..23: mol_type = other RNA; note = Description of Artificial Sequence: Synthetic oligonucleotide
cccattccaattctctccagtgc

SEQ ID NO: 1188 - RNA, 21 nt, synthetic construct
  source 1..21: mol_type = other RNA; note = Description of Artificial Sequence: Synthetic oligonucleotide
ctggagagaattggaatgggt

SEQ ID NO: 1189 - RNA, 23 nt, synthetic construct
  source 1..23: mol_type = other RNA; note = Description of Artificial Sequence: Synthetic oligonucleotide
acccattccaattctctccagtg

SEQ ID NO: 1190 - RNA, 21 nt, synthetic construct
  source 1..21: mol_type = other RNA; note = Description of Artificial Sequence: Synthetic oligonucleotide
tagcactggagagaattggaa

SEQ ID NO: 1191 - RNA, 23 nt, synthetic construct
  source 1..23: mol_type = other RNA; note = Description of Artificial Sequence: Synthetic oligonucleotide
ttccaattctctccagtgctacc

SEQ ID NO: 1192 - RNA, 21 nt, synthetic construct
  source 1..21: mol_type = other RNA; note = Description of Artificial Sequence: Synthetic oligonucleotide
gtagcactggagagaattgga

SEQ ID NO: 1193 - RNA, 23 nt, synthetic construct
  source 1..23: mol_type = other RNA; note = Description of Artificial Sequence: Synthetic oligonucleotide
tccaattctctccagtgctacct

SEQ ID NO: 1194 - RNA, 21 nt, synthetic construct
  source 1..21: mol_type = other RNA; note = Description of Artificial Sequence: Synthetic oligonucleotide
acagtggacacaccttacctg

SEQ ID NO: 1195 - RNA, 23 nt, synthetic construct
  source 1..23: mol_type = other RNA; note = Description of Artificial Sequence: Synthetic oligonucleotide
caggtaaggtgtgtccactgtca

SEQ ID NO: 1196 - RNA, 21 nt, synthetic construct
  source 1..21: mol_type = other RNA; note = Description of Artificial Sequence: Synthetic oligonucleotide
cagtggacacaccttacctgg

SEQ ID NO: 1197 - RNA, 23 nt, synthetic construct
  source 1..23: mol_type = other RNA; note = Description of Artificial Sequence: Synthetic oligonucleotide
ccaggtaaggtgtgtccactgtc

SEQ ID NO: 1198 - RNA, 21 nt, synthetic construct
  source 1..21: mol_type = other RNA; note = Description of Artificial Sequence: Synthetic oligonucleotide
tgtgacagtggacacacctta

SEQ ID NO: 1199 - RNA, 23 nt, synthetic construct
  source 1..23: mol_type = other RNA; note = Description of Artificial Sequence: Synthetic oligonucleotide
taaggtgtgtccactgtcacaaa

SEQ ID NO: 1200 - RNA, 21 nt, synthetic construct
  source 1..21: mol_type = other RNA; note = Description of Artificial Sequence: Synthetic oligonucleotide
ttgtgacagtggacacacctt

SEQ ID NO: 1201 - RNA, 23 nt, synthetic construct
  source 1..23: mol_type = other RNA; note = Description of Artificial Sequence: Synthetic oligonucleotide
aaggtgtgtccactgtcacaaat

SEQ ID NO: 1202 - RNA, 21 nt, synthetic construct
  source 1..21: mol_type = other RNA; note = Description of Artificial Sequence: Synthetic oligonucleotide
gaagactgacatcattgccaa

SEQ ID NO: 1203 - RNA, 23 nt, synthetic construct
  source 1..23: mol_type = other RNA; note = Description of Artificial Sequence: Synthetic oligonucleotide
ttggcaatgatgtcagtcttctc

SEQ ID NO: 1204 - RNA, 21 nt, synthetic construct
  source 1..21: mol_type = other RNA; note = Description of Artificial Sequence: Synthetic oligonucleotide
aagactgacatcattgccaat

SEQ ID NO: 1205 - RNA, 23 nt, synthetic construct
  source 1..23: mol_type = other RNA; note = Description of Artificial Sequence: Synthetic oligonucleotide
attggcaatgatgtcagtcttct

SEQ ID NO: 1206 - RNA, 21 nt, synthetic construct
  source 1..21: mol_type = other RNA; note = Description of Artificial Sequence: Synthetic oligonucleotide
ctgagaagactgacatcattg

SEQ ID NO: 1207 - RNA, 23 nt, synthetic construct
  source 1..23: mol_type = other RNA; note = Description of Artificial Sequence: Synthetic oligonucleotide
caatgatgtcagtcttctcagcc

SEQ ID NO: 1208 - RNA, 21 nt, synthetic construct
  source 1..21: mol_type = other RNA; note = Description of Artificial Sequence: Synthetic oligonucleotide
gctgagaagactgacatcatt

SEQ ID NO: 1209 - RNA, 23 nt, synthetic construct
  source 1..23: mol_type = other RNA; note = Description of Artificial Sequence: Synthetic oligonucleotide
aatgatgtcagtcttctcagcca

SEQ ID NO: 1210 - RNA, 21 nt, synthetic construct
  source 1..21: mol_type = other RNA; note = Description of Artificial Sequence: Synthetic oligonucleotide
gctcaggttcaaagtgttggt

SEQ ID NO: 1211 - RNA, 23 nt, synthetic construct
  source 1..23: mol_type = other RNA; note = Description of Artificial Sequence: Synthetic oligonucleotide
accaacactttgaacctgagctt

SEQ ID NO: 1212 - RNA, 21 nt, synthetic construct
  source 1..21: mol_type = other RNA; note = Description of Artificial Sequence: Synthetic oligonucleotide
ctcaggttcaaagtgttggta

SEQ ID NO: 1213 - RNA, 23 nt, synthetic construct
  source 1..23: mol_type = other RNA; note = Description of Artificial Sequence: Synthetic oligonucleotide
taccaacactttgaacctgagct

SEQ ID NO: 1214 - RNA, 21 nt, synthetic construct
  source 1..21: mol_type = other RNA; note = Description of Artificial Sequence: Synthetic oligonucleotide
gtaagctcaggttcaaagtgt

SEQ ID NO: 1215 - RNA, 23 nt, synthetic construct
  source 1..23: mol_type = other RNA; note = Description of Artificial Sequence: Synthetic oligonucleotide
acactttgaacctgagcttacaa

SEQ ID NO: 1216 - RNA, 21 nt, synthetic construct
  source 1..21: mol_type = other RNA; note = Description of Artificial Sequence: Synthetic oligonucleotide
tgtaagctcaggttcaaagtg

SEQ ID NO: 1217 - RNA, 23 nt, synthetic construct
  source 1..23: mol_type = other RNA; note = Description of Artificial Sequence: Synthetic oligonucleotide
cactttgaacctgagcttacaat

SEQ ID NO: 1218 - RNA, 21 nt, synthetic construct
  source 1..21: mol_type = other RNA; note = Description of Artificial Sequence: Synthetic oligonucleotide
atgtattacttgacaaagaga

SEQ ID NO: 1219 - RNA, 23 nt, synthetic construct
  source 1..23: mol_type = other RNA; note = Description of Artificial Sequence: Synthetic oligonucleotide
tctctttgtcaagtaatacatgc

SEQ ID NO: 1220 - RNA, 21 nt, synthetic construct
  source 1..21: mol_type = other RNA; note = Description of Artificial Sequence: Synthetic oligonucleotide
tgtattacttgacaaagagac

SEQ ID NO: 1221 - RNA, 23 nt, synthetic construct
  source 1..23: mol_type = other RNA; note = Description of Artificial Sequence: Synthetic oligonucleotide
gtctctttgtcaagtaatacatg

SEQ ID NO: 1222 - RNA, 21 nt, synthetic construct
  source 1..21: mol_type = other RNA; note = Description of Artificial Sequence: Synthetic oligonucleotide
cagcatgtattacttgacaaa

SEQ ID NO: 1223 - RNA, 23 nt, synthetic construct
  source 1..23: mol_type = other RNA; note = Description of Artificial Sequence: Synthetic oligonucleotide
tttgtcaagtaatacatgctgaa

SEQ ID NO: 1224 - RNA, 21 nt, synthetic construct
  source 1..21: mol_type = other RNA; note = Description of Artificial Sequence: Synthetic oligonucleotide
tcagcatgtattacttgacaa

SEQ ID NO: 1225 - RNA, 23 nt, synthetic construct
  source 1..23: mol_type = other RNA; note = Description of Artificial Sequence: Synthetic oligonucleotide
ttgtcaagtaatacatgctgaaa

SEQ ID NO: 1226 - RNA, 21 nt, synthetic construct
  source 1..21: mol_type = other RNA; note = Description of Artificial Sequence: Synthetic oligonucleotide
ctgcaactgtatatctacaag

SEQ ID NO: 1227 - RNA, 23 nt, synthetic construct
  source 1..23: mol_type = other RNA; note = Description of Artificial Sequence: Synthetic oligonucleotide
cttgtagatatacagttgcagcc

SEQ ID NO: 1228 - RNA, 21 nt, synthetic construct
  source 1..21: mol_type = other RNA; note = Description of Artificial Sequence: Synthetic oligonucleotide
tgcaactgtatatctacaagg

SEQ ID NO: 1229 - RNA, 23 nt, synthetic construct
  source 1..23: mol_type = other RNA; note = Description of Artificial Sequence: Synthetic oligonucleotide
ccttgtagatatacagttgcagc

SEQ ID NO: 1230 - RNA, 21 nt, synthetic construct
  source 1..21: mol_type = other RNA; note = Description of Artificial Sequence: Synthetic oligonucleotide
ttggctgcaactgtatatcta

SEQ ID NO: 1231 - RNA, 23 nt, synthetic construct
  source 1..23: mol_type = other RNA; note = Description of Artificial Sequence: Synthetic oligonucleotide
tagatatacagttgcagccaacg

SEQ ID NO: 1232 - RNA, 21 nt, synthetic construct
  source 1..21: mol_type = other RNA; note = Description of Artificial Sequence: Synthetic oligonucleotide
gttggctgcaactgtatatct

SEQ ID NO: 1233 - RNA, 23 nt, synthetic construct
  source 1..23: mol_type = other RNA; note = Description of Artificial Sequence: Synthetic oligonucleotide
agatatacagttgcagccaacga

SEQ ID NO: 1234 - RNA, 21 nt, synthetic construct
  source 1..21: mol_type = other RNA; note = Description of Artificial Sequence: Synthetic oligonucleotide
caaatgatgaagaaactttgg

SEQ ID NO: 1235 - RNA, 23 nt, synthetic construct
  source 1..23: mol_type = other RNA; note = Description of Artificial Sequence: Synthetic oligonucleotide
ccaaagtttcttcatcatttgcc

SEQ ID NO: 1236 - RNA, 21 nt, synthetic construct
  source 1..21: mol_type = other RNA; note = Description of Artificial Sequence: Synthetic oligonucleotide
aaatgatgaagaaactttggc

SEQ ID NO: 1237 - RNA, 23 nt, synthetic construct
  source 1..23: mol_type = other RNA; note = Description of Artificial Sequence: Synthetic oligonucleotide
gccaaagtttcttcatcatttgc

SEQ ID NO: 1238 - RNA, 21 nt, synthetic construct
  source 1..21: mol_type = other RNA; note = Description of Artificial Sequence: Synthetic oligonucleotide
ggggcaaatgatgaagaaact

SEQ ID NO: 1239 - RNA, 23 nt, synthetic construct
  source 1..23: mol_type = other RNA; note = Description of Artificial Sequence: Synthetic oligonucleotide
agtttcttcatcatttgccccag

SEQ ID NO: 1240 - RNA, 21 nt, synthetic construct
  source 1..21: mol_type = other RNA; note = Description of Artificial Sequence: Synthetic oligonucleotide
tggggcaaatgatgaagaaac

SEQ ID NO: 1241 - RNA, 23 nt, synthetic construct
  source 1..23: mol_type = other RNA; note = Description of Artificial Sequence: Synthetic oligonucleotide
gtttcttcatcatttgccccaga

SEQ ID NO: 1242 - RNA, 21 nt, synthetic construct
  source 1..21: mol_type = other RNA; note = Description of Artificial Sequence: Synthetic oligonucleotide
caaagggtgtcgttcttttcc

SEQ ID NO: 1243 - RNA, 23 nt, synthetic construct
  source 1..23: mol_type = other RNA; note = Description of Artificial Sequence: Synthetic oligonucleotide
ggaaaagaacgacaccctttgta

SEQ ID NO: 1244 - RNA, 21 nt, synthetic construct
  source 1..21: mol_type = other RNA; note = Description of Artificial Sequence: Synthetic oligonucleotide
aaagggtgtcgttcttttcca

SEQ ID NO: 1245 - RNA, 23 nt, synthetic construct
  source 1..23: mol_type = other RNA; note = Description of Artificial Sequence: Synthetic oligonucleotide
tggaaaagaacgacaccctttgt

SEQ ID NO: 1246 - RNA, 21 nt, synthetic construct
  source 1..21: mol_type = other RNA; note = Description of Artificial Sequence: Synthetic oligonucleotide
aatacaaagggtgtcgttctt

SEQ ID NO: 1247 - RNA, 23 nt, synthetic construct
  source 1..23: mol_type = other RNA; note = Description of Artificial Sequence: Synthetic oligonucleotide
aagaacgacaccctttgtattga

SEQ ID NO: 1248 - RNA, 21 nt, synthetic construct
  source 1..21: mol_type = other RNA; note = Description of Artificial Sequence: Synthetic oligonucleotide
caatacaaagggtgtcgttct

SEQ ID NO: 1249 - RNA, 23 nt, synthetic construct
  source 1..23: mol_type = other RNA; note = Description of Artificial Sequence: Synthetic oligonucleotide
agaacgacaccctttgtattgaa

SEQ ID NO: 1250 - RNA, 21 nt, synthetic construct
  source 1..21: mol_type = other RNA; note = Description of Artificial Sequence: Synthetic oligonucleotide
aaaggcactgatgttctgaaa

SEQ ID NO: 1251 - RNA, 23 nt, synthetic construct
  source 1..23: mol_type = other RNA; note = Description of Artificial Sequence: Synthetic oligonucleotide
tttcagaacatcagtgcctttcc

SEQ ID NO: 1252 - RNA, 21 nt, synthetic construct
  source 1..21: mol_type = other RNA; note = Description of Artificial Sequence: Synthetic oligonucleotide
aaggcactgatgttctgaaag

SEQ ID NO: 1253 - RNA, 23 nt, synthetic construct
  source 1..23: mol_type = other RNA; note = Description of Artificial Sequence: Synthetic oligonucleotide
ctttcagaacatcagtgcctttc

SEQ ID NO: 1254 - RNA, 21 nt, synthetic construct
  source 1..21: mol_type = other RNA; note = Description of Artificial Sequence: Synthetic oligonucleotide
gcggaaaggcactgatgttct

SEQ ID NO: 1255 - RNA, 23 nt, synthetic construct
  source 1..23: mol_type = other RNA; note = Description of Artificial Sequence: Synthetic oligonucleotide
agaacatcagtgcctttccgcac

SEQ ID NO: 1256 - RNA, 21 nt, synthetic construct
  source 1..21: mol_type = other RNA; note = Description of Artificial Sequence: Synthetic oligonucleotide
tgcggaaaggcactgatgttc

SEQ ID NO: 1257 - RNA, 23 nt, synthetic construct
  source 1..23: mol_type = other RNA; note = Description of Artificial Sequence: Synthetic oligonucleotide
gaacatcagtgcctttccgcaca

SEQ ID NO: 1258 - RNA, 21 nt, synthetic construct
  source 1..21: mol_type = other RNA; note = Description of Artificial Sequence: Synthetic oligonucleotide
aaggatgctccggaatgttgc

SEQ ID NO: 1259 - RNA, 23 nt, synthetic construct
  source 1..23: mol_type = other RNA; note = Description of Artificial Sequence: Synthetic oligonucleotide
gcaacattccggagcatccttgg

SEQ ID NO: 1260 - RNA, 21 nt, synthetic construct
  source 1..21: mol_type = other RNA; note = Description of Artificial Sequence: Synthetic oligonucleotide
aggatgctccggaatgttgct

SEQ ID NO: 1261 - RNA, 23 nt, synthetic construct
  source 1..23: mol_type = other RNA; note = Description of Artificial Sequence: Synthetic oligonucleotide
agcaacattccggagcatccttg

SEQ ID NO: 1262 - RNA, 21 nt, synthetic construct
  source 1..21: mol_type = other RNA; note = Description of Artificial Sequence: Synthetic oligonucleotide
atccaaggatgctccggaatg

SEQ ID NO: 1263 - RNA, 23 nt, synthetic construct
  source 1..23: mol_type = other RNA; note = Description of Artificial Sequence: Synthetic oligonucleotide
cattccggagcatccttggatac

SEQ ID NO: 1264 - RNA, 21 nt, synthetic construct
  source 1..21: mol_type = other RNA; note = Description of Artificial Sequence: Synthetic oligonucleotide
tatccaaggatgctccggaat

SEQ ID NO: 1265 - RNA, 23 nt, synthetic construct
  source 1..23: mol_type = other RNA; note = Description of Artificial Sequence: Synthetic oligonucleotide
attccggagcatccttggataca

SEQ ID NO: 1266 - RNA, 21 nt, synthetic construct
  source 1..21: mol_type = other RNA; note = Description of Artificial Sequence: Synthetic oligonucleotide
aatgggtggcggtaattggtg

SEQ ID NO: 1267 - RNA, 23 nt, synthetic construct
  source 1..23: mol_type = other RNA; note = Description of Artificial Sequence: Synthetic oligonucleotide
caccaattaccgccacccattcc

SEQ ID NO: 1268 - RNA, 21 nt, synthetic construct
  source 1..21: mol_type = other RNA; note = Description of Artificial Sequence: Synthetic oligonucleotide
atgggtggcggtaattggtga

SEQ ID NO: 1269 - RNA, 23 nt, synthetic construct
  source 1..23: mol_type = other RNA; note = Description of Artificial Sequence: Synthetic oligonucleotide
tcaccaattaccgccacccattc

SEQ ID NO: 1270 - RNA, 21 nt, synthetic construct
  source 1..21: mol_type = other RNA; note = Description of Artificial Sequence: Synthetic oligonucleotide
ttggaatgggtggcggtaatt

SEQ ID NO: 1271 - RNA, 23 nt, synthetic construct
  source 1..23: mol_type = other RNA; note = Description of Artificial Sequence: Synthetic oligonucleotide
aattaccgccacccattccaatt

SEQ ID NO: 1272 - RNA, 21 nt, synthetic construct
  source 1..21: mol_type = other RNA; note = Description of Artificial Sequence: Synthetic oligonucleotide
attggaatgggtggcggtaat

SEQ ID NO: 1273 - RNA, 23 nt, synthetic construct
  source 1..23: mol_type = other RNA; note = Description of Artificial Sequence: Synthetic oligonucleotide
attaccgccacccattccaattc

SEQ ID NO: 1274 - RNA, 21 nt, synthetic construct
  source 1..21: mol_type = other RNA; note = Description of Artificial Sequence: Synthetic oligonucleotide
ggaaaggcactgatgttctga

SEQ ID NO: 1275 - RNA, 23 nt, synthetic construct
  source 1..23: mol_type = other RNA; note = Description of Artificial Sequence: Synthetic oligonucleotide
tcagaacatcagtgcctttccgc

SEQ ID NO: 1276 - RNA, 21 nt, synthetic construct
  source 1..21: mol_type = other RNA; note = Description of Artificial Sequence: Synthetic oligonucleotide
gaaaggcactgatgttctgaa

SEQ ID NO: 1277 - RNA, 23 nt, synthetic construct
  source 1..23: mol_type = other RNA; note = Description of Artificial Sequence: Synthetic oligonucleotide
ttcagaacatcagtgcctttccg

SEQ ID NO: 1278 - RNA, 21 nt, synthetic construct
  source 1..21: mol_type = other RNA; note = Description of Artificial Sequence: Synthetic oligonucleotide
gtgcggaaaggcactgatgtt

SEQ ID NO: 1279 - RNA, 23 nt, synthetic construct
  source 1..23: mol_type = other RNA; note = Description of Artificial Sequence: Synthetic oligonucleotide
aacatcagtgcctttccgcacac

SEQ ID NO: 1280 - RNA, 21 nt, synthetic construct
  source 1..21: mol_type = other RNA; note = Description of Artificial Sequence: Synthetic oligonucleotide
tgtgcggaaaggcactgatgt

SEQ ID NO: 1281 - RNA, 23 nt, synthetic construct
  source 1..23: mol_type = other RNA; note = Description of Artificial Sequence: Synthetic oligonucleotide
acatcagtgcctttccgcacacc

SEQ ID NO: 1282 - RNA, 21 nt, synthetic construct
  source 1..21: mol_type = other RNA; note = Description of Artificial Sequence: Synthetic oligonucleotide
aattgtaagctcaggttcaaa

SEQ ID NO: 1283 - RNA, 23 nt, synthetic construct
  source 1..23: mol_type = other RNA; note = Description of Artificial Sequence: Synthetic oligonucleotide
tttgaacctgagcttacaattta

SEQ ID NO: 1284 - RNA, 21 nt, synthetic construct
  source 1..21: mol_type = other RNA; note = Description of Artificial Sequence: Synthetic oligonucleotide
attgtaagctcaggttcaaag

SEQ ID NO: 1285 - RNA, 23 nt, synthetic construct
  source 1..23: mol_type = other RNA; note = Description of Artificial Sequence: Synthetic oligonucleotide
ctttgaacctgagcttacaattt

SEQ ID NO: 1286 - RNA, 21 nt, synthetic construct
  source 1..21: mol_type = other RNA; note = Description of Artificial Sequence: Synthetic oligonucleotide
cttaaattgtaagctcaggtt

SEQ ID NO: 1287 - RNA, 23 nt, synthetic construct
  source 1..23: mol_type = other RNA; note = Description of Artificial Sequence: Synthetic oligonucleotide
aacctgagcttacaatttaagaa

SEQ ID NO: 1288 - RNA, 21 nt, synthetic construct
  source 1..21: mol_type = other RNA; note = Description of Artificial Sequence: Synthetic oligonucleotide
tcttaaattgtaagctcaggt

SEQ ID NO: 1289 - RNA, 23 nt, synthetic construct
  source 1..23: mol_type = other RNA; note = Description of Artificial Sequence: Synthetic oligonucleotide
acctgagcttacaatttaagaac

SEQ ID NO: 1290 - RNA, 21 nt, synthetic construct
  source 1..21: mol_type = other RNA; note = Description of Artificial Sequence: Synthetic oligonucleotide
gcaaacactaaggtgaaaaga

SEQ ID NO: 1291 - RNA, 23 nt, synthetic construct
  source 1..23: mol_type = other RNA; note = Description of Artificial Sequence: Synthetic oligonucleotide
tcttttcaccttagtgtttgcta

SEQ ID NO: 1292 - RNA, 21 nt, synthetic construct
  source 1..21: mol_type = other RNA; note = Description of Artificial Sequence: Synthetic oligonucleotide
caaacactaaggtgaaaagat

SEQ ID NO: 1293 - RNA, 23 nt, synthetic construct
  source 1..23: mol_type = other RNA; note = Description of Artificial Sequence: Synthetic oligonucleotide
atcttttcaccttagtgtttgct

SEQ ID NO: 1294 - RNA, 21 nt, synthetic construct
  source 1..21: mol_type = other RNA; note = Description of Artificial Sequence: Synthetic oligonucleotide
ggtagcaaacactaaggtgaa

SEQ ID NO: 1295 - RNA, 23 nt, synthetic construct
  source 1..23: mol_type = other RNA; note = Description of Artificial Sequence: Synthetic oligonucleotide
ttcaccttagtgtttgctacctc

SEQ ID NO: 1296 - RNA, 21 nt, synthetic construct
  source 1..21: mol_type = other RNA; note = Description of Artificial Sequence: Synthetic oligonucleotide
aggtagcaaacactaaggtga

SEQ ID NO: 1297 - RNA, 23 nt, synthetic construct
  source 1..23: mol_type = other RNA; note = Description of Artificial Sequence: Synthetic oligonucleotide
tcaccttagtgtttgctacctcc

SEQ ID NO: 1298 - RNA, 21 nt, synthetic construct
  source 1..21: mol_type = other RNA; note = Description of Artificial Sequence: Synthetic oligonucleotide
aggtagcaaacactaaggtga

SEQ ID NO: 1299 - RNA, 23 nt, synthetic construct
  source 1..23: mol_type = other RNA; note = Description of Artificial Sequence: Synthetic oligonucleotide
tcaccttagtgtttgctacctcc

SEQ ID NO: 1300 - RNA, 21 nt, synthetic construct
  source 1..21: mol_type = other RNA; note = Description of Artificial Sequence: Synthetic oligonucleotide
ggtagcaaacactaaggtgaa

SEQ ID NO: 1301 - RNA, 23 nt, synthetic construct
  source 1..23: mol_type = other RNA; note = Description of Artificial Sequence: Synthetic oligonucleotide
ttcaccttagtgtttgctacctc

SEQ ID NO: 1302 - RNA, 21 nt, synthetic construct
  source 1..21: mol_type = other RNA; note = Description of Artificial Sequence: Synthetic oligonucleotide
ttggaggtagcaaacactaag

SEQ ID NO: 1303 - RNA, 23 nt, synthetic construct
  source 1..23: mol_type = other RNA; note = Description of Artificial Sequence: Synthetic oligonucleotide
cttagtgtttgctacctccaatt

SEQ ID NO: 1304 - RNA, 21 nt, synthetic construct
  source 1..21: mol_type = other RNA; note = Description of Artificial Sequence: Synthetic oligonucleotide
attggaggtagcaaacactaa

SEQ ID NO: 1305 - RNA, 23 nt, synthetic construct
  source 1..23: mol_type = other RNA; note = Description of Artificial Sequence: Synthetic oligonucleotide
ttagtgtttgctacctccaattt

SEQ ID NO: 1306 - RNA, 21 nt, synthetic construct
  source 1..21: mol_type = other RNA; note = Description of Artificial Sequence: Synthetic oligonucleotide
taaagtgctgtatcctttagt

SEQ ID NO: 1307 - RNA, 23 nt, synthetic construct
  source 1..23: mol_type = other RNA; note = Description of Artificial Sequence: Synthetic oligonucleotide
actaaaggatacagcactttagc

SEQ ID NO: 1308 - RNA, 21 nt, synthetic construct
  source 1..21: mol_type = other RNA; note = Description of Artificial Sequence: Synthetic oligonucleotide
aaagtgctgtatcctttagta

SEQ ID NO: 1309 - RNA, 23 nt, synthetic construct
  source 1..23: mol_type = other RNA; note = Description of Artificial Sequence: Synthetic oligonucleotide
tactaaaggatacagcactttag

SEQ ID NO: 1310 - RNA, 21 nt, synthetic construct
  source 1..21: mol_type = other RNA; note = Description of Artificial Sequence: Synthetic oligonucleotide
aggctaaagtgctgtatcctt

SEQ ID NO: 1311 - RNA, 23 nt, synthetic construct
  source 1..23: mol_type = other RNA; note = Description of Artificial Sequence: Synthetic oligonucleotide
aaggatacagcactttagcctgc

SEQ ID NO: 1312 - RNA, 21 nt, synthetic construct
  source 1..21: mol_type = other RNA; note = Description of Artificial Sequence: Synthetic oligonucleotide
caggctaaagtgctgtatcct

SEQ ID NO: 1313 - RNA, 23 nt, synthetic construct
  source 1..23: mol_type = other RNA; note = Description of Artificial Sequence: Synthetic oligonucleotide
aggatacagcactttagcctgcc

SEQ ID NO: 1314 - RNA, 21 nt, synthetic construct
  source 1..21: mol_type = other RNA; note = Description of Artificial Sequence: Synthetic oligonucleotide
aagacattggtgaggaaaaat

SEQ ID NO: 1315 - RNA, 23 nt, synthetic construct
  source 1..23: mol_type = other RNA; note = Description of Artificial Sequence: Synthetic oligonucleotide
atttttcctcaccaatgtcttgt

SEQ ID NO: 1316 - RNA, 21 nt, synthetic construct
  source 1..21: mol_type = other RNA; note = Description of Artificial Sequence: Synthetic oligonucleotide
agacattggtgaggaaaaatc

SEQ ID NO: 1317 - RNA, 23 nt, synthetic construct
  source 1..23: mol_type = other RNA; note = Description of Artificial Sequence: Synthetic oligonucleotide
gatttttcctcaccaatgtcttg

SEQ ID NO: 1318 - RNA, 21 nt, synthetic construct
  source 1..21: mol_type = other RNA; note = Description of Artificial Sequence: Synthetic oligonucleotide
cgacaagacattggtgaggaa

SEQ ID NO: 1319 - RNA, 23 nt, synthetic construct
  source 1..23: mol_type = other RNA; note = Description of Artificial Sequence: Synthetic oligonucleotide
ttcctcaccaatgtcttgtcgat

SEQ ID NO: 1320 - RNA, 21 nt, synthetic construct
  source 1..21: mol_type = other RNA; note = Description of Artificial Sequence: Synthetic oligonucleotide
tcgacaagacattggtgagga

SEQ ID NO: 1321 - RNA, 23 nt, synthetic construct
  source 1..23: mol_type = other RNA; note = Description of Artificial Sequence: Synthetic oligonucleotide
tcctcaccaatgtcttgtcgatg

SEQ ID NO: 1322 - RNA, 21 nt, synthetic construct
  source 1..21: mol_type = other RNA; note = Description of Artificial Sequence: Synthetic oligonucleotide
aagatgtcctcgagatactaa

SEQ ID NO: 1323 - RNA, 23 nt, synthetic construct
  source 1..23: mol_type = other RNA; note = Description of Artificial Sequence: Synthetic oligonucleotide
ttagtatctcgaggacatcttga

SEQ ID NO: 1324 - RNA, 21 nt, synthetic construct
  source 1..21: mol_type = other RNA; note = Description of Artificial Sequence: Synthetic oligonucleotide
agatgtcctcgagatactaaa

SEQ ID NO: 1325 - RNA, 23 nt, synthetic construct
  source 1..23: mol_type = other RNA; note = Description of Artificial Sequence: Synthetic oligonucleotide
tttagtatctcgaggacatcttg

SEQ ID NO: 1326 - RNA, 21 nt, synthetic construct
  source 1..21: mol_type = other RNA; note = Description of Artificial Sequence: Synthetic oligonucleotide
gttcaagatgtcctcgagata

SEQ ID NO: 1327 - RNA, 23 nt, synthetic construct
  source 1..23: mol_type = other RNA; note = Description of Artificial Sequence: Synthetic oligonucleotide
tatctcgaggacatcttgaacac

SEQ ID NO: 1328 - RNA, 21 nt, synthetic construct
  source 1..21: mol_type = other RNA; note = Description of Artificial Sequence: Synthetic oligonucleotide
tgttcaagatgtcctcgagat

SEQ ID NO: 1329 - RNA, 23 nt, synthetic construct
  source 1..23: mol_type = other RNA; note = Description of Artificial Sequence: Synthetic oligonucleotide
atctcgaggacatcttgaacacc

SEQ ID NO: 1330 - RNA, 21 nt, synthetic construct
  source 1..21: mol_type = other RNA; note = Description of Artificial Sequence: Synthetic oligonucleotide
gagaaaggtgttcaagatgtc

SEQ ID NO: 1331 - RNA, 23 nt, synthetic construct
  source 1..23: mol_type = other RNA; note = Description of Artificial Sequence: Synthetic oligonucleotide
gacatcttgaacacctttctccc

SEQ ID NO: 1332 - RNA, 21 nt, synthetic construct
  source 1..21: mol_type = other RNA; note = Description of Artificial Sequence: Synthetic oligonucleotide
agaaaggtgttcaagatgtcc

SEQ ID NO: 1333 - RNA, 23 nt, synthetic construct
  source 1..23: mol_type = other RNA; note = Description of Artificial Sequence: Synthetic oligonucleotide
ggacatcttgaacacctttctcc

SEQ ID NO: 1334 - RNA, 21 nt, synthetic construct
  source 1..21: mol_type = other RNA; note = Description of Artificial Sequence: Synthetic oligonucleotide
gggggagaaaggtgttcaaga

SEQ ID NO: 1335 - RNA, 23 nt, synthetic construct
  source 1..23: mol_type = other RNA; note = Description of Artificial Sequence: Synthetic oligonucleotide
tcttgaacacctttctccccctg

SEQ ID NO: 1336 - RNA, 21 nt, synthetic construct
  source 1..21: mol_type = other RNA; note = Description of Artificial Sequence: Synthetic oligonucleotide
agggggagaaaggtgttcaag

SEQ ID NO: 1337 - RNA, 23 nt, synthetic construct
  source 1..23: mol_type = other RNA; note = Description of Artificial Sequence: Synthetic oligonucleotide
cttgaacacctttctccccctgg

SEQ ID NO: 1338 - RNA, 21 nt, synthetic construct
  source 1..21: mol_type = other RNA; note = Description of Artificial Sequence: Synthetic oligonucleotide
gctgggaagatatcaaatggc

SEQ ID NO: 1339 - RNA, 23 nt, synthetic construct
  source 1..23: mol_type = other RNA; note = Description of Artificial Sequence: Synthetic oligonucleotide
gccatttgatatcttcccagctg

SEQ ID NO: 1340 - RNA, 21 nt, synthetic construct
  source 1..21: mol_type = other RNA; note = Description of Artificial Sequence: Synthetic oligonucleotide
ctgggaagatatcaaatggct

SEQ ID NO: 1341 - RNA, 23 nt, synthetic construct
  source 1..23: mol_type = other RNA; note = Description of Artificial Sequence: Synthetic oligonucleotide
agccatttgatatcttcccagct

SEQ ID NO: 1342 - RNA, 21 nt, synthetic construct
  source 1..21: mol_type = other RNA; note = Description of Artificial Sequence: Synthetic oligonucleotide
atcagctgggaagatatcaaa

SEQ ID NO: 1343 - RNA, 23 nt, synthetic construct
  source 1..23: mol_type = other RNA; note = Description of Artificial Sequence: Synthetic oligonucleotide
tttgatatcttcccagctgatag

SEQ ID NO: 1344 - RNA, 21 nt, synthetic construct
  source 1..21: mol_type = other RNA; note = Description of Artificial Sequence: Synthetic oligonucleotide
tatcagctgggaagatatcaa

SEQ ID NO: 1345 - RNA, 23 nt, synthetic construct
  source 1..23: mol_type = other RNA; note = Description of Artificial Sequence: Synthetic oligonucleotide
ttgatatcttcccagctgataga

SEQ ID NO: 1346 - RNA, 21 nt, synthetic construct
  source 1..21: mol_type = other RNA; note = Description of Artificial Sequence: Synthetic oligonucleotide
tctgtcgacttctgttttagg

SEQ ID NO: 1347 - RNA, 23 nt, synthetic construct
  source 1..23: mol_type = other RNA; note = Description of Artificial Sequence: Synthetic oligonucleotide
cctaaaacagaagtcgacagatc

SEQ ID NO: 1348 - RNA, 21 nt, synthetic construct
  source 1..21: mol_type = other RNA; note = Description of Artificial Sequence: Synthetic oligonucleotide
ctgtcgacttctgttttagga

SEQ ID NO: 1349 - RNA, 23 nt, synthetic construct
  source 1..23: mol_type = other RNA; note = Description of Artificial Sequence: Synthetic oligonucleotide
tcctaaaacagaagtcgacagat

SEQ ID NO: 1350 - RNA, 21 nt, synthetic construct
  source 1..21: mol_type = other RNA; note = Description of Artificial Sequence: Synthetic oligonucleotide
cagatctgtcgacttctgttt

SEQ ID NO: 1351 - RNA, 23 nt, synthetic construct
  source 1..23: mol_type = other RNA; note = Description of Artificial Sequence: Synthetic oligonucleotide
aaacagaagtcgacagatctgtt

SEQ ID NO: 1352 - RNA, 21 nt, synthetic construct
  source 1..21: mol_type = other RNA; note = Description of Artificial Sequence: Synthetic oligonucleotide
acagatctgtcgacttctgtt

SEQ ID NO: 1353 - RNA, 23 nt, synthetic construct
  source 1..23: mol_type = other RNA; note = Description of Artificial Sequence: Synthetic oligonucleotide
aacagaagtcgacagatctgttt

SEQ ID NO: 1354 - RNA, 21 nt, synthetic construct
  source 1..21: mol_type = other RNA; note = Description of Artificial Sequence: Synthetic oligonucleotide
tacttctttgaatgtagattt

SEQ ID NO: 1355 - RNA, 23 nt, synthetic construct
  source 1..23: mol_type = other RNA; note = Description of Artificial Sequence: Synthetic oligonucleotide
aaatctacattcaaagaagtatc

SEQ ID NO: 1356 - RNA, 21 nt, synthetic construct
  source 1..21: mol_type = other RNA; note = Description of Artificial Sequence: Synthetic oligonucleotide
acttctttgaatgtagatttc

SEQ ID NO: 1357 - RNA, 23 nt, synthetic construct
  source 1..23: mol_type = other RNA; note = Description of Artificial Sequence: Synthetic oligonucleotide
gaaatctacattcaaagaagtat

SEQ ID NO: 1358 - RNA, 21 nt, synthetic construct
  source 1..21: mol_type = other RNA; note = Description of Artificial Sequence: Synthetic oligonucleotide
gtgatacttctttgaatgtag

SEQ ID NO: 1359 - RNA, 23 nt, synthetic construct
  source 1..23: mol_type = other RNA; note = Description of Artificial Sequence: Synthetic oligonucleotide
ctacattcaaagaagtatcacca

SEQ ID NO: 1360 - RNA, 21 nt, synthetic construct
  source 1..21: mol_type = other RNA; note = Description of Artificial Sequence: Synthetic oligonucleotide
ggtgatacttctttgaatgta

SEQ ID NO: 1361 - RNA, 23 nt, synthetic construct
  source 1..23: mol_type = other RNA; note = Description of Artificial Sequence: Synthetic oligonucleotide
tacattcaaagaagtatcaccaa

SEQ ID NO: 1362 - RNA, 21 nt, synthetic construct
  source 1..21: mol_type = other RNA; note = Description of Artificial Sequence: Synthetic oligonucleotide
tgggaagatatcaaatggctg

SEQ ID NO: 1363 - RNA, 23 nt, synthetic construct
  source 1..23: mol_type = other RNA; note = Description of Artificial Sequence: Synthetic oligonucleotide
cagccatttgatatcttcccagc

SEQ ID NO: 1364 - RNA, 21 nt, synthetic construct
  source 1..21: mol_type = other RNA; note = Description of Artificial Sequence: Synthetic oligonucleotide
gggaagatatcaaatggctga

SEQ ID NO: 1365 - RNA, 23 nt, synthetic construct
  source 1..23: mol_type = other RNA; note = Description of Artificial Sequence: Synthetic oligonucleotide
tcagccatttgatatcttcccag

SEQ ID NO: 1366 - RNA, 21 nt, synthetic construct
  source 1..21: mol_type = other RNA; note = Description of Artificial Sequence: Synthetic oligonucleotide
cagctgggaagatatcaaatg

SEQ ID NO: 1367 - RNA, 23 nt, synthetic construct
  source 1..23: mol_type = other RNA; note = Description of Artificial Sequence: Synthetic oligonucleotide
catttgatatcttcccagctgat

SEQ ID NO: 1368 - RNA, 21 nt, synthetic construct
  source 1..21: mol_type = other RNA; note = Description of Artificial Sequence: Synthetic oligonucleotide
tcagctgggaagatatcaaat

SEQ ID NO: 1369 - RNA, 23 nt, synthetic construct
  source 1..23: mol_type = other RNA; note = Description of Artificial Sequence: Synthetic oligonucleotide
atttgatatcttcccagctgata

SEQ ID NO: 1370 - RNA, 21 nt, synthetic construct
  source 1..21: mol_type = other RNA; note = Description of Artificial Sequence: Synthetic oligonucleotide
tccaaagtctatatatgacta

SEQ ID NO: 1371 - RNA, 23 nt, synthetic construct
  source 1..23: mol_type = other RNA; note = Description of Artificial Sequence: Synthetic oligonucleotide
tagtcatatatagactttggaag

SEQ ID NO: 1372 - RNA, 21 nt, synthetic construct
  source 1..21: mol_type = other RNA; note = Description of Artificial Sequence: Synthetic oligonucleotide
ccaaagtctatatatgactat

SEQ ID NO: 1373 - RNA, 23 nt, synthetic construct
  source 1..23: mol_type = other RNA; note = Description of Artificial Sequence: Synthetic oligonucleotide
atagtcatatatagactttggaa

SEQ ID NO: 1374 - RNA, 21 nt, synthetic construct
  source 1..21: mol_type = other RNA; note = Description of Artificial Sequence: Synthetic oligonucleotide
tacttccaaagtctatatatg

SEQ ID NO: 1375 - RNA, 23 nt, synthetic construct
  source 1..23: mol_type = other RNA; note = Description of Artificial Sequence: Synthetic oligonucleotide
catatatagactttggaagtact

SEQ ID NO: 1376 - RNA, 21 nt, synthetic construct
  source 1..21: mol_type = other RNA; note = Description of Artificial Sequence: Synthetic oligonucleotide
gtacttccaaagtctatatat

SEQ ID NO: 1377 - RNA, 23 nt, synthetic construct
  source 1..23: mol_type = other RNA; note = Description of Artificial Sequence: Synthetic oligonucleotide
atatatagactttggaagtactg

SEQ ID NO: 1378 - RNA, 21 nt, synthetic construct
  source 1..21: mol_type = other RNA; note = Description of Artificial Sequence: Synthetic oligonucleotide
ttatgaacaacatgctaaatc

SEQ ID NO: 1379 - RNA, 23 nt, synthetic construct
  source 1..23: mol_type = other RNA; note = Description of Artificial Sequence: Synthetic oligonucleotide
gatttagcatgttgttcataatc

SEQ ID NO: 1380 - RNA, 21 nt, synthetic construct
  source 1..21: mol_type = other RNA; note = Description of Artificial Sequence: Synthetic oligonucleotide
tatgaacaacatgctaaatca

SEQ ID NO: 1381 - RNA, 23 nt, synthetic construct
  source 1..23: mol_type = other RNA; note = Description of Artificial Sequence: Synthetic oligonucleotide
tgatttagcatgttgttcataat

SEQ ID NO: 1382 - RNA, 21 nt, synthetic construct
  source 1..21: mol_type = other RNA; note = Description of Artificial Sequence: Synthetic oligonucleotide
atgattatgaacaacatgcta

SEQ ID NO: 1383 - RNA, 23 nt, synthetic construct
  source 1..23: mol_type = other RNA; note = Description of Artificial Sequence: Synthetic oligonucleotide
tagcatgttgttcataatcattg

SEQ ID NO: 1384 - RNA, 21 nt, synthetic construct
  source 1..21: mol_type = other RNA; note = Description of Artificial Sequence: Synthetic oligonucleotide
aatgattatgaacaacatgct

SEQ ID NO: 1385 - RNA, 23 nt, synthetic construct
  source 1..23: mol_type = other RNA; note = Description of Artificial Sequence: Synthetic oligonucleotide
agcatgttgttcataatcattga

SEQ ID NO: 1386 - RNA, 21 nt, synthetic construct
  source 1..21: mol_type = other RNA; note = Description of Artificial Sequence: Synthetic oligonucleotide
aattccccacttcaatacaaa

SEQ ID NO: 1387 - RNA, 23 nt, synthetic construct
  source 1..23: mol_type = other RNA; note = Description of Artificial Sequence: Synthetic oligonucleotide
tttgtattgaagtggggaattac

SEQ ID NO: 1388 - RNA, 21 nt, synthetic construct
  source 1..21: mol_type = other RNA; note = Description of Artificial Sequence: Synthetic oligonucleotide
attccccacttcaatacaaag

SEQ ID NO: 1389 - RNA, 23 nt, synthetic construct
  source 1..23: mol_type = other RNA; note = Description of Artificial Sequence: Synthetic oligonucleotide
ctttgtattgaagtggggaatta

SEQ ID NO: 1390 - RNA, 21 nt, synthetic construct
  source 1..21: mol_type = other RNA; note = Description of Artificial Sequence: Synthetic oligonucleotide
ctgtaattccccacttcaata

SEQ ID NO: 1391 - RNA, 23 nt, synthetic construct
  source 1..23: mol_type = other RNA; note = Description of Artificial Sequence: Synthetic oligonucleotide
tattgaagtggggaattacagac

SEQ ID NO: 1392 - RNA, 21 nt, synthetic construct
  source 1..21: mol_type = other RNA; note = Description of Artificial Sequence: Synthetic oligonucleotide
tctgtaattccccacttcaat

SEQ ID NO: 1393 - RNA, 23 nt, synthetic construct
  source 1..23: mol_type = other RNA; note = Description of Artificial Sequence: Synthetic oligonucleotide
attgaagtggggaattacagact

SEQ ID NO: 1394 - RNA, 21 nt, synthetic construct
  source 1..21: mol_type = other RNA; note = Description of Artificial Sequence: Synthetic oligonucleotide
tgatgtgcgtaacagattcaa

SEQ ID NO: 1395 - RNA, 23 nt, synthetic construct
  source 1..23: mol_type = other RNA; note = Description of Artificial Sequence: Synthetic oligonucleotide
ttgaatctgttacgcacatcatc

SEQ ID NO: 1396 - RNA, 21 nt, synthetic construct
  source 1..21: mol_type = other RNA; note = Description of Artificial Sequence: Synthetic oligonucleotide
gatgtgcgtaacagattcaaa

SEQ ID NO: 1397 - RNA, 23 nt, synthetic construct
  source 1..23: mol_type = other RNA; note = Description of Artificial Sequence: Synthetic oligonucleotide
tttgaatctgttacgcacatcat

SEQ ID NO: 1398 - RNA, 21 nt, synthetic construct
  source 1..21: mol_type = other RNA; note = Description of Artificial Sequence: Synthetic oligonucleotide
tggatgatgtgcgtaacagat

SEQ ID NO: 1399 - RNA, 23 nt, synthetic construct
  source 1..23: mol_type = other RNA; note = Description of Artificial Sequence: Synthetic oligonucleotide
atctgttacgcacatcatccaga

SEQ ID NO: 1400 - RNA, 21 nt, synthetic construct
  source 1..21: mol_type = other RNA; note = Description of Artificial Sequence: Synthetic oligonucleotide
ctggatgatgtgcgtaacaga

SEQ ID NO: 1401 - RNA, 23 nt, synthetic construct
  source 1..23: mol_type = other RNA; note = Description of Artificial Sequence: Synthetic oligonucleotide
tctgttacgcacatcatccagac

SEQ ID NO: 1402 - RNA, 21 nt, synthetic construct
  source 1..21: mol_type = other RNA; note = Description of Artificial Sequence: Synthetic oligonucleotide
gaatgggtggcggtaattggt

SEQ ID NO: 1403 - RNA, 23 nt, synthetic construct
  source 1..23: mol_type = other RNA; note = Description of Artificial Sequence: Synthetic oligonucleotide
accaattaccgccacccattcca

SEQ ID NO: 1404 - RNA, 21 nt, synthetic construct
  source 1..21: mol_type = other RNA; note = Description of Artificial Sequence: Synthetic oligonucleotide
aatgggtggcggtaattggtg

SEQ ID NO: 1405 - RNA, 23 nt, synthetic construct
  source 1..23: mol_type = other RNA; note = Description of Artificial Sequence: Synthetic oligonucleotide
caccaattaccgccacccattcc

SEQ ID NO: 1406 - RNA, 21 nt, synthetic construct
  source 1..21: mol_type = other RNA; note = Description of Artificial Sequence: Synthetic oligonucleotide
attggaatgggtggcggtaat

SEQ ID NO: 1407 - RNA, 23 nt, synthetic construct
  source 1..23: mol_type = other RNA; note = Description of Artificial Sequence: Synthetic oligonucleotide
attaccgccacccattccaattc

SEQ ID NO: 1408 - RNA, 21 nt, synthetic construct
  source 1..21: mol_type = other RNA; note = Description of Artificial Sequence: Synthetic oligonucleotide
aattggaatgggtggcggtaa

SEQ ID NO: 1409 - RNA, 23 nt, synthetic construct
  source 1..23: mol_type = other RNA; note = Description of Artificial Sequence: Synthetic oligonucleotide
ttaccgccacccattccaattct

SEQ ID NO: 1410 - RNA, 21 nt, synthetic construct
  source 1..21: mol_type = other RNA; note = Description of Artificial Sequence: Synthetic oligonucleotide
tccggaatgttgctgaaacag

SEQ ID NO: 1411 - RNA, 23 nt, synthetic construct
  source 1..23: mol_type = other RNA; note = Description of Artificial Sequence: Synthetic oligonucleotide
ctgtttcagcaacattccggagc

SEQ ID NO: 1412 - RNA, 21 nt, synthetic construct
  source 1..21: mol_type = other RNA; note = Description of Artificial Sequence: Synthetic oligonucleotide
ccggaatgttgctgaaacaga

SEQ ID NO: 1413 - RNA, 23 nt, synthetic construct
  source 1..23: mol_type = other RNA; note = Description of Artificial Sequence: Synthetic oligonucleotide
tctgtttcagcaacattccggag

SEQ ID NO: 1414 - RNA, 21 nt, synthetic construct
  source 1..21: mol_type = other RNA; note = Description of Artificial Sequence: Synthetic oligonucleotide
atgctccggaatgttgctgaa

SEQ ID NO: 1415 - RNA, 23 nt, synthetic construct
  source 1..23: mol_type = other RNA; note = Description of Artificial Sequence: Synthetic oligonucleotide
ttcagcaacattccggagcatcc

SEQ ID NO: 1416 - RNA, 21 nt, synthetic construct
  source 1..21: mol_type = other RNA; note = Description of Artificial Sequence: Synthetic oligonucleotide
gatgctccggaatgttgctga

SEQ ID NO: 1417 - RNA, 23 nt, synthetic construct
  source 1..23: mol_type = other RNA; note = Description of Artificial Sequence: Synthetic oligonucleotide
tcagcaacattccggagcatcct

SEQ ID NO: 1418 - RNA, 21 nt, synthetic construct
  source 1..21: mol_type = other RNA; note = Description of Artificial Sequence: Synthetic oligonucleotide
tgtcctcgagatactaaagga

SEQ ID NO: 1419 - RNA, 23 nt, synthetic construct
  source 1..23: mol_type = other RNA; note = Description of Artificial Sequence: Synthetic oligonucleotide
tcctttagtatctcgaggacatc

SEQ ID NO: 1420 - RNA, 21 nt, synthetic construct
  source 1..21: mol_type = other RNA; note = Description of Artificial Sequence: Synthetic oligonucleotide
gtcctcgagatactaaaggaa

SEQ ID NO: 1421 - RNA, 23 nt, synthetic construct
  source 1..23: mol_type = other RNA; note = Description of Artificial Sequence: Synthetic oligonucleotide
ttcctttagtatctcgaggacat

SEQ ID NO: 1422 - RNA, 21 nt, synthetic construct
  source 1..21: mol_type = other RNA; note = Description of Artificial Sequence: Synthetic oligonucleotide
aagatgtcctcgagatactaa

SEQ ID NO: 1423 - RNA, 23 nt, synthetic construct
  source 1..23: mol_type = other RNA; note = Description of Artificial Sequence: Synthetic oligonucleotide
ttagtatctcgaggacatcttga

SEQ ID NO: 1424 - RNA, 21 nt, synthetic construct
  source 1..21: mol_type = other RNA; note = Description of Artificial Sequence: Synthetic oligonucleotide
caagatgtcctcgagatacta

SEQ ID NO: 1425 - RNA, 23 nt, synthetic construct
  source 1..23: mol_type = other RNA; note = Description of Artificial Sequence: Synthetic oligonucleotide
tagtatctcgaggacatcttgaa

SEQ ID NO: 1426 - RNA, 21 nt, synthetic construct
  source 1..21: mol_type = other RNA; note = Description of Artificial Sequence: Synthetic oligonucleotide
acaacatgctaaatcagtact

SEQ ID NO: 1427 - RNA, 23 nt, synthetic construct
  source 1..23: mol_type = other RNA; note = Description of Artificial Sequence: Synthetic oligonucleotide
agtactgatttagcatgttgttc

SEQ ID NO: 1428 - RNA, 21 nt, synthetic construct
  source 1..21: mol_type = other RNA; note = Description of Artificial Sequence: Synthetic oligonucleotide
caacatgctaaatcagtactt

SEQ ID NO: 1429 - RNA, 23 nt, synthetic construct
  source 1..23: mol_type = other RNA; note = Description of Artificial Sequence: Synthetic oligonucleotide
aagtactgatttagcatgttgtt

SEQ ID NO: 1430 - RNA, 21 nt, synthetic construct
  source 1..21: mol_type = other RNA; note = Description of Artificial Sequence: Synthetic oligonucleotide
atgaacaacatgctaaatcag

SEQ ID NO: 1431 - RNA, 23 nt, synthetic construct
  source 1..23: mol_type = other RNA; note = Description of Artificial Sequence: Synthetic oligonucleotide
ctgatttagcatgttgttcataa

SEQ ID NO: 1432 - RNA, 21 nt, synthetic construct
  source 1..21: mol_type = other RNA; note = Description of Artificial Sequence: Synthetic oligonucleotide
tatgaacaacatgctaaatca

SEQ ID NO: 1433 - RNA, 23 nt, synthetic construct
  source 1..23: mol_type = other RNA; note = Description of Artificial Sequence: Synthetic oligonucleotide
tgatttagcatgttgttcataat

SEQ ID NO: 1434 - RNA, 21 nt, synthetic construct
  source 1..21: mol_type = other RNA; note = Description of Artificial Sequence: Synthetic oligonucleotide
gccaaggctgtgtttgtgggg

SEQ ID NO: 1435 - RNA, 23 nt, synthetic construct
  source 1..23: mol_type = other RNA; note = Description of Artificial Sequence: Synthetic oligonucleotide
ccccacaaacacagccttggcgc

SEQ ID NO: 1436 - RNA, 21 nt, synthetic construct
  source 1..21: mol_type = other RNA; note = Description of Artificial Sequence: Synthetic oligonucleotide
ccaaggctgtgtttgtgggga

SEQ ID NO: 1437 - RNA, 23 nt, synthetic construct
  source 1..23: mol_type = other RNA; note = Description of Artificial Sequence: Synthetic oligonucleotide
tccccacaaacacagccttggcg

SEQ ID NO: 1438 - RNA, 21 nt, synthetic construct
  source 1..21: mol_type = other RNA; note = Description of Artificial Sequence: Synthetic oligonucleotide
tggcgccaaggctgtgtttgt

SEQ ID NO: 1439 - RNA, 23 nt, synthetic construct
  source 1..23: mol_type = other RNA; note = Description of Artificial Sequence: Synthetic oligonucleotide
acaaacacagccttggcgccaag

SEQ ID NO: 1440 - RNA, 21 nt, synthetic construct
  source 1..21: mol_type = other RNA; note = Description of Artificial Sequence: Synthetic oligonucleotide
ttggcgccaaggctgtgtttg

SEQ ID NO: 1441 - RNA, 23 nt, synthetic construct
  source 1..23: mol_type = other RNA; note = Description of Artificial Sequence: Synthetic oligonucleotide
caaacacagccttggcgccaaga

SEQ ID NO: 1442 - RNA, 21 nt, synthetic construct
  source 1..21: mol_type = other RNA; note = Description of Artificial Sequence: Synthetic oligonucleotide
tgaaagctctggctcttggcg

SEQ ID NO: 1443 - RNA, 23 nt, synthetic construct
  source 1..23: mol_type = other RNA; note = Description of Artificial Sequence: Synthetic oligonucleotide
cgccaagagccagagctttcaga

SEQ ID NO: 1444 - RNA, 21 nt, synthetic construct
  source 1..21: mol_type = other RNA; note = Description of Artificial Sequence: Synthetic oligonucleotide
gaaagctctggctcttggcgc

SEQ ID NO: 1445 - RNA, 23 nt, synthetic construct
  source 1..23: mol_type = other RNA; note = Description of Artificial Sequence: Synthetic oligonucleotide
gcgccaagagccagagctttcag

SEQ ID NO: 1446 - RNA, 21 nt, synthetic construct
  source 1..21: mol_type = other RNA; note = Description of Artificial Sequence: Synthetic oligonucleotide
gttctgaaagctctggctctt

SEQ ID NO: 1447 - RNA, 23 nt, synthetic construct
  source 1..23: mol_type = other RNA; note = Description of Artificial Sequence: Synthetic oligonucleotide
aagagccagagctttcagaacat

SEQ ID NO: 1448 - RNA, 21 nt, synthetic construct
  source 1..21: mol_type = other RNA; note = Description of Artificial Sequence: Synthetic oligonucleotide
tgttctgaaagctctggctct

SEQ ID NO: 1449 - RNA, 23 nt, synthetic construct
  source 1..23: mol_type = other RNA; note = Description of Artificial Sequence: Synthetic oligonucleotide
agagccagagctttcagaacatc

SEQ ID NO: 1450 - RNA, 21 nt, synthetic construct
  source 1..21: mol_type = other RNA; note = Description of Artificial Sequence: Synthetic oligonucleotide
cagccactattgatgttctgc

SEQ ID NO: 1451 - RNA, 23 nt, synthetic construct
  source 1..23: mol_type = other RNA; note = Description of Artificial Sequence: Synthetic oligonucleotide
gcagaacatcaatagtggctggc

SEQ ID NO: 1452 - RNA, 21 nt, synthetic construct
  source 1..21: mol_type = other RNA; note = Description of Artificial Sequence: Synthetic oligonucleotide
agccactattgatgttctgcc

SEQ ID NO: 1453 - RNA, 23 nt, synthetic construct
  source 1..23: mol_type = other RNA; note = Description of Artificial Sequence: Synthetic oligonucleotide
ggcagaacatcaatagtggctgg

SEQ ID NO: 1454 - RNA, 21 nt, synthetic construct
  source 1..21: mol_type = other RNA; note = Description of Artificial Sequence: Synthetic oligonucleotide
gtgccagccactattgatgtt

SEQ ID NO: 1455 - RNA, 23 nt, synthetic construct
  source 1..23: mol_type = other RNA; note = Description of Artificial Sequence: Synthetic oligonucleotide
aacatcaatagtggctggcaccc

SEQ ID NO: 1456 - RNA, 21 nt, synthetic construct
  source 1..21: mol_type = other RNA; note = Description of Artificial Sequence: Synthetic oligonucleotide
ggtgccagccactattgatgt

SEQ ID NO: 1457 - RNA, 23 nt, synthetic construct
  source 1..23: mol_type = other RNA; note = Description of Artificial Sequence: Synthetic oligonucleotide
acatcaatagtggctggcacccc

SEQ ID NO: 1458 - RNA, 21 nt, synthetic construct
  source 1..21: mol_type = other RNA; note = Description of Artificial Sequence: Synthetic oligonucleotide
acaaggaccgagaagtcacca

SEQ ID NO: 1459 - RNA, 23 nt, synthetic construct
  source 1..23: mol_type = other RNA; note = Description of Artificial Sequence: Synthetic oligonucleotide
tggtgacttctcggtccttgtag

SEQ ID NO: 1460 - RNA, 21 nt, synthetic construct
  source 1..21: mol_type = other RNA; note = Description of Artificial Sequence: Synthetic oligonucleotide
caaggaccgagaagtcaccaa

SEQ ID NO: 1461 - RNA, 23 nt, synthetic construct
  source 1..23: mol_type = other RNA; note = Description of Artificial Sequence: Synthetic oligonucleotide
ttggtgacttctcggtccttgta

SEQ ID NO: 1462 - RNA, 21 nt, synthetic construct
  source 1..21: mol_type = other RNA; note = Description of Artificial Sequence: Synthetic oligonucleotide
atctacaaggaccgagaagtc

SEQ ID NO: 1463 - RNA, 23 nt, synthetic construct
  source 1..23: mol_type = other RNA; note = Description of Artificial Sequence: Synthetic oligonucleotide
gacttctcggtccttgtagatat

SEQ ID NO: 1464 - RNA, 21 nt, synthetic construct
  source 1..21: mol_type = other RNA; note = Description of Artificial Sequence: Synthetic oligonucleotide
tatctacaaggaccgagaagt

SEQ ID NO: 1465 - RNA, 23 nt, synthetic construct
  source 1..23: mol_type = other RNA; note = Description of Artificial Sequence: Synthetic oligonucleotide
acttctcggtccttgtagatata

SEQ ID NO: 1466 - RNA, 21 nt, synthetic construct
  source 1..21: mol_type = other RNA; note = Description of Artificial Sequence: Synthetic oligonucleotide
cagaatgtgaaagtcatcgac

SEQ ID NO: 1467 - RNA, 23 nt, synthetic construct
  source 1..23: mol_type = other RNA; note = Description of Artificial Sequence: Synthetic oligonucleotide
gtcgatgactttcacattctggc

SEQ ID NO: 1468 - RNA, 21 nt, synthetic construct
  source 1..21: mol_type = other RNA; note = Description of Artificial Sequence: Synthetic oligonucleotide
agaatgtgaaagtcatcgaca

SEQ ID NO: 1469 - RNA, 23 nt, synthetic construct
  source 1..23: mol_type = other RNA; note = Description of Artificial Sequence: Synthetic oligonucleotide
tgtcgatgactttcacattctgg

SEQ ID NO: 1470 - RNA, 21 nt, synthetic construct
  source 1..21: mol_type = other RNA; note = Description of Artificial Sequence: Synthetic oligonucleotide
gtgccagaatgtgaaagtcat

SEQ ID NO: 1471 - RNA, 23 nt, synthetic construct
  source 1..23: mol_type = other RNA; note = Description of Artificial Sequence: Synthetic oligonucleotide
atgactttcacattctggcaccc

SEQ ID NO: 1472 - RNA, 21 nt, synthetic construct
  source 1..21: mol_type = other RNA; note = Description of Artificial Sequence: Synthetic oligonucleotide
ggtgccagaatgtgaaagtca

SEQ ID NO: 1473 - RNA, 23 nt, synthetic construct
  source 1..23: mol_type = other RNA; note = Description of Artificial Sequence: Synthetic oligonucleotide
tgactttcacattctggcaccca

SEQ ID NO: 1474 - RNA, 21 nt, synthetic construct
  source 1..21: mol_type = other RNA; note = Description of Artificial Sequence: Synthetic oligonucleotide
agatgtcctcgagatactaaa

SEQ ID NO: 1475 - RNA, 23 nt, synthetic construct
  source 1..23: mol_type = other RNA; note = Description of Artificial Sequence: Synthetic oligonucleotide
tttagtatctcgaggacatcttg

SEQ ID NO: 1476 - RNA, 21 nt, synthetic construct
  source 1..21: mol_type = other RNA; note = Description of Artificial Sequence: Synthetic oligonucleotide
gatgtcctcgagatactaaag

SEQ ID NO: 1477 - RNA, 23 nt, synthetic construct
  source 1..23: mol_type = other RNA; note = Description of Artificial Sequence: Synthetic oligonucleotide
ctttagtatctcgaggacatctt

SEQ ID NO: 1478 - RNA, 21 nt, synthetic construct
  source 1..21: mol_type = other RNA; note = Description of Artificial Sequence: Synthetic oligonucleotide
ttcaagatgtcctcgagatac

SEQ ID NO: 1479 - RNA, 23 nt, synthetic construct
  source 1..23: mol_type = other RNA; note = Description of Artificial Sequence: Synthetic oligonucleotide
gtatctcgaggacatcttgaaca

SEQ ID NO: 1480 - RNA, 21 nt, synthetic construct
  source 1..21: mol_type = other RNA; note = Description of Artificial Sequence: Synthetic oligonucleotide
gttcaagatgtcctcgagata

SEQ ID NO: 1481 - RNA, 23 nt, synthetic construct
  source 1..23: mol_type = other RNA; note = Description of Artificial Sequence: Synthetic oligonucleotide
tatctcgaggacatcttgaacac

SEQ ID NO: 1482 - RNA, 21 nt, synthetic construct
  source 1..21: mol_type = other RNA; note = Description of Artificial Sequence: Synthetic oligonucleotide
gtggacttgctgcatatgtgg

SEQ ID NO: 1483 - RNA, 23 nt, synthetic construct
  source 1..23: mol_type = other RNA; note = Description of Artificial Sequence: Synthetic oligonucleotide
ccacatatgcagcaagtccactg

SEQ ID NO: 1484 - RNA, 21 nt, synthetic construct
  source 1..21: mol_type = other RNA; note = Description of Artificial Sequence: Synthetic oligonucleotide
tggacttgctgcatatgtggc

SEQ ID NO: 1485 - RNA, 23 nt, synthetic construct
  source 1..23: mol_type = other RNA; note = Description of Artificial Sequence: Synthetic oligonucleotide
gccacatatgcagcaagtccact

SEQ ID NO: 1486 - RNA, 21 nt, synthetic construct
  source 1..21: mol_type = other RNA; note = Description of Artificial Sequence: Synthetic oligonucleotide
gacagtggacttgctgcatat

SEQ ID NO: 1487 - RNA, 23 nt, synthetic construct
  source 1..23: mol_type = other RNA; note = Description of Artificial Sequence: Synthetic oligonucleotide
atatgcagcaagtccactgtcgt

SEQ ID NO: 1488 - RNA, 21 nt, synthetic construct
  source 1..21: mol_type = other RNA; note = Description of Artificial Sequence: Synthetic oligonucleotide
cgacagtggacttgctgcata

SEQ ID NO: 1489 - RNA, 23 nt, synthetic construct
  source 1..23: mol_type = other RNA; note = Description of Artificial Sequence: Synthetic oligonucleotide
tatgcagcaagtccactgtcgtc

SEQ ID NO: 1490 - RNA, 21 nt, synthetic construct
  source 1..21: mol_type = other RNA; note = Description of Artificial Sequence: Synthetic oligonucleotide
aaccagtactttatcattttc

SEQ ID NO: 1491 - RNA, 23 nt, synthetic construct
  source 1..23: mol_type = other RNA; note = Description of Artificial Sequence: Synthetic oligonucleotide
gaaaatgataaagtactggtttc

SEQ ID NO: 1492 - RNA, 21 nt, synthetic construct
  source 1..21: mol_type = other RNA; note = Description of Artificial Sequence: Synthetic oligonucleotide
accagtactttatcattttct

SEQ ID NO: 1493 - RNA, 23 nt, synthetic construct
  source 1..23: mol_type = other RNA; note = Description of Artificial Sequence: Synthetic oligonucleotide
agaaaatgataaagtactggttt

SEQ ID NO: 1494 - RNA, 21 nt, synthetic construct
  source 1..21: mol_type = other RNA; note = Description of Artificial Sequence: Synthetic oligonucleotide
ttgaaaccagtactttatcat

SEQ ID NO: 1495 - RNA, 23 nt, synthetic construct
  source 1..23: mol_type = other RNA; note = Description of Artificial Sequence: Synthetic oligonucleotide
atgataaagtactggtttcaaaa

SEQ ID NO: 1496 - RNA, 21 nt, synthetic construct
  source 1..21: mol_type = other RNA; note = Description of Artificial Sequence: Synthetic oligonucleotide
tttgaaaccagtactttatca

SEQ ID NO: 1497 - RNA, 23 nt, synthetic construct
  source 1..23: mol_type = other RNA; note = Description of Artificial Sequence: Synthetic oligonucleotide
tgataaagtactggtttcaaaat

SEQ ID NO: 1498 - RNA, 21 nt, synthetic construct
  source 1..21: mol_type = other RNA; note = Description of Artificial Sequence: Synthetic oligonucleotide
cgagaagtcaccaagaagcta

SEQ ID NO: 1499 - RNA, 23 nt, synthetic construct
  source 1..23: mol_type = other RNA; note = Description of Artificial Sequence: Synthetic oligonucleotide
tagcttcttggtgacttctcggt

SEQ ID NO: 1500 - RNA, 21 nt, synthetic construct
  source 1..21: mol_type = other RNA; note = Description of Artificial Sequence: Synthetic oligonucleotide
gagaagtcaccaagaagctag

SEQ ID NO: 1501 - RNA, 23 nt, synthetic construct
  source 1..23: mol_type = other RNA; note = Description of Artificial Sequence: Synthetic oligonucleotide
ctagcttcttggtgacttctcgg

SEQ ID NO: 1502 - RNA, 21 nt, synthetic construct
  source 1..21: mol_type = other RNA; note = Description of Artificial Sequence: Synthetic oligonucleotide
ggaccgagaagtcaccaagaa

SEQ ID NO: 1503 - RNA, 23 nt, synthetic construct
  source 1..23: mol_type = other RNA; note = Description of Artificial Sequence: Synthetic oligonucleotide
ttcttggtgacttctcggtcctt

SEQ ID NO: 1504 - RNA, 21 nt, synthetic construct
  source 1..21: mol_type = other RNA; note = Description of Artificial Sequence: Synthetic oligonucleotide
aggaccgagaagtcaccaaga

SEQ ID NO: 1505 - RNA, 23 nt, synthetic construct
  source 1..23: mol_type = other RNA; note = Description of Artificial Sequence: Synthetic oligonucleotide
tcttggtgacttctcggtccttg

SEQ ID NO: 1506 - RNA, 21 nt, synthetic construct
  source 1..21: mol_type = other RNA; note = Description of Artificial Sequence: Synthetic oligonucleotide
tcaaagtgttggtaatgcctg

SEQ ID NO: 1507 - RNA, 23 nt, synthetic construct
  source 1..23: mol_type = other RNA; note = Description of Artificial Sequence: Synthetic oligonucleotide
caggcattaccaacactttgaac

SEQ ID NO: 1508 - RNA, 21 nt, synthetic construct
  source 1..21: mol_type = other RNA; note = Description of Artificial Sequence: Synthetic oligonucleotide
caaagtgttggtaatgcctga

SEQ ID NO: 1509 - RNA, 23 nt, synthetic construct
  source 1..23: mol_type = other RNA; note = Description of Artificial Sequence: Synthetic oligonucleotide
tcaggcattaccaacactttgaa

SEQ ID NO: 1510 - RNA, 21 nt, synthetic construct
  source 1..21: mol_type = other RNA; note = Description of Artificial Sequence: Synthetic oligonucleotide
aggttcaaagtgttggtaatg

SEQ ID NO: 1511 - RNA, 23 nt, synthetic construct
  source 1..23: mol_type = other RNA; note = Description of Artificial Sequence: Synthetic oligonucleotide
cattaccaacactttgaacctga

SEQ ID NO: 1512 - RNA, 21 nt, synthetic construct
  source 1..21: mol_type = other RNA; note = Description of Artificial Sequence: Synthetic oligonucleotide
caggttcaaagtgttggtaat

SEQ ID NO: 1513 - RNA, 23 nt, synthetic construct
  source 1..23: mol_type = other RNA; note = Description of Artificial Sequence: Synthetic oligonucleotide
attaccaacactttgaacctgag

SEQ ID NO: 1514 - RNA, 21 nt, synthetic construct
  source 1..21: mol_type = other RNA; note = Description of Artificial Sequence: Synthetic oligonucleotide
tattacttgacaaagagacac

SEQ ID NO: 1515 - RNA, 23 nt, synthetic construct
  source 1..23: mol_type = other RNA; note = Description of Artificial Sequence: Synthetic oligonucleotide
gtgtctctttgtcaagtaataca

SEQ ID NO: 1516 - RNA, 21 nt, synthetic construct
  source 1..21: mol_type = other RNA; note = Description of Artificial Sequence: Synthetic oligonucleotide
attacttgacaaagagacact

SEQ ID NO: 1517 - RNA, 23 nt, synthetic construct
  source 1..23: mol_type = other RNA; note = Description of Artificial Sequence: Synthetic oligonucleotide
agtgtctctttgtcaagtaatac

SEQ ID NO: 1518 - RNA, 21 nt, synthetic construct
  source 1..21: mol_type = other RNA; note = Description of Artificial Sequence: Synthetic oligonucleotide
catgtattacttgacaaagag

SEQ ID NO: 1519 - RNA, 23 nt, synthetic construct
  source 1..23: mol_type = other RNA; note = Description of Artificial Sequence: Synthetic oligonucleotide
ctctttgtcaagtaatacatgct

SEQ ID NO: 1520 - RNA, 21 nt, synthetic construct
  source 1..21: mol_type = other RNA; note = Description of Artificial Sequence: Synthetic oligonucleotide
gcatgtattacttgacaaaga

SEQ ID NO: 1521 - RNA, 23 nt, synthetic construct
  source 1..23: mol_type = other RNA; note = Description of Artificial Sequence: Synthetic oligonucleotide
tctttgtcaagtaatacatgctg

SEQ ID NO: 1522 - RNA, 21 nt, synthetic construct
  source 1..21: mol_type = other RNA; note = Description of Artificial Sequence: Synthetic oligonucleotide
aaagtcatcgacaagacattg

SEQ ID NO: 1523 - RNA, 23 nt, synthetic construct
  source 1..23: mol_type = other RNA; note = Description of Artificial Sequence: Synthetic oligonucleotide
caatgtcttgtcgatgactttca

SEQ ID NO: 1524 - RNA, 21 nt, synthetic construct
  source 1..21: mol_type = other RNA; note = Description of Artificial Sequence: Synthetic oligonucleotide
aagtcatcgacaagacattgg

SEQ ID NO: 1525 - RNA, 23 nt, synthetic construct
  source 1..23: mol_type = other RNA; note = Description of Artificial Sequence: Synthetic oligonucleotide
ccaatgtcttgtcgatgactttc

SEQ ID NO: 1526 - RNA, 21 nt, synthetic construct
  source 1..21: mol_type = other RNA; note = Description of Artificial Sequence: Synthetic oligonucleotide
tgtgaaagtcatcgacaagac

SEQ ID NO: 1527 - RNA, 23 nt, synthetic construct
  source 1..23: mol_type = other RNA; note = Description of Artificial Sequence: Synthetic oligonucleotide
gtcttgtcgatgactttcacatt

SEQ ID NO: 1528 - RNA, 21 nt, synthetic construct
  source 1..21: mol_type = other RNA; note = Description of Artificial Sequence: Synthetic oligonucleotide
atgtgaaagtcatcgacaaga

SEQ ID NO: 1529 - RNA, 23 nt, synthetic construct
  source 1..23: mol_type = other RNA; note = Description of Artificial Sequence: Synthetic oligonucleotide
tcttgtcgatgactttcacattc

SEQ ID NO: 1530 - RNA, 21 nt, synthetic construct
  source 1..21: mol_type = other RNA; note = Description of Artificial Sequence: Synthetic oligonucleotide
atatgtggctaaagcaataga

SEQ ID NO: 1531 - RNA, 23 nt, synthetic construct
  source 1..23: mol_type = other RNA; note = Description of Artificial Sequence: Synthetic oligonucleotide
tctattgctttagccacatatgc

SEQ ID NO: 1532 - RNA, 21 nt, synthetic construct
  source 1..21: mol_type = other RNA; note = Description of Artificial Sequence: Synthetic oligonucleotide
tatgtggctaaagcaatagac

SEQ ID NO: 1533 - RNA, 23 nt, synthetic construct
  source 1..23: mol_type = other RNA; note = Description of Artificial Sequence: Synthetic oligonucleotide
gtctattgctttagccacatatg

SEQ ID NO: 1534 - RNA, 21 nt, synthetic construct
  source 1..21: mol_type = other RNA; note = Description of Artificial Sequence: Synthetic oligonucleotide
ctgcatatgtggctaaagcaa

SEQ ID NO: 1535 - RNA, 23 nt, synthetic construct
  source 1..23: mol_type = other RNA; note = Description of Artificial Sequence: Synthetic oligonucleotide
ttgctttagccacatatgcagca

SEQ ID NO: 1536 - RNA, 21 nt, synthetic construct
  source 1..21: mol_type = other RNA; note = Description of Artificial Sequence: Synthetic oligonucleotide
gctgcatatgtggctaaagca

SEQ ID NO: 1537 - RNA, 23 nt, synthetic construct
  source 1..23: mol_type = other RNA; note = Description of Artificial Sequence: Synthetic oligonucleotide
tgctttagccacatatgcagcaa

SEQ ID NO: 1538 - RNA, 21 nt, synthetic construct
  source 1..21: mol_type = other RNA; note = Description of Artificial Sequence: Synthetic oligonucleotide
agacgacagtggacttgctgc

SEQ ID NO: 1539 - RNA, 23 nt, synthetic construct
  source 1..23: mol_type = other RNA; note = Description of Artificial Sequence: Synthetic oligonucleotide
gcagcaagtccactgtcgtctcc

SEQ ID NO: 1540 - RNA, 21 nt, synthetic construct
  source 1..21: mol_type = other RNA; note = Description of Artificial Sequence: Synthetic oligonucleotide
gacgacagtggacttgctgca

SEQ ID NO: 1541 - RNA, 23 nt, synthetic construct
  source 1..23: mol_type = other RNA; note = Description of Artificial Sequence: Synthetic oligonucleotide
tgcagcaagtccactgtcgtctc

SEQ ID NO: 1542 - RNA, 21 nt, synthetic construct
  source 1..21: mol_type = other RNA; note = Description of Artificial Sequence: Synthetic oligonucleotide
ttggagacgacagtggacttg

SEQ ID NO: 1543 - RNA, 23 nt, synthetic construct
  source 1..23: mol_type = other RNA; note = Description of Artificial Sequence: Synthetic oligonucleotide
caagtccactgtcgtctccaaaa

SEQ ID NO: 1544 - RNA, 21 nt, synthetic construct
  source 1..21: mol_type = other RNA; note = Description of Artificial Sequence: Synthetic oligonucleotide
tttggagacgacagtggactt

SEQ ID NO: 1545 - RNA, 23 nt, synthetic construct
  source 1..23: mol_type = other RNA; note = Description of Artificial Sequence: Synthetic oligonucleotide
aagtccactgtcgtctccaaaat

SEQ ID NO: 1546 - RNA, 21 nt, synthetic construct
  source 1..21: mol_type = other RNA; note = Description of Artificial Sequence: Synthetic oligonucleotide
ggccacctcctcaattgaaga

SEQ ID NO: 1547 - RNA, 23 nt, synthetic construct
  source 1..23: mol_type = other RNA; note = Description of Artificial Sequence: Synthetic oligonucleotide
tcttcaattgaggaggtggccca

SEQ ID NO: 1548 - RNA, 21 nt, synthetic construct
  source 1..21: mol_type = other RNA; note = Description of Artificial Sequence: Synthetic oligonucleotide
gccacctcctcaattgaagaa

SEQ ID NO: 1549 - RNA, 23 nt, synthetic construct
  source 1..23: mol_type = other RNA; note = Description of Artificial Sequence: Synthetic oligonucleotide
ttcttcaattgaggaggtggccc

SEQ ID NO: 1550 - RNA, 21 nt, synthetic construct
  source 1..21: mol_type = other RNA; note = Description of Artificial Sequence: Synthetic oligonucleotide
cctgggccacctcctcaattg

SEQ ID NO: 1551 - RNA, 23 nt, synthetic construct
  source 1..23: mol_type = other RNA; note = Description of Artificial Sequence: Synthetic oligonucleotide
caattgaggaggtggcccaggaa

SEQ ID NO: 1552 - RNA, 21 nt, synthetic construct
  source 1..21: mol_type = other RNA; note = Description of Artificial Sequence: Synthetic oligonucleotide
tcctgggccacctcctcaatt

SEQ ID NO: 1553 - RNA, 23 nt, synthetic construct
  source 1..23: mol_type = other RNA; note = Description of Artificial Sequence: Synthetic oligonucleotide
aattgaggaggtggcccaggaac

SEQ ID NO: 1554 - RNA, 21 nt, synthetic construct
  source 1..21: mol_type = other RNA; note = Description of Artificial Sequence: Synthetic oligonucleotide
tgtatgttacttcttagagag

SEQ ID NO: 1555 - RNA, 23 nt, synthetic construct
  source 1..23: mol_type = other RNA; note = Description of Artificial Sequence: Synthetic oligonucleotide
ctctctaagaagtaacatacatc

SEQ ID NO: 1556 - RNA, 21 nt, synthetic construct
  source 1..21: mol_type = other RNA; note = Description of Artificial Sequence: Synthetic oligonucleotide
gtatgttacttcttagagaga

SEQ ID NO: 1557 - RNA, 23 nt, synthetic construct
  source 1..23: mol_type = other RNA; note = Description of Artificial Sequence: Synthetic oligonucleotide
tctctctaagaagtaacatacat

SEQ ID NO: 1558 - RNA, 21 nt, synthetic construct
  source 1..21: mol_type = other RNA; note = Description of Artificial Sequence: Synthetic oligonucleotide
aggatgtatgttacttcttag

SEQ ID NO: 1559 - RNA, 23 nt, synthetic construct
  source 1..23: mol_type = other RNA; note = Description of Artificial Sequence: Synthetic oligonucleotide
ctaagaagtaacatacatcctaa

SEQ ID NO: 1560 - RNA, 21 nt, synthetic construct
  source 1..21: mol_type = other RNA; note = Description of Artificial Sequence: Synthetic oligonucleotide
taggatgtatgttacttctta

SEQ ID NO: 1561 - RNA, 23 nt, synthetic construct
  source 1..23: mol_type = other RNA; note = Description of Artificial Sequence: Synthetic oligonucleotide
taagaagtaacatacatcctaaa

SEQ ID NO: 1562 - RNA, 21 nt, synthetic construct
  source 1..21: mol_type = other RNA; note = Description of Artificial Sequence: Synthetic oligonucleotide
aaatgttttaggatgtatgtt

SEQ ID NO: 1563 - RNA, 23 nt, synthetic construct
  source 1..23: mol_type = other RNA; note = Description of Artificial Sequence: Synthetic oligonucleotide
aacatacatcctaaaacatttgg

SEQ ID NO: 1564 - RNA, 21 nt, synthetic construct
  source 1..21: mol_type = other RNA; note = Description of Artificial Sequence: Synthetic oligonucleotide
aatgttttaggatgtatgtta

SEQ ID NO: 1565 - RNA, 23 nt, synthetic construct
  source 1..23: mol_type = other RNA; note = Description of Artificial Sequence: Synthetic oligonucleotide
taacatacatcctaaaacatttg

SEQ ID NO: 1566 - RNA, 21 nt, synthetic construct
  source 1..21: mol_type = other RNA; note = Description of Artificial Sequence: Synthetic oligonucleotide
atccaaatgttttaggatgta

SEQ ID NO: 1567 - RNA, 23 nt, synthetic construct
  source 1..23: mol_type = other RNA; note = Description of Artificial Sequence: Synthetic oligonucleotide
tacatcctaaaacatttggatat

SEQ ID NO: 1568 - RNA, 21 nt, synthetic construct
  source 1..21: mol_type = other RNA; note = Description of Artificial Sequence: Synthetic oligonucleotide
tatccaaatgttttaggatgt

SEQ ID NO: 1569 - RNA, 23 nt, synthetic construct
  source 1..23: mol_type = other RNA; note = Description of Artificial Sequence: Synthetic oligonucleotide
acatcctaaaacatttggatata

SEQ ID NO: 1570 - RNA, 21 nt, synthetic construct
  source 1..21: mol_type = other RNA; note = Description of Artificial Sequence: Synthetic oligonucleotide
atgggtggcggtaattggtga

SEQ ID NO: 1571 - RNA, 23 nt, synthetic construct
  source 1..23: mol_type = other RNA; note = Description of Artificial Sequence: Synthetic oligonucleotide
tcaccaattaccgccacccattc

SEQ ID NO: 1572 - RNA, 21 nt, synthetic construct
  source 1..21: mol_type = other RNA; note = Description of Artificial Sequence: Synthetic oligonucleotide
tgggtggcggtaattggtgat

SEQ ID NO: 1573 - RNA, 23 nt, synthetic construct
  source 1..23: mol_type = other RNA; note = Description of Artificial Sequence: Synthetic oligonucleotide
atcaccaattaccgccacccatt

SEQ ID NO: 1574 - RNA, 21 nt, synthetic construct
  source 1..21: mol_type = other RNA; note = Description of Artificial Sequence: Synthetic oligonucleotide
tggaatgggtggcggtaattg

SEQ ID NO: 1575 - RNA, 23 nt, synthetic construct
  source 1..23: mol_type = other RNA; note = Description of Artificial Sequence: Synthetic oligonucleotide
caattaccgccacccattccaat

SEQ ID NO: 1576 - RNA, 21 nt, synthetic construct
  source 1..21: mol_type = other RNA; note = Description of Artificial Sequence: Synthetic oligonucleotide
ttggaatgggtggcggtaatt

SEQ ID NO: 1577 - RNA, 23 nt, synthetic construct
  source 1..23: mol_type = other RNA; note = Description of Artificial Sequence: Synthetic oligonucleotide
aattaccgccacccattccaatt

SEQ ID NO: 1578 - RNA, 21 nt, synthetic construct
  source 1..21: mol_type = other RNA; note = Description of Artificial Sequence: Synthetic oligonucleotide
ttcaaagtgttggtaatgcct

SEQ ID NO: 1579 - RNA, 23 nt, synthetic construct
  source 1..23: mol_type = other RNA; note = Description of Artificial Sequence: Synthetic oligonucleotide
aggcattaccaacactttgaacc

SEQ ID NO: 1580 - RNA, 21 nt, synthetic construct
  source 1..21: mol_type = other RNA; note = Description of Artificial Sequence: Synthetic oligonucleotide
tcaaagtgttggtaatgcctg

SEQ ID NO: 1581 - RNA, 23 nt, synthetic construct
  source 1..23: mol_type = other RNA; note = Description of Artificial Sequence: Synthetic oligonucleotide
caggcattaccaacactttgaac

SEQ ID NO: 1582 - RNA, 21 nt, synthetic construct
  source 1..21: mol_type = other RNA; note = Description of Artificial Sequence: Synthetic oligonucleotide
caggttcaaagtgttggtaat

SEQ ID NO: 1583 - RNA, 23 nt, synthetic construct
  source 1..23: mol_type = other RNA; note = Description of Artificial Sequence: Synthetic oligonucleotide
attaccaacactttgaacctgag

SEQ ID NO: 1584 - RNA, 21 nt, synthetic construct
  source 1..21: mol_type = other RNA; note = Description of Artificial Sequence: Synthetic oligonucleotide
tcaggttcaaagtgttggtaa

SEQ ID NO: 1585 - RNA, 23 nt, synthetic construct
  source 1..23: mol_type = other RNA; note = Description of Artificial Sequence: Synthetic oligonucleotide
ttaccaacactttgaacctgagc

SEQ ID NO: 1586 - RNA, 21 nt, synthetic construct
  source 1..21: mol_type = other RNA; note = Description of Artificial Sequence: Synthetic oligonucleotide
ccacctcctcaattgaagaag

SEQ ID NO: 1587 - RNA, 23 nt, synthetic construct
  source 1..23: mol_type = other RNA; note = Description of Artificial Sequence: Synthetic oligonucleotide
cttcttcaattgaggaggtggcc

SEQ ID NO: 1588 - RNA, 21 nt, synthetic construct
  source 1..21: mol_type = other RNA; note = Description of Artificial Sequence: Synthetic oligonucleotide
cacctcctcaattgaagaagt

SEQ ID NO: 1589 - RNA, 23 nt, synthetic construct
  source 1..23: mol_type = other RNA; note = Description of Artificial Sequence: Synthetic oligonucleotide
acttcttcaattgaggaggtggc

SEQ ID NO: 1590 - RNA, 21 nt, synthetic construct
  source 1..21: mol_type = other RNA; note = Description of Artificial Sequence: Synthetic oligonucleotide
tgggccacctcctcaattgaa

SEQ ID NO: 1591 - RNA, 23 nt, synthetic construct
  source 1..23: mol_type = other RNA; note = Description of Artificial Sequence: Synthetic oligonucleotide
ttcaattgaggaggtggcccagg

SEQ ID NO: 1592 - RNA, 21 nt, synthetic construct
  source 1..21: mol_type = other RNA; note = Description of Artificial Sequence: Synthetic oligonucleotide
ctgggccacctcctcaattga

SEQ ID NO: 1593 - RNA, 23 nt, synthetic construct
  source 1..23: mol_type = other RNA; note = Description of Artificial Sequence: Synthetic oligonucleotide
tcaattgaggaggtggcccagga

SEQ ID NO: 1594 - RNA, 21 nt, synthetic construct
  source 1..21: mol_type = other RNA; note = Description of Artificial Sequence: Synthetic oligonucleotide
gagtgggtgccagaatgtgaa

SEQ ID NO: 1595 - RNA, 23 nt, synthetic construct
  source 1..23: mol_type = other RNA; note = Description of Artificial Sequence: Synthetic oligonucleotide
ttcacattctggcacccactcag

SEQ ID NO: 1596 - RNA, 21 nt, synthetic construct
  source 1..21: mol_type = other RNA; note = Description of Artificial Sequence: Synthetic oligonucleotide
agtgggtgccagaatgtgaaa

SEQ ID NO: 1597 - RNA, 23 nt, synthetic construct
  source 1..23: mol_type = other RNA; note = Description of Artificial Sequence: Synthetic oligonucleotide
tttcacattctggcacccactca

SEQ ID NO: 1598 - RNA, 21 nt, synthetic construct
  source 1..21: mol_type = other RNA; note = Description of Artificial Sequence: Synthetic oligonucleotide
ctctgagtgggtgccagaatg

SEQ ID NO: 1599 - RNA, 23 nt, synthetic construct
  source 1..23: mol_type = other RNA; note = Description of Artificial Sequence: Synthetic oligonucleotide
cattctggcacccactcagagcc

SEQ ID NO: 1600 - RNA, 21 nt, synthetic construct
  source 1..21: mol_type = other RNA; note = Description of Artificial Sequence: Synthetic oligonucleotide
gctctgagtgggtgccagaat

SEQ ID NO: 1601 - RNA, 23 nt, synthetic construct
  source 1..23: mol_type = other RNA; note = Description of Artificial Sequence: Synthetic oligonucleotide
attctggcacccactcagagcca

SEQ ID NO: 1602 - RNA, 21 nt, synthetic construct
  source 1..21: mol_type = other RNA; note = Description of Artificial Sequence: Synthetic oligonucleotide
gcactgatgttctgaaagctc

SEQ ID NO: 1603 - RNA, 23 nt, synthetic construct
  source 1..23: mol_type = other RNA; note = Description of Artificial Sequence: Synthetic oligonucleotide
gagctttcagaacatcagtgcct

SEQ ID NO: 1604 - RNA, 21 nt, synthetic construct
  source 1..21: mol_type = other RNA; note = Description of Artificial Sequence: Synthetic oligonucleotide
cactgatgttctgaaagctct

SEQ ID NO: 1605 - RNA, 23 nt, synthetic construct
  source 1..23: mol_type = other RNA; note = Description of Artificial Sequence: Synthetic oligonucleotide
agagctttcagaacatcagtgcc

SEQ ID NO: 1606 - RNA, 21 nt, synthetic construct
  source 1..21: mol_type = other RNA; note = Description of Artificial Sequence: Synthetic oligonucleotide
aaaggcactgatgttctgaaa

SEQ ID NO: 1607 - RNA, 23 nt, synthetic construct
  source 1..23: mol_type = other RNA; note = Description of Artificial Sequence: Synthetic oligonucleotide
tttcagaacatcagtgcctttcc

SEQ ID NO: 1608 - RNA, 21 nt, synthetic construct
  source 1..21: mol_type = other RNA; note = Description of Artificial Sequence: Synthetic oligonucleotide
gaaaggcactgatgttctgaa

SEQ ID NO: 1609 - RNA, 23 nt, synthetic construct
  source 1..23: mol_type = other RNA; note = Description of Artificial Sequence: Synthetic oligonucleotide
ttcagaacatcagtgcctttccg

SEQ ID NO: 1610 - RNA, 21 nt, synthetic construct
  source 1..21: mol_type = other RNA; note = Description of Artificial Sequence: Synthetic oligonucleotide
gggaaggtggaagtcttcctg

SEQ ID NO: 1611 - RNA, 23 nt, synthetic construct
  source 1..23: mol_type = other RNA; note = Description of Artificial Sequence: Synthetic oligonucleotide
caggaagacttccaccttccctt

SEQ ID NO: 1612 - RNA, 21 nt, synthetic construct
  source 1..21: mol_type = other RNA; note = Description of Artificial Sequence: Synthetic oligonucleotide
ggaaggtggaagtcttcctgg

SEQ ID NO: 1613 - RNA, 23 nt, synthetic construct
  source 1..23: mol_type = other RNA; note = Description of Artificial Sequence: Synthetic oligonucleotide
ccaggaagacttccaccttccct

SEQ ID NO: 1614 - RNA, 21 nt, synthetic construct
  source 1..21: mol_type = other RNA; note = Description of Artificial Sequence: Synthetic oligonucleotide
ggaagggaaggtggaagtctt

SEQ ID NO: 1615 - RNA, 23 nt, synthetic construct
  source 1..23: mol_type = other RNA; note = Description of Artificial Sequence: Synthetic oligonucleotide
aagacttccaccttcccttccac

SEQ ID NO: 1616 - RNA, 21 nt, synthetic construct
  source 1..21: mol_type = other RNA; note = Description of Artificial Sequence: Synthetic oligonucleotide
tggaagggaaggtggaagtct

SEQ ID NO: 1617 - RNA, 23 nt, synthetic construct
  source 1..23: mol_type = other RNA; note = Description of Artificial Sequence: Synthetic oligonucleotide
agacttccaccttcccttccaca

SEQ ID NO: 1618 - RNA, 21 nt, synthetic construct
  source 1..21: mol_type = other RNA; note = Description of Artificial Sequence: Synthetic oligonucleotide
tgctaaatcagtacttccaaa

SEQ ID NO: 1619 - RNA, 23 nt, synthetic construct
  source 1..23: mol_type = other RNA; note = Description of Artificial Sequence: Synthetic oligonucleotide
tttggaagtactgatttagcatg

SEQ ID NO: 1620 - RNA, 21 nt, synthetic construct
  source 1..21: mol_type = other RNA; note = Description of Artificial Sequence: Synthetic oligonucleotide
gctaaatcagtacttccaaag

SEQ ID NO: 1621 - RNA, 23 nt, synthetic construct
  source 1..23: mol_type = other RNA; note = Description of Artificial Sequence: Synthetic oligonucleotide
ctttggaagtactgatttagcat

SEQ ID NO: 1622 - RNA, 21 nt, synthetic construct
  source 1..21: mol_type = other RNA; note = Description of Artificial Sequence: Synthetic oligonucleotide
aacatgctaaatcagtacttc

SEQ ID NO: 1623 - RNA, 23 nt, synthetic construct
  source 1..23: mol_type = other RNA; note = Description of Artificial Sequence: Synthetic oligonucleotide
gaagtactgatttagcatgttgt

SEQ ID NO: 1624 - RNA, 21 nt, synthetic construct
  source 1..21: mol_type = other RNA; note = Description of Artificial Sequence: Synthetic oligonucleotide
caacatgctaaatcagtactt

SEQ ID NO: 1625 - RNA, 23 nt, synthetic construct
  source 1..23: mol_type = other RNA; note = Description of Artificial Sequence: Synthetic oligonucleotide
aagtactgatttagcatgttgtt

SEQ ID NO: 1626 - RNA, 21 nt, synthetic construct
  source 1..21: mol_type = other RNA; note = Description of Artificial Sequence: Synthetic oligonucleotide
ccacaactcaggatgaaaaat

SEQ ID NO: 1627 - RNA, 23 nt, synthetic construct
  source 1..23: mol_type = other RNA; note = Description of Artificial Sequence: Synthetic oligonucleotide
atttttcatcctgagttgtggcg

SEQ ID NO: 1628 - RNA, 21 nt, synthetic construct
  source 1..21: mol_type = other RNA; note = Description of Artificial Sequence: Synthetic oligonucleotide
cacaactcaggatgaaaaatt

SEQ ID NO: 1629 - RNA, 23 nt, synthetic construct
  source 1..23: mol_type = other RNA; note = Description of Artificial Sequence: Synthetic oligonucleotide
aatttttcatcctgagttgtggc

SEQ ID NO: 1630 - RNA, 21 nt, synthetic construct
  source 1..21: mol_type = other RNA; note = Description of Artificial Sequence: Synthetic oligonucleotide
gccgccacaactcaggatgaa

SEQ ID NO: 1631 - RNA, 23 nt, synthetic construct
  source 1..23: mol_type = other RNA; note = Description of Artificial Sequence: Synthetic oligonucleotide
ttcatcctgagttgtggcggcag

SEQ ID NO: 1632 - RNA, 21 nt, synthetic construct
  source 1..21: mol_type = other RNA; note = Description of Artificial Sequence: Synthetic oligonucleotide
tgccgccacaactcaggatga

SEQ ID NO: 1633 - RNA, 23 nt, synthetic construct
  source 1..23: mol_type = other RNA; note = Description of Artificial Sequence: Synthetic oligonucleotide
tcatcctgagttgtggcggcagt

SEQ ID NO: 1634 - RNA, 21 nt, synthetic construct
  source 1..21: mol_type = other RNA; note = Description of Artificial Sequence: Synthetic oligonucleotide
gcaaccgtctggatgatgtgc

SEQ ID NO: 1635 - RNA, 23 nt, synthetic construct
  source 1..23: mol_type = other RNA; note = Description of Artificial Sequence: Synthetic oligonucleotide
gcacatcatccagacggttgccc

SEQ ID NO: 1636 - RNA, 21 nt, synthetic construct
  source 1..21: mol_type = other RNA; note = Description of Artificial Sequence: Synthetic oligonucleotide
caaccgtctggatgatgtgcg

SEQ ID NO: 1637 - RNA, 23 nt, synthetic construct
  source 1..23: mol_type = other RNA; note = Description of Artificial Sequence: Synthetic oligonucleotide
cgcacatcatccagacggttgcc

SEQ ID NO: 1638 - RNA, 21 nt, synthetic construct
  source 1..21: mol_type = other RNA; note = Description of Artificial Sequence: Synthetic oligonucleotide
ctgggcaaccgtctggatgat

SEQ ID NO: 1639 - RNA, 23 nt, synthetic construct
  source 1..23: mol_type = other RNA; note = Description of Artificial Sequence: Synthetic oligonucleotide
atcatccagacggttgcccaggt

SEQ ID NO: 1640 - RNA, 21 nt, synthetic construct
  source 1..21: mol_type = other RNA; note = Description of Artificial Sequence: Synthetic oligonucleotide
cctgggcaaccgtctggatga

SEQ ID NO: 1641 - RNA, 23 nt, synthetic construct
  source 1..23: mol_type = other RNA; note = Description of Artificial Sequence: Synthetic oligonucleotide
tcatccagacggttgcccaggta

SEQ ID NO: 1642 - RNA, 21 nt, synthetic construct
  source 1..21: mol_type = other RNA; note = Description of Artificial Sequence: Synthetic oligonucleotide
gcaaatgatgaagaaactttg

SEQ ID NO: 1643 - RNA, 23 nt, synthetic construct
  source 1..23: mol_type = other RNA; note = Description of Artificial Sequence: Synthetic oligonucleotide
caaagtttcttcatcatttgccc

SEQ ID NO: 1644 - RNA, 21 nt, synthetic construct
  source 1..21: mol_type = other RNA; note = Description of Artificial Sequence: Synthetic oligonucleotide
caaatgatgaagaaactttgg

SEQ ID NO: 1645 - RNA, 23 nt, synthetic construct
  source 1..23: mol_type = other RNA; note = Description of Artificial Sequence: Synthetic oligonucleotide
ccaaagtttcttcatcatttgcc

SEQ ID NO: 1646 - RNA, 21 nt, synthetic construct
  source 1..21: mol_type = other RNA; note = Description of Artificial Sequence: Synthetic oligonucleotide
tggggcaaatgatgaagaaac

SEQ ID NO: 1647 - RNA, 23 nt, synthetic construct
  source 1..23: mol_type = other RNA; note = Description of Artificial Sequence: Synthetic oligonucleotide
gtttcttcatcatttgccccaga

SEQ ID NO: 1648 - RNA, 21 nt, synthetic construct
  source 1..21: mol_type = other RNA; note = Description of Artificial Sequence: Synthetic oligonucleotide
ctggggcaaatgatgaagaaa

SEQ ID NO: 1649 - RNA, 23 nt, synthetic construct
  source 1..23: mol_type = other RNA; note = Description of Artificial Sequence: Synthetic oligonucleotide
tttcttcatcatttgccccagac

SEQ ID NO: 1650 - RNA, 21 nt, synthetic construct
  source 1..21: mol_type = other RNA; note = Description of Artificial Sequence: Synthetic oligonucleotide
ccaaggctgtgtttgtgggga

SEQ ID NO: 1651 - RNA, 23 nt, synthetic construct
  source 1..23: mol_type = other RNA; note = Description of Artificial Sequence: Synthetic oligonucleotide
tccccacaaacacagccttggcg

SEQ ID NO: 1652 - RNA, 21 nt, synthetic construct
  source 1..21: mol_type = other RNA; note = Description of Artificial Sequence: Synthetic oligonucleotide
caaggctgtgtttgtggggag

SEQ ID NO: 1653 - RNA, 23 nt, synthetic construct
  source 1..23: mol_type = other RNA; note = Description of Artificial Sequence: Synthetic oligonucleotide
ctccccacaaacacagccttggc

SEQ ID NO: 1654 - RNA, 21 nt, synthetic construct
  source 1..21: mol_type = other RNA; note = Description of Artificial Sequence: Synthetic oligonucleotide
ggcgccaaggctgtgtttgtg

SEQ ID NO: 1655 - RNA, 23 nt, synthetic construct
  source 1..23: mol_type = other RNA; note = Description of Artificial Sequence: Synthetic oligonucleotide
cacaaacacagccttggcgccaa

SEQ ID NO: 1656 - RNA, 21 nt, synthetic construct
  source 1..21: mol_type = other RNA; note = Description of Artificial Sequence: Synthetic oligonucleotide
tggcgccaaggctgtgtttgt

SEQ ID NO: 1657 - RNA, 23 nt, synthetic construct
  source 1..23: mol_type = other RNA; note = Description of Artificial Sequence: Synthetic oligonucleotide
acaaacacagccttggcgccaag

SEQ ID NO: 1658 - RNA, 21 nt, synthetic construct
  source 1..21: mol_type = other RNA; note = Description of Artificial Sequence: Synthetic oligonucleotide
actgccgccacaactcaggat

SEQ ID NO: 1659 - RNA, 23 nt, synthetic construct
  source 1..23: mol_type = other RNA; note = Description of Artificial Sequence: Synthetic oligonucleotide
atcctgagttgtggcggcagttt

SEQ ID NO: 1660 - RNA, 21 nt, synthetic construct
  source 1..21: mol_type = other RNA; note = Description of Artificial Sequence: Synthetic oligonucleotide
ctgccgccacaactcaggatg

SEQ ID NO: 1661 - RNA, 23 nt, synthetic construct
  source 1..23: mol_type = other RNA; note = Description of Artificial Sequence: Synthetic oligonucleotide
catcctgagttgtggcggcagtt

SEQ ID NO: 1662 - RNA, 21 nt, synthetic construct
  source 1..21: mol_type = other RNA; note = Description of Artificial Sequence: Synthetic oligonucleotide
tcaaactgccgccacaactca

SEQ ID NO: 1663 - RNA, 23 nt, synthetic construct
  source 1..23: mol_type = other RNA; note = Description of Artificial Sequence: Synthetic oligonucleotide
tgagttgtggcggcagtttgaat

SEQ ID NO: 1664 - RNA, 21 nt, synthetic construct
  source 1..21: mol_type = other RNA; note = Description of Artificial Sequence: Synthetic oligonucleotide
ttcaaactgccgccacaactc

SEQ ID NO: 1665 - RNA, 23 nt, synthetic construct
  source 1..23: mol_type = other RNA; note = Description of Artificial Sequence: Synthetic oligonucleotide
gagttgtggcggcagtttgaatc

SEQ ID NO: 1666 - RNA, 21 nt, synthetic construct
  source 1..21: mol_type = other RNA; note = Description of Artificial Sequence: Synthetic oligonucleotide
gggaagatatcaaatggctga

SEQ ID NO: 1667 - RNA, 23 nt, synthetic construct
  source 1..23: mol_type = other RNA; note = Description of Artificial Sequence: Synthetic oligonucleotide
tcagccatttgatatcttcccag

SEQ ID NO: 1668 - RNA, 21 nt, synthetic construct
  source 1..21: mol_type = other RNA; note = Description of Artificial Sequence: Synthetic oligonucleotide
ggaagatatcaaatggctgag

SEQ ID NO: 1669 - RNA, 23 nt, synthetic construct
  source 1..23: mol_type = other RNA; note = Description of Artificial Sequence: Synthetic oligonucleotide
ctcagccatttgatatcttccca

SEQ ID NO: 1670 - RNA, 21 nt, synthetic construct
  source 1..21: mol_type = other RNA; note = Description of Artificial Sequence: Synthetic oligonucleotide
agctgggaagatatcaaatgg

SEQ ID NO: 1671 - RNA, 23 nt, synthetic construct
  source 1..23: mol_type = other RNA; note = Description of Artificial Sequence: Synthetic oligonucleotide
ccatttgatatcttcccagctga

SEQ ID NO: 1672 - RNA, 21 nt, synthetic construct
  source 1..21: mol_type = other RNA; note = Description of Artificial Sequence: Synthetic oligonucleotide
cagctgggaagatatcaaatg

SEQ ID NO: 1673 - RNA, 23 nt, synthetic construct
  source 1..23: mol_type = other RNA; note = Description of Artificial Sequence: Synthetic oligonucleotide
catttgatatcttcccagctgat

SEQ ID NO: 1674 - RNA, 21 nt, synthetic construct
  source 1..21: mol_type = other RNA; note = Description of Artificial Sequence: Synthetic oligonucleotide
aatcagtacttccaaagtcta

SEQ ID NO: 1675 - RNA, 23 nt, synthetic construct
  source 1..23: mol_type = other RNA; note = Description of Artificial Sequence: Synthetic oligonucleotide
tagactttggaagtactgattta

SEQ ID NO: 1676 - RNA, 21 nt, synthetic construct
  source 1..21: mol_type = other RNA; note = Description of Artificial Sequence: Synthetic oligonucleotide
atcagtacttccaaagtctat

SEQ ID NO: 1677 - RNA, 23 nt, synthetic construct
  source 1..23: mol_type = other RNA; note = Description of Artificial Sequence: Synthetic oligonucleotide
atagactttggaagtactgattt

SEQ ID NO: 1678 - RNA, 21 nt, synthetic construct
  source 1..21: mol_type = other RNA; note = Description of Artificial Sequence: Synthetic oligonucleotide
gctaaatcagtacttccaaag

SEQ ID NO: 1679 - RNA, 23 nt, synthetic construct
  source 1..23: mol_type = other RNA; note = Description of Artificial Sequence: Synthetic oligonucleotide
ctttggaagtactgatttagcat

SEQ ID NO: 1680 - RNA, 21 nt, synthetic construct
  source 1..21: mol_type = other RNA; note = Description of Artificial Sequence: Synthetic oligonucleotide
tgctaaatcagtacttccaaa

SEQ ID NO: 1681 - RNA, 23 nt, synthetic construct
  source 1..23: mol_type = other RNA; note = Description of Artificial Sequence: Synthetic oligonucleotide
tttggaagtactgatttagcatg

SEQ ID NO: 1682 - RNA, 21 nt, synthetic construct
  source 1..21: mol_type = other RNA; note = Description of Artificial Sequence: Synthetic oligonucleotide
tcagcatgccaatatgtgtgg

SEQ ID NO: 1683 - RNA, 23 nt, synthetic construct
  source 1..23: mol_type = other RNA; note = Description of Artificial Sequence: Synthetic oligonucleotide
ccacacatattggcatgctgacc

SEQ ID NO: 1684 - RNA, 21 nt, synthetic construct
  source 1..21: mol_type = other RNA; note = Description of Artificial Sequence: Synthetic oligonucleotide
cagcatgccaatatgtgtggg

SEQ ID NO: 1685 - RNA, 23 nt, synthetic construct
  source 1..23: mol_type = other RNA; note = Description of Artificial Sequence: Synthetic oligonucleotide
cccacacatattggcatgctgac

SEQ ID NO: 1686 - RNA, 21 nt, synthetic construct
  source 1..21: mol_type = other RNA; note = Description of Artificial Sequence: Synthetic oligonucleotide
agggtcagcatgccaatatgt

SEQ ID NO: 1687 - RNA, 23 nt, synthetic construct
  source 1..23: mol_type = other RNA; note = Description of Artificial Sequence: Synthetic oligonucleotide
acatattggcatgctgaccctct

SEQ ID NO: 1688 - RNA, 21 nt, synthetic construct
  source 1..21: mol_type = other RNA; note = Description of Artificial Sequence: Synthetic oligonucleotide
gagggtcagcatgccaatatg

SEQ ID NO: 1689 - RNA, 23 nt, synthetic construct
  source 1..23: mol_type = other RNA; note = Description of Artificial Sequence: Synthetic oligonucleotide
catattggcatgctgaccctctg

SEQ ID NO: 1690 - RNA, 21 nt, synthetic construct
  source 1..21: mol_type = other RNA; note = Description of Artificial Sequence: Synthetic oligonucleotide
gcatatgtggctaaagcaata

SEQ ID NO: 1691 - RNA, 23 nt, synthetic construct
  source 1..23: mol_type = other RNA; note = Description of Artificial Sequence: Synthetic oligonucleotide
tattgctttagccacatatgcag

SEQ ID NO: 1692 - RNA, 21 nt, synthetic construct
  source 1..21: mol_type = other RNA; note = Description of Artificial Sequence: Synthetic oligonucleotide
catatgtggctaaagcaatag

SEQ ID NO: 1693 - RNA, 23 nt, synthetic construct
  source 1..23: mol_type = other RNA; note = Description of Artificial Sequence: Synthetic oligonucleotide
ctattgctttagccacatatgca

SEQ ID NO: 1694 - RNA, 21 nt, synthetic construct
  source 1..21: mol_type = other RNA; note = Description of Artificial Sequence: Synthetic oligonucleotide
tgctgcatatgtggctaaagc

SEQ ID NO: 1695 - RNA, 23 nt, synthetic construct
  source 1..23: mol_type = other RNA; note = Description of Artificial Sequence: Synthetic oligonucleotide
gctttagccacatatgcagcaag

SEQ ID NO: 1696 - RNA, 21 nt, synthetic construct
  source 1..21: mol_type = other RNA; note = Description of Artificial Sequence: Synthetic oligonucleotide
ttgctgcatatgtggctaaag

SEQ ID NO: 1697 - RNA, 23 nt, synthetic construct
  source 1..23: mol_type = other RNA; note = Description of Artificial Sequence: Synthetic oligonucleotide
ctttagccacatatgcagcaagt

SEQ ID NO: 1698 - RNA, 21 nt, synthetic construct
  source 1..21: mol_type = other RNA; note = Description of Artificial Sequence: Synthetic oligonucleotide
aaatgatgaagaaactttggc

SEQ ID NO: 1699 - RNA, 23 nt, synthetic construct
  source 1..23: mol_type = other RNA; note = Description of Artificial Sequence: Synthetic oligonucleotide
gccaaagtttcttcatcatttgc

SEQ ID NO: 1700 - RNA, 21 nt, synthetic construct
  source 1..21: mol_type = other RNA; note = Description of Artificial Sequence: Synthetic oligonucleotide
aatgatgaagaaactttggct

SEQ ID NO: 1701 - RNA, 23 nt, synthetic construct
  source 1..23: mol_type = other RNA; note = Description of Artificial Sequence: Synthetic oligonucleotide
agccaaagtttcttcatcatttg

SEQ ID NO: 1702 - RNA, 21 nt, synthetic construct
  source 1..21: mol_type = other RNA; note = Description of Artificial Sequence: Synthetic oligonucleotide
gggcaaatgatgaagaaactt

SEQ ID NO: 1703 - RNA, 23 nt, synthetic construct
  source 1..23: mol_type = other RNA; note = Description of Artificial Sequence: Synthetic oligonucleotide
aagtttcttcatcatttgcccca

SEQ ID NO: 1704 - RNA, 21 nt, synthetic construct
  source 1..21: mol_type = other RNA; note = Description of Artificial Sequence: Synthetic oligonucleotide
ggggcaaatgatgaagaaact

SEQ ID NO: 1705 - RNA, 23 nt, synthetic construct
  source 1..23: mol_type = other RNA; note = Description of Artificial Sequence: Synthetic oligonucleotide
agtttcttcatcatttgccccag

SEQ ID NO: 1706 - RNA, 21 nt, synthetic construct
  source 1..21: mol_type = other RNA; note = Description of Artificial Sequence: Synthetic oligonucleotide
gagatactaaaggaagaattc

SEQ ID NO: 1707 - RNA, 23 nt, synthetic construct
  source 1..23: mol_type = other RNA; note = Description of Artificial Sequence: Synthetic oligonucleotide
gaattcttcctttagtatctcga

SEQ ID NO: 1708 - RNA, 21 nt, synthetic construct
  source 1..21: mol_type = other RNA; note = Description of Artificial Sequence: Synthetic oligonucleotide
agatactaaaggaagaattcc

SEQ ID NO: 1709 - RNA, 23 nt, synthetic construct
  source 1..23: mol_type = other RNA; note = Description of Artificial Sequence: Synthetic oligonucleotide
ggaattcttcctttagtatctcg

SEQ ID NO: 1710 - RNA, 21 nt, synthetic construct
  source 1..21: mol_type = other RNA; note = Description of Artificial Sequence: Synthetic oligonucleotide
cctcgagatactaaaggaaga

SEQ ID NO: 1711 - RNA, 23 nt, synthetic construct
  source 1..23: mol_type = other RNA; note = Description of Artificial Sequence: Synthetic oligonucleotide
tcttcctttagtatctcgaggac

SEQ ID NO: 1712 - RNA, 21 nt, synthetic construct
  source 1..21: mol_type = other RNA; note = Description of Artificial Sequence: Synthetic oligonucleotide
tcctcgagatactaaaggaag

SEQ ID NO: 1713 - RNA, 23 nt, synthetic construct
  source 1..23: mol_type = other RNA; note = Description of Artificial Sequence: Synthetic oligonucleotide
cttcctttagtatctcgaggaca

SEQ ID NO: 1714 - RNA, 21 nt, synthetic construct
  source 1..21: mol_type = other RNA; note = Description of Artificial Sequence: Synthetic oligonucleotide
acaactcaggatgaaaaattt

SEQ ID NO: 1715 - RNA, 23 nt, synthetic construct
  source 1..23: mol_type = other RNA; note = Description of Artificial Sequence: Synthetic oligonucleotide
aaatttttcatcctgagttgtgg

SEQ ID NO: 1716 - RNA, 21 nt, synthetic construct
  source 1..21: mol_type = other RNA; note = Description of Artificial Sequence: Synthetic oligonucleotide
caactcaggatgaaaaatttt

SEQ ID NO: 1717 - RNA, 23 nt, synthetic construct
  source 1..23: mol_type = other RNA; note = Description of Artificial Sequence: Synthetic oligonucleotide
aaaatttttcatcctgagttgtg

SEQ ID NO: 1718 - RNA, 21 nt, synthetic construct
  source 1..21: mol_type = other RNA; note = Description of Artificial Sequence: Synthetic oligonucleotide
cgccacaactcaggatgaaaa

SEQ ID NO: 1719 - RNA, 23 nt, synthetic construct
  source 1..23: mol_type = other RNA; note = Description of Artificial Sequence: Synthetic oligonucleotide
ttttcatcctgagttgtggcggc

SEQ ID NO: 1720 - RNA, 21 nt, synthetic construct
  source 1..21: mol_type = other RNA; note = Description of Artificial Sequence: Synthetic oligonucleotide
ccgccacaactcaggatgaaa

SEQ ID NO: 1721 - RNA, 23 nt, synthetic construct
  source 1..23: mol_type = other RNA; note = Description of Artificial Sequence: Synthetic oligonucleotide
tttcatcctgagttgtggcggca

SEQ ID NO: 1722 - RNA, 21 nt, synthetic construct
  source 1..21: mol_type = other RNA; note = Description of Artificial Sequence: Synthetic oligonucleotide
agggaaggtggaagtcttcct

SEQ ID NO: 1723 - RNA, 23 nt, synthetic construct
  source 1..23: mol_type = other RNA; note = Description of Artificial Sequence: Synthetic oligonucleotide
aggaagacttccaccttcccttc

SEQ ID NO: 1724 - RNA, 21 nt, synthetic construct
  source 1..21: mol_type = other RNA; note = Description of Artificial Sequence: Synthetic oligonucleotide
gggaaggtggaagtcttcctg

SEQ ID NO: 1725 - RNA, 23 nt, synthetic construct
  source 1..23: mol_type = other RNA; note = Description of Artificial Sequence: Synthetic oligonucleotide
caggaagacttccaccttccctt

SEQ ID NO: 1726 - RNA, 21 nt, synthetic construct
  source 1..21: mol_type = other RNA; note = Description of Artificial Sequence: Synthetic oligonucleotide
tggaagggaaggtggaagtct

SEQ ID NO: 1727 - RNA, 23 nt, synthetic construct
  source 1..23: mol_type = other RNA; note = Description of Artificial Sequence: Synthetic oligonucleotide
agacttccaccttcccttccaca

SEQ ID NO: 1728 - RNA, 21 nt, synthetic construct
  source 1..21: mol_type = other RNA; note = Description of Artificial Sequence: Synthetic oligonucleotide
gtggaagggaaggtggaagtc

SEQ ID NO: 1729 - RNA, 23 nt, synthetic construct
  source 1..23: mol_type = other RNA; note = Description of Artificial Sequence: Synthetic oligonucleotide
gacttccaccttcccttccacag

SEQ ID NO: 1730 - RNA, 21 nt, synthetic construct
  source 1..21: mol_type = other RNA; note = Description of Artificial Sequence: Synthetic oligonucleotide
ggcgagcttgccactgtgaga

SEQ ID NO: 1731 - RNA, 23 nt, synthetic construct
  source 1..23: mol_type = other RNA; note = Description of Artificial Sequence: Synthetic oligonucleotide
tctcacagtggcaagctcgccgt

SEQ ID NO: 1732 - RNA, 21 nt, synthetic construct
  source 1..21: mol_type = other RNA; note = Description of Artificial Sequence: Synthetic oligonucleotide
gcgagcttgccactgtgagag

SEQ ID NO: 1733 - RNA, 23 nt, synthetic construct
  source 1..23: mol_type = other RNA; note = Description of Artificial Sequence: Synthetic oligonucleotide
ctctcacagtggcaagctcgccg

SEQ ID NO: 1734 - RNA, 21 nt, synthetic construct
  source 1..21: mol_type = other RNA; note = Description of Artificial Sequence: Synthetic oligonucleotide
ggacggcgagcttgccactgt

SEQ ID NO: 1735 - RNA, 23 nt, synthetic construct
  source 1..23: mol_type = other RNA; note = Description of Artificial Sequence: Synthetic oligonucleotide
acagtggcaagctcgccgtccac

SEQ ID NO: 1736 - RNA, 21 nt, synthetic construct
  source 1..21: mol_type = other RNA; note = Description of Artificial Sequence: Synthetic oligonucleotide
tggacggcgagcttgccactg

SEQ ID NO: 1737 - RNA, 23 nt, synthetic construct
  source 1..23: mol_type = other RNA; note = Description of Artificial Sequence: Synthetic oligonucleotide
cagtggcaagctcgccgtccaca

SEQ ID NO: 1738 - RNA, 21 nt, synthetic construct
  source 1..21: mol_type = other RNA; note = Description of Artificial Sequence: Synthetic oligonucleotide
atgtgcgtaacagattcaaac

SEQ ID NO: 1739 - RNA, 23 nt, synthetic construct
  source 1..23: mol_type = other RNA; note = Description of Artificial Sequence: Synthetic oligonucleotide
gtttgaatctgttacgcacatca

SEQ ID NO: 1740 - RNA, 21 nt, synthetic construct
  source 1..21: mol_type = other RNA; note = Description of Artificial Sequence: Synthetic oligonucleotide
tgtgcgtaacagattcaaact

SEQ ID NO: 1741 - RNA, 23 nt, synthetic construct
  source 1..23: mol_type = other RNA; note = Description of Artificial Sequence: Synthetic oligonucleotide
agtttgaatctgttacgcacatc

SEQ ID NO: 1742 - RNA, 21 nt, synthetic construct
  source 1..21: mol_type = other RNA; note = Description of Artificial Sequence: Synthetic oligonucleotide
gatgatgtgcgtaacagattc

SEQ ID NO: 1743 - RNA, 23 nt, synthetic construct
  source 1..23: mol_type = other RNA; note = Description of Artificial Sequence: Synthetic oligonucleotide
gaatctgttacgcacatcatcca

SEQ ID NO: 1744 - RNA, 21 nt, synthetic construct
  source 1..21: mol_type = other RNA; note = Description of Artificial Sequence: Synthetic oligonucleotide
ggatgatgtgcgtaacagatt

SEQ ID NO: 1745 - RNA, 23 nt, synthetic construct
  source 1..23: mol_type = other RNA; note = Description of Artificial Sequence: Synthetic oligonucleotide
aatctgttacgcacatcatccag

SEQ ID NO: 1746 - RNA, 21 nt, synthetic construct
  source 1..21: mol_type = other RNA; note = Description of Artificial Sequence: Synthetic oligonucleotide
gggtcagcatgccaatatgtg

SEQ ID NO: 1747 - RNA, 23 nt, synthetic construct
  source 1..23: mol_type = other RNA; note = Description of Artificial Sequence: Synthetic oligonucleotide
cacatattggcatgctgaccctc

SEQ ID NO: 1748 - RNA, 21 nt, synthetic construct
  source 1..21: mol_type = other RNA; note = Description of Artificial Sequence: Synthetic oligonucleotide
ggtcagcatgccaatatgtgt

SEQ ID NO: 1749 - RNA, 23 nt, synthetic construct
  source 1..23: mol_type = other RNA; note = Description of Artificial Sequence: Synthetic oligonucleotide
acacatattggcatgctgaccct

SEQ ID NO: 1750 - RNA, 21 nt, synthetic construct
  source 1..21: mol_type = other RNA; note = Description of Artificial Sequence: Synthetic oligonucleotide
cagagggtcagcatgccaata

SEQ ID NO: 1751 - RNA, 23 nt, synthetic construct
  source 1..23: mol_type = other RNA; note = Description of Artificial Sequence: Synthetic oligonucleotide
tattggcatgctgaccctctgtc

SEQ ID NO: 1752 - RNA, 21 nt, synthetic construct
  source 1..21: mol_type = other RNA; note = Description of Artificial Sequence: Synthetic oligonucleotide
acagagggtcagcatgccaat

SEQ ID NO: 1753 - RNA, 23 nt, synthetic construct
  source 1..23: mol_type = other RNA; note = Description of Artificial Sequence: Synthetic oligonucleotide
attggcatgctgaccctctgtcc

SEQ ID NO: 1754 - RNA, 21 nt, synthetic construct
  source 1..21: mol_type = other RNA; note = Description of Artificial Sequence: Synthetic oligonucleotide
gcttgaatgggatcttggtgt

SEQ ID NO: 1755 - RNA, 23 nt, synthetic construct
  source 1..23: mol_type = other RNA; note = Description of Artificial Sequence: Synthetic oligonucleotide
acaccaagatcccattcaagcca

SEQ ID NO: 1756 - RNA, 21 nt, synthetic construct
  source 1..21: mol_type = other RNA; note = Description of Artificial Sequence: Synthetic oligonucleotide
cttgaatgggatcttggtgtc

SEQ ID NO: 1757 - RNA, 23 nt, synthetic construct
  source 1..23: mol_type = other RNA; note = Description of Artificial Sequence: Synthetic oligonucleotide
gacaccaagatcccattcaagcc

SEQ ID NO: 1758 - RNA, 21 nt, synthetic construct
  source 1..21: mol_type = other RNA; note = Description of Artificial Sequence: Synthetic oligonucleotide
catggcttgaatgggatcttg

SEQ ID NO: 1759 - RNA, 23 nt, synthetic construct
  source 1..23: mol_type = other RNA; note = Description of Artificial Sequence: Synthetic oligonucleotide
caagatcccattcaagccatgtt

SEQ ID NO: 1760 - RNA, 21 nt, synthetic construct
  source 1..21: mol_type = other RNA; note = Description of Artificial Sequence: Synthetic oligonucleotide
acatggcttgaatgggatctt

SEQ ID NO: 1761 - RNA, 23 nt, synthetic construct
  source 1..23: mol_type = other RNA; note = Description of Artificial Sequence: Synthetic oligonucleotide
aagatcccattcaagccatgttt

SEQ ID NO: 1762 - RNA, 21 nt, synthetic construct
  source 1..21: mol_type = other RNA; note = Description of Artificial Sequence: Synthetic oligonucleotide
tcaaatggctgagaagactga

SEQ ID NO: 1763 - RNA, 23 nt, synthetic construct
  source 1..23: mol_type = other RNA; note = Description of Artificial Sequence: Synthetic oligonucleotide
tcagtcttctcagccatttgata

SEQ ID NO: 1764 - RNA, 21 nt, synthetic construct
  source 1..21: mol_type = other RNA; note = Description of Artificial Sequence: Synthetic oligonucleotide
caaatggctgagaagactgac

SEQ ID NO: 1765 - RNA, 23 nt, synthetic construct
  source 1..23: mol_type = other RNA; note = Description of Artificial Sequence: Synthetic oligonucleotide
gtcagtcttctcagccatttgat

SEQ ID NO: 1766 - RNA, 21 nt, synthetic construct
  source 1..21: mol_type = other RNA; note = Description of Artificial Sequence: Synthetic oligonucleotide
gatatcaaatggctgagaaga

SEQ ID NO: 1767 - RNA, 23 nt, synthetic construct
  source 1..23: mol_type = other RNA; note = Description of Artificial Sequence: Synthetic oligonucleotide
tcttctcagccatttgatatctt

SEQ ID NO: 1768 - RNA, 21 nt, synthetic construct
  source 1..21: mol_type = other RNA; note = Description of Artificial Sequence: Synthetic oligonucleotide
agatatcaaatggctgagaag

SEQ ID NO: 1769 - RNA, 23 nt, synthetic construct
  source 1..23: mol_type = other RNA; note = Description of Artificial Sequence: Synthetic oligonucleotide
cttctcagccatttgatatcttc

SEQ ID NO: 1770 - RNA, 21 nt, synthetic construct
  source 1..21: mol_type = other RNA; note = Description of Artificial Sequence: Synthetic oligonucleotide
gaaagtcatcgacaagacatt

SEQ ID NO: 1771 - RNA, 23 nt, synthetic construct
  source 1..23: mol_type = other RNA; note = Description of Artificial Sequence: Synthetic oligonucleotide
aatgtcttgtcgatgactttcac

SEQ ID NO: 1772 - RNA, 21 nt, synthetic construct
  source 1..21: mol_type = other RNA; note = Description of Artificial Sequence: Synthetic oligonucleotide
aaagtcatcgacaagacattg

SEQ ID NO: 1773 - RNA, 23 nt, synthetic construct
  source 1..23: mol_type = other RNA; note = Description of Artificial Sequence: Synthetic oligonucleotide
caatgtcttgtcgatgactttca

SEQ ID NO: 1774 - RNA, 21 nt, synthetic construct
  source 1..21: mol_type = other RNA; note = Description of Artificial Sequence: Synthetic oligonucleotide
atgtgaaagtcatcgacaaga

SEQ ID NO: 1775 - RNA, 23 nt, synthetic construct
  source 1..23: mol_type = other RNA; note = Description of Artificial Sequence: Synthetic oligonucleotide
tcttgtcgatgactttcacattc

SEQ ID NO: 1776 - RNA, 21 nt, synthetic construct
  source 1..21: mol_type = other RNA; note = Description of Artificial Sequence: Synthetic oligonucleotide
aatgtgaaagtcatcgacaag

SEQ ID NO: 1777 - RNA, 23 nt, synthetic construct
  source 1..23: mol_type = other RNA; note = Description of Artificial Sequence: Synthetic oligonucleotide
cttgtcgatgactttcacattct

SEQ ID NO: 1778 - RNA, 21 nt, synthetic construct
  source 1..21: mol_type = other RNA; note = Description of Artificial Sequence: Synthetic oligonucleotide
ggctaatttgtatcaatgatt

SEQ ID NO: 1779 - RNA, 23 nt, synthetic construct
  source 1..23: mol_type = other RNA; note = Description of Artificial Sequence: Synthetic oligonucleotide
aatcattgatacaaattagccgg

SEQ ID NO: 1780 - RNA, 21 nt, synthetic construct
  source 1..21: mol_type = other RNA; note = Description of Artificial Sequence: Synthetic oligonucleotide
gctaatttgtatcaatgatta

SEQ ID NO: 1781 - RNA, 23 nt, synthetic construct
  source 1..23: mol_type = other RNA; note = Description of Artificial Sequence: Synthetic oligonucleotide
taatcattgatacaaattagccg

SEQ ID NO: 1782 - RNA, 21 nt, synthetic construct
  source 1..21: mol_type = other RNA; note = Description of Artificial Sequence: Synthetic oligonucleotide
ccccggctaatttgtatcaat

SEQ ID NO: 1783 - RNA, 23 nt, synthetic construct
  source 1..23: mol_type = other RNA; note = Description of Artificial Sequence: Synthetic oligonucleotide
attgatacaaattagccggggga

SEQ ID NO: 1784 - RNA, 21 nt, synthetic construct
  source 1..21: mol_type = other RNA; note = Description of Artificial Sequence: Synthetic oligonucleotide
cccccggctaatttgtatcaa

SEQ ID NO: 1785 - RNA, 23 nt, synthetic construct
  source 1..23: mol_type = other RNA; note = Description of Artificial Sequence: Synthetic oligonucleotide
ttgatacaaattagccgggggag

SEQ ID NO: 1786 - RNA, 21 nt, synthetic construct
  source 1..21: mol_type = other RNA; note = Description of Artificial Sequence: Synthetic oligonucleotide
tgtcgacttctgttttaggac

SEQ ID NO: 1787 - RNA, 23 nt, synthetic construct
  source 1..23: mol_type = other RNA; note = Description of Artificial Sequence: Synthetic oligonucleotide
gtcctaaaacagaagtcgacaga

SEQ ID NO: 1788 - RNA, 21 nt, synthetic construct
  source 1..21: mol_type = other RNA; note = Description of Artificial Sequence: Synthetic oligonucleotide
gtcgacttctgttttaggaca

SEQ ID NO: 1789 - RNA, 23 nt, synthetic construct
  source 1..23: mol_type = other RNA; note = Description of Artificial Sequence: Synthetic oligonucleotide
tgtcctaaaacagaagtcgacag

SEQ ID NO: 1790 - RNA, 21 nt, synthetic construct
  source 1..21: mol_type = other RNA; note = Description of Artificial Sequence: Synthetic oligonucleotide
gatctgtcgacttctgtttta

SEQ ID NO: 1791 - RNA, 23 nt, synthetic construct
  source 1..23: mol_type = other RNA; note = Description of Artificial Sequence: Synthetic oligonucleotide
taaaacagaagtcgacagatctg

SEQ ID NO: 1792 - RNA, 21 nt, synthetic construct
  source 1..21: mol_type = other RNA; note = Description of Artificial Sequence: Synthetic oligonucleotide
agatctgtcgacttctgtttt

SEQ ID NO: 1793 - RNA, 23 nt, synthetic construct
  source 1..23: mol_type = other RNA; note = Description of Artificial Sequence: Synthetic oligonucleotide
aaaacagaagtcgacagatctgt

SEQ ID NO: 1794 - RNA, 21 nt, synthetic construct
  source 1..21: mol_type = other RNA; note = Description of Artificial Sequence: Synthetic oligonucleotide
ccgagaagtcaccaagaagct

SEQ ID NO: 1795 - RNA, 23 nt, synthetic construct
  source 1..23: mol_type = other RNA; note = Description of Artificial Sequence: Synthetic oligonucleotide
agcttcttggtgacttctcggtc

SEQ ID NO: 1796 - RNA, 21 nt, synthetic construct
  source 1..21: mol_type = other RNA; note = Description of Artificial Sequence: Synthetic oligonucleotide
cgagaagtcaccaagaagcta

SEQ ID NO: 1797 - RNA, 23 nt, synthetic construct
  source 1..23: mol_type = other RNA; note = Description of Artificial Sequence: Synthetic oligonucleotide
tagcttcttggtgacttctcggt

SEQ ID NO: 1798 - RNA, 21 nt, synthetic construct
  source 1..21: mol_type = other RNA; note = Description of Artificial Sequence: Synthetic oligonucleotide
aggaccgagaagtcaccaaga

SEQ ID NO: 1799 - RNA, 23 nt, synthetic construct
  source 1..23: mol_type = other RNA; note = Description of Artificial Sequence: Synthetic oligonucleotide
tcttggtgacttctcggtccttg

SEQ ID NO: 1800 - RNA, 21 nt, synthetic construct
  source 1..21: mol_type = other RNA; note = Description of Artificial Sequence: Synthetic oligonucleotide
aaggaccgagaagtcaccaag

SEQ ID NO: 1801 - RNA, 23 nt, synthetic construct
  source 1..23: mol_type = other RNA; note = Description of Artificial Sequence: Synthetic oligonucleotide
cttggtgacttctcggtccttgt

SEQ ID NO: 1802 - RNA, 21 nt, synthetic construct
  source 1..21: mol_type = other RNA; note = Description of Artificial Sequence: Synthetic oligonucleotide
aaacatggcttgaatgggatc

SEQ ID NO: 1803 - RNA, 23 nt, synthetic construct
  source 1..23: mol_type = other RNA; note = Description of Artificial Sequence: Synthetic oligonucleotide
gatcccattcaagccatgtttaa

SEQ ID NO: 1804 - RNA, 21 nt, synthetic construct
  source 1..21: mol_type = other RNA; note = Description of Artificial Sequence: Synthetic oligonucleotide
aacatggcttgaatgggatct

SEQ ID NO: 1805 - RNA, 23 nt, synthetic construct
  source 1..23: mol_type = other RNA; note = Description of Artificial Sequence: Synthetic oligonucleotide
agatcccattcaagccatgttta

SEQ ID NO: 1806 - RNA, 21 nt, synthetic construct
  source 1..21: mol_type = other RNA; note = Description of Artificial Sequence: Synthetic oligonucleotide
tgttaaacatggcttgaatgg

SEQ ID NO: 1807 - RNA, 23 nt, synthetic construct
  source 1..23: mol_type = other RNA; note = Description of Artificial Sequence: Synthetic oligonucleotide
ccattcaagccatgtttaacagc

SEQ ID NO: 1808 - RNA, 21 nt, synthetic construct
  source 1..21: mol_type = other RNA; note = Description of Artificial Sequence: Synthetic oligonucleotide
ctgttaaacatggcttgaatg

SEQ ID NO: 1809 - RNA, 23 nt, synthetic construct
  source 1..23: mol_type = other RNA; note = Description of Artificial Sequence: Synthetic oligonucleotide
cattcaagccatgtttaacagcc

SEQ ID NO: 1810 - RNA, 21 nt, synthetic construct
  source 1..21: mol_type = other RNA; note = Description of Artificial Sequence: Synthetic oligonucleotide
gacttgctgcatatgtggcta

SEQ ID NO: 1811 - RNA, 23 nt, synthetic construct
  source 1..23: mol_type = other RNA; note = Description of Artificial Sequence: Synthetic oligonucleotide
tagccacatatgcagcaagtcca

SEQ ID NO: 1812 - RNA, 21 nt, synthetic construct
  source 1..21: mol_type = other RNA; note = Description of Artificial Sequence: Synthetic oligonucleotide
acttgctgcatatgtggctaa

SEQ ID NO: 1813 - RNA, 23 nt, synthetic construct
  source 1..23: mol_type = other RNA; note = Description of Artificial Sequence: Synthetic oligonucleotide
ttagccacatatgcagcaagtcc

SEQ ID NO: 1814 - RNA, 21 nt, synthetic construct
  source 1..21: mol_type = other RNA; note = Description of Artificial Sequence: Synthetic oligonucleotide
agtggacttgctgcatatgtg

SEQ ID NO: 1815 - RNA, 23 nt, synthetic construct
  source 1..23: mol_type = other RNA; note = Description of Artificial Sequence: Synthetic oligonucleotide
cacatatgcagcaagtccactgt

SEQ ID NO: 1816 - RNA, 21 nt, synthetic construct
  source 1..21: mol_type = other RNA; note = Description of Artificial Sequence: Synthetic oligonucleotide
cagtggacttgctgcatatgt

SEQ ID NO: 1817 - RNA, 23 nt, synthetic construct
  source 1..23: mol_type = other RNA; note = Description of Artificial Sequence: Synthetic oligonucleotide
acatatgcagcaagtccactgtc

SEQ ID NO: 1818 - RNA, 21 nt, synthetic construct
  source 1..21: mol_type = other RNA; note = Description of Artificial Sequence: Synthetic oligonucleotide
taaatcagtacttccaaagtc

SEQ ID NO: 1819 - RNA, 23 nt, synthetic construct
  source 1..23: mol_type = other RNA; note = Description of Artificial Sequence: Synthetic oligonucleotide
gactttggaagtactgatttagc

SEQ ID NO: 1820 - RNA, 21 nt, synthetic construct
  source 1..21: mol_type = other RNA; note = Description of Artificial Sequence: Synthetic oligonucleotide
aaatcagtacttccaaagtct

SEQ ID NO: 1821 - RNA, 23 nt, synthetic construct
  source 1..23: mol_type = other RNA; note = Description of Artificial Sequence: Synthetic oligonucleotide
agactttggaagtactgatttag

SEQ ID NO: 1822 - RNA, 21 nt, synthetic construct
  source 1..21: mol_type = other RNA; note = Description of Artificial Sequence: Synthetic oligonucleotide
atgctaaatcagtacttccaa

SEQ ID NO: 1823 - RNA, 23 nt, synthetic construct
  source 1..23: mol_type = other RNA; note = Description of Artificial Sequence: Synthetic oligonucleotide
ttggaagtactgatttagcatgt

SEQ ID NO: 1824 - RNA, 21 nt, synthetic construct
  source 1..21: mol_type = other RNA; note = Description of Artificial Sequence: Synthetic oligonucleotide
catgctaaatcagtacttcca

SEQ ID NO: 1825 - RNA, 23 nt, synthetic construct
  source 1..23: mol_type = other RNA; note = Description of Artificial Sequence: Synthetic oligonucleotide
tggaagtactgatttagcatgtt

SEQ ID NO: 1826 - RNA, 21 nt, synthetic construct
  source 1..21: mol_type = other RNA; note = Description of Artificial Sequence: Synthetic oligonucleotide
tcctcaattgaagaagtggcg

SEQ ID NO: 1827 - RNA, 23 nt, synthetic construct
  source 1..23: mol_type = other RNA; note = Description of Artificial Sequence: Synthetic oligonucleotide
cgccacttcttcaattgaggagg

SEQ ID NO: 1828 - RNA, 21 nt, synthetic construct
  source 1..21: mol_type = other RNA; note = Description of Artificial Sequence: Synthetic oligonucleotide
cctcaattgaagaagtggcgg

SEQ ID NO: 1829 - RNA, 23 nt, synthetic construct
  source 1..23: mol_type = other RNA; note = Description of Artificial Sequence: Synthetic oligonucleotide
ccgccacttcttcaattgaggag

SEQ ID NO: 1830 - RNA, 21 nt, synthetic construct
  source 1..21: mol_type = other RNA; note = Description of Artificial Sequence: Synthetic oligonucleotide
cacctcctcaattgaagaagt

SEQ ID NO: 1831 - RNA, 23 nt, synthetic construct
  source 1..23: mol_type = other RNA; note = Description of Artificial Sequence: Synthetic oligonucleotide
acttcttcaattgaggaggtggc

SEQ ID NO: 1832 - RNA, 21 nt, synthetic construct
  source 1..21: mol_type = other RNA; note = Description of Artificial Sequence: Synthetic oligonucleotide
ccacctcctcaattgaagaag

SEQ ID NO: 1833 - RNA, 23 nt, synthetic construct
  source 1..23: mol_type = other RNA; note = Description of Artificial Sequence: Synthetic oligonucleotide
cttcttcaattgaggaggtggcc

SEQ ID NO: 1834 - RNA, 21 nt, synthetic construct
  source 1..21: mol_type = other RNA; note = Description of Artificial Sequence: Synthetic oligonucleotide
caagatgtcctcgagatacta

SEQ ID NO: 1835 - RNA, 23 nt, synthetic construct
  source 1..23: mol_type = other RNA; note = Description of Artificial Sequence: Synthetic oligonucleotide
tagtatctcgaggacatcttgaa

SEQ ID NO: 1836 - RNA, 21 nt, synthetic construct
  source 1..21: mol_type = other RNA; note = Description of Artificial Sequence: Synthetic oligonucleotide
aagatgtcctcgagatactaa

SEQ ID NO: 1837 - RNA, 23 nt, synthetic construct
  source 1..23: mol_type = other RNA; note = Description of Artificial Sequence: Synthetic oligonucleotide
ttagtatctcgaggacatcttga

SEQ ID NO: 1838 - RNA, 21 nt, synthetic construct
  source 1..21: mol_type = other RNA; note = Description of Artificial Sequence: Synthetic oligonucleotide
tgttcaagatgtcctcgagat

SEQ ID NO: 1839 - RNA, 23 nt, synthetic construct
  source 1..23: mol_type = other RNA; note = Description of Artificial Sequence: Synthetic oligonucleotide
atctcgaggacatcttgaacacc

SEQ ID NO: 1840 - RNA, 21 nt, synthetic construct
  source 1..21: mol_type = other RNA; note = Description of Artificial Sequence: Synthetic oligonucleotide
gtgttcaagatgtcctcgaga

SEQ ID NO: 1841 - RNA, 23 nt, synthetic construct
  source 1..23: mol_type = other RNA; note = Description of Artificial Sequence: Synthetic oligonucleotide
tctcgaggacatcttgaacacct

SEQ ID NO: 1842 - RNA, 21 nt, synthetic construct
  source 1..21: mol_type = other RNA; note = Description of Artificial Sequence: Synthetic oligonucleotide
acatgctaaatcagtacttcc

SEQ ID NO: 1843 - RNA, 23 nt, synthetic construct
  source 1..23: mol_type = other RNA; note = Description of Artificial Sequence: Synthetic oligonucleotide
ggaagtactgatttagcatgttg

SEQ ID NO: 1844 - RNA, 21 nt, synthetic construct
  source 1..21: mol_type = other RNA; note = Description of Artificial Sequence: Synthetic oligonucleotide
catgctaaatcagtacttcca

SEQ ID NO: 1845 - RNA, 23 nt, synthetic construct
  source 1..23: mol_type = other RNA; note = Description of Artificial Sequence: Synthetic oligonucleotide
tggaagtactgatttagcatgtt

SEQ ID NO: 1846 - RNA, 21 nt, synthetic construct
  source 1..21: mol_type = other RNA; note = Description of Artificial Sequence: Synthetic oligonucleotide
aacaacatgctaaatcagtac

SEQ ID NO: 1847 - RNA, 23 nt, synthetic construct
  source 1..23: mol_type = other RNA; note = Description of Artificial Sequence: Synthetic oligonucleotide
gtactgatttagcatgttgttca

SEQ ID NO: 1848 - RNA, 21 nt, synthetic construct
  source 1..21: mol_type = other RNA; note = Description of Artificial Sequence: Synthetic oligonucleotide
gaacaacatgctaaatcagta

SEQ ID NO: 1849 - RNA, 23 nt, synthetic construct
  source 1..23: mol_type = other RNA; note = Description of Artificial Sequence: Synthetic oligonucleotide
tactgatttagcatgttgttcat

SEQ ID NO: 1850 - RNA, 21 nt, synthetic construct
  source 1..21: mol_type = other RNA; note = Description of Artificial Sequence: Synthetic oligonucleotide
gaaaggcactgatgttctgaa

SEQ ID NO: 1851 - RNA, 23 nt, synthetic construct
  source 1..23: mol_type = other RNA; note = Description of Artificial Sequence: Synthetic oligonucleotide
ttcagaacatcagtgcctttccg

SEQ ID NO: 1852 - RNA, 21 nt, synthetic construct
  source 1..21: mol_type = other RNA; note = Description of Artificial Sequence: Synthetic oligonucleotide
aaaggcactgatgttctgaaa

SEQ ID NO: 1853 - RNA, 23 nt, synthetic construct
  source 1..23: mol_type = other RNA; note = Description of Artificial Sequence: Synthetic oligonucleotide
tttcagaacatcagtgcctttcc

SEQ ID NO: 1854 - RNA, 21 nt, synthetic construct
  source 1..21: mol_type = other RNA; note = Description of Artificial Sequence: Synthetic oligonucleotide
tgcggaaaggcactgatgttc

SEQ ID NO: 1855 - RNA, 23 nt, synthetic construct
  source 1..23: mol_type = other RNA; note = Description of Artificial Sequence: Synthetic oligonucleotide
gaacatcagtgcctttccgcaca

SEQ ID NO: 1856 - RNA, 21 nt, synthetic construct
  source 1..21: mol_type = other RNA; note = Description of Artificial Sequence: Synthetic oligonucleotide
gtgcggaaaggcactgatgtt

SEQ ID NO: 1857 - RNA, 23 nt, synthetic construct
  source 1..23: mol_type = other RNA; note = Description of Artificial Sequence: Synthetic oligonucleotide
aacatcagtgcctttccgcacac

SEQ ID NO: 1858 - RNA, 21 nt, synthetic construct
  source 1..21: mol_type = other RNA; note = Description of Artificial Sequence: Synthetic oligonucleotide
gtcagcatgccaatatgtgtg

SEQ ID NO: 1859 - RNA, 23 nt, synthetic construct
  source 1..23: mol_type = other RNA; note = Description of Artificial Sequence: Synthetic oligonucleotide
cacacatattggcatgctgaccc

SEQ ID NO: 1860 - RNA, 21 nt, synthetic construct
  source 1..21: mol_type = other RNA; note = Description of Artificial Sequence: Synthetic oligonucleotide
tcagcatgccaatatgtgtgg

SEQ ID NO: 1861 - RNA, 23 nt, synthetic construct
  source 1..23: mol_type = other RNA; note = Description of Artificial Sequence: Synthetic oligonucleotide
ccacacatattggcatgctgacc

SEQ ID NO: 1862 - RNA, 21 nt, synthetic construct
  source 1..21: mol_type = other RNA; note = Description of Artificial Sequence: Synthetic oligonucleotide
gagggtcagcatgccaatatg

SEQ ID NO: 1863 - RNA, 23 nt, synthetic construct
  source 1..23: mol_type = other RNA; note = Description of Artificial Sequence: Synthetic oligonucleotide
catattggcatgctgaccctctg

SEQ ID NO: 1864 - RNA, 21 nt, synthetic construct
  source 1..21: mol_type = other RNA; note = Description of Artificial Sequence: Synthetic oligonucleotide
agagggtcagcatgccaatat

SEQ ID NO: 1865 - RNA, 23 nt, synthetic construct
  source 1..23: mol_type = other RNA; note = Description of Artificial Sequence: Synthetic oligonucleotide
atattggcatgctgaccctctgt

SEQ ID NO: 1866 - RNA, 21 nt, synthetic construct
  source 1..21: mol_type = other RNA; note = Description of Artificial Sequence: Synthetic oligonucleotide
gatgctccggaatgttgctga

SEQ ID NO: 1867 - RNA, 23 nt, synthetic construct
  source 1..23: mol_type = other RNA; note = Description of Artificial Sequence: Synthetic oligonucleotide
tcagcaacattccggagcatcct

SEQ ID NO: 1868 - RNA, 21 nt, synthetic construct
  source 1..21: mol_type = other RNA; note = Description of Artificial Sequence: Synthetic oligonucleotide
atgctccggaatgttgctgaa

SEQ ID NO: 1869 - RNA, 23 nt, synthetic construct
  source 1..23: mol_type = other RNA; note = Description of Artificial Sequence: Synthetic oligonucleotide
ttcagcaacattccggagcatcc

SEQ ID NO: 1870 - RNA, 21 nt, synthetic construct
  source 1..21: mol_type = other RNA; note = Description of Artificial Sequence: Synthetic oligonucleotide
caaggatgctccggaatgttg

SEQ ID NO: 1871 - RNA, 23 nt, synthetic construct
  source 1..23: mol_type = other RNA; note = Description of Artificial Sequence: Synthetic oligonucleotide
caacattccggagcatccttgga

SEQ ID NO: 1872 - RNA, 21 nt, synthetic construct
  source 1..21: mol_type = other RNA; note = Description of Artificial Sequence: Synthetic oligonucleotide
ccaaggatgctccggaatgtt

SEQ ID NO: 1873 - RNA, 23 nt, synthetic construct
  source 1..23: mol_type = other RNA; note = Description of Artificial Sequence: Synthetic oligonucleotide
aacattccggagcatccttggat

SEQ ID NO: 1874 - RNA, 21 nt, synthetic construct
  source 1..21: mol_type = other RNA; note = Description of Artificial Sequence: Synthetic oligonucleotide
gcgtaacagattcaaactgcc

SEQ ID NO: 1875 - RNA, 23 nt, synthetic construct
  source 1..23: mol_type = other RNA; note = Description of Artificial Sequence: Synthetic oligonucleotide
ggcagtttgaatctgttacgcac

SEQ ID NO: 1876 - RNA, 21 nt, synthetic construct
  source 1..21: mol_type = other RNA; note = Description of Artificial Sequence: Synthetic oligonucleotide
cgtaacagattcaaactgccg

SEQ ID NO: 1877 - RNA, 23 nt, synthetic construct
  source 1..23: mol_type = other RNA; note = Description of Artificial Sequence: Synthetic oligonucleotide
cggcagtttgaatctgttacgca

SEQ ID NO: 1878 - RNA, 21 nt, synthetic construct
  source 1..21: mol_type = other RNA; note = Description of Artificial Sequence: Synthetic oligonucleotide
atgtgcgtaacagattcaaac

SEQ ID NO: 1879 - RNA, 23 nt, synthetic construct
  source 1..23: mol_type = other RNA; note = Description of Artificial Sequence: Synthetic oligonucleotide
gtttgaatctgttacgcacatca

SEQ ID NO: 1880 - RNA, 21 nt, synthetic construct
  source 1..21: mol_type = other RNA; note = Description of Artificial Sequence: Synthetic oligonucleotide
gatgtgcgtaacagattcaaa

SEQ ID NO: 1881 - RNA, 23 nt, synthetic construct
  source 1..23: mol_type = other RNA; note = Description of Artificial Sequence: Synthetic oligonucleotide
tttgaatctgttacgcacatcat

SEQ ID NO: 1882 - RNA, 21 nt, synthetic construct
  source 1..21: mol_type = other RNA; note = Description of Artificial Sequence: Synthetic oligonucleotide
agagaagatgggctacaaggc

SEQ ID NO: 1883 - RNA, 23 nt, synthetic construct
  source 1..23: mol_type = other RNA; note = Description of Artificial Sequence: Synthetic oligonucleotide
gccttgtagcccatcttctctgc

SEQ ID NO: 1884 - RNA, 21 nt, synthetic construct
  source 1..21: mol_type = other RNA; note = Description of Artificial Sequence: Synthetic oligonucleotide
gagaagatgggctacaaggcc

SEQ ID NO: 1885 - RNA, 23 nt, synthetic construct
  source 1..23: mol_type = other RNA; note = Description of Artificial Sequence: Synthetic oligonucleotide
ggccttgtagcccatcttctctg

SEQ ID NO: 1886 - RNA, 21 nt, synthetic construct
  source 1..21: mol_type = other RNA; note = Description of Artificial Sequence: Synthetic oligonucleotide
aggcagagaagatgggctaca

SEQ ID NO: 1887 - RNA, 23 nt, synthetic construct
  source 1..23: mol_type = other RNA; note = Description of Artificial Sequence: Synthetic oligonucleotide
tgtagcccatcttctctgcctgc

SEQ ID NO: 1888 - RNA, 21 nt, synthetic construct
  source 1..21: mol_type = other RNA; note = Description of Artificial Sequence: Synthetic oligonucleotide
caggcagagaagatgggctac

SEQ ID NO: 1889 - RNA, 23 nt, synthetic construct
  source 1..23: mol_type = other RNA; note = Description of Artificial Sequence: Synthetic oligonucleotide
gtagcccatcttctctgcctgcc

SEQ ID NO: 1890 - RNA, 21 nt, synthetic construct
  source 1..21: mol_type = other RNA; note = Description of Artificial Sequence: Synthetic oligonucleotide
  modified_base 1: mod_base = OTHER; note = 2'-O-methyladenosine-3'-phosphorothioate
  modified_base 2: mod_base = OTHER; note = 2'-O-methyluridine-3'-phosphorothioate
  modified_base 3: mod_base = OTHER; note = 2'-O-methylguanosine-3'-phosphate
  modified_base 4: mod_base = OTHER; note = 2'-O-methyluridine-3'-phosphate
  modified_base 5: mod_base = OTHER; note = 2'-O-methyladenosine-3'-phosphate
  modified_base 6: mod_base = OTHER; note = 2'-O-methyluridine-3'-phosphate
  modified_base 7: mod_base = OTHER; note = 2'-fluoroguanosine-3'-phosphate
  modified_base 8: mod_base = OTHER; note = 2'-O-methyluridine-3'-phosphate
  modified_base 9: mod_base = OTHER; note = 2'-fluorouridine-3'-phosphate
  modified_base 10: mod_base = OTHER; note = 2'-fluoroadenosine-3'-phosphate
  modified_base 11: mod_base = OTHER; note = 2'-fluorocytidine-3'-phosphate
  modified_base 12: mod_base = OTHER; note = 2'-O-methyluridine-3'-phosphate
  modified_base 13: mod_base = OTHER; note = 2'-O-methyluridine-3'-phosphate
  modified_base 14: mod_base = OTHER; note = 2'-O-methylcytidine-3'-phosphate
  modified_base 15: mod_base = OTHER; note = 2'-O-methyluridine-3'-phosphate
  modified_base 16: mod_base = OTHER; note = 2'-O-methyluridine-3'-phosphate
  modified_base 17: mod_base = OTHER; note = 2'-O-methyladenosine-3'-phosphate
  modified_base 18: mod_base = OTHER; note = 2'-O-methylguanosine-3'-phosphate
  modified_base 19: mod_base = OTHER; note = 2'-O-methyladenosine-3'-phosphate
  modified_base 20: mod_base = OTHER; note = 2'-O-methylguanosine-3'-phosphate
  modified_base 21: mod_base = OTHER; note = 2'-O-methyladenosine-3'-phosphate N-[tris(GalNAc-alkyl)-amidodecanoyl)]-4-hydroxyprolinol Hyp-(GalNAc-alkyl)3
atgtatgttacttcttagaga

SEQ ID NO: 1891 - RNA, 23 nt, synthetic construct
  source 1..23: mol_type = other RNA; note = Description of Artificial Sequence: Synthetic oligonucleotide
  modified_base 1: mod_base = OTHER; note = 2'-O-methyluridine-3'-phosphorothioate
  modified_base 2: mod_base = OTHER; note = 2'-fluorocytidine-3'-phosphorothioate
  modified_base 3: mod_base = OTHER; note = 2'-O-methyluridine-3'-phosphate
  modified_base 4: mod_base = OTHER; note = 2'-O-methylcytidine-3'-phosphate
  modified_base 5: mod_base = OTHER; note = 2'-O-methyluridine-3'-phosphate
  modified_base 6: mod_base = OTHER; note = 2'-fluoroadenosine-3'-phosphate
  modified_base 7: mod_base = OTHER; note = 2'-O-methyladenosine-3'-phosphate
  modified_base 8: mod_base = OTHER; note = 2'-fluoroguanosine-3'-phosphate
  modified_base 9: mod_base = OTHER; note = 2'-fluoroadenosine-3'-phosphate
  modified_base 10: mod_base = OTHER; note = 2'-O-methyladenosine-3'-phosphate
  modified_base 11: mod_base = OTHER; note = 2'-O-methylguanosine-3'-phosphate
  modified_base 12: mod_base = OTHER; note = 2'-O-methyluridine-3'-phosphate
  modified_base 13: mod_base = OTHER; note = 2'-O-methyladenosine-3'-phosphate
  modified_base 14: mod_base = OTHER; note = 2'-fluoroadenosine-3'-phosphate
  modified_base 15: mod_base = OTHER; note = 2'-O-methylcytidine-3'-phosphate
  modified_base 16: mod_base = OTHER; note = 2'-fluoroadenosine-3'-phosphate
  modified_base 17: mod_base = OTHER; note = 2'-O-methyluridine-3'-phosphate
  modified_base 18: mod_base = OTHER; note = 2'-O-methyladenosine-3'-phosphate
  modified_base 19: mod_base = OTHER; note = 2'-O-methylcytidine-3'-phosphate
  modified_base 20: mod_base = OTHER; note = 2'-O-methyladenosine-3'-phosphate
  modified_base 21: mod_base = OTHER; note = 2'-O-methyluridine-3'-phosphorothioate
  modified_base 22: mod_base = OTHER; note = 2'-O-methylcytidine-3'-phosphorothioate
  modified_base 23: mod_base = OTHER; note = 2'-O-methylcytidine-3'-phosphate
tctctaagaagtaacatacatcc

SEQ ID NO: 1892 - RNA, 21 nt, synthetic construct
  source 1..21: mol_type = other RNA; note = Description of Artificial Sequence: Synthetic oligonucleotide
  modified_base 1: mod_base = OTHER; note = 2'-O-methyluridine-3'-phosphorothioate
  modified_base 2: mod_base = OTHER; note = 2'-O-methylguanosine-3'-phosphorothioate
  modified_base 3: mod_base = OTHER; note = 2'-O-methyluridine-3'-phosphate
  modified_base 4: mod_base = OTHER; note = 2'-O-methyladenosine-3'-phosphate
  modified_base 5: mod_base = OTHER; note = 2'-O-methyluridine-3'-phosphate
  modified_base 6: mod_base = OTHER; note = 2'-O-methylguanosine-3'-phosphate
  modified_base 7: mod_base = OTHER; note = 2'-fluorouridine-3'-phosphate
  modified_base 8: mod_base = OTHER; note = 2'-O-methyluridine-3'-phosphate
  modified_base 9: mod_base = OTHER; note = 2'-fluoroadenosine-3'-phosphate
  modified_base 10: mod_base = OTHER; note = 2'-fluorocytidine-3'-phosphate
  modified_base 11: mod_base = OTHER; note = 2'-fluorouridine-3'-phosphate
  modified_base 12: mod_base = OTHER; note = 2'-O-methyluridine-3'-phosphate
  modified_base 13: mod_base = OTHER; note = 2'-O-methylcytidine-3'-phosphate
  modified_base 14: mod_base = OTHER; note = 2'-O-methyluridine-3'-phosphate
  modified_base 15: mod_base = OTHER; note = 2'-O-methyluridine-3'-phosphate
  modified_base 16: mod_base = OTHER; note = 2'-O-methyladenosine-3'-phosphate
  modified_base 17: mod_base = OTHER; note = 2'-O-methylguanosine-3'-phosphate
  modified_base 18: mod_base = OTHER; note = 2'-O-methyladenosine-3'-phosphate
  modified_base 19: mod_base = OTHER; note = 2'-O-methylguanosine-3'-phosphate
  modified_base 20: mod_base = OTHER; note = 2'-O-methyladenosine-3'-phosphate
  modified_base 21: mod_base = OTHER; note = 2'-O-methylguanosine-3'-phosphate N-[tris(GalNAc-alkyl)-amidodecanoyl)]-4-hydroxyprolinol Hyp-(GalNAc-alkyl)3
tgtatgttacttcttagagag

SEQ ID NO: 1893 - RNA, 23 nt, synthetic construct
  source 1..23: mol_type = other RNA; note = Description of Artificial Sequence: Synthetic oligonucleotide
  modified_base 1: mod_base = OTHER; note = 2'-O-methylcytidine-3'-phosphorothioate
  modified_base 2: mod_base = OTHER; note = 2'-fluorouridine -3'-phosphorothioate
  modified_base 3: mod_base = OTHER; note = 2'-O-methylcytidine-3'-phosphate
  modified_base 4: mod_base = OTHER; note = 2'-O-methyluridine-3'-phosphate
  modified_base 5: mod_base = OTHER; note = 2'-O-methylcytidine-3'-phosphate
  modified_base 6: mod_base = OTHER; note = 2'-fluorouridine-3'-phosphate
  modified_base 7: mod_base = OTHER; note = 2'-O-methyladenosine-3'-phosphate
  modified_base 8: mod_base = OTHER; note = 2'-fluoroadenosine-3'-phosphate
  modified_base 9: mod_base = OTHER; note = 2'-fluoroguanosine-3'-phosphate
  modified_base 10: mod_base = OTHER; note = 2'-O-methyladenosine-3'-phosphate
  modified_base 11: mod_base = OTHER; note = 2'-O-methyladenosine-3'-phosphate
  modified_base 12: mod_base = OTHER; note = 2'-O-methylguanosine-3'-phosphate
  modified_base 13: mod_base = OTHER; note = 2'-O-methyluridine-3'-phosphate
  modified_base 14: mod_base = OTHER; note = 2'-fluoroadenosine-3'-phosphate
  modified_base 15: mod_base = OTHER; note = 2'-O-methyladenosine-3'-phosphate
  modified_base 16: mod_base = OTHER; note = 2'-fluorocytidine-3'-phosphate
  modified_base 17: mod_base = OTHER; note = 2'-O-methyladenosine-3'-phosphate
  modified_base 18: mod_base = OTHER; note = 2'-O-methyluridine-3'-phosphate
  modified_base 19: mod_base = OTHER; note = 2'-O-methyladenosine-3'-phosphate
  modified_base 20: mod_base = OTHER; note = 2'-O-methylcytidine-3'-phosphate
  modified_base 21: mod_base = OTHER; note = 2'-O-methyladenosine-3'-phosphorothioate
  modified_base 22: mod_base = OTHER; note = 2'-O-methyluridine-3'-phosphorothioate
  modified_base 23: mod_base = OTHER; note = 2'-O-methylcytidine-3'-phosphate
ctctctaagaagtaacatacatc

SEQ ID NO: 1894 - RNA, 21 nt, synthetic construct
  source 1..21: mol_type = other RNA; note = Description of Artificial Sequence: Synthetic oligonucleotide
  modified_base 1: mod_base = OTHER; note = 2'-O-methyluridine-3'-phosphorothioate
  modified_base 2: mod_base = OTHER; note = 2'-O-methyladenosine-3'-phosphorothioate
  modified_base 3: mod_base = OTHER; note = 2'-O-methylguanosine-3'-phosphate
  modified_base 4: mod_base = OTHER; note = 2'-O-methylguanosine-3'-phosphate
  modified_base 5: mod_base = OTHER; note = 2'-O-methyladenosine-3'-phosphate
  modified_base 6: mod_base = OTHER; note = 2'-O-methyluridine-3'-phosphate
  modified_base 7: mod_base = OTHER; note = 2'-fluoroguanosine-3'-phosphate
  modified_base 8: mod_base = OTHER; note = 2'-O-methyluridine-3'-phosphate
  modified_base 9: mod_base = OTHER; note = 2'-fluoroadenosine-3'-phosphate
  modified_base 10: mod_base = OTHER; note = 2'-fluorouridine-3'-phosphate
  modified_base 11: mod_base = OTHER; note = 2'-fluoroguanosine-3'-phosphate
  modified_base 12: mod_base = OTHER; note = 2'-O-methyluridine-3'-phosphate
  modified_base 13: mod_base = OTHER; note = 2'-O-methyluridine-3'-phosphate
  modified_base 14: mod_base = OTHER; note = 2'-O-methyladenosine-3'-phosphate
  modified_base 15: mod_base = OTHER; note = 2'-O-methylcytidine-3'-phosphate
  modified_base 16: mod_base = OTHER; note = 2'-O-methyluridine-3'-phosphate
  modified_base 17: mod_base = OTHER; note = 2'-O-methyluridine-3'-phosphate
  modified_base 18: mod_base = OTHER; note = 2'-O-methylcytidine-3'-phosphate
  modified_base 19: mod_base = OTHER; note = 2'-O-methyluridine-3'-phosphate
  modified_base 20: mod_base = OTHER; note = 2'-O-methyluridine-3'-phosphate
  modified_base 21: mod_base = OTHER; note = 2'-O-methyladenosine-3'-phosphate N-[tris(GalNAc-alkyl)-amidodecanoyl)]-4-hydroxyprolinol Hyp-(GalNAc-alkyl)3
taggatgtatgttacttctta

SEQ ID NO: 1895 - RNA, 23 nt, synthetic construct
  source 1..23: mol_type = other RNA; note = Description of Artificial Sequence: Synthetic oligonucleotide
  modified_base 1: mod_base = OTHER; note = 2'-O-methyluridine-3'-phosphorothioate
  modified_base 2: mod_base = OTHER; note = 2'-fluoroadenosine-3'-phosphorothioate
  modified_base 3: mod_base = OTHER; note = 2'-O-methyladenosine-3'-phosphate
  modified_base 4: mod_base = OTHER; note = 2'-O-methylguanosine-3'-phosphate
  modified_base 5: mod_base = OTHER; note = 2'-O-methyladenosine-3'-phosphate
  modified_base 6: mod_base = OTHER; note = 2'-fluoroadenosine-3'-phosphate
  modified_base 7: mod_base = OTHER; note = 2'-O-methylguanosine-3'-phosphate
  modified_base 8: mod_base = OTHER; note = 2'-fluorouridine-3'-phosphate
  modified_base 9: mod_base = OTHER; note = 2'-fluoroadenosine-3'-phosphate
  modified_base 10: mod_base = OTHER; note = 2'-O-methyladenosine-3'-phosphate
  modified_base 11: mod_base = OTHER; note = 2'-O-methylcytidine-3'-phosphate
  modified_base 12: mod_base = OTHER; note = 2'-O-methyladenosine-3'-phosphate
  modified_base 13: mod_base = OTHER; note = 2'-O-methyluridine-3'-phosphate
  modified_base 14: mod_base = OTHER; note = 2'-fluoroadenosine-3'-phosphate
  modified_base 15: mod_base = OTHER; note = 2'-O-methylcytidine-3'-phosphate
  modified_base 16: mod_base = OTHER; note = 2'-fluoroadenosine-3'-phosphate
  modified_base 17: mod_base = OTHER; note = 2'-O-methyluridine-3'-phosphate
  modified_base 18: mod_base = OTHER; note = 2'-O-methylcytidine-3'-phosphate
  modified_base 19: mod_base = OTHER; note = 2'-O-methylcytidine-3'-phosphate
  modified_base 20: mod_base = OTHER; note = 2'-O-methyluridine-3'-phosphate
  modified_base 21: mod_base = OTHER; note = 2'-O-methyladenosine-3'-phosphorothioate
  modified_base 22: mod_base = OTHER; note = 2'-O-methyladenosine-3'-phosphorothioate
  modified_base 23: mod_base = OTHER; note = 2'-O-methyladenosine-3'-phosphate
taagaagtaacatacatcctaaa

SEQ ID NO: 1896 - RNA, 21 nt, synthetic construct
  source 1..21: mol_type = other RNA; note = Description of Artificial Sequence: Synthetic oligonucleotide
  modified_base 1: mod_base = OTHER; note = 2'-O-methyluridine-3'-phosphorothioate
  modified_base 2: mod_base = OTHER; note = 2'-O-methyluridine-3'-phosphorothioate
  modified_base 3: mod_base = OTHER; note = 2'-O-methyladenosine-3'-phosphate
  modified_base 4: mod_base = OTHER; note = 2'-O-methylguanosine-3'-phosphate
  modified_base 5: mod_base = OTHER; note = 2'-O-methylguanosine-3'-phosphate
  modified_base 6: mod_base = OTHER; note = 2'-O-methyladenosine-3'-phosphate
  modified_base 7: mod_base = OTHER; note = 2'-fluorouridine-3'-phosphate
  modified_base 8: mod_base = OTHER; note = 2'-O-methylguanosine-3'-phosphate
  modified_base 9: mod_base = OTHER; note = 2'-fluorouridine-3'-phosphate
  modified_base 10: mod_base = OTHER; note = 2'-fluoroadenosine-3'-phosphate
  modified_base 11: mod_base = OTHER; note = 2'-fluorouridine-3'-phosphate
  modified_base 12: mod_base = OTHER; note = 2'-O-methylguanosine-3'-phosphate
  modified_base 13: mod_base = OTHER; note = 2'-O-methyluridine-3'-phosphate
  modified_base 14: mod_base = OTHER; note = 2'-O-methyluridine-3'-phosphate
  modified_base 15: mod_base = OTHER; note = 2'-O-methyladenosine-3'-phosphate
  modified_base 16: mod_base = OTHER; note = 2'-O-methylcytidine-3'-phosphate
  modified_base 17: mod_base = OTHER; note = 2'-O-methyluridine-3'-phosphate
  modified_base 18: mod_base = OTHER; note = 2'-O-methyluridine-3'-phosphate
  modified_base 19: mod_base = OTHER; note = 2'-O-methylcytidine-3'-phosphate
  modified_base 20: mod_base = OTHER; note = 2'-O-methyluridine-3'-phosphate
  modified_base 21: mod_base = OTHER; note = 2'-O-methyluridine-3'-phosphate N-[tris(GalNAc-alkyl)-amidodecanoyl)]-4-hydroxyprolinol Hyp-(GalNAc-alkyl)3
ttaggatgtatgttacttctt

SEQ ID NO: 1897 - RNA, 23 nt, synthetic construct
  source 1..23: mol_type = other RNA; note = Description of Artificial Sequence: Synthetic oligonucleotide
  modified_base 1: mod_base = OTHER; note = 2'-O-methyladenosine-3'-phosphorothioate
  modified_base 2: mod_base = OTHER; note = 2'-fluoroadenosine-3'-phosphorothioate
  modified_base 3: mod_base = OTHER; note = 2'-O-methylguanosine-3'-phosphate
  modified_base 4: mod_base = OTHER; note = 2'-O-methyladenosine-3'-phosphate
  modified_base 5: mod_base = OTHER; note = 2'-O-methyladenosine-3'-phosphate
  modified_base 6: mod_base = OTHER; note = 2'-fluoroguanosine-3'-phosphate
  modified_base 7: mod_base = OTHER; note = 2'-O-methyluridine-3'-phosphate
  modified_base 8: mod_base = OTHER; note = 2'-fluoroadenosine-3'-phosphate
  modified_base 9: mod_base = OTHER; note = 2'-fluoroadenosine-3'-phosphate
  modified_base 10: mod_base = OTHER; note = 2'-O-methylcytidine-3'-phosphate
  modified_base 11: mod_base = OTHER; note = 2'-O-methyladenosine-3'-phosphate
  modified_base 12: mod_base = OTHER; note = 2'-O-methyluridine-3'-phosphate
  modified_base 13: mod_base = OTHER; note = 2'-O-methyladenosine-3'-phosphate
  modified_base 14: mod_base = OTHER; note = 2'-fluorocytidine-3'-phosphate
  modified_base 15: mod_base = OTHER; note = 2'-O-methyladenosine-3'-phosphate
  modified_base 16: mod_base = OTHER; note = 2'-fluorouridine-3'-phosphate
  modified_base 17: mod_base = OTHER; note = 2'-O-methylcytidine-3'-phosphate
  modified_base 18: mod_base = OTHER; note = 2'-O-methylcytidine-3'-phosphate
  modified_base 19: mod_base = OTHER; note = 2'-O-methyluridine-3'-phosphate
  modified_base 20: mod_base = OTHER; note = 2'-O-methyladenosine-3'-phosphate
  modified_base 21: mod_base = OTHER; note = 2'-O-methyladenosine-3'-phosphorothioate
  modified_base 22: mod_base = OTHER; note = 2'-O-methyladenosine-3'-phosphorothioate
  modified_base 23: mod_base = OTHER; note = 2'-O-methyladenosine-3'-phosphate
aagaagtaacatacatcctaaaa

SEQ ID NO: 1898 - RNA, 21 nt, synthetic construct
  source 1..21: mol_type = other RNA; note = Description of Artificial Sequence: Synthetic oligonucleotide
  modified_base 1: mod_base = OTHER; note = 2'-O-methyladenosine-3'-phosphorothioate
  modified_base 2: mod_base = OTHER; note = 2'-O-methylguanosine-3'-phosphorothioate
  modified_base 3: mod_base = OTHER; note = 2'-O-methyladenosine-3'-phosphate
  modified_base 4: mod_base = OTHER; note = 2'-O-methyladenosine-3'-phosphate
  modified_base 5: mod_base = OTHER; note = 2'-O-methyladenosine-3'-phosphate
  modified_base 6: mod_base = OTHER; note = 2'-O-methylguanosine-3'-phosphate
  modified_base 7: mod_base = OTHER; note = 2'-fluoroguanosine-3'-phosphate
  modified_base 8: mod_base = OTHER; note = 2'-O-methyluridine-3'-phosphate
  modified_base 9: mod_base = OTHER; note = 2'-fluoroguanosine-3'-phosphate
  modified_base 10: mod_base = OTHER; note = 2'-fluorouridine-3'-phosphate
  modified_base 11: mod_base = OTHER; note = 2'-fluorouridine-3'-phosphate
  modified_base 12: mod_base = OTHER; note = 2'-O-methylcytidine-3'-phosphate
  modified_base 13: mod_base = OTHER; note = 2'-O-methyladenosine-3'-phosphate
  modified_base 14: mod_base = OTHER; note = 2'-O-methyladenosine-3'-phosphate
  modified_base 15: mod_base = OTHER; note = 2'-O-methylguanosine-3'-phosphate
  modified_base 16: mod_base = OTHER; note = 2'-O-methyladenosine-3'-phosphate
  modified_base 17: mod_base = OTHER; note = 2'-O-methyluridine-3'-phosphate
  modified_base 18: mod_base = OTHER; note = 2'-O-methylguanosine-3'-phosphate
  modified_base 19: mod_base = OTHER; note = 2'-O-methyluridine-3'-phosphate
  modified_base 20: mod_base = OTHER; note = 2'-O-methylcytidine-3'-phosphate
  modified_base 21: mod_base = OTHER; note = 2'-O-methylcytidine-3'-phosphate N-[tris(GalNAc-alkyl)-amidodecanoyl)]-4-hydroxyprolinol Hyp-(GalNAc-alkyl)3
agaaaggtgttcaagatgtcc

SEQ ID NO: 1899 - RNA, 23 nt, synthetic construct
  source 1..23: mol_type = other RNA; note = Description of Artificial Sequence: Synthetic oligonucleotide
  modified_base 1: mod_base = OTHER; note = 2'-O-methylguanosine-3'-phosphorothioate
  modified_base 2: mod_base = OTHER; note = 2'-fluoroguanosine-3'-phosphorothioate
  modified_base 3: mod_base = OTHER; note = 2'-O-methyladenosine-3'-phosphate
  modified_base 4: mod_base = OTHER; note = 2'-O-methylcytidine-3'-phosphate
  modified_base 5: mod_base = OTHER; note = 2'-O-methyladenosine-3'-phosphate
  modified_base 6: mod_base = OTHER; note = 2'-fluorouridine-3'-phosphate
  modified_base 7: mod_base = OTHER; note = 2'-O-methylcytidine-3'-phosphate
  modified_base 8: mod_base = OTHER; note = 2'-fluorouridine-3'-phosphate
  modified_base 9: mod_base = OTHER; note = 2'-fluorouridine-3'-phosphate
  modified_base 10: mod_base = OTHER; note = 2'-O-methylguanosine-3'-phosphate
  modified_base 11: mod_base = OTHER; note = 2'-O-methyladenosine-3'-phosphate
  modified_base 12: mod_base = OTHER; note = 2'-O-methyladenosine-3'-phosphate
  modified_base 13: mod_base = OTHER; note = 2'-O-methylcytidine-3'-phosphate
  modified_base 14: mod_base = OTHER; note = 2'-fluoroadenosine-3'-phosphate
  modified_base 15: mod_base = OTHER; note = 2'-O-methylcytidine-3'-phosphate
  modified_base 16: mod_base = OTHER; note = 2'-fluorocytidine-3'-phosphate
  modified_base 17: mod_base = OTHER; note = 2'-O-methyluridine-3'-phosphate
  modified_base 18: mod_base = OTHER; note = 2'-O-methyluridine-3'-phosphate
  modified_base 19: mod_base = OTHER; note = 2'-O-methyluridine-3'-phosphate
  modified_base 20: mod_base = OTHER; note = 2'-O-methylcytidine-3'-phosphate
  modified_base 21: mod_base = OTHER; note = 2'-O-methyluridine-3'-phosphorothioate
  modified_base 22: mod_base = OTHER; note = 2'-O-methylcytidine-3'-phosphorothioate
  modified_base 23: mod_base = OTHER; note = 2'-O-methylcytidine-3'-phosphate
ggacatcttgaacacctttctcc

SEQ ID NO: 1900 - RNA, 21 nt, synthetic construct
  source 1..21: mol_type = other RNA; note = Description of Artificial Sequence: Synthetic oligonucleotide
  modified_base 1: mod_base = OTHER; note = 2'-O-methylguanosine-3'-phosphorothioate
  modified_base 2: mod_base = OTHER; note = 2'-O-methyladenosine-3'-phosphorothioate
  modified_base 3: mod_base = OTHER; note = 2'-O-methyladenosine-3'-phosphate
  modified_base 4: mod_base = OTHER; note = 2'-O-methyladenosine-3'-phosphate
  modified_base 5: mod_base = OTHER; note = 2'-O-methylguanosine-3'-phosphate
  modified_base 6: mod_base = OTHER; note = 2'-O-methylguanosine-3'-phosphate
  modified_base 7: mod_base = OTHER; note = 2'-fluorouridine-3'-phosphate
  modified_base 8: mod_base = OTHER; note = 2'-O-methylguanosine-3'-phosphate
  modified_base 9: mod_base = OTHER; note = 2'-fluorouridine-3'-phosphate
  modified_base 10: mod_base = OTHER; note = 2'-fluorouridine-3'-phosphate
  modified_base 11: mod_base = OTHER; note = 2'-fluorocytidine-3'-phosphate
  modified_base 12: mod_base = OTHER; note = 2'-O-methyladenosine-3'-phosphate
  modified_base 13: mod_base = OTHER; note = 2'-O-methyladenosine-3'-phosphate
  modified_base 14: mod_base = OTHER; note = 2'-O-methylguanosine-3'-phosphate
  modified_base 15: mod_base = OTHER; note = 2'-O-methyladenosine-3'-phosphate
  modified_base 16: mod_base = OTHER; note = 2'-O-methyluridine-3'-phosphate
  modified_base 17: mod_base = OTHER; note = 2'-O-methylguanosine-3'-phosphate
  modified_base 18: mod_base = OTHER; note = 2'-O-methyluridine-3'-phosphate
  modified_base 19: mod_base = OTHER; note = 2'-O-methylcytidine-3'-phosphate
  modified_base 20: mod_base = OTHER; note = 2'-O-methylcytidine-3'-phosphate
  modified_base 21: mod_base = OTHER; note = 2'-O-methyluridine-3'-phosphate N-[tris(GalNAc-alkyl)-amidodecanoyl)]-4-hydroxyprolinol Hyp-(GalNAc-alkyl)3
gaaaggtgttcaagatgtcct

SEQ ID NO: 1901 - RNA, 23 nt, synthetic construct
  source 1..23: mol_type = other RNA; note = Description of Artificial Sequence: Synthetic oligonucleotide
  modified_base 1: mod_base = OTHER; note = 2'-O-methyladenosine-3'-phosphorothioate
  modified_base 2: mod_base = OTHER; note = 2'-fluoroguanosine-3'-phosphorothioate
  modified_base 3: mod_base = OTHER; note = 2'-O-methylguanosine-3'-phosphate
  modified_base 4: mod_base = OTHER; note = 2'-O-methyladenosine-3'-phosphate
  modified_base 5: mod_base = OTHER; note = 2'-O-methylcytidine-3'-phosphate
  modified_base 6: mod_base = OTHER; note = 2'-fluoroadenosine-3'-phosphate
  modified_base 7: mod_base = OTHER; note = 2'-O-methyluridine-3'-phosphate
  modified_base 8: mod_base = OTHER; note = 2'-fluorocytidine-3'-phosphate
  modified_base 9: mod_base = OTHER; note = 2'-fluorouridine-3'-phosphate
  modified_base 10: mod_base = OTHER; note = 2'-O-methyluridine-3'-phosphate
  modified_base 11: mod_base = OTHER; note = 2'-O-methylguanosine-3'-phosphate
  modified_base 12: mod_base = OTHER; note = 2'-O-methyladenosine-3'-phosphate
  modified_base 13: mod_base = OTHER; note = 2'-O-methyladenosine-3'-phosphate
  modified_base 14: mod_base = OTHER; note = 2'-fluorocytidine-3'-phosphate
  modified_base 15: mod_base = OTHER; note = 2'-O-methyladenosine-3'-phosphate
  modified_base 16: mod_base = OTHER; note = 2'-fluorocytidine-3'-phosphate
  modified_base 17: mod_base = OTHER; note = 2'-O-methylcytidine-3'-phosphate
  modified_base 18: mod_base = OTHER; note = 2'-O-methyluridine-3'-phosphate
  modified_base 19: mod_base = OTHER; note = 2'-O-methyluridine-3'-phosphate
  modified_base 20: mod_base = OTHER; note = 2'-O-methyluridine-3'-phosphate
  modified_base 21: mod_base = OTHER; note = 2'-O-methylcytidine-3'-phosphorothioate
  modified_base 22: mod_base = OTHER; note = 2'-O-methyluridine-3'-phosphorothioate
  modified_base 23: mod_base = OTHER; note = 2'-O-methylcytidine-3'-phosphate
aggacatcttgaacacctttctc

SEQ ID NO: 1902 - RNA, 21 nt, synthetic construct
  source 1..21: mol_type = other RNA; note = Description of Artificial Sequence: Synthetic oligonucleotide
  modified_base 1: mod_base = OTHER; note = 2'-O-methylguanosine-3'-phosphorothioate
  modified_base 2: mod_base = OTHER; note = 2'-O-methylguanosine-3'-phosphorothioate
  modified_base 3: mod_base = OTHER; note = 2'-O-methylguanosine-3'-phosphate
  modified_base 4: mod_base = OTHER; note = 2'-O-methylguanosine-3'-phosphate
  modified_base 5: mod_base = OTHER; note = 2'-O-methyladenosine-3'-phosphate
  modified_base 6: mod_base = OTHER; note = 2'-O-methylguanosine-3'-phosphate
  modified_base 7: mod_base = OTHER; note = 2'-fluoroadenosine-3'-phosphate
  modified_base 8: mod_base = OTHER; note = 2'-O-methyladenosine-3'-phosphate
  modified_base 9: mod_base = OTHER; note = 2'-fluoroadenosine-3'-phosphate
  modified_base 10: mod_base = OTHER; note = 2'-fluoroguanosine-3'-phosphate
  modified_base 11: mod_base = OTHER; note = 2'-fluoroguanosine-3'-phosphate
  modified_base 12: mod_base = OTHER; note = 2'-O-methyluridine-3'-phosphate
  modified_base 13: mod_base = OTHER; note = 2'-O-methylguanosine-3'-phosphate
  modified_base 14: mod_base = OTHER; note = 2'-O-methyluridine-3'-phosphate
  modified_base 15: mod_base = OTHER; note = 2'-O-methyluridine-3'-phosphate
  modified_base 16: mod_base = OTHER; note = 2'-O-methylcytidine-3'-phosphate
  modified_base 17: mod_base = OTHER; note = 2'-O-methyladenosine-3'-phosphate
  modified_base 18: mod_base = OTHER; note = 2'-O-methyladenosine-3'-phosphate
  modified_base 19: mod_base = OTHER; note = 2'-O-methylguanosine-3'-phosphate
  modified_base 20: mod_base = OTHER; note = 2'-O-methyladenosine-3'-phosphate
  modified_base 21: mod_base = OTHER; note = 2'-O-methyluridine-3'-phosphate N-[tris(GalNAc-alkyl)-amidodecanoyl)]-4-hydroxyprolinol Hyp-(GalNAc-alkyl)3
ggggagaaaggtgttcaagat

SEQ ID NO: 1903 - RNA, 23 nt, synthetic construct
  source 1..23: mol_type = other RNA; note = Description of Artificial Sequence: Synthetic oligonucleotide
  modified_base 1: mod_base = OTHER; note = 2'-O-methyladenosine-3'-phosphorothioate
  modified_base 2: mod_base = OTHER; note = 2'-fluorouridine -3'-phosphorothioate
  modified_base 3: mod_base = OTHER; note = 2'-O-methylcytidine-3'-phosphate
  modified_base 4: mod_base = OTHER; note = 2'-O-methyluridine-3'-phosphate
  modified_base 5: mod_base = OTHER; note = 2'-O-methyluridine-3'-phosphate
  modified_base 6: mod_base = OTHER; note = 2'-fluoroguanosine-3'-phosphate
  modified_base 7: mod_base = OTHER; note = 2'-O-methyladenosine-3'-phosphate
  modified_base 8: mod_base = OTHER; note = 2'-fluoroadenosine-3'-phosphate
  modified_base 9: mod_base = OTHER; note = 2'-fluorocytidine-3'-phosphate
  modified_base 10: mod_base = OTHER; note = 2'-O-methyladenosine-3'-phosphate
  modified_base 11: mod_base = OTHER; note = 2'-O-methylcytidine-3'-phosphate
  modified_base 12: mod_base = OTHER; note = 2'-O-methylcytidine-3'-phosphate
  modified_base 13: mod_base = OTHER; note = 2'-O-methyluridine-3'-phosphate
  modified_base 14: mod_base = OTHER; note = 2'-fluorouridine-3'-phosphate
  modified_base 15: mod_base = OTHER; note = 2'-O-methyluridine-3'-phosphate
  modified_base 16: mod_base = OTHER; note = 2'-fluorocytidine-3'-phosphate
  modified_base 17: mod_base = OTHER; note = 2'-O-methyluridine-3'-phosphate
  modified_base 18: mod_base = OTHER; note = 2'-O-methylcytidine-3'-phosphate
  modified_base 19: mod_base = OTHER; note = 2'-O-methylcytidine-3'-phosphate
  modified_base 20: mod_base = OTHER; note = 2'-O-methylcytidine-3'-phosphate
  modified_base 21: mod_base = OTHER; note = 2'-O-methylcytidine-3'-phosphorothioate
  modified_base 22: mod_base = OTHER; note = 2'-O-methylcytidine-3'-phosphorothioate
  modified_base 23: mod_base = OTHER; note = 2'-O-methyluridine-3'-phosphate
atcttgaacacctttctccccct

SEQ ID NO: 1904 - RNA, 21 nt, synthetic construct
  source 1..21: mol_type = other RNA; note = Description of Artificial Sequence: Synthetic oligonucleotide
  modified_base 1: mod_base = OTHER; note = 2'-O-methylguanosine-3'-phosphorothioate
  modified_base 2: mod_base = OTHER; note = 2'-O-methylguanosine-3'-phosphorothioate
  modified_base 3: mod_base = OTHER; note = 2'-O-methylguanosine-3'-phosphate
  modified_base 4: mod_base = OTHER; note = 2'-O-methylguanosine-3'-phosphate
  modified_base 5: mod_base = OTHER; note = 2'-O-methylguanosine-3'-phosphate
  modified_base 6: mod_base = OTHER; note = 2'-O-methyladenosine-3'-phosphate
  modified_base 7: mod_base = OTHER; note = 2'-fluoroguanosine-3'-phosphate
  modified_base 8: mod_base = OTHER; note = 2'-O-methyladenosine-3'-phosphate
  modified_base 9: mod_base = OTHER; note = 2'-fluoroadenosine-3'-phosphate
  modified_base 10: mod_base = OTHER; note = 2'-fluoroadenosine-3'-phosphate
  modified_base 11: mod_base = OTHER; note = 2'-fluoroguanosine-3'-phosphate
  modified_base 12: mod_base = OTHER; note = 2'-O-methylguanosine-3'-phosphate
  modified_base 13: mod_base = OTHER; note = 2'-O-methyluridine-3'-phosphate
  modified_base 14: mod_base = OTHER; note = 2'-O-methylguanosine-3'-phosphate
  modified_base 15: mod_base = OTHER; note = 2'-O-methyluridine-3'-phosphate
  modified_base 16: mod_base = OTHER; note = 2'-O-methyluridine-3'-phosphate
  modified_base 17: mod_base = OTHER; note = 2'-O-methylcytidine-3'-phosphate
  modified_base 18: mod_base = OTHER; note = 2'-O-methyladenosine-3'-phosphate
  modified_base 19: mod_base = OTHER; note = 2'-O-methyladenosine-3'-phosphate
  modified_base 20: mod_base = OTHER; note = 2'-O-methylguanosine-3'-phosphate
  modified_base 21: mod_base = OTHER; note = 2'-O-methyladenosine-3'-phosphate N-[tris(GalNAc-alkyl)-amidodecanoyl)]-4-hydroxyprolinol Hyp-(GalNAc-alkyl)3
gggggagaaaggtgttcaaga

SEQ ID NO: 1905 - RNA, 23 nt, synthetic construct
  source 1..23: mol_type = other RNA; note = Description of Artificial Sequence: Synthetic oligonucleotide
  modified_base 1: mod_base = OTHER; note = 2'-O-methyluridine-3'-phosphorothioate
  modified_base 2: mod_base = OTHER; note = 2'-fluorocytidine-3'-phosphorothioate
  modified_base 3: mod_base = OTHER; note = 2'-O-methyluridine-3'-phosphate
  modified_base 4: mod_base = OTHER; note = 2'-O-methyluridine-3'-phosphate
  modified_base 5: mod_base = OTHER; note = 2'-O-methylguanosine-3'-phosphate
  modified_base 6: mod_base = OTHER; note = 2'-fluoroadenosine-3'-phosphate
  modified_base 7: mod_base = OTHER; note = 2'-O-methyladenosine-3'-phosphate
  modified_base 8: mod_base = OTHER; note = 2'-fluorocytidine-3'-phosphate
  modified_base 9: mod_base = OTHER; note = 2'-fluoroadenosine-3'-phosphate
  modified_base 10: mod_base = OTHER; note = 2'-O-methylcytidine-3'-phosphate
  modified_base 11: mod_base = OTHER; note = 2'-O-methylcytidine-3'-phosphate
  modified_base 12: mod_base = OTHER; note = 2'-O-methyluridine-3'-phosphate
  modified_base 13: mod_base = OTHER; note = 2'-O-methyluridine-3'-phosphate
  modified_base 14: mod_base = OTHER; note = 2'-fluorouridine-3'-phosphate
  modified_base 15: mod_base = OTHER; note = 2'-O-methylcytidine-3'-phosphate
  modified_base 16: mod_base = OTHER; note = 2'-fluorouridine-3'-phosphate
  modified_base 17: mod_base = OTHER; note = 2'-O-methylcytidine-3'-phosphate
  modified_base 18: mod_base = OTHER; note = 2'-O-methylcytidine-3'-phosphate
  modified_base 19: mod_base = OTHER; note = 2'-O-methylcytidine-3'-phosphate
  modified_base 20: mod_base = OTHER; note = 2'-O-methylcytidine-3'-phosphate
  modified_base 21: mod_base = OTHER; note = 2'-O-methylcytidine-3'-phosphorothioate
  modified_base 22: mod_base = OTHER; note = 2'-O-methyluridine-3'-phosphorothioate
  modified_base 23: mod_base = OTHER; note = 2'-O-methylguanosine-3'-phosphate
tcttgaacacctttctccccctg

SEQ ID NO: 1906 - RNA, 21 nt, synthetic construct
  source 1..21: mol_type = other RNA; note = Description of Artificial Sequence: Synthetic oligonucleotide
  modified_base 1: mod_base = OTHER; note = 2'-O-methyladenosine-3'-phosphorothioate
  modified_base 2: mod_base = OTHER; note = 2'-O-methylguanosine-3'-phosphorothioate
  modified_base 3: mod_base = OTHER; note = 2'-O-methyladenosine-3'-phosphate
  modified_base 4: mod_base = OTHER; note = 2'-O-methyladenosine-3'-phosphate
  modified_base 5: mod_base = OTHER; note = 2'-O-methyladenosine-3'-phosphate
  modified_base 6: mod_base = OTHER; note = 2'-O-methylcytidine-3'-phosphate
  modified_base 7: mod_base = OTHER; note = 2'-fluorouridine-3'-phosphate
  modified_base 8: mod_base = OTHER; note = 2'-O-methyluridine-3'-phosphate
  modified_base 9: mod_base = OTHER; note = 2'-fluorouridine-3'-phosphate
  modified_base 10: mod_base = OTHER; note = 2'-fluoroguanosine-3'-phosphate
  modified_base 11: mod_base = OTHER; note = 2'-fluoroguanosine-3'-phosphate
  modified_base 12: mod_base = OTHER; note = 2'-O-methylcytidine-3'-phosphate
  modified_base 13: mod_base = OTHER; note = 2'-O-methyluridine-3'-phosphate
  modified_base 14: mod_base = OTHER; note = 2'-O-methylguanosine-3'-phosphate
  modified_base 15: mod_base = OTHER; note = 2'-O-methyladenosine-3'-phosphate
  modified_base 16: mod_base = OTHER; note = 2'-O-methyluridine-3'-phosphate
  modified_base 17: mod_base = OTHER; note = 2'-O-methyladenosine-3'-phosphate
  modified_base 18: mod_base = OTHER; note = 2'-O-methyladenosine-3'-phosphate
  modified_base 19: mod_base = OTHER; note = 2'-O-methyluridine-3'-phosphate
  modified_base 20: mod_base = OTHER; note = 2'-O-methyladenosine-3'-phosphate
  modified_base 21: mod_base = OTHER; note = 2'-O-methyluridine-3'-phosphate N-[tris(GalNAc-alkyl)-amidodecanoyl)]-4-hydroxyprolinol Hyp-(GalNAc-alkyl)3
agaaactttggctgataatat

SEQ ID NO: 1907 - RNA, 23 nt, synthetic construct
  source 1..23: mol_type = other RNA; note = Description of Artificial Sequence: Synthetic oligonucleotide
  modified_base 1: mod_base = OTHER; note = 2'-O-methyladenosine-3'-phosphorothioate
  modified_base 2: mod_base = OTHER; note = 2'-fluorouridine -3'-phosphorothioate
  modified_base 3: mod_base = OTHER; note = 2'-O-methyladenosine-3'-phosphate
  modified_base 4: mod_base = OTHER; note = 2'-O-methyluridine-3'-phosphate
  modified_base 5: mod_base = OTHER; note = 2'-O-methyluridine-3'-phosphate
  modified_base 6: mod_base = OTHER; note = 2'-fluoroadenosine-3'-phosphate
  modified_base 7: mod_base = OTHER; note = 2'-O-methyluridine-3'-phosphate
  modified_base 8: mod_base = OTHER; note = 2'-fluorocytidine-3'-phosphate
  modified_base 9: mod_base = OTHER; note = 2'-fluoroadenosine-3'-phosphate
  modified_base 10: mod_base = OTHER; note = 2'-O-methylguanosine-3'-phosphate
  modified_base 11: mod_base = OTHER; note = 2'-O-methylcytidine-3'-phosphate
  modified_base 12: mod_base = OTHER; note = 2'-O-methylcytidine-3'-phosphate
  modified_base 13: mod_base = OTHER; note = 2'-O-methyladenosine-3'-phosphate
  modified_base 14: mod_base = OTHER; note = 2'-fluoroadenosine-3'-phosphate
  modified_base 15: mod_base = OTHER; note = 2'-O-methyladenosine-3'-phosphate
  modified_base 16: mod_base = OTHER; note = 2'-fluoroguanosine-3'-phosphate
  modified_base 17: mod_base = OTHER; note = 2'-O-methyluridine-3'-phosphate
  modified_base 18: mod_base = OTHER; note = 2'-O-methyluridine-3'-phosphate
  modified_base 19: mod_base = OTHER; note = 2'-O-methyluridine-3'-phosphate
  modified_base 20: mod_base = OTHER; note = 2'-O-methylcytidine-3'-phosphate
  modified_base 21: mod_base = OTHER; note = 2'-O-methyluridine-3'-phosphorothioate
  modified_base 22: mod_base = OTHER; note = 2'-O-methyluridine-3'-phosphorothioate
  modified_base 23: mod_base = OTHER; note = 2'-O-methylcytidine-3'-phosphate
atattatcagccaaagtttcttc

SEQ ID NO: 1908 - RNA, 21 nt, synthetic construct
  source 1..21: mol_type = other RNA; note = Description of Artificial Sequence: Synthetic oligonucleotide
  modified_base 1: mod_base = OTHER; note = 2'-O-methylguanosine-3'-phosphorothioate
  modified_base 2: mod_base = OTHER; note = 2'-O-methyladenosine-3'-phosphorothioate
  modified_base 3: mod_base = OTHER; note = 2'-O-methyladenosine-3'-phosphate
  modified_base 4: mod_base = OTHER; note = 2'-O-methyladenosine-3'-phosphate
  modified_base 5: mod_base = OTHER; note = 2'-O-methylcytidine-3'-phosphate
  modified_base 6: mod_base = OTHER; note = 2'-O-methyluridine-3'-phosphate
  modified_base 7: mod_base = OTHER; note = 2'-fluorouridine-3'-phosphate
  modified_base 8: mod_base = OTHER; note = 2'-O-methyluridine-3'-phosphate
  modified_base 9: mod_base = OTHER; note = 2'-fluoroguanosine-3'-phosphate
  modified_base 10: mod_base = OTHER; note = 2'-fluoroguanosine-3'-phosphate
  modified_base 11: mod_base = OTHER; note = 2'-fluorocytidine-3'-phosphate
  modified_base 12: mod_base = OTHER; note = 2'-O-methyluridine-3'-phosphate
  modified_base 13: mod_base = OTHER; note = 2'-O-methylguanosine-3'-phosphate
  modified_base 14: mod_base = OTHER; note = 2'-O-methyladenosine-3'-phosphate
  modified_base 15: mod_base = OTHER; note = 2'-O-methyluridine-3'-phosphate
  modified_base 16: mod_base = OTHER; note = 2'-O-methyladenosine-3'-phosphate
  modified_base 17: mod_base = OTHER; note = 2'-O-methyladenosine-3'-phosphate
  modified_base 18: mod_base = OTHER; note = 2'-O-methyluridine-3'-phosphate
  modified_base 19: mod_base = OTHER; note = 2'-O-methyladenosine-3'-phosphate
  modified_base 20: mod_base = OTHER; note = 2'-O-methyluridine-3'-phosphate
  modified_base 21: mod_base = OTHER; note = 2'-O-methyluridine-3'-phosphate N-[tris(GalNAc-alkyl)-amidodecanoyl)]-4-hydroxyprolinol Hyp-(GalNAc-alkyl)3
gaaactttggctgataatatt

SEQ ID NO: 1909 - RNA, 23 nt, synthetic construct
  source 1..23: mol_type = other RNA; note = Description of Artificial Sequence: Synthetic oligonucleotide
  modified_base 1: mod_base = OTHER; note = 2'-O-methyladenosine-3'-phosphorothioate
  modified_base 2: mod_base = OTHER; note = 2'-fluoroadenosine-3'-phosphorothioate
  modified_base 3: mod_base = OTHER; note = 2'-O-methyluridine-3'-phosphate
  modified_base 4: mod_base = OTHER; note = 2'-O-methyladenosine-3'-phosphate
  modified_base 5: mod_base = OTHER; note = 2'-O-methyluridine-3'-phosphate
  modified_base 6: mod_base = OTHER; note = 2'-fluorouridine-3'-phosphate
  modified_base 7: mod_base = OTHER; note = 2'-O-methyladenosine-3'-phosphate
  modified_base 8: mod_base = OTHER; note = 2'-fluorouridine-3'-phosphate
  modified_base 9: mod_base = OTHER; note = 2'-fluorocytidine-3'-phosphate
  modified_base 10: mod_base = OTHER; note = 2'-O-methyladenosine-3'-phosphate
  modified_base 11: mod_base = OTHER; note = 2'-O-methylguanosine-3'-phosphate
  modified_base 12: mod_base = OTHER; note = 2'-O-methylcytidine-3'-phosphate
  modified_base 13: mod_base = OTHER; note = 2'-O-methylcytidine-3'-phosphate
  modified_base 14: mod_base = OTHER; note = 2'-fluoroadenosine-3'-phosphate
  modified_base 15: mod_base = OTHER; note = 2'-O-methyladenosine-3'-phosphate
  modified_base 16: mod_base = OTHER; note = 2'-fluoroadenosine-3'-phosphate
  modified_base 17: mod_base = OTHER; note = 2'-O-methylguanosine-3'-phosphate
  modified_base 18: mod_base = OTHER; note = 2'-O-methyluridine-3'-phosphate
  modified_base 19: mod_base = OTHER; note = 2'-O-methyluridine-3'-phosphate
  modified_base 20: mod_base = OTHER; note = 2'-O-methyluridine-3'-phosphate
  modified_base 21: mod_base = OTHER; note = 2'-O-methylcytidine-3'-phosphorothioate
  modified_base 22: mod_base = OTHER; note = 2'-O-methyluridine-3'-phosphorothioate
  modified_base 23: mod_base = OTHER; note = 2'-O-methyluridine-3'-phosphate
aatattatcagccaaagtttctt

SEQ ID NO: 1910 - RNA, 21 nt, synthetic construct
  source 1..21: mol_type = other RNA; note = Description of Artificial Sequence: Synthetic oligonucleotide
  modified_base 1: mod_base = OTHER; note = 2'-O-methyladenosine-3'-phosphorothioate
  modified_base 2: mod_base = OTHER; note = 2'-O-methyluridine-3'-phosphorothioate
  modified_base 3: mod_base = OTHER; note = 2'-O-methylguanosine-3'-phosphate
  modified_base 4: mod_base = OTHER; note = 2'-O-methyladenosine-3'-phosphate
  modified_base 5: mod_base = OTHER; note = 2'-O-methyladenosine-3'-phosphate
  modified_base 6: mod_base = OTHER; note = 2'-O-methylguanosine-3'-phosphate
  modified_base 7: mod_base = OTHER; note = 2'-fluoroadenosine-3'-phosphate
  modified_base 8: mod_base = OTHER; note = 2'-O-methyladenosine-3'-phosphate
  modified_base 9: mod_base = OTHER; note = 2'-fluoroadenosine-3'-phosphate
  modified_base 10: mod_base = OTHER; note = 2'-fluorocytidine-3'-phosphate
  modified_base 11: mod_base = OTHER; note = 2'-fluorouridine-3'-phosphate
  modified_base 12: mod_base = OTHER; note = 2'-O-methyluridine-3'-phosphate
  modified_base 13: mod_base = OTHER; note = 2'-O-methyluridine-3'-phosphate
  modified_base 14: mod_base = OTHER; note = 2'-O-methylguanosine-3'-phosphate
  modified_base 15: mod_base = OTHER; note = 2'-O-methylguanosine-3'-phosphate
  modified_base 16: mod_base = OTHER; note = 2'-O-methylcytidine-3'-phosphate
  modified_base 17: mod_base = OTHER; note = 2'-O-methyluridine-3'-phosphate
  modified_base 18: mod_base = OTHER; note = 2'-O-methylguanosine-3'-phosphate
  modified_base 19: mod_base = OTHER; note = 2'-O-methyladenosine-3'-phosphate
  modified_base 20: mod_base = OTHER; note = 2'-O-methyluridine-3'-phosphate
  modified_base 21: mod_base = OTHER; note = 2'-O-methyladenosine-3'-phosphate N-[tris(GalNAc-alkyl)-amidodecanoyl)]-4-hydroxyprolinol Hyp-(GalNAc-alkyl)3
atgaagaaactttggctgata

SEQ ID NO: 1911 - RNA, 23 nt, synthetic construct
  source 1..23: mol_type = other RNA; note = Description of Artificial Sequence: Synthetic oligonucleotide
  modified_base 1: mod_base = OTHER; note = 2'-O-methyluridine-3'-phosphorothioate
  modified_base 2: mod_base = OTHER; note = 2'-fluoroadenosine-3'-phosphorothioate
  modified_base 3: mod_base = OTHER; note = 2'-O-methyluridine-3'-phosphate
  modified_base 4: mod_base = OTHER; note = 2'-O-methylcytidine-3'-phosphate
  modified_base 5: mod_base = OTHER; note = 2'-O-methyladenosine-3'-phosphate
  modified_base 6: mod_base = OTHER; note = 2'-fluoroguanosine-3'-phosphate
  modified_base 7: mod_base = OTHER; note = 2'-O-methylcytidine-3'-phosphate
  modified_base 8: mod_base = OTHER; note = 2'-fluorocytidine-3'-phosphate
  modified_base 9: mod_base = OTHER; note = 2'-fluoroadenosine-3'-phosphate
  modified_base 10: mod_base = OTHER; note = 2'-O-methyladenosine-3'-phosphate
  modified_base 11: mod_base = OTHER; note = 2'-O-methyladenosine-3'-phosphate
  modified_base 12: mod_base = OTHER; note = 2'-O-methylguanosine-3'-phosphate
  modified_base 13: mod_base = OTHER; note = 2'-O-methyluridine-3'-phosphate
  modified_base 14: mod_base = OTHER; note = 2'-fluorouridine-3'-phosphate
  modified_base 15: mod_base = OTHER; note = 2'-O-methyluridine-3'-phosphate
  modified_base 16: mod_base = OTHER; note = 2'-fluorocytidine-3'-phosphate
  modified_base 17: mod_base = OTHER; note = 2'-O-methyluridine-3'-phosphate
  modified_base 18: mod_base = OTHER; note = 2'-O-methyluridine-3'-phosphate
  modified_base 19: mod_base = OTHER; note = 2'-O-methylcytidine-3'-phosphate
  modified_base 20: mod_base = OTHER; note = 2'-O-methyladenosine-3'-phosphate
  modified_base 21: mod_base = OTHER; note = 2'-O-methyluridine-3'-phosphorothioate
  modified_base 22: mod_base = OTHER; note = 2'-O-methylcytidine-3'-phosphorothioate
  modified_base 23: mod_base = OTHER; note = 2'-O-methyladenosine-3'-phosphate
tatcagccaaagtttcttcatca

SEQ ID NO: 1912 - RNA, 21 nt, synthetic construct
  source 1..21: mol_type = other RNA; note = Description of Artificial Sequence: Synthetic oligonucleotide
  modified_base 1: mod_base = OTHER; note = 2'-O-methylguanosine-3'-phosphorothioate
  modified_base 2: mod_base = OTHER; note = 2'-O-methyladenosine-3'-phosphorothioate
  modified_base 3: mod_base = OTHER; note = 2'-O-methyluridine-3'-phosphate
  modified_base 4: mod_base = OTHER; note = 2'-O-methylguanosine-3'-phosphate
  modified_base 5: mod_base = OTHER; note = 2'-O-methyladenosine-3'-phosphate
  modified_base 6: mod_base = OTHER; note = 2'-O-methyladenosine-3'-phosphate
  modified_base 7: mod_base = OTHER; note = 2'-fluoroguanosine-3'-phosphate
  modified_base 8: mod_base = OTHER; note = 2'-O-methyladenosine-3'-phosphate
  modified_base 9: mod_base = OTHER; note = 2'-fluoroadenosine-3'-phosphate
  modified_base 10: mod_base = OTHER; note = 2'-fluoroadenosine-3'-phosphate
  modified_base 11: mod_base = OTHER; note = 2'-fluorocytidine-3'-phosphate
  modified_base 12: mod_base = OTHER; note = 2'-O-methyluridine-3'-phosphate
  modified_base 13: mod_base = OTHER; note = 2'-O-methyluridine-3'-phosphate
  modified_base 14: mod_base = OTHER; note = 2'-O-methyluridine-3'-phosphate
  modified_base 15: mod_base = OTHER; note = 2'-O-methylguanosine-3'-phosphate
  modified_base 16: mod_base = OTHER; note = 2'-O-methylguanosine-3'-phosphate
  modified_base 17: mod_base = OTHER; note = 2'-O-methylcytidine-3'-phosphate
  modified_base 18: mod_base = OTHER; note = 2'-O-methyluridine-3'-phosphate
  modified_base 19: mod_base = OTHER; note = 2'-O-methylguanosine-3'-phosphate
  modified_base 20: mod_base = OTHER; note = 2'-O-methyladenosine-3'-phosphate
  modified_base 21: mod_base = OTHER; note = 2'-O-methyluridine-3'-phosphate N-[tris(GalNAc-alkyl)-amidodecanoyl)]-4-hydroxyprolinol Hyp-(GalNAc-alkyl)3
gatgaagaaactttggctgat

SEQ ID NO: 1913 - RNA, 23 nt, synthetic construct
  source 1..23: mol_type = other RNA; note = Description of Artificial Sequence: Synthetic oligonucleotide
  modified_base 1: mod_base = OTHER; note = 2'-O-methyladenosine-3'-phosphorothioate
  modified_base 2: mod_base = OTHER; note = 2'-fluorouridine -3'-phosphorothioate
  modified_base 3: mod_base = OTHER; note = 2'-O-methylcytidine-3'-phosphate
  modified_base 4: mod_base = OTHER; note = 2'-O-methyladenosine-3'-phosphate
  modified_base 5: mod_base = OTHER; note = 2'-O-methylguanosine-3'-phosphate
  modified_base 6: mod_base = OTHER; note = 2'-fluorocytidine-3'-phosphate
  modified_base 7: mod_base = OTHER; note = 2'-O-methylcytidine-3'-phosphate
  modified_base 8: mod_base = OTHER; note = 2'-fluoroadenosine-3'-phosphate
  modified_base 9: mod_base = OTHER; note = 2'-fluoroadenosine-3'-phosphate
  modified_base 10: mod_base = OTHER; note = 2'-O-methyladenosine-3'-phosphate
  modified_base 11: mod_base = OTHER; note = 2'-O-methylguanosine-3'-phosphate
  modified_base 12: mod_base = OTHER; note = 2'-O-methyluridine-3'-phosphate
  modified_base 13: mod_base = OTHER; note = 2'-O-methyluridine-3'-phosphate
  modified_base 14: mod_base = OTHER; note = 2'-fluorouridine-3'-phosphate
  modified_base 15: mod_base = OTHER; note = 2'-O-methylcytidine-3'-phosphate
  modified_base 16: mod_base = OTHER; note = 2'-fluorouridine-3'-phosphate
  modified_base 17: mod_base = OTHER; note = 2'-O-methyluridine-3'-phosphate
  modified_base 18: mod_base = OTHER; note = 2'-O-methylcytidine-3'-phosphate
  modified_base 19: mod_base = OTHER; note = 2'-O-methyladenosine-3'-phosphate
  modified_base 20: mod_base = OTHER; note = 2'-O-methyluridine-3'-phosphate
  modified_base 21: mod_base = OTHER; note = 2'-O-methylcytidine-3'-phosphorothioate
  modified_base 22: mod_base = OTHER; note = 2'-O-methyladenosine-3'-phosphorothioate
  modified_base 23: mod_base = OTHER; note = 2'-O-methyluridine-3'-phosphate
atcagccaaagtttcttcatcat

SEQ ID NO: 1914 - RNA, 21 nt, synthetic construct
  source 1..21: mol_type = other RNA; note = Description of Artificial Sequence: Synthetic oligonucleotide
  modified_base 1: mod_base = OTHER; note = 2'-O-methyladenosine-3'-phosphorothioate
  modified_base 2: mod_base = OTHER; note = 2'-O-methyladenosine-3'-phosphorothioate
  modified_base 3: mod_base = OTHER; note = 2'-O-methylguanosine-3'-phosphate
  modified_base 4: mod_base = OTHER; note = 2'-O-methylguanosine-3'-phosphate
  modified_base 5: mod_base = OTHER; note = 2'-O-methylcytidine-3'-phosphate
  modified_base 6: mod_base = OTHER; note = 2'-O-methyladenosine-3'-phosphate
  modified_base 7: mod_base = OTHER; note = 2'-fluorocytidine-3'-phosphate
  modified_base 8: mod_base = OTHER; note = 2'-O-methyluridine-3'-phosphate
  modified_base 9: mod_base = OTHER; note = 2'-fluoroguanosine-3'-phosphate
  modified_base 10: mod_base = OTHER; note = 2'-fluoroadenosine-3'-phosphate
  modified_base 11: mod_base = OTHER; note = 2'-fluorouridine-3'-phosphate
  modified_base 12: mod_base = OTHER; note = 2'-O-methylguanosine-3'-phosphate
  modified_base 13: mod_base = OTHER; note = 2'-O-methyluridine-3'-phosphate
  modified_base 14: mod_base = OTHER; note = 2'-O-methyluridine-3'-phosphate
  modified_base 15: mod_base = OTHER; note = 2'-O-methylcytidine-3'-phosphate
  modified_base 16: mod_base = OTHER; note = 2'-O-methyluridine-3'-phosphate
  modified_base 17: mod_base = OTHER; note = 2'-O-methylguanosine-3'-phosphate
  modified_base 18: mod_base = OTHER; note = 2'-O-methyladenosine-3'-phosphate
  modified_base 19: mod_base = OTHER; note = 2'-O-methyladenosine-3'-phosphate
  modified_base 20: mod_base = OTHER; note = 2'-O-methyladenosine-3'-phosphate
  modified_base 21: mod_base = OTHER; note = 2'-O-methylguanosine-3'-phosphate N-[tris(GalNAc-alkyl)-amidodecanoyl)]-4-hydroxyprolinol Hyp-(GalNAc-alkyl)3
aaggcactgatgttctgaaag

SEQ ID NO: 1915 - RNA, 23 nt, synthetic construct
  source 1..23: mol_type = other RNA; note = Description of Artificial Sequence: Synthetic oligonucleotide
  modified_base 1: mod_base = OTHER; note = 2'-O-methylcytidine-3'-phosphorothioate
  modified_base 2: mod_base = OTHER; note = 2'-fluorouridine -3'-phosphorothioate
  modified_base 3: mod_base = OTHER; note = 2'-O-methyluridine-3'-phosphate
  modified_base 4: mod_base = OTHER; note = 2'-O-methyluridine-3'-phosphate
  modified_base 5: mod_base = OTHER; note = 2'-O-methylcytidine-3'-phosphate
  modified_base 6: mod_base = OTHER; note = 2'-fluoroadenosine-3'-phosphate
  modified_base 7: mod_base = OTHER; note = 2'-O-methylguanosine-3'-phosphate
  modified_base 8: mod_base = OTHER; note = 2'-fluoroadenosine-3'-phosphate
  modified_base 9: mod_base = OTHER; note = 2'-fluoroadenosine-3'-phosphate
  modified_base 10: mod_base = OTHER; note = 2'-O-methylcytidine-3'-phosphate
  modified_base 11: mod_base = OTHER; note = 2'-O-methyladenosine-3'-phosphate
  modified_base 12: mod_base = OTHER; note = 2'-O-methyluridine-3'-phosphate
  modified_base 13: mod_base = OTHER; note = 2'-O-methylcytidine-3'-phosphate
  modified_base 14: mod_base = OTHER; note = 2'-fluoroadenosine-3'-phosphate
  modified_base 15: mod_base = OTHER; note = 2'-O-methylguanosine-3'-phosphate
  modified_base 16: mod_base = OTHER; note = 2'-fluorouridine-3'-phosphate
  modified_base 17: mod_base = OTHER; note = 2'-O-methylguanosine-3'-phosphate
  modified_base 18: mod_base = OTHER; note = 2'-O-methylcytidine-3'-phosphate
  modified_base 19: mod_base = OTHER; note = 2'-O-methylcytidine-3'-phosphate
  modified_base 20: mod_base = OTHER; note = 2'-O-methyluridine-3'-phosphate
  modified_base 21: mod_base = OTHER; note = 2'-O-methyluridine-3'-phosphorothioate
  modified_base 22: mod_base = OTHER; note = 2'-O-methyluridine-3'-phosphorothioate
  modified_base 23: mod_base = OTHER; note = 2'-O-methylcytidine-3'-phosphate
ctttcagaacatcagtgcctttc

SEQ ID NO: 1916 - RNA, 21 nt, synthetic construct
  source 1..21: mol_type = other RNA; note = Description of Artificial Sequence: Synthetic oligonucleotide
  modified_base 1: mod_base = OTHER; note = 2'-O-methyladenosine-3'-phosphorothioate
  modified_base 2: mod_base = OTHER; note = 2'-O-methylguanosine-3'-phosphorothioate
  modified_base 3: mod_base = OTHER; note = 2'-O-methylguanosine-3'-phosphate
  modified_base 4: mod_base = OTHER; note = 2'-O-methylcytidine-3'-phosphate
  modified_base 5: mod_base = OTHER; note = 2'-O-methyladenosine-3'-phosphate
  modified_base 6: mod_base = OTHER; note = 2'-O-methylcytidine-3'-phosphate
  modified_base 7: mod_base = OTHER; note = 2'-fluorouridine-3'-phosphate
  modified_base 8: mod_base = OTHER; note = 2'-O-methylguanosine-3'-phosphate
  modified_base 9: mod_base = OTHER; note = 2'-fluoroadenosine-3'-phosphate
  modified_base 10: mod_base = OTHER; note = 2'-fluorouridine-3'-phosphate
  modified_base 11: mod_base = OTHER; note = 2'-fluoroguanosine-3'-phosphate
  modified_base 12: mod_base = OTHER; note = 2'-O-methyluridine-3'-phosphate
  modified_base 13: mod_base = OTHER; note = 2'-O-methyluridine-3'-phosphate
  modified_base 14: mod_base = OTHER; note = 2'-O-methylcytidine-3'-phosphate
  modified_base 15: mod_base = OTHER; note = 2'-O-methyluridine-3'-phosphate
  modified_base 16: mod_base = OTHER; note = 2'-O-methylguanosine-3'-phosphate
  modified_base 17: mod_base = OTHER; note = 2'-O-methyladenosine-3'-phosphate
  modified_base 18: mod_base = OTHER; note = 2'-O-methyladenosine-3'-phosphate
  modified_base 19: mod_base = OTHER; note = 2'-O-methyladenosine-3'-phosphate
  modified_base 20: mod_base = OTHER; note = 2'-O-methylguanosine-3'-phosphate
  modified_base 21: mod_base = OTHER; note = 2'-O-methylcytidine-3'-phosphate N-[tris(GalNAc-alkyl)-amidodecanoyl)]-4-hydroxyprolinol Hyp-(GalNAc-alkyl)3
aggcactgatgttctgaaagc

SEQ ID NO: 1917 - RNA, 23 nt, synthetic construct
  source 1..23: mol_type = other RNA; note = Description of Artificial Sequence: Synthetic oligonucleotide
  modified_base 1: mod_base = OTHER; note = 2'-O-methylguanosine-3'-phosphorothioate
  modified_base 2: mod_base = OTHER; note = 2'-fluorocytidine-3'-phosphorothioate
  modified_base 3: mod_base = OTHER; note = 2'-O-methyluridine-3'-phosphate
  modified_base 4: mod_base = OTHER; note = 2'-O-methyluridine-3'-phosphate
  modified_base 5: mod_base = OTHER; note = 2'-O-methyluridine-3'-phosphate
  modified_base 6: mod_base = OTHER; note = 2'-fluorocytidine-3'-phosphate
  modified_base 7: mod_base = OTHER; note = 2'-O-methyladenosine-3'-phosphate
  modified_base 8: mod_base = OTHER; note = 2'-fluoroguanosine-3'-phosphate
  modified_base 9: mod_base = OTHER; note = 2'-fluoroadenosine-3'-phosphate
  modified_base 10: mod_base = OTHER; note = 2'-O-methyladenosine-3'-phosphate
  modified_base 11: mod_base = OTHER; note = 2'-O-methylcytidine-3'-phosphate
  modified_base 12: mod_base = OTHER; note = 2'-O-methyladenosine-3'-phosphate
  modified_base 13: mod_base = OTHER; note = 2'-O-methyluridine-3'-phosphate
  modified_base 14: mod_base = OTHER; note = 2'-fluorocytidine-3'-phosphate
  modified_base 15: mod_base = OTHER; note = 2'-O-methyladenosine-3'-phosphate
  modified_base 16: mod_base = OTHER; note = 2'-fluoroguanosine-3'-phosphate
  modified_base 17: mod_base = OTHER; note = 2'-O-methyluridine-3'-phosphate
  modified_base 18: mod_base = OTHER; note = 2'-O-methylguanosine-3'-phosphate
  modified_base 19: mod_base = OTHER; note = 2'-O-methylcytidine-3'-phosphate
  modified_base 20: mod_base = OTHER; note = 2'-O-methylcytidine-3'-phosphate
  modified_base 21: mod_base = OTHER; note = 2'-O-methyluridine-3'-phosphorothioate
  modified_base 22: mod_base = OTHER; note = 2'-O-methyluridine-3'-phosphorothioate
  modified_base 23: mod_base = OTHER; note = 2'-O-methyluridine-3'-phosphate
gctttcagaacatcagtgccttt

SEQ ID NO: 1918 - RNA, 21 nt, synthetic construct
  source 1..21: mol_type = other RNA; note = Description of Artificial Sequence: Synthetic oligonucleotide
  modified_base 1: mod_base = OTHER; note = 2'-O-methylcytidine-3'-phosphorothioate
  modified_base 2: mod_base = OTHER; note = 2'-O-methylguanosine-3'-phosphorothioate
  modified_base 3: mod_base = OTHER; note = 2'-O-methylguanosine-3'-phosphate
  modified_base 4: mod_base = OTHER; note = 2'-O-methyladenosine-3'-phosphate
  modified_base 5: mod_base = OTHER; note = 2'-O-methyladenosine-3'-phosphate
  modified_base 6: mod_base = OTHER; note = 2'-O-methyladenosine-3'-phosphate
  modified_base 7: mod_base = OTHER; note = 2'-fluoroguanosine-3'-phosphate
  modified_base 8: mod_base = OTHER; note = 2'-O-methylguanosine-3'-phosphate
  modified_base 9: mod_base = OTHER; note = 2'-fluorocytidine-3'-phosphate
  modified_base 10: mod_base = OTHER; note = 2'-fluoroadenosine-3'-phosphate
  modified_base 11: mod_base = OTHER; note = 2'-fluorocytidine-3'-phosphate
  modified_base 12: mod_base = OTHER; note = 2'-O-methyluridine-3'-phosphate
  modified_base 13: mod_base = OTHER; note = 2'-O-methylguanosine-3'-phosphate
  modified_base 14: mod_base = OTHER; note = 2'-O-methyladenosine-3'-phosphate
  modified_base 15: mod_base = OTHER; note = 2'-O-methyluridine-3'-phosphate
  modified_base 16: mod_base = OTHER; note = 2'-O-methylguanosine-3'-phosphate
  modified_base 17: mod_base = OTHER; note = 2'-O-methyluridine-3'-phosphate
  modified_base 18: mod_base = OTHER; note = 2'-O-methyluridine-3'-phosphate
  modified_base 19: mod_base = OTHER; note = 2'-O-methylcytidine-3'-phosphate
  modified_base 20: mod_base = OTHER; note = 2'-O-methyluridine-3'-phosphate
  modified_base 21: mod_base = OTHER; note = 2'-O-methylguanosine-3'-phosphate N-[tris(GalNAc-alkyl)-amidodecanoyl)]-4-hydroxyprolinol Hyp-(GalNAc-alkyl)3
cggaaaggcactgatgttctg

SEQ ID NO: 1919 - RNA, 23 nt, synthetic construct
  source 1..23: mol_type = other RNA; note = Description of Artificial Sequence: Synthetic oligonucleotide
  modified_base 1: mod_base = OTHER; note = 2'-O-methylcytidine-3'-phosphorothioate
  modified_base 2: mod_base = OTHER; note = 2'-fluoroadenosine-3'-phosphorothioate
  modified_base 3: mod_base = OTHER; note = 2'-O-methylguanosine-3'-phosphate
  modified_base 4: mod_base = OTHER; note = 2'-O-methyladenosine-3'-phosphate
  modified_base 5: mod_base = OTHER; note = 2'-O-methyladenosine-3'-phosphate
  modified_base 6: mod_base = OTHER; note = 2'-fluorocytidine-3'-phosphate
  modified_base 7: mod_base = OTHER; note = 2'-O-methyladenosine-3'-phosphate
  modified_base 8: mod_base = OTHER; note = 2'-fluorouridine-3'-phosphate
  modified_base 9: mod_base = OTHER; note = 2'-fluorocytidine-3'-phosphate
  modified_base 10: mod_base = OTHER; note = 2'-O-methyladenosine-3'-phosphate
  modified_base 11: mod_base = OTHER; note = 2'-O-methylguanosine-3'-phosphate
  modified_base 12: mod_base = OTHER; note = 2'-O-methyluridine-3'-phosphate
  modified_base 13: mod_base = OTHER; note = 2'-O-methylguanosine-3'-phosphate
  modified_base 14: mod_base = OTHER; note = 2'-fluorocytidine-3'-phosphate
  modified_base 15: mod_base = OTHER; note = 2'-O-methylcytidine-3'-phosphate
  modified_base 16: mod_base = OTHER; note = 2'-fluorouridine-3'-phosphate
  modified_base 17: mod_base = OTHER; note = 2'-O-methyluridine-3'-phosphate
  modified_base 18: mod_base = OTHER; note = 2'-O-methyluridine-3'-phosphate
  modified_base 19: mod_base = OTHER; note = 2'-O-methylcytidine-3'-phosphate
  modified_base 20: mod_base = OTHER; note = 2'-O-methylcytidine-3'-phosphate
  modified_base 21: mod_base = OTHER; note = 2'-O-methylguanosine-3'-phosphorothioate
  modified_base 22: mod_base = OTHER; note = 2'-O-methylcytidine-3'-phosphorothioate
  modified_base 23: mod_base = OTHER; note = 2'-O-methyladenosine-3'-phosphate
cagaacatcagtgcctttccgca

SEQ ID NO: 1920 - RNA, 21 nt, synthetic construct
  source 1..21: mol_type = other RNA; note = Description of Artificial Sequence: Synthetic oligonucleotide
  modified_base 1: mod_base = OTHER; note = 2'-O-methylguanosine-3'-phosphorothioate
  modified_base 2: mod_base = OTHER; note = 2'-O-methylcytidine-3'-phosphorothioate
  modified_base 3: mod_base = OTHER; note = 2'-O-methylguanosine-3'-phosphate
  modified_base 4: mod_base = OTHER; note = 2'-O-methylguanosine-3'-phosphate
  modified_base 5: mod_base = OTHER; note = 2'-O-methyladenosine-3'-phosphate
  modified_base 6: mod_base = OTHER; note = 2'-O-methyladenosine-3'-phosphate
  modified_base 7: mod_base = OTHER; note = 2'-fluoroadenosine-3'-phosphate
  modified_base 8: mod_base = OTHER; note = 2'-O-methylguanosine-3'-phosphate
  modified_base 9: mod_base = OTHER; note = 2'-fluoroguanosine-3'-phosphate
  modified_base 10: mod_base = OTHER; note = 2'-fluorocytidine-3'-phosphate
  modified_base 11: mod_base = OTHER; note = 2'-fluoroadenosine-3'-phosphate
  modified_base 12: mod_base = OTHER; note = 2'-O-methylcytidine-3'-phosphate
  modified_base 13: mod_base = OTHER; note = 2'-O-methyluridine-3'-phosphate
  modified_base 14: mod_base = OTHER; note = 2'-O-methylguanosine-3'-phosphate
  modified_base 15: mod_base = OTHER; note = 2'-O-methyladenosine-3'-phosphate
  modified_base 16: mod_base = OTHER; note = 2'-O-methyluridine-3'-phosphate
  modified_base 17: mod_base = OTHER; note = 2'-O-methylguanosine-3'-phosphate
  modified_base 18: mod_base = OTHER; note = 2'-O-methyluridine-3'-phosphate
  modified_base 19: mod_base = OTHER; note = 2'-O-methyluridine-3'-phosphate
  modified_base 20: mod_base = OTHER; note = 2'-O-methylcytidine-3'-phosphate
  modified_base 21: mod_base = OTHER; note = 2'-O-methyluridine-3'-phosphate N-[tris(GalNAc-alkyl)-amidodecanoyl)]-4-hydroxyprolinol Hyp-(GalNAc-alkyl)3
gcggaaaggcactgatgttct

SEQ ID NO: 1921 - RNA, 23 nt, synthetic construct
  source 1..23: mol_type = other RNA; note = Description of Artificial Sequence: Synthetic oligonucleotide
  modified_base 1: mod_base = OTHER; note = 2'-O-methyladenosine-3'-phosphorothioate
  modified_base 2: mod_base = OTHER; note = 2'-fluoroguanosine-3'-phosphorothioate
  modified_base 3: mod_base = OTHER; note = 2'-O-methyladenosine-3'-phosphate
  modified_base 4: mod_base = OTHER; note = 2'-O-methyladenosine-3'-phosphate
  modified_base 5: mod_base = OTHER; note = 2'-O-methylcytidine-3'-phosphate
  modified_base 6: mod_base = OTHER; note = 2'-fluoroadenosine-3'-phosphate
  modified_base 7: mod_base = OTHER; note = 2'-O-methyluridine-3'-phosphate
  modified_base 8: mod_base = OTHER; note = 2'-fluorocytidine-3'-phosphate
  modified_base 9: mod_base = OTHER; note = 2'-fluoroadenosine-3'-phosphate
  modified_base 10: mod_base = OTHER; note = 2'-O-methylguanosine-3'-phosphate
  modified_base 11: mod_base = OTHER; note = 2'-O-methyluridine-3'-phosphate
  modified_base 12: mod_base = OTHER; note = 2'-O-methylguanosine-3'-phosphate
  modified_base 13: mod_base = OTHER; note = 2'-O-methylcytidine-3'-phosphate
  modified_base 14: mod_base = OTHER; note = 2'-fluorocytidine-3'-phosphate
  modified_base 15: mod_base = OTHER; note = 2'-O-methyluridine-3'-phosphate
  modified_base 16: mod_base = OTHER; note = 2'-fluorouridine-3'-phosphate
  modified_base 17: mod_base = OTHER; note = 2'-O-methyluridine-3'-phosphate
  modified_base 18: mod_base = OTHER; note = 2'-O-methylcytidine-3'-phosphate
  modified_base 19: mod_base = OTHER; note = 2'-O-methylcytidine-3'-phosphate
  modified_base 20: mod_base = OTHER; note = 2'-O-methylguanosine-3'-phosphate
  modified_base 21: mod_base = OTHER; note = 2'-O-methylcytidine-3'-phosphorothioate
  modified_base 22: mod_base = OTHER; note = 2'-O-methyladenosine-3'-phosphorothioate
  modified_base 23: mod_base = OTHER; note = 2'-O-methylcytidine-3'-phosphate
agaacatcagtgcctttccgcac

SEQ ID NO: 1922 - RNA, 21 nt, synthetic construct
  source 1..21: mol_type = other RNA; note = Description of Artificial Sequence: Synthetic oligonucleotide
  modified_base 1: mod_base = OTHER; note = 2'-O-methyladenosine-3'-phosphorothioate
  modified_base 2: mod_base = OTHER; note = 2'-O-methylguanosine-3'-phosphorothioate
  modified_base 3: mod_base = OTHER; note = 2'-O-methyladenosine-3'-phosphate
  modified_base 4: mod_base = OTHER; note = 2'-O-methyladenosine-3'-phosphate
  modified_base 5: mod_base = OTHER; note = 2'-O-methylguanosine-3'-phosphate
  modified_base 6: mod_base = OTHER; note = 2'-O-methyladenosine-3'-phosphate
  modified_base 7: mod_base = OTHER; note = 2'-fluorocytidine-3'-phosphate
  modified_base 8: mod_base = OTHER; note = 2'-O-methyluridine-3'-phosphate
  modified_base 9: mod_base = OTHER; note = 2'-fluoroguanosine-3'-phosphate
  modified_base 10: mod_base = OTHER; note = 2'-fluoroadenosine-3'-phosphate
  modified_base 11: mod_base = OTHER; note = 2'-fluorocytidine-3'-phosphate
  modified_base 12: mod_base = OTHER; note = 2'-O-methyladenosine-3'-phosphate
  modified_base 13: mod_base = OTHER; note = 2'-O-methyluridine-3'-phosphate
  modified_base 14: mod_base = OTHER; note = 2'-O-methylcytidine-3'-phosphate
  modified_base 15: mod_base = OTHER; note = 2'-O-methyladenosine-3'-phosphate
  modified_base 16: mod_base = OTHER; note = 2'-O-methyluridine-3'-phosphate
  modified_base 17: mod_base = OTHER; note = 2'-O-methyluridine-3'-phosphate
  modified_base 18: mod_base = OTHER; note = 2'-O-methylguanosine-3'-phosphate
  modified_base 19: mod_base = OTHER; note = 2'-O-methylcytidine-3'-phosphate
  modified_base 20: mod_base = OTHER; note = 2'-O-methylcytidine-3'-phosphate
  modified_base 21: mod_base = OTHER; note = 2'-O-methyladenosine-3'-phosphate N-[tris(GalNAc-alkyl)-amidodecanoyl)]-4-hydroxyprolinol Hyp-(GalNAc-alkyl)3
agaagactgacatcattgcca

SEQ ID NO: 1923 - RNA, 23 nt, synthetic construct
  source 1..23: mol_type = other RNA; note = Description of Artificial Sequence: Synthetic oligonucleotide
  modified_base 1: mod_base = OTHER; note = 2'-O-methyluridine-3'-phosphorothioate
  modified_base 2: mod_base = OTHER; note = 2'-fluoroguanosine-3'-phosphorothioate
  modified_base 3: mod_base = OTHER; note = 2'-O-methylguanosine-3'-phosphate
  modified_base 4: mod_base = OTHER; note = 2'-O-methylcytidine-3'-phosphate
  modified_base 5: mod_base = OTHER; note = 2'-O-methyladenosine-3'-phosphate
  modified_base 6: mod_base = OTHER; note = 2'-fluoroadenosine-3'-phosphate
  modified_base 7: mod_base = OTHER; note = 2'-O-methyluridine-3'-phosphate
  modified_base 8: mod_base = OTHER; note = 2'-fluoroguanosine-3'-phosphate
  modified_base 9: mod_base = OTHER; note = 2'-fluoroadenosine-3'-phosphate
  modified_base 10: mod_base = OTHER; note = 2'-O-methyluridine-3'-phosphate
  modified_base 11: mod_base = OTHER; note = 2'-O-methylguanosine-3'-phosphate
  modified_base 12: mod_base = OTHER; note = 2'-O-methyluridine-3'-phosphate
  modified_base 13: mod_base = OTHER; note = 2'-O-methylcytidine-3'-phosphate
  modified_base 14: mod_base = OTHER; note = 2'-fluoroadenosine-3'-phosphate
  modified_base 15: mod_base = OTHER; note = 2'-O-methylguanosine-3'-phosphate
  modified_base 16: mod_base = OTHER; note = 2'-fluorouridine-3'-phosphate
  modified_base 17: mod_base = OTHER; note = 2'-O-methylcytidine-3'-phosphate
  modified_base 18: mod_base = OTHER; note = 2'-O-methyluridine-3'-phosphate
  modified_base 19: mod_base = OTHER; note = 2'-O-methyluridine-3'-phosphate
  modified_base 20: mod_base = OTHER; note = 2'-O-methylcytidine-3'-phosphate
  modified_base 21: mod_base = OTHER; note = 2'-O-methyluridine-3'-phosphorothioate
  modified_base 22: mod_base = OTHER; note = 2'-O-methylcytidine-3'-phosphorothioate
  modified_base 23: mod_base = OTHER; note = 2'-O-methyladenosine-3'-phosphate
tggcaatgatgtcagtcttctca

SEQ ID NO: 1924 - RNA, 21 nt, synthetic construct
  source 1..21: mol_type = other RNA; note = Description of Artificial Sequence: Synthetic oligonucleotide
  modified_base 1: mod_base = OTHER; note = 2'-O-methylguanosine-3'-phosphorothioate
  modified_base 2: mod_base = OTHER; note = 2'-O-methyladenosine-3'-phosphorothioate
  modified_base 3: mod_base = OTHER; note = 2'-O-methyladenosine-3'-phosphate
  modified_base 4: mod_base = OTHER; note = 2'-O-methylguanosine-3'-phosphate
  modified_base 5: mod_base = OTHER; note = 2'-O-methyladenosine-3'-phosphate
  modified_base 6: mod_base = OTHER; note = 2'-O-methylcytidine-3'-phosphate
  modified_base 7: mod_base = OTHER; note = 2'-fluorouridine-3'-phosphate
  modified_base 8: mod_base = OTHER; note = 2'-O-methylguanosine-3'-phosphate
  modified_base 9: mod_base = OTHER; note = 2'-fluoroadenosine-3'-phosphate
  modified_base 10: mod_base = OTHER; note = 2'-fluorocytidine-3'-phosphate
  modified_base 11: mod_base = OTHER; note = 2'-fluoroadenosine-3'-phosphate
  modified_base 12: mod_base = OTHER; note = 2'-O-methyluridine-3'-phosphate
  modified_base 13: mod_base = OTHER; note = 2'-O-methylcytidine-3'-phosphate
  modified_base 14: mod_base = OTHER; note = 2'-O-methyladenosine-3'-phosphate
  modified_base 15: mod_base = OTHER; note = 2'-O-methyluridine-3'-phosphate
  modified_base 16: mod_base = OTHER; note = 2'-O-methyluridine-3'-phosphate
  modified_base 17: mod_base = OTHER; note = 2'-O-methylguanosine-3'-phosphate
  modified_base 18: mod_base = OTHER; note = 2'-O-methylcytidine-3'-phosphate
  modified_base 19: mod_base = OTHER; note = 2'-O-methylcytidine-3'-phosphate
  modified_base 20: mod_base = OTHER; note = 2'-O-methyladenosine-3'-phosphate
  modified_base 21: mod_base = OTHER; note = 2'-O-methyladenosine-3'-phosphate N-[tris(GalNAc-alkyl)-amidodecanoyl)]-4-hydroxyprolinol Hyp-(GalNAc-alkyl)3
gaagactgacatcattgccaa

SEQ ID NO: 1925 - RNA, 23 nt, synthetic construct
  source 1..23: mol_type = other RNA; note = Description of Artificial Sequence: Synthetic oligonucleotide
  modified_base 1: mod_base = OTHER; note = 2'-O-methyluridine-3'-phosphorothioate
  modified_base 2: mod_base = OTHER; note = 2'-fluorouridine -3'-phosphorothioate
  modified_base 3: mod_base = OTHER; note = 2'-O-methylguanosine-3'-phosphate
  modified_base 4: mod_base = OTHER; note = 2'-O-methylguanosine-3'-phosphate
  modified_base 5: mod_base = OTHER; note = 2'-O-methylcytidine-3'-phosphate
  modified_base 6: mod_base = OTHER; note = 2'-fluoroadenosine-3'-phosphate
  modified_base 7: mod_base = OTHER; note = 2'-O-methyladenosine-3'-phosphate
  modified_base 8: mod_base = OTHER; note = 2'-fluorouridine-3'-phosphate
  modified_base 9: mod_base = OTHER; note = 2'-fluoroguanosine-3'-phosphate
  modified_base 10: mod_base = OTHER; note = 2'-O-methyladenosine-3'-phosphate
  modified_base 11: mod_base = OTHER; note = 2'-O-methyluridine-3'-phosphate
  modified_base 12: mod_base = OTHER; note = 2'-O-methylguanosine-3'-phosphate
  modified_base 13: mod_base = OTHER; note = 2'-O-methyluridine-3'-phosphate
  modified_base 14: mod_base = OTHER; note = 2'-fluorocytidine-3'-phosphate
  modified_base 15: mod_base = OTHER; note = 2'-O-methyladenosine-3'-phosphate
  modified_base 16: mod_base = OTHER; note = 2'-fluoroguanosine-3'-phosphate
  modified_base 17: mod_base = OTHER; note = 2'-O-methyluridine-3'-phosphate
  modified_base 18: mod_base = OTHER; note = 2'-O-methylcytidine-3'-phosphate
  modified_base 19: mod_base = OTHER; note = 2'-O-methyluridine-3'-phosphate
  modified_base 20: mod_base = OTHER; note = 2'-O-methyluridine-3'-phosphate
  modified_base 21: mod_base = OTHER; note = 2'-O-methylcytidine-3'-phosphorothioate
  modified_base 22: mod_base = OTHER; note = 2'-O-methyluridine-3'-phosphorothioate
  modified_base 23: mod_base = OTHER; note = 2'-O-methylcytidine-3'-phosphate
ttggcaatgatgtcagtcttctc

SEQ ID NO: 1926 - RNA, 21 nt, synthetic construct
  source 1..21: mol_type = other RNA; note = Description of Artificial Sequence: Synthetic oligonucleotide
  modified_base 1: mod_base = OTHER; note = 2'-O-methylguanosine-3'-phosphorothioate
  modified_base 2: mod_base = OTHER; note = 2'-O-methylcytidine-3'-phosphorothioate
  modified_base 3: mod_base = OTHER; note = 2'-O-methyluridine-3'-phosphate
  modified_base 4: mod_base = OTHER; note = 2'-O-methylguanosine-3'-phosphate
  modified_base 5: mod_base = OTHER; note = 2'-O-methyladenosine-3'-phosphate
  modified_base 6: mod_base = OTHER; note = 2'-O-methylguanosine-3'-phosphate
  modified_base 7: mod_base = OTHER; note = 2'-fluoroadenosine-3'-phosphate
  modified_base 8: mod_base = OTHER; note = 2'-O-methyladenosine-3'-phosphate
  modified_base 9: mod_base = OTHER; note = 2'-fluoroguanosine-3'-phosphate
  modified_base 10: mod_base = OTHER; note = 2'-fluoroadenosine-3'-phosphate
  modified_base 11: mod_base = OTHER; note = 2'-fluorocytidine-3'-phosphate
  modified_base 12: mod_base = OTHER; note = 2'-O-methyluridine-3'-phosphate
  modified_base 13: mod_base = OTHER; note = 2'-O-methylguanosine-3'-phosphate
  modified_base 14: mod_base = OTHER; note = 2'-O-methyladenosine-3'-phosphate
  modified_base 15: mod_base = OTHER; note = 2'-O-methylcytidine-3'-phosphate
  modified_base 16: mod_base = OTHER; note = 2'-O-methyladenosine-3'-phosphate
  modified_base 17: mod_base = OTHER; note = 2'-O-methyluridine-3'-phosphate
  modified_base 18: mod_base = OTHER; note = 2'-O-methylcytidine-3'-phosphate
  modified_base 19: mod_base = OTHER; note = 2'-O-methyladenosine-3'-phosphate
  modified_base 20: mod_base = OTHER; note = 2'-O-methyluridine-3'-phosphate
  modified_base 21: mod_base = OTHER; note = 2'-O-methyluridine-3'-phosphate N-[tris(GalNAc-alkyl)-amidodecanoyl)]-4-hydroxyprolinol Hyp-(GalNAc-alkyl)3
gctgagaagactgacatcatt

SEQ ID NO: 1927 - RNA, 23 nt, synthetic construct
  source 1..23: mol_type = other RNA; note = Description of Artificial Sequence: Synthetic oligonucleotide
  modified_base 1: mod_base = OTHER; note = 2'-O-methyladenosine-3'-phosphorothioate
  modified_base 2: mod_base = OTHER; note = 2'-fluoroadenosine-3'-phosphorothioate
  modified_base 3: mod_base = OTHER; note = 2'-O-methyluridine-3'-phosphate
  modified_base 4: mod_base = OTHER; note = 2'-O-methylguanosine-3'-phosphate
  modified_base 5: mod_base = OTHER; note = 2'-O-methyladenosine-3'-phosphate
  modified_base 6: mod_base = OTHER; note = 2'-fluorouridine-3'-phosphate
  modified_base 7: mod_base = OTHER; note = 2'-O-methylguanosine-3'-phosphate
  modified_base 8: mod_base = OTHER; note = 2'-fluorouridine-3'-phosphate
  modified_base 9: mod_base = OTHER; note = 2'-fluorocytidine-3'-phosphate
  modified_base 10: mod_base = OTHER; note = 2'-O-methyladenosine-3'-phosphate
  modified_base 11: mod_base = OTHER; note = 2'-O-methylguanosine-3'-phosphate
  modified_base 12: mod_base = OTHER; note = 2'-O-methyluridine-3'-phosphate
  modified_base 13: mod_base = OTHER; note = 2'-O-methylcytidine-3'-phosphate
  modified_base 14: mod_base = OTHER; note = 2'-fluorouridine-3'-phosphate
  modified_base 15: mod_base = OTHER; note = 2'-O-methyluridine-3'-phosphate
  modified_base 16: mod_base = OTHER; note = 2'-fluorocytidine-3'-phosphate
  modified_base 17: mod_base = OTHER; note = 2'-O-methyluridine-3'-phosphate
  modified_base 18: mod_base = OTHER; note = 2'-O-methylcytidine-3'-phosphate
  modified_base 19: mod_base = OTHER; note = 2'-O-methyladenosine-3'-phosphate
  modified_base 20: mod_base = OTHER; note = 2'-O-methylguanosine-3'-phosphate
  modified_base 21: mod_base = OTHER; note = 2'-O-methylcytidine-3'-phosphorothioate
  modified_base 22: mod_base = OTHER; note = 2'-O-methylcytidine-3'-phosphorothioate
  modified_base 23: mod_base = OTHER; note = 2'-O-methyladenosine-3'-phosphate
aatgatgtcagtcttctcagcca

SEQ ID NO: 1928 - RNA, 21 nt, synthetic construct
  source 1..21: mol_type = other RNA; note = Description of Artificial Sequence: Synthetic oligonucleotide
  modified_base 1: mod_base = OTHER; note = 2'-O-methylguanosine-3'-phosphorothioate
  modified_base 2: mod_base = OTHER; note = 2'-O-methylguanosine-3'-phosphorothioate
  modified_base 3: mod_base = OTHER; note = 2'-O-methylcytidine-3'-phosphate
  modified_base 4: mod_base = OTHER; note = 2'-O-methyluridine-3'-phosphate
  modified_base 5: mod_base = OTHER; note = 2'-O-methylguanosine-3'-phosphate
  modified_base 6: mod_base = OTHER; note = 2'-O-methyladenosine-3'-phosphate
  modified_base 7: mod_base = OTHER; note = 2'-fluoroguanosine-3'-phosphate
  modified_base 8: mod_base = OTHER; note = 2'-O-methyladenosine-3'-phosphate
  modified_base 9: mod_base = OTHER; note = 2'-fluoroadenosine-3'-phosphate
  modified_base 10: mod_base = OTHER; note = 2'-fluoroguanosine-3'-phosphate
  modified_base 11: mod_base = OTHER; note = 2'-fluoroadenosine-3'-phosphate
  modified_base 12: mod_base = OTHER; note = 2'-O-methylcytidine-3'-phosphate
  modified_base 13: mod_base = OTHER; note = 2'-O-methyluridine-3'-phosphate
  modified_base 14: mod_base = OTHER; note = 2'-O-methylguanosine-3'-phosphate
  modified_base 15: mod_base = OTHER; note = 2'-O-methyladenosine-3'-phosphate
  modified_base 16: mod_base = OTHER; note = 2'-O-methylcytidine-3'-phosphate
  modified_base 17: mod_base = OTHER; note = 2'-O-methyladenosine-3'-phosphate
  modified_base 18: mod_base = OTHER; note = 2'-O-methyluridine-3'-phosphate
  modified_base 19: mod_base = OTHER; note = 2'-O-methylcytidine-3'-phosphate
  modified_base 20: mod_base = OTHER; note = 2'-O-methyladenosine-3'-phosphate
  modified_base 21: mod_base = OTHER; note = 2'-O-methyluridine-3'-phosphate N-[tris(GalNAc-alkyl)-amidodecanoyl)]-4-hydroxyprolinol Hyp-(GalNAc-alkyl)3
ggctgagaagactgacatcat

SEQ ID NO: 1929 - RNA, 23 nt, synthetic construct
  source 1..23: mol_type = other RNA; note = Description of Artificial Sequence: Synthetic oligonucleotide
  modified_base 1: mod_base = OTHER; note = 2'-O-methyladenosine-3'-phosphorothioate
  modified_base 2: mod_base = OTHER; note = 2'-fluorouridine -3'-phosphorothioate
  modified_base 3: mod_base = OTHER; note = 2'-O-methylguanosine-3'-phosphate
  modified_base 4: mod_base = OTHER; note = 2'-O-methyladenosine-3'-phosphate
  modified_base 5: mod_base = OTHER; note = 2'-O-methyluridine-3'-phosphate
  modified_base 6: mod_base = OTHER; note = 2'-fluoroguanosine-3'-phosphate
  modified_base 7: mod_base = OTHER; note = 2'-O-methyluridine-3'-phosphate
  modified_base 8: mod_base = OTHER; note = 2'-fluorocytidine-3'-phosphate
  modified_base 9: mod_base = OTHER; note = 2'-fluoroadenosine-3'-phosphate
  modified_base 10: mod_base = OTHER; note = 2'-O-methylguanosine-3'-phosphate
  modified_base 11: mod_base = OTHER; note = 2'-O-methyluridine-3'-phosphate
  modified_base 12: mod_base = OTHER; note = 2'-O-methylcytidine-3'-phosphate
  modified_base 13: mod_base = OTHER; note = 2'-O-methyluridine-3'-phosphate
  modified_base 14: mod_base = OTHER; note = 2'-fluorouridine-3'-phosphate
  modified_base 15: mod_base = OTHER; note = 2'-O-methylcytidine-3'-phosphate
  modified_base 16: mod_base = OTHER; note = 2'-fluorouridine-3'-phosphate
  modified_base 17: mod_base = OTHER; note = 2'-O-methylcytidine-3'-phosphate
  modified_base 18: mod_base = OTHER; note = 2'-O-methyladenosine-3'-phosphate
  modified_base 19: mod_base = OTHER; note = 2'-O-methylguanosine-3'-phosphate
  modified_base 20: mod_base = OTHER; note = 2'-O-methylcytidine-3'-phosphate
  modified_base 21: mod_base = OTHER; note = 2'-O-methylcytidine-3'-phosphorothioate
  modified_base 22: mod_base = OTHER; note = 2'-O-methyladenosine-3'-phosphorothioate
  modified_base 23: mod_base = OTHER; note = 2'-O-methyluridine-3'-phosphate
atgatgtcagtcttctcagccat

SEQ ID NO: 1930 - RNA, 21 nt, synthetic construct
  source 1..21: mol_type = other RNA; note = Description of Artificial Sequence: Synthetic oligonucleotide
  modified_base 1: mod_base = OTHER; note = 2'-O-methyluridine-3'-phosphorothioate
  modified_base 2: mod_base = OTHER; note = 2'-O-methyladenosine-3'-phosphorothioate
  modified_base 3: mod_base = OTHER; note = 2'-O-methyladenosine-3'-phosphate
  modified_base 4: mod_base = OTHER; note = 2'-O-methyluridine-3'-phosphate
  modified_base 5: mod_base = OTHER; note = 2'-O-methylguanosine-3'-phosphate
  modified_base 6: mod_base = OTHER; note = 2'-O-methylcytidine-3'-phosphate
  modified_base 7: mod_base = OTHER; note = 2'-fluorocytidine-3'-phosphate
  modified_base 8: mod_base = OTHER; note = 2'-O-methyluridine-3'-phosphate
  modified_base 9: mod_base = OTHER; note = 2'-fluoroguanosine-3'-phosphate
  modified_base 10: mod_base = OTHER; note = 2'-fluoroadenosine-3'-phosphate
  modified_base 11: mod_base = OTHER; note = 2'-fluorouridine-3'-phosphate
  modified_base 12: mod_base = OTHER; note = 2'-O-methyluridine-3'-phosphate
  modified_base 13: mod_base = OTHER; note = 2'-O-methylcytidine-3'-phosphate
  modified_base 14: mod_base = OTHER; note = 2'-O-methyladenosine-3'-phosphate
  modified_base 15: mod_base = OTHER; note = 2'-O-methylcytidine-3'-phosphate
  modified_base 16: mod_base = OTHER; note = 2'-O-methyladenosine-3'-phosphate
  modified_base 17: mod_base = OTHER; note = 2'-O-methyladenosine-3'-phosphate
  modified_base 18: mod_base = OTHER; note = 2'-O-methylcytidine-3'-phosphate
  modified_base 19: mod_base = OTHER; note = 2'-O-methyluridine-3'-phosphate
  modified_base 20: mod_base = OTHER; note = 2'-O-methyluridine-3'-phosphate
  modified_base 21: mod_base = OTHER; note = 2'-O-methyluridine-3'-phosphate N-[tris(GalNAc-alkyl)-amidodecanoyl)]-4-hydroxyprolinol Hyp-(GalNAc-alkyl)3
taatgcctgattcacaacttt

SEQ ID NO: 1931 - RNA, 23 nt, synthetic construct
  source 1..23: mol_type = other RNA; note = Description of Artificial Sequence: Synthetic oligonucleotide
  modified_base 1: mod_base = OTHER; note = 2'-O-methyladenosine-3'-phosphorothioate
  modified_base 2: mod_base = OTHER; note = 2'-fluoroadenosine-3'-phosphorothioate
  modified_base 3: mod_base = OTHER; note = 2'-O-methyladenosine-3'-phosphate
  modified_base 4: mod_base = OTHER; note = 2'-O-methylguanosine-3'-phosphate
  modified_base 5: mod_base = OTHER; note = 2'-O-methyluridine-3'-phosphate
  modified_base 6: mod_base = OTHER; note = 2'-fluorouridine-3'-phosphate
  modified_base 7: mod_base = OTHER; note = 2'-O-methylguanosine-3'-phosphate
  modified_base 8: mod_base = OTHER; note = 2'-fluorouridine-3'-phosphate
  modified_base 9: mod_base = OTHER; note = 2'-fluoroguanosine-3'-phosphate
  modified_base 10: mod_base = OTHER; note = 2'-O-methyladenosine-3'-phosphate
  modified_base 11: mod_base = OTHER; note = 2'-O-methyladenosine-3'-phosphate
  modified_base 12: mod_base = OTHER; note = 2'-O-methyluridine-3'-phosphate
  modified_base 13: mod_base = OTHER; note = 2'-O-methylcytidine-3'-phosphate
  modified_base 14: mod_base = OTHER; note = 2'-fluoroadenosine-3'-phosphate
  modified_base 15: mod_base = OTHER; note = 2'-O-methylguanosine-3'-phosphate
  modified_base 16: mod_base = OTHER; note = 2'-fluoroguanosine-3'-phosphate
  modified_base 17: mod_base = OTHER; note = 2'-O-methylcytidine-3'-phosphate
  modified_base 18: mod_base = OTHER; note = 2'-O-methyladenosine-3'-phosphate
  modified_base 19: mod_base = OTHER; note = 2'-O-methyluridine-3'-phosphate
  modified_base 20: mod_base = OTHER; note = 2'-O-methyluridine-3'-phosphate
  modified_base 21: mod_base = OTHER; note = 2'-O-methyladenosine-3'-phosphorothioate
  modified_base 22: mod_base = OTHER; note = 2'-O-methylcytidine-3'-phosphorothioate
  modified_base 23: mod_base = OTHER; note = 2'-O-methylcytidine-3'-phosphate
aaagttgtgaatcaggcattacc

SEQ ID NO: 1932 - RNA, 21 nt, synthetic construct
  source 1..21: mol_type = other RNA; note = Description of Artificial Sequence: Synthetic oligonucleotide
  modified_base 1: mod_base = OTHER; note = 2'-O-methyladenosine-3'-phosphorothioate
  modified_base 2: mod_base = OTHER; note = 2'-O-methyladenosine-3'-phosphorothioate
  modified_base 3: mod_base = OTHER; note = 2'-O-methyluridine-3'-phosphate
  modified_base 4: mod_base = OTHER; note = 2'-O-methylguanosine-3'-phosphate
  modified_base 5: mod_base = OTHER; note = 2'-O-methylcytidine-3'-phosphate
  modified_base 6: mod_base = OTHER; note = 2'-O-methylcytidine-3'-phosphate
  modified_base 7: mod_base = OTHER; note = 2'-fluorouridine-3'-phosphate
  modified_base 8: mod_base = OTHER; note = 2'-O-methylguanosine-3'-phosphate
  modified_base 9: mod_base = OTHER; note = 2'-fluoroadenosine-3'-phosphate
  modified_base 10: mod_base = OTHER; note = 2'-fluorouridine-3'-phosphate
  modified_base 11: mod_base = OTHER; note = 2'-fluorouridine-3'-phosphate
  modified_base 12: mod_base = OTHER; note = 2'-O-methylcytidine-3'-phosphate
  modified_base 13: mod_base = OTHER; note = 2'-O-methyladenosine-3'-phosphate
  modified_base 14: mod_base = OTHER; note = 2'-O-methylcytidine-3'-phosphate
  modified_base 15: mod_base = OTHER; note = 2'-O-methyladenosine-3'-phosphate
  modified_base 16: mod_base = OTHER; note = 2'-O-methyladenosine-3'-phosphate
  modified_base 17: mod_base = OTHER; note = 2'-O-methylcytidine-3'-phosphate
  modified_base 18: mod_base = OTHER; note = 2'-O-methyluridine-3'-phosphate
  modified_base 19: mod_base = OTHER; note = 2'-O-methyluridine-3'-phosphate
  modified_base 20: mod_base = OTHER; note = 2'-O-methyluridine-3'-phosphate
  modified_base 21: mod_base = OTHER; note = 2'-O-methylguanosine-3'-phosphate N-[tris(GalNAc-alkyl)-amidodecanoyl)]-4-hydroxyprolinol Hyp-(GalNAc-alkyl)3
aatgcctgattcacaactttg

SEQ ID NO: 1933 - RNA, 23 nt, synthetic construct
  source 1..23: mol_type = other RNA; note = Description of Artificial Sequence: Synthetic oligonucleotide
  modified_base 1: mod_base = OTHER; note = 2'-O-methylcytidine-3'-phosphorothioate
  modified_base 2: mod_base = OTHER; note = 2'-fluoroadenosine-3'-phosphorothioate
  modified_base 3: mod_base = OTHER; note = 2'-O-methyladenosine-3'-phosphate
  modified_base 4: mod_base = OTHER; note = 2'-O-methyladenosine-3'-phosphate
  modified_base 5: mod_base = OTHER; note = 2'-O-methylguanosine-3'-phosphate
  modified_base 6: mod_base = OTHER; note = 2'-fluorouridine-3'-phosphate
  modified_base 7: mod_base = OTHER; note = 2'-O-methyluridine-3'-phosphate
  modified_base 8: mod_base = OTHER; note = 2'-fluoroguanosine-3'-phosphate
  modified_base 9: mod_base = OTHER; note = 2'-fluorouridine-3'-phosphate
  modified_base 10: mod_base = OTHER; note = 2'-O-methylguanosine-3'-phosphate
  modified_base 11: mod_base = OTHER; note = 2'-O-methyladenosine-3'-phosphate
  modified_base 12: mod_base = OTHER; note = 2'-O-methyladenosine-3'-phosphate
  modified_base 13: mod_base = OTHER; note = 2'-O-methyluridine-3'-phosphate
  modified_base 14: mod_base = OTHER; note = 2'-fluorocytidine-3'-phosphate
  modified_base 15: mod_base = OTHER; note = 2'-O-methyladenosine-3'-phosphate
  modified_base 16: mod_base = OTHER; note = 2'-fluoroguanosine-3'-phosphate
  modified_base 17: mod_base = OTHER; note = 2'-O-methylguanosine-3'-phosphate
  modified_base 18: mod_base = OTHER; note = 2'-O-methylcytidine-3'-phosphate
  modified_base 19: mod_base = OTHER; note = 2'-O-methyladenosine-3'-phosphate
  modified_base 20: mod_base = OTHER; note = 2'-O-methyluridine-3'-phosphate
  modified_base 21: mod_base = OTHER; note = 2'-O-methyluridine-3'-phosphorothioate
  modified_base 22: mod_base = OTHER; note = 2'-O-methyladenosine-3'-phosphorothioate
  modified_base 23: mod_base = OTHER; note = 2'-O-methylcytidine-3'-phosphate
caaagttgtgaatcaggcattac

SEQ ID NO: 1934 - RNA, 21 nt, synthetic construct
  source 1..21: mol_type = other RNA; note = Description of Artificial Sequence: Synthetic oligonucleotide
  modified_base 1: mod_base = OTHER; note = 2'-O-methyluridine-3'-phosphorothioate
  modified_base 2: mod_base = OTHER; note = 2'-O-methyluridine-3'-phosphorothioate
  modified_base 3: mod_base = OTHER; note = 2'-O-methylguanosine-3'-phosphate
  modified_base 4: mod_base = OTHER; note = 2'-O-methylguanosine-3'-phosphate
  modified_base 5: mod_base = OTHER; note = 2'-O-methyluridine-3'-phosphate
  modified_base 6: mod_base = OTHER; note = 2'-O-methyladenosine-3'-phosphate
  modified_base 7: mod_base = OTHER; note = 2'-fluoroadenosine-3'-phosphate
  modified_base 8: mod_base = OTHER; note = 2'-O-methyluridine-3'-phosphate
  modified_base 9: mod_base = OTHER; note = 2'-fluoroguanosine-3'-phosphate
  modified_base 10: mod_base = OTHER; note = 2'-fluorocytidine-3'-phosphate
  modified_base 11: mod_base = OTHER; note = 2'-fluorocytidine-3'-phosphate
  modified_base 12: mod_base = OTHER; note = 2'-O-methyluridine-3'-phosphate
  modified_base 13: mod_base = OTHER; note = 2'-O-methylguanosine-3'-phosphate
  modified_base 14: mod_base = OTHER; note = 2'-O-methyladenosine-3'-phosphate
  modified_base 15: mod_base = OTHER; note = 2'-O-methyluridine-3'-phosphate
  modified_base 16: mod_base = OTHER; note = 2'-O-methyluridine-3'-phosphate
  modified_base 17: mod_base = OTHER; note = 2'-O-methylcytidine-3'-phosphate
  modified_base 18: mod_base = OTHER; note = 2'-O-methyladenosine-3'-phosphate
  modified_base 19: mod_base = OTHER; note = 2'-O-methylcytidine-3'-phosphate
  modified_base 20: mod_base = OTHER; note = 2'-O-methyladenosine-3'-phosphate
  modified_base 21: mod_base = OTHER; note = 2'-O-methyladenosine-3'-phosphate N-[tris(GalNAc-alkyl)-amidodecanoyl)]-4-hydroxyprolinol Hyp-(GalNAc-alkyl)3
ttggtaatgcctgattcacaa

SEQ ID NO: 1935 - RNA, 23 nt, synthetic construct
  source 1..23: mol_type = other RNA; note = Description of Artificial Sequence: Synthetic oligonucleotide
  modified_base 1: mod_base = OTHER; note = 2'-O-methyluridine-3'-phosphorothioate
  modified_base 2: mod_base = OTHER; note = 2'-fluorouridine -3'-phosphorothioate
  modified_base 3: mod_base = OTHER; note = 2'-O-methylguanosine-3'-phosphate
  modified_base 4: mod_base = OTHER; note = 2'-O-methyluridine-3'-phosphate
  modified_base 5: mod_base = OTHER; note = 2'-O-methylguanosine-3'-phosphate
  modified_base 6: mod_base = OTHER; note = 2'-fluoroadenosine-3'-phosphate
  modified_base 7: mod_base = OTHER; note = 2'-O-methyladenosine-3'-phosphate
  modified_base 8: mod_base = OTHER; note = 2'-fluorouridine-3'-phosphate
  modified_base 9: mod_base = OTHER; note = 2'-fluorocytidine-3'-phosphate
  modified_base 10: mod_base = OTHER; note = 2'-O-methyladenosine-3'-phosphate
  modified_base 11: mod_base = OTHER; note = 2'-O-methylguanosine-3'-phosphate
  modified_base 12: mod_base = OTHER; note = 2'-O-methylguanosine-3'-phosphate
  modified_base 13: mod_base = OTHER; note = 2'-O-methylcytidine-3'-phosphate
  modified_base 14: mod_base = OTHER; note = 2'-fluoroadenosine-3'-phosphate
  modified_base 15: mod_base = OTHER; note = 2'-O-methyluridine-3'-phosphate
  modified_base 16: mod_base = OTHER; note = 2'-fluorouridine-3'-phosphate
  modified_base 17: mod_base = OTHER; note = 2'-O-methyladenosine-3'-phosphate
  modified_base 18: mod_base = OTHER; note = 2'-O-methylcytidine-3'-phosphate
  modified_base 19: mod_base = OTHER; note = 2'-O-methylcytidine-3'-phosphate
  modified_base 20: mod_base = OTHER; note = 2'-O-methyladenosine-3'-phosphate
  modified_base 21: mod_base = OTHER; note = 2'-O-methyladenosine-3'-phosphorothioate
  modified_base 22: mod_base = OTHER; note = 2'-O-methylcytidine-3'-phosphorothioate
  modified_base 23: mod_base = OTHER; note = 2'-O-methyladenosine-3'-phosphate
ttgtgaatcaggcattaccaaca

SEQ ID NO: 1936 - RNA, 21 nt, synthetic construct
  source 1..21: mol_type = other RNA; note = Description of Artificial Sequence: Synthetic oligonucleotide
  modified_base 1: mod_base = OTHER; note = 2'-O-methylguanosine-3'-phosphorothioate
  modified_base 2: mod_base = OTHER; note = 2'-O-methyluridine-3'-phosphorothioate
  modified_base 3: mod_base = OTHER; note = 2'-O-methyluridine-3'-phosphate
  modified_base 4: mod_base = OTHER; note = 2'-O-methylguanosine-3'-phosphate
  modified_base 5: mod_base = OTHER; note = 2'-O-methylguanosine-3'-phosphate
  modified_base 6: mod_base = OTHER; note = 2'-O-methyluridine-3'-phosphate
  modified_base 7: mod_base = OTHER; note = 2'-fluoroadenosine-3'-phosphate
  modified_base 8: mod_base = OTHER; note = 2'-O-methyladenosine-3'-phosphate
  modified_base 9: mod_base = OTHER; note = 2'-fluorouridine-3'-phosphate
  modified_base 10: mod_base = OTHER; note = 2'-fluoroguanosine-3'-phosphate
  modified_base 11: mod_base = OTHER; note = 2'-fluorocytidine-3'-phosphate
  modified_base 12: mod_base = OTHER; note = 2'-O-methylcytidine-3'-phosphate
  modified_base 13: mod_base = OTHER; note = 2'-O-methyluridine-3'-phosphate
  modified_base 14: mod_base = OTHER; note = 2'-O-methylguanosine-3'-phosphate
  modified_base 15: mod_base = OTHER; note = 2'-O-methyladenosine-3'-phosphate
  modified_base 16: mod_base = OTHER; note = 2'-O-methyluridine-3'-phosphate
  modified_base 17: mod_base = OTHER; note = 2'-O-methyluridine-3'-phosphate
  modified_base 18: mod_base = OTHER; note = 2'-O-methylcytidine-3'-phosphate
  modified_base 19: mod_base = OTHER; note = 2'-O-methyladenosine-3'-phosphate
  modified_base 20: mod_base = OTHER; note = 2'-O-methylcytidine-3'-phosphate
  modified_base 21: mod_base = OTHER; note = 2'-O-methyladenosine-3'-phosphate N-[tris(GalNAc-alkyl)-amidodecanoyl)]-4-hydroxyprolinol Hyp-(GalNAc-alkyl)3
gttggtaatgcctgattcaca

SEQ ID NO: 1937 - RNA, 23 nt, synthetic construct
  source 1..23: mol_type = other RNA; note = Description of Artificial Sequence: Synthetic oligonucleotide
  modified_base 1: mod_base = OTHER; note = 2'-O-methyluridine-3'-phosphorothioate
  modified_base 2: mod_base = OTHER; note = 2'-fluoroguanosine-3'-phosphorothioate
  modified_base 3: mod_base = OTHER; note = 2'-O-methyluridine-3'-phosphate
  modified_base 4: mod_base = OTHER; note = 2'-O-methylguanosine-3'-phosphate
  modified_base 5: mod_base = OTHER; note = 2'-O-methyladenosine-3'-phosphate
  modified_base 6: mod_base = OTHER; note = 2'-fluoroadenosine-3'-phosphate
  modified_base 7: mod_base = OTHER; note = 2'-O-methyluridine-3'-phosphate
  modified_base 8: mod_base = OTHER; note = 2'-fluorocytidine-3'-phosphate
  modified_base 9: mod_base = OTHER; note = 2'-fluoroadenosine-3'-phosphate
  modified_base 10: mod_base = OTHER; note = 2'-O-methylguanosine-3'-phosphate
  modified_base 11: mod_base = OTHER; note = 2'-O-methylguanosine-3'-phosphate
  modified_base 12: mod_base = OTHER; note = 2'-O-methylcytidine-3'-phosphate
  modified_base 13: mod_base = OTHER; note = 2'-O-methyladenosine-3'-phosphate
  modified_base 14: mod_base = OTHER; note = 2'-fluorouridine-3'-phosphate
  modified_base 15: mod_base = OTHER; note = 2'-O-methyluridine-3'-phosphate
  modified_base 16: mod_base = OTHER; note = 2'-fluoroadenosine-3'-phosphate
  modified_base 17: mod_base = OTHER; note = 2'-O-methylcytidine-3'-phosphate
  modified_base 18: mod_base = OTHER; note = 2'-O-methylcytidine-3'-phosphate
  modified_base 19: mod_base = OTHER; note = 2'-O-methyladenosine-3'-phosphate
  modified_base 20: mod_base = OTHER; note = 2'-O-methyladenosine-3'-phosphate
  modified_base 21: mod_base = OTHER; note = 2'-O-methylcytidine-3'-phosphorothioate
  modified_base 22: mod_base = OTHER; note = 2'-O-methyladenosine-3'-phosphorothioate
  modified_base 23: mod_base = OTHER; note = 2'-O-methylcytidine-3'-phosphate
tgtgaatcaggcattaccaacac

SEQ ID NO: 1938 - RNA, 21 nt, synthetic construct
  source 1..21: mol_type = other RNA; note = Description of Artificial Sequence: Synthetic oligonucleotide
  modified_base 1: mod_base = OTHER; note = 2'-O-methyluridine-3'-phosphorothioate
  modified_base 2: mod_base = OTHER; note = 2'-O-methyladenosine-3'-phosphorothioate
  modified_base 3: mod_base = OTHER; note = 2'-O-methyluridine-3'-phosphate
  modified_base 4: mod_base = OTHER; note = 2'-O-methylcytidine-3'-phosphate
  modified_base 5: mod_base = OTHER; note = 2'-O-methyladenosine-3'-phosphate
  modified_base 6: mod_base = OTHER; note = 2'-O-methyladenosine-3'-phosphate
  modified_base 7: mod_base = OTHER; note = 2'-fluoroadenosine-3'-phosphate
  modified_base 8: mod_base = OTHER; note = 2'-O-methyluridine-3'-phosphate
  modified_base 9: mod_base = OTHER; note = 2'-fluoroguanosine-3'-phosphate
  modified_base 10: mod_base = OTHER; note = 2'-fluoroguanosine-3'-phosphate
  modified_base 11: mod_base = OTHER; note = 2'-fluorocytidine-3'-phosphate
  modified_base 12: mod_base = OTHER; note = 2'-O-methyluridine-3'-phosphate
  modified_base 13: mod_base = OTHER; note = 2'-O-methylguanosine-3'-phosphate
  modified_base 14: mod_base = OTHER; note = 2'-O-methyladenosine-3'-phosphate
  modified_base 15: mod_base = OTHER; note = 2'-O-methylguanosine-3'-phosphate
  modified_base 16: mod_base = OTHER; note = 2'-O-methyladenosine-3'-phosphate
  modified_base 17: mod_base = OTHER; note = 2'-O-methyladenosine-3'-phosphate
  modified_base 18: mod_base = OTHER; note = 2'-O-methylguanosine-3'-phosphate
  modified_base 19: mod_base = OTHER; note = 2'-O-methyladenosine-3'-phosphate
  modified_base 20: mod_base = OTHER; note = 2'-O-methylcytidine-3'-phosphate
  modified_base 21: mod_base = OTHER; note = 2'-O-methyluridine-3'-phosphate N-[tris(GalNAc-alkyl)-amidodecanoyl)]-4-hydroxyprolinol Hyp-(GalNAc-alkyl)3
tatcaaatggctgagaagact

SEQ ID NO: 1939 - RNA, 23 nt, synthetic construct
  source 1..23: mol_type = other RNA; note = Description of Artificial Sequence: Synthetic oligonucleotide
  modified_base 1: mod_base = OTHER; note = 2'-O-methyladenosine-3'-phosphorothioate
  modified_base 2: mod_base = OTHER; note = 2'-fluoroguanosine-3'-phosphorothioate
  modified_base 3: mod_base = OTHER; note = 2'-O-methyluridine-3'-phosphate
  modified_base 4: mod_base = OTHER; note = 2'-O-methylcytidine-3'-phosphate
  modified_base 5: mod_base = OTHER; note = 2'-O-methyluridine-3'-phosphate
  modified_base 6: mod_base = OTHER; note = 2'-fluorouridine-3'-phosphate
  modified_base 7: mod_base = OTHER; note = 2'-O-methylcytidine-3'-phosphate
  modified_base 8: mod_base = OTHER; note = 2'-fluorouridine-3'-phosphate
  modified_base 9: mod_base = OTHER; note = 2'-fluorocytidine-3'-phosphate
  modified_base 10: mod_base = OTHER; note = 2'-O-methyladenosine-3'-phosphate
  modified_base 11: mod_base = OTHER; note = 2'-O-methylguanosine-3'-phosphate
  modified_base 12: mod_base = OTHER; note = 2'-O-methylcytidine-3'-phosphate
  modified_base 13: mod_base = OTHER; note = 2'-O-methylcytidine-3'-phosphate
  modified_base 14: mod_base = OTHER; note = 2'-fluoroadenosine-3'-phosphate
  modified_base 15: mod_base = OTHER; note = 2'-O-methyluridine-3'-phosphate
  modified_base 16: mod_base = OTHER; note = 2'-fluorouridine-3'-phosphate
  modified_base 17: mod_base = OTHER; note = 2'-O-methyluridine-3'-phosphate
  modified_base 18: mod_base = OTHER; note = 2'-O-methylguanosine-3'-phosphate
  modified_base 19: mod_base = OTHER; note = 2'-O-methyladenosine-3'-phosphate
  modified_base 20: mod_base = OTHER; note = 2'-O-methyluridine-3'-phosphate
  modified_base 21: mod_base = OTHER; note = 2'-O-methyladenosine-3'-phosphorothioate
  modified_base 22: mod_base = OTHER; note = 2'-O-methyluridine-3'-phosphorothioate
  modified_base 23: mod_base = OTHER; note = 2'-O-methylcytidine-3'-phosphate
agtcttctcagccatttgatatc

SEQ ID NO: 1940 - RNA, 21 nt, synthetic construct
  source 1..21: mol_type = other RNA; note = Description of Artificial Sequence: Synthetic oligonucleotide
  modified_base 1: mod_base = OTHER; note = 2'-O-methyladenosine-3'-phosphorothioate
  modified_base 2: mod_base = OTHER; note = 2'-O-methyluridine-3'-phosphorothioate
  modified_base 3: mod_base = OTHER; note = 2'-O-methylcytidine-3'-phosphate
  modified_base 4: mod_base = OTHER; note = 2'-O-methyladenosine-3'-phosphate
  modified_base 5: mod_base = OTHER; note = 2'-O-methyladenosine-3'-phosphate
  modified_base 6: mod_base = OTHER; note = 2'-O-methyladenosine-3'-phosphate
  modified_base 7: mod_base = OTHER; note = 2'-fluorouridine-3'-phosphate
  modified_base 8: mod_base = OTHER; note = 2'-O-methylguanosine-3'-phosphate
  modified_base 9: mod_base = OTHER; note = 2'-fluoroguanosine-3'-phosphate
  modified_base 10: mod_base = OTHER; note = 2'-fluorocytidine-3'-phosphate
  modified_base 11: mod_base = OTHER; note = 2'-fluorouridine-3'-phosphate
  modified_base 12: mod_base = OTHER; note = 2'-O-methylguanosine-3'-phosphate
  modified_base 13: mod_base = OTHER; note = 2'-O-methyladenosine-3'-phosphate
  modified_base 14: mod_base = OTHER; note = 2'-O-methylguanosine-3'-phosphate
  modified_base 15: mod_base = OTHER; note = 2'-O-methyladenosine-3'-phosphate
  modified_base 16: mod_base = OTHER; note = 2'-O-methyladenosine-3'-phosphate
  modified_base 17: mod_base = OTHER; note = 2'-O-methylguanosine-3'-phosphate
  modified_base 18: mod_base = OTHER; note = 2'-O-methyladenosine-3'-phosphate
  modified_base 19: mod_base = OTHER; note = 2'-O-methylcytidine-3'-phosphate
  modified_base 20: mod_base = OTHER; note = 2'-O-methyluridine-3'-phosphate
  modified_base 21: mod_base = OTHER; note = 2'-O-methylguanosine-3'-phosphate N-[tris(GalNAc-alkyl)-amidodecanoyl)]-4-hydroxyprolinol Hyp-(GalNAc-alkyl)3
atcaaatggctgagaagactg

SEQ ID NO: 1941 - RNA, 23 nt, synthetic construct
  source 1..23: mol_type = other RNA; note = Description of Artificial Sequence: Synthetic oligonucleotide
  modified_base 1: mod_base = OTHER; note = 2'-O-methylcytidine-3'-phosphorothioate
  modified_base 2: mod_base = OTHER; note = 2'-fluoroadenosine-3'-phosphorothioate
  modified_base 3: mod_base = OTHER; note = 2'-O-methylguanosine-3'-phosphate
  modified_base 4: mod_base = OTHER; note = 2'-O-methyluridine-3'-phosphate
  modified_base 5: mod_base = OTHER; note = 2'-O-methylcytidine-3'-phosphate
  modified_base 6: mod_base = OTHER; note = 2'-fluorouridine-3'-phosphate
  modified_base 7: mod_base = OTHER; note = 2'-O-methyluridine-3'-phosphate
  modified_base 8: mod_base = OTHER; note = 2'-fluorocytidine-3'-phosphate
  modified_base 9: mod_base = OTHER; note = 2'-fluorouridine-3'-phosphate
  modified_base 10: mod_base = OTHER; note = 2'-O-methylcytidine-3'-phosphate
  modified_base 11: mod_base = OTHER; note = 2'-O-methyladenosine-3'-phosphate
  modified_base 12: mod_base = OTHER; note = 2'-O-methylguanosine-3'-phosphate
  modified_base 13: mod_base = OTHER; note = 2'-O-methylcytidine-3'-phosphate
  modified_base 14: mod_base = OTHER; note = 2'-fluorocytidine-3'-phosphate
  modified_base 15: mod_base = OTHER; note = 2'-O-methyladenosine-3'-phosphate
  modified_base 16: mod_base = OTHER; note = 2'-fluorouridine-3'-phosphate
  modified_base 17: mod_base = OTHER; note = 2'-O-methyluridine-3'-phosphate
  modified_base 18: mod_base = OTHER; note = 2'-O-methyluridine-3'-phosphate
  modified_base 19: mod_base = OTHER; note = 2'-O-methylguanosine-3'-phosphate
  modified_base 20: mod_base = OTHER; note = 2'-O-methyladenosine-3'-phosphate
  modified_base 21: mod_base = OTHER; note = 2'-O-methyluridine-3'-phosphorothioate
  modified_base 22: mod_base = OTHER; note = 2'-O-methyladenosine-3'-phosphorothioate
  modified_base 23: mod_base = OTHER; note = 2'-O-methyluridine-3'-phosphate
cagtcttctcagccatttgatat

SEQ ID NO: 1942 - RNA, 21 nt, synthetic construct
  source 1..21: mol_type = other RNA; note = Description of Artificial Sequence: Synthetic oligonucleotide
  modified_base 1: mod_base = OTHER; note = 2'-O-methyladenosine-3'-phosphorothioate
  modified_base 2: mod_base = OTHER; note = 2'-O-methyladenosine-3'-phosphorothioate
  modified_base 3: mod_base = OTHER; note = 2'-O-methylguanosine-3'-phosphate
  modified_base 4: mod_base = OTHER; note = 2'-O-methyladenosine-3'-phosphate
  modified_base 5: mod_base = OTHER; note = 2'-O-methyluridine-3'-phosphate
  modified_base 6: mod_base = OTHER; note = 2'-O-methyladenosine-3'-phosphate
  modified_base 7: mod_base = OTHER; note = 2'-fluorouridine-3'-phosphate
  modified_base 8: mod_base = OTHER; note = 2'-O-methylcytidine-3'-phosphate
  modified_base 9: mod_base = OTHER; note = 2'-fluoroadenosine-3'-phosphate
  modified_base 10: mod_base = OTHER; note = 2'-fluoroadenosine-3'-phosphate
  modified_base 11: mod_base = OTHER; note = 2'-fluoroadenosine-3'-phosphate
  modified_base 12: mod_base = OTHER; note = 2'-O-methyluridine-3'-phosphate
  modified_base 13: mod_base = OTHER; note = 2'-O-methylguanosine-3'-phosphate
  modified_base 14: mod_base = OTHER; note = 2'-O-methylguanosine-3'-phosphate
  modified_base 15: mod_base = OTHER; note = 2'-O-methylcytidine-3'-phosphate
  modified_base 16: mod_base = OTHER; note = 2'-O-methyluridine-3'-phosphate
  modified_base 17: mod_base = OTHER; note = 2'-O-methylguanosine-3'-phosphate
  modified_base 18: mod_base = OTHER; note = 2'-O-methyladenosine-3'-phosphate
  modified_base 19: mod_base = OTHER; note = 2'-O-methylguanosine-3'-phosphate
  modified_base 20: mod_base = OTHER; note = 2'-O-methyladenosine-3'-phosphate
  modified_base 21: mod_base = OTHER; note = 2'-O-methyladenosine-3'-phosphate N-[tris(GalNAc-alkyl)-amidodecanoyl)]-4-hydroxyprolinol Hyp-(GalNAc-alkyl)3
aagatatcaaatggctgagaa

SEQ ID NO: 1943 - RNA, 23 nt, synthetic construct
  source 1..23: mol_type = other RNA; note = Description of Artificial Sequence: Synthetic oligonucleotide
  modified_base 1: mod_base = OTHER; note = 2'-O-methyluridine-3'-phosphorothioate
  modified_base 2: mod_base = OTHER; note = 2'-fluorouridine -3'-phosphorothioate
  modified_base 3: mod_base = OTHER; note = 2'-O-methylcytidine-3'-phosphate
  modified_base 4: mod_base = OTHER; note = 2'-O-methyluridine-3'-phosphate
  modified_base 5: mod_base = OTHER; note = 2'-O-methylcytidine-3'-phosphate
  modified_base 6: mod_base = OTHER; note = 2'-fluoroadenosine-3'-phosphate
  modified_base 7: mod_base = OTHER; note = 2'-O-methylguanosine-3'-phosphate
  modified_base 8: mod_base = OTHER; note = 2'-fluorocytidine-3'-phosphate
  modified_base 9: mod_base = OTHER; note = 2'-fluorocytidine-3'-phosphate
  modified_base 10: mod_base = OTHER; note = 2'-O-methyladenosine-3'-phosphate
  modified_base 11: mod_base = OTHER; note = 2'-O-methyluridine-3'-phosphate
  modified_base 12: mod_base = OTHER; note = 2'-O-methyluridine-3'-phosphate
  modified_base 13: mod_base = OTHER; note = 2'-O-methyluridine-3'-phosphate
  modified_base 14: mod_base = OTHER; note = 2'-fluoroguanosine-3'-phosphate
  modified_base 15: mod_base = OTHER; note = 2'-O-methyladenosine-3'-phosphate
  modified_base 16: mod_base = OTHER; note = 2'-fluorouridine-3'-phosphate
  modified_base 17: mod_base = OTHER; note = 2'-O-methyladenosine-3'-phosphate
  modified_base 18: mod_base = OTHER; note = 2'-O-methyluridine-3'-phosphate
  modified_base 19: mod_base = OTHER; note = 2'-O-methylcytidine-3'-phosphate
  modified_base 20: mod_base = OTHER; note = 2'-O-methyluridine-3'-phosphate
  modified_base 21: mod_base = OTHER; note = 2'-O-methyluridine-3'-phosphorothioate
  modified_base 22: mod_base = OTHER; note = 2'-O-methylcytidine-3'-phosphorothioate
  modified_base 23: mod_base = OTHER; note = 2'-O-methylcytidine-3'-phosphate
ttctcagccatttgatatcttcc

SEQ ID NO: 1944 - RNA, 21 nt, synthetic construct
  source 1..21: mol_type = other RNA; note = Description of Artificial Sequence: Synthetic oligonucleotide
  modified_base 1: mod_base = OTHER; note = 2'-O-methylguanosine-3'-phosphorothioate
  modified_base 2: mod_base = OTHER; note = 2'-O-methyladenosine-3'-phosphorothioate
  modified_base 3: mod_base = OTHER; note = 2'-O-methyladenosine-3'-phosphate
  modified_base 4: mod_base = OTHER; note = 2'-O-methylguanosine-3'-phosphate
  modified_base 5: mod_base = OTHER; note = 2'-O-methyladenosine-3'-phosphate
  modified_base 6: mod_base = OTHER; note = 2'-O-methyluridine-3'-phosphate
  modified_base 7: mod_base = OTHER; note = 2'-fluoroadenosine-3'-phosphate
  modified_base 8: mod_base = OTHER; note = 2'-O-methyluridine-3'-phosphate
  modified_base 9: mod_base = OTHER; note = 2'-fluorocytidine-3'-phosphate
  modified_base 10: mod_base = OTHER; note = 2'-fluoroadenosine-3'-phosphate
  modified_base 11: mod_base = OTHER; note = 2'-fluoroadenosine-3'-phosphate
  modified_base 12: mod_base = OTHER; note = 2'-O-methyladenosine-3'-phosphate
  modified_base 13: mod_base = OTHER; note = 2'-O-methyluridine-3'-phosphate
  modified_base 14: mod_base = OTHER; note = 2'-O-methylguanosine-3'-phosphate
  modified_base 15: mod_base = OTHER; note = 2'-O-methylguanosine-3'-phosphate
  modified_base 16: mod_base = OTHER; note = 2'-O-methylcytidine-3'-phosphate
  modified_base 17: mod_base = OTHER; note = 2'-O-methyluridine-3'-phosphate
  modified_base 18: mod_base = OTHER; note = 2'-O-methylguanosine-3'-phosphate
  modified_base 19: mod_base = OTHER; note = 2'-O-methyladenosine-3'-phosphate
  modified_base 20: mod_base = OTHER; note = 2'-O-methylguanosine-3'-phosphate
  modified_base 21: mod_base = OTHER; note = 2'-O-methyladenosine-3'-phosphate N-[tris(GalNAc-alkyl)-amidodecanoyl)]-4-hydroxyprolinol Hyp-(GalNAc-alkyl)3
gaagatatcaaatggctgaga

SEQ ID NO: 1945 - RNA, 23 nt, synthetic construct
  source 1..23: mol_type = other RNA; note = Description of Artificial Sequence: Synthetic oligonucleotide
  modified_base 1: mod_base = OTHER; note = 2'-O-methyluridine-3'-phosphorothioate
  modified_base 2: mod_base = OTHER; note = 2'-fluorocytidine-3'-phosphorothioate
  modified_base 3: mod_base = OTHER; note = 2'-O-methyluridine-3'-phosphate
  modified_base 4: mod_base = OTHER; note = 2'-O-methylcytidine-3'-phosphate
  modified_base 5: mod_base = OTHER; note = 2'-O-methyladenosine-3'-phosphate
  modified_base 6: mod_base = OTHER; note = 2'-fluoroguanosine-3'-phosphate
  modified_base 7: mod_base = OTHER; note = 2'-O-methylcytidine-3'-phosphate
  modified_base 8: mod_base = OTHER; note = 2'-fluorocytidine-3'-phosphate
  modified_base 9: mod_base = OTHER; note = 2'-fluoroadenosine-3'-phosphate
  modified_base 10: mod_base = OTHER; note = 2'-O-methyluridine-3'-phosphate
  modified_base 11: mod_base = OTHER; note = 2'-O-methyluridine-3'-phosphate
  modified_base 12: mod_base = OTHER; note = 2'-O-methyluridine-3'-phosphate
  modified_base 13: mod_base = OTHER; note = 2'-O-methylguanosine-3'-phosphate
  modified_base 14: mod_base = OTHER; note = 2'-fluoroadenosine-3'-phosphate
  modified_base 15: mod_base = OTHER; note = 2'-O-methyluridine-3'-phosphate
  modified_base 16: mod_base = OTHER; note = 2'-fluoroadenosine-3'-phosphate
  modified_base 17: mod_base = OTHER; note = 2'-O-methyluridine-3'-phosphate
  modified_base 18: mod_base = OTHER; note = 2'-O-methylcytidine-3'-phosphate
  modified_base 19: mod_base = OTHER; note = 2'-O-methyluridine-3'-phosphate
  modified_base 20: mod_base = OTHER; note = 2'-O-methyluridine-3'-phosphate
  modified_base 21: mod_base = OTHER; note = 2'-O-methylcytidine-3'-phosphorothioate
  modified_base 22: mod_base = OTHER; note = 2'-O-methylcytidine-3'-phosphorothioate
  modified_base 23: mod_base = OTHER; note = 2'-O-methylcytidine-3'-phosphate
tctcagccatttgatatcttccc

SEQ ID NO: 1946 - RNA, 21 nt, synthetic construct
  source 1..21: mol_type = other RNA; note = Description of Artificial Sequence: Synthetic oligonucleotide
  modified_base 1: mod_base = OTHER; note = 2'-O-methyluridine-3'-phosphorothioate
  modified_base 2: mod_base = OTHER; note = 2'-O-methylcytidine-3'-phosphorothioate
  modified_base 3: mod_base = OTHER; note = 2'-O-methyluridine-3'-phosphate
  modified_base 4: mod_base = OTHER; note = 2'-O-methylguanosine-3'-phosphate
  modified_base 5: mod_base = OTHER; note = 2'-O-methyladenosine-3'-phosphate
  modified_base 6: mod_base = OTHER; note = 2'-O-methylcytidine-3'-phosphate
  modified_base 7: mod_base = OTHER; note = 2'-fluoroadenosine-3'-phosphate
  modified_base 8: mod_base = OTHER; note = 2'-O-methylguanosine-3'-phosphate
  modified_base 9: mod_base = OTHER; note = 2'-fluorouridine-3'-phosphate
  modified_base 10: mod_base = OTHER; note = 2'-fluoroguanosine-3'-phosphate
  modified_base 11: mod_base = OTHER; note = 2'-fluorocytidine-3'-phosphate
  modified_base 12: mod_base = OTHER; note = 2'-O-methyladenosine-3'-phosphate
  modified_base 13: mod_base = OTHER; note = 2'-O-methylcytidine-3'-phosphate
  modified_base 14: mod_base = OTHER; note = 2'-O-methyladenosine-3'-phosphate
  modified_base 15: mod_base = OTHER; note = 2'-O-methyladenosine-3'-phosphate
  modified_base 16: mod_base = OTHER; note = 2'-O-methyluridine-3'-phosphate
  modified_base 17: mod_base = OTHER; note = 2'-O-methyladenosine-3'-phosphate
  modified_base 18: mod_base = OTHER; note = 2'-O-methyluridine-3'-phosphate
  modified_base 19: mod_base = OTHER; note = 2'-O-methyluridine-3'-phosphate
  modified_base 20: mod_base = OTHER; note = 2'-O-methyluridine-3'-phosphate
  modified_base 21: mod_base = OTHER; note = 2'-O-methyluridine-3'-phosphate N-[tris(GalNAc-alkyl)-amidodecanoyl)]-4-hydroxyprolinol Hyp-(GalNAc-alkyl)3
tctgacagtgcacaatatttt

SEQ ID NO: 1947 - RNA, 23 nt, synthetic construct
  source 1..23: mol_type = other RNA; note = Description of Artificial Sequence: Synthetic oligonucleotide
  modified_base 1: mod_base = OTHER; note = 2'-O-methyladenosine-3'-phosphorothioate
  modified_base 2: mod_base = OTHER; note = 2'-fluoroadenosine-3'-phosphorothioate
  modified_base 3: mod_base = OTHER; note = 2'-O-methyladenosine-3'-phosphate
  modified_base 4: mod_base = OTHER; note = 2'-O-methyladenosine-3'-phosphate
  modified_base 5: mod_base = OTHER; note = 2'-O-methyluridine-3'-phosphate
  modified_base 6: mod_base = OTHER; note = 2'-fluoroadenosine-3'-phosphate
  modified_base 7: mod_base = OTHER; note = 2'-O-methyluridine-3'-phosphate
  modified_base 8: mod_base = OTHER; note = 2'-fluorouridine-3'-phosphate
  modified_base 9: mod_base = OTHER; note = 2'-fluoroguanosine-3'-phosphate
  modified_base 10: mod_base = OTHER; note = 2'-O-methyluridine-3'-phosphate
  modified_base 11: mod_base = OTHER; note = 2'-O-methylguanosine-3'-phosphate
  modified_base 12: mod_base = OTHER; note = 2'-O-methylcytidine-3'-phosphate
  modified_base 13: mod_base = OTHER; note = 2'-O-methyladenosine-3'-phosphate
  modified_base 14: mod_base = OTHER; note = 2'-fluorocytidine-3'-phosphate
  modified_base 15: mod_base = OTHER; note = 2'-O-methyluridine-3'-phosphate
  modified_base 16: mod_base = OTHER; note = 2'-fluoroguanosine-3'-phosphate
  modified_base 17: mod_base = OTHER; note = 2'-O-methyluridine-3'-phosphate
  modified_base 18: mod_base = OTHER; note = 2'-O-methylcytidine-3'-phosphate
  modified_base 19: mod_base = OTHER; note = 2'-O-methyladenosine-3'-phosphate
  modified_base 20: mod_base = OTHER; note = 2'-O-methylguanosine-3'-phosphate
  modified_base 21: mod_base = OTHER; note = 2'-O-methyladenosine-3'-phosphorothioate
  modified_base 22: mod_base = OTHER; note = 2'-O-methyluridine-3'-phosphorothioate
  modified_base 23: mod_base = OTHER; note = 2'-O-methylcytidine-3'-phosphate
aaaatattgtgcactgtcagatc

SEQ ID NO: 1948 - RNA, 21 nt, synthetic construct
  source 1..21: mol_type = other RNA; note = Description of Artificial Sequence: Synthetic oligonucleotide
  modified_base 1: mod_base = OTHER; note = 2'-O-methylcytidine-3'-phosphorothioate
  modified_base 2: mod_base = OTHER; note = 2'-O-methyluridine-3'-phosphorothioate
  modified_base 3: mod_base = OTHER; note = 2'-O-methylguanosine-3'-phosphate
  modified_base 4: mod_base = OTHER; note = 2'-O-methyladenosine-3'-phosphate
  modified_base 5: mod_base = OTHER; note = 2'-O-methylcytidine-3'-phosphate
  modified_base 6: mod_base = OTHER; note = 2'-O-methyladenosine-3'-phosphate
  modified_base 7: mod_base = OTHER; note = 2'-fluoroguanosine-3'-phosphate
  modified_base 8: mod_base = OTHER; note = 2'-O-methyluridine-3'-phosphate
  modified_base 9: mod_base = OTHER; note = 2'-fluoroguanosine-3'-phosphate
  modified_base 10: mod_base = OTHER; note = 2'-fluorocytidine-3'-phosphate
  modified_base 11: mod_base = OTHER; note = 2'-fluoroadenosine-3'-phosphate
  modified_base 12: mod_base = OTHER; note = 2'-O-methylcytidine-3'-phosphate
  modified_base 13: mod_base = OTHER; note = 2'-O-methyladenosine-3'-phosphate
  modified_base 14: mod_base = OTHER; note = 2'-O-methyladenosine-3'-phosphate
  modified_base 15: mod_base = OTHER; note = 2'-O-methyluridine-3'-phosphate
  modified_base 16: mod_base = OTHER; note = 2'-O-methyladenosine-3'-phosphate
  modified_base 17: mod_base = OTHER; note = 2'-O-methyluridine-3'-phosphate
  modified_base 18: mod_base = OTHER; note = 2'-O-methyluridine-3'-phosphate
  modified_base 19: mod_base = OTHER; note = 2'-O-methyluridine-3'-phosphate
  modified_base 20: mod_base = OTHER; note = 2'-O-methyluridine-3'-phosphate
  modified_base 21: mod_base = OTHER; note = 2'-O-methylcytidine-3'-phosphate N-[tris(GalNAc-alkyl)-amidodecanoyl)]-4-hydroxyprolinol Hyp-(GalNAc-alkyl)3
ctgacagtgcacaatattttc

SEQ ID NO: 1949 - RNA, 23 nt, synthetic construct
  source 1..23: mol_type = other RNA; note = Description of Artificial Sequence: Synthetic oligonucleotide
  modified_base 1: mod_base = OTHER; note = 2'-O-methylguanosine-3'-phosphorothioate
  modified_base 2: mod_base = OTHER; note = 2'-fluoroadenosine-3'-phosphorothioate
  modified_base 3: mod_base = OTHER; note = 2'-O-methyladenosine-3'-phosphate
  modified_base 4: mod_base = OTHER; note = 2'-O-methyladenosine-3'-phosphate
  modified_base 5: mod_base = OTHER; note = 2'-O-methyladenosine-3'-phosphate
  modified_base 6: mod_base = OTHER; note = 2'-fluorouridine-3'-phosphate
  modified_base 7: mod_base = OTHER; note = 2'-O-methyladenosine-3'-phosphate
  modified_base 8: mod_base = OTHER; note = 2'-fluorouridine-3'-phosphate
  modified_base 9: mod_base = OTHER; note = 2'-fluorouridine-3'-phosphate
  modified_base 10: mod_base = OTHER; note = 2'-O-methylguanosine-3'-phosphate
  modified_base 11: mod_base = OTHER; note = 2'-O-methyluridine-3'-phosphate
  modified_base 12: mod_base = OTHER; note = 2'-O-methylguanosine-3'-phosphate
  modified_base 13: mod_base = OTHER; note = 2'-O-methylcytidine-3'-phosphate
  modified_base 14: mod_base = OTHER; note = 2'-fluoroadenosine-3'-phosphate
  modified_base 15: mod_base = OTHER; note = 2'-O-methylcytidine-3'-phosphate
  modified_base 16: mod_base = OTHER; note = 2'-fluorouridine-3'-phosphate
  modified_base 17: mod_base = OTHER; note = 2'-O-methylguanosine-3'-phosphate
  modified_base 18: mod_base = OTHER; note = 2'-O-methyluridine-3'-phosphate
  modified_base 19: mod_base = OTHER; note = 2'-O-methylcytidine-3'-phosphate
  modified_base 20: mod_base = OTHER; note = 2'-O-methyladenosine-3'-phosphate
  modified_base 21: mod_base = OTHER; note = 2'-O-methylguanosine-3'-phosphorothioate
  modified_base 22: mod_base = OTHER; note = 2'-O-methyladenosine-3'-phosphorothioate
  modified_base 23: mod_base = OTHER; note = 2'-O-methyluridine-3'-phosphate
gaaaatattgtgcactgtcagat

SEQ ID NO: 1950 - RNA, 21 nt, synthetic construct
  source 1..21: mol_type = other RNA; note = Description of Artificial Sequence: Synthetic oligonucleotide
  modified_base 1: mod_base = OTHER; note = 2'-O-methyladenosine-3'-phosphorothioate
  modified_base 2: mod_base = OTHER; note = 2'-O-methyladenosine-3'-phosphorothioate
  modified_base 3: mod_base = OTHER; note = 2'-O-methylguanosine-3'-phosphate
  modified_base 4: mod_base = OTHER; note = 2'-O-methyladenosine-3'-phosphate
  modified_base 5: mod_base = OTHER; note = 2'-O-methyluridine-3'-phosphate
  modified_base 6: mod_base = OTHER; note = 2'-O-methylcytidine-3'-phosphate
  modified_base 7: mod_base = OTHER; note = 2'-fluorouridine-3'-phosphate
  modified_base 8: mod_base = OTHER; note = 2'-O-methylguanosine-3'-phosphate
  modified_base 9: mod_base = OTHER; note = 2'-fluoroadenosine-3'-phosphate
  modified_base 10: mod_base = OTHER; note = 2'-fluorocytidine-3'-phosphate
  modified_base 11: mod_base = OTHER; note = 2'-fluoroadenosine-3'-phosphate
  modified_base 12: mod_base = OTHER; note = 2'-O-methylguanosine-3'-phosphate
  modified_base 13: mod_base = OTHER; note = 2'-O-methyluridine-3'-phosphate
  modified_base 14: mod_base = OTHER; note = 2'-O-methylguanosine-3'-phosphate
  modified_base 15: mod_base = OTHER; note = 2'-O-methylcytidine-3'-phosphate
  modified_base 16: mod_base = OTHER; note = 2'-O-methyladenosine-3'-phosphate
  modified_base 17: mod_base = OTHER; note = 2'-O-methylcytidine-3'-phosphate
  modified_base 18: mod_base = OTHER; note = 2'-O-methyladenosine-3'-phosphate
  modified_base 19: mod_base = OTHER; note = 2'-O-methyladenosine-3'-phosphate
  modified_base 20: mod_base = OTHER; note = 2'-O-methyluridine-3'-phosphate
  modified_base 21: mod_base = OTHER; note = 2'-O-methyladenosine-3'-phosphate N-[tris(GalNAc-alkyl)-amidodecanoyl)]-4-hydroxyprolinol Hyp-(GalNAc-alkyl)3
aagatctgacagtgcacaata

SEQ ID NO: 1951 - RNA, 23 nt, synthetic construct
  source 1..23: mol_type = other RNA; note = Description of Artificial Sequence: Synthetic oligonucleotide
  modified_base 1: mod_base = OTHER; note = 2'-O-methyluridine-3'-phosphorothioate
  modified_base 2: mod_base = OTHER; note = 2'-fluoroadenosine-3'-phosphorothioate
  modified_base 3: mod_base = OTHER; note = 2'-O-methyluridine-3'-phosphate
  modified_base 4: mod_base = OTHER; note = 2'-O-methyluridine-3'-phosphate
  modified_base 5: mod_base = OTHER; note = 2'-O-methylguanosine-3'-phosphate
  modified_base 6: mod_base = OTHER; note = 2'-fluorouridine-3'-phosphate
  modified_base 7: mod_base = OTHER; note = 2'-O-methylguanosine-3'-phosphate
  modified_base 8: mod_base = OTHER; note = 2'-fluorocytidine-3'-phosphate
  modified_base 9: mod_base = OTHER; note = 2'-fluoroadenosine-3'-phosphate
  modified_base 10: mod_base = OTHER; note = 2'-O-methylcytidine-3'-phosphate
  modified_base 11: mod_base = OTHER; note = 2'-O-methyluridine-3'-phosphate
  modified_base 12: mod_base = OTHER; note = 2'-O-methylguanosine-3'-phosphate
  modified_base 13: mod_base = OTHER; note = 2'-O-methyluridine-3'-phosphate
  modified_base 14: mod_base = OTHER; note = 2'-fluorocytidine-3'-phosphate
  modified_base 15: mod_base = OTHER; note = 2'-O-methyladenosine-3'-phosphate
  modified_base 16: mod_base = OTHER; note = 2'-fluoroguanosine-3'-phosphate
  modified_base 17: mod_base = OTHER; note = 2'-O-methyladenosine-3'-phosphate
  modified_base 18: mod_base = OTHER; note = 2'-O-methyluridine-3'-phosphate
  modified_base 19: mod_base = OTHER; note = 2'-O-methylcytidine-3'-phosphate
  modified_base 20: mod_base = OTHER; note = 2'-O-methyluridine-3'-phosphate
  modified_base 21: mod_base = OTHER; note = 2'-O-methyluridine-3'-phosphorothioate
  modified_base 22: mod_base = OTHER; note = 2'-O-methylguanosine-3'-phosphorothioate
  modified_base 23: mod_base = OTHER; note = 2'-O-methylguanosine-3'-phosphate
tattgtgcactgtcagatcttgg

SEQ ID NO: 1952 - RNA, 21 nt, synthetic construct
  source 1..21: mol_type = other RNA; note = Description of Artificial Sequence: Synthetic oligonucleotide
  modified_base 1: mod_base = OTHER; note = 2'-O-methylcytidine-3'-phosphorothioate
  modified_base 2: mod_base = OTHER; note = 2'-O-methyladenosine-3'-phosphorothioate
  modified_base 3: mod_base = OTHER; note = 2'-O-methyladenosine-3'-phosphate
  modified_base 4: mod_base = OTHER; note = 2'-O-methylguanosine-3'-phosphate
  modified_base 5: mod_base = OTHER; note = 2'-O-methyladenosine-3'-phosphate
  modified_base 6: mod_base = OTHER; note = 2'-O-methyluridine-3'-phosphate
  modified_base 7: mod_base = OTHER; note = 2'-fluorocytidine-3'-phosphate
  modified_base 8: mod_base = OTHER; note = 2'-O-methyluridine-3'-phosphate
  modified_base 9: mod_base = OTHER; note = 2'-fluoroguanosine-3'-phosphate
  modified_base 10: mod_base = OTHER; note = 2'-fluoroadenosine-3'-phosphate
  modified_base 11: mod_base = OTHER; note = 2'-fluorocytidine-3'-phosphate
  modified_base 12: mod_base = OTHER; note = 2'-O-methyladenosine-3'-phosphate
  modified_base 13: mod_base = OTHER; note = 2'-O-methylguanosine-3'-phosphate
  modified_base 14: mod_base = OTHER; note = 2'-O-methyluridine-3'-phosphate
  modified_base 15: mod_base = OTHER; note = 2'-O-methylguanosine-3'-phosphate
  modified_base 16: mod_base = OTHER; note = 2'-O-methylcytidine-3'-phosphate
  modified_base 17: mod_base = OTHER; note = 2'-O-methyladenosine-3'-phosphate
  modified_base 18: mod_base = OTHER; note = 2'-O-methylcytidine-3'-phosphate
  modified_base 19: mod_base = OTHER; note = 2'-O-methyladenosine-3'-phosphate
  modified_base 20: mod_base = OTHER; note = 2'-O-methyladenosine-3'-phosphate
  modified_base 21: mod_base = OTHER; note = 2'-O-methyluridine-3'-phosphate N-[tris(GalNAc-alkyl)-amidodecanoyl)]-4-hydroxyprolinol Hyp-(GalNAc-alkyl)3
caagatctgacagtgcacaat

SEQ ID NO: 1953 - RNA, 23 nt, synthetic construct
  source 1..23: mol_type = other RNA; note = Description of Artificial Sequence: Synthetic oligonucleotide
  modified_base 1: mod_base = OTHER; note = 2'-O-methyladenosine-3'-phosphorothioate
  modified_base 2: mod_base = OTHER; note = 2'-fluorouridine -3'-phosphorothioate
  modified_base 3: mod_base = OTHER; note = 2'-O-methyluridine-3'-phosphate
  modified_base 4: mod_base = OTHER; note = 2'-O-methylguanosine-3'-phosphate
  modified_base 5: mod_base = OTHER; note = 2'-O-methyluridine-3'-phosphate
  modified_base 6: mod_base = OTHER; note = 2'-fluoroguanosine-3'-phosphate
  modified_base 7: mod_base = OTHER; note = 2'-O-methylcytidine-3'-phosphate
  modified_base 8: mod_base = OTHER; note = 2'-fluoroadenosine-3'-phosphate
  modified_base 9: mod_base = OTHER; note = 2'-fluorocytidine-3'-phosphate
  modified_base 10: mod_base = OTHER; note = 2'-O-methyluridine-3'-phosphate
  modified_base 11: mod_base = OTHER; note = 2'-O-methylguanosine-3'-phosphate
  modified_base 12: mod_base = OTHER; note = 2'-O-methyluridine-3'-phosphate
  modified_base 13: mod_base = OTHER; note = 2'-O-methylcytidine-3'-phosphate
  modified_base 14: mod_base = OTHER; note = 2'-fluoroadenosine-3'-phosphate
  modified_base 15: mod_base = OTHER; note = 2'-O-methylguanosine-3'-phosphate
  modified_base 16: mod_base = OTHER; note = 2'-fluoroadenosine-3'-phosphate
  modified_base 17: mod_base = OTHER; note = 2'-O-methyluridine-3'-phosphate
  modified_base 18: mod_base = OTHER; note = 2'-O-methylcytidine-3'-phosphate
  modified_base 19: mod_base = OTHER; note = 2'-O-methyluridine-3'-phosphate
  modified_base 20: mod_base = OTHER; note = 2'-O-methyluridine-3'-phosphate
  modified_base 21: mod_base = OTHER; note = 2'-O-methylguanosine-3'-phosphorothioate
  modified_base 22: mod_base = OTHER; note = 2'-O-methylguanosine-3'-phosphorothioate
  modified_base 23: mod_base = OTHER; note = 2'-O-methyladenosine-3'-phosphate
attgtgcactgtcagatcttgga

SEQ ID NO: 1954 - RNA, 21 nt, synthetic construct
  source 1..21: mol_type = other RNA; note = Description of Artificial Sequence: Synthetic oligonucleotide
  modified_base 1: mod_base = OTHER; note = 2'-O-methyladenosine-3'-phosphorothioate
  modified_base 2: mod_base = OTHER; note = 2'-O-methylcytidine-3'-phosphorothioate
  modified_base 3: mod_base = OTHER; note = 2'-O-methyluridine-3'-phosphate
  modified_base 4: mod_base = OTHER; note = 2'-O-methylguanosine-3'-phosphate
  modified_base 5: mod_base = OTHER; note = 2'-O-methyladenosine-3'-phosphate
  modified_base 6: mod_base = OTHER; note = 2'-O-methyluridine-3'-phosphate
  modified_base 7: mod_base = OTHER; note = 2'-fluoroguanosine-3'-phosphate
  modified_base 8: mod_base = OTHER; note = 2'-O-methyluridine-3'-phosphate
  modified_base 9: mod_base = OTHER; note = 2'-fluorouridine-3'-phosphate
  modified_base 10: mod_base = OTHER; note = 2'-fluorocytidine-3'-phosphate
  modified_base 11: mod_base = OTHER; note = 2'-fluorouridine-3'-phosphate
  modified_base 12: mod_base = OTHER; note = 2'-O-methylguanosine-3'-phosphate
  modified_base 13: mod_base = OTHER; note = 2'-O-methyladenosine-3'-phosphate
  modified_base 14: mod_base = OTHER; note = 2'-O-methyladenosine-3'-phosphate
  modified_base 15: mod_base = OTHER; note = 2'-O-methyladenosine-3'-phosphate
  modified_base 16: mod_base = OTHER; note = 2'-O-methylguanosine-3'-phosphate
  modified_base 17: mod_base = OTHER; note = 2'-O-methylcytidine-3'-phosphate
  modified_base 18: mod_base = OTHER; note = 2'-O-methyluridine-3'-phosphate
  modified_base 19: mod_base = OTHER; note = 2'-O-methylcytidine-3'-phosphate
  modified_base 20: mod_base = OTHER; note = 2'-O-methyluridine-3'-phosphate
  modified_base 21: mod_base = OTHER; note = 2'-O-methylguanosine-3'-phosphate N-[tris(GalNAc-alkyl)-amidodecanoyl)]-4-hydroxyprolinol Hyp-(GalNAc-alkyl)3
actgatgttctgaaagctctg

SEQ ID NO: 1955 - RNA, 23 nt, synthetic construct
  source 1..23: mol_type = other RNA; note = Description of Artificial Sequence: Synthetic oligonucleotide
  modified_base 1: mod_base = OTHER; note = 2'-O-methylcytidine-3'-phosphorothioate
  modified_base 2: mod_base = OTHER; note = 2'-fluoroadenosine-3'-phosphorothioate
  modified_base 3: mod_base = OTHER; note = 2'-O-methylguanosine-3'-phosphate
  modified_base 4: mod_base = OTHER; note = 2'-O-methyladenosine-3'-phosphate
  modified_base 5: mod_base = OTHER; note = 2'-O-methylguanosine-3'-phosphate
  modified_base 6: mod_base = OTHER; note = 2'-fluorocytidine-3'-phosphate
  modified_base 7: mod_base = OTHER; note = 2'-O-methyluridine-3'-phosphate
  modified_base 8: mod_base = OTHER; note = 2'-fluorouridine-3'-phosphate
  modified_base 9: mod_base = OTHER; note = 2'-fluorouridine-3'-phosphate
  modified_base 10: mod_base = OTHER; note = 2'-O-methylcytidine-3'-phosphate
  modified_base 11: mod_base = OTHER; note = 2'-O-methyladenosine-3'-phosphate
  modified_base 12: mod_base = OTHER; note = 2'-O-methylguanosine-3'-phosphate
  modified_base 13: mod_base = OTHER; note = 2'-O-methyladenosine-3'-phosphate
  modified_base 14: mod_base = OTHER; note = 2'-fluoroadenosine-3'-phosphate
  modified_base 15: mod_base = OTHER; note = 2'-O-methylcytidine-3'-phosphate
  modified_base 16: mod_base = OTHER; note = 2'-fluoroadenosine-3'-phosphate
  modified_base 17: mod_base = OTHER; note = 2'-O-methyluridine-3'-phosphate
  modified_base 18: mod_base = OTHER; note = 2'-O-methylcytidine-3'-phosphate
  modified_base 19: mod_base = OTHER; note = 2'-O-methyladenosine-3'-phosphate
  modified_base 20: mod_base = OTHER; note = 2'-O-methylguanosine-3'-phosphate
  modified_base 21: mod_base = OTHER; note = 2'-O-methyluridine-3'-phosphorothioate
  modified_base 22: mod_base = OTHER; note = 2'-O-methylguanosine-3'-phosphorothioate
  modified_base 23: mod_base = OTHER; note = 2'-O-methylcytidine-3'-phosphate
cagagctttcagaacatcagtgc

SEQ ID NO: 1956 - RNA, 21 nt, synthetic construct
  source 1..21: mol_type = other RNA; note = Description of Artificial Sequence: Synthetic oligonucleotide
  modified_base 1: mod_base = OTHER; note = 2'-O-methylcytidine-3'-phosphorothioate
  modified_base 2: mod_base = OTHER; note = 2'-O-methyluridine-3'-phosphorothioate
  modified_base 3: mod_base = OTHER; note = 2'-O-methylguanosine-3'-phosphate
  modified_base 4: mod_base = OTHER; note = 2'-O-methyladenosine-3'-phosphate
  modified_base 5: mod_base = OTHER; note = 2'-O-methyluridine-3'-phosphate
  modified_base 6: mod_base = OTHER; note = 2'-O-methylguanosine-3'-phosphate
  modified_base 7: mod_base = OTHER; note = 2'-fluorouridine-3'-phosphate
  modified_base 8: mod_base = OTHER; note = 2'-O-methyluridine-3'-phosphate
  modified_base 9: mod_base = OTHER; note = 2'-fluorocytidine-3'-phosphate
  modified_base 10: mod_base = OTHER; note = 2'-fluorouridine-3'-phosphate
  modified_base 11: mod_base = OTHER; note = 2'-fluoroguanosine-3'-phosphate
  modified_base 12: mod_base = OTHER; note = 2'-O-methyladenosine-3'-phosphate
  modified_base 13: mod_base = OTHER; note = 2'-O-methyladenosine-3'-phosphate
  modified_base 14: mod_base = OTHER; note = 2'-O-methyladenosine-3'-phosphate
  modified_base 15: mod_base = OTHER; note = 2'-O-methylguanosine-3'-phosphate
  modified_base 16: mod_base = OTHER; note = 2'-O-methylcytidine-3'-phosphate
  modified_base 17: mod_base = OTHER; note = 2'-O-methyluridine-3'-phosphate
  modified_base 18: mod_base = OTHER; note = 2'-O-methylcytidine-3'-phosphate
  modified_base 19: mod_base = OTHER; note = 2'-O-methyluridine-3'-phosphate
  modified_base 20: mod_base = OTHER; note = 2'-O-methylguanosine-3'-phosphate
  modified_base 21: mod_base = OTHER; note = 2'-O-methylguanosine-3'-phosphate N-[tris(GalNAc-alkyl)-amidodecanoyl)]-4-hydroxyprolinol Hyp-(GalNAc-alkyl)3
ctgatgttctgaaagctctgg

SEQ ID NO: 1957 - RNA, 23 nt, synthetic construct
  source 1..23: mol_type = other RNA; note = Description of Artificial Sequence: Synthetic oligonucleotide
  modified_base 1: mod_base = OTHER; note = 2'-O-methylcytidine-3'-phosphorothioate
  modified_base 2: mod_base = OTHER; note = 2'-fluorocytidine-3'-phosphorothioate
  modified_base 3: mod_base = OTHER; note = 2'-O-methyladenosine-3'-phosphate
  modified_base 4: mod_base = OTHER; note = 2'-O-methylguanosine-3'-phosphate
  modified_base 5: mod_base = OTHER; note = 2'-O-methyladenosine-3'-phosphate
  modified_base 6: mod_base = OTHER; note = 2'-fluoroguanosine-3'-phosphate
  modified_base 7: mod_base = OTHER; note = 2'-O-methylcytidine-3'-phosphate
  modified_base 8: mod_base = OTHER; note = 2'-fluorouridine-3'-phosphate
  modified_base 9: mod_base = OTHER; note = 2'-fluorouridine-3'-phosphate
  modified_base 10: mod_base = OTHER; note = 2'-O-methyluridine-3'-phosphate
  modified_base 11: mod_base = OTHER; note = 2'-O-methylcytidine-3'-phosphate
  modified_base 12: mod_base = OTHER; note = 2'-O-methyladenosine-3'-phosphate
  modified_base 13: mod_base = OTHER; note = 2'-O-methylguanosine-3'-phosphate
  modified_base 14: mod_base = OTHER; note = 2'-fluoroadenosine-3'-phosphate
  modified_base 15: mod_base = OTHER; note = 2'-O-methyladenosine-3'-phosphate
  modified_base 16: mod_base = OTHER; note = 2'-fluorocytidine-3'-phosphate
  modified_base 17: mod_base = OTHER; note = 2'-O-methyladenosine-3'-phosphate
  modified_base 18: mod_base = OTHER; note = 2'-O-methyluridine-3'-phosphate
  modified_base 19: mod_base = OTHER; note = 2'-O-methylcytidine-3'-phosphate
  modified_base 20: mod_base = OTHER; note = 2'-O-methyladenosine-3'-phosphate
  modified_base 21: mod_base = OTHER; note = 2'-O-methylguanosine-3'-phosphorothioate
  modified_base 22: mod_base = OTHER; note = 2'-O-methyluridine-3'-phosphorothioate
  modified_base 23: mod_base = OTHER; note = 2'-O-methylguanosine-3'-phosphate
ccagagctttcagaacatcagtg

SEQ ID NO: 1958 - RNA, 21 nt, synthetic construct
  source 1..21: mol_type = other RNA; note = Description of Artificial Sequence: Synthetic oligonucleotide
  modified_base 1: mod_base = OTHER; note = 2'-O-methyladenosine-3'-phosphorothioate
  modified_base 2: mod_base = OTHER; note = 2'-O-methylguanosine-3'-phosphorothioate
  modified_base 3: mod_base = OTHER; note = 2'-O-methylguanosine-3'-phosphate
  modified_base 4: mod_base = OTHER; note = 2'-O-methylcytidine-3'-phosphate
  modified_base 5: mod_base = OTHER; note = 2'-O-methyladenosine-3'-phosphate
  modified_base 6: mod_base = OTHER; note = 2'-O-methylcytidine-3'-phosphate
  modified_base 7: mod_base = OTHER; note = 2'-fluorouridine-3'-phosphate
  modified_base 8: mod_base = OTHER; note = 2'-O-methylguanosine-3'-phosphate
  modified_base 9: mod_base = OTHER; note = 2'-fluoroadenosine-3'-phosphate
  modified_base 10: mod_base = OTHER; note = 2'-fluorouridine-3'-phosphate
  modified_base 11: mod_base = OTHER; note = 2'-fluoroguanosine-3'-phosphate
  modified_base 12: mod_base = OTHER; note = 2'-O-methyluridine-3'-phosphate
  modified_base 13: mod_base = OTHER; note = 2'-O-methyluridine-3'-phosphate
  modified_base 14: mod_base = OTHER; note = 2'-O-methylcytidine-3'-phosphate
  modified_base 15: mod_base = OTHER; note = 2'-O-methyluridine-3'-phosphate
  modified_base 16: mod_base = OTHER; note = 2'-O-methylguanosine-3'-phosphate
  modified_base 17: mod_base = OTHER; note = 2'-O-methyladenosine-3'-phosphate
  modified_base 18: mod_base = OTHER; note = 2'-O-methyladenosine-3'-phosphate
  modified_base 19: mod_base = OTHER; note = 2'-O-methyladenosine-3'-phosphate
  modified_base 20: mod_base = OTHER; note = 2'-O-methylguanosine-3'-phosphate
  modified_base 21: mod_base = OTHER; note = 2'-O-methylcytidine-3'-phosphate N-[tris(GalNAc-alkyl)-amidodecanoyl)]-4-hydroxyprolinol Hyp-(GalNAc-alkyl)3
aggcactgatgttctgaaagc

SEQ ID NO: 1959 - RNA, 23 nt, synthetic construct
  source 1..23: mol_type = other RNA; note = Description of Artificial Sequence: Synthetic oligonucleotide
  modified_base 1: mod_base = OTHER; note = 2'-O-methylguanosine-3'-phosphorothioate
  modified_base 2: mod_base = OTHER; note = 2'-fluorocytidine-3'-phosphorothioate
  modified_base 3: mod_base = OTHER; note = 2'-O-methyluridine-3'-phosphate
  modified_base 4: mod_base = OTHER; note = 2'-O-methyluridine-3'-phosphate
  modified_base 5: mod_base = OTHER; note = 2'-O-methyluridine-3'-phosphate
  modified_base 6: mod_base = OTHER; note = 2'-fluorocytidine-3'-phosphate
  modified_base 7: mod_base = OTHER; note = 2'-O-methyladenosine-3'-phosphate
  modified_base 8: mod_base = OTHER; note = 2'-fluoroguanosine-3'-phosphate
  modified_base 9: mod_base = OTHER; note = 2'-fluoroadenosine-3'-phosphate
  modified_base 10: mod_base = OTHER; note = 2'-O-methyladenosine-3'-phosphate
  modified_base 11: mod_base = OTHER; note = 2'-O-methylcytidine-3'-phosphate
  modified_base 12: mod_base = OTHER; note = 2'-O-methyladenosine-3'-phosphate
  modified_base 13: mod_base = OTHER; note = 2'-O-methyluridine-3'-phosphate
  modified_base 14: mod_base = OTHER; note = 2'-fluorocytidine-3'-phosphate
  modified_base 15: mod_base = OTHER; note = 2'-O-methyladenosine-3'-phosphate
  modified_base 16: mod_base = OTHER; note = 2'-fluoroguanosine-3'-phosphate
  modified_base 17: mod_base = OTHER; note = 2'-O-methyluridine-3'-phosphate
  modified_base 18: mod_base = OTHER; note = 2'-O-methylguanosine-3'-phosphate
  modified_base 19: mod_base = OTHER; note = 2'-O-methylcytidine-3'-phosphate
  modified_base 20: mod_base = OTHER; note = 2'-O-methylcytidine-3'-phosphate
  modified_base 21: mod_base = OTHER; note = 2'-O-methyluridine-3'-phosphorothioate
  modified_base 22: mod_base = OTHER; note = 2'-O-methyluridine-3'-phosphorothioate
  modified_base 23: mod_base = OTHER; note = 2'-O-methyluridine-3'-phosphate
gctttcagaacatcagtgccttt

SEQ ID NO: 1960 - RNA, 21 nt, synthetic construct
  source 1..21: mol_type = other RNA; note = Description of Artificial Sequence: Synthetic oligonucleotide
  modified_base 1: mod_base = OTHER; note = 2'-O-methyladenosine-3'-phosphorothioate
  modified_base 2: mod_base = OTHER; note = 2'-O-methyladenosine-3'-phosphorothioate
  modified_base 3: mod_base = OTHER; note = 2'-O-methylguanosine-3'-phosphate
  modified_base 4: mod_base = OTHER; note = 2'-O-methylguanosine-3'-phosphate
  modified_base 5: mod_base = OTHER; note = 2'-O-methylcytidine-3'-phosphate
  modified_base 6: mod_base = OTHER; note = 2'-O-methyladenosine-3'-phosphate
  modified_base 7: mod_base = OTHER; note = 2'-fluorocytidine-3'-phosphate
  modified_base 8: mod_base = OTHER; note = 2'-O-methyluridine-3'-phosphate
  modified_base 9: mod_base = OTHER; note = 2'-fluoroguanosine-3'-phosphate
  modified_base 10: mod_base = OTHER; note = 2'-fluoroadenosine-3'-phosphate
  modified_base 11: mod_base = OTHER; note = 2'-fluorouridine-3'-phosphate
  modified_base 12: mod_base = OTHER; note = 2'-O-methylguanosine-3'-phosphate
  modified_base 13: mod_base = OTHER; note = 2'-O-methyluridine-3'-phosphate
  modified_base 14: mod_base = OTHER; note = 2'-O-methyluridine-3'-phosphate
  modified_base 15: mod_base = OTHER; note = 2'-O-methylcytidine-3'-phosphate
  modified_base 16: mod_base = OTHER; note = 2'-O-methyluridine-3'-phosphate
  modified_base 17: mod_base = OTHER; note = 2'-O-methylguanosine-3'-phosphate
  modified_base 18: mod_base = OTHER; note = 2'-O-methyladenosine-3'-phosphate
  modified_base 19: mod_base = OTHER; note = 2'-O-methyladenosine-3'-phosphate
  modified_base 20: mod_base = OTHER; note = 2'-O-methyladenosine-3'-phosphate
  modified_base 21: mod_base = OTHER; note = 2'-O-methylguanosine-3'-phosphate N-[tris(GalNAc-alkyl)-amidodecanoyl)]-4-hydroxyprolinol Hyp-(GalNAc-alkyl)3
aaggcactgatgttctgaaag

SEQ ID NO: 1961 - RNA, 23 nt, synthetic construct
  source 1..23: mol_type = other RNA; note = Description of Artificial Sequence: Synthetic oligonucleotide
  modified_base 1: mod_base = OTHER; note = 2'-O-methylcytidine-3'-phosphorothioate
  modified_base 2: mod_base = OTHER; note = 2'-fluorouridine -3'-phosphorothioate
  modified_base 3: mod_base = OTHER; note = 2'-O-methyluridine-3'-phosphate
  modified_base 4: mod_base = OTHER; note = 2'-O-methyluridine-3'-phosphate
  modified_base 5: mod_base = OTHER; note = 2'-O-methylcytidine-3'-phosphate
  modified_base 6: mod_base = OTHER; note = 2'-fluoroadenosine-3'-phosphate
  modified_base 7: mod_base = OTHER; note = 2'-O-methylguanosine-3'-phosphate
  modified_base 8: mod_base = OTHER; note = 2'-fluoroadenosine-3'-phosphate
  modified_base 9: mod_base = OTHER; note = 2'-fluoroadenosine-3'-phosphate
  modified_base 10: mod_base = OTHER; note = 2'-O-methylcytidine-3'-phosphate
  modified_base 11: mod_base = OTHER; note = 2'-O-methyladenosine-3'-phosphate
  modified_base 12: mod_base = OTHER; note = 2'-O-methyluridine-3'-phosphate
  modified_base 13: mod_base = OTHER; note = 2'-O-methylcytidine-3'-phosphate
  modified_base 14: mod_base = OTHER; note = 2'-fluoroadenosine-3'-phosphate
  modified_base 15: mod_base = OTHER; note = 2'-O-methylguanosine-3'-phosphate
  modified_base 16: mod_base = OTHER; note = 2'-fluorouridine-3'-phosphate
  modified_base 17: mod_base = OTHER; note = 2'-O-methylguanosine-3'-phosphate
  modified_base 18: mod_base = OTHER; note = 2'-O-methylcytidine-3'-phosphate
  modified_base 19: mod_base = OTHER; note = 2'-O-methylcytidine-3'-phosphate
  modified_base 20: mod_base = OTHER; note = 2'-O-methyluridine-3'-phosphate
  modified_base 21: mod_base = OTHER; note = 2'-O-methyluridine-3'-phosphorothioate
  modified_base 22: mod_base = OTHER; note = 2'-O-methyluridine-3'-phosphorothioate
  modified_base 23: mod_base = OTHER; note = 2'-O-methylcytidine-3'-phosphate
ctttcagaacatcagtgcctttc

SEQ ID NO: 1962 - RNA, 21 nt, synthetic construct
  source 1..21: mol_type = other RNA; note = Description of Artificial Sequence: Synthetic oligonucleotide
  modified_base 1: mod_base = OTHER; note = 2'-O-methyladenosine-3'-phosphorothioate
  modified_base 2: mod_base = OTHER; note = 2'-O-methyladenosine-3'-phosphorothioate
  modified_base 3: mod_base = OTHER; note = 2'-O-methylcytidine-3'-phosphate
  modified_base 4: mod_base = OTHER; note = 2'-O-methyladenosine-3'-phosphate
  modified_base 5: mod_base = OTHER; note = 2'-O-methyladenosine-3'-phosphate
  modified_base 6: mod_base = OTHER; note = 2'-O-methylcytidine-3'-phosphate
  modified_base 7: mod_base = OTHER; note = 2'-fluoroadenosine-3'-phosphate
  modified_base 8: mod_base = OTHER; note = 2'-O-methyluridine-3'-phosphate
  modified_base 9: mod_base = OTHER; note = 2'-fluoroguanosine-3'-phosphate
  modified_base 10: mod_base = OTHER; note = 2'-fluorocytidine-3'-phosphate
  modified_base 11: mod_base = OTHER; note = 2'-fluorouridine-3'-phosphate
  modified_base 12: mod_base = OTHER; note = 2'-O-methyladenosine-3'-phosphate
  modified_base 13: mod_base = OTHER; note = 2'-O-methyladenosine-3'-phosphate
  modified_base 14: mod_base = OTHER; note = 2'-O-methyladenosine-3'-phosphate
  modified_base 15: mod_base = OTHER; note = 2'-O-methyluridine-3'-phosphate
  modified_base 16: mod_base = OTHER; note = 2'-O-methylcytidine-3'-phosphate
  modified_base 17: mod_base = OTHER; note = 2'-O-methyladenosine-3'-phosphate
  modified_base 18: mod_base = OTHER; note = 2'-O-methylguanosine-3'-phosphate
  modified_base 19: mod_base = OTHER; note = 2'-O-methyluridine-3'-phosphate
  modified_base 20: mod_base = OTHER; note = 2'-O-methyladenosine-3'-phosphate
  modified_base 21: mod_base = OTHER; note = 2'-O-methylcytidine-3'-phosphate N-[tris(GalNAc-alkyl)-amidodecanoyl)]-4-hydroxyprolinol Hyp-(GalNAc-alkyl)3
aacaacatgctaaatcagtac

SEQ ID NO: 1963 - RNA, 23 nt, synthetic construct
  source 1..23: mol_type = other RNA; note = Description of Artificial Sequence: Synthetic oligonucleotide
  modified_base 1: mod_base = OTHER; note = 2'-O-methylguanosine-3'-phosphorothioate
  modified_base 2: mod_base = OTHER; note = 2'-fluorouridine -3'-phosphorothioate
  modified_base 3: mod_base = OTHER; note = 2'-O-methyladenosine-3'-phosphate
  modified_base 4: mod_base = OTHER; note = 2'-O-methylcytidine-3'-phosphate
  modified_base 5: mod_base = OTHER; note = 2'-O-methyluridine-3'-phosphate
  modified_base 6: mod_base = OTHER; note = 2'-fluoroguanosine-3'-phosphate
  modified_base 7: mod_base = OTHER; note = 2'-O-methyladenosine-3'-phosphate
  modified_base 8: mod_base = OTHER; note = 2'-fluorouridine-3'-phosphate
  modified_base 9: mod_base = OTHER; note = 2'-fluorouridine-3'-phosphate
  modified_base 10: mod_base = OTHER; note = 2'-O-methyluridine-3'-phosphate
  modified_base 11: mod_base = OTHER; note = 2'-O-methyladenosine-3'-phosphate
  modified_base 12: mod_base = OTHER; note = 2'-O-methylguanosine-3'-phosphate
  modified_base 13: mod_base = OTHER; note = 2'-O-methylcytidine-3'-phosphate
  modified_base 14: mod_base = OTHER; note = 2'-fluoroadenosine-3'-phosphate
  modified_base 15: mod_base = OTHER; note = 2'-O-methyluridine-3'-phosphate
  modified_base 16: mod_base = OTHER; note = 2'-fluoroguanosine-3'-phosphate
  modified_base 17: mod_base = OTHER; note = 2'-O-methyluridine-3'-phosphate
  modified_base 18: mod_base = OTHER; note = 2'-O-methyluridine-3'-phosphate
  modified_base 19: mod_base = OTHER; note = 2'-O-methylguanosine-3'-phosphate
  modified_base 20: mod_base = OTHER; note = 2'-O-methyluridine-3'-phosphate
  modified_base 21: mod_base = OTHER; note = 2'-O-methyluridine-3'-phosphorothioate
  modified_base 22: mod_base = OTHER; note = 2'-O-methylcytidine-3'-phosphorothioate
  modified_base 23: mod_base = OTHER; note = 2'-O-methyladenosine-3'-phosphate
gtactgatttagcatgttgttca

SEQ ID NO: 1964 - RNA, 21 nt, synthetic construct
  source 1..21: mol_type = other RNA; note = Description of Artificial Sequence: Synthetic oligonucleotide
  modified_base 1: mod_base = OTHER; note = 2'-O-methyladenosine-3'-phosphorothioate
  modified_base 2: mod_base = OTHER; note = 2'-O-methylcytidine-3'-phosphorothioate
  modified_base 3: mod_base = OTHER; note = 2'-O-methyladenosine-3'-phosphate
  modified_base 4: mod_base = OTHER; note = 2'-O-methyladenosine-3'-phosphate
  modified_base 5: mod_base = OTHER; note = 2'-O-methylcytidine-3'-phosphate
  modified_base 6: mod_base = OTHER; note = 2'-O-methyladenosine-3'-phosphate
  modified_base 7: mod_base = OTHER; note = 2'-fluorouridine-3'-phosphate
  modified_base 8: mod_base = OTHER; note = 2'-O-methylguanosine-3'-phosphate
  modified_base 9: mod_base = OTHER; note = 2'-fluorocytidine-3'-phosphate
  modified_base 10: mod_base = OTHER; note = 2'-fluorouridine-3'-phosphate
  modified_base 11: mod_base = OTHER; note = 2'-fluoroadenosine-3'-phosphate
  modified_base 12: mod_base = OTHER; note = 2'-O-methyladenosine-3'-phosphate
  modified_base 13: mod_base = OTHER; note = 2'-O-methyladenosine-3'-phosphate
  modified_base 14: mod_base = OTHER; note = 2'-O-methyluridine-3'-phosphate
  modified_base 15: mod_base = OTHER; note = 2'-O-methylcytidine-3'-phosphate
  modified_base 16: mod_base = OTHER; note = 2'-O-methyladenosine-3'-phosphate
  modified_base 17: mod_base = OTHER; note = 2'-O-methylguanosine-3'-phosphate
  modified_base 18: mod_base = OTHER; note = 2'-O-methyluridine-3'-phosphate
  modified_base 19: mod_base = OTHER; note = 2'-O-methyladenosine-3'-phosphate
  modified_base 20: mod_base = OTHER; note = 2'-O-methylcytidine-3'-phosphate
  modified_base 21: mod_base = OTHER; note = 2'-O-methyluridine-3'-phosphate N-[tris(GalNAc-alkyl)-amidodecanoyl)]-4-hydroxyprolinol Hyp-(GalNAc-alkyl)3
acaacatgctaaatcagtact

SEQ ID NO: 1965 - RNA, 23 nt, synthetic construct
  source 1..23: mol_type = other RNA; note = Description of Artificial Sequence: Synthetic oligonucleotide
  modified_base 1: mod_base = OTHER; note = 2'-O-methyladenosine-3'-phosphorothioate
  modified_base 2: mod_base = OTHER; note = 2'-fluoroguanosine-3'-phosphorothioate
  modified_base 3: mod_base = OTHER; note = 2'-O-methyluridine-3'-phosphate
  modified_base 4: mod_base = OTHER; note = 2'-O-methyladenosine-3'-phosphate
  modified_base 5: mod_base = OTHER; note = 2'-O-methylcytidine-3'-phosphate
  modified_base 6: mod_base = OTHER; note = 2'-fluorouridine-3'-phosphate
  modified_base 7: mod_base = OTHER; note = 2'-O-methylguanosine-3'-phosphate
  modified_base 8: mod_base = OTHER; note = 2'-fluoroadenosine-3'-phosphate
  modified_base 9: mod_base = OTHER; note = 2'-fluorouridine-3'-phosphate
  modified_base 10: mod_base = OTHER; note = 2'-O-methyluridine-3'-phosphate
  modified_base 11: mod_base = OTHER; note = 2'-O-methyluridine-3'-phosphate
  modified_base 12: mod_base = OTHER; note = 2'-O-methyladenosine-3'-phosphate
  modified_base 13: mod_base = OTHER; note = 2'-O-methylguanosine-3'-phosphate
  modified_base 14: mod_base = OTHER; note = 2'-fluorocytidine-3'-phosphate
  modified_base 15: mod_base = OTHER; note = 2'-O-methyladenosine-3'-phosphate
  modified_base 16: mod_base = OTHER; note = 2'-fluorouridine-3'-phosphate
  modified_base 17: mod_base = OTHER; note = 2'-O-methylguanosine-3'-phosphate
  modified_base 18: mod_base = OTHER; note = 2'-O-methyluridine-3'-phosphate
  modified_base 19: mod_base = OTHER; note = 2'-O-methyluridine-3'-phosphate
  modified_base 20: mod_base = OTHER; note = 2'-O-methylguanosine-3'-phosphate
  modified_base 21: mod_base = OTHER; note = 2'-O-methyluridine-3'-phosphorothioate
  modified_base 22: mod_base = OTHER; note = 2'-O-methyluridine-3'-phosphorothioate
  modified_base 23: mod_base = OTHER; note = 2'-O-methylcytidine-3'-phosphate
agtactgatttagcatgttgttc

SEQ ID NO: 1966 - RNA, 21 nt, synthetic construct
  source 1..21: mol_type = other RNA; note = Description of Artificial Sequence: Synthetic oligonucleotide
  modified_base 1: mod_base = OTHER; note = 2'-O-methyluridine-3'-phosphorothioate
  modified_base 2: mod_base = OTHER; note = 2'-O-methyladenosine-3'-phosphorothioate
  modified_base 3: mod_base = OTHER; note = 2'-O-methyluridine-3'-phosphate
  modified_base 4: mod_base = OTHER; note = 2'-O-methylguanosine-3'-phosphate
  modified_base 5: mod_base = OTHER; note = 2'-O-methyladenosine-3'-phosphate
  modified_base 6: mod_base = OTHER; note = 2'-O-methyladenosine-3'-phosphate
  modified_base 7: mod_base = OTHER; note = 2'-fluorocytidine-3'-phosphate
  modified_base 8: mod_base = OTHER; note = 2'-O-methyladenosine-3'-phosphate
  modified_base 9: mod_base = OTHER; note = 2'-fluoroadenosine-3'-phosphate
  modified_base 10: mod_base = OTHER; note = 2'-fluorocytidine-3'-phosphate
  modified_base 11: mod_base = OTHER; note = 2'-fluoroadenosine-3'-phosphate
  modified_base 12: mod_base = OTHER; note = 2'-O-methyluridine-3'-phosphate
  modified_base 13: mod_base = OTHER; note = 2'-O-methylguanosine-3'-phosphate
  modified_base 14: mod_base = OTHER; note = 2'-O-methylcytidine-3'-phosphate
  modified_base 15: mod_base = OTHER; note = 2'-O-methyluridine-3'-phosphate
  modified_base 16: mod_base = OTHER; note = 2'-O-methyladenosine-3'-phosphate
  modified_base 17: mod_base = OTHER; note = 2'-O-methyladenosine-3'-phosphate
  modified_base 18: mod_base = OTHER; note = 2'-O-methyladenosine-3'-phosphate
  modified_base 19: mod_base = OTHER; note = 2'-O-methyluridine-3'-phosphate
  modified_base 20: mod_base = OTHER; note = 2'-O-methylcytidine-3'-phosphate
  modified_base 21: mod_base = OTHER; note = 2'-O-methyladenosine-3'-phosphate N-[tris(GalNAc-alkyl)-amidodecanoyl)]-4-hydroxyprolinol Hyp-(GalNAc-alkyl)3
tatgaacaacatgctaaatca

SEQ ID NO: 1967 - RNA, 23 nt, synthetic construct
  source 1..23: mol_type = other RNA; note = Description of Artificial Sequence: Synthetic oligonucleotide
  modified_base 1: mod_base = OTHER; note = 2'-O-methyluridine-3'-phosphorothioate
  modified_base 2: mod_base = OTHER; note = 2'-fluoroguanosine-3'-phosphorothioate
  modified_base 3: mod_base = OTHER; note = 2'-O-methyladenosine-3'-phosphate
  modified_base 4: mod_base = OTHER; note = 2'-O-methyluridine-3'-phosphate
  modified_base 5: mod_base = OTHER; note = 2'-O-methyluridine-3'-phosphate
  modified_base 6: mod_base = OTHER; note = 2'-fluorouridine-3'-phosphate
  modified_base 7: mod_base = OTHER; note = 2'-O-methyladenosine-3'-phosphate
  modified_base 8: mod_base = OTHER; note = 2'-fluoroguanosine-3'-phosphate
  modified_base 9: mod_base = OTHER; note = 2'-fluorocytidine-3'-phosphate
  modified_base 10: mod_base = OTHER; note = 2'-O-methyladenosine-3'-phosphate
  modified_base 11: mod_base = OTHER; note = 2'-O-methyluridine-3'-phosphate
  modified_base 12: mod_base = OTHER; note = 2'-O-methylguanosine-3'-phosphate
  modified_base 13: mod_base = OTHER; note = 2'-O-methyluridine-3'-phosphate
  modified_base 14: mod_base = OTHER; note = 2'-fluorouridine-3'-phosphate
  modified_base 15: mod_base = OTHER; note = 2'-O-methylguanosine-3'-phosphate
  modified_base 16: mod_base = OTHER; note = 2'-fluorouridine-3'-phosphate
  modified_base 17: mod_base = OTHER; note = 2'-O-methyluridine-3'-phosphate
  modified_base 18: mod_base = OTHER; note = 2'-O-methylcytidine-3'-phosphate
  modified_base 19: mod_base = OTHER; note = 2'-O-methyladenosine-3'-phosphate
  modified_base 20: mod_base = OTHER; note = 2'-O-methyluridine-3'-phosphate
  modified_base 21: mod_base = OTHER; note = 2'-O-methyladenosine-3'-phosphorothioate
  modified_base 22: mod_base = OTHER; note = 2'-O-methyladenosine-3'-phosphorothioate
  modified_base 23: mod_base = OTHER; note = 2'-O-methyluridine-3'-phosphate
tgatttagcatgttgttcataat

SEQ ID NO: 1968 - RNA, 21 nt, synthetic construct
  source 1..21: mol_type = other RNA; note = Description of Artificial Sequence: Synthetic oligonucleotide
  modified_base 1: mod_base = OTHER; note = 2'-O-methyluridine-3'-phosphorothioate
  modified_base 2: mod_base = OTHER; note = 2'-O-methyluridine-3'-phosphorothioate
  modified_base 3: mod_base = OTHER; note = 2'-O-methyladenosine-3'-phosphate
  modified_base 4: mod_base = OTHER; note = 2'-O-methyluridine-3'-phosphate
  modified_base 5: mod_base = OTHER; note = 2'-O-methylguanosine-3'-phosphate
  modified_base 6: mod_base = OTHER; note = 2'-O-methyladenosine-3'-phosphate
  modified_base 7: mod_base = OTHER; note = 2'-fluoroadenosine-3'-phosphate
  modified_base 8: mod_base = OTHER; note = 2'-O-methylcytidine-3'-phosphate
  modified_base 9: mod_base = OTHER; note = 2'-fluoroadenosine-3'-phosphate
  modified_base 10: mod_base = OTHER; note = 2'-fluoroadenosine-3'-phosphate
  modified_base 11: mod_base = OTHER; note = 2'-fluorocytidine-3'-phosphate
  modified_base 12: mod_base = OTHER; note = 2'-O-methyladenosine-3'-phosphate
  modified_base 13: mod_base = OTHER; note = 2'-O-methyluridine-3'-phosphate
  modified_base 14: mod_base = OTHER; note = 2'-O-methylguanosine-3'-phosphate
  modified_base 15: mod_base = OTHER; note = 2'-O-methylcytidine-3'-phosphate
  modified_base 16: mod_base = OTHER; note = 2'-O-methyluridine-3'-phosphate
  modified_base 17: mod_base = OTHER; note = 2'-O-methyladenosine-3'-phosphate
  modified_base 18: mod_base = OTHER; note = 2'-O-methyladenosine-3'-phosphate
  modified_base 19: mod_base = OTHER; note = 2'-O-methyladenosine-3'-phosphate
  modified_base 20: mod_base = OTHER; note = 2'-O-methyluridine-3'-phosphate
  modified_base 21: mod_base = OTHER; note = 2'-O-methylcytidine-3'-phosphate N-[tris(GalNAc-alkyl)-amidodecanoyl)]-4-hydroxyprolinol Hyp-(GalNAc-alkyl)3
ttatgaacaacatgctaaatc

SEQ ID NO: 1969 - RNA, 23 nt, synthetic construct
  source 1..23: mol_type = other RNA; note = Description of Artificial Sequence: Synthetic oligonucleotide
  modified_base 1: mod_base = OTHER; note = 2'-O-methylguanosine-3'-phosphorothioate
  modified_base 2: mod_base = OTHER; note = 2'-fluoroadenosine-3'-phosphorothioate
  modified_base 3: mod_base = OTHER; note = 2'-O-methyluridine-3'-phosphate
  modified_base 4: mod_base = OTHER; note = 2'-O-methyluridine-3'-phosphate
  modified_base 5: mod_base = OTHER; note = 2'-O-methyluridine-3'-phosphate
  modified_base 6: mod_base = OTHER; note = 2'-fluoroadenosine-3'-phosphate
  modified_base 7: mod_base = OTHER; note = 2'-O-methylguanosine-3'-phosphate
  modified_base 8: mod_base = OTHER; note = 2'-fluorocytidine-3'-phosphate
  modified_base 9: mod_base = OTHER; note = 2'-fluoroadenosine-3'-phosphate
  modified_base 10: mod_base = OTHER; note = 2'-O-methyluridine-3'-phosphate
  modified_base 11: mod_base = OTHER; note = 2'-O-methylguanosine-3'-phosphate
  modified_base 12: mod_base = OTHER; note = 2'-O-methyluridine-3'-phosphate
  modified_base 13: mod_base = OTHER; note = 2'-O-methyluridine-3'-phosphate
  modified_base 14: mod_base = OTHER; note = 2'-fluoroguanosine-3'-phosphate
  modified_base 15: mod_base = OTHER; note = 2'-O-methyluridine-3'-phosphate
  modified_base 16: mod_base = OTHER; note = 2'-fluorouridine-3'-phosphate
  modified_base 17: mod_base = OTHER; note = 2'-O-methylcytidine-3'-phosphate
  modified_base 18: mod_base = OTHER; note = 2'-O-methyladenosine-3'-phosphate
  modified_base 19: mod_base = OTHER; note = 2'-O-methyluridine-3'-phosphate
  modified_base 20: mod_base = OTHER; note = 2'-O-methyladenosine-3'-phosphate
  modified_base 21: mod_base = OTHER; note = 2'-O-methyladenosine-3'-phosphorothioate
  modified_base 22: mod_base = OTHER; note = 2'-O-methyluridine-3'-phosphorothioate
  modified_base 23: mod_base = OTHER; note = 2'-O-methylcytidine-3'-phosphate
gatttagcatgttgttcataatc

SEQ ID NO: 1970 - RNA, 21 nt, synthetic construct
  source 1..21: mol_type = other RNA; note = Description of Artificial Sequence: Synthetic oligonucleotide
  modified_base 1: mod_base = OTHER; note = 2'-O-methyluridine-3'-phosphorothioate
  modified_base 2: mod_base = OTHER; note = 2'-O-methylcytidine-3'-phosphorothioate
  modified_base 3: mod_base = OTHER; note = 2'-O-methyluridine-3'-phosphate
  modified_base 4: mod_base = OTHER; note = 2'-O-methyluridine-3'-phosphate
  modified_base 5: mod_base = OTHER; note = 2'-O-methyluridine-3'-phosphate
  modified_base 6: mod_base = OTHER; note = 2'-O-methyladenosine-3'-phosphate
  modified_base 7: mod_base = OTHER; note = 2'-fluoroguanosine-3'-phosphate
  modified_base 8: mod_base = OTHER; note = 2'-O-methyluridine-3'-phosphate
  modified_base 9: mod_base = OTHER; note = 2'-fluoroguanosine-3'-phosphate
  modified_base 10: mod_base = OTHER; note = 2'-fluorouridine-3'-phosphate
  modified_base 11: mod_base = OTHER; note = 2'-fluorocytidine-3'-phosphate
  modified_base 12: mod_base = OTHER; note = 2'-O-methyluridine-3'-phosphate
  modified_base 13: mod_base = OTHER; note = 2'-O-methylguanosine-3'-phosphate
  modified_base 14: mod_base = OTHER; note = 2'-O-methyladenosine-3'-phosphate
  modified_base 15: mod_base = OTHER; note = 2'-O-methyladenosine-3'-phosphate
  modified_base 16: mod_base = OTHER; note = 2'-O-methyluridine-3'-phosphate
  modified_base 17: mod_base = OTHER; note = 2'-O-methyladenosine-3'-phosphate
  modified_base 18: mod_base = OTHER; note = 2'-O-methyluridine-3'-phosphate
  modified_base 19: mod_base = OTHER; note = 2'-O-methyladenosine-3'-phosphate
  modified_base 20: mod_base = OTHER; note = 2'-O-methyluridine-3'-phosphate
  modified_base 21: mod_base = OTHER; note = 2'-O-methylcytidine-3'-phosphate N-[tris(GalNAc-alkyl)-amidodecanoyl)]-4-hydroxyprolinol Hyp-(GalNAc-alkyl)3
tctttagtgtctgaatatatc

SEQ ID NO: 1971 - RNA, 23 nt, synthetic construct
  source 1..23: mol_type = other RNA; note = Description of Artificial Sequence: Synthetic oligonucleotide
  modified_base 1: mod_base = OTHER; note = 2'-O-methylguanosine-3'-phosphorothioate
  modified_base 2: mod_base = OTHER; note = 2'-fluoroadenosine-3'-phosphorothioate
  modified_base 3: mod_base = OTHER; note = 2'-O-methyluridine-3'-phosphate
  modified_base 4: mod_base = OTHER; note = 2'-O-methyladenosine-3'-phosphate
  modified_base 5: mod_base = OTHER; note = 2'-O-methyluridine-3'-phosphate
  modified_base 6: mod_base = OTHER; note = 2'-fluoroadenosine-3'-phosphate
  modified_base 7: mod_base = OTHER; note = 2'-O-methyluridine-3'-phosphate
  modified_base 8: mod_base = OTHER; note = 2'-fluorouridine-3'-phosphate
  modified_base 9: mod_base = OTHER; note = 2'-fluorocytidine-3'-phosphate
  modified_base 10: mod_base = OTHER; note = 2'-O-methyladenosine-3'-phosphate
  modified_base 11: mod_base = OTHER; note = 2'-O-methylguanosine-3'-phosphate
  modified_base 12: mod_base = OTHER; note = 2'-O-methyladenosine-3'-phosphate
  modified_base 13: mod_base = OTHER; note = 2'-O-methylcytidine-3'-phosphate
  modified_base 14: mod_base = OTHER; note = 2'-fluoroadenosine-3'-phosphate
  modified_base 15: mod_base = OTHER; note = 2'-O-methylcytidine-3'-phosphate
  modified_base 16: mod_base = OTHER; note = 2'-fluorouridine-3'-phosphate
  modified_base 17: mod_base = OTHER; note = 2'-O-methyladenosine-3'-phosphate
  modified_base 18: mod_base = OTHER; note = 2'-O-methyladenosine-3'-phosphate
  modified_base 19: mod_base = OTHER; note = 2'-O-methyladenosine-3'-phosphate
  modified_base 20: mod_base = OTHER; note = 2'-O-methylguanosine-3'-phosphate
  modified_base 21: mod_base = OTHER; note = 2'-O-methyladenosine-3'-phosphorothioate
  modified_base 22: mod_base = OTHER; note = 2'-O-methyluridine-3'-phosphorothioate
  modified_base 23: mod_base = OTHER; note = 2'-O-methylguanosine-3'-phosphate
gatatattcagacactaaagatg

SEQ ID NO: 1972 - RNA, 21 nt, synthetic construct
  source 1..21: mol_type = other RNA; note = Description of Artificial Sequence: Synthetic oligonucleotide
  modified_base 1: mod_base = OTHER; note = 2'-O-methylcytidine-3'-phosphorothioate
  modified_base 2: mod_base = OTHER; note = 2'-O-methyluridine-3'-phosphorothioate
  modified_base 3: mod_base = OTHER; note = 2'-O-methyluridine-3'-phosphate
  modified_base 4: mod_base = OTHER; note = 2'-O-methyluridine-3'-phosphate
  modified_base 5: mod_base = OTHER; note = 2'-O-methyladenosine-3'-phosphate
  modified_base 6: mod_base = OTHER; note = 2'-O-methylguanosine-3'-phosphate
  modified_base 7: mod_base = OTHER; note = 2'-fluorouridine-3'-phosphate
  modified_base 8: mod_base = OTHER; note = 2'-O-methylguanosine-3'-phosphate
  modified_base 9: mod_base = OTHER; note = 2'-fluorouridine-3'-phosphate
  modified_base 10: mod_base = OTHER; note = 2'-fluorocytidine-3'-phosphate
  modified_base 11: mod_base = OTHER; note = 2'-fluorouridine-3'-phosphate
  modified_base 12: mod_base = OTHER; note = 2'-O-methylguanosine-3'-phosphate
  modified_base 13: mod_base = OTHER; note = 2'-O-methyladenosine-3'-phosphate
  modified_base 14: mod_base = OTHER; note = 2'-O-methyladenosine-3'-phosphate
  modified_base 15: mod_base = OTHER; note = 2'-O-methyluridine-3'-phosphate
  modified_base 16: mod_base = OTHER; note = 2'-O-methyladenosine-3'-phosphate
  modified_base 17: mod_base = OTHER; note = 2'-O-methyluridine-3'-phosphate
  modified_base 18: mod_base = OTHER; note = 2'-O-methyladenosine-3'-phosphate
  modified_base 19: mod_base = OTHER; note = 2'-O-methyluridine-3'-phosphate
  modified_base 20: mod_base = OTHER; note = 2'-O-methylcytidine-3'-phosphate
  modified_base 21: mod_base = OTHER; note = 2'-O-methylcytidine-3'-phosphate N-[tris(GalNAc-alkyl)-amidodecanoyl)]-4-hydroxyprolinol Hyp-(GalNAc-alkyl)3
ctttagtgtctgaatatatcc

SEQ ID NO: 1973 - RNA, 23 nt, synthetic construct
  source 1..23: mol_type = other RNA; note = Description of Artificial Sequence: Synthetic oligonucleotide
  modified_base 1: mod_base = OTHER; note = 2'-O-methylguanosine-3'-phosphorothioate
  modified_base 2: mod_base = OTHER; note = 2'-fluoroguanosine-3'-phosphorothioate
  modified_base 3: mod_base = OTHER; note = 2'-O-methyladenosine-3'-phosphate
  modified_base 4: mod_base = OTHER; note = 2'-O-methyluridine-3'-phosphate
  modified_base 5: mod_base = OTHER; note = 2'-O-methyladenosine-3'-phosphate
  modified_base 6: mod_base = OTHER; note = 2'-fluorouridine-3'-phosphate
  modified_base 7: mod_base = OTHER; note = 2'-O-methyladenosine-3'-phosphate
  modified_base 8: mod_base = OTHER; note = 2'-fluorouridine-3'-phosphate
  modified_base 9: mod_base = OTHER; note = 2'-fluorouridine-3'-phosphate
  modified_base 10: mod_base = OTHER; note = 2'-O-methylcytidine-3'-phosphate
  modified_base 11: mod_base = OTHER; note = 2'-O-methyladenosine-3'-phosphate
  modified_base 12: mod_base = OTHER; note = 2'-O-methylguanosine-3'-phosphate
  modified_base 13: mod_base = OTHER; note = 2'-O-methyladenosine-3'-phosphate
  modified_base 14: mod_base = OTHER; note = 2'-fluorocytidine-3'-phosphate
  modified_base 15: mod_base = OTHER; note = 2'-O-methyladenosine-3'-phosphate
  modified_base 16: mod_base = OTHER; note = 2'-fluorocytidine-3'-phosphate
  modified_base 17: mod_base = OTHER; note = 2'-O-methyluridine-3'-phosphate
  modified_base 18: mod_base = OTHER; note = 2'-O-methyladenosine-3'-phosphate
  modified_base 19: mod_base = OTHER; note = 2'-O-methyladenosine-3'-phosphate
  modified_base 20: mod_base = OTHER; note = 2'-O-methyladenosine-3'-phosphate
  modified_base 21: mod_base = OTHER; note = 2'-O-methylguanosine-3'-phosphorothioate
  modified_base 22: mod_base = OTHER; note = 2'-O-methyladenosine-3'-phosphorothioate
  modified_base 23: mod_base = OTHER; note = 2'-O-methyluridine-3'-phosphate
ggatatattcagacactaaagat

SEQ ID NO: 1974 - RNA, 21 nt, synthetic construct
  source 1..21: mol_type = other RNA; note = Description of Artificial Sequence: Synthetic oligonucleotide
  modified_base 1: mod_base = OTHER; note = 2'-O-methylcytidine-3'-phosphorothioate
  modified_base 2: mod_base = OTHER; note = 2'-O-methyladenosine-3'-phosphorothioate
  modified_base 3: mod_base = OTHER; note = 2'-O-methylcytidine-3'-phosphate
  modified_base 4: mod_base = OTHER; note = 2'-O-methyladenosine-3'-phosphate
  modified_base 5: mod_base = OTHER; note = 2'-O-methyluridine-3'-phosphate
  modified_base 6: mod_base = OTHER; note = 2'-O-methylcytidine-3'-phosphate
  modified_base 7: mod_base = OTHER; note = 2'-fluorouridine-3'-phosphate
  modified_base 8: mod_base = OTHER; note = 2'-O-methyluridine-3'-phosphate
  modified_base 9: mod_base = OTHER; note = 2'-fluorouridine-3'-phosphate
  modified_base 10: mod_base = OTHER; note = 2'-fluoroadenosine-3'-phosphate
  modified_base 11: mod_base = OTHER; note = 2'-fluoroguanosine-3'-phosphate
  modified_base 12: mod_base = OTHER; note = 2'-O-methyluridine-3'-phosphate
  modified_base 13: mod_base = OTHER; note = 2'-O-methylguanosine-3'-phosphate
  modified_base 14: mod_base = OTHER; note = 2'-O-methyluridine-3'-phosphate
  modified_base 15: mod_base = OTHER; note = 2'-O-methylcytidine-3'-phosphate
  modified_base 16: mod_base = OTHER; note = 2'-O-methyluridine-3'-phosphate
  modified_base 17: mod_base = OTHER; note = 2'-O-methylguanosine-3'-phosphate
  modified_base 18: mod_base = OTHER; note = 2'-O-methyladenosine-3'-phosphate
  modified_base 19: mod_base = OTHER; note = 2'-O-methyladenosine-3'-phosphate
  modified_base 20: mod_base = OTHER; note = 2'-O-methyluridine-3'-phosphate
  modified_base 21: mod_base = OTHER; note = 2'-O-methyladenosine-3'-phosphate N-[tris(GalNAc-alkyl)-amidodecanoyl)]-4-hydroxyprolinol Hyp-(GalNAc-alkyl)3
cacatctttagtgtctgaata

SEQ ID NO: 1975 - RNA, 23 nt, synthetic construct
  source 1..23: mol_type = other RNA; note = Description of Artificial Sequence: Synthetic oligonucleotide
  modified_base 1: mod_base = OTHER; note = 2'-O-methyluridine-3'-phosphorothioate
  modified_base 2: mod_base = OTHER; note = 2'-fluoroadenosine-3'-phosphorothioate
  modified_base 3: mod_base = OTHER; note = 2'-O-methyluridine-3'-phosphate
  modified_base 4: mod_base = OTHER; note = 2'-O-methyluridine-3'-phosphate
  modified_base 5: mod_base = OTHER; note = 2'-O-methylcytidine-3'-phosphate
  modified_base 6: mod_base = OTHER; note = 2'-fluoroadenosine-3'-phosphate
  modified_base 7: mod_base = OTHER; note = 2'-O-methylguanosine-3'-phosphate
  modified_base 8: mod_base = OTHER; note = 2'-fluoroadenosine-3'-phosphate
  modified_base 9: mod_base = OTHER; note = 2'-fluorocytidine-3'-phosphate
  modified_base 10: mod_base = OTHER; note = 2'-O-methyladenosine-3'-phosphate
  modified_base 11: mod_base = OTHER; note = 2'-O-methylcytidine-3'-phosphate
  modified_base 12: mod_base = OTHER; note = 2'-O-methyluridine-3'-phosphate
  modified_base 13: mod_base = OTHER; note = 2'-O-methyladenosine-3'-phosphate
  modified_base 14: mod_base = OTHER; note = 2'-fluoroadenosine-3'-phosphate
  modified_base 15: mod_base = OTHER; note = 2'-O-methyladenosine-3'-phosphate
  modified_base 16: mod_base = OTHER; note = 2'-fluoroguanosine-3'-phosphate
  modified_base 17: mod_base = OTHER; note = 2'-O-methyladenosine-3'-phosphate
  modified_base 18: mod_base = OTHER; note = 2'-O-methyluridine-3'-phosphate
  modified_base 19: mod_base = OTHER; note = 2'-O-methylguanosine-3'-phosphate
  modified_base 20: mod_base = OTHER; note = 2'-O-methyluridine-3'-phosphate
  modified_base 21: mod_base = OTHER; note = 2'-O-methylguanosine-3'-phosphorothioate
  modified_base 22: mod_base = OTHER; note = 2'-O-methyladenosine-3'-phosphorothioate
  modified_base 23: mod_base = OTHER; note = 2'-O-methyluridine-3'-phosphate
tattcagacactaaagatgtgat

SEQ ID NO: 1976 - RNA, 21 nt, synthetic construct
  source 1..21: mol_type = other RNA; note = Description of Artificial Sequence: Synthetic oligonucleotide
  modified_base 1: mod_base = OTHER; note = 2'-O-methyluridine-3'-phosphorothioate
  modified_base 2: mod_base = OTHER; note = 2'-O-methylcytidine-3'-phosphorothioate
  modified_base 3: mod_base = OTHER; note = 2'-O-methyladenosine-3'-phosphate
  modified_base 4: mod_base = OTHER; note = 2'-O-methylcytidine-3'-phosphate
  modified_base 5: mod_base = OTHER; note = 2'-O-methyladenosine-3'-phosphate
  modified_base 6: mod_base = OTHER; note = 2'-O-methyluridine-3'-phosphate
  modified_base 7: mod_base = OTHER; note = 2'-fluorocytidine-3'-phosphate
  modified_base 8: mod_base = OTHER; note = 2'-O-methyluridine-3'-phosphate
  modified_base 9: mod_base = OTHER; note = 2'-fluorouridine-3'-phosphate
  modified_base 10: mod_base = OTHER; note = 2'-fluorouridine-3'-phosphate
  modified_base 11: mod_base = OTHER; note = 2'-fluoroadenosine-3'-phosphate
  modified_base 12: mod_base = OTHER; note = 2'-O-methylguanosine-3'-phosphate
  modified_base 13: mod_base = OTHER; note = 2'-O-methyluridine-3'-phosphate
  modified_base 14: mod_base = OTHER; note = 2'-O-methylguanosine-3'-phosphate
  modified_base 15: mod_base = OTHER; note = 2'-O-methyluridine-3'-phosphate
  modified_base 16: mod_base = OTHER; note = 2'-O-methylcytidine-3'-phosphate
  modified_base 17: mod_base = OTHER; note = 2'-O-methyluridine-3'-phosphate
  modified_base 18: mod_base = OTHER; note = 2'-O-methylguanosine-3'-phosphate
  modified_base 19: mod_base = OTHER; note = 2'-O-methyladenosine-3'-phosphate
  modified_base 20: mod_base = OTHER; note = 2'-O-methyladenosine-3'-phosphate
  modified_base 21: mod_base = OTHER; note = 2'-O-methyluridine-3'-phosphate N-[tris(GalNAc-alkyl)-amidodecanoyl)]-4-hydroxyprolinol Hyp-(GalNAc-alkyl)3
tcacatctttagtgtctgaat

SEQ ID NO: 1977 - RNA, 23 nt, synthetic construct
  source 1..23: mol_type = other RNA; note = Description of Artificial Sequence: Synthetic oligonucleotide
  modified_base 1: mod_base = OTHER; note = 2'-O-methyladenosine-3'-phosphorothioate
  modified_base 2: mod_base = OTHER; note = 2'-fluorouridine -3'-phosphorothioate
  modified_base 3: mod_base = OTHER; note = 2'-O-methyluridine-3'-phosphate
  modified_base 4: mod_base = OTHER; note = 2'-O-methylcytidine-3'-phosphate
  modified_base 5: mod_base = OTHER; note = 2'-O-methyladenosine-3'-phosphate
  modified_base 6: mod_base = OTHER; note = 2'-fluoroguanosine-3'-phosphate
  modified_base 7: mod_base = OTHER; note = 2'-O-methyladenosine-3'-phosphate
  modified_base 8: mod_base = OTHER; note = 2'-fluorocytidine-3'-phosphate
  modified_base 9: mod_base = OTHER; note = 2'-fluoroadenosine-3'-phosphate
  modified_base 10: mod_base = OTHER; note = 2'-O-methylcytidine-3'-phosphate
  modified_base 11: mod_base = OTHER; note = 2'-O-methyluridine-3'-phosphate
  modified_base 12: mod_base = OTHER; note = 2'-O-methyladenosine-3'-phosphate
  modified_base 13: mod_base = OTHER; note = 2'-O-methyladenosine-3'-phosphate
  modified_base 14: mod_base = OTHER; note = 2'-fluoroadenosine-3'-phosphate
  modified_base 15: mod_base = OTHER; note = 2'-O-methylguanosine-3'-phosphate
  modified_base 16: mod_base = OTHER; note = 2'-fluoroadenosine-3'-phosphate
  modified_base 17: mod_base = OTHER; note = 2'-O-methyluridine-3'-phosphate
  modified_base 18: mod_base = OTHER; note = 2'-O-methylguanosine-3'-phosphate
  modified_base 19: mod_base = OTHER; note = 2'-O-methyluridine-3'-phosphate
  modified_base 20: mod_base = OTHER; note = 2'-O-methylguanosine-3'-phosphate
  modified_base 21: mod_base = OTHER; note = 2'-O-methyladenosine-3'-phosphorothioate
  modified_base 22: mod_base = OTHER; note = 2'-O-methyluridine-3'-phosphorothioate
  modified_base 23: mod_base = OTHER; note = 2'-O-methyluridine-3'-phosphate
attcagacactaaagatgtgatt

SEQ ID NO: 1978 - RNA, 21 nt, synthetic construct
  source 1..21: mol_type = other RNA; note = Description of Artificial Sequence: Synthetic oligonucleotide
  modified_base 1: mod_base = OTHER; note = 2'-O-methyluridine-3'-phosphorothioate
  modified_base 2: mod_base = OTHER; note = 2'-O-methylguanosine-3'-phosphorothioate
  modified_base 3: mod_base = OTHER; note = 2'-O-methyladenosine-3'-phosphate
  modified_base 4: mod_base = OTHER; note = 2'-O-methyluridine-3'-phosphate
  modified_base 5: mod_base = OTHER; note = 2'-O-methyladenosine-3'-phosphate
  modified_base 6: mod_base = OTHER; note = 2'-O-methylcytidine-3'-phosphate
  modified_base 7: mod_base = OTHER; note = 2'-fluorouridine-3'-phosphate
  modified_base 8: mod_base = OTHER; note = 2'-O-methyluridine-3'-phosphate
  modified_base 9: mod_base = OTHER; note = 2'-fluorocytidine-3'-phosphate
  modified_base 10: mod_base = OTHER; note = 2'-fluorouridine-3'-phosphate
  modified_base 11: mod_base = OTHER; note = 2'-fluorouridine-3'-phosphate
  modified_base 12: mod_base = OTHER; note = 2'-O-methyluridine-3'-phosphate
  modified_base 13: mod_base = OTHER; note = 2'-O-methylguanosine-3'-phosphate
  modified_base 14: mod_base = OTHER; note = 2'-O-methyladenosine-3'-phosphate
  modified_base 15: mod_base = OTHER; note = 2'-O-methyladenosine-3'-phosphate
  modified_base 16: mod_base = OTHER; note = 2'-O-methyluridine-3'-phosphate
  modified_base 17: mod_base = OTHER; note = 2'-O-methylguanosine-3'-phosphate
  modified_base 18: mod_base = OTHER; note = 2'-O-methyluridine-3'-phosphate
  modified_base 19: mod_base = OTHER; note = 2'-O-methyladenosine-3'-phosphate
  modified_base 20: mod_base = OTHER; note = 2'-O-methylguanosine-3'-phosphate
  modified_base 21: mod_base = OTHER; note = 2'-O-methyladenosine-3'-phosphate N-[tris(GalNAc-alkyl)-amidodecanoyl)]-4-hydroxyprolinol Hyp-(GalNAc-alkyl)3
tgatacttctttgaatgtaga

SEQ ID NO: 1979 - RNA, 23 nt, synthetic construct
  source 1..23: mol_type = other RNA; note = Description of Artificial Sequence: Synthetic oligonucleotide
  modified_base 1: mod_base = OTHER; note = 2'-O-methyluridine-3'-phosphorothioate
  modified_base 2: mod_base = OTHER; note = 2'-fluorocytidine-3'-phosphorothioate
  modified_base 3: mod_base = OTHER; note = 2'-O-methyluridine-3'-phosphate
  modified_base 4: mod_base = OTHER; note = 2'-O-methyladenosine-3'-phosphate
  modified_base 5: mod_base = OTHER; note = 2'-O-methylcytidine-3'-phosphate
  modified_base 6: mod_base = OTHER; note = 2'-fluoroadenosine-3'-phosphate
  modified_base 7: mod_base = OTHER; note = 2'-O-methyluridine-3'-phosphate
  modified_base 8: mod_base = OTHER; note = 2'-fluorouridine-3'-phosphate
  modified_base 9: mod_base = OTHER; note = 2'-fluorocytidine-3'-phosphate
  modified_base 10: mod_base = OTHER; note = 2'-O-methyladenosine-3'-phosphate
  modified_base 11: mod_base = OTHER; note = 2'-O-methyladenosine-3'-phosphate
  modified_base 12: mod_base = OTHER; note = 2'-O-methyladenosine-3'-phosphate
  modified_base 13: mod_base = OTHER; note = 2'-O-methylguanosine-3'-phosphate
  modified_base 14: mod_base = OTHER; note = 2'-fluoroadenosine-3'-phosphate
  modified_base 15: mod_base = OTHER; note = 2'-O-methyladenosine-3'-phosphate
  modified_base 16: mod_base = OTHER; note = 2'-fluoroguanosine-3'-phosphate
  modified_base 17: mod_base = OTHER; note = 2'-O-methyluridine-3'-phosphate
  modified_base 18: mod_base = OTHER; note = 2'-O-methyladenosine-3'-phosphate
  modified_base 19: mod_base = OTHER; note = 2'-O-methyluridine-3'-phosphate
  modified_base 20: mod_base = OTHER; note = 2'-O-methylcytidine-3'-phosphate
  modified_base 21: mod_base = OTHER; note = 2'-O-methyladenosine-3'-phosphorothioate
  modified_base 22: mod_base = OTHER; note = 2'-O-methylcytidine-3'-phosphorothioate
  modified_base 23: mod_base = OTHER; note = 2'-O-methylcytidine-3'-phosphate
tctacattcaaagaagtatcacc

SEQ ID NO: 1980 - RNA, 21 nt, synthetic construct
  source 1..21: mol_type = other RNA; note = Description of Artificial Sequence: Synthetic oligonucleotide
  modified_base 1: mod_base = OTHER; note = 2'-O-methylguanosine-3'-phosphorothioate
  modified_base 2: mod_base = OTHER; note = 2'-O-methyladenosine-3'-phosphorothioate
  modified_base 3: mod_base = OTHER; note = 2'-O-methyluridine-3'-phosphate
  modified_base 4: mod_base = OTHER; note = 2'-O-methyladenosine-3'-phosphate
  modified_base 5: mod_base = OTHER; note = 2'-O-methylcytidine-3'-phosphate
  modified_base 6: mod_base = OTHER; note = 2'-O-methyluridine-3'-phosphate
  modified_base 7: mod_base = OTHER; note = 2'-fluorouridine-3'-phosphate
  modified_base 8: mod_base = OTHER; note = 2'-O-methylcytidine-3'-phosphate
  modified_base 9: mod_base = OTHER; note = 2'-fluorouridine-3'-phosphate
  modified_base 10: mod_base = OTHER; note = 2'-fluorouridine-3'-phosphate
  modified_base 11: mod_base = OTHER; note = 2'-fluorouridine-3'-phosphate
  modified_base 12: mod_base = OTHER; note = 2'-O-methylguanosine-3'-phosphate
  modified_base 13: mod_base = OTHER; note = 2'-O-methyladenosine-3'-phosphate
  modified_base 14: mod_base = OTHER; note = 2'-O-methyladenosine-3'-phosphate
  modified_base 15: mod_base = OTHER; note = 2'-O-methyluridine-3'-phosphate
  modified_base 16: mod_base = OTHER; note = 2'-O-methylguanosine-3'-phosphate
  modified_base 17: mod_base = OTHER; note = 2'-O-methyluridine-3'-phosphate
  modified_base 18: mod_base = OTHER; note = 2'-O-methyladenosine-3'-phosphate
  modified_base 19: mod_base = OTHER; note = 2'-O-methylguanosine-3'-phosphate
  modified_base 20: mod_base = OTHER; note = 2'-O-methyladenosine-3'-phosphate
  modified_base 21: mod_base = OTHER; note = 2'-O-methyluridine-3'-phosphate N-[tris(GalNAc-alkyl)-amidodecanoyl)]-4-hydroxyprolinol Hyp-(GalNAc-alkyl)3
gatacttctttgaatgtagat

SEQ ID NO: 1981 - RNA, 23 nt, synthetic construct
  source 1..23: mol_type = other RNA; note = Description of Artificial Sequence: Synthetic oligonucleotide
  modified_base 1: mod_base = OTHER; note = 2'-O-methyladenosine-3'-phosphorothioate
  modified_base 2: mod_base = OTHER; note = 2'-fluorouridine -3'-phosphorothioate
  modified_base 3: mod_base = OTHER; note = 2'-O-methylcytidine-3'-phosphate
  modified_base 4: mod_base = OTHER; note = 2'-O-methyluridine-3'-phosphate
  modified_base 5: mod_base = OTHER; note = 2'-O-methyladenosine-3'-phosphate
  modified_base 6: mod_base = OTHER; note = 2'-fluorocytidine-3'-phosphate
  modified_base 7: mod_base = OTHER; note = 2'-O-methyladenosine-3'-phosphate
  modified_base 8: mod_base = OTHER; note = 2'-fluorouridine-3'-phosphate
  modified_base 9: mod_base = OTHER; note = 2'-fluorouridine-3'-phosphate
  modified_base 10: mod_base = OTHER; note = 2'-O-methylcytidine-3'-phosphate
  modified_base 11: mod_base = OTHER; note = 2'-O-methyladenosine-3'-phosphate
  modified_base 12: mod_base = OTHER; note = 2'-O-methyladenosine-3'-phosphate
  modified_base 13: mod_base = OTHER; note = 2'-O-methyladenosine-3'-phosphate
  modified_base 14: mod_base = OTHER; note = 2'-fluoroguanosine-3'-phosphate
  modified_base 15: mod_base = OTHER; note = 2'-O-methyladenosine-3'-phosphate
  modified_base 16: mod_base = OTHER; note = 2'-fluoroadenosine-3'-phosphate
  modified_base 17: mod_base = OTHER; note = 2'-O-methylguanosine-3'-phosphate
  modified_base 18: mod_base = OTHER; note = 2'-O-methyluridine-3'-phosphate
  modified_base 19: mod_base = OTHER; note = 2'-O-methyladenosine-3'-phosphate
  modified_base 20: mod_base = OTHER; note = 2'-O-methyluridine-3'-phosphate
  modified_base 21: mod_base = OTHER; note = 2'-O-methylcytidine-3'-phosphorothioate
  modified_base 22: mod_base = OTHER; note = 2'-O-methyladenosine-3'-phosphorothioate
  modified_base 23: mod_base = OTHER; note = 2'-O-methylcytidine-3'-phosphate
atctacattcaaagaagtatcac

SEQ ID NO: 1982 - RNA, 21 nt, synthetic construct
  source 1..21: mol_type = other RNA; note = Description of Artificial Sequence: Synthetic oligonucleotide
  modified_base 1: mod_base = OTHER; note = 2'-O-methyluridine-3'-phosphorothioate
  modified_base 2: mod_base = OTHER; note = 2'-O-methyluridine-3'-phosphorothioate
  modified_base 3: mod_base = OTHER; note = 2'-O-methylguanosine-3'-phosphate
  modified_base 4: mod_base = OTHER; note = 2'-O-methylguanosine-3'-phosphate
  modified_base 5: mod_base = OTHER; note = 2'-O-methyluridine-3'-phosphate
  modified_base 6: mod_base = OTHER; note = 2'-O-methylguanosine-3'-phosphate
  modified_base 7: mod_base = OTHER; note = 2'-fluoroadenosine-3'-phosphate
  modified_base 8: mod_base = OTHER; note = 2'-O-methyluridine-3'-phosphate
  modified_base 9: mod_base = OTHER; note = 2'-fluoroadenosine-3'-phosphate
  modified_base 10: mod_base = OTHER; note = 2'-fluorocytidine-3'-phosphate
  modified_base 11: mod_base = OTHER; note = 2'-fluorouridine-3'-phosphate
  modified_base 12: mod_base = OTHER; note = 2'-O-methyluridine-3'-phosphate
  modified_base 13: mod_base = OTHER; note = 2'-O-methylcytidine-3'-phosphate
  modified_base 14: mod_base = OTHER; note = 2'-O-methyluridine-3'-phosphate
  modified_base 15: mod_base = OTHER; note = 2'-O-methyluridine-3'-phosphate
  modified_base 16: mod_base = OTHER; note = 2'-O-methyluridine-3'-phosphate
  modified_base 17: mod_base = OTHER; note = 2'-O-methylguanosine-3'-phosphate
  modified_base 18: mod_base = OTHER; note = 2'-O-methyladenosine-3'-phosphate
  modified_base 19: mod_base = OTHER; note = 2'-O-methyladenosine-3'-phosphate
  modified_base 20: mod_base = OTHER; note = 2'-O-methyluridine-3'-phosphate
  modified_base 21: mod_base = OTHER; note = 2'-O-methylguanosine-3'-phosphate N-[tris(GalNAc-alkyl)-amidodecanoyl)]-4-hydroxyprolinol Hyp-(GalNAc-alkyl)3
ttggtgatacttctttgaatg

SEQ ID NO: 1983 - RNA, 23 nt, synthetic construct
  source 1..23: mol_type = other RNA; note = Description of Artificial Sequence: Synthetic oligonucleotide
  modified_base 1: mod_base = OTHER; note = 2'-O-methylcytidine-3'-phosphorothioate
  modified_base 2: mod_base = OTHER; note = 2'-fluoroadenosine-3'-phosphorothioate
  modified_base 3: mod_base = OTHER; note = 2'-O-methyluridine-3'-phosphate
  modified_base 4: mod_base = OTHER; note = 2'-O-methyluridine-3'-phosphate
  modified_base 5: mod_base = OTHER; note = 2'-O-methylcytidine-3'-phosphate
  modified_base 6: mod_base = OTHER; note = 2'-fluoroadenosine-3'-phosphate
  modified_base 7: mod_base = OTHER; note = 2'-O-methyladenosine-3'-phosphate
  modified_base 8: mod_base = OTHER; note = 2'-fluoroadenosine-3'-phosphate
  modified_base 9: mod_base = OTHER; note = 2'-fluoroguanosine-3'-phosphate
  modified_base 10: mod_base = OTHER; note = 2'-O-methyladenosine-3'-phosphate
  modified_base 11: mod_base = OTHER; note = 2'-O-methyladenosine-3'-phosphate
  modified_base 12: mod_base = OTHER; note = 2'-O-methylguanosine-3'-phosphate
  modified_base 13: mod_base = OTHER; note = 2'-O-methyluridine-3'-phosphate
  modified_base 14: mod_base = OTHER; note = 2'-fluoroadenosine-3'-phosphate
  modified_base 15: mod_base = OTHER; note = 2'-O-methyluridine-3'-phosphate
  modified_base 16: mod_base = OTHER; note = 2'-fluorocytidine-3'-phosphate
  modified_base 17: mod_base = OTHER; note = 2'-O-methyladenosine-3'-phosphate
  modified_base 18: mod_base = OTHER; note = 2'-O-methylcytidine-3'-phosphate
  modified_base 19: mod_base = OTHER; note = 2'-O-methylcytidine-3'-phosphate
  modified_base 20: mod_base = OTHER; note = 2'-O-methyladenosine-3'-phosphate
  modified_base 21: mod_base = OTHER; note = 2'-O-methyladenosine-3'-phosphorothioate
  modified_base 22: mod_base = OTHER; note = 2'-O-methyluridine-3'-phosphorothioate
  modified_base 23: mod_base = OTHER; note = 2'-O-methyluridine-3'-phosphate
cattcaaagaagtatcaccaatt

SEQ ID NO: 1984 - RNA, 21 nt, synthetic construct
  source 1..21: mol_type = other RNA; note = Description of Artificial Sequence: Synthetic oligonucleotide
  modified_base 1: mod_base = OTHER; note = 2'-O-methyladenosine-3'-phosphorothioate
  modified_base 2: mod_base = OTHER; note = 2'-O-methyluridine-3'-phosphorothioate
  modified_base 3: mod_base = OTHER; note = 2'-O-methyluridine-3'-phosphate
  modified_base 4: mod_base = OTHER; note = 2'-O-methylguanosine-3'-phosphate
  modified_base 5: mod_base = OTHER; note = 2'-O-methylguanosine-3'-phosphate
  modified_base 6: mod_base = OTHER; note = 2'-O-methyluridine-3'-phosphate
  modified_base 7: mod_base = OTHER; note = 2'-fluoroguanosine-3'-phosphate
  modified_base 8: mod_base = OTHER; note = 2'-O-methyladenosine-3'-phosphate
  modified_base 9: mod_base = OTHER; note = 2'-fluorouridine-3'-phosphate
  modified_base 10: mod_base = OTHER; note = 2'-fluoroadenosine-3'-phosphate
  modified_base 11: mod_base = OTHER; note = 2'-fluorocytidine-3'-phosphate
  modified_base 12: mod_base = OTHER; note = 2'-O-methyluridine-3'-phosphate
  modified_base 13: mod_base = OTHER; note = 2'-O-methyluridine-3'-phosphate
  modified_base 14: mod_base = OTHER; note = 2'-O-methylcytidine-3'-phosphate
  modified_base 15: mod_base = OTHER; note = 2'-O-methyluridine-3'-phosphate
  modified_base 16: mod_base = OTHER; note = 2'-O-methyluridine-3'-phosphate
  modified_base 17: mod_base = OTHER; note = 2'-O-methyluridine-3'-phosphate
  modified_base 18: mod_base = OTHER; note = 2'-O-methylguanosine-3'-phosphate
  modified_base 19: mod_base = OTHER; note = 2'-O-methyladenosine-3'-phosphate
  modified_base 20: mod_base = OTHER; note = 2'-O-methyladenosine-3'-phosphate
  modified_base 21: mod_base = OTHER; note = 2'-O-methyluridine-3'-phosphate N-[tris(GalNAc-alkyl)-amidodecanoyl)]-4-hydroxyprolinol Hyp-(GalNAc-alkyl)3
attggtgatacttctttgaat

SEQ ID NO: 1985 - RNA, 23 nt, synthetic construct
  source 1..23: mol_type = other RNA; note = Description of Artificial Sequence: Synthetic oligonucleotide
  modified_base 1: mod_base = OTHER; note = 2'-O-methyladenosine-3'-phosphorothioate
  modified_base 2: mod_base = OTHER; note = 2'-fluorouridine -3'-phosphorothioate
  modified_base 3: mod_base = OTHER; note = 2'-O-methyluridine-3'-phosphate
  modified_base 4: mod_base = OTHER; note = 2'-O-methylcytidine-3'-phosphate
  modified_base 5: mod_base = OTHER; note = 2'-O-methyladenosine-3'-phosphate
  modified_base 6: mod_base = OTHER; note = 2'-fluoroadenosine-3'-phosphate
  modified_base 7: mod_base = OTHER; note = 2'-O-methyladenosine-3'-phosphate
  modified_base 8: mod_base = OTHER; note = 2'-fluoroguanosine-3'-phosphate
  modified_base 9: mod_base = OTHER; note = 2'-fluoroadenosine-3'-phosphate
  modified_base 10: mod_base = OTHER; note = 2'-O-methyladenosine-3'-phosphate
  modified_base 11: mod_base = OTHER; note = 2'-O-methylguanosine-3'-phosphate
  modified_base 12: mod_base = OTHER; note = 2'-O-methyluridine-3'-phosphate
  modified_base 13: mod_base = OTHER; note = 2'-O-methyladenosine-3'-phosphate
  modified_base 14: mod_base = OTHER; note = 2'-fluorouridine-3'-phosphate
  modified_base 15: mod_base = OTHER; note = 2'-O-methylcytidine-3'-phosphate
  modified_base 16: mod_base = OTHER; note = 2'-fluoroadenosine-3'-phosphate
  modified_base 17: mod_base = OTHER; note = 2'-O-methylcytidine-3'-phosphate
  modified_base 18: mod_base = OTHER; note = 2'-O-methylcytidine-3'-phosphate
  modified_base 19: mod_base = OTHER; note = 2'-O-methyladenosine-3'-phosphate
  modified_base 20: mod_base = OTHER; note = 2'-O-methyladenosine-3'-phosphate
  modified_base 21: mod_base = OTHER; note = 2'-O-methyluridine-3'-phosphorothioate
  modified_base 22: mod_base = OTHER; note = 2'-O-methyluridine-3'-phosphorothioate
  modified_base 23: mod_base = OTHER; note = 2'-O-methyladenosine-3'-phosphate
attcaaagaagtatcaccaatta

SEQ ID NO: 1986 - RNA, 21 nt, synthetic construct
  source 1..21: mol_type = other RNA; note = Description of Artificial Sequence: Synthetic oligonucleotide
  modified_base 1: mod_base = OTHER; note = 2'-O-methyladenosine-3'-phosphorothioate
  modified_base 2: mod_base = OTHER; note = 2'-O-methyladenosine-3'-phosphorothioate
  modified_base 3: mod_base = OTHER; note = 2'-O-methyluridine-3'-phosphate
  modified_base 4: mod_base = OTHER; note = 2'-O-methyladenosine-3'-phosphate
  modified_base 5: mod_base = OTHER; note = 2'-O-methyladenosine-3'-phosphate
  modified_base 6: mod_base = OTHER; note = 2'-O-methylcytidine-3'-phosphate
  modified_base 7: mod_base = OTHER; note = 2'-fluorocytidine-3'-phosphate
  modified_base 8: mod_base = OTHER; note = 2'-O-methyluridine-3'-phosphate
  modified_base 9: mod_base = OTHER; note = 2'-fluoroguanosine-3'-phosphate
  modified_base 10: mod_base = OTHER; note = 2'-fluorouridine-3'-phosphate
  modified_base 11: mod_base = OTHER; note = 2'-fluoroguanosine-3'-phosphate
  modified_base 12: mod_base = OTHER; note = 2'-O-methyladenosine-3'-phosphate
  modified_base 13: mod_base = OTHER; note = 2'-O-methyladenosine-3'-phosphate
  modified_base 14: mod_base = OTHER; note = 2'-O-methyladenosine-3'-phosphate
  modified_base 15: mod_base = OTHER; note = 2'-O-methyladenosine-3'-phosphate
  modified_base 16: mod_base = OTHER; note = 2'-O-methyluridine-3'-phosphate
  modified_base 17: mod_base = OTHER; note = 2'-O-methylguanosine-3'-phosphate
  modified_base 18: mod_base = OTHER; note = 2'-O-methylcytidine-3'-phosphate
  modified_base 19: mod_base = OTHER; note = 2'-O-methyluridine-3'-phosphate
  modified_base 20: mod_base = OTHER; note = 2'-O-methylcytidine-3'-phosphate
  modified_base 21: mod_base = OTHER; note = 2'-O-methylcytidine-3'-phosphate N-[tris(GalNAc-alkyl)-amidodecanoyl)]-4-hydroxyprolinol Hyp-(GalNAc-alkyl)3
aataacctgtgaaaatgctcc

SEQ ID NO: 1987 - RNA, 23 nt, synthetic construct
  source 1..23: mol_type = other RNA; note = Description of Artificial Sequence: Synthetic oligonucleotide
  modified_base 1: mod_base = OTHER; note = 2'-O-methylguanosine-3'-phosphorothioate
  modified_base 2: mod_base = OTHER; note = 2'-fluoroguanosine-3'-phosphorothioate
  modified_base 3: mod_base = OTHER; note = 2'-O-methyladenosine-3'-phosphate
  modified_base 4: mod_base = OTHER; note = 2'-O-methylguanosine-3'-phosphate
  modified_base 5: mod_base = OTHER; note = 2'-O-methylcytidine-3'-phosphate
  modified_base 6: mod_base = OTHER; note = 2'-fluoroadenosine-3'-phosphate
  modified_base 7: mod_base = OTHER; note = 2'-O-methyluridine-3'-phosphate
  modified_base 8: mod_base = OTHER; note = 2'-fluorouridine-3'-phosphate
  modified_base 9: mod_base = OTHER; note = 2'-fluorouridine-3'-phosphate
  modified_base 10: mod_base = OTHER; note = 2'-O-methyluridine-3'-phosphate
  modified_base 11: mod_base = OTHER; note = 2'-O-methylcytidine-3'-phosphate
  modified_base 12: mod_base = OTHER; note = 2'-O-methyladenosine-3'-phosphate
  modified_base 13: mod_base = OTHER; note = 2'-O-methylcytidine-3'-phosphate
  modified_base 14: mod_base = OTHER; note = 2'-fluoroadenosine-3'-phosphate
  modified_base 15: mod_base = OTHER; note = 2'-O-methylguanosine-3'-phosphate
  modified_base 16: mod_base = OTHER; note = 2'-fluoroguanosine-3'-phosphate
  modified_base 17: mod_base = OTHER; note = 2'-O-methyluridine-3'-phosphate
  modified_base 18: mod_base = OTHER; note = 2'-O-methyluridine-3'-phosphate
  modified_base 19: mod_base = OTHER; note = 2'-O-methyladenosine-3'-phosphate
  modified_base 20: mod_base = OTHER; note = 2'-O-methyluridine-3'-phosphate
  modified_base 21: mod_base = OTHER; note = 2'-O-methyluridine-3'-phosphorothioate
  modified_base 22: mod_base = OTHER; note = 2'-O-methylguanosine-3'-phosphorothioate
  modified_base 23: mod_base = OTHER; note = 2'-O-methylcytidine-3'-phosphate
ggagcattttcacaggttattgc

SEQ ID NO: 1988 - RNA, 21 nt, synthetic construct
  source 1..21: mol_type = other RNA; note = Description of Artificial Sequence: Synthetic oligonucleotide
  modified_base 1: mod_base = OTHER; note = 2'-O-methyladenosine-3'-phosphorothioate
  modified_base 2: mod_base = OTHER; note = 2'-O-methyluridine-3'-phosphorothioate
  modified_base 3: mod_base = OTHER; note = 2'-O-methyladenosine-3'-phosphate
  modified_base 4: mod_base = OTHER; note = 2'-O-methyladenosine-3'-phosphate
  modified_base 5: mod_base = OTHER; note = 2'-O-methylcytidine-3'-phosphate
  modified_base 6: mod_base = OTHER; note = 2'-O-methylcytidine-3'-phosphate
  modified_base 7: mod_base = OTHER; note = 2'-fluorouridine-3'-phosphate
  modified_base 8: mod_base = OTHER; note = 2'-O-methylguanosine-3'-phosphate
  modified_base 9: mod_base = OTHER; note = 2'-fluorouridine-3'-phosphate
  modified_base 10: mod_base = OTHER; note = 2'-fluoroguanosine-3'-phosphate
  modified_base 11: mod_base = OTHER; note = 2'-fluoroadenosine-3'-phosphate
  modified_base 12: mod_base = OTHER; note = 2'-O-methyladenosine-3'-phosphate
  modified_base 13: mod_base = OTHER; note = 2'-O-methyladenosine-3'-phosphate
  modified_base 14: mod_base = OTHER; note = 2'-O-methyladenosine-3'-phosphate
  modified_base 15: mod_base = OTHER; note = 2'-O-methyluridine-3'-phosphate
  modified_base 16: mod_base = OTHER; note = 2'-O-methylguanosine-3'-phosphate
  modified_base 17: mod_base = OTHER; note = 2'-O-methylcytidine-3'-phosphate
  modified_base 18: mod_base = OTHER; note = 2'-O-methyluridine-3'-phosphate
  modified_base 19: mod_base = OTHER; note = 2'-O-methylcytidine-3'-phosphate
  modified_base 20: mod_base = OTHER; note = 2'-O-methylcytidine-3'-phosphate
  modified_base 21: mod_base = OTHER; note = 2'-O-methylcytidine-3'-phosphate N-[tris(GalNAc-alkyl)-amidodecanoyl)]-4-hydroxyprolinol Hyp-(GalNAc-alkyl)3
ataacctgtgaaaatgctccc

SEQ ID NO: 1989 - RNA, 23 nt, synthetic construct
  source 1..23: mol_type = other RNA; note = Description of Artificial Sequence: Synthetic oligonucleotide
  modified_base 1: mod_base = OTHER; note = 2'-O-methylguanosine-3'-phosphorothioate
  modified_base 2: mod_base = OTHER; note = 2'-fluoroguanosine-3'-phosphorothioate
  modified_base 3: mod_base = OTHER; note = 2'-O-methylguanosine-3'-phosphate
  modified_base 4: mod_base = OTHER; note = 2'-O-methyladenosine-3'-phosphate
  modified_base 5: mod_base = OTHER; note = 2'-O-methylguanosine-3'-phosphate
  modified_base 6: mod_base = OTHER; note = 2'-fluorocytidine-3'-phosphate
  modified_base 7: mod_base = OTHER; note = 2'-O-methyladenosine-3'-phosphate
  modified_base 8: mod_base = OTHER; note = 2'-fluorouridine-3'-phosphate
  modified_base 9: mod_base = OTHER; note = 2'-fluorouridine-3'-phosphate
  modified_base 10: mod_base = OTHER; note = 2'-O-methyluridine-3'-phosphate
  modified_base 11: mod_base = OTHER; note = 2'-O-methyluridine-3'-phosphate
  modified_base 12: mod_base = OTHER; note = 2'-O-methylcytidine-3'-phosphate
  modified_base 13: mod_base = OTHER; note = 2'-O-methyladenosine-3'-phosphate
  modified_base 14: mod_base = OTHER; note = 2'-fluorocytidine-3'-phosphate
  modified_base 15: mod_base = OTHER; note = 2'-O-methyladenosine-3'-phosphate
  modified_base 16: mod_base = OTHER; note = 2'-fluoroguanosine-3'-phosphate
  modified_base 17: mod_base = OTHER; note = 2'-O-methylguanosine-3'-phosphate
  modified_base 18: mod_base = OTHER; note = 2'-O-methyluridine-3'-phosphate
  modified_base 19: mod_base = OTHER; note = 2'-O-methyluridine-3'-phosphate
  modified_base 20: mod_base = OTHER; note = 2'-O-methyladenosine-3'-phosphate
  modified_base 21: mod_base = OTHER; note = 2'-O-methyluridine-3'-phosphorothioate
  modified_base 22: mod_base = OTHER; note = 2'-O-methyluridine-3'-phosphorothioate
  modified_base 23: mod_base = OTHER; note = 2'-O-methylguanosine-3'-phosphate
gggagcattttcacaggttattg

SEQ ID NO: 1990 - RNA, 21 nt, synthetic construct
  source 1..21: mol_type = other RNA; note = Description of Artificial Sequence: Synthetic oligonucleotide
  modified_base 1: mod_base = OTHER; note = 2'-O-methyluridine-3'-phosphorothioate
  modified_base 2: mod_base = OTHER; note = 2'-O-methyladenosine-3'-phosphorothioate
  modified_base 3: mod_base = OTHER; note = 2'-O-methylguanosine-3'-phosphate
  modified_base 4: mod_base = OTHER; note = 2'-O-methylcytidine-3'-phosphate
  modified_base 5: mod_base = OTHER; note = 2'-O-methyladenosine-3'-phosphate
  modified_base 6: mod_base = OTHER; note = 2'-O-methyladenosine-3'-phosphate
  modified_base 7: mod_base = OTHER; note = 2'-fluorouridine-3'-phosphate
  modified_base 8: mod_base = OTHER; note = 2'-O-methyladenosine-3'-phosphate
  modified_base 9: mod_base = OTHER; note = 2'-fluoroadenosine-3'-phosphate
  modified_base 10: mod_base = OTHER; note = 2'-fluorocytidine-3'-phosphate
  modified_base 11: mod_base = OTHER; note = 2'-fluorocytidine-3'-phosphate
  modified_base 12: mod_base = OTHER; note = 2'-O-methyluridine-3'-phosphate
  modified_base 13: mod_base = OTHER; note = 2'-O-methylguanosine-3'-phosphate
  modified_base 14: mod_base = OTHER; note = 2'-O-methyluridine-3'-phosphate
  modified_base 15: mod_base = OTHER; note = 2'-O-methylguanosine-3'-phosphate
  modified_base 16: mod_base = OTHER; note = 2'-O-methyladenosine-3'-phosphate
  modified_base 17: mod_base = OTHER; note = 2'-O-methyladenosine-3'-phosphate
  modified_base 18: mod_base = OTHER; note = 2'-O-methyladenosine-3'-phosphate
  modified_base 19: mod_base = OTHER; note = 2'-O-methyladenosine-3'-phosphate
  modified_base 20: mod_base = OTHER; note = 2'-O-methyluridine-3'-phosphate
  modified_base 21: mod_base = OTHER; note = 2'-O-methylguanosine-3'-phosphate N-[tris(GalNAc-alkyl)-amidodecanoyl)]-4-hydroxyprolinol Hyp-(GalNAc-alkyl)3
tagcaataacctgtgaaaatg

SEQ ID NO: 1991 - RNA, 23 nt, synthetic construct
  source 1..23: mol_type = other RNA; note = Description of Artificial Sequence: Synthetic oligonucleotide
  modified_base 1: mod_base = OTHER; note = 2'-O-methylcytidine-3'-phosphorothioate
  modified_base 2: mod_base = OTHER; note = 2'-fluoroadenosine-3'-phosphorothioate
  modified_base 3: mod_base = OTHER; note = 2'-O-methyluridine-3'-phosphate
  modified_base 4: mod_base = OTHER; note = 2'-O-methyluridine-3'-phosphate
  modified_base 5: mod_base = OTHER; note = 2'-O-methyluridine-3'-phosphate
  modified_base 6: mod_base = OTHER; note = 2'-fluorouridine-3'-phosphate
  modified_base 7: mod_base = OTHER; note = 2'-O-methylcytidine-3'-phosphate
  modified_base 8: mod_base = OTHER; note = 2'-fluoroadenosine-3'-phosphate
  modified_base 9: mod_base = OTHER; note = 2'-fluorocytidine-3'-phosphate
  modified_base 10: mod_base = OTHER; note = 2'-O-methyladenosine-3'-phosphate
  modified_base 11: mod_base = OTHER; note = 2'-O-methylguanosine-3'-phosphate
  modified_base 12: mod_base = OTHER; note = 2'-O-methylguanosine-3'-phosphate
  modified_base 13: mod_base = OTHER; note = 2'-O-methyluridine-3'-phosphate
  modified_base 14: mod_base = OTHER; note = 2'-fluorouridine-3'-phosphate
  modified_base 15: mod_base = OTHER; note = 2'-O-methyladenosine-3'-phosphate
  modified_base 16: mod_base = OTHER; note = 2'-fluorouridine-3'-phosphate
  modified_base 17: mod_base = OTHER; note = 2'-O-methyluridine-3'-phosphate
  modified_base 18: mod_base = OTHER; note = 2'-O-methylguanosine-3'-phosphate
  modified_base 19: mod_base = OTHER; note = 2'-O-methylcytidine-3'-phosphate
  modified_base 20: mod_base = OTHER; note = 2'-O-methyluridine-3'-phosphate
  modified_base 21: mod_base = OTHER; note = 2'-O-methyladenosine-3'-phosphorothioate
  modified_base 22: mod_base = OTHER; note = 2'-O-methyluridine-3'-phosphorothioate
  modified_base 23: mod_base = OTHER; note = 2'-O-methylcytidine-3'-phosphate
cattttcacaggttattgctatc

SEQ ID NO: 1992 - RNA, 21 nt, synthetic construct
  source 1..21: mol_type = other RNA; note = Description of Artificial Sequence: Synthetic oligonucleotide
  modified_base 1: mod_base = OTHER; note = 2'-O-methyladenosine-3'-phosphorothioate
  modified_base 2: mod_base = OTHER; note = 2'-O-methyluridine-3'-phosphorothioate
  modified_base 3: mod_base = OTHER; note = 2'-O-methyladenosine-3'-phosphate
  modified_base 4: mod_base = OTHER; note = 2'-O-methylguanosine-3'-phosphate
  modified_base 5: mod_base = OTHER; note = 2'-O-methylcytidine-3'-phosphate
  modified_base 6: mod_base = OTHER; note = 2'-O-methyladenosine-3'-phosphate
  modified_base 7: mod_base = OTHER; note = 2'-fluoroadenosine-3'-phosphate
  modified_base 8: mod_base = OTHER; note = 2'-O-methyluridine-3'-phosphate
  modified_base 9: mod_base = OTHER; note = 2'-fluoroadenosine-3'-phosphate
  modified_base 10: mod_base = OTHER; note = 2'-fluoroadenosine-3'-phosphate
  modified_base 11: mod_base = OTHER; note = 2'-fluorocytidine-3'-phosphate
  modified_base 12: mod_base = OTHER; note = 2'-O-methylcytidine-3'-phosphate
  modified_base 13: mod_base = OTHER; note = 2'-O-methyluridine-3'-phosphate
  modified_base 14: mod_base = OTHER; note = 2'-O-methylguanosine-3'-phosphate
  modified_base 15: mod_base = OTHER; note = 2'-O-methyluridine-3'-phosphate
  modified_base 16: mod_base = OTHER; note = 2'-O-methylguanosine-3'-phosphate
  modified_base 17: mod_base = OTHER; note = 2'-O-methyladenosine-3'-phosphate
  modified_base 18: mod_base = OTHER; note = 2'-O-methyladenosine-3'-phosphate
  modified_base 19: mod_base = OTHER; note = 2'-O-methyladenosine-3'-phosphate
  modified_base 20: mod_base = OTHER; note = 2'-O-methyladenosine-3'-phosphate
  modified_base 21: mod_base = OTHER; note = 2'-O-methyluridine-3'-phosphate N-[tris(GalNAc-alkyl)-amidodecanoyl)]-4-hydroxyprolinol Hyp-(GalNAc-alkyl)3
atagcaataacctgtgaaaat

SEQ ID NO: 1993 - RNA, 23 nt, synthetic construct
  source 1..23: mol_type = other RNA; note = Description of Artificial Sequence: Synthetic oligonucleotide
  modified_base 1: mod_base = OTHER; note = 2'-O-methyladenosine-3'-phosphorothioate
  modified_base 2: mod_base = OTHER; note = 2'-fluorouridine -3'-phosphorothioate
  modified_base 3: mod_base = OTHER; note = 2'-O-methyluridine-3'-phosphate
  modified_base 4: mod_base = OTHER; note = 2'-O-methyluridine-3'-phosphate
  modified_base 5: mod_base = OTHER; note = 2'-O-methyluridine-3'-phosphate
  modified_base 6: mod_base = OTHER; note = 2'-fluorocytidine-3'-phosphate
  modified_base 7: mod_base = OTHER; note = 2'-O-methyladenosine-3'-phosphate
  modified_base 8: mod_base = OTHER; note = 2'-fluorocytidine-3'-phosphate
  modified_base 9: mod_base = OTHER; note = 2'-fluoroadenosine-3'-phosphate
  modified_base 10: mod_base = OTHER; note = 2'-O-methylguanosine-3'-phosphate
  modified_base 11: mod_base = OTHER; note = 2'-O-methylguanosine-3'-phosphate
  modified_base 12: mod_base = OTHER; note = 2'-O-methyluridine-3'-phosphate
  modified_base 13: mod_base = OTHER; note = 2'-O-methyluridine-3'-phosphate
  modified_base 14: mod_base = OTHER; note = 2'-fluoroadenosine-3'-phosphate
  modified_base 15: mod_base = OTHER; note = 2'-O-methyluridine-3'-phosphate
  modified_base 16: mod_base = OTHER; note = 2'-fluorouridine-3'-phosphate
  modified_base 17: mod_base = OTHER; note = 2'-O-methylguanosine-3'-phosphate
  modified_base 18: mod_base = OTHER; note = 2'-O-methylcytidine-3'-phosphate
  modified_base 19: mod_base = OTHER; note = 2'-O-methyluridine-3'-phosphate
  modified_base 20: mod_base = OTHER; note = 2'-O-methyladenosine-3'-phosphate
  modified_base 21: mod_base = OTHER; note = 2'-O-methyluridine-3'-phosphorothioate
  modified_base 22: mod_base = OTHER; note = 2'-O-methylcytidine-3'-phosphorothioate
  modified_base 23: mod_base = OTHER; note = 2'-O-methylcytidine-3'-phosphate
attttcacaggttattgctatcc

SEQ ID NO: 1994 - RNA, 21 nt, synthetic construct
  source 1..21: mol_type = other RNA; note = Description of Artificial Sequence: Synthetic oligonucleotide
  modified_base 1: mod_base = OTHER; note = 2'-O-methyladenosine-3'-phosphorothioate
  modified_base 2: mod_base = OTHER; note = 2'-O-methyladenosine-3'-phosphorothioate
  modified_base 3: mod_base = OTHER; note = 2'-O-methyluridine-3'-phosphate
  modified_base 4: mod_base = OTHER; note = 2'-O-methylcytidine-3'-phosphate
  modified_base 5: mod_base = OTHER; note = 2'-O-methyladenosine-3'-phosphate
  modified_base 6: mod_base = OTHER; note = 2'-O-methylcytidine-3'-phosphate
  modified_base 7: mod_base = OTHER; note = 2'-fluoroadenosine-3'-phosphate
  modified_base 8: mod_base = OTHER; note = 2'-O-methyluridine-3'-phosphate
  modified_base 9: mod_base = OTHER; note = 2'-fluorocytidine-3'-phosphate
  modified_base 10: mod_base = OTHER; note = 2'-fluorouridine-3'-phosphate
  modified_base 11: mod_base = OTHER; note = 2'-fluorouridine-3'-phosphate
  modified_base 12: mod_base = OTHER; note = 2'-O-methyluridine-3'-phosphate
  modified_base 13: mod_base = OTHER; note = 2'-O-methyladenosine-3'-phosphate
  modified_base 14: mod_base = OTHER; note = 2'-O-methylguanosine-3'-phosphate
  modified_base 15: mod_base = OTHER; note = 2'-O-methyluridine-3'-phosphate
  modified_base 16: mod_base = OTHER; note = 2'-O-methylguanosine-3'-phosphate
  modified_base 17: mod_base = OTHER; note = 2'-O-methyluridine-3'-phosphate
  modified_base 18: mod_base = OTHER; note = 2'-O-methylcytidine-3'-phosphate
  modified_base 19: mod_base = OTHER; note = 2'-O-methyluridine-3'-phosphate
  modified_base 20: mod_base = OTHER; note = 2'-O-methylguanosine-3'-phosphate
  modified_base 21: mod_base = OTHER; note = 2'-O-methyladenosine-3'-phosphate N-[tris(GalNAc-alkyl)-amidodecanoyl)]-4-hydroxyprolinol Hyp-(GalNAc-alkyl)3
aatcacatctttagtgtctga

SEQ ID NO: 1995 - RNA, 23 nt, synthetic construct
  source 1..23: mol_type = other RNA; note = Description of Artificial Sequence: Synthetic oligonucleotide
  modified_base 1: mod_base = OTHER; note = 2'-O-methyluridine-3'-phosphorothioate
  modified_base 2: mod_base = OTHER; note = 2'-fluorocytidine-3'-phosphorothioate
  modified_base 3: mod_base = OTHER; note = 2'-O-methyladenosine-3'-phosphate
  modified_base 4: mod_base = OTHER; note = 2'-O-methylguanosine-3'-phosphate
  modified_base 5: mod_base = OTHER; note = 2'-O-methyladenosine-3'-phosphate
  modified_base 6: mod_base = OTHER; note = 2'-fluorocytidine-3'-phosphate
  modified_base 7: mod_base = OTHER; note = 2'-O-methyladenosine-3'-phosphate
  modified_base 8: mod_base = OTHER; note = 2'-fluorocytidine-3'-phosphate
  modified_base 9: mod_base = OTHER; note = 2'-fluorouridine-3'-phosphate
  modified_base 10: mod_base = OTHER; note = 2'-O-methyladenosine-3'-phosphate
  modified_base 11: mod_base = OTHER; note = 2'-O-methyladenosine-3'-phosphate
  modified_base 12: mod_base = OTHER; note = 2'-O-methyladenosine-3'-phosphate
  modified_base 13: mod_base = OTHER; note = 2'-O-methylguanosine-3'-phosphate
  modified_base 14: mod_base = OTHER; note = 2'-fluoroadenosine-3'-phosphate
  modified_base 15: mod_base = OTHER; note = 2'-O-methyluridine-3'-phosphate
  modified_base 16: mod_base = OTHER; note = 2'-fluoroguanosine-3'-phosphate
  modified_base 17: mod_base = OTHER; note = 2'-O-methyluridine-3'-phosphate
  modified_base 18: mod_base = OTHER; note = 2'-O-methylguanosine-3'-phosphate
  modified_base 19: mod_base = OTHER; note = 2'-O-methyladenosine-3'-phosphate
  modified_base 20: mod_base = OTHER; note = 2'-O-methyluridine-3'-phosphate
  modified_base 21: mod_base = OTHER; note = 2'-O-methyluridine-3'-phosphorothioate
  modified_base 22: mod_base = OTHER; note = 2'-O-methylguanosine-3'-phosphorothioate
  modified_base 23: mod_base = OTHER; note = 2'-O-methylguanosine-3'-phosphate
tcagacactaaagatgtgattgg

SEQ ID NO: 1996 - RNA, 21 nt, synthetic construct
  source 1..21: mol_type = other RNA; note = Description of Artificial Sequence: Synthetic oligonucleotide
  modified_base 1: mod_base = OTHER; note = 2'-O-methyladenosine-3'-phosphorothioate
  modified_base 2: mod_base = OTHER; note = 2'-O-methyluridine-3'-phosphorothioate
  modified_base 3: mod_base = OTHER; note = 2'-O-methylcytidine-3'-phosphate
  modified_base 4: mod_base = OTHER; note = 2'-O-methyladenosine-3'-phosphate
  modified_base 5: mod_base = OTHER; note = 2'-O-methylcytidine-3'-phosphate
  modified_base 6: mod_base = OTHER; note = 2'-O-methyladenosine-3'-phosphate
  modified_base 7: mod_base = OTHER; note = 2'-fluorouridine-3'-phosphate
  modified_base 8: mod_base = OTHER; note = 2'-O-methylcytidine-3'-phosphate
  modified_base 9: mod_base = OTHER; note = 2'-fluorouridine-3'-phosphate
  modified_base 10: mod_base = OTHER; note = 2'-fluorouridine-3'-phosphate
  modified_base 11: mod_base = OTHER; note = 2'-fluorouridine-3'-phosphate
  modified_base 12: mod_base = OTHER; note = 2'-O-methyladenosine-3'-phosphate
  modified_base 13: mod_base = OTHER; note = 2'-O-methylguanosine-3'-phosphate
  modified_base 14: mod_base = OTHER; note = 2'-O-methyluridine-3'-phosphate
  modified_base 15: mod_base = OTHER; note = 2'-O-methylguanosine-3'-phosphate
  modified_base 16: mod_base = OTHER; note = 2'-O-methyluridine-3'-phosphate
  modified_base 17: mod_base = OTHER; note = 2'-O-methylcytidine-3'-phosphate
  modified_base 18: mod_base = OTHER; note = 2'-O-methyluridine-3'-phosphate
  modified_base 19: mod_base = OTHER; note = 2'-O-methylguanosine-3'-phosphate
  modified_base 20: mod_base = OTHER; note = 2'-O-methyladenosine-3'-phosphate
  modified_base 21: mod_base = OTHER; note = 2'-O-methyladenosine-3'-phosphate N-[tris(GalNAc-alkyl)-amidodecanoyl)]-4-hydroxyprolinol Hyp-(GalNAc-alkyl)3
atcacatctttagtgtctgaa

SEQ ID NO: 1997 - RNA, 23 nt, synthetic construct
  source 1..23: mol_type = other RNA; note = Description of Artificial Sequence: Synthetic oligonucleotide
  modified_base 1: mod_base = OTHER; note = 2'-O-methyluridine-3'-phosphorothioate
  modified_base 2: mod_base = OTHER; note = 2'-fluorouridine -3'-phosphorothioate
  modified_base 3: mod_base = OTHER; note = 2'-O-methylcytidine-3'-phosphate
  modified_base 4: mod_base = OTHER; note = 2'-O-methyladenosine-3'-phosphate
  modified_base 5: mod_base = OTHER; note = 2'-O-methylguanosine-3'-phosphate
  modified_base 6: mod_base = OTHER; note = 2'-fluoroadenosine-3'-phosphate
  modified_base 7: mod_base = OTHER; note = 2'-O-methylcytidine-3'-phosphate
  modified_base 8: mod_base = OTHER; note = 2'-fluoroadenosine-3'-phosphate
  modified_base 9: mod_base = OTHER; note = 2'-fluorocytidine-3'-phosphate
  modified_base 10: mod_base = OTHER; note = 2'-O-methyluridine-3'-phosphate
  modified_base 11: mod_base = OTHER; note = 2'-O-methyladenosine-3'-phosphate
  modified_base 12: mod_base = OTHER; note = 2'-O-methyladenosine-3'-phosphate
  modified_base 13: mod_base = OTHER; note = 2'-O-methyladenosine-3'-phosphate
  modified_base 14: mod_base = OTHER; note = 2'-fluoroguanosine-3'-phosphate
  modified_base 15: mod_base = OTHER; note = 2'-O-methyladenosine-3'-phosphate
  modified_base 16: mod_base = OTHER; note = 2'-fluorouridine-3'-phosphate
  modified_base 17: mod_base = OTHER; note = 2'-O-methylguanosine-3'-phosphate
  modified_base 18: mod_base = OTHER; note = 2'-O-methyluridine-3'-phosphate
  modified_base 19: mod_base = OTHER; note = 2'-O-methylguanosine-3'-phosphate
  modified_base 20: mod_base = OTHER; note = 2'-O-methyladenosine-3'-phosphate
  modified_base 21: mod_base = OTHER; note = 2'-O-methyluridine-3'-phosphorothioate
  modified_base 22: mod_base = OTHER; note = 2'-O-methyluridine-3'-phosphorothioate
  modified_base 23: mod_base = OTHER; note = 2'-O-methylguanosine-3'-phosphate
ttcagacactaaagatgtgattg

SEQ ID NO: 1998 - RNA, 21 nt, synthetic construct
  source 1..21: mol_type = other RNA; note = Description of Artificial Sequence: Synthetic oligonucleotide
  modified_base 1: mod_base = OTHER; note = 2'-O-methyluridine-3'-phosphorothioate
  modified_base 2: mod_base = OTHER; note = 2'-O-methyluridine-3'-phosphorothioate
  modified_base 3: mod_base = OTHER; note = 2'-O-methylcytidine-3'-phosphate
  modified_base 4: mod_base = OTHER; note = 2'-O-methylcytidine-3'-phosphate
  modified_base 5: mod_base = OTHER; note = 2'-O-methyladenosine-3'-phosphate
  modified_base 6: mod_base = OTHER; note = 2'-O-methyladenosine-3'-phosphate
  modified_base 7: mod_base = OTHER; note = 2'-fluorouridine-3'-phosphate
  modified_base 8: mod_base = OTHER; note = 2'-O-methylcytidine-3'-phosphate
  modified_base 9: mod_base = OTHER; note = 2'-fluoroadenosine-3'-phosphate
  modified_base 10: mod_base = OTHER; note = 2'-fluorocytidine-3'-phosphate
  modified_base 11: mod_base = OTHER; note = 2'-fluoroadenosine-3'-phosphate
  modified_base 12: mod_base = OTHER; note = 2'-O-methyluridine-3'-phosphate
  modified_base 13: mod_base = OTHER; note = 2'-O-methylcytidine-3'-phosphate
  modified_base 14: mod_base = OTHER; note = 2'-O-methyluridine-3'-phosphate
  modified_base 15: mod_base = OTHER; note = 2'-O-methyluridine-3'-phosphate
  modified_base 16: mod_base = OTHER; note = 2'-O-methyluridine-3'-phosphate
  modified_base 17: mod_base = OTHER; note = 2'-O-methyladenosine-3'-phosphate
  modified_base 18: mod_base = OTHER; note = 2'-O-methylguanosine-3'-phosphate
  modified_base 19: mod_base = OTHER; note = 2'-O-methyluridine-3'-phosphate
  modified_base 20: mod_base = OTHER; note = 2'-O-methylguanosine-3'-phosphate
  modified_base 21: mod_base = OTHER; note = 2'-O-methyluridine-3'-phosphate N-[tris(GalNAc-alkyl)-amidodecanoyl)]-4-hydroxyprolinol Hyp-(GalNAc-alkyl)3
ttccaatcacatctttagtgt

SEQ ID NO: 1999 - RNA, 23 nt, synthetic construct
  source 1..23: mol_type = other RNA; note = Description of Artificial Sequence: Synthetic oligonucleotide
  modified_base 1: mod_base = OTHER; note = 2'-O-methyladenosine-3'-phosphorothioate
  modified_base 2: mod_base = OTHER; note = 2'-fluorocytidine-3'-phosphorothioate
  modified_base 3: mod_base = OTHER; note = 2'-O-methyladenosine-3'-phosphate
  modified_base 4: mod_base = OTHER; note = 2'-O-methylcytidine-3'-phosphate
  modified_base 5: mod_base = OTHER; note = 2'-O-methyluridine-3'-phosphate
  modified_base 6: mod_base = OTHER; note = 2'-fluoroadenosine-3'-phosphate
  modified_base 7: mod_base = OTHER; note = 2'-O-methyladenosine-3'-phosphate
  modified_base 8: mod_base = OTHER; note = 2'-fluoroadenosine-3'-phosphate
  modified_base 9: mod_base = OTHER; note = 2'-fluoroguanosine-3'-phosphate
  modified_base 10: mod_base = OTHER; note = 2'-O-methyladenosine-3'-phosphate
  modified_base 11: mod_base = OTHER; note = 2'-O-methyluridine-3'-phosphate
  modified_base 12: mod_base = OTHER; note = 2'-O-methylguanosine-3'-phosphate
  modified_base 13: mod_base = OTHER; note = 2'-O-methyluridine-3'-phosphate
  modified_base 14: mod_base = OTHER; note = 2'-fluoroguanosine-3'-phosphate
  modified_base 15: mod_base = OTHER; note = 2'-O-methyladenosine-3'-phosphate
  modified_base 16: mod_base = OTHER; note = 2'-fluorouridine-3'-phosphate
  modified_base 17: mod_base = OTHER; note = 2'-O-methyluridine-3'-phosphate
  modified_base 18: mod_base = OTHER; note = 2'-O-methylguanosine-3'-phosphate
  modified_base 19: mod_base = OTHER; note = 2'-O-methylguanosine-3'-phosphate
  modified_base 20: mod_base = OTHER; note = 2'-O-methyladenosine-3'-phosphate
  modified_base 21: mod_base = OTHER; note = 2'-O-methyladenosine-3'-phosphorothioate
  modified_base 22: mod_base = OTHER; note = 2'-O-methyladenosine-3'-phosphorothioate
  modified_base 23: mod_base = OTHER; note = 2'-O-methyluridine-3'-phosphate
acactaaagatgtgattggaaat

SEQ ID NO: 2000 - RNA, 21 nt, synthetic construct
  source 1..21: mol_type = other RNA; note = Description of Artificial Sequence: Synthetic oligonucleotide
  modified_base 1: mod_base = OTHER; note = 2'-O-methyluridine-3'-phosphorothioate
  modified_base 2: mod_base = OTHER; note = 2'-O-methyluridine-3'-phosphorothioate
  modified_base 3: mod_base = OTHER; note = 2'-O-methyluridine-3'-phosphate
  modified_base 4: mod_base = OTHER; note = 2'-O-methylcytidine-3'-phosphate
  modified_base 5: mod_base = OTHER; note = 2'-O-methylcytidine-3'-phosphate
  modified_base 6: mod_base = OTHER; note = 2'-O-methyladenosine-3'-phosphate
  modified_base 7: mod_base = OTHER; note = 2'-fluoroadenosine-3'-phosphate
  modified_base 8: mod_base = OTHER; note = 2'-O-methyluridine-3'-phosphate
  modified_base 9: mod_base = OTHER; note = 2'-fluorocytidine-3'-phosphate
  modified_base 10: mod_base = OTHER; note = 2'-fluoroadenosine-3'-phosphate
  modified_base 11: mod_base = OTHER; note = 2'-fluorocytidine-3'-phosphate
  modified_base 12: mod_base = OTHER; note = 2'-O-methyladenosine-3'-phosphate
  modified_base 13: mod_base = OTHER; note = 2'-O-methyluridine-3'-phosphate
  modified_base 14: mod_base = OTHER; note = 2'-O-methylcytidine-3'-phosphate
  modified_base 15: mod_base = OTHER; note = 2'-O-methyluridine-3'-phosphate
  modified_base 16: mod_base = OTHER; note = 2'-O-methyluridine-3'-phosphate
  modified_base 17: mod_base = OTHER; note = 2'-O-methyluridine-3'-phosphate
  modified_base 18: mod_base = OTHER; note = 2'-O-methyladenosine-3'-phosphate
  modified_base 19: mod_base = OTHER; note = 2'-O-methylguanosine-3'-phosphate
  modified_base 20: mod_base = OTHER; note = 2'-O-methyluridine-3'-phosphate
  modified_base 21: mod_base = OTHER; note = 2'-O-methylguanosine-3'-phosphate N-[tris(GalNAc-alkyl)-amidodecanoyl)]-4-hydroxyprolinol Hyp-(GalNAc-alkyl)3
tttccaatcacatctttagtg

SEQ ID NO: 2001 - RNA, 23 nt, synthetic construct
  source 1..23: mol_type = other RNA; note = Description of Artificial Sequence: Synthetic oligonucleotide
  modified_base 1: mod_base = OTHER; note = 2'-O-methylcytidine-3'-phosphorothioate
  modified_base 2: mod_base = OTHER; note = 2'-fluoroadenosine-3'-phosphorothioate
  modified_base 3: mod_base = OTHER; note = 2'-O-methylcytidine-3'-phosphate
  modified_base 4: mod_base = OTHER; note = 2'-O-methyluridine-3'-phosphate
  modified_base 5: mod_base = OTHER; note = 2'-O-methyladenosine-3'-phosphate
  modified_base 6: mod_base = OTHER; note = 2'-fluoroadenosine-3'-phosphate
  modified_base 7: mod_base = OTHER; note = 2'-O-methyladenosine-3'-phosphate
  modified_base 8: mod_base = OTHER; note = 2'-fluoroguanosine-3'-phosphate
  modified_base 9: mod_base = OTHER; note = 2'-fluoroadenosine-3'-phosphate
  modified_base 10: mod_base = OTHER; note = 2'-O-methyluridine-3'-phosphate
  modified_base 11: mod_base = OTHER; note = 2'-O-methylguanosine-3'-phosphate
  modified_base 12: mod_base = OTHER; note = 2'-O-methyluridine-3'-phosphate
  modified_base 13: mod_base = OTHER; note = 2'-O-methylguanosine-3'-phosphate
  modified_base 14: mod_base = OTHER; note = 2'-fluoroadenosine-3'-phosphate
  modified_base 15: mod_base = OTHER; note = 2'-O-methyluridine-3'-phosphate
  modified_base 16: mod_base = OTHER; note = 2'-fluorouridine-3'-phosphate
  modified_base 17: mod_base = OTHER; note = 2'-O-methylguanosine-3'-phosphate
  modified_base 18: mod_base = OTHER; note = 2'-O-methylguanosine-3'-phosphate
  modified_base 19: mod_base = OTHER; note = 2'-O-methyladenosine-3'-phosphate
  modified_base 20: mod_base = OTHER; note = 2'-O-methyladenosine-3'-phosphate
  modified_base 21: mod_base = OTHER; note = 2'-O-methyladenosine-3'-phosphorothioate
  modified_base 22: mod_base = OTHER; note = 2'-O-methyluridine-3'-phosphorothioate
  modified_base 23: mod_base = OTHER; note = 2'-O-methylcytidine-3'-phosphate
cactaaagatgtgattggaaatc

SEQ ID NO: 2002 - RNA, 21 nt, synthetic construct
  source 1..21: mol_type = other RNA; note = Description of Artificial Sequence: Synthetic oligonucleotide
  modified_base 1: mod_base = OTHER; note = 2'-O-methyladenosine-3'-phosphorothioate
  modified_base 2: mod_base = OTHER; note = 2'-O-methylcytidine-3'-phosphorothioate
  modified_base 3: mod_base = OTHER; note = 2'-O-methylguanosine-3'-phosphate
  modified_base 4: mod_base = OTHER; note = 2'-O-methylguanosine-3'-phosphate
  modified_base 5: mod_base = OTHER; note = 2'-O-methylguanosine-3'-phosphate
  modified_base 6: mod_base = OTHER; note = 2'-O-methylcytidine-3'-phosphate
  modified_base 7: mod_base = OTHER; note = 2'-fluoroadenosine-3'-phosphate
  modified_base 8: mod_base = OTHER; note = 2'-O-methyluridine-3'-phosphate
  modified_base 9: mod_base = OTHER; note = 2'-fluoroguanosine-3'-phosphate
  modified_base 10: mod_base = OTHER; note = 2'-fluoroadenosine-3'-phosphate
  modified_base 11: mod_base = OTHER; note = 2'-fluorouridine-3'-phosphate
  modified_base 12: mod_base = OTHER; note = 2'-O-methylguanosine-3'-phosphate
  modified_base 13: mod_base = OTHER; note = 2'-O-methyluridine-3'-phosphate
  modified_base 14: mod_base = OTHER; note = 2'-O-methyluridine-3'-phosphate
  modified_base 15: mod_base = OTHER; note = 2'-O-methylguanosine-3'-phosphate
  modified_base 16: mod_base = OTHER; note = 2'-O-methyladenosine-3'-phosphate
  modified_base 17: mod_base = OTHER; note = 2'-O-methylguanosine-3'-phosphate
  modified_base 18: mod_base = OTHER; note = 2'-O-methyluridine-3'-phosphate
  modified_base 19: mod_base = OTHER; note = 2'-O-methyluridine-3'-phosphate
  modified_base 20: mod_base = OTHER; note = 2'-O-methylcytidine-3'-phosphate
  modified_base 21: mod_base = OTHER; note = 2'-O-methylcytidine-3'-phosphate N-[tris(GalNAc-alkyl)-amidodecanoyl)]-4-hydroxyprolinol Hyp-(GalNAc-alkyl)3
acgggcatgatgttgagttcc

SEQ ID NO: 2003 - RNA, 23 nt, synthetic construct
  source 1..23: mol_type = other RNA; note = Description of Artificial Sequence: Synthetic oligonucleotide
  modified_base 1: mod_base = OTHER; note = 2'-O-methylguanosine-3'-phosphorothioate
  modified_base 2: mod_base = OTHER; note = 2'-fluoroguanosine-3'-phosphorothioate
  modified_base 3: mod_base = OTHER; note = 2'-O-methyladenosine-3'-phosphate
  modified_base 4: mod_base = OTHER; note = 2'-O-methyladenosine-3'-phosphate
  modified_base 5: mod_base = OTHER; note = 2'-O-methylcytidine-3'-phosphate
  modified_base 6: mod_base = OTHER; note = 2'-fluorouridine-3'-phosphate
  modified_base 7: mod_base = OTHER; note = 2'-O-methylcytidine-3'-phosphate
  modified_base 8: mod_base = OTHER; note = 2'-fluoroadenosine-3'-phosphate
  modified_base 9: mod_base = OTHER; note = 2'-fluoroadenosine-3'-phosphate
  modified_base 10: mod_base = OTHER; note = 2'-O-methylcytidine-3'-phosphate
  modified_base 11: mod_base = OTHER; note = 2'-O-methyladenosine-3'-phosphate
  modified_base 12: mod_base = OTHER; note = 2'-O-methyluridine-3'-phosphate
  modified_base 13: mod_base = OTHER; note = 2'-O-methylcytidine-3'-phosphate
  modified_base 14: mod_base = OTHER; note = 2'-fluoroadenosine-3'-phosphate
  modified_base 15: mod_base = OTHER; note = 2'-O-methyluridine-3'-phosphate
  modified_base 16: mod_base = OTHER; note = 2'-fluoroguanosine-3'-phosphate
  modified_base 17: mod_base = OTHER; note = 2'-O-methylcytidine-3'-phosphate
  modified_base 18: mod_base = OTHER; note = 2'-O-methylcytidine-3'-phosphate
  modified_base 19: mod_base = OTHER; note = 2'-O-methylcytidine-3'-phosphate
  modified_base 20: mod_base = OTHER; note = 2'-O-methylguanosine-3'-phosphate
  modified_base 21: mod_base = OTHER; note = 2'-O-methyluridine-3'-phosphorothioate
  modified_base 22: mod_base = OTHER; note = 2'-O-methyluridine-3'-phosphorothioate
  modified_base 23: mod_base = OTHER; note = 2'-O-methylcytidine-3'-phosphate
ggaactcaacatcatgcccgttc

SEQ ID NO: 2004 - RNA, 21 nt, synthetic construct
  source 1..21: mol_type = other RNA; note = Description of Artificial Sequence: Synthetic oligonucleotide
  modified_base 1: mod_base = OTHER; note = 2'-O-methylcytidine-3'-phosphorothioate
  modified_base 2: mod_base = OTHER; note = 2'-O-methylguanosine-3'-phosphorothioate
  modified_base 3: mod_base = OTHER; note = 2'-O-methylguanosine-3'-phosphate
  modified_base 4: mod_base = OTHER; note = 2'-O-methylguanosine-3'-phosphate
  modified_base 5: mod_base = OTHER; note = 2'-O-methylcytidine-3'-phosphate
  modified_base 6: mod_base = OTHER; note = 2'-O-methyladenosine-3'-phosphate
  modified_base 7: mod_base = OTHER; note = 2'-fluorouridine-3'-phosphate
  modified_base 8: mod_base = OTHER; note = 2'-O-methylguanosine-3'-phosphate
  modified_base 9: mod_base = OTHER; note = 2'-fluoroadenosine-3'-phosphate
  modified_base 10: mod_base = OTHER; note = 2'-fluorouridine-3'-phosphate
  modified_base 11: mod_base = OTHER; note = 2'-fluoroguanosine-3'-phosphate
  modified_base 12: mod_base = OTHER; note = 2'-O-methyluridine-3'-phosphate
  modified_base 13: mod_base = OTHER; note = 2'-O-methyluridine-3'-phosphate
  modified_base 14: mod_base = OTHER; note = 2'-O-methylguanosine-3'-phosphate
  modified_base 15: mod_base = OTHER; note = 2'-O-methyladenosine-3'-phosphate
  modified_base 16: mod_base = OTHER; note = 2'-O-methylguanosine-3'-phosphate
  modified_base 17: mod_base = OTHER; note = 2'-O-methyluridine-3'-phosphate
  modified_base 18: mod_base = OTHER; note = 2'-O-methyluridine-3'-phosphate
  modified_base 19: mod_base = OTHER; note = 2'-O-methylcytidine-3'-phosphate
  modified_base 20: mod_base = OTHER; note = 2'-O-methylcytidine-3'-phosphate
  modified_base 21: mod_base = OTHER; note = 2'-O-methyluridine-3'-phosphate N-[tris(GalNAc-alkyl)-amidodecanoyl)]-4-hydroxyprolinol Hyp-(GalNAc-alkyl)3
cgggcatgatgttgagttcct

SEQ ID NO: 2005 - RNA, 23 nt, synthetic construct
  source 1..23: mol_type = other RNA; note = Description of Artificial Sequence: Synthetic oligonucleotide
  modified_base 1: mod_base = OTHER; note = 2'-O-methyladenosine-3'-phosphorothioate
  modified_base 2: mod_base = OTHER; note = 2'-fluoroguanosine-3'-phosphorothioate
  modified_base 3: mod_base = OTHER; note = 2'-O-methylguanosine-3'-phosphate
  modified_base 4: mod_base = OTHER; note = 2'-O-methyladenosine-3'-phosphate
  modified_base 5: mod_base = OTHER; note = 2'-O-methyladenosine-3'-phosphate
  modified_base 6: mod_base = OTHER; note = 2'-fluorocytidine-3'-phosphate
  modified_base 7: mod_base = OTHER; note = 2'-O-methyluridine-3'-phosphate
  modified_base 8: mod_base = OTHER; note = 2'-fluorocytidine-3'-phosphate
  modified_base 9: mod_base = OTHER; note = 2'-fluoroadenosine-3'-phosphate
  modified_base 10: mod_base = OTHER; note = 2'-O-methyladenosine-3'-phosphate
  modified_base 11: mod_base = OTHER; note = 2'-O-methylcytidine-3'-phosphate
  modified_base 12: mod_base = OTHER; note = 2'-O-methyladenosine-3'-phosphate
  modified_base 13: mod_base = OTHER; note = 2'-O-methyluridine-3'-phosphate
  modified_base 14: mod_base = OTHER; note = 2'-fluorocytidine-3'-phosphate
  modified_base 15: mod_base = OTHER; note = 2'-O-methyladenosine-3'-phosphate
  modified_base 16: mod_base = OTHER; note = 2'-fluorouridine-3'-phosphate
  modified_base 17: mod_base = OTHER; note = 2'-O-methylguanosine-3'-phosphate
  modified_base 18: mod_base = OTHER; note = 2'-O-methylcytidine-3'-phosphate
  modified_base 19: mod_base = OTHER; note = 2'-O-methylcytidine-3'-phosphate
  modified_base 20: mod_base = OTHER; note = 2'-O-methylcytidine-3'-phosphate
  modified_base 21: mod_base = OTHER; note = 2'-O-methylguanosine-3'-phosphorothioate
  modified_base 22: mod_base = OTHER; note = 2'-O-methyluridine-3'-phosphorothioate
  modified_base 23: mod_base = OTHER; note = 2'-O-methyluridine-3'-phosphate
aggaactcaacatcatgcccgtt

SEQ ID NO: 2006 - RNA, 21 nt, synthetic construct
  source 1..21: mol_type = other RNA; note = Description of Artificial Sequence: Synthetic oligonucleotide
  modified_base 1: mod_base = OTHER; note = 2'-O-methylguanosine-3'-phosphorothioate
  modified_base 2: mod_base = OTHER; note = 2'-O-methylguanosine-3'-phosphorothioate
  modified_base 3: mod_base = OTHER; note = 2'-O-methylguanosine-3'-phosphate
  modified_base 4: mod_base = OTHER; note = 2'-O-methyladenosine-3'-phosphate
  modified_base 5: mod_base = OTHER; note = 2'-O-methyladenosine-3'-phosphate
  modified_base 6: mod_base = OTHER; note = 2'-O-methylcytidine-3'-phosphate
  modified_base 7: mod_base = OTHER; note = 2'-fluoroguanosine-3'-phosphate
  modified_base 8: mod_base = OTHER; note = 2'-O-methylguanosine-3'-phosphate
  modified_base 9: mod_base = OTHER; note = 2'-fluoroguanosine-3'-phosphate
  modified_base 10: mod_base = OTHER; note = 2'-fluorocytidine-3'-phosphate
  modified_base 11: mod_base = OTHER; note = 2'-fluoroadenosine-3'-phosphate
  modified_base 12: mod_base = OTHER; note = 2'-O-methyluridine-3'-phosphate
  modified_base 13: mod_base = OTHER; note = 2'-O-methylguanosine-3'-phosphate
  modified_base 14: mod_base = OTHER; note = 2'-O-methyladenosine-3'-phosphate
  modified_base 15: mod_base = OTHER; note = 2'-O-methyluridine-3'-phosphate
  modified_base 16: mod_base = OTHER; note = 2'-O-methylguanosine-3'-phosphate
  modified_base 17: mod_base = OTHER; note = 2'-O-methyluridine-3'-phosphate
  modified_base 18: mod_base = OTHER; note = 2'-O-methyluridine-3'-phosphate
  modified_base 19: mod_base = OTHER; note = 2'-O-methylguanosine-3'-phosphate
  modified_base 20: mod_base = OTHER; note = 2'-O-methyladenosine-3'-phosphate
  modified_base 21: mod_base = OTHER; note = 2'-O-methylguanosine-3'-phosphate N-[tris(GalNAc-alkyl)-amidodecanoyl)]-4-hydroxyprolinol Hyp-(GalNAc-alkyl)3
gggaacgggcatgatgttgag

SEQ ID NO: 2007 - RNA, 23 nt, synthetic construct
  source 1..23: mol_type = other RNA; note = Description of Artificial Sequence: Synthetic oligonucleotide
  modified_base 1: mod_base = OTHER; note = 2'-O-methylcytidine-3'-phosphorothioate
  modified_base 2: mod_base = OTHER; note = 2'-fluorouridine -3'-phosphorothioate
  modified_base 3: mod_base = OTHER; note = 2'-O-methylcytidine-3'-phosphate
  modified_base 4: mod_base = OTHER; note = 2'-O-methyladenosine-3'-phosphate
  modified_base 5: mod_base = OTHER; note = 2'-O-methyladenosine-3'-phosphate
  modified_base 6: mod_base = OTHER; note = 2'-fluorocytidine-3'-phosphate
  modified_base 7: mod_base = OTHER; note = 2'-O-methyladenosine-3'-phosphate
  modified_base 8: mod_base = OTHER; note = 2'-fluorouridine-3'-phosphate
  modified_base 9: mod_base = OTHER; note = 2'-fluorocytidine-3'-phosphate
  modified_base 10: mod_base = OTHER; note = 2'-O-methyladenosine-3'-phosphate
  modified_base 11: mod_base = OTHER; note = 2'-O-methyluridine-3'-phosphate
  modified_base 12: mod_base = OTHER; note = 2'-O-methylguanosine-3'-phosphate
  modified_base 13: mod_base = OTHER; note = 2'-O-methylcytidine-3'-phosphate
  modified_base 14: mod_base = OTHER; note = 2'-fluorocytidine-3'-phosphate
  modified_base 15: mod_base = OTHER; note = 2'-O-methylcytidine-3'-phosphate
  modified_base 16: mod_base = OTHER; note = 2'-fluoroguanosine-3'-phosphate
  modified_base 17: mod_base = OTHER; note = 2'-O-methyluridine-3'-phosphate
  modified_base 18: mod_base = OTHER; note = 2'-O-methyluridine-3'-phosphate
  modified_base 19: mod_base = OTHER; note = 2'-O-methylcytidine-3'-phosphate
  modified_base 20: mod_base = OTHER; note = 2'-O-methylcytidine-3'-phosphate
  modified_base 21: mod_base = OTHER; note = 2'-O-methylcytidine-3'-phosphorothioate
  modified_base 22: mod_base = OTHER; note = 2'-O-methyladenosine-3'-phosphorothioate
  modified_base 23: mod_base = OTHER; note = 2'-O-methylguanosine-3'-phosphate
ctcaacatcatgcccgttcccag

SEQ ID NO: 2008 - RNA, 21 nt, synthetic construct
  source 1..21: mol_type = other RNA; note = Description of Artificial Sequence: Synthetic oligonucleotide
  modified_base 1: mod_base = OTHER; note = 2'-O-methyluridine-3'-phosphorothioate
  modified_base 2: mod_base = OTHER; note = 2'-O-methylguanosine-3'-phosphorothioate
  modified_base 3: mod_base = OTHER; note = 2'-O-methylguanosine-3'-phosphate
  modified_base 4: mod_base = OTHER; note = 2'-O-methylguanosine-3'-phosphate
  modified_base 5: mod_base = OTHER; note = 2'-O-methyladenosine-3'-phosphate
  modified_base 6: mod_base = OTHER; note = 2'-O-methyladenosine-3'-phosphate
  modified_base 7: mod_base = OTHER; note = 2'-fluorocytidine-3'-phosphate
  modified_base 8: mod_base = OTHER; note = 2'-O-methylguanosine-3'-phosphate
  modified_base 9: mod_base = OTHER; note = 2'-fluoroguanosine-3'-phosphate
  modified_base 10: mod_base = OTHER; note = 2'-fluoroguanosine-3'-phosphate
  modified_base 11: mod_base = OTHER; note = 2'-fluorocytidine-3'-phosphate
  modified_base 12: mod_base = OTHER; note = 2'-O-methyladenosine-3'-phosphate
  modified_base 13: mod_base = OTHER; note = 2'-O-methyluridine-3'-phosphate
  modified_base 14: mod_base = OTHER; note = 2'-O-methylguanosine-3'-phosphate
  modified_base 15: mod_base = OTHER; note = 2'-O-methyladenosine-3'-phosphate
  modified_base 16: mod_base = OTHER; note = 2'-O-methyluridine-3'-phosphate
  modified_base 17: mod_base = OTHER; note = 2'-O-methylguanosine-3'-phosphate
  modified_base 18: mod_base = OTHER; note = 2'-O-methyluridine-3'-phosphate
  modified_base 19: mod_base = OTHER; note = 2'-O-methyluridine-3'-phosphate
  modified_base 20: mod_base = OTHER; note = 2'-O-methylguanosine-3'-phosphate
  modified_base 21: mod_base = OTHER; note = 2'-O-methyladenosine-3'-phosphate N-[tris(GalNAc-alkyl)-amidodecanoyl)]-4-hydroxyprolinol Hyp-(GalNAc-alkyl)3
tgggaacgggcatgatgttga

SEQ ID NO: 2009 - RNA, 23 nt, synthetic construct
  source 1..23: mol_type = other RNA; note = Description of Artificial Sequence: Synthetic oligonucleotide
  modified_base 1: mod_base = OTHER; note = 2'-O-methyluridine-3'-phosphorothioate
  modified_base 2: mod_base = OTHER; note = 2'-fluorocytidine-3'-phosphorothioate
  modified_base 3: mod_base = OTHER; note = 2'-O-methyladenosine-3'-phosphate
  modified_base 4: mod_base = OTHER; note = 2'-O-methyladenosine-3'-phosphate
  modified_base 5: mod_base = OTHER; note = 2'-O-methylcytidine-3'-phosphate
  modified_base 6: mod_base = OTHER; note = 2'-fluoroadenosine-3'-phosphate
  modified_base 7: mod_base = OTHER; note = 2'-O-methyluridine-3'-phosphate
  modified_base 8: mod_base = OTHER; note = 2'-fluorocytidine-3'-phosphate
  modified_base 9: mod_base = OTHER; note = 2'-fluoroadenosine-3'-phosphate
  modified_base 10: mod_base = OTHER; note = 2'-O-methyluridine-3'-phosphate
  modified_base 11: mod_base = OTHER; note = 2'-O-methylguanosine-3'-phosphate
  modified_base 12: mod_base = OTHER; note = 2'-O-methylcytidine-3'-phosphate
  modified_base 13: mod_base = OTHER; note = 2'-O-methylcytidine-3'-phosphate
  modified_base 14: mod_base = OTHER; note = 2'-fluorocytidine-3'-phosphate
  modified_base 15: mod_base = OTHER; note = 2'-O-methylguanosine-3'-phosphate
  modified_base 16: mod_base = OTHER; note = 2'-fluorouridine-3'-phosphate
  modified_base 17: mod_base = OTHER; note = 2'-O-methyluridine-3'-phosphate
  modified_base 18: mod_base = OTHER; note = 2'-O-methylcytidine-3'-phosphate
  modified_base 19: mod_base = OTHER; note = 2'-O-methylcytidine-3'-phosphate
  modified_base 20: mod_base = OTHER; note = 2'-O-methylcytidine-3'-phosphate
  modified_base 21: mod_base = OTHER; note = 2'-O-methyladenosine-3'-phosphorothioate
  modified_base 22: mod_base = OTHER; note = 2'-O-methylguanosine-3'-phosphorothioate
  modified_base 23: mod_base = OTHER; note = 2'-O-methylguanosine-3'-phosphate
tcaacatcatgcccgttcccagg

SEQ ID NO: 2010 - RNA, 21 nt, synthetic construct
  source 1..21: mol_type = other RNA; note = Description of Artificial Sequence: Synthetic oligonucleotide
  modified_base 1: mod_base = OTHER; note = 2'-O-methyladenosine-3'-phosphorothioate
  modified_base 2: mod_base = OTHER; note = 2'-O-methylcytidine-3'-phosphorothioate
  modified_base 3: mod_base = OTHER; note = 2'-O-methyluridine-3'-phosphate
  modified_base 4: mod_base = OTHER; note = 2'-O-methyladenosine-3'-phosphate
  modified_base 5: mod_base = OTHER; note = 2'-O-methyladenosine-3'-phosphate
  modified_base 6: mod_base = OTHER; note = 2'-O-methylguanosine-3'-phosphate
  modified_base 7: mod_base = OTHER; note = 2'-fluoroguanosine-3'-phosphate
  modified_base 8: mod_base = OTHER; note = 2'-O-methyluridine-3'-phosphate
  modified_base 9: mod_base = OTHER; note = 2'-fluoroguanosine-3'-phosphate
  modified_base 10: mod_base = OTHER; note = 2'-fluoroadenosine-3'-phosphate
  modified_base 11: mod_base = OTHER; note = 2'-fluoroadenosine-3'-phosphate
  modified_base 12: mod_base = OTHER; note = 2'-O-methyladenosine-3'-phosphate
  modified_base 13: mod_base = OTHER; note = 2'-O-methyladenosine-3'-phosphate
  modified_base 14: mod_base = OTHER; note = 2'-O-methylguanosine-3'-phosphate
  modified_base 15: mod_base = OTHER; note = 2'-O-methyladenosine-3'-phosphate
  modified_base 16: mod_base = OTHER; note = 2'-O-methyluridine-3'-phosphate
  modified_base 17: mod_base = OTHER; note = 2'-O-methyladenosine-3'-phosphate
  modified_base 18: mod_base = OTHER; note = 2'-O-methyladenosine-3'-phosphate
  modified_base 19: mod_base = OTHER; note = 2'-O-methyluridine-3'-phosphate
  modified_base 20: mod_base = OTHER; note = 2'-O-methylguanosine-3'-phosphate
  modified_base 21: mod_base = OTHER; note = 2'-O-methyladenosine-3'-phosphate N-[tris(GalNAc-alkyl)-amidodecanoyl)]-4-hydroxyprolinol Hyp-(GalNAc-alkyl)3
actaaggtgaaaagataatga

SEQ ID NO: 2011 - RNA, 23 nt, synthetic construct
  source 1..23: mol_type = other RNA; note = Description of Artificial Sequence: Synthetic oligonucleotide
  modified_base 1: mod_base = OTHER; note = 2'-O-methyluridine-3'-phosphorothioate
  modified_base 2: mod_base = OTHER; note = 2'-fluorocytidine-3'-phosphorothioate
  modified_base 3: mod_base = OTHER; note = 2'-O-methyladenosine-3'-phosphate
  modified_base 4: mod_base = OTHER; note = 2'-O-methyluridine-3'-phosphate
  modified_base 5: mod_base = OTHER; note = 2'-O-methyluridine-3'-phosphate
  modified_base 6: mod_base = OTHER; note = 2'-fluoroadenosine-3'-phosphate
  modified_base 7: mod_base = OTHER; note = 2'-O-methyluridine-3'-phosphate
  modified_base 8: mod_base = OTHER; note = 2'-fluorocytidine-3'-phosphate
  modified_base 9: mod_base = OTHER; note = 2'-fluorouridine-3'-phosphate
  modified_base 10: mod_base = OTHER; note = 2'-O-methyluridine-3'-phosphate
  modified_base 11: mod_base = OTHER; note = 2'-O-methyluridine-3'-phosphate
  modified_base 12: mod_base = OTHER; note = 2'-O-methyluridine-3'-phosphate
  modified_base 13: mod_base = OTHER; note = 2'-O-methylcytidine-3'-phosphate
  modified_base 14: mod_base = OTHER; note = 2'-fluoroadenosine-3'-phosphate
  modified_base 15: mod_base = OTHER; note = 2'-O-methylcytidine-3'-phosphate
  modified_base 16: mod_base = OTHER; note = 2'-fluorocytidine-3'-phosphate
  modified_base 17: mod_base = OTHER; note = 2'-O-methyluridine-3'-phosphate
  modified_base 18: mod_base = OTHER; note = 2'-O-methyluridine-3'-phosphate
  modified_base 19: mod_base = OTHER; note = 2'-O-methyladenosine-3'-phosphate
  modified_base 20: mod_base = OTHER; note = 2'-O-methylguanosine-3'-phosphate
  modified_base 21: mod_base = OTHER; note = 2'-O-methyluridine-3'-phosphorothioate
  modified_base 22: mod_base = OTHER; note = 2'-O-methylguanosine-3'-phosphorothioate
  modified_base 23: mod_base = OTHER; note = 2'-O-methyluridine-3'-phosphate
tcattatcttttcaccttagtgt

SEQ ID NO: 2012 - RNA, 21 nt, synthetic construct
  source 1..21: mol_type = other RNA; note = Description of Artificial Sequence: Synthetic oligonucleotide
  modified_base 1: mod_base = OTHER; note = 2'-O-methylcytidine-3'-phosphorothioate
  modified_base 2: mod_base = OTHER; note = 2'-O-methyluridine-3'-phosphorothioate
  modified_base 3: mod_base = OTHER; note = 2'-O-methyladenosine-3'-phosphate
  modified_base 4: mod_base = OTHER; note = 2'-O-methyladenosine-3'-phosphate
  modified_base 5: mod_base = OTHER; note = 2'-O-methylguanosine-3'-phosphate
  modified_base 6: mod_base = OTHER; note = 2'-O-methylguanosine-3'-phosphate
  modified_base 7: mod_base = OTHER; note = 2'-fluorouridine-3'-phosphate
  modified_base 8: mod_base = OTHER; note = 2'-O-methylguanosine-3'-phosphate
  modified_base 9: mod_base = OTHER; note = 2'-fluoroadenosine-3'-phosphate
  modified_base 10: mod_base = OTHER; note = 2'-fluoroadenosine-3'-phosphate
  modified_base 11: mod_base = OTHER; note = 2'-fluoroadenosine-3'-phosphate
  modified_base 12: mod_base = OTHER; note = 2'-O-methyladenosine-3'-phosphate
  modified_base 13: mod_base = OTHER; note = 2'-O-methylguanosine-3'-phosphate
  modified_base 14: mod_base = OTHER; note = 2'-O-methyladenosine-3'-phosphate
  modified_base 15: mod_base = OTHER; note = 2'-O-methyluridine-3'-phosphate
  modified_base 16: mod_base = OTHER; note = 2'-O-methyladenosine-3'-phosphate
  modified_base 17: mod_base = OTHER; note = 2'-O-methyladenosine-3'-phosphate
  modified_base 18: mod_base = OTHER; note = 2'-O-methyluridine-3'-phosphate
  modified_base 19: mod_base = OTHER; note = 2'-O-methylguanosine-3'-phosphate
  modified_base 20: mod_base = OTHER; note = 2'-O-methyladenosine-3'-phosphate
  modified_base 21: mod_base = OTHER; note = 2'-O-methyluridine-3'-phosphate N-[tris(GalNAc-alkyl)-amidodecanoyl)]-4-hydroxyprolinol Hyp-(GalNAc-alkyl)3
ctaaggtgaaaagataatgat

SEQ ID NO: 2013 - RNA, 23 nt, synthetic construct
  source 1..23: mol_type = other RNA; note = Description of Artificial Sequence: Synthetic oligonucleotide
  modified_base 1: mod_base = OTHER; note = 2'-O-methyladenosine-3'-phosphorothioate
  modified_base 2: mod_base = OTHER; note = 2'-fluorouridine -3'-phosphorothioate
  modified_base 3: mod_base = OTHER; note = 2'-O-methylcytidine-3'-phosphate
  modified_base 4: mod_base = OTHER; note = 2'-O-methyladenosine-3'-phosphate
  modified_base 5: mod_base = OTHER; note = 2'-O-methyluridine-3'-phosphate
  modified_base 6: mod_base = OTHER; note = 2'-fluorouridine-3'-phosphate
  modified_base 7: mod_base = OTHER; note = 2'-O-methyladenosine-3'-phosphate
  modified_base 8: mod_base = OTHER; note = 2'-fluorouridine-3'-phosphate
  modified_base 9: mod_base = OTHER; note = 2'-fluorocytidine-3'-phosphate
  modified_base 10: mod_base = OTHER; note = 2'-O-methyluridine-3'-phosphate
  modified_base 11: mod_base = OTHER; note = 2'-O-methyluridine-3'-phosphate
  modified_base 12: mod_base = OTHER; note = 2'-O-methyluridine-3'-phosphate
  modified_base 13: mod_base = OTHER; note = 2'-O-methyluridine-3'-phosphate
  modified_base 14: mod_base = OTHER; note = 2'-fluorocytidine-3'-phosphate
  modified_base 15: mod_base = OTHER; note = 2'-O-methyladenosine-3'-phosphate
  modified_base 16: mod_base = OTHER; note = 2'-fluorocytidine-3'-phosphate
  modified_base 17: mod_base = OTHER; note = 2'-O-methylcytidine-3'-phosphate
  modified_base 18: mod_base = OTHER; note = 2'-O-methyluridine-3'-phosphate
  modified_base 19: mod_base = OTHER; note = 2'-O-methyluridine-3'-phosphate
  modified_base 20: mod_base = OTHER; note = 2'-O-methyladenosine-3'-phosphate
  modified_base 21: mod_base = OTHER; note = 2'-O-methylguanosine-3'-phosphorothioate
  modified_base 22: mod_base = OTHER; note = 2'-O-methyluridine-3'-phosphorothioate
  modified_base 23: mod_base = OTHER; note = 2'-O-methylguanosine-3'-phosphate
atcattatcttttcaccttagtg

SEQ ID NO: 2014 - RNA, 21 nt, synthetic construct
  source 1..21: mol_type = other RNA; note = Description of Artificial Sequence: Synthetic oligonucleotide
  modified_base 1: mod_base = OTHER; note = 2'-O-methyladenosine-3'-phosphorothioate
  modified_base 2: mod_base = OTHER; note = 2'-O-methyladenosine-3'-phosphorothioate
  modified_base 3: mod_base = OTHER; note = 2'-O-methyladenosine-3'-phosphate
  modified_base 4: mod_base = OTHER; note = 2'-O-methylcytidine-3'-phosphate
  modified_base 5: mod_base = OTHER; note = 2'-O-methyladenosine-3'-phosphate
  modified_base 6: mod_base = OTHER; note = 2'-O-methylcytidine-3'-phosphate
  modified_base 7: mod_base = OTHER; note = 2'-fluorouridine-3'-phosphate
  modified_base 8: mod_base = OTHER; note = 2'-O-methyladenosine-3'-phosphate
  modified_base 9: mod_base = OTHER; note = 2'-fluoroadenosine-3'-phosphate
  modified_base 10: mod_base = OTHER; note = 2'-fluoroguanosine-3'-phosphate
  modified_base 11: mod_base = OTHER; note = 2'-fluoroguanosine-3'-phosphate
  modified_base 12: mod_base = OTHER; note = 2'-O-methyluridine-3'-phosphate
  modified_base 13: mod_base = OTHER; note = 2'-O-methylguanosine-3'-phosphate
  modified_base 14: mod_base = OTHER; note = 2'-O-methyladenosine-3'-phosphate
  modified_base 15: mod_base = OTHER; note = 2'-O-methyladenosine-3'-phosphate
  modified_base 16: mod_base = OTHER; note = 2'-O-methyladenosine-3'-phosphate
  modified_base 17: mod_base = OTHER; note = 2'-O-methyladenosine-3'-phosphate
  modified_base 18: mod_base = OTHER; note = 2'-O-methylguanosine-3'-phosphate
  modified_base 19: mod_base = OTHER; note = 2'-O-methyladenosine-3'-phosphate
  modified_base 20: mod_base = OTHER; note = 2'-O-methyluridine-3'-phosphate
  modified_base 21: mod_base = OTHER; note = 2'-O-methyladenosine-3'-phosphate N-[tris(GalNAc-alkyl)-amidodecanoyl)]-4-hydroxyprolinol Hyp-(GalNAc-alkyl)3
aaacactaaggtgaaaagata

SEQ ID NO: 2015 - RNA, 23 nt, synthetic construct
  source 1..23: mol_type = other RNA; note = Description of Artificial Sequence: Synthetic oligonucleotide
  modified_base 1: mod_base = OTHER; note = 2'-O-methyluridine-3'-phosphorothioate
  modified_base 2: mod_base = OTHER; note = 2'-fluoroadenosine-3'-phosphorothioate
  modified_base 3: mod_base = OTHER; note = 2'-O-methyluridine-3'-phosphate
  modified_base 4: mod_base = OTHER; note = 2'-O-methylcytidine-3'-phosphate
  modified_base 5: mod_base = OTHER; note = 2'-O-methyluridine-3'-phosphate
  modified_base 6: mod_base = OTHER; note = 2'-fluorouridine-3'-phosphate
  modified_base 7: mod_base = OTHER; note = 2'-O-methyluridine-3'-phosphate
  modified_base 8: mod_base = OTHER; note = 2'-fluorouridine-3'-phosphate
  modified_base 9: mod_base = OTHER; note = 2'-fluorocytidine-3'-phosphate
  modified_base 10: mod_base = OTHER; note = 2'-O-methyladenosine-3'-phosphate
  modified_base 11: mod_base = OTHER; note = 2'-O-methylcytidine-3'-phosphate
  modified_base 12: mod_base = OTHER; note = 2'-O-methylcytidine-3'-phosphate
  modified_base 13: mod_base = OTHER; note = 2'-O-methyluridine-3'-phosphate
  modified_base 14: mod_base = OTHER; note = 2'-fluorouridine-3'-phosphate
  modified_base 15: mod_base = OTHER; note = 2'-O-methyladenosine-3'-phosphate
  modified_base 16: mod_base = OTHER; note = 2'-fluoroguanosine-3'-phosphate
  modified_base 17: mod_base = OTHER; note = 2'-O-methyluridine-3'-phosphate
  modified_base 18: mod_base = OTHER; note = 2'-O-methylguanosine-3'-phosphate
  modified_base 19: mod_base = OTHER; note = 2'-O-methyluridine-3'-phosphate
  modified_base 20: mod_base = OTHER; note = 2'-O-methyluridine-3'-phosphate
  modified_base 21: mod_base = OTHER; note = 2'-O-methyluridine-3'-phosphorothioate
  modified_base 22: mod_base = OTHER; note = 2'-O-methylguanosine-3'-phosphorothioate
  modified_base 23: mod_base = OTHER; note = 2'-O-methylcytidine-3'-phosphate
tatcttttcaccttagtgtttgc

SEQ ID NO: 2016 - RNA, 21 nt, synthetic construct
  source 1..21: mol_type = other RNA; note = Description of Artificial Sequence: Synthetic oligonucleotide
  modified_base 1: mod_base = OTHER; note = 2'-O-methylcytidine-3'-phosphorothioate
  modified_base 2: mod_base = OTHER; note = 2'-O-methyladenosine-3'-phosphorothioate
  modified_base 3: mod_base = OTHER; note = 2'-O-methyladenosine-3'-phosphate
  modified_base 4: mod_base = OTHER; note = 2'-O-methyladenosine-3'-phosphate
  modified_base 5: mod_base = OTHER; note = 2'-O-methylcytidine-3'-phosphate
  modified_base 6: mod_base = OTHER; note = 2'-O-methyladenosine-3'-phosphate
  modified_base 7: mod_base = OTHER; note = 2'-fluorocytidine-3'-phosphate
  modified_base 8: mod_base = OTHER; note = 2'-O-methyluridine-3'-phosphate
  modified_base 9: mod_base = OTHER; note = 2'-fluoroadenosine-3'-phosphate
  modified_base 10: mod_base = OTHER; note = 2'-fluoroadenosine-3'-phosphate
  modified_base 11: mod_base = OTHER; note = 2'-fluoroguanosine-3'-phosphate
  modified_base 12: mod_base = OTHER; note = 2'-O-methylguanosine-3'-phosphate
  modified_base 13: mod_base = OTHER; note = 2'-O-methyluridine-3'-phosphate
  modified_base 14: mod_base = OTHER; note = 2'-O-methylguanosine-3'-phosphate
  modified_base 15: mod_base = OTHER; note = 2'-O-methyladenosine-3'-phosphate
  modified_base 16: mod_base = OTHER; note = 2'-O-methyladenosine-3'-phosphate
  modified_base 17: mod_base = OTHER; note = 2'-O-methyladenosine-3'-phosphate
  modified_base 18: mod_base = OTHER; note = 2'-O-methyladenosine-3'-phosphate
  modified_base 19: mod_base = OTHER; note = 2'-O-methylguanosine-3'-phosphate
  modified_base 20: mod_base = OTHER; note = 2'-O-methyladenosine-3'-phosphate
  modified_base 21: mod_base = OTHER; note = 2'-O-methyluridine-3'-phosphate N-[tris(GalNAc-alkyl)-amidodecanoyl)]-4-hydroxyprolinol Hyp-(GalNAc-alkyl)3
caaacactaaggtgaaaagat

SEQ ID NO: 2017 - RNA, 23 nt, synthetic construct
  source 1..23: mol_type = other RNA; note = Description of Artificial Sequence: Synthetic oligonucleotide
  modified_base 1: mod_base = OTHER; note = 2'-O-methyladenosine-3'-phosphorothioate
  modified_base 2: mod_base = OTHER; note = 2'-fluorouridine -3'-phosphorothioate
  modified_base 3: mod_base = OTHER; note = 2'-O-methylcytidine-3'-phosphate
  modified_base 4: mod_base = OTHER; note = 2'-O-methyluridine-3'-phosphate
  modified_base 5: mod_base = OTHER; note = 2'-O-methyluridine-3'-phosphate
  modified_base 6: mod_base = OTHER; note = 2'-fluorouridine-3'-phosphate
  modified_base 7: mod_base = OTHER; note = 2'-O-methyluridine-3'-phosphate
  modified_base 8: mod_base = OTHER; note = 2'-fluorocytidine-3'-phosphate
  modified_base 9: mod_base = OTHER; note = 2'-fluoroadenosine-3'-phosphate
  modified_base 10: mod_base = OTHER; note = 2'-O-methylcytidine-3'-phosphate
  modified_base 11: mod_base = OTHER; note = 2'-O-methylcytidine-3'-phosphate
  modified_base 12: mod_base = OTHER; note = 2'-O-methyluridine-3'-phosphate
  modified_base 13: mod_base = OTHER; note = 2'-O-methyluridine-3'-phosphate
  modified_base 14: mod_base = OTHER; note = 2'-fluoroadenosine-3'-phosphate
  modified_base 15: mod_base = OTHER; note = 2'-O-methylguanosine-3'-phosphate
  modified_base 16: mod_base = OTHER; note = 2'-fluorouridine-3'-phosphate
  modified_base 17: mod_base = OTHER; note = 2'-O-methylguanosine-3'-phosphate
  modified_base 18: mod_base = OTHER; note = 2'-O-methyluridine-3'-phosphate
  modified_base 19: mod_base = OTHER; note = 2'-O-methyluridine-3'-phosphate
  modified_base 20: mod_base = OTHER; note = 2'-O-methyluridine-3'-phosphate
  modified_base 21: mod_base = OTHER; note = 2'-O-methylguanosine-3'-phosphorothioate
  modified_base 22: mod_base = OTHER; note = 2'-O-methylcytidine-3'-phosphorothioate
  modified_base 23: mod_base = OTHER; note = 2'-O-methyluridine-3'-phosphate
atcttttcaccttagtgtttgct

SEQ ID NO: 2018 - RNA, 21 nt, synthetic construct
  source 1..21: mol_type = other RNA; note = Description of Artificial Sequence: Synthetic oligonucleotide
  modified_base 1: mod_base = OTHER; note = 2'-O-methyladenosine-3'-phosphorothioate
  modified_base 2: mod_base = OTHER; note = 2'-O-methylguanosine-3'-phosphorothioate
  modified_base 3: mod_base = OTHER; note = 2'-O-methylguanosine-3'-phosphate
  modified_base 4: mod_base = OTHER; note = 2'-O-methyluridine-3'-phosphate
  modified_base 5: mod_base = OTHER; note = 2'-O-methyladenosine-3'-phosphate
  modified_base 6: mod_base = OTHER; note = 2'-O-methylguanosine-3'-phosphate
  modified_base 7: mod_base = OTHER; note = 2'-fluorocytidine-3'-phosphate
  modified_base 8: mod_base = OTHER; note = 2'-O-methyladenosine-3'-phosphate
  modified_base 9: mod_base = OTHER; note = 2'-fluorocytidine-3'-phosphate
  modified_base 10: mod_base = OTHER; note = 2'-fluorouridine-3'-phosphate
  modified_base 11: mod_base = OTHER; note = 2'-fluoroguanosine-3'-phosphate
  modified_base 12: mod_base = OTHER; note = 2'-O-methylguanosine-3'-phosphate
  modified_base 13: mod_base = OTHER; note = 2'-O-methyladenosine-3'-phosphate
  modified_base 14: mod_base = OTHER; note = 2'-O-methylguanosine-3'-phosphate
  modified_base 15: mod_base = OTHER; note = 2'-O-methyladenosine-3'-phosphate
  modified_base 16: mod_base = OTHER; note = 2'-O-methylguanosine-3'-phosphate
  modified_base 17: mod_base = OTHER; note = 2'-O-methyladenosine-3'-phosphate
  modified_base 18: mod_base = OTHER; note = 2'-O-methyladenosine-3'-phosphate
  modified_base 19: mod_base = OTHER; note = 2'-O-methyluridine-3'-phosphate
  modified_base 20: mod_base = OTHER; note = 2'-O-methyluridine-3'-phosphate
  modified_base 21: mod_base = OTHER; note = 2'-O-methylguanosine-3'-phosphate N-[tris(GalNAc-alkyl)-amidodecanoyl)]-4-hydroxyprolinol Hyp-(GalNAc-alkyl)3
aggtagcactggagagaattg

SEQ ID NO: 2019 - RNA, 23 nt, synthetic construct
  source 1..23: mol_type = other RNA; note = Description of Artificial Sequence: Synthetic oligonucleotide
  modified_base 1: mod_base = OTHER; note = 2'-O-methylcytidine-3'-phosphorothioate
  modified_base 2: mod_base = OTHER; note = 2'-fluoroadenosine-3'-phosphorothioate
  modified_base 3: mod_base = OTHER; note = 2'-O-methyladenosine-3'-phosphate
  modified_base 4: mod_base = OTHER; note = 2'-O-methyluridine-3'-phosphate
  modified_base 5: mod_base = OTHER; note = 2'-O-methyluridine-3'-phosphate
  modified_base 6: mod_base = OTHER; note = 2'-fluorocytidine-3'-phosphate
  modified_base 7: mod_base = OTHER; note = 2'-O-methyluridine-3'-phosphate
  modified_base 8: mod_base = OTHER; note = 2'-fluorocytidine-3'-phosphate
  modified_base 9: mod_base = OTHER; note = 2'-fluorouridine-3'-phosphate
  modified_base 10: mod_base = OTHER; note = 2'-O-methylcytidine-3'-phosphate
  modified_base 11: mod_base = OTHER; note = 2'-O-methylcytidine-3'-phosphate
  modified_base 12: mod_base = OTHER; note = 2'-O-methyladenosine-3'-phosphate
  modified_base 13: mod_base = OTHER; note = 2'-O-methylguanosine-3'-phosphate
  modified_base 14: mod_base = OTHER; note = 2'-fluorouridine-3'-phosphate
  modified_base 15: mod_base = OTHER; note = 2'-O-methylguanosine-3'-phosphate
  modified_base 16: mod_base = OTHER; note = 2'-fluorocytidine-3'-phosphate
  modified_base 17: mod_base = OTHER; note = 2'-O-methyluridine-3'-phosphate
  modified_base 18: mod_base = OTHER; note = 2'-O-methyladenosine-3'-phosphate
  modified_base 19: mod_base = OTHER; note = 2'-O-methylcytidine-3'-phosphate
  modified_base 20: mod_base = OTHER; note = 2'-O-methylcytidine-3'-phosphate
  modified_base 21: mod_base = OTHER; note = 2'-O-methyluridine-3'-phosphorothioate
  modified_base 22: mod_base = OTHER; note = 2'-O-methyluridine-3'-phosphorothioate
  modified_base 23: mod_base = OTHER; note = 2'-O-methylcytidine-3'-phosphate
caattctctccagtgctaccttc

SEQ ID NO: 2020 - RNA, 21 nt, synthetic construct
  source 1..21: mol_type = other RNA; note = Description of Artificial Sequence: Synthetic oligonucleotide
  modified_base 1: mod_base = OTHER; note = 2'-O-methylguanosine-3'-phosphorothioate
  modified_base 2: mod_base = OTHER; note = 2'-O-methylguanosine-3'-phosphorothioate
  modified_base 3: mod_base = OTHER; note = 2'-O-methyluridine-3'-phosphate
  modified_base 4: mod_base = OTHER; note = 2'-O-methyladenosine-3'-phosphate
  modified_base 5: mod_base = OTHER; note = 2'-O-methylguanosine-3'-phosphate
  modified_base 6: mod_base = OTHER; note = 2'-O-methylcytidine-3'-phosphate
  modified_base 7: mod_base = OTHER; note = 2'-fluoroadenosine-3'-phosphate
  modified_base 8: mod_base = OTHER; note = 2'-O-methylcytidine-3'-phosphate
  modified_base 9: mod_base = OTHER; note = 2'-fluorouridine-3'-phosphate
  modified_base 10: mod_base = OTHER; note = 2'-fluoroguanosine-3'-phosphate
  modified_base 11: mod_base = OTHER; note = 2'-fluoroguanosine-3'-phosphate
  modified_base 12: mod_base = OTHER; note = 2'-O-methyladenosine-3'-phosphate
  modified_base 13: mod_base = OTHER; note = 2'-O-methylguanosine-3'-phosphate
  modified_base 14: mod_base = OTHER; note = 2'-O-methyladenosine-3'-phosphate
  modified_base 15: mod_base = OTHER; note = 2'-O-methylguanosine-3'-phosphate
  modified_base 16: mod_base = OTHER; note = 2'-O-methyladenosine-3'-phosphate
  modified_base 17: mod_base = OTHER; note = 2'-O-methyladenosine-3'-phosphate
  modified_base 18: mod_base = OTHER; note = 2'-O-methyluridine-3'-phosphate
  modified_base 19: mod_base = OTHER; note = 2'-O-methyluridine-3'-phosphate
  modified_base 20: mod_base = OTHER; note = 2'-O-methylguanosine-3'-phosphate
  modified_base 21: mod_base = OTHER; note = 2'-O-methylguanosine-3'-phosphate N-[tris(GalNAc-alkyl)-amidodecanoyl)]-4-hydroxyprolinol Hyp-(GalNAc-alkyl)3
ggtagcactggagagaattgg

SEQ ID NO: 2021 - RNA, 23 nt, synthetic construct
  source 1..23: mol_type = other RNA; note = Description of Artificial Sequence: Synthetic oligonucleotide
  modified_base 1: mod_base = OTHER; note = 2'-O-methylcytidine-3'-phosphorothioate
  modified_base 2: mod_base = OTHER; note = 2'-fluorocytidine-3'-phosphorothioate
  modified_base 3: mod_base = OTHER; note = 2'-O-methyladenosine-3'-phosphate
  modified_base 4: mod_base = OTHER; note = 2'-O-methyladenosine-3'-phosphate
  modified_base 5: mod_base = OTHER; note = 2'-O-methyluridine-3'-phosphate
  modified_base 6: mod_base = OTHER; note = 2'-fluorouridine-3'-phosphate
  modified_base 7: mod_base = OTHER; note = 2'-O-methylcytidine-3'-phosphate
  modified_base 8: mod_base = OTHER; note = 2'-fluorouridine-3'-phosphate
  modified_base 9: mod_base = OTHER; note = 2'-fluorocytidine-3'-phosphate
  modified_base 10: mod_base = OTHER; note = 2'-O-methyluridine-3'-phosphate
  modified_base 11: mod_base = OTHER; note = 2'-O-methylcytidine-3'-phosphate
  modified_base 12: mod_base = OTHER; note = 2'-O-methylcytidine-3'-phosphate
  modified_base 13: mod_base = OTHER; note = 2'-O-methyladenosine-3'-phosphate
  modified_base 14: mod_base = OTHER; note = 2'-fluoroguanosine-3'-phosphate
  modified_base 15: mod_base = OTHER; note = 2'-O-methyluridine-3'-phosphate
  modified_base 16: mod_base = OTHER; note = 2'-fluoroguanosine-3'-phosphate
  modified_base 17: mod_base = OTHER; note = 2'-O-methylcytidine-3'-phosphate
  modified_base 18: mod_base = OTHER; note = 2'-O-methyluridine-3'-phosphate
  modified_base 19: mod_base = OTHER; note = 2'-O-methyladenosine-3'-phosphate
  modified_base 20: mod_base = OTHER; note = 2'-O-methylcytidine-3'-phosphate
  modified_base 21: mod_base = OTHER; note = 2'-O-methylcytidine-3'-phosphorothioate
  modified_base 22: mod_base = OTHER; note = 2'-O-methyluridine-3'-phosphorothioate
  modified_base 23: mod_base = OTHER; note = 2'-O-methyluridine-3'-phosphate
ccaattctctccagtgctacctt

SEQ ID NO: 2022 - RNA, 21 nt, synthetic construct
  source 1..21: mol_type = other RNA; note = Description of Artificial Sequence: Synthetic oligonucleotide
  modified_base 1: mod_base = OTHER; note = 2'-O-methylguanosine-3'-phosphorothioate
  modified_base 2: mod_base = OTHER; note = 2'-O-methyladenosine-3'-phosphorothioate
  modified_base 3: mod_base = OTHER; note = 2'-O-methylguanosine-3'-phosphate
  modified_base 4: mod_base = OTHER; note = 2'-O-methyladenosine-3'-phosphate
  modified_base 5: mod_base = OTHER; note = 2'-O-methyladenosine-3'-phosphate
  modified_base 6: mod_base = OTHER; note = 2'-O-methylguanosine-3'-phosphate
  modified_base 7: mod_base = OTHER; note = 2'-fluoroguanosine-3'-phosphate
  modified_base 8: mod_base = OTHER; note = 2'-O-methyluridine-3'-phosphate
  modified_base 9: mod_base = OTHER; note = 2'-fluoroadenosine-3'-phosphate
  modified_base 10: mod_base = OTHER; note = 2'-fluoroguanosine-3'-phosphate
  modified_base 11: mod_base = OTHER; note = 2'-fluorocytidine-3'-phosphate
  modified_base 12: mod_base = OTHER; note = 2'-O-methyladenosine-3'-phosphate
  modified_base 13: mod_base = OTHER; note = 2'-O-methylcytidine-3'-phosphate
  modified_base 14: mod_base = OTHER; note = 2'-O-methyluridine-3'-phosphate
  modified_base 15: mod_base = OTHER; note = 2'-O-methylguanosine-3'-phosphate
  modified_base 16: mod_base = OTHER; note = 2'-O-methylguanosine-3'-phosphate
  modified_base 17: mod_base = OTHER; note = 2'-O-methyladenosine-3'-phosphate
  modified_base 18: mod_base = OTHER; note = 2'-O-methylguanosine-3'-phosphate
  modified_base 19: mod_base = OTHER; note = 2'-O-methyladenosine-3'-phosphate
  modified_base 20: mod_base = OTHER; note = 2'-O-methylguanosine-3'-phosphate
  modified_base 21: mod_base = OTHER; note = 2'-O-methyladenosine-3'-phosphate N-[tris(GalNAc-alkyl)-amidodecanoyl)]-4-hydroxyprolinol Hyp-(GalNAc-alkyl)3
gagaaggtagcactggagaga

SEQ ID NO: 2023 - RNA, 23 nt, synthetic construct
  source 1..23: mol_type = other RNA; note = Description of Artificial Sequence: Synthetic oligonucleotide
  modified_base 1: mod_base = OTHER; note = 2'-O-methyluridine-3'-phosphorothioate
  modified_base 2: mod_base = OTHER; note = 2'-fluorocytidine-3'-phosphorothioate
  modified_base 3: mod_base = OTHER; note = 2'-O-methyluridine-3'-phosphate
  modified_base 4: mod_base = OTHER; note = 2'-O-methylcytidine-3'-phosphate
  modified_base 5: mod_base = OTHER; note = 2'-O-methyluridine-3'-phosphate
  modified_base 6: mod_base = OTHER; note = 2'-fluorocytidine-3'-phosphate
  modified_base 7: mod_base = OTHER; note = 2'-O-methylcytidine-3'-phosphate
  modified_base 8: mod_base = OTHER; note = 2'-fluoroadenosine-3'-phosphate
  modified_base 9: mod_base = OTHER; note = 2'-fluoroguanosine-3'-phosphate
  modified_base 10: mod_base = OTHER; note = 2'-O-methyluridine-3'-phosphate
  modified_base 11: mod_base = OTHER; note = 2'-O-methylguanosine-3'-phosphate
  modified_base 12: mod_base = OTHER; note = 2'-O-methylcytidine-3'-phosphate
  modified_base 13: mod_base = OTHER; note = 2'-O-methyluridine-3'-phosphate
  modified_base 14: mod_base = OTHER; note = 2'-fluoroadenosine-3'-phosphate
  modified_base 15: mod_base = OTHER; note = 2'-O-methylcytidine-3'-phosphate
  modified_base 16: mod_base = OTHER; note = 2'-fluorocytidine-3'-phosphate
  modified_base 17: mod_base = OTHER; note = 2'-O-methyluridine-3'-phosphate
  modified_base 18: mod_base = OTHER; note = 2'-O-methyluridine-3'-phosphate
  modified_base 19: mod_base = OTHER; note = 2'-O-methylcytidine-3'-phosphate
  modified_base 20: mod_base = OTHER; note = 2'-O-methyluridine-3'-phosphate
  modified_base 21: mod_base = OTHER; note = 2'-O-methylcytidine-3'-phosphorothioate
  modified_base 22: mod_base = OTHER; note = 2'-O-methyladenosine-3'-phosphorothioate
  modified_base 23: mod_base = OTHER; note = 2'-O-methyladenosine-3'-phosphate
tctctccagtgctaccttctcaa

SEQ ID NO: 2024 - RNA, 21 nt, synthetic construct
  source 1..21: mol_type = other RNA; note = Description of Artificial Sequence: Synthetic oligonucleotide
  modified_base 1: mod_base = OTHER; note = 2'-O-methyluridine-3'-phosphorothioate
  modified_base 2: mod_base = OTHER; note = 2'-O-methylguanosine-3'-phosphorothioate
  modified_base 3: mod_base = OTHER; note = 2'-O-methyladenosine-3'-phosphate
  modified_base 4: mod_base = OTHER; note = 2'-O-methylguanosine-3'-phosphate
  modified_base 5: mod_base = OTHER; note = 2'-O-methyladenosine-3'-phosphate
  modified_base 6: mod_base = OTHER; note = 2'-O-methyladenosine-3'-phosphate
  modified_base 7: mod_base = OTHER; note = 2'-fluoroguanosine-3'-phosphate
  modified_base 8: mod_base = OTHER; note = 2'-O-methylguanosine-3'-phosphate
  modified_base 9: mod_base = OTHER; note = 2'-fluorouridine-3'-phosphate
  modified_base 10: mod_base = OTHER; note = 2'-fluoroadenosine-3'-phosphate
  modified_base 11: mod_base = OTHER; note = 2'-fluoroguanosine-3'-phosphate
  modified_base 12: mod_base = OTHER; note = 2'-O-methylcytidine-3'-phosphate
  modified_base 13: mod_base = OTHER; note = 2'-O-methyladenosine-3'-phosphate
  modified_base 14: mod_base = OTHER; note = 2'-O-methylcytidine-3'-phosphate
  modified_base 15: mod_base = OTHER; note = 2'-O-methyluridine-3'-phosphate
  modified_base 16: mod_base = OTHER; note = 2'-O-methylguanosine-3'-phosphate
  modified_base 17: mod_base = OTHER; note = 2'-O-methylguanosine-3'-phosphate
  modified_base 18: mod_base = OTHER; note = 2'-O-methyladenosine-3'-phosphate
  modified_base 19: mod_base = OTHER; note = 2'-O-methylguanosine-3'-phosphate
  modified_base 20: mod_base = OTHER; note = 2'-O-methyladenosine-3'-phosphate
  modified_base 21: mod_base = OTHER; note = 2'-O-methylguanosine-3'-phosphate N-[tris(GalNAc-alkyl)-amidodecanoyl)]-4-hydroxyprolinol Hyp-(GalNAc-alkyl)3
tgagaaggtagcactggagag

SEQ ID NO: 2025 - RNA, 23 nt, synthetic construct
  source 1..23: mol_type = other RNA; note = Description of Artificial Sequence: Synthetic oligonucleotide
  modified_base 1: mod_base = OTHER; note = 2'-O-methylcytidine-3'-phosphorothioate
  modified_base 2: mod_base = OTHER; note = 2'-fluorouridine -3'-phosphorothioate
  modified_base 3: mod_base = OTHER; note = 2'-O-methylcytidine-3'-phosphate
  modified_base 4: mod_base = OTHER; note = 2'-O-methyluridine-3'-phosphate
  modified_base 5: mod_base = OTHER; note = 2'-O-methylcytidine-3'-phosphate
  modified_base 6: mod_base = OTHER; note = 2'-fluorocytidine-3'-phosphate
  modified_base 7: mod_base = OTHER; note = 2'-O-methyladenosine-3'-phosphate
  modified_base 8: mod_base = OTHER; note = 2'-fluoroguanosine-3'-phosphate
  modified_base 9: mod_base = OTHER; note = 2'-fluorouridine-3'-phosphate
  modified_base 10: mod_base = OTHER; note = 2'-O-methylguanosine-3'-phosphate
  modified_base 11: mod_base = OTHER; note = 2'-O-methylcytidine-3'-phosphate
  modified_base 12: mod_base = OTHER; note = 2'-O-methyluridine-3'-phosphate
  modified_base 13: mod_base = OTHER; note = 2'-O-methyladenosine-3'-phosphate
  modified_base 14: mod_base = OTHER; note = 2'-fluorocytidine-3'-phosphate
  modified_base 15: mod_base = OTHER; note = 2'-O-methylcytidine-3'-phosphate
  modified_base 16: mod_base = OTHER; note = 2'-fluorouridine-3'-phosphate
  modified_base 17: mod_base = OTHER; note = 2'-O-methyluridine-3'-phosphate
  modified_base 18: mod_base = OTHER; note = 2'-O-methylcytidine-3'-phosphate
  modified_base 19: mod_base = OTHER; note = 2'-O-methyluridine-3'-phosphate
  modified_base 20: mod_base = OTHER; note = 2'-O-methylcytidine-3'-phosphate
  modified_base 21: mod_base = OTHER; note = 2'-O-methyladenosine-3'-phosphorothioate
  modified_base 22: mod_base = OTHER; note = 2'-O-methyladenosine-3'-phosphorothioate
  modified_base 23: mod_base = OTHER; note = 2'-O-methyladenosine-3'-phosphate
ctctccagtgctaccttctcaaa

SEQ ID NO: 2026 - RNA, 21 nt, synthetic construct
  source 1..21: mol_type = other RNA; note = Description of Artificial Sequence: Synthetic oligonucleotide
  modified_base 1: mod_base = OTHER; note = 2'-O-methyladenosine-3'-phosphorothioate
  modified_base 2: mod_base = OTHER; note = 2'-O-methylguanosine-3'-phosphorothioate
  modified_base 3: mod_base = OTHER; note = 2'-O-methyluridine-3'-phosphate
  modified_base 4: mod_base = OTHER; note = 2'-O-methylguanosine-3'-phosphate
  modified_base 5: mod_base = OTHER; note = 2'-O-methylguanosine-3'-phosphate
  modified_base 6: mod_base = OTHER; note = 2'-O-methyladenosine-3'-phosphate
  modified_base 7: mod_base = OTHER; note = 2'-fluorocytidine-3'-phosphate
  modified_base 8: mod_base = OTHER; note = 2'-O-methyluridine-3'-phosphate
  modified_base 9: mod_base = OTHER; note = 2'-fluorouridine-3'-phosphate
  modified_base 10: mod_base = OTHER; note = 2'-fluoroguanosine-3'-phosphate
  modified_base 11: mod_base = OTHER; note = 2'-fluorocytidine-3'-phosphate
  modified_base 12: mod_base = OTHER; note = 2'-O-methyluridine-3'-phosphate
  modified_base 13: mod_base = OTHER; note = 2'-O-methylguanosine-3'-phosphate
  modified_base 14: mod_base = OTHER; note = 2'-O-methylcytidine-3'-phosphate
  modified_base 15: mod_base = OTHER; note = 2'-O-methyladenosine-3'-phosphate
  modified_base 16: mod_base = OTHER; note = 2'-O-methyluridine-3'-phosphate
  modified_base 17: mod_base = OTHER; note = 2'-O-methyladenosine-3'-phosphate
  modified_base 18: mod_base = OTHER; note = 2'-O-methyluridine-3'-phosphate
  modified_base 19: mod_base = OTHER; note = 2'-O-methylguanosine-3'-phosphate
  modified_base 20: mod_base = OTHER; note = 2'-O-methyluridine-3'-phosphate
  modified_base 21: mod_base = OTHER; note = 2'-O-methylguanosine-3'-phosphate N-[tris(GalNAc-alkyl)-amidodecanoyl)]-4-hydroxyprolinol Hyp-(GalNAc-alkyl)3
agtggacttgctgcatatgtg

SEQ ID NO: 2027 - RNA, 23 nt, synthetic construct
  source 1..23: mol_type = other RNA; note = Description of Artificial Sequence: Synthetic oligonucleotide
  modified_base 1: mod_base = OTHER; note = 2'-O-methylcytidine-3'-phosphorothioate
  modified_base 2: mod_base = OTHER; note = 2'-fluoroadenosine-3'-phosphorothioate
  modified_base 3: mod_base = OTHER; note = 2'-O-methylcytidine-3'-phosphate
  modified_base 4: mod_base = OTHER; note = 2'-O-methyladenosine-3'-phosphate
  modified_base 5: mod_base = OTHER; note = 2'-O-methyluridine-3'-phosphate
  modified_base 6: mod_base = OTHER; note = 2'-fluoroadenosine-3'-phosphate
  modified_base 7: mod_base = OTHER; note = 2'-O-methyluridine-3'-phosphate
  modified_base 8: mod_base = OTHER; note = 2'-fluoroguanosine-3'-phosphate
  modified_base 9: mod_base = OTHER; note = 2'-fluorocytidine-3'-phosphate
  modified_base 10: mod_base = OTHER; note = 2'-O-methyladenosine-3'-phosphate
  modified_base 11: mod_base = OTHER; note = 2'-O-methylguanosine-3'-phosphate
  modified_base 12: mod_base = OTHER; note = 2'-O-methylcytidine-3'-phosphate
  modified_base 13: mod_base = OTHER; note = 2'-O-methyladenosine-3'-phosphate
  modified_base 14: mod_base = OTHER; note = 2'-fluoroadenosine-3'-phosphate
  modified_base 15: mod_base = OTHER; note = 2'-O-methylguanosine-3'-phosphate
  modified_base 16: mod_base = OTHER; note = 2'-fluorouridine-3'-phosphate
  modified_base 17: mod_base = OTHER; note = 2'-O-methylcytidine-3'-phosphate
  modified_base 18: mod_base = OTHER; note = 2'-O-methylcytidine-3'-phosphate
  modified_base 19: mod_base = OTHER; note = 2'-O-methyladenosine-3'-phosphate
  modified_base 20: mod_base = OTHER; note = 2'-O-methylcytidine-3'-phosphate
  modified_base 21: mod_base = OTHER; note = 2'-O-methyluridine-3'-phosphorothioate
  modified_base 22: mod_base = OTHER; note = 2'-O-methylguanosine-3'-phosphorothioate
  modified_base 23: mod_base = OTHER; note = 2'-O-methyluridine-3'-phosphate
cacatatgcagcaagtccactgt

SEQ ID NO: 2028 - RNA, 21 nt, synthetic construct
  source 1..21: mol_type = other RNA; note = Description of Artificial Sequence: Synthetic oligonucleotide
  modified_base 1: mod_base = OTHER; note = 2'-O-methylguanosine-3'-phosphorothioate
  modified_base 2: mod_base = OTHER; note = 2'-O-methyluridine-3'-phosphorothioate
  modified_base 3: mod_base = OTHER; note = 2'-O-methylguanosine-3'-phosphate
  modified_base 4: mod_base = OTHER; note = 2'-O-methylguanosine-3'-phosphate
  modified_base 5: mod_base = OTHER; note = 2'-O-methyladenosine-3'-phosphate
  modified_base 6: mod_base = OTHER; note = 2'-O-methylcytidine-3'-phosphate
  modified_base 7: mod_base = OTHER; note = 2'-fluorouridine-3'-phosphate
  modified_base 8: mod_base = OTHER; note = 2'-O-methyluridine-3'-phosphate
  modified_base 9: mod_base = OTHER; note = 2'-fluoroguanosine-3'-phosphate
  modified_base 10: mod_base = OTHER; note = 2'-fluorocytidine-3'-phosphate
  modified_base 11: mod_base = OTHER; note = 2'-fluorouridine-3'-phosphate
  modified_base 12: mod_base = OTHER; note = 2'-O-methylguanosine-3'-phosphate
  modified_base 13: mod_base = OTHER; note = 2'-O-methylcytidine-3'-phosphate
  modified_base 14: mod_base = OTHER; note = 2'-O-methyladenosine-3'-phosphate
  modified_base 15: mod_base = OTHER; note = 2'-O-methyluridine-3'-phosphate
  modified_base 16: mod_base = OTHER; note = 2'-O-methyladenosine-3'-phosphate
  modified_base 17: mod_base = OTHER; note = 2'-O-methyluridine-3'-phosphate
  modified_base 18: mod_base = OTHER; note = 2'-O-methylguanosine-3'-phosphate
  modified_base 19: mod_base = OTHER; note = 2'-O-methyluridine-3'-phosphate
  modified_base 20: mod_base = OTHER; note = 2'-O-methylguanosine-3'-phosphate
  modified_base 21: mod_base = OTHER; note = 2'-O-methylguanosine-3'-phosphate N-[tris(GalNAc-alkyl)-amidodecanoyl)]-4-hydroxyprolinol Hyp-(GalNAc-alkyl)3
gtggacttgctgcatatgtgg

SEQ ID NO: 2029 - RNA, 23 nt, synthetic construct
  source 1..23: mol_type = other RNA; note = Description of Artificial Sequence: Synthetic oligonucleotide
  modified_base 1: mod_base = OTHER; note = 2'-O-methylcytidine-3'-phosphorothioate
  modified_base 2: mod_base = OTHER; note = 2'-fluorocytidine-3'-phosphorothioate
  modified_base 3: mod_base = OTHER; note = 2'-O-methyladenosine-3'-phosphate
  modified_base 4: mod_base = OTHER; note = 2'-O-methylcytidine-3'-phosphate
  modified_base 5: mod_base = OTHER; note = 2'-O-methyladenosine-3'-phosphate
  modified_base 6: mod_base = OTHER; note = 2'-fluorouridine-3'-phosphate
  modified_base 7: mod_base = OTHER; note = 2'-O-methyladenosine-3'-phosphate
  modified_base 8: mod_base = OTHER; note = 2'-fluorouridine-3'-phosphate
  modified_base 9: mod_base = OTHER; note = 2'-fluoroguanosine-3'-phosphate
  modified_base 10: mod_base = OTHER; note = 2'-O-methylcytidine-3'-phosphate
  modified_base 11: mod_base = OTHER; note = 2'-O-methyladenosine-3'-phosphate
  modified_base 12: mod_base = OTHER; note = 2'-O-methylguanosine-3'-phosphate
  modified_base 13: mod_base = OTHER; note = 2'-O-methylcytidine-3'-phosphate
  modified_base 14: mod_base = OTHER; note = 2'-fluoroadenosine-3'-phosphate
  modified_base 15: mod_base = OTHER; note = 2'-O-methyladenosine-3'-phosphate
  modified_base 16: mod_base = OTHER; note = 2'-fluoroguanosine-3'-phosphate
  modified_base 17: mod_base = OTHER; note = 2'-O-methyluridine-3'-phosphate
  modified_base 18: mod_base = OTHER; note = 2'-O-methylcytidine-3'-phosphate
  modified_base 19: mod_base = OTHER; note = 2'-O-methylcytidine-3'-phosphate
  modified_base 20: mod_base = OTHER; note = 2'-O-methyladenosine-3'-phosphate
  modified_base 21: mod_base = OTHER; note = 2'-O-methylcytidine-3'-phosphorothioate
  modified_base 22: mod_base = OTHER; note = 2'-O-methyluridine-3'-phosphorothioate
  modified_base 23: mod_base = OTHER; note = 2'-O-methylguanosine-3'-phosphate
ccacatatgcagcaagtccactg

SEQ ID NO: 2030 - RNA, 21 nt, synthetic construct
  source 1..21: mol_type = other RNA; note = Description of Artificial Sequence: Synthetic oligonucleotide
  modified_base 1: mod_base = OTHER; note = 2'-O-methylcytidine-3'-phosphorothioate
  modified_base 2: mod_base = OTHER; note = 2'-O-methylguanosine-3'-phosphorothioate
  modified_base 3: mod_base = OTHER; note = 2'-O-methyladenosine-3'-phosphate
  modified_base 4: mod_base = OTHER; note = 2'-O-methylcytidine-3'-phosphate
  modified_base 5: mod_base = OTHER; note = 2'-O-methyladenosine-3'-phosphate
  modified_base 6: mod_base = OTHER; note = 2'-O-methylguanosine-3'-phosphate
  modified_base 7: mod_base = OTHER; note = 2'-fluorouridine-3'-phosphate
  modified_base 8: mod_base = OTHER; note = 2'-O-methylguanosine-3'-phosphate
  modified_base 9: mod_base = OTHER; note = 2'-fluoroguanosine-3'-phosphate
  modified_base 10: mod_base = OTHER; note = 2'-fluoroadenosine-3'-phosphate
  modified_base 11: mod_base = OTHER; note = 2'-fluorocytidine-3'-phosphate
  modified_base 12: mod_base = OTHER; note = 2'-O-methyluridine-3'-phosphate
  modified_base 13: mod_base = OTHER; note = 2'-O-methyluridine-3'-phosphate
  modified_base 14: mod_base = OTHER; note = 2'-O-methylguanosine-3'-phosphate
  modified_base 15: mod_base = OTHER; note = 2'-O-methylcytidine-3'-phosphate
  modified_base 16: mod_base = OTHER; note = 2'-O-methyluridine-3'-phosphate
  modified_base 17: mod_base = OTHER; note = 2'-O-methylguanosine-3'-phosphate
  modified_base 18: mod_base = OTHER; note = 2'-O-methylcytidine-3'-phosphate
  modified_base 19: mod_base = OTHER; note = 2'-O-methyladenosine-3'-phosphate
  modified_base 20: mod_base = OTHER; note = 2'-O-methyluridine-3'-phosphate
  modified_base 21: mod_base = OTHER; note = 2'-O-methyladenosine-3'-phosphate N-[tris(GalNAc-alkyl)-amidodecanoyl)]-4-hydroxyprolinol Hyp-(GalNAc-alkyl)3
cgacagtggacttgctgcata

SEQ ID NO: 2031 - RNA, 23 nt, synthetic construct
  source 1..23: mol_type = other RNA; note = Description of Artificial Sequence: Synthetic oligonucleotide
  modified_base 1: mod_base = OTHER; note = 2'-O-methyluridine-3'-phosphorothioate
  modified_base 2: mod_base = OTHER; note = 2'-fluoroadenosine-3'-phosphorothioate
  modified_base 3: mod_base = OTHER; note = 2'-O-methyluridine-3'-phosphate
  modified_base 4: mod_base = OTHER; note = 2'-O-methylguanosine-3'-phosphate
  modified_base 5: mod_base = OTHER; note = 2'-O-methylcytidine-3'-phosphate
  modified_base 6: mod_base = OTHER; note = 2'-fluoroadenosine-3'-phosphate
  modified_base 7: mod_base = OTHER; note = 2'-O-methylguanosine-3'-phosphate
  modified_base 8: mod_base = OTHER; note = 2'-fluorocytidine-3'-phosphate
  modified_base 9: mod_base = OTHER; note = 2'-fluoroadenosine-3'-phosphate
  modified_base 10: mod_base = OTHER; note = 2'-O-methyladenosine-3'-phosphate
  modified_base 11: mod_base = OTHER; note = 2'-O-methylguanosine-3'-phosphate
  modified_base 12: mod_base = OTHER; note = 2'-O-methyluridine-3'-phosphate
  modified_base 13: mod_base = OTHER; note = 2'-O-methylcytidine-3'-phosphate
  modified_base 14: mod_base = OTHER; note = 2'-fluorocytidine-3'-phosphate
  modified_base 15: mod_base = OTHER; note = 2'-O-methyladenosine-3'-phosphate
  modified_base 16: mod_base = OTHER; note = 2'-fluorocytidine-3'-phosphate
  modified_base 17: mod_base = OTHER; note = 2'-O-methyluridine-3'-phosphate
  modified_base 18: mod_base = OTHER; note = 2'-O-methylguanosine-3'-phosphate
  modified_base 19: mod_base = OTHER; note = 2'-O-methyluridine-3'-phosphate
  modified_base 20: mod_base = OTHER; note = 2'-O-methylcytidine-3'-phosphate
  modified_base 21: mod_base = OTHER; note = 2'-O-methylguanosine-3'-phosphorothioate
  modified_base 22: mod_base = OTHER; note = 2'-O-methyluridine-3'-phosphorothioate
  modified_base 23: mod_base = OTHER; note = 2'-O-methylcytidine-3'-phosphate
tatgcagcaagtccactgtcgtc

SEQ ID NO: 2032 - RNA, 21 nt, synthetic construct
  source 1..21: mol_type = other RNA; note = Description of Artificial Sequence: Synthetic oligonucleotide
  modified_base 1: mod_base = OTHER; note = 2'-O-methyladenosine-3'-phosphorothioate
  modified_base 2: mod_base = OTHER; note = 2'-O-methylcytidine-3'-phosphorothioate
  modified_base 3: mod_base = OTHER; note = 2'-O-methylguanosine-3'-phosphate
  modified_base 4: mod_base = OTHER; note = 2'-O-methyladenosine-3'-phosphate
  modified_base 5: mod_base = OTHER; note = 2'-O-methylcytidine-3'-phosphate
  modified_base 6: mod_base = OTHER; note = 2'-O-methyladenosine-3'-phosphate
  modified_base 7: mod_base = OTHER; note = 2'-fluoroguanosine-3'-phosphate
  modified_base 8: mod_base = OTHER; note = 2'-O-methyluridine-3'-phosphate
  modified_base 9: mod_base = OTHER; note = 2'-fluoroguanosine-3'-phosphate
  modified_base 10: mod_base = OTHER; note = 2'-fluoroguanosine-3'-phosphate
  modified_base 11: mod_base = OTHER; note = 2'-fluoroadenosine-3'-phosphate
  modified_base 12: mod_base = OTHER; note = 2'-O-methylcytidine-3'-phosphate
  modified_base 13: mod_base = OTHER; note = 2'-O-methyluridine-3'-phosphate
  modified_base 14: mod_base = OTHER; note = 2'-O-methyluridine-3'-phosphate
  modified_base 15: mod_base = OTHER; note = 2'-O-methylguanosine-3'-phosphate
  modified_base 16: mod_base = OTHER; note = 2'-O-methylcytidine-3'-phosphate
  modified_base 17: mod_base = OTHER; note = 2'-O-methyluridine-3'-phosphate
  modified_base 18: mod_base = OTHER; note = 2'-O-methylguanosine-3'-phosphate
  modified_base 19: mod_base = OTHER; note = 2'-O-methylcytidine-3'-phosphate
  modified_base 20: mod_base = OTHER; note = 2'-O-methyladenosine-3'-phosphate
  modified_base 21: mod_base = OTHER; note = 2'-O-methyluridine-3'-phosphate N-[tris(GalNAc-alkyl)-amidodecanoyl)]-4-hydroxyprolinol Hyp-(GalNAc-alkyl)3
acgacagtggacttgctgcat

SEQ ID NO: 2033 - RNA, 23 nt, synthetic construct
  source 1..23: mol_type = other RNA; note = Description of Artificial Sequence: Synthetic oligonucleotide
  modified_base 1: mod_base = OTHER; note = 2'-O-methyladenosine-3'-phosphorothioate
  modified_base 2: mod_base = OTHER; note = 2'-fluorouridine -3'-phosphorothioate
  modified_base 3: mod_base = OTHER; note = 2'-O-methylguanosine-3'-phosphate
  modified_base 4: mod_base = OTHER; note = 2'-O-methylcytidine-3'-phosphate
  modified_base 5: mod_base = OTHER; note = 2'-O-methyladenosine-3'-phosphate
  modified_base 6: mod_base = OTHER; note = 2'-fluoroguanosine-3'-phosphate
  modified_base 7: mod_base = OTHER; note = 2'-O-methylcytidine-3'-phosphate
  modified_base 8: mod_base = OTHER; note = 2'-fluoroadenosine-3'-phosphate
  modified_base 9: mod_base = OTHER; note = 2'-fluoroadenosine-3'-phosphate
  modified_base 10: mod_base = OTHER; note = 2'-O-methylguanosine-3'-phosphate
  modified_base 11: mod_base = OTHER; note = 2'-O-methyluridine-3'-phosphate
  modified_base 12: mod_base = OTHER; note = 2'-O-methylcytidine-3'-phosphate
  modified_base 13: mod_base = OTHER; note = 2'-O-methylcytidine-3'-phosphate
  modified_base 14: mod_base = OTHER; note = 2'-fluoroadenosine-3'-phosphate
  modified_base 15: mod_base = OTHER; note = 2'-O-methylcytidine-3'-phosphate
  modified_base 16: mod_base = OTHER; note = 2'-fluorouridine-3'-phosphate
  modified_base 17: mod_base = OTHER; note = 2'-O-methylguanosine-3'-phosphate
  modified_base 18: mod_base = OTHER; note = 2'-O-methyluridine-3'-phosphate
  modified_base 19: mod_base = OTHER; note = 2'-O-methylcytidine-3'-phosphate
  modified_base 20: mod_base = OTHER; note = 2'-O-methylguanosine-3'-phosphate
  modified_base 21: mod_base = OTHER; note = 2'-O-methyluridine-3'-phosphorothioate
  modified_base 22: mod_base = OTHER; note = 2'-O-methylcytidine-3'-phosphorothioate
  modified_base 23: mod_base = OTHER; note = 2'-O-methyluridine-3'-phosphate
atgcagcaagtccactgtcgtct

SEQ ID NO: 2034 - RNA, 21 nt, synthetic construct
  source 1..21: mol_type = other RNA; note = Description of Artificial Sequence: Synthetic oligonucleotide
  modified_base 1: mod_base = OTHER; note = 2'-O-methyladenosine-3'-phosphorothioate
  modified_base 2: mod_base = OTHER; note = 2'-O-methyladenosine-3'-phosphorothioate
  modified_base 3: mod_base = OTHER; note = 2'-O-methylguanosine-3'-phosphate
  modified_base 4: mod_base = OTHER; note = 2'-O-methylguanosine-3'-phosphate
  modified_base 5: mod_base = OTHER; note = 2'-O-methyluridine-3'-phosphate
  modified_base 6: mod_base = OTHER; note = 2'-O-methylguanosine-3'-phosphate
  modified_base 7: mod_base = OTHER; note = 2'-fluorouridine-3'-phosphate
  modified_base 8: mod_base = OTHER; note = 2'-O-methyluridine-3'-phosphate
  modified_base 9: mod_base = OTHER; note = 2'-fluorocytidine-3'-phosphate
  modified_base 10: mod_base = OTHER; note = 2'-fluoroadenosine-3'-phosphate
  modified_base 11: mod_base = OTHER; note = 2'-fluoroadenosine-3'-phosphate
  modified_base 12: mod_base = OTHER; note = 2'-O-methylguanosine-3'-phosphate
  modified_base 13: mod_base = OTHER; note = 2'-O-methyladenosine-3'-phosphate
  modified_base 14: mod_base = OTHER; note = 2'-O-methyluridine-3'-phosphate
  modified_base 15: mod_base = OTHER; note = 2'-O-methylguanosine-3'-phosphate
  modified_base 16: mod_base = OTHER; note = 2'-O-methyluridine-3'-phosphate
  modified_base 17: mod_base = OTHER; note = 2'-O-methylcytidine-3'-phosphate
  modified_base 18: mod_base = OTHER; note = 2'-O-methylcytidine-3'-phosphate
  modified_base 19: mod_base = OTHER; note = 2'-O-methyluridine-3'-phosphate
  modified_base 20: mod_base = OTHER; note = 2'-O-methylcytidine-3'-phosphate
  modified_base 21: mod_base = OTHER; note = 2'-O-methylguanosine-3'-phosphate N-[tris(GalNAc-alkyl)-amidodecanoyl)]-4-hydroxyprolinol Hyp-(GalNAc-alkyl)3
aaggtgttcaagatgtcctcg

SEQ ID NO: 2035 - RNA, 23 nt, synthetic construct
  source 1..23: mol_type = other RNA; note = Description of Artificial Sequence: Synthetic oligonucleotide
  modified_base 1: mod_base = OTHER; note = 2'-O-methylcytidine-3'-phosphorothioate
  modified_base 2: mod_base = OTHER; note = 2'-fluoroguanosine-3'-phosphorothioate
  modified_base 3: mod_base = OTHER; note = 2'-O-methyladenosine-3'-phosphate
  modified_base 4: mod_base = OTHER; note = 2'-O-methylguanosine-3'-phosphate
  modified_base 5: mod_base = OTHER; note = 2'-O-methylguanosine-3'-phosphate
  modified_base 6: mod_base = OTHER; note = 2'-fluoroadenosine-3'-phosphate
  modified_base 7: mod_base = OTHER; note = 2'-O-methylcytidine-3'-phosphate
  modified_base 8: mod_base = OTHER; note = 2'-fluoroadenosine-3'-phosphate
  modified_base 9: mod_base = OTHER; note = 2'-fluorouridine-3'-phosphate
  modified_base 10: mod_base = OTHER; note = 2'-O-methylcytidine-3'-phosphate
  modified_base 11: mod_base = OTHER; note = 2'-O-methyluridine-3'-phosphate
  modified_base 12: mod_base = OTHER; note = 2'-O-methyluridine-3'-phosphate
  modified_base 13: mod_base = OTHER; note = 2'-O-methylguanosine-3'-phosphate
  modified_base 14: mod_base = OTHER; note = 2'-fluoroadenosine-3'-phosphate
  modified_base 15: mod_base = OTHER; note = 2'-O-methyladenosine-3'-phosphate
  modified_base 16: mod_base = OTHER; note = 2'-fluorocytidine-3'-phosphate
  modified_base 17: mod_base = OTHER; note = 2'-O-methyladenosine-3'-phosphate
  modified_base 18: mod_base = OTHER; note = 2'-O-methylcytidine-3'-phosphate
  modified_base 19: mod_base = OTHER; note = 2'-O-methylcytidine-3'-phosphate
  modified_base 20: mod_base = OTHER; note = 2'-O-methyluridine-3'-phosphate
  modified_base 21: mod_base = OTHER; note = 2'-O-methyluridine-3'-phosphorothioate
  modified_base 22: mod_base = OTHER; note = 2'-O-methyluridine-3'-phosphorothioate
  modified_base 23: mod_base = OTHER; note = 2'-O-methylcytidine-3'-phosphate
cgaggacatcttgaacacctttc

SEQ ID NO: 2036 - RNA, 21 nt, synthetic construct
  source 1..21: mol_type = other RNA; note = Description of Artificial Sequence: Synthetic oligonucleotide
  modified_base 1: mod_base = OTHER; note = 2'-O-methyladenosine-3'-phosphorothioate
  modified_base 2: mod_base = OTHER; note = 2'-O-methylguanosine-3'-phosphorothioate
  modified_base 3: mod_base = OTHER; note = 2'-O-methylguanosine-3'-phosphate
  modified_base 4: mod_base = OTHER; note = 2'-O-methyluridine-3'-phosphate
  modified_base 5: mod_base = OTHER; note = 2'-O-methylguanosine-3'-phosphate
  modified_base 6: mod_base = OTHER; note = 2'-O-methyluridine-3'-phosphate
  modified_base 7: mod_base = OTHER; note = 2'-fluorouridine-3'-phosphate
  modified_base 8: mod_base = OTHER; note = 2'-O-methylcytidine-3'-phosphate
  modified_base 9: mod_base = OTHER; note = 2'-fluoroadenosine-3'-phosphate
  modified_base 10: mod_base = OTHER; note = 2'-fluoroadenosine-3'-phosphate
  modified_base 11: mod_base = OTHER; note = 2'-fluoroguanosine-3'-phosphate
  modified_base 12: mod_base = OTHER; note = 2'-O-methyladenosine-3'-phosphate
  modified_base 13: mod_base = OTHER; note = 2'-O-methyluridine-3'-phosphate
  modified_base 14: mod_base = OTHER; note = 2'-O-methylguanosine-3'-phosphate
  modified_base 15: mod_base = OTHER; note = 2'-O-methyluridine-3'-phosphate
  modified_base 16: mod_base = OTHER; note = 2'-O-methylcytidine-3'-phosphate
  modified_base 17: mod_base = OTHER; note = 2'-O-methylcytidine-3'-phosphate
  modified_base 18: mod_base = OTHER; note = 2'-O-methyluridine-3'-phosphate
  modified_base 19: mod_base = OTHER; note = 2'-O-methylcytidine-3'-phosphate
  modified_base 20: mod_base = OTHER; note = 2'-O-methylguanosine-3'-phosphate
  modified_base 21: mod_base = OTHER; note = 2'-O-methyladenosine-3'-phosphate N-[tris(GalNAc-alkyl)-amidodecanoyl)]-4-hydroxyprolinol Hyp-(GalNAc-alkyl)3
aggtgttcaagatgtcctcga

SEQ ID NO: 2037 - RNA, 23 nt, synthetic construct
  source 1..23: mol_type = other RNA; note = Description of Artificial Sequence: Synthetic oligonucleotide
  modified_base 1: mod_base = OTHER; note = 2'-O-methyluridine-3'-phosphorothioate
  modified_base 2: mod_base = OTHER; note = 2'-fluorocytidine-3'-phosphorothioate
  modified_base 3: mod_base = OTHER; note = 2'-O-methylguanosine-3'-phosphate
  modified_base 4: mod_base = OTHER; note = 2'-O-methyladenosine-3'-phosphate
  modified_base 5: mod_base = OTHER; note = 2'-O-methylguanosine-3'-phosphate
  modified_base 6: mod_base = OTHER; note = 2'-fluoroguanosine-3'-phosphate
  modified_base 7: mod_base = OTHER; note = 2'-O-methyladenosine-3'-phosphate
  modified_base 8: mod_base = OTHER; note = 2'-fluorocytidine-3'-phosphate
  modified_base 9: mod_base = OTHER; note = 2'-fluoroadenosine-3'-phosphate
  modified_base 10: mod_base = OTHER; note = 2'-O-methyluridine-3'-phosphate
  modified_base 11: mod_base = OTHER; note = 2'-O-methylcytidine-3'-phosphate
  modified_base 12: mod_base = OTHER; note = 2'-O-methyluridine-3'-phosphate
  modified_base 13: mod_base = OTHER; note = 2'-O-methyluridine-3'-phosphate
  modified_base 14: mod_base = OTHER; note = 2'-fluoroguanosine-3'-phosphate
  modified_base 15: mod_base = OTHER; note = 2'-O-methyladenosine-3'-phosphate
  modified_base 16: mod_base = OTHER; note = 2'-fluoroadenosine-3'-phosphate
  modified_base 17: mod_base = OTHER; note = 2'-O-methylcytidine-3'-phosphate
  modified_base 18: mod_base = OTHER; note = 2'-O-methyladenosine-3'-phosphate
  modified_base 19: mod_base = OTHER; note = 2'-O-methylcytidine-3'-phosphate
  modified_base 20: mod_base = OTHER; note = 2'-O-methylcytidine-3'-phosphate
  modified_base 21: mod_base = OTHER; note = 2'-O-methyluridine-3'-phosphorothioate
  modified_base 22: mod_base = OTHER; note = 2'-O-methyluridine-3'-phosphorothioate
  modified_base 23: mod_base = OTHER; note = 2'-O-methyluridine-3'-phosphate
tcgaggacatcttgaacaccttt

SEQ ID NO: 2038 - RNA, 21 nt, synthetic construct
  source 1..21: mol_type = other RNA; note = Description of Artificial Sequence: Synthetic oligonucleotide
  modified_base 1: mod_base = OTHER; note = 2'-O-methylguanosine-3'-phosphorothioate
  modified_base 2: mod_base = OTHER; note = 2'-O-methyladenosine-3'-phosphorothioate
  modified_base 3: mod_base = OTHER; note = 2'-O-methylguanosine-3'-phosphate
  modified_base 4: mod_base = OTHER; note = 2'-O-methyladenosine-3'-phosphate
  modified_base 5: mod_base = OTHER; note = 2'-O-methyladenosine-3'-phosphate
  modified_base 6: mod_base = OTHER; note = 2'-O-methyladenosine-3'-phosphate
  modified_base 7: mod_base = OTHER; note = 2'-fluoroguanosine-3'-phosphate
  modified_base 8: mod_base = OTHER; note = 2'-O-methylguanosine-3'-phosphate
  modified_base 9: mod_base = OTHER; note = 2'-fluorouridine-3'-phosphate
  modified_base 10: mod_base = OTHER; note = 2'-fluoroguanosine-3'-phosphate
  modified_base 11: mod_base = OTHER; note = 2'-fluorouridine-3'-phosphate
  modified_base 12: mod_base = OTHER; note = 2'-O-methyluridine-3'-phosphate
  modified_base 13: mod_base = OTHER; note = 2'-O-methylcytidine-3'-phosphate
  modified_base 14: mod_base = OTHER; note = 2'-O-methyladenosine-3'-phosphate
  modified_base 15: mod_base = OTHER; note = 2'-O-methyladenosine-3'-phosphate
  modified_base 16: mod_base = OTHER; note = 2'-O-methylguanosine-3'-phosphate
  modified_base 17: mod_base = OTHER; note = 2'-O-methyladenosine-3'-phosphate
  modified_base 18: mod_base = OTHER; note = 2'-O-methyluridine-3'-phosphate
  modified_base 19: mod_base = OTHER; note = 2'-O-methylguanosine-3'-phosphate
  modified_base 20: mod_base = OTHER; note = 2'-O-methyluridine-3'-phosphate
  modified_base 21: mod_base = OTHER; note = 2'-O-methylcytidine-3'-phosphate N-[tris(GalNAc-alkyl)-amidodecanoyl)]-4-hydroxyprolinol Hyp-(GalNAc-alkyl)3
gagaaaggtgttcaagatgtc

SEQ ID NO: 2039 - RNA, 23 nt, synthetic construct
  source 1..23: mol_type = other RNA; note = Description of Artificial Sequence: Synthetic oligonucleotide
  modified_base 1: mod_base = OTHER; note = 2'-O-methylguanosine-3'-phosphorothioate
  modified_base 2: mod_base = OTHER; note = 2'-fluoroadenosine-3'-phosphorothioate
  modified_base 3: mod_base = OTHER; note = 2'-O-methylcytidine-3'-phosphate
  modified_base 4: mod_base = OTHER; note = 2'-O-methyladenosine-3'-phosphate
  modified_base 5: mod_base = OTHER; note = 2'-O-methyluridine-3'-phosphate
  modified_base 6: mod_base = OTHER; note = 2'-fluorocytidine-3'-phosphate
  modified_base 7: mod_base = OTHER; note = 2'-O-methyluridine-3'-phosphate
  modified_base 8: mod_base = OTHER; note = 2'-fluorouridine-3'-phosphate
  modified_base 9: mod_base = OTHER; note = 2'-fluoroguanosine-3'-phosphate
  modified_base 10: mod_base = OTHER; note = 2'-O-methyladenosine-3'-phosphate
  modified_base 11: mod_base = OTHER; note = 2'-O-methyladenosine-3'-phosphate
  modified_base 12: mod_base = OTHER; note = 2'-O-methylcytidine-3'-phosphate
  modified_base 13: mod_base = OTHER; note = 2'-O-methyladenosine-3'-phosphate
  modified_base 14: mod_base = OTHER; note = 2'-fluorocytidine-3'-phosphate
  modified_base 15: mod_base = OTHER; note = 2'-O-methylcytidine-3'-phosphate
  modified_base 16: mod_base = OTHER; note = 2'-fluorouridine-3'-phosphate
  modified_base 17: mod_base = OTHER; note = 2'-O-methyluridine-3'-phosphate
  modified_base 18: mod_base = OTHER; note = 2'-O-methyluridine-3'-phosphate
  modified_base 19: mod_base = OTHER; note = 2'-O-methylcytidine-3'-phosphate
  modified_base 20: mod_base = OTHER; note = 2'-O-methyluridine-3'-phosphate
  modified_base 21: mod_base = OTHER; note = 2'-O-methylcytidine-3'-phosphorothioate
  modified_base 22: mod_base = OTHER; note = 2'-O-methylcytidine-3'-phosphorothioate
  modified_base 23: mod_base = OTHER; note = 2'-O-methylcytidine-3'-phosphate
gacatcttgaacacctttctccc

SEQ ID NO: 2040 - RNA, 21 nt, synthetic construct
  source 1..21: mol_type = other RNA; note = Description of Artificial Sequence: Synthetic oligonucleotide
  modified_base 1: mod_base = OTHER; note = 2'-O-methylguanosine-3'-phosphorothioate
  modified_base 2: mod_base = OTHER; note = 2'-O-methylguanosine-3'-phosphorothioate
  modified_base 3: mod_base = OTHER; note = 2'-O-methyladenosine-3'-phosphate
  modified_base 4: mod_base = OTHER; note = 2'-O-methylguanosine-3'-phosphate
  modified_base 5: mod_base = OTHER; note = 2'-O-methyladenosine-3'-phosphate
  modified_base 6: mod_base = OTHER; note = 2'-O-methyladenosine-3'-phosphate
  modified_base 7: mod_base = OTHER; note = 2'-fluoroadenosine-3'-phosphate
  modified_base 8: mod_base = OTHER; note = 2'-O-methylguanosine-3'-phosphate
  modified_base 9: mod_base = OTHER; note = 2'-fluoroguanosine-3'-phosphate
  modified_base 10: mod_base = OTHER; note = 2'-fluorouridine-3'-phosphate
  modified_base 11: mod_base = OTHER; note = 2'-fluoroguanosine-3'-phosphate
  modified_base 12: mod_base = OTHER; note = 2'-O-methyluridine-3'-phosphate
  modified_base 13: mod_base = OTHER; note = 2'-O-methyluridine-3'-phosphate
  modified_base 14: mod_base = OTHER; note = 2'-O-methylcytidine-3'-phosphate
  modified_base 15: mod_base = OTHER; note = 2'-O-methyladenosine-3'-phosphate
  modified_base 16: mod_base = OTHER; note = 2'-O-methyladenosine-3'-phosphate
  modified_base 17: mod_base = OTHER; note = 2'-O-methylguanosine-3'-phosphate
  modified_base 18: mod_base = OTHER; note = 2'-O-methyladenosine-3'-phosphate
  modified_base 19: mod_base = OTHER; note = 2'-O-methyluridine-3'-phosphate
  modified_base 20: mod_base = OTHER; note = 2'-O-methylguanosine-3'-phosphate
  modified_base 21: mod_base = OTHER; note = 2'-O-methyluridine-3'-phosphate N-[tris(GalNAc-alkyl)-amidodecanoyl)]-4-hydroxyprolinol Hyp-(GalNAc-alkyl)3
ggagaaaggtgttcaagatgt

SEQ ID NO: 2041 - RNA, 23 nt, synthetic construct
  source 1..23: mol_type = other RNA; note = Description of Artificial Sequence: Synthetic oligonucleotide
  modified_base 1: mod_base = OTHER; note = 2'-O-methyladenosine-3'-phosphorothioate
  modified_base 2: mod_base = OTHER; note = 2'-fluorocytidine-3'-phosphorothioate
  modified_base 3: mod_base = OTHER; note = 2'-O-methyladenosine-3'-phosphate
  modified_base 4: mod_base = OTHER; note = 2'-O-methyluridine-3'-phosphate
  modified_base 5: mod_base = OTHER; note = 2'-O-methylcytidine-3'-phosphate
  modified_base 6: mod_base = OTHER; note = 2'-fluorouridine-3'-phosphate
  modified_base 7: mod_base = OTHER; note = 2'-O-methyluridine-3'-phosphate
  modified_base 8: mod_base = OTHER; note = 2'-fluoroguanosine-3'-phosphate
  modified_base 9: mod_base = OTHER; note = 2'-fluoroadenosine-3'-phosphate
  modified_base 10: mod_base = OTHER; note = 2'-O-methyladenosine-3'-phosphate
  modified_base 11: mod_base = OTHER; note = 2'-O-methylcytidine-3'-phosphate
  modified_base 12: mod_base = OTHER; note = 2'-O-methyladenosine-3'-phosphate
  modified_base 13: mod_base = OTHER; note = 2'-O-methylcytidine-3'-phosphate
  modified_base 14: mod_base = OTHER; note = 2'-fluorocytidine-3'-phosphate
  modified_base 15: mod_base = OTHER; note = 2'-O-methyluridine-3'-phosphate
  modified_base 16: mod_base = OTHER; note = 2'-fluorouridine-3'-phosphate
  modified_base 17: mod_base = OTHER; note = 2'-O-methyluridine-3'-phosphate
  modified_base 18: mod_base = OTHER; note = 2'-O-methylcytidine-3'-phosphate
  modified_base 19: mod_base = OTHER; note = 2'-O-methyluridine-3'-phosphate
  modified_base 20: mod_base = OTHER; note = 2'-O-methylcytidine-3'-phosphate
  modified_base 21: mod_base = OTHER; note = 2'-O-methylcytidine-3'-phosphorothioate
  modified_base 22: mod_base = OTHER; note = 2'-O-methylcytidine-3'-phosphorothioate
  modified_base 23: mod_base = OTHER; note = 2'-O-methylcytidine-3'-phosphate
acatcttgaacacctttctcccc

SEQ ID NO: 2042 - RNA, 21 nt, synthetic construct
  source 1..21: mol_type = other RNA; note = Description of Artificial Sequence: Synthetic oligonucleotide
  modified_base 1: mod_base = OTHER; note = 2'-O-methyladenosine-3'-phosphorothioate
  modified_base 2: mod_base = OTHER; note = 2'-O-methyladenosine-3'-phosphorothioate
  modified_base 3: mod_base = OTHER; note = 2'-O-methylcytidine-3'-phosphate
  modified_base 4: mod_base = OTHER; note = 2'-O-methylcytidine-3'-phosphate
  modified_base 5: mod_base = OTHER; note = 2'-O-methylguanosine-3'-phosphate
  modified_base 6: mod_base = OTHER; note = 2'-O-methyluridine-3'-phosphate
  modified_base 7: mod_base = OTHER; note = 2'-fluorocytidine-3'-phosphate
  modified_base 8: mod_base = OTHER; note = 2'-O-methyluridine-3'-phosphate
  modified_base 9: mod_base = OTHER; note = 2'-fluoroguanosine-3'-phosphate
  modified_base 10: mod_base = OTHER; note = 2'-fluoroguanosine-3'-phosphate
  modified_base 11: mod_base = OTHER; note = 2'-fluoroadenosine-3'-phosphate
  modified_base 12: mod_base = OTHER; note = 2'-O-methyluridine-3'-phosphate
  modified_base 13: mod_base = OTHER; note = 2'-O-methylguanosine-3'-phosphate
  modified_base 14: mod_base = OTHER; note = 2'-O-methyladenosine-3'-phosphate
  modified_base 15: mod_base = OTHER; note = 2'-O-methyluridine-3'-phosphate
  modified_base 16: mod_base = OTHER; note = 2'-O-methylguanosine-3'-phosphate
  modified_base 17: mod_base = OTHER; note = 2'-O-methyluridine-3'-phosphate
  modified_base 18: mod_base = OTHER; note = 2'-O-methylguanosine-3'-phosphate
  modified_base 19: mod_base = OTHER; note = 2'-O-methylcytidine-3'-phosphate
  modified_base 20: mod_base = OTHER; note = 2'-O-methylguanosine-3'-phosphate
  modified_base 21: mod_base = OTHER; note = 2'-O-methyluridine-3'-phosphate N-[tris(GalNAc-alkyl)-amidodecanoyl)]-4-hydroxyprolinol Hyp-(GalNAc-alkyl)3
aaccgtctggatgatgtgcgt

SEQ ID NO: 2043 - RNA, 23 nt, synthetic construct
  source 1..23: mol_type = other RNA; note = Description of Artificial Sequence: Synthetic oligonucleotide
  modified_base 1: mod_base = OTHER; note = 2'-O-methyladenosine-3'-phosphorothioate
  modified_base 2: mod_base = OTHER; note = 2'-fluorocytidine-3'-phosphorothioate
  modified_base 3: mod_base = OTHER; note = 2'-O-methylguanosine-3'-phosphate
  modified_base 4: mod_base = OTHER; note = 2'-O-methylcytidine-3'-phosphate
  modified_base 5: mod_base = OTHER; note = 2'-O-methyladenosine-3'-phosphate
  modified_base 6: mod_base = OTHER; note = 2'-fluorocytidine-3'-phosphate
  modified_base 7: mod_base = OTHER; note = 2'-O-methyladenosine-3'-phosphate
  modified_base 8: mod_base = OTHER; note = 2'-fluorouridine-3'-phosphate
  modified_base 9: mod_base = OTHER; note = 2'-fluorocytidine-3'-phosphate
  modified_base 10: mod_base = OTHER; note = 2'-O-methyladenosine-3'-phosphate
  modified_base 11: mod_base = OTHER; note = 2'-O-methyluridine-3'-phosphate
  modified_base 12: mod_base = OTHER; note = 2'-O-methylcytidine-3'-phosphate
  modified_base 13: mod_base = OTHER; note = 2'-O-methylcytidine-3'-phosphate
  modified_base 14: mod_base = OTHER; note = 2'-fluoroadenosine-3'-phosphate
  modified_base 15: mod_base = OTHER; note = 2'-O-methylguanosine-3'-phosphate
  modified_base 16: mod_base = OTHER; note = 2'-fluoroadenosine-3'-phosphate
  modified_base 17: mod_base = OTHER; note = 2'-O-methylcytidine-3'-phosphate
  modified_base 18: mod_base = OTHER; note = 2'-O-methylguanosine-3'-phosphate
  modified_base 19: mod_base = OTHER; note = 2'-O-methylguanosine-3'-phosphate
  modified_base 20: mod_base = OTHER; note = 2'-O-methyluridine-3'-phosphate
  modified_base 21: mod_base = OTHER; note = 2'-O-methyluridine-3'-phosphorothioate
  modified_base 22: mod_base = OTHER; note = 2'-O-methylguanosine-3'-phosphorothioate
  modified_base 23: mod_base = OTHER; note = 2'-O-methylcytidine-3'-phosphate
acgcacatcatccagacggttgc

SEQ ID NO: 2044 - RNA, 21 nt, synthetic construct
  source 1..21: mol_type = other RNA; note = Description of Artificial Sequence: Synthetic oligonucleotide
  modified_base 1: mod_base = OTHER; note = 2'-O-methyladenosine-3'-phosphorothioate
  modified_base 2: mod_base = OTHER; note = 2'-O-methylcytidine-3'-phosphorothioate
  modified_base 3: mod_base = OTHER; note = 2'-O-methylcytidine-3'-phosphate
  modified_base 4: mod_base = OTHER; note = 2'-O-methylguanosine-3'-phosphate
  modified_base 5: mod_base = OTHER; note = 2'-O-methyluridine-3'-phosphate
  modified_base 6: mod_base = OTHER; note = 2'-O-methylcytidine-3'-phosphate
  modified_base 7: mod_base = OTHER; note = 2'-fluorouridine-3'-phosphate
  modified_base 8: mod_base = OTHER; note = 2'-O-methylguanosine-3'-phosphate
  modified_base 9: mod_base = OTHER; note = 2'-fluoroguanosine-3'-phosphate
  modified_base 10: mod_base = OTHER; note = 2'-fluoroadenosine-3'-phosphate
  modified_base 11: mod_base = OTHER; note = 2'-fluorouridine-3'-phosphate
  modified_base 12: mod_base = OTHER; note = 2'-O-methylguanosine-3'-phosphate
  modified_base 13: mod_base = OTHER; note = 2'-O-methyladenosine-3'-phosphate
  modified_base 14: mod_base = OTHER; note = 2'-O-methyluridine-3'-phosphate
  modified_base 15: mod_base = OTHER; note = 2'-O-methylguanosine-3'-phosphate
  modified_base 16: mod_base = OTHER; note = 2'-O-methyluridine-3'-phosphate
  modified_base 17: mod_base = OTHER; note = 2'-O-methylguanosine-3'-phosphate
  modified_base 18: mod_base = OTHER; note = 2'-O-methylcytidine-3'-phosphate
  modified_base 19: mod_base = OTHER; note = 2'-O-methylguanosine-3'-phosphate
  modified_base 20: mod_base = OTHER; note = 2'-O-methyluridine-3'-phosphate
  modified_base 21: mod_base = OTHER; note = 2'-O-methyladenosine-3'-phosphate N-[tris(GalNAc-alkyl)-amidodecanoyl)]-4-hydroxyprolinol Hyp-(GalNAc-alkyl)3
accgtctggatgatgtgcgta

SEQ ID NO: 2045 - RNA, 23 nt, synthetic construct
  source 1..23: mol_type = other RNA; note = Description of Artificial Sequence: Synthetic oligonucleotide
  modified_base 1: mod_base = OTHER; note = 2'-O-methyluridine-3'-phosphorothioate
  modified_base 2: mod_base = OTHER; note = 2'-fluoroadenosine-3'-phosphorothioate
  modified_base 3: mod_base = OTHER; note = 2'-O-methylcytidine-3'-phosphate
  modified_base 4: mod_base = OTHER; note = 2'-O-methylguanosine-3'-phosphate
  modified_base 5: mod_base = OTHER; note = 2'-O-methylcytidine-3'-phosphate
  modified_base 6: mod_base = OTHER; note = 2'-fluoroadenosine-3'-phosphate
  modified_base 7: mod_base = OTHER; note = 2'-O-methylcytidine-3'-phosphate
  modified_base 8: mod_base = OTHER; note = 2'-fluoroadenosine-3'-phosphate
  modified_base 9: mod_base = OTHER; note = 2'-fluorouridine-3'-phosphate
  modified_base 10: mod_base = OTHER; note = 2'-O-methylcytidine-3'-phosphate
  modified_base 11: mod_base = OTHER; note = 2'-O-methyladenosine-3'-phosphate
  modified_base 12: mod_base = OTHER; note = 2'-O-methyluridine-3'-phosphate
  modified_base 13: mod_base = OTHER; note = 2'-O-methylcytidine-3'-phosphate
  modified_base 14: mod_base = OTHER; note = 2'-fluorocytidine-3'-phosphate
  modified_base 15: mod_base = OTHER; note = 2'-O-methyladenosine-3'-phosphate
  modified_base 16: mod_base = OTHER; note = 2'-fluoroguanosine-3'-phosphate
  modified_base 17: mod_base = OTHER; note = 2'-O-methyladenosine-3'-phosphate
  modified_base 18: mod_base = OTHER; note = 2'-O-methylcytidine-3'-phosphate
  modified_base 19: mod_base = OTHER; note = 2'-O-methylguanosine-3'-phosphate
  modified_base 20: mod_base = OTHER; note = 2'-O-methylguanosine-3'-phosphate
  modified_base 21: mod_base = OTHER; note = 2'-O-methyluridine-3'-phosphorothioate
  modified_base 22: mod_base = OTHER; note = 2'-O-methyluridine-3'-phosphorothioate
  modified_base 23: mod_base = OTHER; note = 2'-O-methylguanosine-3'-phosphate
tacgcacatcatccagacggttg

SEQ ID NO: 2046 - RNA, 21 nt, synthetic construct
  source 1..21: mol_type = other RNA; note = Description of Artificial Sequence: Synthetic oligonucleotide
  modified_base 1: mod_base = OTHER; note = 2'-O-methylguanosine-3'-phosphorothioate
  modified_base 2: mod_base = OTHER; note = 2'-O-methylguanosine-3'-phosphorothioate
  modified_base 3: mod_base = OTHER; note = 2'-O-methylguanosine-3'-phosphate
  modified_base 4: mod_base = OTHER; note = 2'-O-methylcytidine-3'-phosphate
  modified_base 5: mod_base = OTHER; note = 2'-O-methyladenosine-3'-phosphate
  modified_base 6: mod_base = OTHER; note = 2'-O-methyladenosine-3'-phosphate
  modified_base 7: mod_base = OTHER; note = 2'-fluorocytidine-3'-phosphate
  modified_base 8: mod_base = OTHER; note = 2'-O-methylcytidine-3'-phosphate
  modified_base 9: mod_base = OTHER; note = 2'-fluoroguanosine-3'-phosphate
  modified_base 10: mod_base = OTHER; note = 2'-fluorouridine-3'-phosphate
  modified_base 11: mod_base = OTHER; note = 2'-fluorocytidine-3'-phosphate
  modified_base 12: mod_base = OTHER; note = 2'-O-methyluridine-3'-phosphate
  modified_base 13: mod_base = OTHER; note = 2'-O-methylguanosine-3'-phosphate
  modified_base 14: mod_base = OTHER; note = 2'-O-methylguanosine-3'-phosphate
  modified_base 15: mod_base = OTHER; note = 2'-O-methyladenosine-3'-phosphate
  modified_base 16: mod_base = OTHER; note = 2'-O-methyluridine-3'-phosphate
  modified_base 17: mod_base = OTHER; note = 2'-O-methylguanosine-3'-phosphate
  modified_base 18: mod_base = OTHER; note = 2'-O-methyladenosine-3'-phosphate
  modified_base 19: mod_base = OTHER; note = 2'-O-methyluridine-3'-phosphate
  modified_base 20: mod_base = OTHER; note = 2'-O-methylguanosine-3'-phosphate
  modified_base 21: mod_base = OTHER; note = 2'-O-methyluridine-3'-phosphate N-[tris(GalNAc-alkyl)-amidodecanoyl)]-4-hydroxyprolinol Hyp-(GalNAc-alkyl)3
gggcaaccgtctggatgatgt

SEQ ID NO: 2047 - RNA, 23 nt, synthetic construct
  source 1..23: mol_type = other RNA; note = Description of Artificial Sequence: Synthetic oligonucleotide
  modified_base 1: mod_base = OTHER; note = 2'-O-methyladenosine-3'-phosphorothioate
  modified_base 2: mod_base = OTHER; note = 2'-fluorocytidine-3'-phosphorothioate
  modified_base 3: mod_base = OTHER; note = 2'-O-methyladenosine-3'-phosphate
  modified_base 4: mod_base = OTHER; note = 2'-O-methyluridine-3'-phosphate
  modified_base 5: mod_base = OTHER; note = 2'-O-methylcytidine-3'-phosphate
  modified_base 6: mod_base = OTHER; note = 2'-fluoroadenosine-3'-phosphate
  modified_base 7: mod_base = OTHER; note = 2'-O-methyluridine-3'-phosphate
  modified_base 8: mod_base = OTHER; note = 2'-fluorocytidine-3'-phosphate
  modified_base 9: mod_base = OTHER; note = 2'-fluorocytidine-3'-phosphate
  modified_base 10: mod_base = OTHER; note = 2'-O-methyladenosine-3'-phosphate
  modified_base 11: mod_base = OTHER; note = 2'-O-methylguanosine-3'-phosphate
  modified_base 12: mod_base = OTHER; note = 2'-O-methyladenosine-3'-phosphate
  modified_base 13: mod_base = OTHER; note = 2'-O-methylcytidine-3'-phosphate
  modified_base 14: mod_base = OTHER; note = 2'-fluoroguanosine-3'-phosphate
  modified_base 15: mod_base = OTHER; note = 2'-O-methylguanosine-3'-phosphate
  modified_base 16: mod_base = OTHER; note = 2'-fluorouridine-3'-phosphate
  modified_base 17: mod_base = OTHER; note = 2'-O-methyluridine-3'-phosphate
  modified_base 18: mod_base = OTHER; note = 2'-O-methylguanosine-3'-phosphate
  modified_base 19: mod_base = OTHER; note = 2'-O-methylcytidine-3'-phosphate
  modified_base 20: mod_base = OTHER; note = 2'-O-methylcytidine-3'-phosphate
  modified_base 21: mod_base = OTHER; note = 2'-O-methylcytidine-3'-phosphorothioate
  modified_base 22: mod_base = OTHER; note = 2'-O-methyladenosine-3'-phosphorothioate
  modified_base 23: mod_base = OTHER; note = 2'-O-methylguanosine-3'-phosphate
acatcatccagacggttgcccag

SEQ ID NO: 2048 - RNA, 21 nt, synthetic construct
  source 1..21: mol_type = other RNA; note = Description of Artificial Sequence: Synthetic oligonucleotide
  modified_base 1: mod_base = OTHER; note = 2'-O-methyluridine-3'-phosphorothioate
  modified_base 2: mod_base = OTHER; note = 2'-O-methylguanosine-3'-phosphorothioate
  modified_base 3: mod_base = OTHER; note = 2'-O-methylguanosine-3'-phosphate
  modified_base 4: mod_base = OTHER; note = 2'-O-methylguanosine-3'-phosphate
  modified_base 5: mod_base = OTHER; note = 2'-O-methylcytidine-3'-phosphate
  modified_base 6: mod_base = OTHER; note = 2'-O-methyladenosine-3'-phosphate
  modified_base 7: mod_base = OTHER; note = 2'-fluoroadenosine-3'-phosphate
  modified_base 8: mod_base = OTHER; note = 2'-O-methylcytidine-3'-phosphate
  modified_base 9: mod_base = OTHER; note = 2'-fluorocytidine-3'-phosphate
  modified_base 10: mod_base = OTHER; note = 2'-fluoroguanosine-3'-phosphate
  modified_base 11: mod_base = OTHER; note = 2'-fluorouridine-3'-phosphate
  modified_base 12: mod_base = OTHER; note = 2'-O-methylcytidine-3'-phosphate
  modified_base 13: mod_base = OTHER; note = 2'-O-methyluridine-3'-phosphate
  modified_base 14: mod_base = OTHER; note = 2'-O-methylguanosine-3'-phosphate
  modified_base 15: mod_base = OTHER; note = 2'-O-methylguanosine-3'-phosphate
  modified_base 16: mod_base = OTHER; note = 2'-O-methyladenosine-3'-phosphate
  modified_base 17: mod_base = OTHER; note = 2'-O-methyluridine-3'-phosphate
  modified_base 18: mod_base = OTHER; note = 2'-O-methylguanosine-3'-phosphate
  modified_base 19: mod_base = OTHER; note = 2'-O-methyladenosine-3'-phosphate
  modified_base 20: mod_base = OTHER; note = 2'-O-methyluridine-3'-phosphate
  modified_base 21: mod_base = OTHER; note = 2'-O-methylguanosine-3'-phosphate N-[tris(GalNAc-alkyl)-amidodecanoyl)]-4-hydroxyprolinol Hyp-(GalNAc-alkyl)3
tgggcaaccgtctggatgatg

SEQ ID NO: 2049 - RNA, 23 nt, synthetic construct
  source 1..23: mol_type = other RNA; note = Description of Artificial Sequence: Synthetic oligonucleotide
  modified_base 1: mod_base = OTHER; note = 2'-O-methylcytidine-3'-phosphorothioate
  modified_base 2: mod_base = OTHER; note = 2'-fluoroadenosine-3'-phosphorothioate
  modified_base 3: mod_base = OTHER; note = 2'-O-methyluridine-3'-phosphate
  modified_base 4: mod_base = OTHER; note = 2'-O-methylcytidine-3'-phosphate
  modified_base 5: mod_base = OTHER; note = 2'-O-methyladenosine-3'-phosphate
  modified_base 6: mod_base = OTHER; note = 2'-fluorouridine-3'-phosphate
  modified_base 7: mod_base = OTHER; note = 2'-O-methylcytidine-3'-phosphate
  modified_base 8: mod_base = OTHER; note = 2'-fluorocytidine-3'-phosphate
  modified_base 9: mod_base = OTHER; note = 2'-fluoroadenosine-3'-phosphate
  modified_base 10: mod_base = OTHER; note = 2'-O-methylguanosine-3'-phosphate
  modified_base 11: mod_base = OTHER; note = 2'-O-methyladenosine-3'-phosphate
  modified_base 12: mod_base = OTHER; note = 2'-O-methylcytidine-3'-phosphate
  modified_base 13: mod_base = OTHER; note = 2'-O-methylguanosine-3'-phosphate
  modified_base 14: mod_base = OTHER; note = 2'-fluoroguanosine-3'-phosphate
  modified_base 15: mod_base = OTHER; note = 2'-O-methyluridine-3'-phosphate
  modified_base 16: mod_base = OTHER; note = 2'-fluorouridine-3'-phosphate
  modified_base 17: mod_base = OTHER; note = 2'-O-methylguanosine-3'-phosphate
  modified_base 18: mod_base = OTHER; note = 2'-O-methylcytidine-3'-phosphate
  modified_base 19: mod_base = OTHER; note = 2'-O-methylcytidine-3'-phosphate
  modified_base 20: mod_base = OTHER; note = 2'-O-methylcytidine-3'-phosphate
  modified_base 21: mod_base = OTHER; note = 2'-O-methyladenosine-3'-phosphorothioate
  modified_base 22: mod_base = OTHER; note = 2'-O-methylguanosine-3'-phosphorothioate
  modified_base 23: mod_base = OTHER; note = 2'-O-methylguanosine-3'-phosphate
catcatccagacggttgcccagg

SEQ ID NO: 2050 - RNA, 21 nt, synthetic construct
  source 1..21: mol_type = other RNA; note = Description of Artificial Sequence: Synthetic oligonucleotide
  modified_base 1: mod_base = OTHER; note = 2'-O-methylguanosine-3'-phosphorothioate
  modified_base 2: mod_base = OTHER; note = 2'-O-methyladenosine-3'-phosphorothioate
  modified_base 3: mod_base = OTHER; note = 2'-O-methyladenosine-3'-phosphate
  modified_base 4: mod_base = OTHER; note = 2'-O-methyladenosine-3'-phosphate
  modified_base 5: mod_base = OTHER; note = 2'-O-methylcytidine-3'-phosphate
  modified_base 6: mod_base = OTHER; note = 2'-O-methyluridine-3'-phosphate
  modified_base 7: mod_base = OTHER; note = 2'-fluorouridine-3'-phosphate
  modified_base 8: mod_base = OTHER; note = 2'-O-methyluridine-3'-phosphate
  modified_base 9: mod_base = OTHER; note = 2'-fluoroguanosine-3'-phosphate
  modified_base 10: mod_base = OTHER; note = 2'-fluoroguanosine-3'-phosphate
  modified_base 11: mod_base = OTHER; note = 2'-fluorocytidine-3'-phosphate
  modified_base 12: mod_base = OTHER; note = 2'-O-methyluridine-3'-phosphate
  modified_base 13: mod_base = OTHER; note = 2'-O-methylguanosine-3'-phosphate
  modified_base 14: mod_base = OTHER; note = 2'-O-methyladenosine-3'-phosphate
  modified_base 15: mod_base = OTHER; note = 2'-O-methyluridine-3'-phosphate
  modified_base 16: mod_base = OTHER; note = 2'-O-methyladenosine-3'-phosphate
  modified_base 17: mod_base = OTHER; note = 2'-O-methyladenosine-3'-phosphate
  modified_base 18: mod_base = OTHER; note = 2'-O-methyluridine-3'-phosphate
  modified_base 19: mod_base = OTHER; note = 2'-O-methyladenosine-3'-phosphate
  modified_base 20: mod_base = OTHER; note = 2'-O-methyluridine-3'-phosphate
  modified_base 21: mod_base = OTHER; note = 2'-O-methyluridine-3'-phosphate N-[tris(GalNAc-alkyl)-amidodecanoyl)]-4-hydroxyprolinol Hyp-(GalNAc-alkyl)3
gaaactttggctgataatatt

SEQ ID NO: 2051 - RNA, 23 nt, synthetic construct
  source 1..23: mol_type = other RNA; note = Description of Artificial Sequence: Synthetic oligonucleotide
  modified_base 1: mod_base = OTHER; note = 2'-O-methyladenosine-3'-phosphorothioate
  modified_base 2: mod_base = OTHER; note = 2'-fluoroadenosine-3'-phosphorothioate
  modified_base 3: mod_base = OTHER; note = 2'-O-methyluridine-3'-phosphate
  modified_base 4: mod_base = OTHER; note = 2'-O-methyladenosine-3'-phosphate
  modified_base 5: mod_base = OTHER; note = 2'-O-methyluridine-3'-phosphate
  modified_base 6: mod_base = OTHER; note = 2'-fluorouridine-3'-phosphate
  modified_base 7: mod_base = OTHER; note = 2'-O-methyladenosine-3'-phosphate
  modified_base 8: mod_base = OTHER; note = 2'-fluorouridine-3'-phosphate
  modified_base 9: mod_base = OTHER; note = 2'-fluorocytidine-3'-phosphate
  modified_base 10: mod_base = OTHER; note = 2'-O-methyladenosine-3'-phosphate
  modified_base 11: mod_base = OTHER; note = 2'-O-methylguanosine-3'-phosphate
  modified_base 12: mod_base = OTHER; note = 2'-O-methylcytidine-3'-phosphate
  modified_base 13: mod_base = OTHER; note = 2'-O-methylcytidine-3'-phosphate
  modified_base 14: mod_base = OTHER; note = 2'-fluoroadenosine-3'-phosphate
  modified_base 15: mod_base = OTHER; note = 2'-O-methyladenosine-3'-phosphate
  modified_base 16: mod_base = OTHER; note = 2'-fluoroadenosine-3'-phosphate
  modified_base 17: mod_base = OTHER; note = 2'-O-methylguanosine-3'-phosphate
  modified_base 18: mod_base = OTHER; note = 2'-O-methyluridine-3'-phosphate
  modified_base 19: mod_base = OTHER; note = 2'-O-methyluridine-3'-phosphate
  modified_base 20: mod_base = OTHER; note = 2'-O-methyluridine-3'-phosphate
  modified_base 21: mod_base = OTHER; note = 2'-O-methylcytidine-3'-phosphorothioate
  modified_base 22: mod_base = OTHER; note = 2'-O-methyluridine-3'-phosphorothioate
  modified_base 23: mod_base = OTHER; note = 2'-O-methyluridine-3'-phosphate
aatattatcagccaaagtttctt

SEQ ID NO: 2052 - RNA, 21 nt, synthetic construct
  source 1..21: mol_type = other RNA; note = Description of Artificial Sequence: Synthetic oligonucleotide
  modified_base 1: mod_base = OTHER; note = 2'-O-methyladenosine-3'-phosphorothioate
  modified_base 2: mod_base = OTHER; note = 2'-O-methyladenosine-3'-phosphorothioate
  modified_base 3: mod_base = OTHER; note = 2'-O-methyladenosine-3'-phosphate
  modified_base 4: mod_base = OTHER; note = 2'-O-methylcytidine-3'-phosphate
  modified_base 5: mod_base = OTHER; note = 2'-O-methyluridine-3'-phosphate
  modified_base 6: mod_base = OTHER; note = 2'-O-methyluridine-3'-phosphate
  modified_base 7: mod_base = OTHER; note = 2'-fluorouridine-3'-phosphate
  modified_base 8: mod_base = OTHER; note = 2'-O-methylguanosine-3'-phosphate
  modified_base 9: mod_base = OTHER; note = 2'-fluoroguanosine-3'-phosphate
  modified_base 10: mod_base = OTHER; note = 2'-fluorocytidine-3'-phosphate
  modified_base 11: mod_base = OTHER; note = 2'-fluorouridine-3'-phosphate
  modified_base 12: mod_base = OTHER; note = 2'-O-methylguanosine-3'-phosphate
  modified_base 13: mod_base = OTHER; note = 2'-O-methyladenosine-3'-phosphate
  modified_base 14: mod_base = OTHER; note = 2'-O-methyluridine-3'-phosphate
  modified_base 15: mod_base = OTHER; note = 2'-O-methyladenosine-3'-phosphate
  modified_base 16: mod_base = OTHER; note = 2'-O-methyladenosine-3'-phosphate
  modified_base 17: mod_base = OTHER; note = 2'-O-methyluridine-3'-phosphate
  modified_base 18: mod_base = OTHER; note = 2'-O-methyladenosine-3'-phosphate
  modified_base 19: mod_base = OTHER; note = 2'-O-methyluridine-3'-phosphate
  modified_base 20: mod_base = OTHER; note = 2'-O-methyluridine-3'-phosphate
  modified_base 21: mod_base = OTHER; note = 2'-O-methylguanosine-3'-phosphate N-[tris(GalNAc-alkyl)-amidodecanoyl)]-4-hydroxyprolinol Hyp-(GalNAc-alkyl)3
aaactttggctgataatattg

SEQ ID NO: 2053 - RNA, 23 nt, synthetic construct
  source 1..23: mol_type = other RNA; note = Description of Artificial Sequence: Synthetic oligonucleotide
  modified_base 1: mod_base = OTHER; note = 2'-O-methylcytidine-3'-phosphorothioate
  modified_base 2: mod_base = OTHER; note = 2'-fluoroadenosine-3'-phosphorothioate
  modified_base 3: mod_base = OTHER; note = 2'-O-methyladenosine-3'-phosphate
  modified_base 4: mod_base = OTHER; note = 2'-O-methyluridine-3'-phosphate
  modified_base 5: mod_base = OTHER; note = 2'-O-methyladenosine-3'-phosphate
  modified_base 6: mod_base = OTHER; note = 2'-fluorouridine-3'-phosphate
  modified_base 7: mod_base = OTHER; note = 2'-O-methyluridine-3'-phosphate
  modified_base 8: mod_base = OTHER; note = 2'-fluoroadenosine-3'-phosphate
  modified_base 9: mod_base = OTHER; note = 2'-fluorouridine-3'-phosphate
  modified_base 10: mod_base = OTHER; note = 2'-O-methylcytidine-3'-phosphate
  modified_base 11: mod_base = OTHER; note = 2'-O-methyladenosine-3'-phosphate
  modified_base 12: mod_base = OTHER; note = 2'-O-methylguanosine-3'-phosphate
  modified_base 13: mod_base = OTHER; note = 2'-O-methylcytidine-3'-phosphate
  modified_base 14: mod_base = OTHER; note = 2'-fluorocytidine-3'-phosphate
  modified_base 15: mod_base = OTHER; note = 2'-O-methyladenosine-3'-phosphate
  modified_base 16: mod_base = OTHER; note = 2'-fluoroadenosine-3'-phosphate
  modified_base 17: mod_base = OTHER; note = 2'-O-methyladenosine-3'-phosphate
  modified_base 18: mod_base = OTHER; note = 2'-O-methylguanosine-3'-phosphate
  modified_base 19: mod_base = OTHER; note = 2'-O-methyluridine-3'-phosphate
  modified_base 20: mod_base = OTHER; note = 2'-O-methyluridine-3'-phosphate
  modified_base 21: mod_base = OTHER; note = 2'-O-methyluridine-3'-phosphorothioate
  modified_base 22: mod_base = OTHER; note = 2'-O-methylcytidine-3'-phosphorothioate
  modified_base 23: mod_base = OTHER; note = 2'-O-methyluridine-3'-phosphate
caatattatcagccaaagtttct

SEQ ID NO: 2054 - RNA, 21 nt, synthetic construct
  source 1..21: mol_type = other RNA; note = Description of Artificial Sequence: Synthetic oligonucleotide
  modified_base 1: mod_base = OTHER; note = 2'-O-methyluridine-3'-phosphorothioate
  modified_base 2: mod_base = OTHER; note = 2'-O-methylguanosine-3'-phosphorothioate
  modified_base 3: mod_base = OTHER; note = 2'-O-methyladenosine-3'-phosphate
  modified_base 4: mod_base = OTHER; note = 2'-O-methyladenosine-3'-phosphate
  modified_base 5: mod_base = OTHER; note = 2'-O-methylguanosine-3'-phosphate
  modified_base 6: mod_base = OTHER; note = 2'-O-methyladenosine-3'-phosphate
  modified_base 7: mod_base = OTHER; note = 2'-fluoroadenosine-3'-phosphate
  modified_base 8: mod_base = OTHER; note = 2'-O-methyladenosine-3'-phosphate
  modified_base 9: mod_base = OTHER; note = 2'-fluorocytidine-3'-phosphate
  modified_base 10: mod_base = OTHER; note = 2'-fluorouridine-3'-phosphate
  modified_base 11: mod_base = OTHER; note = 2'-fluorouridine-3'-phosphate
  modified_base 12: mod_base = OTHER; note = 2'-O-methyluridine-3'-phosphate
  modified_base 13: mod_base = OTHER; note = 2'-O-methylguanosine-3'-phosphate
  modified_base 14: mod_base = OTHER; note = 2'-O-methylguanosine-3'-phosphate
  modified_base 15: mod_base = OTHER; note = 2'-O-methylcytidine-3'-phosphate
  modified_base 16: mod_base = OTHER; note = 2'-O-methyluridine-3'-phosphate
  modified_base 17: mod_base = OTHER; note = 2'-O-methylguanosine-3'-phosphate
  modified_base 18: mod_base = OTHER; note = 2'-O-methyladenosine-3'-phosphate
  modified_base 19: mod_base = OTHER; note = 2'-O-methyluridine-3'-phosphate
  modified_base 20: mod_base = OTHER; note = 2'-O-methyladenosine-3'-phosphate
  modified_base 21: mod_base = OTHER; note = 2'-O-methyladenosine-3'-phosphate N-[tris(GalNAc-alkyl)-amidodecanoyl)]-4-hydroxyprolinol Hyp-(GalNAc-alkyl)3
tgaagaaactttggctgataa

SEQ ID NO: 2055 - RNA, 23 nt, synthetic construct
  source 1..23: mol_type = other RNA; note = Description of Artificial Sequence: Synthetic oligonucleotide
  modified_base 1: mod_base = OTHER; note = 2'-O-methyluridine-3'-phosphorothioate
  modified_base 2: mod_base = OTHER; note = 2'-fluorouridine -3'-phosphorothioate
  modified_base 3: mod_base = OTHER; note = 2'-O-methyladenosine-3'-phosphate
  modified_base 4: mod_base = OTHER; note = 2'-O-methyluridine-3'-phosphate
  modified_base 5: mod_base = OTHER; note = 2'-O-methylcytidine-3'-phosphate
  modified_base 6: mod_base = OTHER; note = 2'-fluoroadenosine-3'-phosphate
  modified_base 7: mod_base = OTHER; note = 2'-O-methylguanosine-3'-phosphate
  modified_base 8: mod_base = OTHER; note = 2'-fluorocytidine-3'-phosphate
  modified_base 9: mod_base = OTHER; note = 2'-fluorocytidine-3'-phosphate
  modified_base 10: mod_base = OTHER; note = 2'-O-methyladenosine-3'-phosphate
  modified_base 11: mod_base = OTHER; note = 2'-O-methyladenosine-3'-phosphate
  modified_base 12: mod_base = OTHER; note = 2'-O-methyladenosine-3'-phosphate
  modified_base 13: mod_base = OTHER; note = 2'-O-methylguanosine-3'-phosphate
  modified_base 14: mod_base = OTHER; note = 2'-fluorouridine-3'-phosphate
  modified_base 15: mod_base = OTHER; note = 2'-O-methyluridine-3'-phosphate
  modified_base 16: mod_base = OTHER; note = 2'-fluorouridine-3'-phosphate
  modified_base 17: mod_base = OTHER; note = 2'-O-methylcytidine-3'-phosphate
  modified_base 18: mod_base = OTHER; note = 2'-O-methyluridine-3'-phosphate
  modified_base 19: mod_base = OTHER; note = 2'-O-methyluridine-3'-phosphate
  modified_base 20: mod_base = OTHER; note = 2'-O-methylcytidine-3'-phosphate
  modified_base 21: mod_base = OTHER; note = 2'-O-methyladenosine-3'-phosphorothioate
  modified_base 22: mod_base = OTHER; note = 2'-O-methyluridine-3'-phosphorothioate
  modified_base 23: mod_base = OTHER; note = 2'-O-methylcytidine-3'-phosphate
ttatcagccaaagtttcttcatc

SEQ ID NO: 2056 - RNA, 21 nt, synthetic construct
  source 1..21: mol_type = other RNA; note = Description of Artificial Sequence: Synthetic oligonucleotide
  modified_base 1: mod_base = OTHER; note = 2'-O-methyladenosine-3'-phosphorothioate
  modified_base 2: mod_base = OTHER; note = 2'-O-methyluridine-3'-phosphorothioate
  modified_base 3: mod_base = OTHER; note = 2'-O-methylguanosine-3'-phosphate
  modified_base 4: mod_base = OTHER; note = 2'-O-methyladenosine-3'-phosphate
  modified_base 5: mod_base = OTHER; note = 2'-O-methyladenosine-3'-phosphate
  modified_base 6: mod_base = OTHER; note = 2'-O-methylguanosine-3'-phosphate
  modified_base 7: mod_base = OTHER; note = 2'-fluoroadenosine-3'-phosphate
  modified_base 8: mod_base = OTHER; note = 2'-O-methyladenosine-3'-phosphate
  modified_base 9: mod_base = OTHER; note = 2'-fluoroadenosine-3'-phosphate
  modified_base 10: mod_base = OTHER; note = 2'-fluorocytidine-3'-phosphate
  modified_base 11: mod_base = OTHER; note = 2'-fluorouridine-3'-phosphate
  modified_base 12: mod_base = OTHER; note = 2'-O-methyluridine-3'-phosphate
  modified_base 13: mod_base = OTHER; note = 2'-O-methyluridine-3'-phosphate
  modified_base 14: mod_base = OTHER; note = 2'-O-methylguanosine-3'-phosphate
  modified_base 15: mod_base = OTHER; note = 2'-O-methylguanosine-3'-phosphate
  modified_base 16: mod_base = OTHER; note = 2'-O-methylcytidine-3'-phosphate
  modified_base 17: mod_base = OTHER; note = 2'-O-methyluridine-3'-phosphate
  modified_base 18: mod_base = OTHER; note = 2'-O-methylguanosine-3'-phosphate
  modified_base 19: mod_base = OTHER; note = 2'-O-methyladenosine-3'-phosphate
  modified_base 20: mod_base = OTHER; note = 2'-O-methyluridine-3'-phosphate
  modified_base 21: mod_base = OTHER; note = 2'-O-methyladenosine-3'-phosphate N-[tris(GalNAc-alkyl)-amidodecanoyl)]-4-hydroxyprolinol Hyp-(GalNAc-alkyl)3
atgaagaaactttggctgata

SEQ ID NO: 2057 - RNA, 23 nt, synthetic construct
  source 1..23: mol_type = other RNA; note = Description of Artificial Sequence: Synthetic oligonucleotide
  modified_base 1: mod_base = OTHER; note = 2'-O-methyluridine-3'-phosphorothioate
  modified_base 2: mod_base = OTHER; note = 2'-fluoroadenosine-3'-phosphorothioate
  modified_base 3: mod_base = OTHER; note = 2'-O-methyluridine-3'-phosphate
  modified_base 4: mod_base = OTHER; note = 2'-O-methylcytidine-3'-phosphate
  modified_base 5: mod_base = OTHER; note = 2'-O-methyladenosine-3'-phosphate
  modified_base 6: mod_base = OTHER; note = 2'-fluoroguanosine-3'-phosphate
  modified_base 7: mod_base = OTHER; note = 2'-O-methylcytidine-3'-phosphate
  modified_base 8: mod_base = OTHER; note = 2'-fluorocytidine-3'-phosphate
  modified_base 9: mod_base = OTHER; note = 2'-fluoroadenosine-3'-phosphate
  modified_base 10: mod_base = OTHER; note = 2'-O-methyladenosine-3'-phosphate
  modified_base 11: mod_base = OTHER; note = 2'-O-methyladenosine-3'-phosphate
  modified_base 12: mod_base = OTHER; note = 2'-O-methylguanosine-3'-phosphate
  modified_base 13: mod_base = OTHER; note = 2'-O-methyluridine-3'-phosphate
  modified_base 14: mod_base = OTHER; note = 2'-fluorouridine-3'-phosphate
  modified_base 15: mod_base = OTHER; note = 2'-O-methyluridine-3'-phosphate
  modified_base 16: mod_base = OTHER; note = 2'-fluorocytidine-3'-phosphate
  modified_base 17: mod_base = OTHER; note = 2'-O-methyluridine-3'-phosphate
  modified_base 18: mod_base = OTHER; note = 2'-O-methyluridine-3'-phosphate
  modified_base 19: mod_base = OTHER; note = 2'-O-methylcytidine-3'-phosphate
  modified_base 20: mod_base = OTHER; note = 2'-O-methyladenosine-3'-phosphate
  modified_base 21: mod_base = OTHER; note = 2'-O-methyluridine-3'-phosphorothioate
  modified_base 22: mod_base = OTHER; note = 2'-O-methylcytidine-3'-phosphorothioate
  modified_base 23: mod_base = OTHER; note = 2'-O-methyladenosine-3'-phosphate
tatcagccaaagtttcttcatca

SEQ ID NO: 2058 - RNA, 21 nt, synthetic construct
  source 1..21: mol_type = other RNA; note = Description of Artificial Sequence: Synthetic oligonucleotide
  modified_base 1: mod_base = OTHER; note = 2'-O-methyladenosine-3'-phosphorothioate
  modified_base 2: mod_base = OTHER; note = 2'-O-methyladenosine-3'-phosphorothioate
  modified_base 3: mod_base = OTHER; note = 2'-O-methyladenosine-3'-phosphate
  modified_base 4: mod_base = OTHER; note = 2'-O-methylguanosine-3'-phosphate
  modified_base 5: mod_base = OTHER; note = 2'-O-methylguanosine-3'-phosphate
  modified_base 6: mod_base = OTHER; note = 2'-O-methyluridine-3'-phosphate
  modified_base 7: mod_base = OTHER; note = 2'-fluoroguanosine-3'-phosphate
  modified_base 8: mod_base = OTHER; note = 2'-O-methyluridine-3'-phosphate
  modified_base 9: mod_base = OTHER; note = 2'-fluorouridine-3'-phosphate
  modified_base 10: mod_base = OTHER; note = 2'-fluorocytidine-3'-phosphate
  modified_base 11: mod_base = OTHER; note = 2'-fluoroadenosine-3'-phosphate
  modified_base 12: mod_base = OTHER; note = 2'-O-methyladenosine-3'-phosphate
  modified_base 13: mod_base = OTHER; note = 2'-O-methylguanosine-3'-phosphate
  modified_base 14: mod_base = OTHER; note = 2'-O-methyladenosine-3'-phosphate
  modified_base 15: mod_base = OTHER; note = 2'-O-methyluridine-3'-phosphate
  modified_base 16: mod_base = OTHER; note = 2'-O-methylguanosine-3'-phosphate
  modified_base 17: mod_base = OTHER; note = 2'-O-methyluridine-3'-phosphate
  modified_base 18: mod_base = OTHER; note = 2'-O-methylcytidine-3'-phosphate
  modified_base 19: mod_base = OTHER; note = 2'-O-methylcytidine-3'-phosphate
  modified_base 20: mod_base = OTHER; note = 2'-O-methyluridine-3'-phosphate
  modified_base 21: mod_base = OTHER; note = 2'-O-methylcytidine-3'-phosphate N-[tris(GalNAc-alkyl)-amidodecanoyl)]-4-hydroxyprolinol Hyp-(GalNAc-alkyl)3
aaaggtgttcaagatgtcctc

SEQ ID NO: 2059 - RNA, 23 nt, synthetic construct
  source 1..23: mol_type = other RNA; note = Description of Artificial Sequence: Synthetic oligonucleotide
  modified_base 1: mod_base = OTHER; note = 2'-O-methylguanosine-3'-phosphorothioate
  modified_base 2: mod_base = OTHER; note = 2'-fluoroadenosine-3'-phosphorothioate
  modified_base 3: mod_base = OTHER; note = 2'-O-methylguanosine-3'-phosphate
  modified_base 4: mod_base = OTHER; note = 2'-O-methylguanosine-3'-phosphate
  modified_base 5: mod_base = OTHER; note = 2'-O-methyladenosine-3'-phosphate
  modified_base 6: mod_base = OTHER; note = 2'-fluorocytidine-3'-phosphate
  modified_base 7: mod_base = OTHER; note = 2'-O-methyladenosine-3'-phosphate
  modified_base 8: mod_base = OTHER; note = 2'-fluorouridine-3'-phosphate
  modified_base 9: mod_base = OTHER; note = 2'-fluorocytidine-3'-phosphate
  modified_base 10: mod_base = OTHER; note = 2'-O-methyluridine-3'-phosphate
  modified_base 11: mod_base = OTHER; note = 2'-O-methyluridine-3'-phosphate
  modified_base 12: mod_base = OTHER; note = 2'-O-methylguanosine-3'-phosphate
  modified_base 13: mod_base = OTHER; note = 2'-O-methyladenosine-3'-phosphate
  modified_base 14: mod_base = OTHER; note = 2'-fluoroadenosine-3'-phosphate
  modified_base 15: mod_base = OTHER; note = 2'-O-methylcytidine-3'-phosphate
  modified_base 16: mod_base = OTHER; note = 2'-fluoroadenosine-3'-phosphate
  modified_base 17: mod_base = OTHER; note = 2'-O-methylcytidine-3'-phosphate
  modified_base 18: mod_base = OTHER; note = 2'-O-methylcytidine-3'-phosphate
  modified_base 19: mod_base = OTHER; note = 2'-O-methyluridine-3'-phosphate
  modified_base 20: mod_base = OTHER; note = 2'-O-methyluridine-3'-phosphate
  modified_base 21: mod_base = OTHER; note = 2'-O-methyluridine-3'-phosphorothioate
  modified_base 22: mod_base = OTHER; note = 2'-O-methylcytidine-3'-phosphorothioate
  modified_base 23: mod_base = OTHER; note = 2'-O-methyluridine-3'-phosphate
gaggacatcttgaacacctttct

SEQ ID NO: 2060 - RNA, 21 nt, synthetic construct
  source 1..21: mol_type = other RNA; note = Description of Artificial Sequence: Synthetic oligonucleotide
  modified_base 1: mod_base = OTHER; note = 2'-O-methyladenosine-3'-phosphorothioate
  modified_base 2: mod_base = OTHER; note = 2'-O-methyladenosine-3'-phosphorothioate
  modified_base 3: mod_base = OTHER; note = 2'-O-methylguanosine-3'-phosphate
  modified_base 4: mod_base = OTHER; note = 2'-O-methylguanosine-3'-phosphate
  modified_base 5: mod_base = OTHER; note = 2'-O-methyluridine-3'-phosphate
  modified_base 6: mod_base = OTHER; note = 2'-O-methylguanosine-3'-phosphate
  modified_base 7: mod_base = OTHER; note = 2'-fluorouridine-3'-phosphate
  modified_base 8: mod_base = OTHER; note = 2'-O-methyluridine-3'-phosphate
  modified_base 9: mod_base = OTHER; note = 2'-fluorocytidine-3'-phosphate
  modified_base 10: mod_base = OTHER; note = 2'-fluoroadenosine-3'-phosphate
  modified_base 11: mod_base = OTHER; note = 2'-fluoroadenosine-3'-phosphate
  modified_base 12: mod_base = OTHER; note = 2'-O-methylguanosine-3'-phosphate
  modified_base 13: mod_base = OTHER; note = 2'-O-methyladenosine-3'-phosphate
  modified_base 14: mod_base = OTHER; note = 2'-O-methyluridine-3'-phosphate
  modified_base 15: mod_base = OTHER; note = 2'-O-methylguanosine-3'-phosphate
  modified_base 16: mod_base = OTHER; note = 2'-O-methyluridine-3'-phosphate
  modified_base 17: mod_base = OTHER; note = 2'-O-methylcytidine-3'-phosphate
  modified_base 18: mod_base = OTHER; note = 2'-O-methylcytidine-3'-phosphate
  modified_base 19: mod_base = OTHER; note = 2'-O-methyluridine-3'-phosphate
  modified_base 20: mod_base = OTHER; note = 2'-O-methylcytidine-3'-phosphate
  modified_base 21: mod_base = OTHER; note = 2'-O-methylguanosine-3'-phosphate N-[tris(GalNAc-alkyl)-amidodecanoyl)]-4-hydroxyprolinol Hyp-(GalNAc-alkyl)3
aaggtgttcaagatgtcctcg

SEQ ID NO: 2061 - RNA, 23 nt, synthetic construct
  source 1..23: mol_type = other RNA; note = Description of Artificial Sequence: Synthetic oligonucleotide
  modified_base 1: mod_base = OTHER; note = 2'-O-methylcytidine-3'-phosphorothioate
  modified_base 2: mod_base = OTHER; note = 2'-fluoroguanosine-3'-phosphorothioate
  modified_base 3: mod_base = OTHER; note = 2'-O-methyladenosine-3'-phosphate
  modified_base 4: mod_base = OTHER; note = 2'-O-methylguanosine-3'-phosphate
  modified_base 5: mod_base = OTHER; note = 2'-O-methylguanosine-3'-phosphate
  modified_base 6: mod_base = OTHER; note = 2'-fluoroadenosine-3'-phosphate
  modified_base 7: mod_base = OTHER; note = 2'-O-methylcytidine-3'-phosphate
  modified_base 8: mod_base = OTHER; note = 2'-fluoroadenosine-3'-phosphate
  modified_base 9: mod_base = OTHER; note = 2'-fluorouridine-3'-phosphate
  modified_base 10: mod_base = OTHER; note = 2'-O-methylcytidine-3'-phosphate
  modified_base 11: mod_base = OTHER; note = 2'-O-methyluridine-3'-phosphate
  modified_base 12: mod_base = OTHER; note = 2'-O-methyluridine-3'-phosphate
  modified_base 13: mod_base = OTHER; note = 2'-O-methylguanosine-3'-phosphate
  modified_base 14: mod_base = OTHER; note = 2'-fluoroadenosine-3'-phosphate
  modified_base 15: mod_base = OTHER; note = 2'-O-methyladenosine-3'-phosphate
  modified_base 16: mod_base = OTHER; note = 2'-fluorocytidine-3'-phosphate
  modified_base 17: mod_base = OTHER; note = 2'-O-methyladenosine-3'-phosphate
  modified_base 18: mod_base = OTHER; note = 2'-O-methylcytidine-3'-phosphate
  modified_base 19: mod_base = OTHER; note = 2'-O-methylcytidine-3'-phosphate
  modified_base 20: mod_base = OTHER; note = 2'-O-methyluridine-3'-phosphate
  modified_base 21: mod_base = OTHER; note = 2'-O-methyluridine-3'-phosphorothioate
  modified_base 22: mod_base = OTHER; note = 2'-O-methyluridine-3'-phosphorothioate
  modified_base 23: mod_base = OTHER; note = 2'-O-methylcytidine-3'-phosphate
cgaggacatcttgaacacctttc

SEQ ID NO: 2062 - RNA, 21 nt, synthetic construct
  source 1..21: mol_type = other RNA; note = Description of Artificial Sequence: Synthetic oligonucleotide
  modified_base 1: mod_base = OTHER; note = 2'-O-methylguanosine-3'-phosphorothioate
  modified_base 2: mod_base = OTHER; note = 2'-O-methylguanosine-3'-phosphorothioate
  modified_base 3: mod_base = OTHER; note = 2'-O-methyladenosine-3'-phosphate
  modified_base 4: mod_base = OTHER; note = 2'-O-methylguanosine-3'-phosphate
  modified_base 5: mod_base = OTHER; note = 2'-O-methyladenosine-3'-phosphate
  modified_base 6: mod_base = OTHER; note = 2'-O-methyladenosine-3'-phosphate
  modified_base 7: mod_base = OTHER; note = 2'-fluoroadenosine-3'-phosphate
  modified_base 8: mod_base = OTHER; note = 2'-O-methylguanosine-3'-phosphate
  modified_base 9: mod_base = OTHER; note = 2'-fluoroguanosine-3'-phosphate
  modified_base 10: mod_base = OTHER; note = 2'-fluorouridine-3'-phosphate
  modified_base 11: mod_base = OTHER; note = 2'-fluoroguanosine-3'-phosphate
  modified_base 12: mod_base = OTHER; note = 2'-O-methyluridine-3'-phosphate
  modified_base 13: mod_base = OTHER; note = 2'-O-methyluridine-3'-phosphate
  modified_base 14: mod_base = OTHER; note = 2'-O-methylcytidine-3'-phosphate
  modified_base 15: mod_base = OTHER; note = 2'-O-methyladenosine-3'-phosphate
  modified_base 16: mod_base = OTHER; note = 2'-O-methyladenosine-3'-phosphate
  modified_base 17: mod_base = OTHER; note = 2'-O-methylguanosine-3'-phosphate
  modified_base 18: mod_base = OTHER; note = 2'-O-methyladenosine-3'-phosphate
  modified_base 19: mod_base = OTHER; note = 2'-O-methyluridine-3'-phosphate
  modified_base 20: mod_base = OTHER; note = 2'-O-methylguanosine-3'-phosphate
  modified_base 21: mod_base = OTHER; note = 2'-O-methyluridine-3'-phosphate N-[tris(GalNAc-alkyl)-amidodecanoyl)]-4-hydroxyprolinol Hyp-(GalNAc-alkyl)3
ggagaaaggtgttcaagatgt

SEQ ID NO: 2063 - RNA, 23 nt, synthetic construct
  source 1..23: mol_type = other RNA; note = Description of Artificial Sequence: Synthetic oligonucleotide
  modified_base 1: mod_base = OTHER; note = 2'-O-methyladenosine-3'-phosphorothioate
  modified_base 2: mod_base = OTHER; note = 2'-fluorocytidine-3'-phosphorothioate
  modified_base 3: mod_base = OTHER; note = 2'-O-methyladenosine-3'-phosphate
  modified_base 4: mod_base = OTHER; note = 2'-O-methyluridine-3'-phosphate
  modified_base 5: mod_base = OTHER; note = 2'-O-methylcytidine-3'-phosphate
  modified_base 6: mod_base = OTHER; note = 2'-fluorouridine-3'-phosphate
  modified_base 7: mod_base = OTHER; note = 2'-O-methyluridine-3'-phosphate
  modified_base 8: mod_base = OTHER; note = 2'-fluoroguanosine-3'-phosphate
  modified_base 9: mod_base = OTHER; note = 2'-fluoroadenosine-3'-phosphate
  modified_base 10: mod_base = OTHER; note = 2'-O-methyladenosine-3'-phosphate
  modified_base 11: mod_base = OTHER; note = 2'-O-methylcytidine-3'-phosphate
  modified_base 12: mod_base = OTHER; note = 2'-O-methyladenosine-3'-phosphate
  modified_base 13: mod_base = OTHER; note = 2'-O-methylcytidine-3'-phosphate
  modified_base 14: mod_base = OTHER; note = 2'-fluorocytidine-3'-phosphate
  modified_base 15: mod_base = OTHER; note = 2'-O-methyluridine-3'-phosphate
  modified_base 16: mod_base = OTHER; note = 2'-fluorouridine-3'-phosphate
  modified_base 17: mod_base = OTHER; note = 2'-O-methyluridine-3'-phosphate
  modified_base 18: mod_base = OTHER; note = 2'-O-methylcytidine-3'-phosphate
  modified_base 19: mod_base = OTHER; note = 2'-O-methyluridine-3'-phosphate
  modified_base 20: mod_base = OTHER; note = 2'-O-methylcytidine-3'-phosphate
  modified_base 21: mod_base = OTHER; note = 2'-O-methylcytidine-3'-phosphorothioate
  modified_base 22: mod_base = OTHER; note = 2'-O-methylcytidine-3'-phosphorothioate
  modified_base 23: mod_base = OTHER; note = 2'-O-methylcytidine-3'-phosphate
acatcttgaacacctttctcccc

SEQ ID NO: 2064 - RNA, 21 nt, synthetic construct
  source 1..21: mol_type = other RNA; note = Description of Artificial Sequence: Synthetic oligonucleotide
  modified_base 1: mod_base = OTHER; note = 2'-O-methylguanosine-3'-phosphorothioate
  modified_base 2: mod_base = OTHER; note = 2'-O-methylguanosine-3'-phosphorothioate
  modified_base 3: mod_base = OTHER; note = 2'-O-methylguanosine-3'-phosphate
  modified_base 4: mod_base = OTHER; note = 2'-O-methyladenosine-3'-phosphate
  modified_base 5: mod_base = OTHER; note = 2'-O-methylguanosine-3'-phosphate
  modified_base 6: mod_base = OTHER; note = 2'-O-methyladenosine-3'-phosphate
  modified_base 7: mod_base = OTHER; note = 2'-fluoroadenosine-3'-phosphate
  modified_base 8: mod_base = OTHER; note = 2'-O-methyladenosine-3'-phosphate
  modified_base 9: mod_base = OTHER; note = 2'-fluoroguanosine-3'-phosphate
  modified_base 10: mod_base = OTHER; note = 2'-fluoroguanosine-3'-phosphate
  modified_base 11: mod_base = OTHER; note = 2'-fluorouridine-3'-phosphate
  modified_base 12: mod_base = OTHER; note = 2'-O-methylguanosine-3'-phosphate
  modified_base 13: mod_base = OTHER; note = 2'-O-methyluridine-3'-phosphate
  modified_base 14: mod_base = OTHER; note = 2'-O-methyluridine-3'-phosphate
  modified_base 15: mod_base = OTHER; note = 2'-O-methylcytidine-3'-phosphate
  modified_base 16: mod_base = OTHER; note = 2'-O-methyladenosine-3'-phosphate
  modified_base 17: mod_base = OTHER; note = 2'-O-methyladenosine-3'-phosphate
  modified_base 18: mod_base = OTHER; note = 2'-O-methylguanosine-3'-phosphate
  modified_base 19: mod_base = OTHER; note = 2'-O-methyladenosine-3'-phosphate
  modified_base 20: mod_base = OTHER; note = 2'-O-methyluridine-3'-phosphate
  modified_base 21: mod_base = OTHER; note = 2'-O-methylguanosine-3'-phosphate N-[tris(GalNAc-alkyl)-amidodecanoyl)]-4-hydroxyprolinol Hyp-(GalNAc-alkyl)3
gggagaaaggtgttcaagatg

SEQ ID NO: 2065 - RNA, 23 nt, synthetic construct
  source 1..23: mol_type = other RNA; note = Description of Artificial Sequence: Synthetic oligonucleotide
  modified_base 1: mod_base = OTHER; note = 2'-O-methylcytidine-3'-phosphorothioate
  modified_base 2: mod_base = OTHER; note = 2'-fluoroadenosine-3'-phosphorothioate
  modified_base 3: mod_base = OTHER; note = 2'-O-methyluridine-3'-phosphate
  modified_base 4: mod_base = OTHER; note = 2'-O-methylcytidine-3'-phosphate
  modified_base 5: mod_base = OTHER; note = 2'-O-methyluridine-3'-phosphate
  modified_base 6: mod_base = OTHER; note = 2'-fluorouridine-3'-phosphate
  modified_base 7: mod_base = OTHER; note = 2'-O-methylguanosine-3'-phosphate
  modified_base 8: mod_base = OTHER; note = 2'-fluoroadenosine-3'-phosphate
  modified_base 9: mod_base = OTHER; note = 2'-fluoroadenosine-3'-phosphate
  modified_base 10: mod_base = OTHER; note = 2'-O-methylcytidine-3'-phosphate
  modified_base 11: mod_base = OTHER; note = 2'-O-methyladenosine-3'-phosphate
  modified_base 12: mod_base = OTHER; note = 2'-O-methylcytidine-3'-phosphate
  modified_base 13: mod_base = OTHER; note = 2'-O-methylcytidine-3'-phosphate
  modified_base 14: mod_base = OTHER; note = 2'-fluorouridine-3'-phosphate
  modified_base 15: mod_base = OTHER; note = 2'-O-methyluridine-3'-phosphate
  modified_base 16: mod_base = OTHER; note = 2'-fluorouridine-3'-phosphate
  modified_base 17: mod_base = OTHER; note = 2'-O-methylcytidine-3'-phosphate
  modified_base 18: mod_base = OTHER; note = 2'-O-methyluridine-3'-phosphate
  modified_base 19: mod_base = OTHER; note = 2'-O-methylcytidine-3'-phosphate
  modified_base 20: mod_base = OTHER; note = 2'-O-methylcytidine-3'-phosphate
  modified_base 21: mod_base = OTHER; note = 2'-O-methylcytidine-3'-phosphorothioate
  modified_base 22: mod_base = OTHER; note = 2'-O-methylcytidine-3'-phosphorothioate
  modified_base 23: mod_base = OTHER; note = 2'-O-methylcytidine-3'-phosphate
catcttgaacacctttctccccc

SEQ ID NO: 2066 - RNA, 21 nt, synthetic construct
  source 1..21: mol_type = other RNA; note = Description of Artificial Sequence: Synthetic oligonucleotide
  modified_base 1: mod_base = OTHER; note = 2'-O-methyladenosine-3'-phosphorothioate
  modified_base 2: mod_base = OTHER; note = 2'-O-methyladenosine-3'-phosphorothioate
  modified_base 3: mod_base = OTHER; note = 2'-O-methyladenosine-3'-phosphate
  modified_base 4: mod_base = OTHER; note = 2'-O-methyluridine-3'-phosphate
  modified_base 5: mod_base = OTHER; note = 2'-O-methylcytidine-3'-phosphate
  modified_base 6: mod_base = OTHER; note = 2'-O-methyladenosine-3'-phosphate
  modified_base 7: mod_base = OTHER; note = 2'-fluoroguanosine-3'-phosphate
  modified_base 8: mod_base = OTHER; note = 2'-O-methyluridine-3'-phosphate
  modified_base 9: mod_base = OTHER; note = 2'-fluoroadenosine-3'-phosphate
  modified_base 10: mod_base = OTHER; note = 2'-fluorocytidine-3'-phosphate
  modified_base 11: mod_base = OTHER; note = 2'-fluorouridine-3'-phosphate
  modified_base 12: mod_base = OTHER; note = 2'-O-methyluridine-3'-phosphate
  modified_base 13: mod_base = OTHER; note = 2'-O-methylcytidine-3'-phosphate
  modified_base 14: mod_base = OTHER; note = 2'-O-methylcytidine-3'-phosphate
  modified_base 15: mod_base = OTHER; note = 2'-O-methyladenosine-3'-phosphate
  modified_base 16: mod_base = OTHER; note = 2'-O-methyladenosine-3'-phosphate
  modified_base 17: mod_base = OTHER; note = 2'-O-methyladenosine-3'-phosphate
  modified_base 18: mod_base = OTHER; note = 2'-O-methylguanosine-3'-phosphate
  modified_base 19: mod_base = OTHER; note = 2'-O-methyluridine-3'-phosphate
  modified_base 20: mod_base = OTHER; note = 2'-O-methylcytidine-3'-phosphate
  modified_base 21: mod_base = OTHER; note = 2'-O-methyluridine-3'-phosphate N-[tris(GalNAc-alkyl)-amidodecanoyl)]-4-hydroxyprolinol Hyp-(GalNAc-alkyl)3
aaatcagtacttccaaagtct

SEQ ID NO: 2067 - RNA, 23 nt, synthetic construct
  source 1..23: mol_type = other RNA; note = Description of Artificial Sequence: Synthetic oligonucleotide
  modified_base 1: mod_base = OTHER; note = 2'-O-methyladenosine-3'-phosphorothioate
  modified_base 2: mod_base = OTHER; note = 2'-fluoroguanosine-3'-phosphorothioate
  modified_base 3: mod_base = OTHER; note = 2'-O-methyladenosine-3'-phosphate
  modified_base 4: mod_base = OTHER; note = 2'-O-methylcytidine-3'-phosphate
  modified_base 5: mod_base = OTHER; note = 2'-O-methyluridine-3'-phosphate
  modified_base 6: mod_base = OTHER; note = 2'-fluorouridine-3'-phosphate
  modified_base 7: mod_base = OTHER; note = 2'-O-methyluridine-3'-phosphate
  modified_base 8: mod_base = OTHER; note = 2'-fluoroguanosine-3'-phosphate
  modified_base 9: mod_base = OTHER; note = 2'-fluoroguanosine-3'-phosphate
  modified_base 10: mod_base = OTHER; note = 2'-O-methyladenosine-3'-phosphate
  modified_base 11: mod_base = OTHER; note = 2'-O-methyladenosine-3'-phosphate
  modified_base 12: mod_base = OTHER; note = 2'-O-methylguanosine-3'-phosphate
  modified_base 13: mod_base = OTHER; note = 2'-O-methyluridine-3'-phosphate
  modified_base 14: mod_base = OTHER; note = 2'-fluoroadenosine-3'-phosphate
  modified_base 15: mod_base = OTHER; note = 2'-O-methylcytidine-3'-phosphate
  modified_base 16: mod_base = OTHER; note = 2'-fluorouridine-3'-phosphate
  modified_base 17: mod_base = OTHER; note = 2'-O-methylguanosine-3'-phosphate
  modified_base 18: mod_base = OTHER; note = 2'-O-methyladenosine-3'-phosphate
  modified_base 19: mod_base = OTHER; note = 2'-O-methyluridine-3'-phosphate
  modified_base 20: mod_base = OTHER; note = 2'-O-methyluridine-3'-phosphate
  modified_base 21: mod_base = OTHER; note = 2'-O-methyluridine-3'-phosphorothioate
  modified_base 22: mod_base = OTHER; note = 2'-O-methyladenosine-3'-phosphorothioate
  modified_base 23: mod_base = OTHER; note = 2'-O-methylguanosine-3'-phosphate
agactttggaagtactgatttag

SEQ ID NO: 2068 - RNA, 21 nt, synthetic construct
  source 1..21: mol_type = other RNA; note = Description of Artificial Sequence: Synthetic oligonucleotide
  modified_base 1: mod_base = OTHER; note = 2'-O-methyladenosine-3'-phosphorothioate
  modified_base 2: mod_base = OTHER; note = 2'-O-methyladenosine-3'-phosphorothioate
  modified_base 3: mod_base = OTHER; note = 2'-O-methyluridine-3'-phosphate
  modified_base 4: mod_base = OTHER; note = 2'-O-methylcytidine-3'-phosphate
  modified_base 5: mod_base = OTHER; note = 2'-O-methyladenosine-3'-phosphate
  modified_base 6: mod_base = OTHER; note = 2'-O-methylguanosine-3'-phosphate
  modified_base 7: mod_base = OTHER; note = 2'-fluorouridine-3'-phosphate
  modified_base 8: mod_base = OTHER; note = 2'-O-methyladenosine-3'-phosphate
  modified_base 9: mod_base = OTHER; note = 2'-fluorocytidine-3'-phosphate
  modified_base 10: mod_base = OTHER; note = 2'-fluorouridine-3'-phosphate
  modified_base 11: mod_base = OTHER; note = 2'-fluorouridine-3'-phosphate
  modified_base 12: mod_base = OTHER; note = 2'-O-methylcytidine-3'-phosphate
  modified_base 13: mod_base = OTHER; note = 2'-O-methylcytidine-3'-phosphate
  modified_base 14: mod_base = OTHER; note = 2'-O-methyladenosine-3'-phosphate
  modified_base 15: mod_base = OTHER; note = 2'-O-methyladenosine-3'-phosphate
  modified_base 16: mod_base = OTHER; note = 2'-O-methyladenosine-3'-phosphate
  modified_base 17: mod_base = OTHER; note = 2'-O-methylguanosine-3'-phosphate
  modified_base 18: mod_base = OTHER; note = 2'-O-methyluridine-3'-phosphate
  modified_base 19: mod_base = OTHER; note = 2'-O-methylcytidine-3'-phosphate
  modified_base 20: mod_base = OTHER; note = 2'-O-methyluridine-3'-phosphate
  modified_base 21: mod_base = OTHER; note = 2'-O-methyladenosine-3'-phosphate N-[tris(GalNAc-alkyl)-amidodecanoyl)]-4-hydroxyprolinol Hyp-(GalNAc-alkyl)3
aatcagtacttccaaagtcta

SEQ ID NO: 2069 - RNA, 23 nt, synthetic construct
  source 1..23: mol_type = other RNA; note = Description of Artificial Sequence: Synthetic oligonucleotide
  modified_base 1: mod_base = OTHER; note = 2'-O-methyluridine-3'-phosphorothioate
  modified_base 2: mod_base = OTHER; note = 2'-fluoroadenosine-3'-phosphorothioate
  modified_base 3: mod_base = OTHER; note = 2'-O-methylguanosine-3'-phosphate
  modified_base 4: mod_base = OTHER; note = 2'-O-methyladenosine-3'-phosphate
  modified_base 5: mod_base = OTHER; note = 2'-O-methylcytidine-3'-phosphate
  modified_base 6: mod_base = OTHER; note = 2'-fluorouridine-3'-phosphate
  modified_base 7: mod_base = OTHER; note = 2'-O-methyluridine-3'-phosphate
  modified_base 8: mod_base = OTHER; note = 2'-fluorouridine-3'-phosphate
  modified_base 9: mod_base = OTHER; note = 2'-fluoroguanosine-3'-phosphate
  modified_base 10: mod_base = OTHER; note = 2'-O-methylguanosine-3'-phosphate
  modified_base 11: mod_base = OTHER; note = 2'-O-methyladenosine-3'-phosphate
  modified_base 12: mod_base = OTHER; note = 2'-O-methyladenosine-3'-phosphate
  modified_base 13: mod_base = OTHER; note = 2'-O-methylguanosine-3'-phosphate
  modified_base 14: mod_base = OTHER; note = 2'-fluorouridine-3'-phosphate
  modified_base 15: mod_base = OTHER; note = 2'-O-methyladenosine-3'-phosphate
  modified_base 16: mod_base = OTHER; note = 2'-fluorocytidine-3'-phosphate
  modified_base 17: mod_base = OTHER; note = 2'-O-methyluridine-3'-phosphate
  modified_base 18: mod_base = OTHER; note = 2'-O-methylguanosine-3'-phosphate
  modified_base 19: mod_base = OTHER; note = 2'-O-methyladenosine-3'-phosphate
  modified_base 20: mod_base = OTHER; note = 2'-O-methyluridine-3'-phosphate
  modified_base 21: mod_base = OTHER; note = 2'-O-methyluridine-3'-phosphorothioate
  modified_base 22: mod_base = OTHER; note = 2'-O-methyluridine-3'-phosphorothioate
  modified_base 23: mod_base = OTHER; note = 2'-O-methyladenosine-3'-phosphate
tagactttggaagtactgattta

SEQ ID NO: 2070 - RNA, 21 nt, synthetic construct
  source 1..21: mol_type = other RNA; note = Description of Artificial Sequence: Synthetic oligonucleotide
  modified_base 1: mod_base = OTHER; note = 2'-O-methyluridine-3'-phosphorothioate
  modified_base 2: mod_base = OTHER; note = 2'-O-methylguanosine-3'-phosphorothioate
  modified_base 3: mod_base = OTHER; note = 2'-O-methylcytidine-3'-phosphate
  modified_base 4: mod_base = OTHER; note = 2'-O-methyluridine-3'-phosphate
  modified_base 5: mod_base = OTHER; note = 2'-O-methyladenosine-3'-phosphate
  modified_base 6: mod_base = OTHER; note = 2'-O-methyladenosine-3'-phosphate
  modified_base 7: mod_base = OTHER; note = 2'-fluoroadenosine-3'-phosphate
  modified_base 8: mod_base = OTHER; note = 2'-O-methyluridine-3'-phosphate
  modified_base 9: mod_base = OTHER; note = 2'-fluorocytidine-3'-phosphate
  modified_base 10: mod_base = OTHER; note = 2'-fluoroadenosine-3'-phosphate
  modified_base 11: mod_base = OTHER; note = 2'-fluoroguanosine-3'-phosphate
  modified_base 12: mod_base = OTHER; note = 2'-O-methyluridine-3'-phosphate
  modified_base 13: mod_base = OTHER; note = 2'-O-methyladenosine-3'-phosphate
  modified_base 14: mod_base = OTHER; note = 2'-O-methylcytidine-3'-phosphate
  modified_base 15: mod_base = OTHER; note = 2'-O-methyluridine-3'-phosphate
  modified_base 16: mod_base = OTHER; note = 2'-O-methyluridine-3'-phosphate
  modified_base 17: mod_base = OTHER; note = 2'-O-methylcytidine-3'-phosphate
  modified_base 18: mod_base = OTHER; note = 2'-O-methylcytidine-3'-phosphate
  modified_base 19: mod_base = OTHER; note = 2'-O-methyladenosine-3'-phosphate
  modified_base 20: mod_base = OTHER; note = 2'-O-methyladenosine-3'-phosphate
  modified_base 21: mod_base = OTHER; note = 2'-O-methyladenosine-3'-phosphate N-[tris(GalNAc-alkyl)-amidodecanoyl)]-4-hydroxyprolinol Hyp-(GalNAc-alkyl)3
tgctaaatcagtacttccaaa

SEQ ID NO: 2071 - RNA, 23 nt, synthetic construct
  source 1..23: mol_type = other RNA; note = Description of Artificial Sequence: Synthetic oligonucleotide
  modified_base 1: mod_base = OTHER; note = 2'-O-methyluridine-3'-phosphorothioate
  modified_base 2: mod_base = OTHER; note = 2'-fluorouridine -3'-phosphorothioate
  modified_base 3: mod_base = OTHER; note = 2'-O-methyluridine-3'-phosphate
  modified_base 4: mod_base = OTHER; note = 2'-O-methylguanosine-3'-phosphate
  modified_base 5: mod_base = OTHER; note = 2'-O-methylguanosine-3'-phosphate
  modified_base 6: mod_base = OTHER; note = 2'-fluoroadenosine-3'-phosphate
  modified_base 7: mod_base = OTHER; note = 2'-O-methyladenosine-3'-phosphate
  modified_base 8: mod_base = OTHER; note = 2'-fluoroguanosine-3'-phosphate
  modified_base 9: mod_base = OTHER; note = 2'-fluorouridine-3'-phosphate
  modified_base 10: mod_base = OTHER; note = 2'-O-methyladenosine-3'-phosphate
  modified_base 11: mod_base = OTHER; note = 2'-O-methylcytidine-3'-phosphate
  modified_base 12: mod_base = OTHER; note = 2'-O-methyluridine-3'-phosphate
  modified_base 13: mod_base = OTHER; note = 2'-O-methylguanosine-3'-phosphate
  modified_base 14: mod_base = OTHER; note = 2'-fluoroadenosine-3'-phosphate
  modified_base 15: mod_base = OTHER; note = 2'-O-methyluridine-3'-phosphate
  modified_base 16: mod_base = OTHER; note = 2'-fluorouridine-3'-phosphate
  modified_base 17: mod_base = OTHER; note = 2'-O-methyluridine-3'-phosphate
  modified_base 18: mod_base = OTHER; note = 2'-O-methyladenosine-3'-phosphate
  modified_base 19: mod_base = OTHER; note = 2'-O-methylguanosine-3'-phosphate
  modified_base 20: mod_base = OTHER; note = 2'-O-methylcytidine-3'-phosphate
  modified_base 21: mod_base = OTHER; note = 2'-O-methyladenosine-3'-phosphorothioate
  modified_base 22: mod_base = OTHER; note = 2'-O-methyluridine-3'-phosphorothioate
  modified_base 23: mod_base = OTHER; note = 2'-O-methylguanosine-3'-phosphate
tttggaagtactgatttagcatg

SEQ ID NO: 2072 - RNA, 21 nt, synthetic construct
  source 1..21: mol_type = other RNA; note = Description of Artificial Sequence: Synthetic oligonucleotide
  modified_base 1: mod_base = OTHER; note = 2'-O-methyladenosine-3'-phosphorothioate
  modified_base 2: mod_base = OTHER; note = 2'-O-methyluridine-3'-phosphorothioate
  modified_base 3: mod_base = OTHER; note = 2'-O-methylguanosine-3'-phosphate
  modified_base 4: mod_base = OTHER; note = 2'-O-methylcytidine-3'-phosphate
  modified_base 5: mod_base = OTHER; note = 2'-O-methyluridine-3'-phosphate
  modified_base 6: mod_base = OTHER; note = 2'-O-methyladenosine-3'-phosphate
  modified_base 7: mod_base = OTHER; note = 2'-fluoroadenosine-3'-phosphate
  modified_base 8: mod_base = OTHER; note = 2'-O-methyladenosine-3'-phosphate
  modified_base 9: mod_base = OTHER; note = 2'-fluorouridine-3'-phosphate
  modified_base 10: mod_base = OTHER; note = 2'-fluorocytidine-3'-phosphate
  modified_base 11: mod_base = OTHER; note = 2'-fluoroadenosine-3'-phosphate
  modified_base 12: mod_base = OTHER; note = 2'-O-methylguanosine-3'-phosphate
  modified_base 13: mod_base = OTHER; note = 2'-O-methyluridine-3'-phosphate
  modified_base 14: mod_base = OTHER; note = 2'-O-methyladenosine-3'-phosphate
  modified_base 15: mod_base = OTHER; note = 2'-O-methylcytidine-3'-phosphate
  modified_base 16: mod_base = OTHER; note = 2'-O-methyluridine-3'-phosphate
  modified_base 17: mod_base = OTHER; note = 2'-O-methyluridine-3'-phosphate
  modified_base 18: mod_base = OTHER; note = 2'-O-methylcytidine-3'-phosphate
  modified_base 19: mod_base = OTHER; note = 2'-O-methylcytidine-3'-phosphate
  modified_base 20: mod_base = OTHER; note = 2'-O-methyladenosine-3'-phosphate
  modified_base 21: mod_base = OTHER; note = 2'-O-methyladenosine-3'-phosphate N-[tris(GalNAc-alkyl)-amidodecanoyl)]-4-hydroxyprolinol Hyp-(GalNAc-alkyl)3
atgctaaatcagtacttccaa

SEQ ID NO: 2073 - RNA, 23 nt, synthetic construct
  source 1..23: mol_type = other RNA; note = Description of Artificial Sequence: Synthetic oligonucleotide
  modified_base 1: mod_base = OTHER; note = 2'-O-methyluridine-3'-phosphorothioate
  modified_base 2: mod_base = OTHER; note = 2'-fluorouridine -3'-phosphorothioate
  modified_base 3: mod_base = OTHER; note = 2'-O-methylguanosine-3'-phosphate
  modified_base 4: mod_base = OTHER; note = 2'-O-methylguanosine-3'-phosphate
  modified_base 5: mod_base = OTHER; note = 2'-O-methyladenosine-3'-phosphate
  modified_base 6: mod_base = OTHER; note = 2'-fluoroadenosine-3'-phosphate
  modified_base 7: mod_base = OTHER; note = 2'-O-methylguanosine-3'-phosphate
  modified_base 8: mod_base = OTHER; note = 2'-fluorouridine-3'-phosphate
  modified_base 9: mod_base = OTHER; note = 2'-fluoroadenosine-3'-phosphate
  modified_base 10: mod_base = OTHER; note = 2'-O-methylcytidine-3'-phosphate
  modified_base 11: mod_base = OTHER; note = 2'-O-methyluridine-3'-phosphate
  modified_base 12: mod_base = OTHER; note = 2'-O-methylguanosine-3'-phosphate
  modified_base 13: mod_base = OTHER; note = 2'-O-methyladenosine-3'-phosphate
  modified_base 14: mod_base = OTHER; note = 2'-fluorouridine-3'-phosphate
  modified_base 15: mod_base = OTHER; note = 2'-O-methyluridine-3'-phosphate
  modified_base 16: mod_base = OTHER; note = 2'-fluorouridine-3'-phosphate
  modified_base 17: mod_base = OTHER; note = 2'-O-methyladenosine-3'-phosphate
  modified_base 18: mod_base = OTHER; note = 2'-O-methylguanosine-3'-phosphate
  modified_base 19: mod_base = OTHER; note = 2'-O-methylcytidine-3'-phosphate
  modified_base 20: mod_base = OTHER; note = 2'-O-methyladenosine-3'-phosphate
  modified_base 21: mod_base = OTHER; note = 2'-O-methyluridine-3'-phosphorothioate
  modified_base 22: mod_base = OTHER; note = 2'-O-methylguanosine-3'-phosphorothioate
  modified_base 23: mod_base = OTHER; note = 2'-O-methyluridine-3'-phosphate
ttggaagtactgatttagcatgt

SEQ ID NO: 2074 - RNA, 21 nt, synthetic construct
  source 1..21: mol_type = other RNA; note = Description of Artificial Sequence: Synthetic oligonucleotide
  modified_base 1: mod_base = OTHER; note = 2'-O-methyladenosine-3'-phosphorothioate
  modified_base 2: mod_base = OTHER; note = 2'-O-methylcytidine-3'-phosphorothioate
  modified_base 3: mod_base = OTHER; note = 2'-O-methyladenosine-3'-phosphate
  modified_base 4: mod_base = OTHER; note = 2'-O-methyluridine-3'-phosphate
  modified_base 5: mod_base = OTHER; note = 2'-O-methylcytidine-3'-phosphate
  modified_base 6: mod_base = OTHER; note = 2'-O-methyluridine-3'-phosphate
  modified_base 7: mod_base = OTHER; note = 2'-fluorouridine-3'-phosphate
  modified_base 8: mod_base = OTHER; note = 2'-O-methyluridine-3'-phosphate
  modified_base 9: mod_base = OTHER; note = 2'-fluoroadenosine-3'-phosphate
  modified_base 10: mod_base = OTHER; note = 2'-fluoroguanosine-3'-phosphate
  modified_base 11: mod_base = OTHER; note = 2'-fluorouridine-3'-phosphate
  modified_base 12: mod_base = OTHER; note = 2'-O-methylguanosine-3'-phosphate
  modified_base 13: mod_base = OTHER; note = 2'-O-methyluridine-3'-phosphate
  modified_base 14: mod_base = OTHER; note = 2'-O-methylcytidine-3'-phosphate
  modified_base 15: mod_base = OTHER; note = 2'-O-methyluridine-3'-phosphate
  modified_base 16: mod_base = OTHER; note = 2'-O-methylguanosine-3'-phosphate
  modified_base 17: mod_base = OTHER; note = 2'-O-methyladenosine-3'-phosphate
  modified_base 18: mod_base = OTHER; note = 2'-O-methyladenosine-3'-phosphate
  modified_base 19: mod_base = OTHER; note = 2'-O-methyluridine-3'-phosphate
  modified_base 20: mod_base = OTHER; note = 2'-O-methyladenosine-3'-phosphate
  modified_base 21: mod_base = OTHER; note = 2'-O-methyluridine-3'-phosphate N-[tris(GalNAc-alkyl)-amidodecanoyl)]-4-hydroxyprolinol Hyp-(GalNAc-alkyl)3
acatctttagtgtctgaatat

SEQ ID NO: 2075 - RNA, 23 nt, synthetic construct
  source 1..23: mol_type = other RNA; note = Description of Artificial Sequence: Synthetic oligonucleotide
  modified_base 1: mod_base = OTHER; note = 2'-O-methyladenosine-3'-phosphorothioate
  modified_base 2: mod_base = OTHER; note = 2'-fluorouridine -3'-phosphorothioate
  modified_base 3: mod_base = OTHER; note = 2'-O-methyladenosine-3'-phosphate
  modified_base 4: mod_base = OTHER; note = 2'-O-methyluridine-3'-phosphate
  modified_base 5: mod_base = OTHER; note = 2'-O-methyluridine-3'-phosphate
  modified_base 6: mod_base = OTHER; note = 2'-fluorocytidine-3'-phosphate
  modified_base 7: mod_base = OTHER; note = 2'-O-methyladenosine-3'-phosphate
  modified_base 8: mod_base = OTHER; note = 2'-fluoroguanosine-3'-phosphate
  modified_base 9: mod_base = OTHER; note = 2'-fluoroadenosine-3'-phosphate
  modified_base 10: mod_base = OTHER; note = 2'-O-methylcytidine-3'-phosphate
  modified_base 11: mod_base = OTHER; note = 2'-O-methyladenosine-3'-phosphate
  modified_base 12: mod_base = OTHER; note = 2'-O-methylcytidine-3'-phosphate
  modified_base 13: mod_base = OTHER; note = 2'-O-methyluridine-3'-phosphate
  modified_base 14: mod_base = OTHER; note = 2'-fluoroadenosine-3'-phosphate
  modified_base 15: mod_base = OTHER; note = 2'-O-methyladenosine-3'-phosphate
  modified_base 16: mod_base = OTHER; note = 2'-fluoroadenosine-3'-phosphate
  modified_base 17: mod_base = OTHER; note = 2'-O-methylguanosine-3'-phosphate
  modified_base 18: mod_base = OTHER; note = 2'-O-methyladenosine-3'-phosphate
  modified_base 19: mod_base = OTHER; note = 2'-O-methyluridine-3'-phosphate
  modified_base 20: mod_base = OTHER; note = 2'-O-methylguanosine-3'-phosphate
  modified_base 21: mod_base = OTHER; note = 2'-O-methyluridine-3'-phosphorothioate
  modified_base 22: mod_base = OTHER; note = 2'-O-methylguanosine-3'-phosphorothioate
  modified_base 23: mod_base = OTHER; note = 2'-O-methyladenosine-3'-phosphate
atattcagacactaaagatgtga

SEQ ID NO: 2076 - RNA, 21 nt, synthetic construct
  source 1..21: mol_type = other RNA; note = Description of Artificial Sequence: Synthetic oligonucleotide
  modified_base 1: mod_base = OTHER; note = 2'-O-methylcytidine-3'-phosphorothioate
  modified_base 2: mod_base = OTHER; note = 2'-O-methyladenosine-3'-phosphorothioate
  modified_base 3: mod_base = OTHER; note = 2'-O-methyluridine-3'-phosphate
  modified_base 4: mod_base = OTHER; note = 2'-O-methylcytidine-3'-phosphate
  modified_base 5: mod_base = OTHER; note = 2'-O-methyluridine-3'-phosphate
  modified_base 6: mod_base = OTHER; note = 2'-O-methyluridine-3'-phosphate
  modified_base 7: mod_base = OTHER; note = 2'-fluorouridine-3'-phosphate
  modified_base 8: mod_base = OTHER; note = 2'-O-methyladenosine-3'-phosphate
  modified_base 9: mod_base = OTHER; note = 2'-fluoroguanosine-3'-phosphate
  modified_base 10: mod_base = OTHER; note = 2'-fluorouridine-3'-phosphate
  modified_base 11: mod_base = OTHER; note = 2'-fluoroguanosine-3'-phosphate
  modified_base 12: mod_base = OTHER; note = 2'-O-methyluridine-3'-phosphate
  modified_base 13: mod_base = OTHER; note = 2'-O-methylcytidine-3'-phosphate
  modified_base 14: mod_base = OTHER; note = 2'-O-methyluridine-3'-phosphate
  modified_base 15: mod_base = OTHER; note = 2'-O-methylguanosine-3'-phosphate
  modified_base 16: mod_base = OTHER; note = 2'-O-methyladenosine-3'-phosphate
  modified_base 17: mod_base = OTHER; note = 2'-O-methyladenosine-3'-phosphate
  modified_base 18: mod_base = OTHER; note = 2'-O-methyluridine-3'-phosphate
  modified_base 19: mod_base = OTHER; note = 2'-O-methyladenosine-3'-phosphate
  modified_base 20: mod_base = OTHER; note = 2'-O-methyluridine-3'-phosphate
  modified_base 21: mod_base = OTHER; note = 2'-O-methyladenosine-3'-phosphate N-[tris(GalNAc-alkyl)-amidodecanoyl)]-4-hydroxyprolinol Hyp-(GalNAc-alkyl)3
catctttagtgtctgaatata

SEQ ID NO: 2077 - RNA, 23 nt, synthetic construct
  source 1..23: mol_type = other RNA; note = Description of Artificial Sequence: Synthetic oligonucleotide
  modified_base 1: mod_base = OTHER; note = 2'-O-methyluridine-3'-phosphorothioate
  modified_base 2: mod_base = OTHER; note = 2'-fluoroadenosine-3'-phosphorothioate
  modified_base 3: mod_base = OTHER; note = 2'-O-methyluridine-3'-phosphate
  modified_base 4: mod_base = OTHER; note = 2'-O-methyladenosine-3'-phosphate
  modified_base 5: mod_base = OTHER; note = 2'-O-methyluridine-3'-phosphate
  modified_base 6: mod_base = OTHER; note = 2'-fluorouridine-3'-phosphate
  modified_base 7: mod_base = OTHER; note = 2'-O-methylcytidine-3'-phosphate
  modified_base 8: mod_base = OTHER; note = 2'-fluoroadenosine-3'-phosphate
  modified_base 9: mod_base = OTHER; note = 2'-fluoroguanosine-3'-phosphate
  modified_base 10: mod_base = OTHER; note = 2'-O-methyladenosine-3'-phosphate
  modified_base 11: mod_base = OTHER; note = 2'-O-methylcytidine-3'-phosphate
  modified_base 12: mod_base = OTHER; note = 2'-O-methyladenosine-3'-phosphate
  modified_base 13: mod_base = OTHER; note = 2'-O-methylcytidine-3'-phosphate
  modified_base 14: mod_base = OTHER; note = 2'-fluorouridine-3'-phosphate
  modified_base 15: mod_base = OTHER; note = 2'-O-methyladenosine-3'-phosphate
  modified_base 16: mod_base = OTHER; note = 2'-fluoroadenosine-3'-phosphate
  modified_base 17: mod_base = OTHER; note = 2'-O-methyladenosine-3'-phosphate
  modified_base 18: mod_base = OTHER; note = 2'-O-methylguanosine-3'-phosphate
  modified_base 19: mod_base = OTHER; note = 2'-O-methyladenosine-3'-phosphate
  modified_base 20: mod_base = OTHER; note = 2'-O-methyluridine-3'-phosphate
  modified_base 21: mod_base = OTHER; note = 2'-O-methylguanosine-3'-phosphorothioate
  modified_base 22: mod_base = OTHER; note = 2'-O-methyluridine-3'-phosphorothioate
  modified_base 23: mod_base = OTHER; note = 2'-O-methylguanosine-3'-phosphate
tatattcagacactaaagatgtg

SEQ ID NO: 2078 - RNA, 21 nt, synthetic construct
  source 1..21: mol_type = other RNA; note = Description of Artificial Sequence: Synthetic oligonucleotide
  modified_base 1: mod_base = OTHER; note = 2'-O-methyladenosine-3'-phosphorothioate
  modified_base 2: mod_base = OTHER; note = 2'-O-methyladenosine-3'-phosphorothioate
  modified_base 3: mod_base = OTHER; note = 2'-O-methyluridine-3'-phosphate
  modified_base 4: mod_base = OTHER; note = 2'-O-methylcytidine-3'-phosphate
  modified_base 5: mod_base = OTHER; note = 2'-O-methyladenosine-3'-phosphate
  modified_base 6: mod_base = OTHER; note = 2'-O-methylcytidine-3'-phosphate
  modified_base 7: mod_base = OTHER; note = 2'-fluoroadenosine-3'-phosphate
  modified_base 8: mod_base = OTHER; note = 2'-O-methyluridine-3'-phosphate
  modified_base 9: mod_base = OTHER; note = 2'-fluorocytidine-3'-phosphate
  modified_base 10: mod_base = OTHER; note = 2'-fluorouridine-3'-phosphate
  modified_base 11: mod_base = OTHER; note = 2'-fluorouridine-3'-phosphate
  modified_base 12: mod_base = OTHER; note = 2'-O-methyluridine-3'-phosphate
  modified_base 13: mod_base = OTHER; note = 2'-O-methyladenosine-3'-phosphate
  modified_base 14: mod_base = OTHER; note = 2'-O-methylguanosine-3'-phosphate
  modified_base 15: mod_base = OTHER; note = 2'-O-methyluridine-3'-phosphate
  modified_base 16: mod_base = OTHER; note = 2'-O-methylguanosine-3'-phosphate
  modified_base 17: mod_base = OTHER; note = 2'-O-methyluridine-3'-phosphate
  modified_base 18: mod_base = OTHER; note = 2'-O-methylcytidine-3'-phosphate
  modified_base 19: mod_base = OTHER; note = 2'-O-methyluridine-3'-phosphate
  modified_base 20: mod_base = OTHER; note = 2'-O-methylguanosine-3'-phosphate
  modified_base 21: mod_base = OTHER; note = 2'-O-methyladenosine-3'-phosphate N-[tris(GalNAc-alkyl)-amidodecanoyl)]-4-hydroxyprolinol Hyp-(GalNAc-alkyl)3
aatcacatctttagtgtctga

SEQ ID NO: 2079 - RNA, 23 nt, synthetic construct
  source 1..23: mol_type = other RNA; note = Description of Artificial Sequence: Synthetic oligonucleotide
  modified_base 1: mod_base = OTHER; note = 2'-O-methyluridine-3'-phosphorothioate
  modified_base 2: mod_base = OTHER; note = 2'-fluorocytidine-3'-phosphorothioate
  modified_base 3: mod_base = OTHER; note = 2'-O-methyladenosine-3'-phosphate
  modified_base 4: mod_base = OTHER; note = 2'-O-methylguanosine-3'-phosphate
  modified_base 5: mod_base = OTHER; note = 2'-O-methyladenosine-3'-phosphate
  modified_base 6: mod_base = OTHER; note = 2'-fluorocytidine-3'-phosphate
  modified_base 7: mod_base = OTHER; note = 2'-O-methyladenosine-3'-phosphate
  modified_base 8: mod_base = OTHER; note = 2'-fluorocytidine-3'-phosphate
  modified_base 9: mod_base = OTHER; note = 2'-fluorouridine-3'-phosphate
  modified_base 10: mod_base = OTHER; note = 2'-O-methyladenosine-3'-phosphate
  modified_base 11: mod_base = OTHER; note = 2'-O-methyladenosine-3'-phosphate
  modified_base 12: mod_base = OTHER; note = 2'-O-methyladenosine-3'-phosphate
  modified_base 13: mod_base = OTHER; note = 2'-O-methylguanosine-3'-phosphate
  modified_base 14: mod_base = OTHER; note = 2'-fluoroadenosine-3'-phosphate
  modified_base 15: mod_base = OTHER; note = 2'-O-methyluridine-3'-phosphate
  modified_base 16: mod_base = OTHER; note = 2'-fluoroguanosine-3'-phosphate
  modified_base 17: mod_base = OTHER; note = 2'-O-methyluridine-3'-phosphate
  modified_base 18: mod_base = OTHER; note = 2'-O-methylguanosine-3'-phosphate
  modified_base 19: mod_base = OTHER; note = 2'-O-methyladenosine-3'-phosphate
  modified_base 20: mod_base = OTHER; note = 2'-O-methyluridine-3'-phosphate
  modified_base 21: mod_base = OTHER; note = 2'-O-methyluridine-3'-phosphorothioate
  modified_base 22: mod_base = OTHER; note = 2'-O-methylguanosine-3'-phosphorothioate
  modified_base 23: mod_base = OTHER; note = 2'-O-methylguanosine-3'-phosphate
tcagacactaaagatgtgattgg

SEQ ID NO: 2080 - RNA, 21 nt, synthetic construct
  source 1..21: mol_type = other RNA; note = Description of Artificial Sequence: Synthetic oligonucleotide
  modified_base 1: mod_base = OTHER; note = 2'-O-methylcytidine-3'-phosphorothioate
  modified_base 2: mod_base = OTHER; note = 2'-O-methyladenosine-3'-phosphorothioate
  modified_base 3: mod_base = OTHER; note = 2'-O-methyladenosine-3'-phosphate
  modified_base 4: mod_base = OTHER; note = 2'-O-methyluridine-3'-phosphate
  modified_base 5: mod_base = OTHER; note = 2'-O-methylcytidine-3'-phosphate
  modified_base 6: mod_base = OTHER; note = 2'-O-methyladenosine-3'-phosphate
  modified_base 7: mod_base = OTHER; note = 2'-fluorocytidine-3'-phosphate
  modified_base 8: mod_base = OTHER; note = 2'-O-methyladenosine-3'-phosphate
  modified_base 9: mod_base = OTHER; note = 2'-fluorouridine-3'-phosphate
  modified_base 10: mod_base = OTHER; note = 2'-fluorocytidine-3'-phosphate
  modified_base 11: mod_base = OTHER; note = 2'-fluorouridine-3'-phosphate
  modified_base 12: mod_base = OTHER; note = 2'-O-methyluridine-3'-phosphate
  modified_base 13: mod_base = OTHER; note = 2'-O-methyluridine-3'-phosphate
  modified_base 14: mod_base = OTHER; note = 2'-O-methyladenosine-3'-phosphate
  modified_base 15: mod_base = OTHER; note = 2'-O-methylguanosine-3'-phosphate
  modified_base 16: mod_base = OTHER; note = 2'-O-methyluridine-3'-phosphate
  modified_base 17: mod_base = OTHER; note = 2'-O-methylguanosine-3'-phosphate
  modified_base 18: mod_base = OTHER; note = 2'-O-methyluridine-3'-phosphate
  modified_base 19: mod_base = OTHER; note = 2'-O-methylcytidine-3'-phosphate
  modified_base 20: mod_base = OTHER; note = 2'-O-methyluridine-3'-phosphate
  modified_base 21: mod_base = OTHER; note = 2'-O-methylguanosine-3'-phosphate N-[tris(GalNAc-alkyl)-amidodecanoyl)]-4-hydroxyprolinol Hyp-(GalNAc-alkyl)3
caatcacatctttagtgtctg

SEQ ID NO: 2081 - RNA, 23 nt, synthetic construct
  source 1..23: mol_type = other RNA; note = Description of Artificial Sequence: Synthetic oligonucleotide
  modified_base 1: mod_base = OTHER; note = 2'-O-methylcytidine-3'-phosphorothioate
  modified_base 2: mod_base = OTHER; note = 2'-fluoroadenosine-3'-phosphorothioate
  modified_base 3: mod_base = OTHER; note = 2'-O-methylguanosine-3'-phosphate
  modified_base 4: mod_base = OTHER; note = 2'-O-methyladenosine-3'-phosphate
  modified_base 5: mod_base = OTHER; note = 2'-O-methylcytidine-3'-phosphate
  modified_base 6: mod_base = OTHER; note = 2'-fluoroadenosine-3'-phosphate
  modified_base 7: mod_base = OTHER; note = 2'-O-methylcytidine-3'-phosphate
  modified_base 8: mod_base = OTHER; note = 2'-fluorouridine-3'-phosphate
  modified_base 9: mod_base = OTHER; note = 2'-fluoroadenosine-3'-phosphate
  modified_base 10: mod_base = OTHER; note = 2'-O-methyladenosine-3'-phosphate
  modified_base 11: mod_base = OTHER; note = 2'-O-methyladenosine-3'-phosphate
  modified_base 12: mod_base = OTHER; note = 2'-O-methylguanosine-3'-phosphate
  modified_base 13: mod_base = OTHER; note = 2'-O-methyladenosine-3'-phosphate
  modified_base 14: mod_base = OTHER; note = 2'-fluorouridine-3'-phosphate
  modified_base 15: mod_base = OTHER; note = 2'-O-methylguanosine-3'-phosphate
  modified_base 16: mod_base = OTHER; note = 2'-fluorouridine-3'-phosphate
  modified_base 17: mod_base = OTHER; note = 2'-O-methylguanosine-3'-phosphate
  modified_base 18: mod_base = OTHER; note = 2'-O-methyladenosine-3'-phosphate
  modified_base 19: mod_base = OTHER; note = 2'-O-methyluridine-3'-phosphate
  modified_base 20: mod_base = OTHER; note = 2'-O-methyluridine-3'-phosphate
  modified_base 21: mod_base = OTHER; note = 2'-O-methylguanosine-3'-phosphorothioate
  modified_base 22: mod_base = OTHER; note = 2'-O-methylguanosine-3'-phosphorothioate
  modified_base 23: mod_base = OTHER; note = 2'-O-methyladenosine-3'-phosphate
cagacactaaagatgtgattgga

SEQ ID NO: 2082 - RNA, 21 nt, synthetic construct
  source 1..21: mol_type = other RNA; note = Description of Artificial Sequence: Synthetic oligonucleotide
  modified_base 1: mod_base = OTHER; note = 2'-O-methylguanosine-3'-phosphorothioate
  modified_base 2: mod_base = OTHER; note = 2'-O-methylcytidine-3'-phosphorothioate
  modified_base 3: mod_base = OTHER; note = 2'-O-methyladenosine-3'-phosphate
  modified_base 4: mod_base = OTHER; note = 2'-O-methyluridine-3'-phosphate
  modified_base 5: mod_base = OTHER; note = 2'-O-methylguanosine-3'-phosphate
  modified_base 6: mod_base = OTHER; note = 2'-O-methyluridine-3'-phosphate
  modified_base 7: mod_base = OTHER; note = 2'-fluoroadenosine-3'-phosphate
  modified_base 8: mod_base = OTHER; note = 2'-O-methyluridine-3'-phosphate
  modified_base 9: mod_base = OTHER; note = 2'-fluorouridine-3'-phosphate
  modified_base 10: mod_base = OTHER; note = 2'-fluoroadenosine-3'-phosphate
  modified_base 11: mod_base = OTHER; note = 2'-fluorocytidine-3'-phosphate
  modified_base 12: mod_base = OTHER; note = 2'-O-methyluridine-3'-phosphate
  modified_base 13: mod_base = OTHER; note = 2'-O-methyluridine-3'-phosphate
  modified_base 14: mod_base = OTHER; note = 2'-O-methylguanosine-3'-phosphate
  modified_base 15: mod_base = OTHER; note = 2'-O-methyladenosine-3'-phosphate
  modified_base 16: mod_base = OTHER; note = 2'-O-methylcytidine-3'-phosphate
  modified_base 17: mod_base = OTHER; note = 2'-O-methyladenosine-3'-phosphate
  modified_base 18: mod_base = OTHER; note = 2'-O-methyladenosine-3'-phosphate
  modified_base 19: mod_base = OTHER; note = 2'-O-methyladenosine-3'-phosphate
  modified_base 20: mod_base = OTHER; note = 2'-O-methylguanosine-3'-phosphate
  modified_base 21: mod_base = OTHER; note = 2'-O-methyladenosine-3'-phosphate N-[tris(GalNAc-alkyl)-amidodecanoyl)]-4-hydroxyprolinol Hyp-(GalNAc-alkyl)3
gcatgtattacttgacaaaga

SEQ ID NO: 2083 - RNA, 23 nt, synthetic construct
  source 1..23: mol_type = other RNA; note = Description of Artificial Sequence: Synthetic oligonucleotide
  modified_base 1: mod_base = OTHER; note = 2'-O-methyluridine-3'-phosphorothioate
  modified_base 2: mod_base = OTHER; note = 2'-fluorocytidine-3'-phosphorothioate
  modified_base 3: mod_base = OTHER; note = 2'-O-methyluridine-3'-phosphate
  modified_base 4: mod_base = OTHER; note = 2'-O-methyluridine-3'-phosphate
  modified_base 5: mod_base = OTHER; note = 2'-O-methyluridine-3'-phosphate
  modified_base 6: mod_base = OTHER; note = 2'-fluoroguanosine-3'-phosphate
  modified_base 7: mod_base = OTHER; note = 2'-O-methyluridine-3'-phosphate
  modified_base 8: mod_base = OTHER; note = 2'-fluorocytidine-3'-phosphate
  modified_base 9: mod_base = OTHER; note = 2'-fluoroadenosine-3'-phosphate
  modified_base 10: mod_base = OTHER; note = 2'-O-methyladenosine-3'-phosphate
  modified_base 11: mod_base = OTHER; note = 2'-O-methylguanosine-3'-phosphate
  modified_base 12: mod_base = OTHER; note = 2'-O-methyluridine-3'-phosphate
  modified_base 13: mod_base = OTHER; note = 2'-O-methyladenosine-3'-phosphate
  modified_base 14: mod_base = OTHER; note = 2'-fluoroadenosine-3'-phosphate
  modified_base 15: mod_base = OTHER; note = 2'-O-methyluridine-3'-phosphate
  modified_base 16: mod_base = OTHER; note = 2'-fluoroadenosine-3'-phosphate
  modified_base 17: mod_base = OTHER; note = 2'-O-methylcytidine-3'-phosphate
  modified_base 18: mod_base = OTHER; note = 2'-O-methyladenosine-3'-phosphate
  modified_base 19: mod_base = OTHER; note = 2'-O-methyluridine-3'-phosphate
  modified_base 20: mod_base = OTHER; note = 2'-O-methylguanosine-3'-phosphate
  modified_base 21: mod_base = OTHER; note = 2'-O-methylcytidine-3'-phosphorothioate
  modified_base 22: mod_base = OTHER; note = 2'-O-methyluridine-3'-phosphorothioate
  modified_base 23: mod_base = OTHER; note = 2'-O-methylguanosine-3'-phosphate
tctttgtcaagtaatacatgctg

SEQ ID NO: 2084 - RNA, 21 nt, synthetic construct
  source 1..21: mol_type = other RNA; note = Description of Artificial Sequence: Synthetic oligonucleotide
  modified_base 1: mod_base = OTHER; note = 2'-O-methylcytidine-3'-phosphorothioate
  modified_base 2: mod_base = OTHER; note = 2'-O-methyladenosine-3'-phosphorothioate
  modified_base 3: mod_base = OTHER; note = 2'-O-methyluridine-3'-phosphate
  modified_base 4: mod_base = OTHER; note = 2'-O-methylguanosine-3'-phosphate
  modified_base 5: mod_base = OTHER; note = 2'-O-methyluridine-3'-phosphate
  modified_base 6: mod_base = OTHER; note = 2'-O-methyladenosine-3'-phosphate
  modified_base 7: mod_base = OTHER; note = 2'-fluorouridine-3'-phosphate
  modified_base 8: mod_base = OTHER; note = 2'-O-methyluridine-3'-phosphate
  modified_base 9: mod_base = OTHER; note = 2'-fluoroadenosine-3'-phosphate
  modified_base 10: mod_base = OTHER; note = 2'-fluorocytidine-3'-phosphate
  modified_base 11: mod_base = OTHER; note = 2'-fluorouridine-3'-phosphate
  modified_base 12: mod_base = OTHER; note = 2'-O-methyluridine-3'-phosphate
  modified_base 13: mod_base = OTHER; note = 2'-O-methylguanosine-3'-phosphate
  modified_base 14: mod_base = OTHER; note = 2'-O-methyladenosine-3'-phosphate
  modified_base 15: mod_base = OTHER; note = 2'-O-methylcytidine-3'-phosphate
  modified_base 16: mod_base = OTHER; note = 2'-O-methyladenosine-3'-phosphate
  modified_base 17: mod_base = OTHER; note = 2'-O-methyladenosine-3'-phosphate
  modified_base 18: mod_base = OTHER; note = 2'-O-methyladenosine-3'-phosphate
  modified_base 19: mod_base = OTHER; note = 2'-O-methylguanosine-3'-phosphate
  modified_base 20: mod_base = OTHER; note = 2'-O-methyladenosine-3'-phosphate
  modified_base 21: mod_base = OTHER; note = 2'-O-methylguanosine-3'-phosphate N-[tris(GalNAc-alkyl)-amidodecanoyl)]-4-hydroxyprolinol Hyp-(GalNAc-alkyl)3
catgtattacttgacaaagag

SEQ ID NO: 2085 - RNA, 23 nt, synthetic construct
  source 1..23: mol_type = other RNA; note = Description of Artificial Sequence: Synthetic oligonucleotide
  modified_base 1: mod_base = OTHER; note = 2'-O-methylcytidine-3'-phosphorothioate
  modified_base 2: mod_base = OTHER; note = 2'-fluorouridine -3'-phosphorothioate
  modified_base 3: mod_base = OTHER; note = 2'-O-methylcytidine-3'-phosphate
  modified_base 4: mod_base = OTHER; note = 2'-O-methyluridine-3'-phosphate
  modified_base 5: mod_base = OTHER; note = 2'-O-methyluridine-3'-phosphate
  modified_base 6: mod_base = OTHER; note = 2'-fluorouridine-3'-phosphate
  modified_base 7: mod_base = OTHER; note = 2'-O-methylguanosine-3'-phosphate
  modified_base 8: mod_base = OTHER; note = 2'-fluorouridine-3'-phosphate
  modified_base 9: mod_base = OTHER; note = 2'-fluorocytidine-3'-phosphate
  modified_base 10: mod_base = OTHER; note = 2'-O-methyladenosine-3'-phosphate
  modified_base 11: mod_base = OTHER; note = 2'-O-methyladenosine-3'-phosphate
  modified_base 12: mod_base = OTHER; note = 2'-O-methylguanosine-3'-phosphate
  modified_base 13: mod_base = OTHER; note = 2'-O-methyluridine-3'-phosphate
  modified_base 14: mod_base = OTHER; note = 2'-fluoroadenosine-3'-phosphate
  modified_base 15: mod_base = OTHER; note = 2'-O-methyladenosine-3'-phosphate
  modified_base 16: mod_base = OTHER; note = 2'-fluorouridine-3'-phosphate
  modified_base 17: mod_base = OTHER; note = 2'-O-methyladenosine-3'-phosphate
  modified_base 18: mod_base = OTHER; note = 2'-O-methylcytidine-3'-phosphate
  modified_base 19: mod_base = OTHER; note = 2'-O-methyladenosine-3'-phosphate
  modified_base 20: mod_base = OTHER; note = 2'-O-methyluridine-3'-phosphate
  modified_base 21: mod_base = OTHER; note = 2'-O-methylguanosine-3'-phosphorothioate
  modified_base 22: mod_base = OTHER; note = 2'-O-methylcytidine-3'-phosphorothioate
  modified_base 23: mod_base = OTHER; note = 2'-O-methyluridine-3'-phosphate
ctctttgtcaagtaatacatgct

SEQ ID NO: 2086 - RNA, 21 nt, synthetic construct
  source 1..21: mol_type = other RNA; note = Description of Artificial Sequence: Synthetic oligonucleotide
  modified_base 1: mod_base = OTHER; note = 2'-O-methyluridine-3'-phosphorothioate
  modified_base 2: mod_base = OTHER; note = 2'-O-methyluridine-3'-phosphorothioate
  modified_base 3: mod_base = OTHER; note = 2'-O-methylcytidine-3'-phosphate
  modified_base 4: mod_base = OTHER; note = 2'-O-methyladenosine-3'-phosphate
  modified_base 5: mod_base = OTHER; note = 2'-O-methylguanosine-3'-phosphate
  modified_base 6: mod_base = OTHER; note = 2'-O-methylcytidine-3'-phosphate
  modified_base 7: mod_base = OTHER; note = 2'-fluoroadenosine-3'-phosphate
  modified_base 8: mod_base = OTHER; note = 2'-O-methyluridine-3'-phosphate
  modified_base 9: mod_base = OTHER; note = 2'-fluoroguanosine-3'-phosphate
  modified_base 10: mod_base = OTHER; note = 2'-fluorouridine-3'-phosphate
  modified_base 11: mod_base = OTHER; note = 2'-fluoroadenosine-3'-phosphate
  modified_base 12: mod_base = OTHER; note = 2'-O-methyluridine-3'-phosphate
  modified_base 13: mod_base = OTHER; note = 2'-O-methyluridine-3'-phosphate
  modified_base 14: mod_base = OTHER; note = 2'-O-methyladenosine-3'-phosphate
  modified_base 15: mod_base = OTHER; note = 2'-O-methylcytidine-3'-phosphate
  modified_base 16: mod_base = OTHER; note = 2'-O-methyluridine-3'-phosphate
  modified_base 17: mod_base = OTHER; note = 2'-O-methyluridine-3'-phosphate
  modified_base 18: mod_base = OTHER; note = 2'-O-methylguanosine-3'-phosphate
  modified_base 19: mod_base = OTHER; note = 2'-O-methyladenosine-3'-phosphate
  modified_base 20: mod_base = OTHER; note = 2'-O-methylcytidine-3'-phosphate
  modified_base 21: mod_base = OTHER; note = 2'-O-methyladenosine-3'-phosphate N-[tris(GalNAc-alkyl)-amidodecanoyl)]-4-hydroxyprolinol Hyp-(GalNAc-alkyl)3
ttcagcatgtattacttgaca

SEQ ID NO: 2087 - RNA, 23 nt, synthetic construct
  source 1..23: mol_type = other RNA; note = Description of Artificial Sequence: Synthetic oligonucleotide
  modified_base 1: mod_base = OTHER; note = 2'-O-methyluridine-3'-phosphorothioate
  modified_base 2: mod_base = OTHER; note = 2'-fluoroguanosine-3'-phosphorothioate
  modified_base 3: mod_base = OTHER; note = 2'-O-methyluridine-3'-phosphate
  modified_base 4: mod_base = OTHER; note = 2'-O-methylcytidine-3'-phosphate
  modified_base 5: mod_base = OTHER; note = 2'-O-methyladenosine-3'-phosphate
  modified_base 6: mod_base = OTHER; note = 2'-fluoroadenosine-3'-phosphate
  modified_base 7: mod_base = OTHER; note = 2'-O-methylguanosine-3'-phosphate
  modified_base 8: mod_base = OTHER; note = 2'-fluorouridine-3'-phosphate
  modified_base 9: mod_base = OTHER; note = 2'-fluoroadenosine-3'-phosphate
  modified_base 10: mod_base = OTHER; note = 2'-O-methyladenosine-3'-phosphate
  modified_base 11: mod_base = OTHER; note = 2'-O-methyluridine-3'-phosphate
  modified_base 12: mod_base = OTHER; note = 2'-O-methyladenosine-3'-phosphate
  modified_base 13: mod_base = OTHER; note = 2'-O-methylcytidine-3'-phosphate
  modified_base 14: mod_base = OTHER; note = 2'-fluoroadenosine-3'-phosphate
  modified_base 15: mod_base = OTHER; note = 2'-O-methyluridine-3'-phosphate
  modified_base 16: mod_base = OTHER; note = 2'-fluoroguanosine-3'-phosphate
  modified_base 17: mod_base = OTHER; note = 2'-O-methylcytidine-3'-phosphate
  modified_base 18: mod_base = OTHER; note = 2'-O-methyluridine-3'-phosphate
  modified_base 19: mod_base = OTHER; note = 2'-O-methylguanosine-3'-phosphate
  modified_base 20: mod_base = OTHER; note = 2'-O-methyladenosine-3'-phosphate
  modified_base 21: mod_base = OTHER; note = 2'-O-methyladenosine-3'-phosphorothioate
  modified_base 22: mod_base = OTHER; note = 2'-O-methyladenosine-3'-phosphorothioate
  modified_base 23: mod_base = OTHER; note = 2'-O-methyladenosine-3'-phosphate
tgtcaagtaatacatgctgaaaa

SEQ ID NO: 2088 - RNA, 21 nt, synthetic construct
  source 1..21: mol_type = other RNA; note = Description of Artificial Sequence: Synthetic oligonucleotide
  modified_base 1: mod_base = OTHER; note = 2'-O-methyluridine-3'-phosphorothioate
  modified_base 2: mod_base = OTHER; note = 2'-O-methyluridine-3'-phosphorothioate
  modified_base 3: mod_base = OTHER; note = 2'-O-methyluridine-3'-phosphate
  modified_base 4: mod_base = OTHER; note = 2'-O-methylcytidine-3'-phosphate
  modified_base 5: mod_base = OTHER; note = 2'-O-methyladenosine-3'-phosphate
  modified_base 6: mod_base = OTHER; note = 2'-O-methylguanosine-3'-phosphate
  modified_base 7: mod_base = OTHER; note = 2'-fluorocytidine-3'-phosphate
  modified_base 8: mod_base = OTHER; note = 2'-O-methyladenosine-3'-phosphate
  modified_base 9: mod_base = OTHER; note = 2'-fluorouridine-3'-phosphate
  modified_base 10: mod_base = OTHER; note = 2'-fluoroguanosine-3'-phosphate
  modified_base 11: mod_base = OTHER; note = 2'-fluorouridine-3'-phosphate
  modified_base 12: mod_base = OTHER; note = 2'-O-methyladenosine-3'-phosphate
  modified_base 13: mod_base = OTHER; note = 2'-O-methyluridine-3'-phosphate
  modified_base 14: mod_base = OTHER; note = 2'-O-methyluridine-3'-phosphate
  modified_base 15: mod_base = OTHER; note = 2'-O-methyladenosine-3'-phosphate
  modified_base 16: mod_base = OTHER; note = 2'-O-methylcytidine-3'-phosphate
  modified_base 17: mod_base = OTHER; note = 2'-O-methyluridine-3'-phosphate
  modified_base 18: mod_base = OTHER; note = 2'-O-methyluridine-3'-phosphate
  modified_base 19: mod_base = OTHER; note = 2'-O-methylguanosine-3'-phosphate
  modified_base 20: mod_base = OTHER; note = 2'-O-methyladenosine-3'-phosphate
  modified_base 21: mod_base = OTHER; note = 2'-O-methylcytidine-3'-phosphate N-[tris(GalNAc-alkyl)-amidodecanoyl)]-4-hydroxyprolinol Hyp-(GalNAc-alkyl)3
tttcagcatgtattacttgac

SEQ ID NO: 2089 - RNA, 23 nt, synthetic construct
  source 1..23: mol_type = other RNA; note = Description of Artificial Sequence: Synthetic oligonucleotide
  modified_base 1: mod_base = OTHER; note = 2'-O-methylguanosine-3'-phosphorothioate
  modified_base 2: mod_base = OTHER; note = 2'-fluorouridine -3'-phosphorothioate
  modified_base 3: mod_base = OTHER; note = 2'-O-methylcytidine-3'-phosphate
  modified_base 4: mod_base = OTHER; note = 2'-O-methyladenosine-3'-phosphate
  modified_base 5: mod_base = OTHER; note = 2'-O-methyladenosine-3'-phosphate
  modified_base 6: mod_base = OTHER; note = 2'-fluoroguanosine-3'-phosphate
  modified_base 7: mod_base = OTHER; note = 2'-O-methyluridine-3'-phosphate
  modified_base 8: mod_base = OTHER; note = 2'-fluoroadenosine-3'-phosphate
  modified_base 9: mod_base = OTHER; note = 2'-fluoroadenosine-3'-phosphate
  modified_base 10: mod_base = OTHER; note = 2'-O-methyluridine-3'-phosphate
  modified_base 11: mod_base = OTHER; note = 2'-O-methyladenosine-3'-phosphate
  modified_base 12: mod_base = OTHER; note = 2'-O-methylcytidine-3'-phosphate
  modified_base 13: mod_base = OTHER; note = 2'-O-methyladenosine-3'-phosphate
  modified_base 14: mod_base = OTHER; note = 2'-fluorouridine-3'-phosphate
  modified_base 15: mod_base = OTHER; note = 2'-O-methylguanosine-3'-phosphate
  modified_base 16: mod_base = OTHER; note = 2'-fluorocytidine-3'-phosphate
  modified_base 17: mod_base = OTHER; note = 2'-O-methyluridine-3'-phosphate
  modified_base 18: mod_base = OTHER; note = 2'-O-methylguanosine-3'-phosphate
  modified_base 19: mod_base = OTHER; note = 2'-O-methyladenosine-3'-phosphate
  modified_base 20: mod_base = OTHER; note = 2'-O-methyladenosine-3'-phosphate
  modified_base 21: mod_base = OTHER; note = 2'-O-methyladenosine-3'-phosphorothioate
  modified_base 22: mod_base = OTHER; note = 2'-O-methyladenosine-3'-phosphorothioate
  modified_base 23: mod_base = OTHER; note = 2'-O-methyladenosine-3'-phosphate
gtcaagtaatacatgctgaaaaa

SEQ ID NO: 2090 - RNA, 21 nt, synthetic construct
  source 1..21: mol_type = other RNA; note = Description of Artificial Sequence: Synthetic oligonucleotide
  modified_base 1: mod_base = OTHER; note = 2'-O-methyladenosine-3'-phosphorothioate
  modified_base 2: mod_base = OTHER; note = 2'-O-methyluridine-3'-phosphorothioate
  modified_base 3: mod_base = OTHER; note = 2'-O-methylguanosine-3'-phosphate
  modified_base 4: mod_base = OTHER; note = 2'-O-methyluridine-3'-phosphate
  modified_base 5: mod_base = OTHER; note = 2'-O-methyluridine-3'-phosphate
  modified_base 6: mod_base = OTHER; note = 2'-O-methyladenosine-3'-phosphate
  modified_base 7: mod_base = OTHER; note = 2'-fluorocytidine-3'-phosphate
  modified_base 8: mod_base = OTHER; note = 2'-O-methyluridine-3'-phosphate
  modified_base 9: mod_base = OTHER; note = 2'-fluorouridine-3'-phosphate
  modified_base 10: mod_base = OTHER; note = 2'-fluorocytidine-3'-phosphate
  modified_base 11: mod_base = OTHER; note = 2'-fluorouridine-3'-phosphate
  modified_base 12: mod_base = OTHER; note = 2'-O-methyluridine-3'-phosphate
  modified_base 13: mod_base = OTHER; note = 2'-O-methyladenosine-3'-phosphate
  modified_base 14: mod_base = OTHER; note = 2'-O-methylguanosine-3'-phosphate
  modified_base 15: mod_base = OTHER; note = 2'-O-methyladenosine-3'-phosphate
  modified_base 16: mod_base = OTHER; note = 2'-O-methylguanosine-3'-phosphate
  modified_base 17: mod_base = OTHER; note = 2'-O-methyladenosine-3'-phosphate
  modified_base 18: mod_base = OTHER; note = 2'-O-methylguanosine-3'-phosphate
  modified_base 19: mod_base = OTHER; note = 2'-O-methyladenosine-3'-phosphate
  modified_base 20: mod_base = OTHER; note = 2'-O-methyladenosine-3'-phosphate
  modified_base 21: mod_base = OTHER; note = 2'-O-methyladenosine-3'-phosphate N-[tris(GalNAc-alkyl)-amidodecanoyl)]-4-hydroxyprolinol Hyp-(GalNAc-alkyl)3
atgttacttcttagagagaaa

SEQ ID NO: 2091 - RNA, 23 nt, synthetic construct
  source 1..23: mol_type = other RNA; note = Description of Artificial Sequence: Synthetic oligonucleotide
  modified_base 1: mod_base = OTHER; note = 2'-O-methyluridine-3'-phosphorothioate
  modified_base 2: mod_base = OTHER; note = 2'-fluorouridine -3'-phosphorothioate
  modified_base 3: mod_base = OTHER; note = 2'-O-methyluridine-3'-phosphate
  modified_base 4: mod_base = OTHER; note = 2'-O-methylcytidine-3'-phosphate
  modified_base 5: mod_base = OTHER; note = 2'-O-methyluridine-3'-phosphate
  modified_base 6: mod_base = OTHER; note = 2'-fluorocytidine-3'-phosphate
  modified_base 7: mod_base = OTHER; note = 2'-O-methyluridine-3'-phosphate
  modified_base 8: mod_base = OTHER; note = 2'-fluorocytidine-3'-phosphate
  modified_base 9: mod_base = OTHER; note = 2'-fluorouridine-3'-phosphate
  modified_base 10: mod_base = OTHER; note = 2'-O-methyladenosine-3'-phosphate
  modified_base 11: mod_base = OTHER; note = 2'-O-methyladenosine-3'-phosphate
  modified_base 12: mod_base = OTHER; note = 2'-O-methylguanosine-3'-phosphate
  modified_base 13: mod_base = OTHER; note = 2'-O-methyladenosine-3'-phosphate
  modified_base 14: mod_base = OTHER; note = 2'-fluoroadenosine-3'-phosphate
  modified_base 15: mod_base = OTHER; note = 2'-O-methylguanosine-3'-phosphate
  modified_base 16: mod_base = OTHER; note = 2'-fluorouridine-3'-phosphate
  modified_base 17: mod_base = OTHER; note = 2'-O-methyladenosine-3'-phosphate
  modified_base 18: mod_base = OTHER; note = 2'-O-methyladenosine-3'-phosphate
  modified_base 19: mod_base = OTHER; note = 2'-O-methylcytidine-3'-phosphate
  modified_base 20: mod_base = OTHER; note = 2'-O-methyladenosine-3'-phosphate
  modified_base 21: mod_base = OTHER; note = 2'-O-methyluridine-3'-phosphorothioate
  modified_base 22: mod_base = OTHER; note = 2'-O-methyladenosine-3'-phosphorothioate
  modified_base 23: mod_base = OTHER; note = 2'-O-methylcytidine-3'-phosphate
tttctctctaagaagtaacatac

SEQ ID NO: 2092 - RNA, 21 nt, synthetic construct
  source 1..21: mol_type = other RNA; note = Description of Artificial Sequence: Synthetic oligonucleotide
  modified_base 1: mod_base = OTHER; note = 2'-O-methyluridine-3'-phosphorothioate
  modified_base 2: mod_base = OTHER; note = 2'-O-methylguanosine-3'-phosphorothioate
  modified_base 3: mod_base = OTHER; note = 2'-O-methyluridine-3'-phosphate
  modified_base 4: mod_base = OTHER; note = 2'-O-methyluridine-3'-phosphate
  modified_base 5: mod_base = OTHER; note = 2'-O-methyladenosine-3'-phosphate
  modified_base 6: mod_base = OTHER; note = 2'-O-methylcytidine-3'-phosphate
  modified_base 7: mod_base = OTHER; note = 2'-fluorouridine-3'-phosphate
  modified_base 8: mod_base = OTHER; note = 2'-O-methyluridine-3'-phosphate
  modified_base 9: mod_base = OTHER; note = 2'-fluorocytidine-3'-phosphate
  modified_base 10: mod_base = OTHER; note = 2'-fluorouridine-3'-phosphate
  modified_base 11: mod_base = OTHER; note = 2'-fluorouridine-3'-phosphate
  modified_base 12: mod_base = OTHER; note = 2'-O-methyladenosine-3'-phosphate
  modified_base 13: mod_base = OTHER; note = 2'-O-methylguanosine-3'-phosphate
  modified_base 14: mod_base = OTHER; note = 2'-O-methyladenosine-3'-phosphate
  modified_base 15: mod_base = OTHER; note = 2'-O-methylguanosine-3'-phosphate
  modified_base 16: mod_base = OTHER; note = 2'-O-methyladenosine-3'-phosphate
  modified_base 17: mod_base = OTHER; note = 2'-O-methylguanosine-3'-phosphate
  modified_base 18: mod_base = OTHER; note = 2'-O-methyladenosine-3'-phosphate
  modified_base 19: mod_base = OTHER; note = 2'-O-methyladenosine-3'-phosphate
  modified_base 20: mod_base = OTHER; note = 2'-O-methyladenosine-3'-phosphate
  modified_base 21: mod_base = OTHER; note = 2'-O-methyluridine-3'-phosphate N-[tris(GalNAc-alkyl)-amidodecanoyl)]-4-hydroxyprolinol Hyp-(GalNAc-alkyl)3
tgttacttcttagagagaaat

SEQ ID NO: 2093 - RNA, 23 nt, synthetic construct
  source 1..23: mol_type = other RNA; note = Description of Artificial Sequence: Synthetic oligonucleotide
  modified_base 1: mod_base = OTHER; note = 2'-O-methyladenosine-3'-phosphorothioate
  modified_base 2: mod_base = OTHER; note = 2'-fluorouridine -3'-phosphorothioate
  modified_base 3: mod_base = OTHER; note = 2'-O-methyluridine-3'-phosphate
  modified_base 4: mod_base = OTHER; note = 2'-O-methyluridine-3'-phosphate
  modified_base 5: mod_base = OTHER; note = 2'-O-methylcytidine-3'-phosphate
  modified_base 6: mod_base = OTHER; note = 2'-fluorouridine-3'-phosphate
  modified_base 7: mod_base = OTHER; note = 2'-O-methylcytidine-3'-phosphate
  modified_base 8: mod_base = OTHER; note = 2'-fluorouridine-3'-phosphate
  modified_base 9: mod_base = OTHER; note = 2'-fluorocytidine-3'-phosphate
  modified_base 10: mod_base = OTHER; note = 2'-O-methyluridine-3'-phosphate
  modified_base 11: mod_base = OTHER; note = 2'-O-methyladenosine-3'-phosphate
  modified_base 12: mod_base = OTHER; note = 2'-O-methyladenosine-3'-phosphate
  modified_base 13: mod_base = OTHER; note = 2'-O-methylguanosine-3'-phosphate
  modified_base 14: mod_base = OTHER; note = 2'-fluoroadenosine-3'-phosphate
  modified_base 15: mod_base = OTHER; note = 2'-O-methyladenosine-3'-phosphate
  modified_base 16: mod_base = OTHER; note = 2'-fluoroguanosine-3'-phosphate
  modified_base 17: mod_base = OTHER; note = 2'-O-methyluridine-3'-phosphate
  modified_base 18: mod_base = OTHER; note = 2'-O-methyladenosine-3'-phosphate
  modified_base 19: mod_base = OTHER; note = 2'-O-methyladenosine-3'-phosphate
  modified_base 20: mod_base = OTHER; note = 2'-O-methylcytidine-3'-phosphate
  modified_base 21: mod_base = OTHER; note = 2'-O-methyladenosine-3'-phosphorothioate
  modified_base 22: mod_base = OTHER; note = 2'-O-methyluridine-3'-phosphorothioate
  modified_base 23: mod_base = OTHER; note = 2'-O-methyladenosine-3'-phosphate
atttctctctaagaagtaacata

SEQ ID NO: 2094 - RNA, 21 nt, synthetic construct
  source 1..21: mol_type = other RNA; note = Description of Artificial Sequence: Synthetic oligonucleotide
  modified_base 1: mod_base = OTHER; note = 2'-O-methyladenosine-3'-phosphorothioate
  modified_base 2: mod_base = OTHER; note = 2'-O-methyluridine-3'-phosphorothioate
  modified_base 3: mod_base = OTHER; note = 2'-O-methylguanosine-3'-phosphate
  modified_base 4: mod_base = OTHER; note = 2'-O-methyluridine-3'-phosphate
  modified_base 5: mod_base = OTHER; note = 2'-O-methyladenosine-3'-phosphate
  modified_base 6: mod_base = OTHER; note = 2'-O-methyluridine-3'-phosphate
  modified_base 7: mod_base = OTHER; note = 2'-fluoroguanosine-3'-phosphate
  modified_base 8: mod_base = OTHER; note = 2'-O-methyluridine-3'-phosphate
  modified_base 9: mod_base = OTHER; note = 2'-fluorouridine-3'-phosphate
  modified_base 10: mod_base = OTHER; note = 2'-fluoroadenosine-3'-phosphate
  modified_base 11: mod_base = OTHER; note = 2'-fluorocytidine-3'-phosphate
  modified_base 12: mod_base = OTHER; note = 2'-O-methyluridine-3'-phosphate
  modified_base 13: mod_base = OTHER; note = 2'-O-methyluridine-3'-phosphate
  modified_base 14: mod_base = OTHER; note = 2'-O-methylcytidine-3'-phosphate
  modified_base 15: mod_base = OTHER; note = 2'-O-methyluridine-3'-phosphate
  modified_base 16: mod_base = OTHER; note = 2'-O-methyluridine-3'-phosphate
  modified_base 17: mod_base = OTHER; note = 2'-O-methyladenosine-3'-phosphate
  modified_base 18: mod_base = OTHER; note = 2'-O-methylguanosine-3'-phosphate
  modified_base 19: mod_base = OTHER; note = 2'-O-methyladenosine-3'-phosphate
  modified_base 20: mod_base = OTHER; note = 2'-O-methylguanosine-3'-phosphate
  modified_base 21: mod_base = OTHER; note = 2'-O-methyladenosine-3'-phosphate N-[tris(GalNAc-alkyl)-amidodecanoyl)]-4-hydroxyprolinol Hyp-(GalNAc-alkyl)3
atgtatgttacttcttagaga

SEQ ID NO: 2095 - RNA, 23 nt, synthetic construct
  source 1..23: mol_type = other RNA; note = Description of Artificial Sequence: Synthetic oligonucleotide
  modified_base 1: mod_base = OTHER; note = 2'-O-methyluridine-3'-phosphorothioate
  modified_base 2: mod_base = OTHER; note = 2'-fluorocytidine-3'-phosphorothioate
  modified_base 3: mod_base = OTHER; note = 2'-O-methyluridine-3'-phosphate
  modified_base 4: mod_base = OTHER; note = 2'-O-methylcytidine-3'-phosphate
  modified_base 5: mod_base = OTHER; note = 2'-O-methyluridine-3'-phosphate
  modified_base 6: mod_base = OTHER; note = 2'-fluoroadenosine-3'-phosphate
  modified_base 7: mod_base = OTHER; note = 2'-O-methyladenosine-3'-phosphate
  modified_base 8: mod_base = OTHER; note = 2'-fluoroguanosine-3'-phosphate
  modified_base 9: mod_base = OTHER; note = 2'-fluoroadenosine-3'-phosphate
  modified_base 10: mod_base = OTHER; note = 2'-O-methyladenosine-3'-phosphate
  modified_base 11: mod_base = OTHER; note = 2'-O-methylguanosine-3'-phosphate
  modified_base 12: mod_base = OTHER; note = 2'-O-methyluridine-3'-phosphate
  modified_base 13: mod_base = OTHER; note = 2'-O-methyladenosine-3'-phosphate
  modified_base 14: mod_base = OTHER; note = 2'-fluoroadenosine-3'-phosphate
  modified_base 15: mod_base = OTHER; note = 2'-O-methylcytidine-3'-phosphate
  modified_base 16: mod_base = OTHER; note = 2'-fluoroadenosine-3'-phosphate
  modified_base 17: mod_base = OTHER; note = 2'-O-methyluridine-3'-phosphate
  modified_base 18: mod_base = OTHER; note = 2'-O-methyladenosine-3'-phosphate
  modified_base 19: mod_base = OTHER; note = 2'-O-methylcytidine-3'-phosphate
  modified_base 20: mod_base = OTHER; note = 2'-O-methyladenosine-3'-phosphate
  modified_base 21: mod_base = OTHER; note = 2'-O-methyluridine-3'-phosphorothioate
  modified_base 22: mod_base = OTHER; note = 2'-O-methylcytidine-3'-phosphorothioate
  modified_base 23: mod_base = OTHER; note = 2'-O-methylcytidine-3'-phosphate
tctctaagaagtaacatacatcc

SEQ ID NO: 2096 - RNA, 21 nt, synthetic construct
  source 1..21: mol_type = other RNA; note = Description of Artificial Sequence: Synthetic oligonucleotide
  modified_base 1: mod_base = OTHER; note = 2'-O-methylguanosine-3'-phosphorothioate
  modified_base 2: mod_base = OTHER; note = 2'-O-methyladenosine-3'-phosphorothioate
  modified_base 3: mod_base = OTHER; note = 2'-O-methyluridine-3'-phosphate
  modified_base 4: mod_base = OTHER; note = 2'-O-methylguanosine-3'-phosphate
  modified_base 5: mod_base = OTHER; note = 2'-O-methyluridine-3'-phosphate
  modified_base 6: mod_base = OTHER; note = 2'-O-methyladenosine-3'-phosphate
  modified_base 7: mod_base = OTHER; note = 2'-fluorouridine-3'-phosphate
  modified_base 8: mod_base = OTHER; note = 2'-O-methylguanosine-3'-phosphate
  modified_base 9: mod_base = OTHER; note = 2'-fluorouridine-3'-phosphate
  modified_base 10: mod_base = OTHER; note = 2'-fluorouridine-3'-phosphate
  modified_base 11: mod_base = OTHER; note = 2'-fluoroadenosine-3'-phosphate
  modified_base 12: mod_base = OTHER; note = 2'-O-methylcytidine-3'-phosphate
  modified_base 13: mod_base = OTHER; note = 2'-O-methyluridine-3'-phosphate
  modified_base 14: mod_base = OTHER; note = 2'-O-methyluridine-3'-phosphate
  modified_base 15: mod_base = OTHER; note = 2'-O-methylcytidine-3'-phosphate
  modified_base 16: mod_base = OTHER; note = 2'-O-methyluridine-3'-phosphate
  modified_base 17: mod_base = OTHER; note = 2'-O-methyluridine-3'-phosphate
  modified_base 18: mod_base = OTHER; note = 2'-O-methyladenosine-3'-phosphate
  modified_base 19: mod_base = OTHER; note = 2'-O-methylguanosine-3'-phosphate
  modified_base 20: mod_base = OTHER; note = 2'-O-methyladenosine-3'-phosphate
  modified_base 21: mod_base = OTHER; note = 2'-O-methylguanosine-3'-phosphate N-[tris(GalNAc-alkyl)-amidodecanoyl)]-4-hydroxyprolinol Hyp-(GalNAc-alkyl)3
gatgtatgttacttcttagag

SEQ ID NO: 2097 - RNA, 23 nt, synthetic construct
  source 1..23: mol_type = other RNA; note = Description of Artificial Sequence: Synthetic oligonucleotide
  modified_base 1: mod_base = OTHER; note = 2'-O-methylcytidine-3'-phosphorothioate
  modified_base 2: mod_base = OTHER; note = 2'-fluorouridine -3'-phosphorothioate
  modified_base 3: mod_base = OTHER; note = 2'-O-methylcytidine-3'-phosphate
  modified_base 4: mod_base = OTHER; note = 2'-O-methyluridine-3'-phosphate
  modified_base 5: mod_base = OTHER; note = 2'-O-methyladenosine-3'-phosphate
  modified_base 6: mod_base = OTHER; note = 2'-fluoroadenosine-3'-phosphate
  modified_base 7: mod_base = OTHER; note = 2'-O-methylguanosine-3'-phosphate
  modified_base 8: mod_base = OTHER; note = 2'-fluoroadenosine-3'-phosphate
  modified_base 9: mod_base = OTHER; note = 2'-fluoroadenosine-3'-phosphate
  modified_base 10: mod_base = OTHER; note = 2'-O-methylguanosine-3'-phosphate
  modified_base 11: mod_base = OTHER; note = 2'-O-methyluridine-3'-phosphate
  modified_base 12: mod_base = OTHER; note = 2'-O-methyladenosine-3'-phosphate
  modified_base 13: mod_base = OTHER; note = 2'-O-methyladenosine-3'-phosphate
  modified_base 14: mod_base = OTHER; note = 2'-fluorocytidine-3'-phosphate
  modified_base 15: mod_base = OTHER; note = 2'-O-methyladenosine-3'-phosphate
  modified_base 16: mod_base = OTHER; note = 2'-fluorouridine-3'-phosphate
  modified_base 17: mod_base = OTHER; note = 2'-O-methyladenosine-3'-phosphate
  modified_base 18: mod_base = OTHER; note = 2'-O-methylcytidine-3'-phosphate
  modified_base 19: mod_base = OTHER; note = 2'-O-methyladenosine-3'-phosphate
  modified_base 20: mod_base = OTHER; note = 2'-O-methyluridine-3'-phosphate
  modified_base 21: mod_base = OTHER; note = 2'-O-methylcytidine-3'-phosphorothioate
  modified_base 22: mod_base = OTHER; note = 2'-O-methylcytidine-3'-phosphorothioate
  modified_base 23: mod_base = OTHER; note = 2'-O-methyluridine-3'-phosphate
ctctaagaagtaacatacatcct

SEQ ID NO: 2098 - RNA, 21 nt, synthetic construct
  source 1..21: mol_type = other RNA; note = Description of Artificial Sequence: Synthetic oligonucleotide
  modified_base 1: mod_base = OTHER; note = 2'-O-methyladenosine-3'-phosphorothioate
  modified_base 2: mod_base = OTHER; note = 2'-O-methylcytidine-3'-phosphorothioate
  modified_base 3: mod_base = OTHER; note = 2'-O-methyladenosine-3'-phosphate
  modified_base 4: mod_base = OTHER; note = 2'-O-methyladenosine-3'-phosphate
  modified_base 5: mod_base = OTHER; note = 2'-O-methylcytidine-3'-phosphate
  modified_base 6: mod_base = OTHER; note = 2'-O-methyluridine-3'-phosphate
  modified_base 7: mod_base = OTHER; note = 2'-fluorouridine-3'-phosphate
  modified_base 8: mod_base = OTHER; note = 2'-O-methyluridine-3'-phosphate
  modified_base 9: mod_base = OTHER; note = 2'-fluoroguanosine-3'-phosphate
  modified_base 10: mod_base = OTHER; note = 2'-fluoroadenosine-3'-phosphate
  modified_base 11: mod_base = OTHER; note = 2'-fluoroguanosine-3'-phosphate
  modified_base 12: mod_base = OTHER; note = 2'-O-methyladenosine-3'-phosphate
  modified_base 13: mod_base = OTHER; note = 2'-O-methyladenosine-3'-phosphate
  modified_base 14: mod_base = OTHER; note = 2'-O-methylguanosine-3'-phosphate
  modified_base 15: mod_base = OTHER; note = 2'-O-methylguanosine-3'-phosphate
  modified_base 16: mod_base = OTHER; note = 2'-O-methyluridine-3'-phosphate
  modified_base 17: mod_base = OTHER; note = 2'-O-methyladenosine-3'-phosphate
  modified_base 18: mod_base = OTHER; note = 2'-O-methylguanosine-3'-phosphate
  modified_base 19: mod_base = OTHER; note = 2'-O-methylcytidine-3'-phosphate
  modified_base 20: mod_base = OTHER; note = 2'-O-methyladenosine-3'-phosphate
  modified_base 21: mod_base = OTHER; note = 2'-O-methylcytidine-3'-phosphate N-[tris(GalNAc-alkyl)-amidodecanoyl)]-4-hydroxyprolinol Hyp-(GalNAc-alkyl)3
acaactttgagaaggtagcac

SEQ ID NO: 2099 - RNA, 23 nt, synthetic construct
  source 1..23: mol_type = other RNA; note = Description of Artificial Sequence: Synthetic oligonucleotide
  modified_base 1: mod_base = OTHER; note = 2'-O-methylguanosine-3'-phosphorothioate
  modified_base 2: mod_base = OTHER; note = 2'-fluorouridine -3'-phosphorothioate
  modified_base 3: mod_base = OTHER; note = 2'-O-methylguanosine-3'-phosphate
  modified_base 4: mod_base = OTHER; note = 2'-O-methylcytidine-3'-phosphate
  modified_base 5: mod_base = OTHER; note = 2'-O-methyluridine-3'-phosphate
  modified_base 6: mod_base = OTHER; note = 2'-fluoroadenosine-3'-phosphate
  modified_base 7: mod_base = OTHER; note = 2'-O-methylcytidine-3'-phosphate
  modified_base 8: mod_base = OTHER; note = 2'-fluorocytidine-3'-phosphate
  modified_base 9: mod_base = OTHER; note = 2'-fluorouridine-3'-phosphate
  modified_base 10: mod_base = OTHER; note = 2'-O-methyluridine-3'-phosphate
  modified_base 11: mod_base = OTHER; note = 2'-O-methylcytidine-3'-phosphate
  modified_base 12: mod_base = OTHER; note = 2'-O-methyluridine-3'-phosphate
  modified_base 13: mod_base = OTHER; note = 2'-O-methylcytidine-3'-phosphate
  modified_base 14: mod_base = OTHER; note = 2'-fluoroadenosine-3'-phosphate
  modified_base 15: mod_base = OTHER; note = 2'-O-methyladenosine-3'-phosphate
  modified_base 16: mod_base = OTHER; note = 2'-fluoroadenosine-3'-phosphate
  modified_base 17: mod_base = OTHER; note = 2'-O-methylguanosine-3'-phosphate
  modified_base 18: mod_base = OTHER; note = 2'-O-methyluridine-3'-phosphate
  modified_base 19: mod_base = OTHER; note = 2'-O-methyluridine-3'-phosphate
  modified_base 20: mod_base = OTHER; note = 2'-O-methylguanosine-3'-phosphate
  modified_base 21: mod_base = OTHER; note = 2'-O-methyluridine-3'-phosphorothioate
  modified_base 22: mod_base = OTHER; note = 2'-O-methylguanosine-3'-phosphorothioate
  modified_base 23: mod_base = OTHER; note = 2'-O-methyladenosine-3'-phosphate
gtgctaccttctcaaagttgtga

SEQ ID NO: 2100 - RNA, 21 nt, synthetic construct
  source 1..21: mol_type = other RNA; note = Description of Artificial Sequence: Synthetic oligonucleotide
  modified_base 1: mod_base = OTHER; note = 2'-O-methylcytidine-3'-phosphorothioate
  modified_base 2: mod_base = OTHER; note = 2'-O-methyladenosine-3'-phosphorothioate
  modified_base 3: mod_base = OTHER; note = 2'-O-methyladenosine-3'-phosphate
  modified_base 4: mod_base = OTHER; note = 2'-O-methylcytidine-3'-phosphate
  modified_base 5: mod_base = OTHER; note = 2'-O-methyluridine-3'-phosphate
  modified_base 6: mod_base = OTHER; note = 2'-O-methyluridine-3'-phosphate
  modified_base 7: mod_base = OTHER; note = 2'-fluorouridine-3'-phosphate
  modified_base 8: mod_base = OTHER; note = 2'-O-methylguanosine-3'-phosphate
  modified_base 9: mod_base = OTHER; note = 2'-fluoroadenosine-3'-phosphate
  modified_base 10: mod_base = OTHER; note = 2'-fluoroguanosine-3'-phosphate
  modified_base 11: mod_base = OTHER; note = 2'-fluoroadenosine-3'-phosphate
  modified_base 12: mod_base = OTHER; note = 2'-O-methyladenosine-3'-phosphate
  modified_base 13: mod_base = OTHER; note = 2'-O-methylguanosine-3'-phosphate
  modified_base 14: mod_base = OTHER; note = 2'-O-methylguanosine-3'-phosphate
  modified_base 15: mod_base = OTHER; note = 2'-O-methyluridine-3'-phosphate
  modified_base 16: mod_base = OTHER; note = 2'-O-methyladenosine-3'-phosphate
  modified_base 17: mod_base = OTHER; note = 2'-O-methylguanosine-3'-phosphate
  modified_base 18: mod_base = OTHER; note = 2'-O-methylcytidine-3'-phosphate
  modified_base 19: mod_base = OTHER; note = 2'-O-methyladenosine-3'-phosphate
  modified_base 20: mod_base = OTHER; note = 2'-O-methylcytidine-3'-phosphate
  modified_base 21: mod_base = OTHER; note = 2'-O-methyluridine-3'-phosphate N-[tris(GalNAc-alkyl)-amidodecanoyl)]-4-hydroxyprolinol Hyp-(GalNAc-alkyl)3
caactttgagaaggtagcact

SEQ ID NO: 2101 - RNA, 23 nt, synthetic construct
  source 1..23: mol_type = other RNA; note = Description of Artificial Sequence: Synthetic oligonucleotide
  modified_base 1: mod_base = OTHER; note = 2'-O-methyladenosine-3'-phosphorothioate
  modified_base 2: mod_base = OTHER; note = 2'-fluoroguanosine-3'-phosphorothioate
  modified_base 3: mod_base = OTHER; note = 2'-O-methyluridine-3'-phosphate
  modified_base 4: mod_base = OTHER; note = 2'-O-methylguanosine-3'-phosphate
  modified_base 5: mod_base = OTHER; note = 2'-O-methylcytidine-3'-phosphate
  modified_base 6: mod_base = OTHER; note = 2'-fluorouridine-3'-phosphate
  modified_base 7: mod_base = OTHER; note = 2'-O-methyladenosine-3'-phosphate
  modified_base 8: mod_base = OTHER; note = 2'-fluorocytidine-3'-phosphate
  modified_base 9: mod_base = OTHER; note = 2'-fluorocytidine-3'-phosphate
  modified_base 10: mod_base = OTHER; note = 2'-O-methyluridine-3'-phosphate
  modified_base 11: mod_base = OTHER; note = 2'-O-methyluridine-3'-phosphate
  modified_base 12: mod_base = OTHER; note = 2'-O-methylcytidine-3'-phosphate
  modified_base 13: mod_base = OTHER; note = 2'-O-methyluridine-3'-phosphate
  modified_base 14: mod_base = OTHER; note = 2'-fluorocytidine-3'-phosphate
  modified_base 15: mod_base = OTHER; note = 2'-O-methyladenosine-3'-phosphate
  modified_base 16: mod_base = OTHER; note = 2'-fluoroadenosine-3'-phosphate
  modified_base 17: mod_base = OTHER; note = 2'-O-methyladenosine-3'-phosphate
  modified_base 18: mod_base = OTHER; note = 2'-O-methylguanosine-3'-phosphate
  modified_base 19: mod_base = OTHER; note = 2'-O-methyluridine-3'-phosphate
  modified_base 20: mod_base = OTHER; note = 2'-O-methyluridine-3'-phosphate
  modified_base 21: mod_base = OTHER; note = 2'-O-methylguanosine-3'-phosphorothioate
  modified_base 22: mod_base = OTHER; note = 2'-O-methyluridine-3'-phosphorothioate
  modified_base 23: mod_base = OTHER; note = 2'-O-methylguanosine-3'-phosphate
agtgctaccttctcaaagttgtg

SEQ ID NO: 2102 - RNA, 21 nt, synthetic construct
  source 1..21: mol_type = other RNA; note = Description of Artificial Sequence: Synthetic oligonucleotide
  modified_base 1: mod_base = OTHER; note = 2'-O-methyladenosine-3'-phosphorothioate
  modified_base 2: mod_base = OTHER; note = 2'-O-methyluridine-3'-phosphorothioate
  modified_base 3: mod_base = OTHER; note = 2'-O-methyluridine-3'-phosphate
  modified_base 4: mod_base = OTHER; note = 2'-O-methylcytidine-3'-phosphate
  modified_base 5: mod_base = OTHER; note = 2'-O-methyladenosine-3'-phosphate
  modified_base 6: mod_base = OTHER; note = 2'-O-methylcytidine-3'-phosphate
  modified_base 7: mod_base = OTHER; note = 2'-fluoroadenosine-3'-phosphate
  modified_base 8: mod_base = OTHER; note = 2'-O-methyladenosine-3'-phosphate
  modified_base 9: mod_base = OTHER; note = 2'-fluorocytidine-3'-phosphate
  modified_base 10: mod_base = OTHER; note = 2'-fluorouridine-3'-phosphate
  modified_base 11: mod_base = OTHER; note = 2'-fluorouridine-3'-phosphate
  modified_base 12: mod_base = OTHER; note = 2'-O-methyluridine-3'-phosphate
  modified_base 13: mod_base = OTHER; note = 2'-O-methylguanosine-3'-phosphate
  modified_base 14: mod_base = OTHER; note = 2'-O-methyladenosine-3'-phosphate
  modified_base 15: mod_base = OTHER; note = 2'-O-methylguanosine-3'-phosphate
  modified_base 16: mod_base = OTHER; note = 2'-O-methyladenosine-3'-phosphate
  modified_base 17: mod_base = OTHER; note = 2'-O-methyladenosine-3'-phosphate
  modified_base 18: mod_base = OTHER; note = 2'-O-methylguanosine-3'-phosphate
  modified_base 19: mod_base = OTHER; note = 2'-O-methylguanosine-3'-phosphate
  modified_base 20: mod_base = OTHER; note = 2'-O-methyluridine-3'-phosphate
  modified_base 21: mod_base = OTHER; note = 2'-O-methyladenosine-3'-phosphate N-[tris(GalNAc-alkyl)-amidodecanoyl)]-4-hydroxyprolinol Hyp-(GalNAc-alkyl)3
attcacaactttgagaaggta

SEQ ID NO: 2103 - RNA, 23 nt, synthetic construct
  source 1..23: mol_type = other RNA; note = Description of Artificial Sequence: Synthetic oligonucleotide
  modified_base 1: mod_base = OTHER; note = 2'-O-methyluridine-3'-phosphorothioate
  modified_base 2: mod_base = OTHER; note = 2'-fluoroadenosine-3'-phosphorothioate
  modified_base 3: mod_base = OTHER; note = 2'-O-methylcytidine-3'-phosphate
  modified_base 4: mod_base = OTHER; note = 2'-O-methylcytidine-3'-phosphate
  modified_base 5: mod_base = OTHER; note = 2'-O-methyluridine-3'-phosphate
  modified_base 6: mod_base = OTHER; note = 2'-fluorouridine-3'-phosphate
  modified_base 7: mod_base = OTHER; note = 2'-O-methylcytidine-3'-phosphate
  modified_base 8: mod_base = OTHER; note = 2'-fluorouridine-3'-phosphate
  modified_base 9: mod_base = OTHER; note = 2'-fluorocytidine-3'-phosphate
  modified_base 10: mod_base = OTHER; note = 2'-O-methyladenosine-3'-phosphate
  modified_base 11: mod_base = OTHER; note = 2'-O-methyladenosine-3'-phosphate
  modified_base 12: mod_base = OTHER; note = 2'-O-methyladenosine-3'-phosphate
  modified_base 13: mod_base = OTHER; note = 2'-O-methylguanosine-3'-phosphate
  modified_base 14: mod_base = OTHER; note = 2'-fluorouridine-3'-phosphate
  modified_base 15: mod_base = OTHER; note = 2'-O-methyluridine-3'-phosphate
  modified_base 16: mod_base = OTHER; note = 2'-fluoroguanosine-3'-phosphate
  modified_base 17: mod_base = OTHER; note = 2'-O-methyluridine-3'-phosphate
  modified_base 18: mod_base = OTHER; note = 2'-O-methylguanosine-3'-phosphate
  modified_base 19: mod_base = OTHER; note = 2'-O-methyladenosine-3'-phosphate
  modified_base 20: mod_base = OTHER; note = 2'-O-methyladenosine-3'-phosphate
  modified_base 21: mod_base = OTHER; note = 2'-O-methyluridine-3'-phosphorothioate
  modified_base 22: mod_base = OTHER; note = 2'-O-methylcytidine-3'-phosphorothioate
  modified_base 23: mod_base = OTHER; note = 2'-O-methyladenosine-3'-phosphate
taccttctcaaagttgtgaatca

SEQ ID NO: 2104 - RNA, 21 nt, synthetic construct
  source 1..21: mol_type = other RNA; note = Description of Artificial Sequence: Synthetic oligonucleotide
  modified_base 1: mod_base = OTHER; note = 2'-O-methylguanosine-3'-phosphorothioate
  modified_base 2: mod_base = OTHER; note = 2'-O-methyladenosine-3'-phosphorothioate
  modified_base 3: mod_base = OTHER; note = 2'-O-methyluridine-3'-phosphate
  modified_base 4: mod_base = OTHER; note = 2'-O-methyluridine-3'-phosphate
  modified_base 5: mod_base = OTHER; note = 2'-O-methylcytidine-3'-phosphate
  modified_base 6: mod_base = OTHER; note = 2'-O-methyladenosine-3'-phosphate
  modified_base 7: mod_base = OTHER; note = 2'-fluorocytidine-3'-phosphate
  modified_base 8: mod_base = OTHER; note = 2'-O-methyladenosine-3'-phosphate
  modified_base 9: mod_base = OTHER; note = 2'-fluoroadenosine-3'-phosphate
  modified_base 10: mod_base = OTHER; note = 2'-fluorocytidine-3'-phosphate
  modified_base 11: mod_base = OTHER; note = 2'-fluorouridine-3'-phosphate
  modified_base 12: mod_base = OTHER; note = 2'-O-methyluridine-3'-phosphate
  modified_base 13: mod_base = OTHER; note = 2'-O-methyluridine-3'-phosphate
  modified_base 14: mod_base = OTHER; note = 2'-O-methylguanosine-3'-phosphate
  modified_base 15: mod_base = OTHER; note = 2'-O-methyladenosine-3'-phosphate
  modified_base 16: mod_base = OTHER; note = 2'-O-methylguanosine-3'-phosphate
  modified_base 17: mod_base = OTHER; note = 2'-O-methyladenosine-3'-phosphate
  modified_base 18: mod_base = OTHER; note = 2'-O-methyladenosine-3'-phosphate
  modified_base 19: mod_base = OTHER; note = 2'-O-methylguanosine-3'-phosphate
  modified_base 20: mod_base = OTHER; note = 2'-O-methylguanosine-3'-phosphate
  modified_base 21: mod_base = OTHER; note = 2'-O-methyluridine-3'-phosphate N-[tris(GalNAc-alkyl)-amidodecanoyl)]-4-hydroxyprolinol Hyp-(GalNAc-alkyl)3
gattcacaactttgagaaggt

SEQ ID NO: 2105 - RNA, 23 nt, synthetic construct
  source 1..23: mol_type = other RNA; note = Description of Artificial Sequence: Synthetic oligonucleotide
  modified_base 1: mod_base = OTHER; note = 2'-O-methyladenosine-3'-phosphorothioate
  modified_base 2: mod_base = OTHER; note = 2'-fluorocytidine-3'-phosphorothioate
  modified_base 3: mod_base = OTHER; note = 2'-O-methylcytidine-3'-phosphate
  modified_base 4: mod_base = OTHER; note = 2'-O-methyluridine-3'-phosphate
  modified_base 5: mod_base = OTHER; note = 2'-O-methyluridine-3'-phosphate
  modified_base 6: mod_base = OTHER; note = 2'-fluorocytidine-3'-phosphate
  modified_base 7: mod_base = OTHER; note = 2'-O-methyluridine-3'-phosphate
  modified_base 8: mod_base = OTHER; note = 2'-fluorocytidine-3'-phosphate
  modified_base 9: mod_base = OTHER; note = 2'-fluoroadenosine-3'-phosphate
  modified_base 10: mod_base = OTHER; note = 2'-O-methyladenosine-3'-phosphate
  modified_base 11: mod_base = OTHER; note = 2'-O-methyladenosine-3'-phosphate
  modified_base 12: mod_base = OTHER; note = 2'-O-methylguanosine-3'-phosphate
  modified_base 13: mod_base = OTHER; note = 2'-O-methyluridine-3'-phosphate
  modified_base 14: mod_base = OTHER; note = 2'-fluorouridine-3'-phosphate
  modified_base 15: mod_base = OTHER; note = 2'-O-methylguanosine-3'-phosphate
  modified_base 16: mod_base = OTHER; note = 2'-fluorouridine-3'-phosphate
  modified_base 17: mod_base = OTHER; note = 2'-O-methylguanosine-3'-phosphate
  modified_base 18: mod_base = OTHER; note = 2'-O-methyladenosine-3'-phosphate
  modified_base 19: mod_base = OTHER; note = 2'-O-methyladenosine-3'-phosphate
  modified_base 20: mod_base = OTHER; note = 2'-O-methyluridine-3'-phosphate
  modified_base 21: mod_base = OTHER; note = 2'-O-methylcytidine-3'-phosphorothioate
  modified_base 22: mod_base = OTHER; note = 2'-O-methyladenosine-3'-phosphorothioate
  modified_base 23: mod_base = OTHER; note = 2'-O-methylguanosine-3'-phosphate
accttctcaaagttgtgaatcag

SEQ ID NO: 2106 - RNA, 21 nt, synthetic construct
  source 1..21: mol_type = other RNA; note = Description of Artificial Sequence: Synthetic oligonucleotide
  modified_base 1: mod_base = OTHER; note = 2'-O-methyladenosine-3'-phosphorothioate
  modified_base 2: mod_base = OTHER; note = 2'-O-methyladenosine-3'-phosphorothioate
  modified_base 3: mod_base = OTHER; note = 2'-O-methylcytidine-3'-phosphate
  modified_base 4: mod_base = OTHER; note = 2'-O-methyladenosine-3'-phosphate
  modified_base 5: mod_base = OTHER; note = 2'-O-methyluridine-3'-phosphate
  modified_base 6: mod_base = OTHER; note = 2'-O-methylguanosine-3'-phosphate
  modified_base 7: mod_base = OTHER; note = 2'-fluorocytidine-3'-phosphate
  modified_base 8: mod_base = OTHER; note = 2'-O-methyluridine-3'-phosphate
  modified_base 9: mod_base = OTHER; note = 2'-fluoroadenosine-3'-phosphate
  modified_base 10: mod_base = OTHER; note = 2'-fluoroadenosine-3'-phosphate
  modified_base 11: mod_base = OTHER; note = 2'-fluoroadenosine-3'-phosphate
  modified_base 12: mod_base = OTHER; note = 2'-O-methyluridine-3'-phosphate
  modified_base 13: mod_base = OTHER; note = 2'-O-methylcytidine-3'-phosphate
  modified_base 14: mod_base = OTHER; note = 2'-O-methyladenosine-3'-phosphate
  modified_base 15: mod_base = OTHER; note = 2'-O-methylguanosine-3'-phosphate
  modified_base 16: mod_base = OTHER; note = 2'-O-methyluridine-3'-phosphate
  modified_base 17: mod_base = OTHER; note = 2'-O-methyladenosine-3'-phosphate
  modified_base 18: mod_base = OTHER; note = 2'-O-methylcytidine-3'-phosphate
  modified_base 19: mod_base = OTHER; note = 2'-O-methyluridine-3'-phosphate
  modified_base 20: mod_base = OTHER; note = 2'-O-methyluridine-3'-phosphate
  modified_base 21: mod_base = OTHER; note = 2'-O-methylcytidine-3'-phosphate N-[tris(GalNAc-alkyl)-amidodecanoyl)]-4-hydroxyprolinol Hyp-(GalNAc-alkyl)3
aacatgctaaatcagtacttc

SEQ ID NO: 2107 - RNA, 23 nt, synthetic construct
  source 1..23: mol_type = other RNA; note = Description of Artificial Sequence: Synthetic oligonucleotide
  modified_base 1: mod_base = OTHER; note = 2'-O-methylguanosine-3'-phosphorothioate
  modified_base 2: mod_base = OTHER; note = 2'-fluoroadenosine-3'-phosphorothioate
  modified_base 3: mod_base = OTHER; note = 2'-O-methyladenosine-3'-phosphate
  modified_base 4: mod_base = OTHER; note = 2'-O-methylguanosine-3'-phosphate
  modified_base 5: mod_base = OTHER; note = 2'-O-methyluridine-3'-phosphate
  modified_base 6: mod_base = OTHER; note = 2'-fluoroadenosine-3'-phosphate
  modified_base 7: mod_base = OTHER; note = 2'-O-methylcytidine-3'-phosphate
  modified_base 8: mod_base = OTHER; note = 2'-fluorouridine-3'-phosphate
  modified_base 9: mod_base = OTHER; note = 2'-fluoroguanosine-3'-phosphate
  modified_base 10: mod_base = OTHER; note = 2'-O-methyladenosine-3'-phosphate
  modified_base 11: mod_base = OTHER; note = 2'-O-methyluridine-3'-phosphate
  modified_base 12: mod_base = OTHER; note = 2'-O-methyluridine-3'-phosphate
  modified_base 13: mod_base = OTHER; note = 2'-O-methyluridine-3'-phosphate
  modified_base 14: mod_base = OTHER; note = 2'-fluoroadenosine-3'-phosphate
  modified_base 15: mod_base = OTHER; note = 2'-O-methylguanosine-3'-phosphate
  modified_base 16: mod_base = OTHER; note = 2'-fluorocytidine-3'-phosphate
  modified_base 17: mod_base = OTHER; note = 2'-O-methyladenosine-3'-phosphate
  modified_base 18: mod_base = OTHER; note = 2'-O-methyluridine-3'-phosphate
  modified_base 19: mod_base = OTHER; note = 2'-O-methylguanosine-3'-phosphate
  modified_base 20: mod_base = OTHER; note = 2'-O-methyluridine-3'-phosphate
  modified_base 21: mod_base = OTHER; note = 2'-O-methyluridine-3'-phosphorothioate
  modified_base 22: mod_base = OTHER; note = 2'-O-methylguanosine-3'-phosphorothioate
  modified_base 23: mod_base = OTHER; note = 2'-O-methyluridine-3'-phosphate
gaagtactgatttagcatgttgt

SEQ ID NO: 2108 - RNA, 21 nt, synthetic construct
  source 1..21: mol_type = other RNA; note = Description of Artificial Sequence: Synthetic oligonucleotide
  modified_base 1: mod_base = OTHER; note = 2'-O-methyladenosine-3'-phosphorothioate
  modified_base 2: mod_base = OTHER; note = 2'-O-methylcytidine-3'-phosphorothioate
  modified_base 3: mod_base = OTHER; note = 2'-O-methyladenosine-3'-phosphate
  modified_base 4: mod_base = OTHER; note = 2'-O-methyluridine-3'-phosphate
  modified_base 5: mod_base = OTHER; note = 2'-O-methylguanosine-3'-phosphate
  modified_base 6: mod_base = OTHER; note = 2'-O-methylcytidine-3'-phosphate
  modified_base 7: mod_base = OTHER; note = 2'-fluorouridine-3'-phosphate
  modified_base 8: mod_base = OTHER; note = 2'-O-methyladenosine-3'-phosphate
  modified_base 9: mod_base = OTHER; note = 2'-fluoroadenosine-3'-phosphate
  modified_base 10: mod_base = OTHER; note = 2'-fluoroadenosine-3'-phosphate
  modified_base 11: mod_base = OTHER; note = 2'-fluorouridine-3'-phosphate
  modified_base 12: mod_base = OTHER; note = 2'-O-methylcytidine-3'-phosphate
  modified_base 13: mod_base = OTHER; note = 2'-O-methyladenosine-3'-phosphate
  modified_base 14: mod_base = OTHER; note = 2'-O-methylguanosine-3'-phosphate
  modified_base 15: mod_base = OTHER; note = 2'-O-methyluridine-3'-phosphate
  modified_base 16: mod_base = OTHER; note = 2'-O-methyladenosine-3'-phosphate
  modified_base 17: mod_base = OTHER; note = 2'-O-methylcytidine-3'-phosphate
  modified_base 18: mod_base = OTHER; note = 2'-O-methyluridine-3'-phosphate
  modified_base 19: mod_base = OTHER; note = 2'-O-methyluridine-3'-phosphate
  modified_base 20: mod_base = OTHER; note = 2'-O-methylcytidine-3'-phosphate
  modified_base 21: mod_base = OTHER; note = 2'-O-methylcytidine-3'-phosphate N-[tris(GalNAc-alkyl)-amidodecanoyl)]-4-hydroxyprolinol Hyp-(GalNAc-alkyl)3
acatgctaaatcagtacttcc

SEQ ID NO: 2109 - RNA, 23 nt, synthetic construct
  source 1..23: mol_type = other RNA; note = Description of Artificial Sequence: Synthetic oligonucleotide
  modified_base 1: mod_base = OTHER; note = 2'-O-methylguanosine-3'-phosphorothioate
  modified_base 2: mod_base = OTHER; note = 2'-fluoroguanosine-3'-phosphorothioate
  modified_base 3: mod_base = OTHER; note = 2'-O-methyladenosine-3'-phosphate
  modified_base 4: mod_base = OTHER; note = 2'-O-methyladenosine-3'-phosphate
  modified_base 5: mod_base = OTHER; note = 2'-O-methylguanosine-3'-phosphate
  modified_base 6: mod_base = OTHER; note = 2'-fluorouridine-3'-phosphate
  modified_base 7: mod_base = OTHER; note = 2'-O-methyladenosine-3'-phosphate
  modified_base 8: mod_base = OTHER; note = 2'-fluorocytidine-3'-phosphate
  modified_base 9: mod_base = OTHER; note = 2'-fluorouridine-3'-phosphate
  modified_base 10: mod_base = OTHER; note = 2'-O-methylguanosine-3'-phosphate
  modified_base 11: mod_base = OTHER; note = 2'-O-methyladenosine-3'-phosphate
  modified_base 12: mod_base = OTHER; note = 2'-O-methyluridine-3'-phosphate
  modified_base 13: mod_base = OTHER; note = 2'-O-methyluridine-3'-phosphate
  modified_base 14: mod_base = OTHER; note = 2'-fluorouridine-3'-phosphate
  modified_base 15: mod_base = OTHER; note = 2'-O-methyladenosine-3'-phosphate
  modified_base 16: mod_base = OTHER; note = 2'-fluoroguanosine-3'-phosphate
  modified_base 17: mod_base = OTHER; note = 2'-O-methylcytidine-3'-phosphate
  modified_base 18: mod_base = OTHER; note = 2'-O-methyladenosine-3'-phosphate
  modified_base 19: mod_base = OTHER; note = 2'-O-methyluridine-3'-phosphate
  modified_base 20: mod_base = OTHER; note = 2'-O-methylguanosine-3'-phosphate
  modified_base 21: mod_base = OTHER; note = 2'-O-methyluridine-3'-phosphorothioate
  modified_base 22: mod_base = OTHER; note = 2'-O-methyluridine-3'-phosphorothioate
  modified_base 23: mod_base = OTHER; note = 2'-O-methylguanosine-3'-phosphate
ggaagtactgatttagcatgttg

SEQ ID NO: 2110 - RNA, 21 nt, synthetic construct
  source 1..21: mol_type = other RNA; note = Description of Artificial Sequence: Synthetic oligonucleotide
  modified_base 1: mod_base = OTHER; note = 2'-O-methylguanosine-3'-phosphorothioate
  modified_base 2: mod_base = OTHER; note = 2'-O-methyladenosine-3'-phosphorothioate
  modified_base 3: mod_base = OTHER; note = 2'-O-methyladenosine-3'-phosphate
  modified_base 4: mod_base = OTHER; note = 2'-O-methylcytidine-3'-phosphate
  modified_base 5: mod_base = OTHER; note = 2'-O-methyladenosine-3'-phosphate
  modified_base 6: mod_base = OTHER; note = 2'-O-methyladenosine-3'-phosphate
  modified_base 7: mod_base = OTHER; note = 2'-fluorocytidine-3'-phosphate
  modified_base 8: mod_base = OTHER; note = 2'-O-methyladenosine-3'-phosphate
  modified_base 9: mod_base = OTHER; note = 2'-fluorouridine-3'-phosphate
  modified_base 10: mod_base = OTHER; note = 2'-fluoroguanosine-3'-phosphate
  modified_base 11: mod_base = OTHER; note = 2'-fluorocytidine-3'-phosphate
  modified_base 12: mod_base = OTHER; note = 2'-O-methyluridine-3'-phosphate
  modified_base 13: mod_base = OTHER; note = 2'-O-methyladenosine-3'-phosphate
  modified_base 14: mod_base = OTHER; note = 2'-O-methyladenosine-3'-phosphate
  modified_base 15: mod_base = OTHER; note = 2'-O-methyladenosine-3'-phosphate
  modified_base 16: mod_base = OTHER; note = 2'-O-methyluridine-3'-phosphate
  modified_base 17: mod_base = OTHER; note = 2'-O-methylcytidine-3'-phosphate
  modified_base 18: mod_base = OTHER; note = 2'-O-methyladenosine-3'-phosphate
  modified_base 19: mod_base = OTHER; note = 2'-O-methylguanosine-3'-phosphate
  modified_base 20: mod_base = OTHER; note = 2'-O-methyluridine-3'-phosphate
  modified_base 21: mod_base = OTHER; note = 2'-O-methyladenosine-3'-phosphate N-[tris(GalNAc-alkyl)-amidodecanoyl)]-4-hydroxyprolinol Hyp-(GalNAc-alkyl)3
gaacaacatgctaaatcagta

SEQ ID NO: 2111 - RNA, 23 nt, synthetic construct
  source 1..23: mol_type = other RNA; note = Description of Artificial Sequence: Synthetic oligonucleotide
  modified_base 1: mod_base = OTHER; note = 2'-O-methyluridine-3'-phosphorothioate
  modified_base 2: mod_base = OTHER; note = 2'-fluoroadenosine-3'-phosphorothioate
  modified_base 3: mod_base = OTHER; note = 2'-O-methylcytidine-3'-phosphate
  modified_base 4: mod_base = OTHER; note = 2'-O-methyluridine-3'-phosphate
  modified_base 5: mod_base = OTHER; note = 2'-O-methylguanosine-3'-phosphate
  modified_base 6: mod_base = OTHER; note = 2'-fluoroadenosine-3'-phosphate
  modified_base 7: mod_base = OTHER; note = 2'-O-methyluridine-3'-phosphate
  modified_base 8: mod_base = OTHER; note = 2'-fluorouridine-3'-phosphate
  modified_base 9: mod_base = OTHER; note = 2'-fluorouridine-3'-phosphate
  modified_base 10: mod_base = OTHER; note = 2'-O-methyladenosine-3'-phosphate
  modified_base 11: mod_base = OTHER; note = 2'-O-methylguanosine-3'-phosphate
  modified_base 12: mod_base = OTHER; note = 2'-O-methylcytidine-3'-phosphate
  modified_base 13: mod_base = OTHER; note = 2'-O-methyladenosine-3'-phosphate
  modified_base 14: mod_base = OTHER; note = 2'-fluorouridine-3'-phosphate
  modified_base 15: mod_base = OTHER; note = 2'-O-methylguanosine-3'-phosphate
  modified_base 16: mod_base = OTHER; note = 2'-fluorouridine-3'-phosphate
  modified_base 17: mod_base = OTHER; note = 2'-O-methyluridine-3'-phosphate
  modified_base 18: mod_base = OTHER; note = 2'-O-methylguanosine-3'-phosphate
  modified_base 19: mod_base = OTHER; note = 2'-O-methyluridine-3'-phosphate
  modified_base 20: mod_base = OTHER; note = 2'-O-methyluridine-3'-phosphate
  modified_base 21: mod_base = OTHER; note = 2'-O-methylcytidine-3'-phosphorothioate
  modified_base 22: mod_base = OTHER; note = 2'-O-methyladenosine-3'-phosphorothioate
  modified_base 23: mod_base = OTHER; note = 2'-O-methyluridine-3'-phosphate
tactgatttagcatgttgttcat

SEQ ID NO: 2112 - RNA, 21 nt, synthetic construct
  source 1..21: mol_type = other RNA; note = Description of Artificial Sequence: Synthetic oligonucleotide
  modified_base 1: mod_base = OTHER; note = 2'-O-methyluridine-3'-phosphorothioate
  modified_base 2: mod_base = OTHER; note = 2'-O-methylguanosine-3'-phosphorothioate
  modified_base 3: mod_base = OTHER; note = 2'-O-methyladenosine-3'-phosphate
  modified_base 4: mod_base = OTHER; note = 2'-O-methyladenosine-3'-phosphate
  modified_base 5: mod_base = OTHER; note = 2'-O-methylcytidine-3'-phosphate
  modified_base 6: mod_base = OTHER; note = 2'-O-methyladenosine-3'-phosphate
  modified_base 7: mod_base = OTHER; note = 2'-fluoroadenosine-3'-phosphate
  modified_base 8: mod_base = OTHER; note = 2'-O-methylcytidine-3'-phosphate
  modified_base 9: mod_base = OTHER; note = 2'-fluoroadenosine-3'-phosphate
  modified_base 10: mod_base = OTHER; note = 2'-fluorouridine-3'-phosphate
  modified_base 11: mod_base = OTHER; note = 2'-fluoroguanosine-3'-phosphate
  modified_base 12: mod_base = OTHER; note = 2'-O-methylcytidine-3'-phosphate
  modified_base 13: mod_base = OTHER; note = 2'-O-methyluridine-3'-phosphate
  modified_base 14: mod_base = OTHER; note = 2'-O-methyladenosine-3'-phosphate
  modified_base 15: mod_base = OTHER; note = 2'-O-methyladenosine-3'-phosphate
  modified_base 16: mod_base = OTHER; note = 2'-O-methyladenosine-3'-phosphate
  modified_base 17: mod_base = OTHER; note = 2'-O-methyluridine-3'-phosphate
  modified_base 18: mod_base = OTHER; note = 2'-O-methylcytidine-3'-phosphate
  modified_base 19: mod_base = OTHER; note = 2'-O-methyladenosine-3'-phosphate
  modified_base 20: mod_base = OTHER; note = 2'-O-methylguanosine-3'-phosphate
  modified_base 21: mod_base = OTHER; note = 2'-O-methyluridine-3'-phosphate N-[tris(GalNAc-alkyl)-amidodecanoyl)]-4-hydroxyprolinol Hyp-(GalNAc-alkyl)3
tgaacaacatgctaaatcagt

SEQ ID NO: 2113 - RNA, 23 nt, synthetic construct
  source 1..23: mol_type = other RNA; note = Description of Artificial Sequence: Synthetic oligonucleotide
  modified_base 1: mod_base = OTHER; note = 2'-O-methyladenosine-3'-phosphorothioate
  modified_base 2: mod_base = OTHER; note = 2'-fluorocytidine-3'-phosphorothioate
  modified_base 3: mod_base = OTHER; note = 2'-O-methyluridine-3'-phosphate
  modified_base 4: mod_base = OTHER; note = 2'-O-methylguanosine-3'-phosphate
  modified_base 5: mod_base = OTHER; note = 2'-O-methyladenosine-3'-phosphate
  modified_base 6: mod_base = OTHER; note = 2'-fluorouridine-3'-phosphate
  modified_base 7: mod_base = OTHER; note = 2'-O-methyluridine-3'-phosphate
  modified_base 8: mod_base = OTHER; note = 2'-fluorouridine-3'-phosphate
  modified_base 9: mod_base = OTHER; note = 2'-fluoroadenosine-3'-phosphate
  modified_base 10: mod_base = OTHER; note = 2'-O-methylguanosine-3'-phosphate
  modified_base 11: mod_base = OTHER; note = 2'-O-methylcytidine-3'-phosphate
  modified_base 12: mod_base = OTHER; note = 2'-O-methyladenosine-3'-phosphate
  modified_base 13: mod_base = OTHER; note = 2'-O-methyluridine-3'-phosphate
  modified_base 14: mod_base = OTHER; note = 2'-fluoroguanosine-3'-phosphate
  modified_base 15: mod_base = OTHER; note = 2'-O-methyluridine-3'-phosphate
  modified_base 16: mod_base = OTHER; note = 2'-fluorouridine-3'-phosphate
  modified_base 17: mod_base = OTHER; note = 2'-O-methylguanosine-3'-phosphate
  modified_base 18: mod_base = OTHER; note = 2'-O-methyluridine-3'-phosphate
  modified_base 19: mod_base = OTHER; note = 2'-O-methyluridine-3'-phosphate
  modified_base 20: mod_base = OTHER; note = 2'-O-methylcytidine-3'-phosphate
  modified_base 21: mod_base = OTHER; note = 2'-O-methyladenosine-3'-phosphorothioate
  modified_base 22: mod_base = OTHER; note = 2'-O-methyluridine-3'-phosphorothioate
  modified_base 23: mod_base = OTHER; note = 2'-O-methyladenosine-3'-phosphate
actgatttagcatgttgttcata

SEQ ID NO: 2114 - RNA, 21 nt, synthetic construct
  source 1..21: mol_type = other RNA; note = Description of Artificial Sequence: Synthetic oligonucleotide
  modified_base 1: mod_base = OTHER; note = 2'-O-methyladenosine-3'-phosphorothioate
  modified_base 2: mod_base = OTHER; note = 2'-O-methyladenosine-3'-phosphorothioate
  modified_base 3: mod_base = OTHER; note = 2'-O-methyladenosine-3'-phosphate
  modified_base 4: mod_base = OTHER; note = 2'-O-methylcytidine-3'-phosphate
  modified_base 5: mod_base = OTHER; note = 2'-O-methylcytidine-3'-phosphate
  modified_base 6: mod_base = OTHER; note = 2'-O-methyladenosine-3'-phosphate
  modified_base 7: mod_base = OTHER; note = 2'-fluoroguanosine-3'-phosphate
  modified_base 8: mod_base = OTHER; note = 2'-O-methyluridine-3'-phosphate
  modified_base 9: mod_base = OTHER; note = 2'-fluoroadenosine-3'-phosphate
  modified_base 10: mod_base = OTHER; note = 2'-fluorocytidine-3'-phosphate
  modified_base 11: mod_base = OTHER; note = 2'-fluorouridine-3'-phosphate
  modified_base 12: mod_base = OTHER; note = 2'-O-methyluridine-3'-phosphate
  modified_base 13: mod_base = OTHER; note = 2'-O-methyluridine-3'-phosphate
  modified_base 14: mod_base = OTHER; note = 2'-O-methyladenosine-3'-phosphate
  modified_base 15: mod_base = OTHER; note = 2'-O-methyluridine-3'-phosphate
  modified_base 16: mod_base = OTHER; note = 2'-O-methylcytidine-3'-phosphate
  modified_base 17: mod_base = OTHER; note = 2'-O-methyladenosine-3'-phosphate
  modified_base 18: mod_base = OTHER; note = 2'-O-methyluridine-3'-phosphate
  modified_base 19: mod_base = OTHER; note = 2'-O-methyluridine-3'-phosphate
  modified_base 20: mod_base = OTHER; note = 2'-O-methyluridine-3'-phosphate
  modified_base 21: mod_base = OTHER; note = 2'-O-methyluridine-3'-phosphate N-[tris(GalNAc-alkyl)-amidodecanoyl)]-4-hydroxyprolinol Hyp-(GalNAc-alkyl)3
aaaccagtactttatcatttt

SEQ ID NO: 2115 - RNA, 23 nt, synthetic construct
  source 1..23: mol_type = other RNA; note = Description of Artificial Sequence: Synthetic oligonucleotide
  modified_base 1: mod_base = OTHER; note = 2'-O-methyladenosine-3'-phosphorothioate
  modified_base 2: mod_base = OTHER; note = 2'-fluoroadenosine-3'-phosphorothioate
  modified_base 3: mod_base = OTHER; note = 2'-O-methyladenosine-3'-phosphate
  modified_base 4: mod_base = OTHER; note = 2'-O-methyladenosine-3'-phosphate
  modified_base 5: mod_base = OTHER; note = 2'-O-methyluridine-3'-phosphate
  modified_base 6: mod_base = OTHER; note = 2'-fluoroguanosine-3'-phosphate
  modified_base 7: mod_base = OTHER; note = 2'-O-methyladenosine-3'-phosphate
  modified_base 8: mod_base = OTHER; note = 2'-fluorouridine-3'-phosphate
  modified_base 9: mod_base = OTHER; note = 2'-fluoroadenosine-3'-phosphate
  modified_base 10: mod_base = OTHER; note = 2'-O-methyladenosine-3'-phosphate
  modified_base 11: mod_base = OTHER; note = 2'-O-methyladenosine-3'-phosphate
  modified_base 12: mod_base = OTHER; note = 2'-O-methylguanosine-3'-phosphate
  modified_base 13: mod_base = OTHER; note = 2'-O-methyluridine-3'-phosphate
  modified_base 14: mod_base = OTHER; note = 2'-fluoroadenosine-3'-phosphate
  modified_base 15: mod_base = OTHER; note = 2'-O-methylcytidine-3'-phosphate
  modified_base 16: mod_base = OTHER; note = 2'-fluorouridine-3'-phosphate
  modified_base 17: mod_base = OTHER; note = 2'-O-methylguanosine-3'-phosphate
  modified_base 18: mod_base = OTHER; note = 2'-O-methylguanosine-3'-phosphate
  modified_base 19: mod_base = OTHER; note = 2'-O-methyluridine-3'-phosphate
  modified_base 20: mod_base = OTHER; note = 2'-O-methyluridine-3'-phosphate
  modified_base 21: mod_base = OTHER; note = 2'-O-methyluridine-3'-phosphorothioate
  modified_base 22: mod_base = OTHER; note = 2'-O-methylcytidine-3'-phosphorothioate
  modified_base 23: mod_base = OTHER; note = 2'-O-methyladenosine-3'-phosphate
aaaatgataaagtactggtttca

SEQ ID NO: 2116 - RNA, 21 nt, synthetic construct
  source 1..21: mol_type = other RNA; note = Description of Artificial Sequence: Synthetic oligonucleotide
  modified_base 1: mod_base = OTHER; note = 2'-O-methyladenosine-3'-phosphorothioate
  modified_base 2: mod_base = OTHER; note = 2'-O-methyladenosine-3'-phosphorothioate
  modified_base 3: mod_base = OTHER; note = 2'-O-methylcytidine-3'-phosphate
  modified_base 4: mod_base = OTHER; note = 2'-O-methylcytidine-3'-phosphate
  modified_base 5: mod_base = OTHER; note = 2'-O-methyladenosine-3'-phosphate
  modified_base 6: mod_base = OTHER; note = 2'-O-methylguanosine-3'-phosphate
  modified_base 7: mod_base = OTHER; note = 2'-fluorouridine-3'-phosphate
  modified_base 8: mod_base = OTHER; note = 2'-O-methyladenosine-3'-phosphate
  modified_base 9: mod_base = OTHER; note = 2'-fluorocytidine-3'-phosphate
  modified_base 10: mod_base = OTHER; note = 2'-fluorouridine-3'-phosphate
  modified_base 11: mod_base = OTHER; note = 2'-fluorouridine-3'-phosphate
  modified_base 12: mod_base = OTHER; note = 2'-O-methyluridine-3'-phosphate
  modified_base 13: mod_base = OTHER; note = 2'-O-methyladenosine-3'-phosphate
  modified_base 14: mod_base = OTHER; note = 2'-O-methyluridine-3'-phosphate
  modified_base 15: mod_base = OTHER; note = 2'-O-methylcytidine-3'-phosphate
  modified_base 16: mod_base = OTHER; note = 2'-O-methyladenosine-3'-phosphate
  modified_base 17: mod_base = OTHER; note = 2'-O-methyluridine-3'-phosphate
  modified_base 18: mod_base = OTHER; note = 2'-O-methyluridine-3'-phosphate
  modified_base 19: mod_base = OTHER; note = 2'-O-methyluridine-3'-phosphate
  modified_base 20: mod_base = OTHER; note = 2'-O-methyluridine-3'-phosphate
  modified_base 21: mod_base = OTHER; note = 2'-O-methylcytidine-3'-phosphate N-[tris(GalNAc-alkyl)-amidodecanoyl)]-4-hydroxyprolinol Hyp-(GalNAc-alkyl)3
aaccagtactttatcattttc

SEQ ID NO: 2117 - RNA, 23 nt, synthetic construct
  source 1..23: mol_type = other RNA; note = Description of Artificial Sequence: Synthetic oligonucleotide
  modified_base 1: mod_base = OTHER; note = 2'-O-methylguanosine-3'-phosphorothioate
  modified_base 2: mod_base = OTHER; note = 2'-fluoroadenosine-3'-phosphorothioate
  modified_base 3: mod_base = OTHER; note = 2'-O-methyladenosine-3'-phosphate
  modified_base 4: mod_base = OTHER; note = 2'-O-methyladenosine-3'-phosphate
  modified_base 5: mod_base = OTHER; note = 2'-O-methyladenosine-3'-phosphate
  modified_base 6: mod_base = OTHER; note = 2'-fluorouridine-3'-phosphate
  modified_base 7: mod_base = OTHER; note = 2'-O-methylguanosine-3'-phosphate
  modified_base 8: mod_base = OTHER; note = 2'-fluoroadenosine-3'-phosphate
  modified_base 9: mod_base = OTHER; note = 2'-fluorouridine-3'-phosphate
  modified_base 10: mod_base = OTHER; note = 2'-O-methyladenosine-3'-phosphate
  modified_base 11: mod_base = OTHER; note = 2'-O-methyladenosine-3'-phosphate
  modified_base 12: mod_base = OTHER; note = 2'-O-methyladenosine-3'-phosphate
  modified_base 13: mod_base = OTHER; note = 2'-O-methylguanosine-3'-phosphate
  modified_base 14: mod_base = OTHER; note = 2'-fluorouridine-3'-phosphate
  modified_base 15: mod_base = OTHER; note = 2'-O-methyladenosine-3'-phosphate
  modified_base 16: mod_base = OTHER; note = 2'-fluorocytidine-3'-phosphate
  modified_base 17: mod_base = OTHER; note = 2'-O-methyluridine-3'-phosphate
  modified_base 18: mod_base = OTHER; note = 2'-O-methylguanosine-3'-phosphate
  modified_base 19: mod_base = OTHER; note = 2'-O-methylguanosine-3'-phosphate
  modified_base 20: mod_base = OTHER; note = 2'-O-methyluridine-3'-phosphate
  modified_base 21: mod_base = OTHER; note = 2'-O-methyluridine-3'-phosphorothioate
  modified_base 22: mod_base = OTHER; note = 2'-O-methyluridine-3'-phosphorothioate
  modified_base 23: mod_base = OTHER; note = 2'-O-methylcytidine-3'-phosphate
gaaaatgataaagtactggtttc

SEQ ID NO: 2118 - RNA, 21 nt, synthetic construct
  source 1..21: mol_type = other RNA; note = Description of Artificial Sequence: Synthetic oligonucleotide
  modified_base 1: mod_base = OTHER; note = 2'-O-methyluridine-3'-phosphorothioate
  modified_base 2: mod_base = OTHER; note = 2'-O-methyluridine-3'-phosphorothioate
  modified_base 3: mod_base = OTHER; note = 2'-O-methyluridine-3'-phosphate
  modified_base 4: mod_base = OTHER; note = 2'-O-methylguanosine-3'-phosphate
  modified_base 5: mod_base = OTHER; note = 2'-O-methyladenosine-3'-phosphate
  modified_base 6: mod_base = OTHER; note = 2'-O-methyladenosine-3'-phosphate
  modified_base 7: mod_base = OTHER; note = 2'-fluoroadenosine-3'-phosphate
  modified_base 8: mod_base = OTHER; note = 2'-O-methylcytidine-3'-phosphate
  modified_base 9: mod_base = OTHER; note = 2'-fluorocytidine-3'-phosphate
  modified_base 10: mod_base = OTHER; note = 2'-fluoroadenosine-3'-phosphate
  modified_base 11: mod_base = OTHER; note = 2'-fluoroguanosine-3'-phosphate
  modified_base 12: mod_base = OTHER; note = 2'-O-methyluridine-3'-phosphate
  modified_base 13: mod_base = OTHER; note = 2'-O-methyladenosine-3'-phosphate
  modified_base 14: mod_base = OTHER; note = 2'-O-methylcytidine-3'-phosphate
  modified_base 15: mod_base = OTHER; note = 2'-O-methyluridine-3'-phosphate
  modified_base 16: mod_base = OTHER; note = 2'-O-methyluridine-3'-phosphate
  modified_base 17: mod_base = OTHER; note = 2'-O-methyluridine-3'-phosphate
  modified_base 18: mod_base = OTHER; note = 2'-O-methyladenosine-3'-phosphate
  modified_base 19: mod_base = OTHER; note = 2'-O-methyluridine-3'-phosphate
  modified_base 20: mod_base = OTHER; note = 2'-O-methylcytidine-3'-phosphate
  modified_base 21: mod_base = OTHER; note = 2'-O-methyladenosine-3'-phosphate N-[tris(GalNAc-alkyl)-amidodecanoyl)]-4-hydroxyprolinol Hyp-(GalNAc-alkyl)3
tttgaaaccagtactttatca

SEQ ID NO: 2119 - RNA, 23 nt, synthetic construct
  source 1..23: mol_type = other RNA; note = Description of Artificial Sequence: Synthetic oligonucleotide
  modified_base 1: mod_base = OTHER; note = 2'-O-methyluridine-3'-phosphorothioate
  modified_base 2: mod_base = OTHER; note = 2'-fluoroguanosine-3'-phosphorothioate
  modified_base 3: mod_base = OTHER; note = 2'-O-methyladenosine-3'-phosphate
  modified_base 4: mod_base = OTHER; note = 2'-O-methyluridine-3'-phosphate
  modified_base 5: mod_base = OTHER; note = 2'-O-methyladenosine-3'-phosphate
  modified_base 6: mod_base = OTHER; note = 2'-fluoroadenosine-3'-phosphate
  modified_base 7: mod_base = OTHER; note = 2'-O-methyladenosine-3'-phosphate
  modified_base 8: mod_base = OTHER; note = 2'-fluoroguanosine-3'-phosphate
  modified_base 9: mod_base = OTHER; note = 2'-fluorouridine-3'-phosphate
  modified_base 10: mod_base = OTHER; note = 2'-O-methyladenosine-3'-phosphate
  modified_base 11: mod_base = OTHER; note = 2'-O-methylcytidine-3'-phosphate
  modified_base 12: mod_base = OTHER; note = 2'-O-methyluridine-3'-phosphate
  modified_base 13: mod_base = OTHER; note = 2'-O-methylguanosine-3'-phosphate
  modified_base 14: mod_base = OTHER; note = 2'-fluoroguanosine-3'-phosphate
  modified_base 15: mod_base = OTHER; note = 2'-O-methyluridine-3'-phosphate
  modified_base 16: mod_base = OTHER; note = 2'-fluorouridine-3'-phosphate
  modified_base 17: mod_base = OTHER; note = 2'-O-methyluridine-3'-phosphate
  modified_base 18: mod_base = OTHER; note = 2'-O-methylcytidine-3'-phosphate
  modified_base 19: mod_base = OTHER; note = 2'-O-methyladenosine-3'-phosphate
  modified_base 20: mod_base = OTHER; note = 2'-O-methyladenosine-3'-phosphate
  modified_base 21: mod_base = OTHER; note = 2'-O-methyladenosine-3'-phosphorothioate
  modified_base 22: mod_base = OTHER; note = 2'-O-methyladenosine-3'-phosphorothioate
  modified_base 23: mod_base = OTHER; note = 2'-O-methyluridine-3'-phosphate
tgataaagtactggtttcaaaat

SEQ ID NO: 2120 - RNA, 21 nt, synthetic construct
  source 1..21: mol_type = other RNA; note = Description of Artificial Sequence: Synthetic oligonucleotide
  modified_base 1: mod_base = OTHER; note = 2'-O-methyluridine-3'-phosphorothioate
  modified_base 2: mod_base = OTHER; note = 2'-O-methyluridine-3'-phosphorothioate
  modified_base 3: mod_base = OTHER; note = 2'-O-methyluridine-3'-phosphate
  modified_base 4: mod_base = OTHER; note = 2'-O-methyluridine-3'-phosphate
  modified_base 5: mod_base = OTHER; note = 2'-O-methylguanosine-3'-phosphate
  modified_base 6: mod_base = OTHER; note = 2'-O-methyladenosine-3'-phosphate
  modified_base 7: mod_base = OTHER; note = 2'-fluoroadenosine-3'-phosphate
  modified_base 8: mod_base = OTHER; note = 2'-O-methyladenosine-3'-phosphate
  modified_base 9: mod_base = OTHER; note = 2'-fluorocytidine-3'-phosphate
  modified_base 10: mod_base = OTHER; note = 2'-fluorocytidine-3'-phosphate
  modified_base 11: mod_base = OTHER; note = 2'-fluoroadenosine-3'-phosphate
  modified_base 12: mod_base = OTHER; note = 2'-O-methylguanosine-3'-phosphate
  modified_base 13: mod_base = OTHER; note = 2'-O-methyluridine-3'-phosphate
  modified_base 14: mod_base = OTHER; note = 2'-O-methyladenosine-3'-phosphate
  modified_base 15: mod_base = OTHER; note = 2'-O-methylcytidine-3'-phosphate
  modified_base 16: mod_base = OTHER; note = 2'-O-methyluridine-3'-phosphate
  modified_base 17: mod_base = OTHER; note = 2'-O-methyluridine-3'-phosphate
  modified_base 18: mod_base = OTHER; note = 2'-O-methyluridine-3'-phosphate
  modified_base 19: mod_base = OTHER; note = 2'-O-methyladenosine-3'-phosphate
  modified_base 20: mod_base = OTHER; note = 2'-O-methyluridine-3'-phosphate
  modified_base 21: mod_base = OTHER; note = 2'-O-methylcytidine-3'-phosphate N-[tris(GalNAc-alkyl)-amidodecanoyl)]-4-hydroxyprolinol Hyp-(GalNAc-alkyl)3
ttttgaaaccagtactttatc

SEQ ID NO: 2121 - RNA, 23 nt, synthetic construct
  source 1..23: mol_type = other RNA; note = Description of Artificial Sequence: Synthetic oligonucleotide
  modified_base 1: mod_base = OTHER; note = 2'-O-methylguanosine-3'-phosphorothioate
  modified_base 2: mod_base = OTHER; note = 2'-fluoroadenosine-3'-phosphorothioate
  modified_base 3: mod_base = OTHER; note = 2'-O-methyluridine-3'-phosphate
  modified_base 4: mod_base = OTHER; note = 2'-O-methyladenosine-3'-phosphate
  modified_base 5: mod_base = OTHER; note = 2'-O-methyladenosine-3'-phosphate
  modified_base 6: mod_base = OTHER; note = 2'-fluoroadenosine-3'-phosphate
  modified_base 7: mod_base = OTHER; note = 2'-O-methylguanosine-3'-phosphate
  modified_base 8: mod_base = OTHER; note = 2'-fluorouridine-3'-phosphate
  modified_base 9: mod_base = OTHER; note = 2'-fluoroadenosine-3'-phosphate
  modified_base 10: mod_base = OTHER; note = 2'-O-methylcytidine-3'-phosphate
  modified_base 11: mod_base = OTHER; note = 2'-O-methyluridine-3'-phosphate
  modified_base 12: mod_base = OTHER; note = 2'-O-methylguanosine-3'-phosphate
  modified_base 13: mod_base = OTHER; note = 2'-O-methylguanosine-3'-phosphate
  modified_base 14: mod_base = OTHER; note = 2'-fluorouridine-3'-phosphate
  modified_base 15: mod_base = OTHER; note = 2'-O-methyluridine-3'-phosphate
  modified_base 16: mod_base = OTHER; note = 2'-fluorouridine-3'-phosphate
  modified_base 17: mod_base = OTHER; note = 2'-O-methylcytidine-3'-phosphate
  modified_base 18: mod_base = OTHER; note = 2'-O-methyladenosine-3'-phosphate
  modified_base 19: mod_base = OTHER; note = 2'-O-methyladenosine-3'-phosphate
  modified_base 20: mod_base = OTHER; note = 2'-O-methyladenosine-3'-phosphate
  modified_base 21: mod_base = OTHER; note = 2'-O-methyladenosine-3'-phosphorothioate
  modified_base 22: mod_base = OTHER; note = 2'-O-methyluridine-3'-phosphorothioate
  modified_base 23: mod_base = OTHER; note = 2'-O-methyluridine-3'-phosphate
gataaagtactggtttcaaaatt

SEQ ID NO: 2122 - RNA, 21 nt, synthetic construct
  source 1..21: mol_type = other RNA; note = Description of Artificial Sequence: Synthetic oligonucleotide
  modified_base 1: mod_base = OTHER; note = 2'-O-methylguanosine-3'-phosphorothioate
  modified_base 2: mod_base = OTHER; note = 2'-O-methyladenosine-3'-phosphorothioate
  modified_base 3: mod_base = OTHER; note = 2'-O-methylguanosine-3'-phosphate
  modified_base 4: mod_base = OTHER; note = 2'-O-methyladenosine-3'-phosphate
  modified_base 5: mod_base = OTHER; note = 2'-O-methyladenosine-3'-phosphate
  modified_base 6: mod_base = OTHER; note = 2'-O-methylguanosine-3'-phosphate
  modified_base 7: mod_base = OTHER; note = 2'-fluoroadenosine-3'-phosphate
  modified_base 8: mod_base = OTHER; note = 2'-O-methyluridine-3'-phosphate
  modified_base 9: mod_base = OTHER; note = 2'-fluoroguanosine-3'-phosphate
  modified_base 10: mod_base = OTHER; note = 2'-fluoroguanosine-3'-phosphate
  modified_base 11: mod_base = OTHER; note = 2'-fluoroguanosine-3'-phosphate
  modified_base 12: mod_base = OTHER; note = 2'-O-methylcytidine-3'-phosphate
  modified_base 13: mod_base = OTHER; note = 2'-O-methyluridine-3'-phosphate
  modified_base 14: mod_base = OTHER; note = 2'-O-methyladenosine-3'-phosphate
  modified_base 15: mod_base = OTHER; note = 2'-O-methylcytidine-3'-phosphate
  modified_base 16: mod_base = OTHER; note = 2'-O-methyladenosine-3'-phosphate
  modified_base 17: mod_base = OTHER; note = 2'-O-methyladenosine-3'-phosphate
  modified_base 18: mod_base = OTHER; note = 2'-O-methylguanosine-3'-phosphate
  modified_base 19: mod_base = OTHER; note = 2'-O-methylguanosine-3'-phosphate
  modified_base 20: mod_base = OTHER; note = 2'-O-methylcytidine-3'-phosphate
  modified_base 21: mod_base = OTHER; note = 2'-O-methylcytidine-3'-phosphate N-[tris(GalNAc-alkyl)-amidodecanoyl)]-4-hydroxyprolinol Hyp-(GalNAc-alkyl)3
gagaagatgggctacaaggcc

SEQ ID NO: 2123 - RNA, 23 nt, synthetic construct
  source 1..23: mol_type = other RNA; note = Description of Artificial Sequence: Synthetic oligonucleotide
  modified_base 1: mod_base = OTHER; note = 2'-O-methylguanosine-3'-phosphorothioate
  modified_base 2: mod_base = OTHER; note = 2'-fluoroguanosine-3'-phosphorothioate
  modified_base 3: mod_base = OTHER; note = 2'-O-methylcytidine-3'-phosphate
  modified_base 4: mod_base = OTHER; note = 2'-O-methylcytidine-3'-phosphate
  modified_base 5: mod_base = OTHER; note = 2'-O-methyluridine-3'-phosphate
  modified_base 6: mod_base = OTHER; note = 2'-fluorouridine-3'-phosphate
  modified_base 7: mod_base = OTHER; note = 2'-O-methylguanosine-3'-phosphate
  modified_base 8: mod_base = OTHER; note = 2'-fluorouridine-3'-phosphate
  modified_base 9: mod_base = OTHER; note = 2'-fluoroadenosine-3'-phosphate
  modified_base 10: mod_base = OTHER; note = 2'-O-methylguanosine-3'-phosphate
  modified_base 11: mod_base = OTHER; note = 2'-O-methylcytidine-3'-phosphate
  modified_base 12: mod_base = OTHER; note = 2'-O-methylcytidine-3'-phosphate
  modified_base 13: mod_base = OTHER; note = 2'-O-methylcytidine-3'-phosphate
  modified_base 14: mod_base = OTHER; note = 2'-fluoroadenosine-3'-phosphate
  modified_base 15: mod_base = OTHER; note = 2'-O-methyluridine-3'-phosphate
  modified_base 16: mod_base = OTHER; note = 2'-fluorocytidine-3'-phosphate
  modified_base 17: mod_base = OTHER; note = 2'-O-methyluridine-3'-phosphate
  modified_base 18: mod_base = OTHER; note = 2'-O-methyluridine-3'-phosphate
  modified_base 19: mod_base = OTHER; note = 2'-O-methylcytidine-3'-phosphate
  modified_base 20: mod_base = OTHER; note = 2'-O-methyluridine-3'-phosphate
  modified_base 21: mod_base = OTHER; note = 2'-O-methylcytidine-3'-phosphorothioate
  modified_base 22: mod_base = OTHER; note = 2'-O-methyluridine-3'-phosphorothioate
  modified_base 23: mod_base = OTHER; note = 2'-O-methylguanosine-3'-phosphate
ggccttgtagcccatcttctctg

SEQ ID NO: 2124 - RNA, 21 nt, synthetic construct
  source 1..21: mol_type = other RNA; note = Description of Artificial Sequence: Synthetic oligonucleotide
  modified_base 1: mod_base = OTHER; note = 2'-O-methyladenosine-3'-phosphorothioate
  modified_base 2: mod_base = OTHER; note = 2'-O-methylguanosine-3'-phosphorothioate
  modified_base 3: mod_base = OTHER; note = 2'-O-methyladenosine-3'-phosphate
  modified_base 4: mod_base = OTHER; note = 2'-O-methyladenosine-3'-phosphate
  modified_base 5: mod_base = OTHER; note = 2'-O-methylguanosine-3'-phosphate
  modified_base 6: mod_base = OTHER; note = 2'-O-methyladenosine-3'-phosphate
  modified_base 7: mod_base = OTHER; note = 2'-fluorouridine-3'-phosphate
  modified_base 8: mod_base = OTHER; note = 2'-O-methylguanosine-3'-phosphate
  modified_base 9: mod_base = OTHER; note = 2'-fluoroguanosine-3'-phosphate
  modified_base 10: mod_base = OTHER; note = 2'-fluoroguanosine-3'-phosphate
  modified_base 11: mod_base = OTHER; note = 2'-fluorocytidine-3'-phosphate
  modified_base 12: mod_base = OTHER; note = 2'-O-methyluridine-3'-phosphate
  modified_base 13: mod_base = OTHER; note = 2'-O-methyladenosine-3'-phosphate
  modified_base 14: mod_base = OTHER; note = 2'-O-methylcytidine-3'-phosphate
  modified_base 15: mod_base = OTHER; note = 2'-O-methyladenosine-3'-phosphate
  modified_base 16: mod_base = OTHER; note = 2'-O-methyladenosine-3'-phosphate
  modified_base 17: mod_base = OTHER; note = 2'-O-methylguanosine-3'-phosphate
  modified_base 18: mod_base = OTHER; note = 2'-O-methylguanosine-3'-phosphate
  modified_base 19: mod_base = OTHER; note = 2'-O-methylcytidine-3'-phosphate
  modified_base 20: mod_base = OTHER; note = 2'-O-methylcytidine-3'-phosphate
  modified_base 21: mod_base = OTHER; note = 2'-O-methyladenosine-3'-phosphate N-[tris(GalNAc-alkyl)-amidodecanoyl)]-4-hydroxyprolinol Hyp-(GalNAc-alkyl)3
agaagatgggctacaaggcca

SEQ ID NO: 2125 - RNA, 23 nt, synthetic construct
  source 1..23: mol_type = other RNA; note = Description of Artificial Sequence: Synthetic oligonucleotide
  modified_base 1: mod_base = OTHER; note = 2'-O-methyluridine-3'-phosphorothioate
  modified_base 2: mod_base = OTHER; note = 2'-fluoroguanosine-3'-phosphorothioate
  modified_base 3: mod_base = OTHER; note = 2'-O-methylguanosine-3'-phosphate
  modified_base 4: mod_base = OTHER; note = 2'-O-methylcytidine-3'-phosphate
  modified_base 5: mod_base = OTHER; note = 2'-O-methylcytidine-3'-phosphate
  modified_base 6: mod_base = OTHER; note = 2'-fluorouridine-3'-phosphate
  modified_base 7: mod_base = OTHER; note = 2'-O-methyluridine-3'-phosphate
  modified_base 8: mod_base = OTHER; note = 2'-fluoroguanosine-3'-phosphate
  modified_base 9: mod_base = OTHER; note = 2'-fluorouridine-3'-phosphate
  modified_base 10: mod_base = OTHER; note = 2'-O-methyladenosine-3'-phosphate
  modified_base 11: mod_base = OTHER; note = 2'-O-methylguanosine-3'-phosphate
  modified_base 12: mod_base = OTHER; note = 2'-O-methylcytidine-3'-phosphate
  modified_base 13: mod_base = OTHER; note = 2'-O-methylcytidine-3'-phosphate
  modified_base 14: mod_base = OTHER; note = 2'-fluorocytidine-3'-phosphate
  modified_base 15: mod_base = OTHER; note = 2'-O-methyladenosine-3'-phosphate
  modified_base 16: mod_base = OTHER; note = 2'-fluorouridine-3'-phosphate
  modified_base 17: mod_base = OTHER; note = 2'-O-methylcytidine-3'-phosphate
  modified_base 18: mod_base = OTHER; note = 2'-O-methyluridine-3'-phosphate
  modified_base 19: mod_base = OTHER; note = 2'-O-methyluridine-3'-phosphate
  modified_base 20: mod_base = OTHER; note = 2'-O-methylcytidine-3'-phosphate
  modified_base 21: mod_base = OTHER; note = 2'-O-methyluridine-3'-phosphorothioate
  modified_base 22: mod_base = OTHER; note = 2'-O-methylcytidine-3'-phosphorothioate
  modified_base 23: mod_base = OTHER; note = 2'-O-methyluridine-3'-phosphate
tggccttgtagcccatcttctct

SEQ ID NO: 2126 - RNA, 21 nt, synthetic construct
  source 1..21: mol_type = other RNA; note = Description of Artificial Sequence: Synthetic oligonucleotide
  modified_base 1: mod_base = OTHER; note = 2'-O-methylguanosine-3'-phosphorothioate
  modified_base 2: mod_base = OTHER; note = 2'-O-methylguanosine-3'-phosphorothioate
  modified_base 3: mod_base = OTHER; note = 2'-O-methylcytidine-3'-phosphate
  modified_base 4: mod_base = OTHER; note = 2'-O-methyladenosine-3'-phosphate
  modified_base 5: mod_base = OTHER; note = 2'-O-methylguanosine-3'-phosphate
  modified_base 6: mod_base = OTHER; note = 2'-O-methyladenosine-3'-phosphate
  modified_base 7: mod_base = OTHER; note = 2'-fluoroguanosine-3'-phosphate
  modified_base 8: mod_base = OTHER; note = 2'-O-methyladenosine-3'-phosphate
  modified_base 9: mod_base = OTHER; note = 2'-fluoroadenosine-3'-phosphate
  modified_base 10: mod_base = OTHER; note = 2'-fluoroguanosine-3'-phosphate
  modified_base 11: mod_base = OTHER; note = 2'-fluoroadenosine-3'-phosphate
  modified_base 12: mod_base = OTHER; note = 2'-O-methyluridine-3'-phosphate
  modified_base 13: mod_base = OTHER; note = 2'-O-methylguanosine-3'-phosphate
  modified_base 14: mod_base = OTHER; note = 2'-O-methylguanosine-3'-phosphate
  modified_base 15: mod_base = OTHER; note = 2'-O-methylguanosine-3'-phosphate
  modified_base 16: mod_base = OTHER; note = 2'-O-methylcytidine-3'-phosphate
  modified_base 17: mod_base = OTHER; note = 2'-O-methyluridine-3'-phosphate
  modified_base 18: mod_base = OTHER; note = 2'-O-methyladenosine-3'-phosphate
  modified_base 19: mod_base = OTHER; note = 2'-O-methylcytidine-3'-phosphate
  modified_base 20: mod_base = OTHER; note = 2'-O-methyladenosine-3'-phosphate
  modified_base 21: mod_base = OTHER; note = 2'-O-methyladenosine-3'-phosphate N-[tris(GalNAc-alkyl)-amidodecanoyl)]-4-hydroxyprolinol Hyp-(GalNAc-alkyl)3
ggcagagaagatgggctacaa

SEQ ID NO: 2127 - RNA, 23 nt, synthetic construct
  source 1..23: mol_type = other RNA; note = Description of Artificial Sequence: Synthetic oligonucleotide
  modified_base 1: mod_base = OTHER; note = 2'-O-methyluridine-3'-phosphorothioate
  modified_base 2: mod_base = OTHER; note = 2'-fluorouridine -3'-phosphorothioate
  modified_base 3: mod_base = OTHER; note = 2'-O-methylguanosine-3'-phosphate
  modified_base 4: mod_base = OTHER; note = 2'-O-methyluridine-3'-phosphate
  modified_base 5: mod_base = OTHER; note = 2'-O-methyladenosine-3'-phosphate
  modified_base 6: mod_base = OTHER; note = 2'-fluoroguanosine-3'-phosphate
  modified_base 7: mod_base = OTHER; note = 2'-O-methylcytidine-3'-phosphate
  modified_base 8: mod_base = OTHER; note = 2'-fluorocytidine-3'-phosphate
  modified_base 9: mod_base = OTHER; note = 2'-fluorocytidine-3'-phosphate
  modified_base 10: mod_base = OTHER; note = 2'-O-methyladenosine-3'-phosphate
  modified_base 11: mod_base = OTHER; note = 2'-O-methyluridine-3'-phosphate
  modified_base 12: mod_base = OTHER; note = 2'-O-methylcytidine-3'-phosphate
  modified_base 13: mod_base = OTHER; note = 2'-O-methyluridine-3'-phosphate
  modified_base 14: mod_base = OTHER; note = 2'-fluorouridine-3'-phosphate
  modified_base 15: mod_base = OTHER; note = 2'-O-methylcytidine-3'-phosphate
  modified_base 16: mod_base = OTHER; note = 2'-fluorouridine-3'-phosphate
  modified_base 17: mod_base = OTHER; note = 2'-O-methylcytidine-3'-phosphate
  modified_base 18: mod_base = OTHER; note = 2'-O-methyluridine-3'-phosphate
  modified_base 19: mod_base = OTHER; note = 2'-O-methylguanosine-3'-phosphate
  modified_base 20: mod_base = OTHER; note = 2'-O-methylcytidine-3'-phosphate
  modified_base 21: mod_base = OTHER; note = 2'-O-methylcytidine-3'-phosphorothioate
  modified_base 22: mod_base = OTHER; note = 2'-O-methyluridine-3'-phosphorothioate
  modified_base 23: mod_base = OTHER; note = 2'-O-methylguanosine-3'-phosphate
ttgtagcccatcttctctgcctg

SEQ ID NO: 2128 - RNA, 21 nt, synthetic construct
  source 1..21: mol_type = other RNA; note = Description of Artificial Sequence: Synthetic oligonucleotide
  modified_base 1: mod_base = OTHER; note = 2'-O-methyladenosine-3'-phosphorothioate
  modified_base 2: mod_base = OTHER; note = 2'-O-methylguanosine-3'-phosphorothioate
  modified_base 3: mod_base = OTHER; note = 2'-O-methylguanosine-3'-phosphate
  modified_base 4: mod_base = OTHER; note = 2'-O-methylcytidine-3'-phosphate
  modified_base 5: mod_base = OTHER; note = 2'-O-methyladenosine-3'-phosphate
  modified_base 6: mod_base = OTHER; note = 2'-O-methylguanosine-3'-phosphate
  modified_base 7: mod_base = OTHER; note = 2'-fluoroadenosine-3'-phosphate
  modified_base 8: mod_base = OTHER; note = 2'-O-methylguanosine-3'-phosphate
  modified_base 9: mod_base = OTHER; note = 2'-fluoroadenosine-3'-phosphate
  modified_base 10: mod_base = OTHER; note = 2'-fluoroadenosine-3'-phosphate
  modified_base 11: mod_base = OTHER; note = 2'-fluoroguanosine-3'-phosphate
  modified_base 12: mod_base = OTHER; note = 2'-O-methyladenosine-3'-phosphate
  modified_base 13: mod_base = OTHER; note = 2'-O-methyluridine-3'-phosphate
  modified_base 14: mod_base = OTHER; note = 2'-O-methylguanosine-3'-phosphate
  modified_base 15: mod_base = OTHER; note = 2'-O-methylguanosine-3'-phosphate
  modified_base 16: mod_base = OTHER; note = 2'-O-methylguanosine-3'-phosphate
  modified_base 17: mod_base = OTHER; note = 2'-O-methylcytidine-3'-phosphate
  modified_base 18: mod_base = OTHER; note = 2'-O-methyluridine-3'-phosphate
  modified_base 19: mod_base = OTHER; note = 2'-O-methyladenosine-3'-phosphate
  modified_base 20: mod_base = OTHER; note = 2'-O-methylcytidine-3'-phosphate
  modified_base 21: mod_base = OTHER; note = 2'-O-methyladenosine-3'-phosphate N-[tris(GalNAc-alkyl)-amidodecanoyl)]-4-hydroxyprolinol Hyp-(GalNAc-alkyl)3
aggcagagaagatgggctaca

SEQ ID NO: 2129 - RNA, 23 nt, synthetic construct
  source 1..23: mol_type = other RNA; note = Description of Artificial Sequence: Synthetic oligonucleotide
  modified_base 1: mod_base = OTHER; note = 2'-O-methyluridine-3'-phosphorothioate
  modified_base 2: mod_base = OTHER; note = 2'-fluoroguanosine-3'-phosphorothioate
  modified_base 3: mod_base = OTHER; note = 2'-O-methyluridine-3'-phosphate
  modified_base 4: mod_base = OTHER; note = 2'-O-methyladenosine-3'-phosphate
  modified_base 5: mod_base = OTHER; note = 2'-O-methylguanosine-3'-phosphate
  modified_base 6: mod_base = OTHER; note = 2'-fluorocytidine-3'-phosphate
  modified_base 7: mod_base = OTHER; note = 2'-O-methylcytidine-3'-phosphate
  modified_base 8: mod_base = OTHER; note = 2'-fluorocytidine-3'-phosphate
  modified_base 9: mod_base = OTHER; note = 2'-fluoroadenosine-3'-phosphate
  modified_base 10: mod_base = OTHER; note = 2'-O-methyluridine-3'-phosphate
  modified_base 11: mod_base = OTHER; note = 2'-O-methylcytidine-3'-phosphate
  modified_base 12: mod_base = OTHER; note = 2'-O-methyluridine-3'-phosphate
  modified_base 13: mod_base = OTHER; note = 2'-O-methyluridine-3'-phosphate
  modified_base 14: mod_base = OTHER; note = 2'-fluorocytidine-3'-phosphate
  modified_base 15: mod_base = OTHER; note = 2'-O-methyluridine-3'-phosphate
  modified_base 16: mod_base = OTHER; note = 2'-fluorocytidine-3'-phosphate
  modified_base 17: mod_base = OTHER; note = 2'-O-methyluridine-3'-phosphate
  modified_base 18: mod_base = OTHER; note = 2'-O-methylguanosine-3'-phosphate
  modified_base 19: mod_base = OTHER; note = 2'-O-methylcytidine-3'-phosphate
  modified_base 20: mod_base = OTHER; note = 2'-O-methylcytidine-3'-phosphate
  modified_base 21: mod_base = OTHER; note = 2'-O-methyluridine-3'-phosphorothioate
  modified_base 22: mod_base = OTHER; note = 2'-O-methylguanosine-3'-phosphorothioate
  modified_base 23: mod_base = OTHER; note = 2'-O-methylcytidine-3'-phosphate
tgtagcccatcttctctgcctgc

SEQ ID NO: 2130 - RNA, 21 nt, synthetic construct
  source 1..21: mol_type = other RNA; note = Description of Artificial Sequence: Synthetic oligonucleotide
  modified_base 1: mod_base = OTHER; note = 2'-O-methyladenosine-3'-phosphorothioate
  modified_base 2: mod_base = OTHER; note = 2'-O-methyladenosine-3'-phosphorothioate
  modified_base 3: mod_base = OTHER; note = 2'-O-methylcytidine-3'-phosphate
  modified_base 4: mod_base = OTHER; note = 2'-O-methylguanosine-3'-phosphate
  modified_base 5: mod_base = OTHER; note = 2'-O-methylguanosine-3'-phosphate
  modified_base 6: mod_base = OTHER; note = 2'-O-methylguanosine-3'-phosphate
  modified_base 7: mod_base = OTHER; note = 2'-fluorocytidine-3'-phosphate
  modified_base 8: mod_base = OTHER; note = 2'-O-methyladenosine-3'-phosphate
  modified_base 9: mod_base = OTHER; note = 2'-fluorouridine-3'-phosphate
  modified_base 10: mod_base = OTHER; note = 2'-fluoroguanosine-3'-phosphate
  modified_base 11: mod_base = OTHER; note = 2'-fluoroadenosine-3'-phosphate
  modified_base 12: mod_base = OTHER; note = 2'-O-methyluridine-3'-phosphate
  modified_base 13: mod_base = OTHER; note = 2'-O-methylguanosine-3'-phosphate
  modified_base 14: mod_base = OTHER; note = 2'-O-methyluridine-3'-phosphate
  modified_base 15: mod_base = OTHER; note = 2'-O-methyluridine-3'-phosphate
  modified_base 16: mod_base = OTHER; note = 2'-O-methylguanosine-3'-phosphate
  modified_base 17: mod_base = OTHER; note = 2'-O-methyladenosine-3'-phosphate
  modified_base 18: mod_base = OTHER; note = 2'-O-methylguanosine-3'-phosphate
  modified_base 19: mod_base = OTHER; note = 2'-O-methyluridine-3'-phosphate
  modified_base 20: mod_base = OTHER; note = 2'-O-methyluridine-3'-phosphate
  modified_base 21: mod_base = OTHER; note = 2'-O-methylcytidine-3'-phosphate N-[tris(GalNAc-alkyl)-amidodecanoyl)]-4-hydroxyprolinol Hyp-(GalNAc-alkyl)3
aacgggcatgatgttgagttc

SEQ ID NO: 2131 - RNA, 23 nt, synthetic construct
  source 1..23: mol_type = other RNA; note = Description of Artificial Sequence: Synthetic oligonucleotide
  modified_base 1: mod_base = OTHER; note = 2'-O-methylguanosine-3'-phosphorothioate
  modified_base 2: mod_base = OTHER; note = 2'-fluoroadenosine-3'-phosphorothioate
  modified_base 3: mod_base = OTHER; note = 2'-O-methyladenosine-3'-phosphate
  modified_base 4: mod_base = OTHER; note = 2'-O-methylcytidine-3'-phosphate
  modified_base 5: mod_base = OTHER; note = 2'-O-methyluridine-3'-phosphate
  modified_base 6: mod_base = OTHER; note = 2'-fluorocytidine-3'-phosphate
  modified_base 7: mod_base = OTHER; note = 2'-O-methyladenosine-3'-phosphate
  modified_base 8: mod_base = OTHER; note = 2'-fluoroadenosine-3'-phosphate
  modified_base 9: mod_base = OTHER; note = 2'-fluorocytidine-3'-phosphate
  modified_base 10: mod_base = OTHER; note = 2'-O-methyladenosine-3'-phosphate
  modified_base 11: mod_base = OTHER; note = 2'-O-methyluridine-3'-phosphate
  modified_base 12: mod_base = OTHER; note = 2'-O-methylcytidine-3'-phosphate
  modified_base 13: mod_base = OTHER; note = 2'-O-methyladenosine-3'-phosphate
  modified_base 14: mod_base = OTHER; note = 2'-fluorouridine-3'-phosphate
  modified_base 15: mod_base = OTHER; note = 2'-O-methylguanosine-3'-phosphate
  modified_base 16: mod_base = OTHER; note = 2'-fluorocytidine-3'-phosphate
  modified_base 17: mod_base = OTHER; note = 2'-O-methylcytidine-3'-phosphate
  modified_base 18: mod_base = OTHER; note = 2'-O-methylcytidine-3'-phosphate
  modified_base 19: mod_base = OTHER; note = 2'-O-methylguanosine-3'-phosphate
  modified_base 20: mod_base = OTHER; note = 2'-O-methyluridine-3'-phosphate
  modified_base 21: mod_base = OTHER; note = 2'-O-methyluridine-3'-phosphorothioate
  modified_base 22: mod_base = OTHER; note = 2'-O-methylcytidine-3'-phosphorothioate
  modified_base 23: mod_base = OTHER; note = 2'-O-methylcytidine-3'-phosphate
gaactcaacatcatgcccgttcc

SEQ ID NO: 2132 - RNA, 21 nt, synthetic construct
  source 1..21: mol_type = other RNA; note = Description of Artificial Sequence: Synthetic oligonucleotide
  modified_base 1: mod_base = OTHER; note = 2'-O-methyladenosine-3'-phosphorothioate
  modified_base 2: mod_base = OTHER; note = 2'-O-methylcytidine-3'-phosphorothioate
  modified_base 3: mod_base = OTHER; note = 2'-O-methylguanosine-3'-phosphate
  modified_base 4: mod_base = OTHER; note = 2'-O-methylguanosine-3'-phosphate
  modified_base 5: mod_base = OTHER; note = 2'-O-methylguanosine-3'-phosphate
  modified_base 6: mod_base = OTHER; note = 2'-O-methylcytidine-3'-phosphate
  modified_base 7: mod_base = OTHER; note = 2'-fluoroadenosine-3'-phosphate
  modified_base 8: mod_base = OTHER; note = 2'-O-methyluridine-3'-phosphate
  modified_base 9: mod_base = OTHER; note = 2'-fluoroguanosine-3'-phosphate
  modified_base 10: mod_base = OTHER; note = 2'-fluoroadenosine-3'-phosphate
  modified_base 11: mod_base = OTHER; note = 2'-fluorouridine-3'-phosphate
  modified_base 12: mod_base = OTHER; note = 2'-O-methylguanosine-3'-phosphate
  modified_base 13: mod_base = OTHER; note = 2'-O-methyluridine-3'-phosphate
  modified_base 14: mod_base = OTHER; note = 2'-O-methyluridine-3'-phosphate
  modified_base 15: mod_base = OTHER; note = 2'-O-methylguanosine-3'-phosphate
  modified_base 16: mod_base = OTHER; note = 2'-O-methyladenosine-3'-phosphate
  modified_base 17: mod_base = OTHER; note = 2'-O-methylguanosine-3'-phosphate
  modified_base 18: mod_base = OTHER; note = 2'-O-methyluridine-3'-phosphate
  modified_base 19: mod_base = OTHER; note = 2'-O-methyluridine-3'-phosphate
  modified_base 20: mod_base = OTHER; note = 2'-O-methylcytidine-3'-phosphate
  modified_base 21: mod_base = OTHER; note = 2'-O-methylcytidine-3'-phosphate N-[tris(GalNAc-alkyl)-amidodecanoyl)]-4-hydroxyprolinol Hyp-(GalNAc-alkyl)3
acgggcatgatgttgagttcc

SEQ ID NO: 2133 - RNA, 23 nt, synthetic construct
  source 1..23: mol_type = other RNA; note = Description of Artificial Sequence: Synthetic oligonucleotide
  modified_base 1: mod_base = OTHER; note = 2'-O-methylguanosine-3'-phosphorothioate
  modified_base 2: mod_base = OTHER; note = 2'-fluoroguanosine-3'-phosphorothioate
  modified_base 3: mod_base = OTHER; note = 2'-O-methyladenosine-3'-phosphate
  modified_base 4: mod_base = OTHER; note = 2'-O-methyladenosine-3'-phosphate
  modified_base 5: mod_base = OTHER; note = 2'-O-methylcytidine-3'-phosphate
  modified_base 6: mod_base = OTHER; note = 2'-fluorouridine-3'-phosphate
  modified_base 7: mod_base = OTHER; note = 2'-O-methylcytidine-3'-phosphate
  modified_base 8: mod_base = OTHER; note = 2'-fluoroadenosine-3'-phosphate
  modified_base 9: mod_base = OTHER; note = 2'-fluoroadenosine-3'-phosphate
  modified_base 10: mod_base = OTHER; note = 2'-O-methylcytidine-3'-phosphate
  modified_base 11: mod_base = OTHER; note = 2'-O-methyladenosine-3'-phosphate
  modified_base 12: mod_base = OTHER; note = 2'-O-methyluridine-3'-phosphate
  modified_base 13: mod_base = OTHER; note = 2'-O-methylcytidine-3'-phosphate
  modified_base 14: mod_base = OTHER; note = 2'-fluoroadenosine-3'-phosphate
  modified_base 15: mod_base = OTHER; note = 2'-O-methyluridine-3'-phosphate
  modified_base 16: mod_base = OTHER; note = 2'-fluoroguanosine-3'-phosphate
  modified_base 17: mod_base = OTHER; note = 2'-O-methylcytidine-3'-phosphate
  modified_base 18: mod_base = OTHER; note = 2'-O-methylcytidine-3'-phosphate
  modified_base 19: mod_base = OTHER; note = 2'-O-methylcytidine-3'-phosphate
  modified_base 20: mod_base = OTHER; note = 2'-O-methylguanosine-3'-phosphate
  modified_base 21: mod_base = OTHER; note = 2'-O-methyluridine-3'-phosphorothioate
  modified_base 22: mod_base = OTHER; note = 2'-O-methyluridine-3'-phosphorothioate
  modified_base 23: mod_base = OTHER; note = 2'-O-methylcytidine-3'-phosphate
ggaactcaacatcatgcccgttc

SEQ ID NO: 2134 - RNA, 21 nt, synthetic construct
  source 1..21: mol_type = other RNA; note = Description of Artificial Sequence: Synthetic oligonucleotide
  modified_base 1: mod_base = OTHER; note = 2'-O-methyluridine-3'-phosphorothioate
  modified_base 2: mod_base = OTHER; note = 2'-O-methylguanosine-3'-phosphorothioate
  modified_base 3: mod_base = OTHER; note = 2'-O-methylguanosine-3'-phosphate
  modified_base 4: mod_base = OTHER; note = 2'-O-methylguanosine-3'-phosphate
  modified_base 5: mod_base = OTHER; note = 2'-O-methyladenosine-3'-phosphate
  modified_base 6: mod_base = OTHER; note = 2'-O-methyladenosine-3'-phosphate
  modified_base 7: mod_base = OTHER; note = 2'-fluorocytidine-3'-phosphate
  modified_base 8: mod_base = OTHER; note = 2'-O-methylguanosine-3'-phosphate
  modified_base 9: mod_base = OTHER; note = 2'-fluoroguanosine-3'-phosphate
  modified_base 10: mod_base = OTHER; note = 2'-fluoroguanosine-3'-phosphate
  modified_base 11: mod_base = OTHER; note = 2'-fluorocytidine-3'-phosphate
  modified_base 12: mod_base = OTHER; note = 2'-O-methyladenosine-3'-phosphate
  modified_base 13: mod_base = OTHER; note = 2'-O-methyluridine-3'-phosphate
  modified_base 14: mod_base = OTHER; note = 2'-O-methylguanosine-3'-phosphate
  modified_base 15: mod_base = OTHER; note = 2'-O-methyladenosine-3'-phosphate
  modified_base 16: mod_base = OTHER; note = 2'-O-methyluridine-3'-phosphate
  modified_base 17: mod_base = OTHER; note = 2'-O-methylguanosine-3'-phosphate
  modified_base 18: mod_base = OTHER; note = 2'-O-methyluridine-3'-phosphate
  modified_base 19: mod_base = OTHER; note = 2'-O-methyluridine-3'-phosphate
  modified_base 20: mod_base = OTHER; note = 2'-O-methylguanosine-3'-phosphate
  modified_base 21: mod_base = OTHER; note = 2'-O-methyladenosine-3'-phosphate N-[tris(GalNAc-alkyl)-amidodecanoyl)]-4-hydroxyprolinol Hyp-(GalNAc-alkyl)3
tgggaacgggcatgatgttga

SEQ ID NO: 2135 - RNA, 23 nt, synthetic construct
  source 1..23: mol_type = other RNA; note = Description of Artificial Sequence: Synthetic oligonucleotide
  modified_base 1: mod_base = OTHER; note = 2'-O-methyluridine-3'-phosphorothioate
  modified_base 2: mod_base = OTHER; note = 2'-fluorocytidine-3'-phosphorothioate
  modified_base 3: mod_base = OTHER; note = 2'-O-methyladenosine-3'-phosphate
  modified_base 4: mod_base = OTHER; note = 2'-O-methyladenosine-3'-phosphate
  modified_base 5: mod_base = OTHER; note = 2'-O-methylcytidine-3'-phosphate
  modified_base 6: mod_base = OTHER; note = 2'-fluoroadenosine-3'-phosphate
  modified_base 7: mod_base = OTHER; note = 2'-O-methyluridine-3'-phosphate
  modified_base 8: mod_base = OTHER; note = 2'-fluorocytidine-3'-phosphate
  modified_base 9: mod_base = OTHER; note = 2'-fluoroadenosine-3'-phosphate
  modified_base 10: mod_base = OTHER; note = 2'-O-methyluridine-3'-phosphate
  modified_base 11: mod_base = OTHER; note = 2'-O-methylguanosine-3'-phosphate
  modified_base 12: mod_base = OTHER; note = 2'-O-methylcytidine-3'-phosphate
  modified_base 13: mod_base = OTHER; note = 2'-O-methylcytidine-3'-phosphate
  modified_base 14: mod_base = OTHER; note = 2'-fluorocytidine-3'-phosphate
  modified_base 15: mod_base = OTHER; note = 2'-O-methylguanosine-3'-phosphate
  modified_base 16: mod_base = OTHER; note = 2'-fluorouridine-3'-phosphate
  modified_base 17: mod_base = OTHER; note = 2'-O-methyluridine-3'-phosphate
  modified_base 18: mod_base = OTHER; note = 2'-O-methylcytidine-3'-phosphate
  modified_base 19: mod_base = OTHER; note = 2'-O-methylcytidine-3'-phosphate
  modified_base 20: mod_base = OTHER; note = 2'-O-methylcytidine-3'-phosphate
  modified_base 21: mod_base = OTHER; note = 2'-O-methyladenosine-3'-phosphorothioate
  modified_base 22: mod_base = OTHER; note = 2'-O-methylguanosine-3'-phosphorothioate
  modified_base 23: mod_base = OTHER; note = 2'-O-methylguanosine-3'-phosphate
tcaacatcatgcccgttcccagg

SEQ ID NO: 2136 - RNA, 21 nt, synthetic construct
  source 1..21: mol_type = other RNA; note = Description of Artificial Sequence: Synthetic oligonucleotide
  modified_base 1: mod_base = OTHER; note = 2'-O-methylcytidine-3'-phosphorothioate
  modified_base 2: mod_base = OTHER; note = 2'-O-methyluridine-3'-phosphorothioate
  modified_base 3: mod_base = OTHER; note = 2'-O-methylguanosine-3'-phosphate
  modified_base 4: mod_base = OTHER; note = 2'-O-methylguanosine-3'-phosphate
  modified_base 5: mod_base = OTHER; note = 2'-O-methylguanosine-3'-phosphate
  modified_base 6: mod_base = OTHER; note = 2'-O-methyladenosine-3'-phosphate
  modified_base 7: mod_base = OTHER; note = 2'-fluoroadenosine-3'-phosphate
  modified_base 8: mod_base = OTHER; note = 2'-O-methylcytidine-3'-phosphate
  modified_base 9: mod_base = OTHER; note = 2'-fluoroguanosine-3'-phosphate
  modified_base 10: mod_base = OTHER; note = 2'-fluoroguanosine-3'-phosphate
  modified_base 11: mod_base = OTHER; note = 2'-fluoroguanosine-3'-phosphate
  modified_base 12: mod_base = OTHER; note = 2'-O-methylcytidine-3'-phosphate
  modified_base 13: mod_base = OTHER; note = 2'-O-methyladenosine-3'-phosphate
  modified_base 14: mod_base = OTHER; note = 2'-O-methyluridine-3'-phosphate
  modified_base 15: mod_base = OTHER; note = 2'-O-methylguanosine-3'-phosphate
  modified_base 16: mod_base = OTHER; note = 2'-O-methyladenosine-3'-phosphate
  modified_base 17: mod_base = OTHER; note = 2'-O-methyluridine-3'-phosphate
  modified_base 18: mod_base = OTHER; note = 2'-O-methylguanosine-3'-phosphate
  modified_base 19: mod_base = OTHER; note = 2'-O-methyluridine-3'-phosphate
  modified_base 20: mod_base = OTHER; note = 2'-O-methyluridine-3'-phosphate
  modified_base 21: mod_base = OTHER; note = 2'-O-methylguanosine-3'-phosphate N-[tris(GalNAc-alkyl)-amidodecanoyl)]-4-hydroxyprolinol Hyp-(GalNAc-alkyl)3
ctgggaacgggcatgatgttg

SEQ ID NO: 2137 - RNA, 23 nt, synthetic construct
  source 1..23: mol_type = other RNA; note = Description of Artificial Sequence: Synthetic oligonucleotide
  modified_base 1: mod_base = OTHER; note = 2'-O-methylcytidine-3'-phosphorothioate
  modified_base 2: mod_base = OTHER; note = 2'-fluoroadenosine-3'-phosphorothioate
  modified_base 3: mod_base = OTHER; note = 2'-O-methyladenosine-3'-phosphate
  modified_base 4: mod_base = OTHER; note = 2'-O-methylcytidine-3'-phosphate
  modified_base 5: mod_base = OTHER; note = 2'-O-methyladenosine-3'-phosphate
  modified_base 6: mod_base = OTHER; note = 2'-fluorouridine-3'-phosphate
  modified_base 7: mod_base = OTHER; note = 2'-O-methylcytidine-3'-phosphate
  modified_base 8: mod_base = OTHER; note = 2'-fluoroadenosine-3'-phosphate
  modified_base 9: mod_base = OTHER; note = 2'-fluorouridine-3'-phosphate
  modified_base 10: mod_base = OTHER; note = 2'-O-methylguanosine-3'-phosphate
  modified_base 11: mod_base = OTHER; note = 2'-O-methylcytidine-3'-phosphate
  modified_base 12: mod_base = OTHER; note = 2'-O-methylcytidine-3'-phosphate
  modified_base 13: mod_base = OTHER; note = 2'-O-methylcytidine-3'-phosphate
  modified_base 14: mod_base = OTHER; note = 2'-fluoroguanosine-3'-phosphate
  modified_base 15: mod_base = OTHER; note = 2'-O-methyluridine-3'-phosphate
  modified_base 16: mod_base = OTHER; note = 2'-fluorouridine-3'-phosphate
  modified_base 17: mod_base = OTHER; note = 2'-O-methylcytidine-3'-phosphate
  modified_base 18: mod_base = OTHER; note = 2'-O-methylcytidine-3'-phosphate
  modified_base 19: mod_base = OTHER; note = 2'-O-methylcytidine-3'-phosphate
  modified_base 20: mod_base = OTHER; note = 2'-O-methyladenosine-3'-phosphate
  modified_base 21: mod_base = OTHER; note = 2'-O-methylguanosine-3'-phosphorothioate
  modified_base 22: mod_base = OTHER; note = 2'-O-methylguanosine-3'-phosphorothioate
  modified_base 23: mod_base = OTHER; note = 2'-O-methylguanosine-3'-phosphate
caacatcatgcccgttcccaggg

SEQ ID NO: 2138 - RNA, 21 nt, synthetic construct
  source 1..21: mol_type = other RNA; note = Description of Artificial Sequence: Synthetic oligonucleotide
  modified_base 1: mod_base = OTHER; note = 2'-O-methyladenosine-3'-phosphorothioate
  modified_base 2: mod_base = OTHER; note = 2'-O-methyluridine-3'-phosphorothioate
  modified_base 3: mod_base = OTHER; note = 2'-O-methylguanosine-3'-phosphate
  modified_base 4: mod_base = OTHER; note = 2'-O-methyluridine-3'-phosphate
  modified_base 5: mod_base = OTHER; note = 2'-O-methylguanosine-3'-phosphate
  modified_base 6: mod_base = OTHER; note = 2'-O-methylguanosine-3'-phosphate
  modified_base 7: mod_base = OTHER; note = 2'-fluorocytidine-3'-phosphate
  modified_base 8: mod_base = OTHER; note = 2'-O-methyluridine-3'-phosphate
  modified_base 9: mod_base = OTHER; note = 2'-fluoroadenosine-3'-phosphate
  modified_base 10: mod_base = OTHER; note = 2'-fluoroadenosine-3'-phosphate
  modified_base 11: mod_base = OTHER; note = 2'-fluoroadenosine-3'-phosphate
  modified_base 12: mod_base = OTHER; note = 2'-O-methylguanosine-3'-phosphate
  modified_base 13: mod_base = OTHER; note = 2'-O-methylcytidine-3'-phosphate
  modified_base 14: mod_base = OTHER; note = 2'-O-methyladenosine-3'-phosphate
  modified_base 15: mod_base = OTHER; note = 2'-O-methyladenosine-3'-phosphate
  modified_base 16: mod_base = OTHER; note = 2'-O-methyluridine-3'-phosphate
  modified_base 17: mod_base = OTHER; note = 2'-O-methyladenosine-3'-phosphate
  modified_base 18: mod_base = OTHER; note = 2'-O-methylguanosine-3'-phosphate
  modified_base 19: mod_base = OTHER; note = 2'-O-methyladenosine-3'-phosphate
  modified_base 20: mod_base = OTHER; note = 2'-O-methylcytidine-3'-phosphate
  modified_base 21: mod_base = OTHER; note = 2'-O-methylcytidine-3'-phosphate N-[tris(GalNAc-alkyl)-amidodecanoyl)]-4-hydroxyprolinol Hyp-(GalNAc-alkyl)3
atgtggctaaagcaatagacc

SEQ ID NO: 2139 - RNA, 23 nt, synthetic construct
  source 1..23: mol_type = other RNA; note = Description of Artificial Sequence: Synthetic oligonucleotide
  modified_base 1: mod_base = OTHER; note = 2'-O-methylguanosine-3'-phosphorothioate
  modified_base 2: mod_base = OTHER; note = 2'-fluoroguanosine-3'-phosphorothioate
  modified_base 3: mod_base = OTHER; note = 2'-O-methyluridine-3'-phosphate
  modified_base 4: mod_base = OTHER; note = 2'-O-methylcytidine-3'-phosphate
  modified_base 5: mod_base = OTHER; note = 2'-O-methyluridine-3'-phosphate
  modified_base 6: mod_base = OTHER; note = 2'-fluoroadenosine-3'-phosphate
  modified_base 7: mod_base = OTHER; note = 2'-O-methyluridine-3'-phosphate
  modified_base 8: mod_base = OTHER; note = 2'-fluorouridine-3'-phosphate
  modified_base 9: mod_base = OTHER; note = 2'-fluoroguanosine-3'-phosphate
  modified_base 10: mod_base = OTHER; note = 2'-O-methylcytidine-3'-phosphate
  modified_base 11: mod_base = OTHER; note = 2'-O-methyluridine-3'-phosphate
  modified_base 12: mod_base = OTHER; note = 2'-O-methyluridine-3'-phosphate
  modified_base 13: mod_base = OTHER; note = 2'-O-methyluridine-3'-phosphate
  modified_base 14: mod_base = OTHER; note = 2'-fluoroadenosine-3'-phosphate
  modified_base 15: mod_base = OTHER; note = 2'-O-methylguanosine-3'-phosphate
  modified_base 16: mod_base = OTHER; note = 2'-fluorocytidine-3'-phosphate
  modified_base 17: mod_base = OTHER; note = 2'-O-methylcytidine-3'-phosphate
  modified_base 18: mod_base = OTHER; note = 2'-O-methyladenosine-3'-phosphate
  modified_base 19: mod_base = OTHER; note = 2'-O-methylcytidine-3'-phosphate
  modified_base 20: mod_base = OTHER; note = 2'-O-methyladenosine-3'-phosphate
  modified_base 21: mod_base = OTHER; note = 2'-O-methyluridine-3'-phosphorothioate
  modified_base 22: mod_base = OTHER; note = 2'-O-methyladenosine-3'-phosphorothioate
  modified_base 23: mod_base = OTHER; note = 2'-O-methyluridine-3'-phosphate
ggtctattgctttagccacatat

SEQ ID NO: 2140 - RNA, 21 nt, synthetic construct
  source 1..21: mol_type = other RNA; note = Description of Artificial Sequence: Synthetic oligonucleotide
  modified_base 1: mod_base = OTHER; note = 2'-O-methyluridine-3'-phosphorothioate
  modified_base 2: mod_base = OTHER; note = 2'-O-methylguanosine-3'-phosphorothioate
  modified_base 3: mod_base = OTHER; note = 2'-O-methyluridine-3'-phosphate
  modified_base 4: mod_base = OTHER; note = 2'-O-methylguanosine-3'-phosphate
  modified_base 5: mod_base = OTHER; note = 2'-O-methylguanosine-3'-phosphate
  modified_base 6: mod_base = OTHER; note = 2'-O-methylcytidine-3'-phosphate
  modified_base 7: mod_base = OTHER; note = 2'-fluorouridine-3'-phosphate
  modified_base 8: mod_base = OTHER; note = 2'-O-methyladenosine-3'-phosphate
  modified_base 9: mod_base = OTHER; note = 2'-fluoroadenosine-3'-phosphate
  modified_base 10: mod_base = OTHER; note = 2'-fluoroadenosine-3'-phosphate
  modified_base 11: mod_base = OTHER; note = 2'-fluoroguanosine-3'-phosphate
  modified_base 12: mod_base = OTHER; note = 2'-O-methylcytidine-3'-phosphate
  modified_base 13: mod_base = OTHER; note = 2'-O-methyladenosine-3'-phosphate
  modified_base 14: mod_base = OTHER; note = 2'-O-methyladenosine-3'-phosphate
  modified_base 15: mod_base = OTHER; note = 2'-O-methyluridine-3'-phosphate
  modified_base 16: mod_base = OTHER; note = 2'-O-methyladenosine-3'-phosphate
  modified_base 17: mod_base = OTHER; note = 2'-O-methylguanosine-3'-phosphate
  modified_base 18: mod_base = OTHER; note = 2'-O-methyladenosine-3'-phosphate
  modified_base 19: mod_base = OTHER; note = 2'-O-methylcytidine-3'-phosphate
  modified_base 20: mod_base = OTHER; note = 2'-O-methylcytidine-3'-phosphate
  modified_base 21: mod_base = OTHER; note = 2'-O-methylcytidine-3'-phosphate N-[tris(GalNAc-alkyl)-amidodecanoyl)]-4-hydroxyprolinol Hyp-(GalNAc-alkyl)3
tgtggctaaagcaatagaccc

SEQ ID NO: 2141 - RNA, 23 nt, synthetic construct
  source 1..23: mol_type = other RNA; note = Description of Artificial Sequence: Synthetic oligonucleotide
  modified_base 1: mod_base = OTHER; note = 2'-O-methylguanosine-3'-phosphorothioate
  modified_base 2: mod_base = OTHER; note = 2'-fluoroguanosine-3'-phosphorothioate
  modified_base 3: mod_base = OTHER; note = 2'-O-methylguanosine-3'-phosphate
  modified_base 4: mod_base = OTHER; note = 2'-O-methyluridine-3'-phosphate
  modified_base 5: mod_base = OTHER; note = 2'-O-methylcytidine-3'-phosphate
  modified_base 6: mod_base = OTHER; note = 2'-fluorouridine-3'-phosphate
  modified_base 7: mod_base = OTHER; note = 2'-O-methyladenosine-3'-phosphate
  modified_base 8: mod_base = OTHER; note = 2'-fluorouridine-3'-phosphate
  modified_base 9: mod_base = OTHER; note = 2'-fluorouridine-3'-phosphate
  modified_base 10: mod_base = OTHER; note = 2'-O-methylguanosine-3'-phosphate
  modified_base 11: mod_base = OTHER; note = 2'-O-methylcytidine-3'-phosphate
  modified_base 12: mod_base = OTHER; note = 2'-O-methyluridine-3'-phosphate
  modified_base 13: mod_base = OTHER; note = 2'-O-methyluridine-3'-phosphate
  modified_base 14: mod_base = OTHER; note = 2'-fluorouridine-3'-phosphate
  modified_base 15: mod_base = OTHER; note = 2'-O-methyladenosine-3'-phosphate
  modified_base 16: mod_base = OTHER; note = 2'-fluoroguanosine-3'-phosphate
  modified_base 17: mod_base = OTHER; note = 2'-O-methylcytidine-3'-phosphate
  modified_base 18: mod_base = OTHER; note = 2'-O-methylcytidine-3'-phosphate
  modified_base 19: mod_base = OTHER; note = 2'-O-methyladenosine-3'-phosphate
  modified_base 20: mod_base = OTHER; note = 2'-O-methylcytidine-3'-phosphate
  modified_base 21: mod_base = OTHER; note = 2'-O-methyladenosine-3'-phosphorothioate
  modified_base 22: mod_base = OTHER; note = 2'-O-methyluridine-3'-phosphorothioate
  modified_base 23: mod_base = OTHER; note = 2'-O-methyladenosine-3'-phosphate
gggtctattgctttagccacata

SEQ ID NO: 2142 - RNA, 21 nt, synthetic construct
  source 1..21: mol_type = other RNA; note = Description of Artificial Sequence: Synthetic oligonucleotide
  modified_base 1: mod_base = OTHER; note = 2'-O-methylguanosine-3'-phosphorothioate
  modified_base 2: mod_base = OTHER; note = 2'-O-methylcytidine-3'-phosphorothioate
  modified_base 3: mod_base = OTHER; note = 2'-O-methyladenosine-3'-phosphate
  modified_base 4: mod_base = OTHER; note = 2'-O-methyluridine-3'-phosphate
  modified_base 5: mod_base = OTHER; note = 2'-O-methyladenosine-3'-phosphate
  modified_base 6: mod_base = OTHER; note = 2'-O-methyluridine-3'-phosphate
  modified_base 7: mod_base = OTHER; note = 2'-fluoroguanosine-3'-phosphate
  modified_base 8: mod_base = OTHER; note = 2'-O-methyluridine-3'-phosphate
  modified_base 9: mod_base = OTHER; note = 2'-fluoroguanosine-3'-phosphate
  modified_base 10: mod_base = OTHER; note = 2'-fluoroguanosine-3'-phosphate
  modified_base 11: mod_base = OTHER; note = 2'-fluorocytidine-3'-phosphate
  modified_base 12: mod_base = OTHER; note = 2'-O-methyluridine-3'-phosphate
  modified_base 13: mod_base = OTHER; note = 2'-O-methyladenosine-3'-phosphate
  modified_base 14: mod_base = OTHER; note = 2'-O-methyladenosine-3'-phosphate
  modified_base 15: mod_base = OTHER; note = 2'-O-methyladenosine-3'-phosphate
  modified_base 16: mod_base = OTHER; note = 2'-O-methylguanosine-3'-phosphate
  modified_base 17: mod_base = OTHER; note = 2'-O-methylcytidine-3'-phosphate
  modified_base 18: mod_base = OTHER; note = 2'-O-methyladenosine-3'-phosphate
  modified_base 19: mod_base = OTHER; note = 2'-O-methyladenosine-3'-phosphate
  modified_base 20: mod_base = OTHER; note = 2'-O-methyluridine-3'-phosphate
  modified_base 21: mod_base = OTHER; note = 2'-O-methyladenosine-3'-phosphate N-[tris(GalNAc-alkyl)-amidodecanoyl)]-4-hydroxyprolinol Hyp-(GalNAc-alkyl)3
gcatatgtggctaaagcaata

SEQ ID NO: 2143 - RNA, 23 nt, synthetic construct
  source 1..23: mol_type = other RNA; note = Description of Artificial Sequence: Synthetic oligonucleotide
  modified_base 1: mod_base = OTHER; note = 2'-O-methyluridine-3'-phosphorothioate
  modified_base 2: mod_base = OTHER; note = 2'-fluoroadenosine-3'-phosphorothioate
  modified_base 3: mod_base = OTHER; note = 2'-O-methyluridine-3'-phosphate
  modified_base 4: mod_base = OTHER; note = 2'-O-methyluridine-3'-phosphate
  modified_base 5: mod_base = OTHER; note = 2'-O-methylguanosine-3'-phosphate
  modified_base 6: mod_base = OTHER; note = 2'-fluorocytidine-3'-phosphate
  modified_base 7: mod_base = OTHER; note = 2'-O-methyluridine-3'-phosphate
  modified_base 8: mod_base = OTHER; note = 2'-fluorouridine-3'-phosphate
  modified_base 9: mod_base = OTHER; note = 2'-fluorouridine-3'-phosphate
  modified_base 10: mod_base = OTHER; note = 2'-O-methyladenosine-3'-phosphate
  modified_base 11: mod_base = OTHER; note = 2'-O-methylguanosine-3'-phosphate
  modified_base 12: mod_base = OTHER; note = 2'-O-methylcytidine-3'-phosphate
  modified_base 13: mod_base = OTHER; note = 2'-O-methylcytidine-3'-phosphate
  modified_base 14: mod_base = OTHER; note = 2'-fluoroadenosine-3'-phosphate
  modified_base 15: mod_base = OTHER; note = 2'-O-methylcytidine-3'-phosphate
  modified_base 16: mod_base = OTHER; note = 2'-fluoroadenosine-3'-phosphate
  modified_base 17: mod_base = OTHER; note = 2'-O-methyluridine-3'-phosphate
  modified_base 18: mod_base = OTHER; note = 2'-O-methyladenosine-3'-phosphate
  modified_base 19: mod_base = OTHER; note = 2'-O-methyluridine-3'-phosphate
  modified_base 20: mod_base = OTHER; note = 2'-O-methylguanosine-3'-phosphate
  modified_base 21: mod_base = OTHER; note = 2'-O-methylcytidine-3'-phosphorothioate
  modified_base 22: mod_base = OTHER; note = 2'-O-methyladenosine-3'-phosphorothioate
  modified_base 23: mod_base = OTHER; note = 2'-O-methylguanosine-3'-phosphate
tattgctttagccacatatgcag

SEQ ID NO: 2144 - RNA, 21 nt, synthetic construct
  source 1..21: mol_type = other RNA; note = Description of Artificial Sequence: Synthetic oligonucleotide
  modified_base 1: mod_base = OTHER; note = 2'-O-methyluridine-3'-phosphorothioate
  modified_base 2: mod_base = OTHER; note = 2'-O-methylguanosine-3'-phosphorothioate
  modified_base 3: mod_base = OTHER; note = 2'-O-methylcytidine-3'-phosphate
  modified_base 4: mod_base = OTHER; note = 2'-O-methyladenosine-3'-phosphate
  modified_base 5: mod_base = OTHER; note = 2'-O-methyluridine-3'-phosphate
  modified_base 6: mod_base = OTHER; note = 2'-O-methyladenosine-3'-phosphate
  modified_base 7: mod_base = OTHER; note = 2'-fluorouridine-3'-phosphate
  modified_base 8: mod_base = OTHER; note = 2'-O-methylguanosine-3'-phosphate
  modified_base 9: mod_base = OTHER; note = 2'-fluorouridine-3'-phosphate
  modified_base 10: mod_base = OTHER; note = 2'-fluoroguanosine-3'-phosphate
  modified_base 11: mod_base = OTHER; note = 2'-fluoroguanosine-3'-phosphate
  modified_base 12: mod_base = OTHER; note = 2'-O-methylcytidine-3'-phosphate
  modified_base 13: mod_base = OTHER; note = 2'-O-methyluridine-3'-phosphate
  modified_base 14: mod_base = OTHER; note = 2'-O-methyladenosine-3'-phosphate
  modified_base 15: mod_base = OTHER; note = 2'-O-methyladenosine-3'-phosphate
  modified_base 16: mod_base = OTHER; note = 2'-O-methyladenosine-3'-phosphate
  modified_base 17: mod_base = OTHER; note = 2'-O-methylguanosine-3'-phosphate
  modified_base 18: mod_base = OTHER; note = 2'-O-methylcytidine-3'-phosphate
  modified_base 19: mod_base = OTHER; note = 2'-O-methyladenosine-3'-phosphate
  modified_base 20: mod_base = OTHER; note = 2'-O-methyladenosine-3'-phosphate
  modified_base 21: mod_base = OTHER; note = 2'-O-methyluridine-3'-phosphate N-[tris(GalNAc-alkyl)-amidodecanoyl)]-4-hydroxyprolinol Hyp-(GalNAc-alkyl)3
tgcatatgtggctaaagcaat

SEQ ID NO: 2145 - RNA, 23 nt, synthetic construct
  source 1..23: mol_type = other RNA; note = Description of Artificial Sequence: Synthetic oligonucleotide
  modified_base 1: mod_base = OTHER; note = 2'-O-methyladenosine-3'-phosphorothioate
  modified_base 2: mod_base = OTHER; note = 2'-fluorouridine -3'-phosphorothioate
  modified_base 3: mod_base = OTHER; note = 2'-O-methyluridine-3'-phosphate
  modified_base 4: mod_base = OTHER; note = 2'-O-methylguanosine-3'-phosphate
  modified_base 5: mod_base = OTHER; note = 2'-O-methylcytidine-3'-phosphate
  modified_base 6: mod_base = OTHER; note = 2'-fluorouridine-3'-phosphate
  modified_base 7: mod_base = OTHER; note = 2'-O-methyluridine-3'-phosphate
  modified_base 8: mod_base = OTHER; note = 2'-fluorouridine-3'-phosphate
  modified_base 9: mod_base = OTHER; note = 2'-fluoroadenosine-3'-phosphate
  modified_base 10: mod_base = OTHER; note = 2'-O-methylguanosine-3'-phosphate
  modified_base 11: mod_base = OTHER; note = 2'-O-methylcytidine-3'-phosphate
  modified_base 12: mod_base = OTHER; note = 2'-O-methylcytidine-3'-phosphate
  modified_base 13: mod_base = OTHER; note = 2'-O-methyladenosine-3'-phosphate
  modified_base 14: mod_base = OTHER; note = 2'-fluorocytidine-3'-phosphate
  modified_base 15: mod_base = OTHER; note = 2'-O-methyladenosine-3'-phosphate
  modified_base 16: mod_base = OTHER; note = 2'-fluorouridine-3'-phosphate
  modified_base 17: mod_base = OTHER; note = 2'-O-methyladenosine-3'-phosphate
  modified_base 18: mod_base = OTHER; note = 2'-O-methyluridine-3'-phosphate
  modified_base 19: mod_base = OTHER; note = 2'-O-methylguanosine-3'-phosphate
  modified_base 20: mod_base = OTHER; note = 2'-O-methylcytidine-3'-phosphate
  modified_base 21: mod_base = OTHER; note = 2'-O-methyladenosine-3'-phosphorothioate
  modified_base 22: mod_base = OTHER; note = 2'-O-methylguanosine-3'-phosphorothioate
  modified_base 23: mod_base = OTHER; note = 2'-O-methylcytidine-3'-phosphate
attgctttagccacatatgcagc

SEQ ID NO: 2146 - RNA, 21 nt, synthetic construct
  source 1..21: mol_type = other RNA; note = Description of Artificial Sequence: Synthetic oligonucleotide
  modified_base 1: mod_base = OTHER; note = 2'-O-methyladenosine-3'-phosphorothioate
  modified_base 2: mod_base = OTHER; note = 2'-O-methylguanosine-3'-phosphorothioate
  modified_base 3: mod_base = OTHER; note = 2'-O-methylguanosine-3'-phosphate
  modified_base 4: mod_base = OTHER; note = 2'-O-methyladenosine-3'-phosphate
  modified_base 5: mod_base = OTHER; note = 2'-O-methyluridine-3'-phosphate
  modified_base 6: mod_base = OTHER; note = 2'-O-methylguanosine-3'-phosphate
  modified_base 7: mod_base = OTHER; note = 2'-fluorocytidine-3'-phosphate
  modified_base 8: mod_base = OTHER; note = 2'-O-methyluridine-3'-phosphate
  modified_base 9: mod_base = OTHER; note = 2'-fluorocytidine-3'-phosphate
  modified_base 10: mod_base = OTHER; note = 2'-fluorocytidine-3'-phosphate
  modified_base 11: mod_base = OTHER; note = 2'-fluoroguanosine-3'-phosphate
  modified_base 12: mod_base = OTHER; note = 2'-O-methylguanosine-3'-phosphate
  modified_base 13: mod_base = OTHER; note = 2'-O-methyladenosine-3'-phosphate
  modified_base 14: mod_base = OTHER; note = 2'-O-methyladenosine-3'-phosphate
  modified_base 15: mod_base = OTHER; note = 2'-O-methyluridine-3'-phosphate
  modified_base 16: mod_base = OTHER; note = 2'-O-methylguanosine-3'-phosphate
  modified_base 17: mod_base = OTHER; note = 2'-O-methyluridine-3'-phosphate
  modified_base 18: mod_base = OTHER; note = 2'-O-methyluridine-3'-phosphate
  modified_base 19: mod_base = OTHER; note = 2'-O-methylguanosine-3'-phosphate
  modified_base 20: mod_base = OTHER; note = 2'-O-methylcytidine-3'-phosphate
  modified_base 21: mod_base = OTHER; note = 2'-O-methyluridine-3'-phosphate N-[tris(GalNAc-alkyl)-amidodecanoyl)]-4-hydroxyprolinol Hyp-(GalNAc-alkyl)3
aggatgctccggaatgttgct

SEQ ID NO: 2147 - RNA, 23 nt, synthetic construct
  source 1..23: mol_type = other RNA; note = Description of Artificial Sequence: Synthetic oligonucleotide
  modified_base 1: mod_base = OTHER; note = 2'-O-methyladenosine-3'-phosphorothioate
  modified_base 2: mod_base = OTHER; note = 2'-fluoroguanosine-3'-phosphorothioate
  modified_base 3: mod_base = OTHER; note = 2'-O-methylcytidine-3'-phosphate
  modified_base 4: mod_base = OTHER; note = 2'-O-methyladenosine-3'-phosphate
  modified_base 5: mod_base = OTHER; note = 2'-O-methyladenosine-3'-phosphate
  modified_base 6: mod_base = OTHER; note = 2'-fluorocytidine-3'-phosphate
  modified_base 7: mod_base = OTHER; note = 2'-O-methyladenosine-3'-phosphate
  modified_base 8: mod_base = OTHER; note = 2'-fluorouridine-3'-phosphate
  modified_base 9: mod_base = OTHER; note = 2'-fluorouridine-3'-phosphate
  modified_base 10: mod_base = OTHER; note = 2'-O-methylcytidine-3'-phosphate
  modified_base 11: mod_base = OTHER; note = 2'-O-methylcytidine-3'-phosphate
  modified_base 12: mod_base = OTHER; note = 2'-O-methylguanosine-3'-phosphate
  modified_base 13: mod_base = OTHER; note = 2'-O-methylguanosine-3'-phosphate
  modified_base 14: mod_base = OTHER; note = 2'-fluoroadenosine-3'-phosphate
  modified_base 15: mod_base = OTHER; note = 2'-O-methylguanosine-3'-phosphate
  modified_base 16: mod_base = OTHER; note = 2'-fluorocytidine-3'-phosphate
  modified_base 17: mod_base = OTHER; note = 2'-O-methyladenosine-3'-phosphate
  modified_base 18: mod_base = OTHER; note = 2'-O-methyluridine-3'-phosphate
  modified_base 19: mod_base = OTHER; note = 2'-O-methylcytidine-3'-phosphate
  modified_base 20: mod_base = OTHER; note = 2'-O-methylcytidine-3'-phosphate
  modified_base 21: mod_base = OTHER; note = 2'-O-methyluridine-3'-phosphorothioate
  modified_base 22: mod_base = OTHER; note = 2'-O-methyluridine-3'-phosphorothioate
  modified_base 23: mod_base = OTHER; note = 2'-O-methylguanosine-3'-phosphate
agcaacattccggagcatccttg

SEQ ID NO: 2148 - RNA, 21 nt, synthetic construct
  source 1..21: mol_type = other RNA; note = Description of Artificial Sequence: Synthetic oligonucleotide
  modified_base 1: mod_base = OTHER; note = 2'-O-methylguanosine-3'-phosphorothioate
  modified_base 2: mod_base = OTHER; note = 2'-O-methylguanosine-3'-phosphorothioate
  modified_base 3: mod_base = OTHER; note = 2'-O-methyladenosine-3'-phosphate
  modified_base 4: mod_base = OTHER; note = 2'-O-methyluridine-3'-phosphate
  modified_base 5: mod_base = OTHER; note = 2'-O-methylguanosine-3'-phosphate
  modified_base 6: mod_base = OTHER; note = 2'-O-methylcytidine-3'-phosphate
  modified_base 7: mod_base = OTHER; note = 2'-fluorouridine-3'-phosphate
  modified_base 8: mod_base = OTHER; note = 2'-O-methylcytidine-3'-phosphate
  modified_base 9: mod_base = OTHER; note = 2'-fluorocytidine-3'-phosphate
  modified_base 10: mod_base = OTHER; note = 2'-fluoroguanosine-3'-phosphate
  modified_base 11: mod_base = OTHER; note = 2'-fluoroguanosine-3'-phosphate
  modified_base 12: mod_base = OTHER; note = 2'-O-methyladenosine-3'-phosphate
  modified_base 13: mod_base = OTHER; note = 2'-O-methyladenosine-3'-phosphate
  modified_base 14: mod_base = OTHER; note = 2'-O-methyluridine-3'-phosphate
  modified_base 15: mod_base = OTHER; note = 2'-O-methylguanosine-3'-phosphate
  modified_base 16: mod_base = OTHER; note = 2'-O-methyluridine-3'-phosphate
  modified_base 17: mod_base = OTHER; note = 2'-O-methyluridine-3'-phosphate
  modified_base 18: mod_base = OTHER; note = 2'-O-methylguanosine-3'-phosphate
  modified_base 19: mod_base = OTHER; note = 2'-O-methylcytidine-3'-phosphate
  modified_base 20: mod_base = OTHER; note = 2'-O-methyluridine-3'-phosphate
  modified_base 21: mod_base = OTHER; note = 2'-O-methylguanosine-3'-phosphate N-[tris(GalNAc-alkyl)-amidodecanoyl)]-4-hydroxyprolinol Hyp-(GalNAc-alkyl)3
ggatgctccggaatgttgctg

SEQ ID NO: 2149 - RNA, 23 nt, synthetic construct
  source 1..23: mol_type = other RNA; note = Description of Artificial Sequence: Synthetic oligonucleotide
  modified_base 1: mod_base = OTHER; note = 2'-O-methylcytidine-3'-phosphorothioate
  modified_base 2: mod_base = OTHER; note = 2'-fluoroadenosine-3'-phosphorothioate
  modified_base 3: mod_base = OTHER; note = 2'-O-methylguanosine-3'-phosphate
  modified_base 4: mod_base = OTHER; note = 2'-O-methylcytidine-3'-phosphate
  modified_base 5: mod_base = OTHER; note = 2'-O-methyladenosine-3'-phosphate
  modified_base 6: mod_base = OTHER; note = 2'-fluoroadenosine-3'-phosphate
  modified_base 7: mod_base = OTHER; note = 2'-O-methylcytidine-3'-phosphate
  modified_base 8: mod_base = OTHER; note = 2'-fluoroadenosine-3'-phosphate
  modified_base 9: mod_base = OTHER; note = 2'-fluorouridine-3'-phosphate
  modified_base 10: mod_base = OTHER; note = 2'-O-methyluridine-3'-phosphate
  modified_base 11: mod_base = OTHER; note = 2'-O-methylcytidine-3'-phosphate
  modified_base 12: mod_base = OTHER; note = 2'-O-methylcytidine-3'-phosphate
  modified_base 13: mod_base = OTHER; note = 2'-O-methylguanosine-3'-phosphate
  modified_base 14: mod_base = OTHER; note = 2'-fluoroguanosine-3'-phosphate
  modified_base 15: mod_base = OTHER; note = 2'-O-methyladenosine-3'-phosphate
  modified_base 16: mod_base = OTHER; note = 2'-fluoroguanosine-3'-phosphate
  modified_base 17: mod_base = OTHER; note = 2'-O-methylcytidine-3'-phosphate
  modified_base 18: mod_base = OTHER; note = 2'-O-methyladenosine-3'-phosphate
  modified_base 19: mod_base = OTHER; note = 2'-O-methyluridine-3'-phosphate
  modified_base 20: mod_base = OTHER; note = 2'-O-methylcytidine-3'-phosphate
  modified_base 21: mod_base = OTHER; note = 2'-O-methylcytidine-3'-phosphorothioate
  modified_base 22: mod_base = OTHER; note = 2'-O-methyluridine-3'-phosphorothioate
  modified_base 23: mod_base = OTHER; note = 2'-O-methyluridine-3'-phosphate
cagcaacattccggagcatcctt

SEQ ID NO: 2150 - RNA, 21 nt, synthetic construct
  source 1..21: mol_type = other RNA; note = Description of Artificial Sequence: Synthetic oligonucleotide
  modified_base 1: mod_base = OTHER; note = 2'-O-methyluridine-3'-phosphorothioate
  modified_base 2: mod_base = OTHER; note = 2'-O-methylcytidine-3'-phosphorothioate
  modified_base 3: mod_base = OTHER; note = 2'-O-methylcytidine-3'-phosphate
  modified_base 4: mod_base = OTHER; note = 2'-O-methyladenosine-3'-phosphate
  modified_base 5: mod_base = OTHER; note = 2'-O-methyladenosine-3'-phosphate
  modified_base 6: mod_base = OTHER; note = 2'-O-methylguanosine-3'-phosphate
  modified_base 7: mod_base = OTHER; note = 2'-fluoroguanosine-3'-phosphate
  modified_base 8: mod_base = OTHER; note = 2'-O-methyladenosine-3'-phosphate
  modified_base 9: mod_base = OTHER; note = 2'-fluorouridine-3'-phosphate
  modified_base 10: mod_base = OTHER; note = 2'-fluoroguanosine-3'-phosphate
  modified_base 11: mod_base = OTHER; note = 2'-fluorocytidine-3'-phosphate
  modified_base 12: mod_base = OTHER; note = 2'-O-methyluridine-3'-phosphate
  modified_base 13: mod_base = OTHER; note = 2'-O-methylcytidine-3'-phosphate
  modified_base 14: mod_base = OTHER; note = 2'-O-methylcytidine-3'-phosphate
  modified_base 15: mod_base = OTHER; note = 2'-O-methylguanosine-3'-phosphate
  modified_base 16: mod_base = OTHER; note = 2'-O-methylguanosine-3'-phosphate
  modified_base 17: mod_base = OTHER; note = 2'-O-methyladenosine-3'-phosphate
  modified_base 18: mod_base = OTHER; note = 2'-O-methyladenosine-3'-phosphate
  modified_base 19: mod_base = OTHER; note = 2'-O-methyluridine-3'-phosphate
  modified_base 20: mod_base = OTHER; note = 2'-O-methylguanosine-3'-phosphate
  modified_base 21: mod_base = OTHER; note = 2'-O-methyluridine-3'-phosphate N-[tris(GalNAc-alkyl)-amidodecanoyl)]-4-hydroxyprolinol Hyp-(GalNAc-alkyl)3
tccaaggatgctccggaatgt

SEQ ID NO: 2151 - RNA, 23 nt, synthetic construct
  source 1..23: mol_type = other RNA; note = Description of Artificial Sequence: Synthetic oligonucleotide
  modified_base 1: mod_base = OTHER; note = 2'-O-methyladenosine-3'-phosphorothioate
  modified_base 2: mod_base = OTHER; note = 2'-fluorocytidine-3'-phosphorothioate
  modified_base 3: mod_base = OTHER; note = 2'-O-methyladenosine-3'-phosphate
  modified_base 4: mod_base = OTHER; note = 2'-O-methyluridine-3'-phosphate
  modified_base 5: mod_base = OTHER; note = 2'-O-methyluridine-3'-phosphate
  modified_base 6: mod_base = OTHER; note = 2'-fluorocytidine-3'-phosphate
  modified_base 7: mod_base = OTHER; note = 2'-O-methylcytidine-3'-phosphate
  modified_base 8: mod_base = OTHER; note = 2'-fluoroguanosine-3'-phosphate
  modified_base 9: mod_base = OTHER; note = 2'-fluoroguanosine-3'-phosphate
  modified_base 10: mod_base = OTHER; note = 2'-O-methyladenosine-3'-phosphate
  modified_base 11: mod_base = OTHER; note = 2'-O-methylguanosine-3'-phosphate
  modified_base 12: mod_base = OTHER; note = 2'-O-methylcytidine-3'-phosphate
  modified_base 13: mod_base = OTHER; note = 2'-O-methyladenosine-3'-phosphate
  modified_base 14: mod_base = OTHER; note = 2'-fluorouridine-3'-phosphate
  modified_base 15: mod_base = OTHER; note = 2'-O-methylcytidine-3'-phosphate
  modified_base 16: mod_base = OTHER; note = 2'-fluorocytidine-3'-phosphate
  modified_base 17: mod_base = OTHER; note = 2'-O-methyluridine-3'-phosphate
  modified_base 18: mod_base = OTHER; note = 2'-O-methyluridine-3'-phosphate
  modified_base 19: mod_base = OTHER; note = 2'-O-methylguanosine-3'-phosphate
  modified_base 20: mod_base = OTHER; note = 2'-O-methylguanosine-3'-phosphate
  modified_base 21: mod_base = OTHER; note = 2'-O-methyladenosine-3'-phosphorothioate
  modified_base 22: mod_base = OTHER; note = 2'-O-methyluridine-3'-phosphorothioate
  modified_base 23: mod_base = OTHER; note = 2'-O-methyladenosine-3'-phosphate
acattccggagcatccttggata

SEQ ID NO: 2152 - RNA, 21 nt, synthetic construct
  source 1..21: mol_type = other RNA; note = Description of Artificial Sequence: Synthetic oligonucleotide
  modified_base 1: mod_base = OTHER; note = 2'-O-methyladenosine-3'-phosphorothioate
  modified_base 2: mod_base = OTHER; note = 2'-O-methyluridine-3'-phosphorothioate
  modified_base 3: mod_base = OTHER; note = 2'-O-methylcytidine-3'-phosphate
  modified_base 4: mod_base = OTHER; note = 2'-O-methylcytidine-3'-phosphate
  modified_base 5: mod_base = OTHER; note = 2'-O-methyladenosine-3'-phosphate
  modified_base 6: mod_base = OTHER; note = 2'-O-methyladenosine-3'-phosphate
  modified_base 7: mod_base = OTHER; note = 2'-fluoroguanosine-3'-phosphate
  modified_base 8: mod_base = OTHER; note = 2'-O-methylguanosine-3'-phosphate
  modified_base 9: mod_base = OTHER; note = 2'-fluoroadenosine-3'-phosphate
  modified_base 10: mod_base = OTHER; note = 2'-fluorouridine-3'-phosphate
  modified_base 11: mod_base = OTHER; note = 2'-fluoroguanosine-3'-phosphate
  modified_base 12: mod_base = OTHER; note = 2'-O-methylcytidine-3'-phosphate
  modified_base 13: mod_base = OTHER; note = 2'-O-methyluridine-3'-phosphate
  modified_base 14: mod_base = OTHER; note = 2'-O-methylcytidine-3'-phosphate
  modified_base 15: mod_base = OTHER; note = 2'-O-methylcytidine-3'-phosphate
  modified_base 16: mod_base = OTHER; note = 2'-O-methylguanosine-3'-phosphate
  modified_base 17: mod_base = OTHER; note = 2'-O-methylguanosine-3'-phosphate
  modified_base 18: mod_base = OTHER; note = 2'-O-methyladenosine-3'-phosphate
  modified_base 19: mod_base = OTHER; note = 2'-O-methyladenosine-3'-phosphate
  modified_base 20: mod_base = OTHER; note = 2'-O-methyluridine-3'-phosphate
  modified_base 21: mod_base = OTHER; note = 2'-O-methylguanosine-3'-phosphate N-[tris(GalNAc-alkyl)-amidodecanoyl)]-4-hydroxyprolinol Hyp-(GalNAc-alkyl)3
atccaaggatgctccggaatg

SEQ ID NO: 2153 - RNA, 23 nt, synthetic construct
  source 1..23: mol_type = other RNA; note = Description of Artificial Sequence: Synthetic oligonucleotide
  modified_base 1: mod_base = OTHER; note = 2'-O-methylcytidine-3'-phosphorothioate
  modified_base 2: mod_base = OTHER; note = 2'-fluoroadenosine-3'-phosphorothioate
  modified_base 3: mod_base = OTHER; note = 2'-O-methyluridine-3'-phosphate
  modified_base 4: mod_base = OTHER; note = 2'-O-methyluridine-3'-phosphate
  modified_base 5: mod_base = OTHER; note = 2'-O-methylcytidine-3'-phosphate
  modified_base 6: mod_base = OTHER; note = 2'-fluorocytidine-3'-phosphate
  modified_base 7: mod_base = OTHER; note = 2'-O-methylguanosine-3'-phosphate
  modified_base 8: mod_base = OTHER; note = 2'-fluoroguanosine-3'-phosphate
  modified_base 9: mod_base = OTHER; note = 2'-fluoroadenosine-3'-phosphate
  modified_base 10: mod_base = OTHER; note = 2'-O-methylguanosine-3'-phosphate
  modified_base 11: mod_base = OTHER; note = 2'-O-methylcytidine-3'-phosphate
  modified_base 12: mod_base = OTHER; note = 2'-O-methyladenosine-3'-phosphate
  modified_base 13: mod_base = OTHER; note = 2'-O-methyluridine-3'-phosphate
  modified_base 14: mod_base = OTHER; note = 2'-fluorocytidine-3'-phosphate
  modified_base 15: mod_base = OTHER; note = 2'-O-methylcytidine-3'-phosphate
  modified_base 16: mod_base = OTHER; note = 2'-fluorouridine-3'-phosphate
  modified_base 17: mod_base = OTHER; note = 2'-O-methyluridine-3'-phosphate
  modified_base 18: mod_base = OTHER; note = 2'-O-methylguanosine-3'-phosphate
  modified_base 19: mod_base = OTHER; note = 2'-O-methylguanosine-3'-phosphate
  modified_base 20: mod_base = OTHER; note = 2'-O-methyladenosine-3'-phosphate
  modified_base 21: mod_base = OTHER; note = 2'-O-methyluridine-3'-phosphorothioate
  modified_base 22: mod_base = OTHER; note = 2'-O-methyladenosine-3'-phosphorothioate
  modified_base 23: mod_base = OTHER; note = 2'-O-methylcytidine-3'-phosphate
cattccggagcatccttggatac

SEQ ID NO: 2154 - RNA, 21 nt, synthetic construct
  source 1..21: mol_type = other RNA; note = Description of Artificial Sequence: Synthetic oligonucleotide
  modified_base 1: mod_base = OTHER; note = 2'-O-methyluridine-3'-phosphorothioate
  modified_base 2: mod_base = OTHER; note = 2'-O-methylcytidine-3'-phosphorothioate
  modified_base 3: mod_base = OTHER; note = 2'-O-methyladenosine-3'-phosphate
  modified_base 4: mod_base = OTHER; note = 2'-O-methylcytidine-3'-phosphate
  modified_base 5: mod_base = OTHER; note = 2'-O-methyladenosine-3'-phosphate
  modified_base 6: mod_base = OTHER; note = 2'-O-methyluridine-3'-phosphate
  modified_base 7: mod_base = OTHER; note = 2'-fluorocytidine-3'-phosphate
  modified_base 8: mod_base = OTHER; note = 2'-O-methyluridine-3'-phosphate
  modified_base 9: mod_base = OTHER; note = 2'-fluorouridine-3'-phosphate
  modified_base 10: mod_base = OTHER; note = 2'-fluorouridine-3'-phosphate
  modified_base 11: mod_base = OTHER; note = 2'-fluoroadenosine-3'-phosphate
  modified_base 12: mod_base = OTHER; note = 2'-O-methylguanosine-3'-phosphate
  modified_base 13: mod_base = OTHER; note = 2'-O-methyluridine-3'-phosphate
  modified_base 14: mod_base = OTHER; note = 2'-O-methylguanosine-3'-phosphate
  modified_base 15: mod_base = OTHER; note = 2'-O-methyluridine-3'-phosphate
  modified_base 16: mod_base = OTHER; note = 2'-O-methylcytidine-3'-phosphate
  modified_base 17: mod_base = OTHER; note = 2'-O-methyluridine-3'-phosphate
  modified_base 18: mod_base = OTHER; note = 2'-O-methylguanosine-3'-phosphate
  modified_base 19: mod_base = OTHER; note = 2'-O-methyladenosine-3'-phosphate
  modified_base 20: mod_base = OTHER; note = 2'-O-methyladenosine-3'-phosphate
  modified_base 21: mod_base = OTHER; note = 2'-O-methyluridine-3'-phosphate N-[tris(GalNAc-alkyl)-amidodecanoyl)]-4-hydroxyprolinol Hyp-(GalNAc-alkyl)3
tcacatctttagtgtctgaat

SEQ ID NO: 2155 - RNA, 23 nt, synthetic construct
  source 1..23: mol_type = other RNA; note = Description of Artificial Sequence: Synthetic oligonucleotide
  modified_base 1: mod_base = OTHER; note = 2'-O-methyladenosine-3'-phosphorothioate
  modified_base 2: mod_base = OTHER; note = 2'-fluorouridine -3'-phosphorothioate
  modified_base 3: mod_base = OTHER; note = 2'-O-methyluridine-3'-phosphate
  modified_base 4: mod_base = OTHER; note = 2'-O-methylcytidine-3'-phosphate
  modified_base 5: mod_base = OTHER; note = 2'-O-methyladenosine-3'-phosphate
  modified_base 6: mod_base = OTHER; note = 2'-fluoroguanosine-3'-phosphate
  modified_base 7: mod_base = OTHER; note = 2'-O-methyladenosine-3'-phosphate
  modified_base 8: mod_base = OTHER; note = 2'-fluorocytidine-3'-phosphate
  modified_base 9: mod_base = OTHER; note = 2'-fluoroadenosine-3'-phosphate
  modified_base 10: mod_base = OTHER; note = 2'-O-methylcytidine-3'-phosphate
  modified_base 11: mod_base = OTHER; note = 2'-O-methyluridine-3'-phosphate
  modified_base 12: mod_base = OTHER; note = 2'-O-methyladenosine-3'-phosphate
  modified_base 13: mod_base = OTHER; note = 2'-O-methyladenosine-3'-phosphate
  modified_base 14: mod_base = OTHER; note = 2'-fluoroadenosine-3'-phosphate
  modified_base 15: mod_base = OTHER; note = 2'-O-methylguanosine-3'-phosphate
  modified_base 16: mod_base = OTHER; note = 2'-fluoroadenosine-3'-phosphate
  modified_base 17: mod_base = OTHER; note = 2'-O-methyluridine-3'-phosphate
  modified_base 18: mod_base = OTHER; note = 2'-O-methylguanosine-3'-phosphate
  modified_base 19: mod_base = OTHER; note = 2'-O-methyluridine-3'-phosphate
  modified_base 20: mod_base = OTHER; note = 2'-O-methylguanosine-3'-phosphate
  modified_base 21: mod_base = OTHER; note = 2'-O-methyladenosine-3'-phosphorothioate
  modified_base 22: mod_base = OTHER; note = 2'-O-methyluridine-3'-phosphorothioate
  modified_base 23: mod_base = OTHER; note = 2'-O-methyluridine-3'-phosphate
attcagacactaaagatgtgatt

SEQ ID NO: 2156 - RNA, 21 nt, synthetic construct
  source 1..21: mol_type = other RNA; note = Description of Artificial Sequence: Synthetic oligonucleotide
  modified_base 1: mod_base = OTHER; note = 2'-O-methylcytidine-3'-phosphorothioate
  modified_base 2: mod_base = OTHER; note = 2'-O-methyladenosine-3'-phosphorothioate
  modified_base 3: mod_base = OTHER; note = 2'-O-methylcytidine-3'-phosphate
  modified_base 4: mod_base = OTHER; note = 2'-O-methyladenosine-3'-phosphate
  modified_base 5: mod_base = OTHER; note = 2'-O-methyluridine-3'-phosphate
  modified_base 6: mod_base = OTHER; note = 2'-O-methylcytidine-3'-phosphate
  modified_base 7: mod_base = OTHER; note = 2'-fluorouridine-3'-phosphate
  modified_base 8: mod_base = OTHER; note = 2'-O-methyluridine-3'-phosphate
  modified_base 9: mod_base = OTHER; note = 2'-fluorouridine-3'-phosphate
  modified_base 10: mod_base = OTHER; note = 2'-fluoroadenosine-3'-phosphate
  modified_base 11: mod_base = OTHER; note = 2'-fluoroguanosine-3'-phosphate
  modified_base 12: mod_base = OTHER; note = 2'-O-methyluridine-3'-phosphate
  modified_base 13: mod_base = OTHER; note = 2'-O-methylguanosine-3'-phosphate
  modified_base 14: mod_base = OTHER; note = 2'-O-methyluridine-3'-phosphate
  modified_base 15: mod_base = OTHER; note = 2'-O-methylcytidine-3'-phosphate
  modified_base 16: mod_base = OTHER; note = 2'-O-methyluridine-3'-phosphate
  modified_base 17: mod_base = OTHER; note = 2'-O-methylguanosine-3'-phosphate
  modified_base 18: mod_base = OTHER; note = 2'-O-methyladenosine-3'-phosphate
  modified_base 19: mod_base = OTHER; note = 2'-O-methyladenosine-3'-phosphate
  modified_base 20: mod_base = OTHER; note = 2'-O-methyluridine-3'-phosphate
  modified_base 21: mod_base = OTHER; note = 2'-O-methyladenosine-3'-phosphate N-[tris(GalNAc-alkyl)-amidodecanoyl)]-4-hydroxyprolinol Hyp-(GalNAc-alkyl)3
cacatctttagtgtctgaata

SEQ ID NO: 2157 - RNA, 23 nt, synthetic construct
  source 1..23: mol_type = other RNA; note = Description of Artificial Sequence: Synthetic oligonucleotide
  modified_base 1: mod_base = OTHER; note = 2'-O-methyluridine-3'-phosphorothioate
  modified_base 2: mod_base = OTHER; note = 2'-fluoroadenosine-3'-phosphorothioate
  modified_base 3: mod_base = OTHER; note = 2'-O-methyluridine-3'-phosphate
  modified_base 4: mod_base = OTHER; note = 2'-O-methyluridine-3'-phosphate
  modified_base 5: mod_base = OTHER; note = 2'-O-methylcytidine-3'-phosphate
  modified_base 6: mod_base = OTHER; note = 2'-fluoroadenosine-3'-phosphate
  modified_base 7: mod_base = OTHER; note = 2'-O-methylguanosine-3'-phosphate
  modified_base 8: mod_base = OTHER; note = 2'-fluoroadenosine-3'-phosphate
  modified_base 9: mod_base = OTHER; note = 2'-fluorocytidine-3'-phosphate
  modified_base 10: mod_base = OTHER; note = 2'-O-methyladenosine-3'-phosphate
  modified_base 11: mod_base = OTHER; note = 2'-O-methylcytidine-3'-phosphate
  modified_base 12: mod_base = OTHER; note = 2'-O-methyluridine-3'-phosphate
  modified_base 13: mod_base = OTHER; note = 2'-O-methyladenosine-3'-phosphate
  modified_base 14: mod_base = OTHER; note = 2'-fluoroadenosine-3'-phosphate
  modified_base 15: mod_base = OTHER; note = 2'-O-methyladenosine-3'-phosphate
  modified_base 16: mod_base = OTHER; note = 2'-fluoroguanosine-3'-phosphate
  modified_base 17: mod_base = OTHER; note = 2'-O-methyladenosine-3'-phosphate
  modified_base 18: mod_base = OTHER; note = 2'-O-methyluridine-3'-phosphate
  modified_base 19: mod_base = OTHER; note = 2'-O-methylguanosine-3'-phosphate
  modified_base 20: mod_base = OTHER; note = 2'-O-methyluridine-3'-phosphate
  modified_base 21: mod_base = OTHER; note = 2'-O-methylguanosine-3'-phosphorothioate
  modified_base 22: mod_base = OTHER; note = 2'-O-methyladenosine-3'-phosphorothioate
  modified_base 23: mod_base = OTHER; note = 2'-O-methyluridine-3'-phosphate
tattcagacactaaagatgtgat

SEQ ID NO: 2158 - RNA, 21 nt, synthetic construct
  source 1..21: mol_type = other RNA; note = Description of Artificial Sequence: Synthetic oligonucleotide
  modified_base 1: mod_base = OTHER; note = 2'-O-methylcytidine-3'-phosphorothioate
  modified_base 2: mod_base = OTHER; note = 2'-O-methylcytidine-3'-phosphorothioate
  modified_base 3: mod_base = OTHER; note = 2'-O-methyladenosine-3'-phosphate
  modified_base 4: mod_base = OTHER; note = 2'-O-methyladenosine-3'-phosphate
  modified_base 5: mod_base = OTHER; note = 2'-O-methyluridine-3'-phosphate
  modified_base 6: mod_base = OTHER; note = 2'-O-methylcytidine-3'-phosphate
  modified_base 7: mod_base = OTHER; note = 2'-fluoroadenosine-3'-phosphate
  modified_base 8: mod_base = OTHER; note = 2'-O-methylcytidine-3'-phosphate
  modified_base 9: mod_base = OTHER; note = 2'-fluoroadenosine-3'-phosphate
  modified_base 10: mod_base = OTHER; note = 2'-fluorouridine-3'-phosphate
  modified_base 11: mod_base = OTHER; note = 2'-fluorocytidine-3'-phosphate
  modified_base 12: mod_base = OTHER; note = 2'-O-methyluridine-3'-phosphate
  modified_base 13: mod_base = OTHER; note = 2'-O-methyluridine-3'-phosphate
  modified_base 14: mod_base = OTHER; note = 2'-O-methyluridine-3'-phosphate
  modified_base 15: mod_base = OTHER; note = 2'-O-methyladenosine-3'-phosphate
  modified_base 16: mod_base = OTHER; note = 2'-O-methylguanosine-3'-phosphate
  modified_base 17: mod_base = OTHER; note = 2'-O-methyluridine-3'-phosphate
  modified_base 18: mod_base = OTHER; note = 2'-O-methylguanosine-3'-phosphate
  modified_base 19: mod_base = OTHER; note = 2'-O-methyluridine-3'-phosphate
  modified_base 20: mod_base = OTHER; note = 2'-O-methylcytidine-3'-phosphate
  modified_base 21: mod_base = OTHER; note = 2'-O-methyluridine-3'-phosphate N-[tris(GalNAc-alkyl)-amidodecanoyl)]-4-hydroxyprolinol Hyp-(GalNAc-alkyl)3
ccaatcacatctttagtgtct

SEQ ID NO: 2159 - RNA, 23 nt, synthetic construct
  source 1..23: mol_type = other RNA; note = Description of Artificial Sequence: Synthetic oligonucleotide
  modified_base 1: mod_base = OTHER; note = 2'-O-methyladenosine-3'-phosphorothioate
  modified_base 2: mod_base = OTHER; note = 2'-fluoroguanosine-3'-phosphorothioate
  modified_base 3: mod_base = OTHER; note = 2'-O-methyladenosine-3'-phosphate
  modified_base 4: mod_base = OTHER; note = 2'-O-methylcytidine-3'-phosphate
  modified_base 5: mod_base = OTHER; note = 2'-O-methyladenosine-3'-phosphate
  modified_base 6: mod_base = OTHER; note = 2'-fluorocytidine-3'-phosphate
  modified_base 7: mod_base = OTHER; note = 2'-O-methyluridine-3'-phosphate
  modified_base 8: mod_base = OTHER; note = 2'-fluoroadenosine-3'-phosphate
  modified_base 9: mod_base = OTHER; note = 2'-fluoroadenosine-3'-phosphate
  modified_base 10: mod_base = OTHER; note = 2'-O-methyladenosine-3'-phosphate
  modified_base 11: mod_base = OTHER; note = 2'-O-methylguanosine-3'-phosphate
  modified_base 12: mod_base = OTHER; note = 2'-O-methyladenosine-3'-phosphate
  modified_base 13: mod_base = OTHER; note = 2'-O-methyluridine-3'-phosphate
  modified_base 14: mod_base = OTHER; note = 2'-fluoroguanosine-3'-phosphate
  modified_base 15: mod_base = OTHER; note = 2'-O-methyluridine-3'-phosphate
  modified_base 16: mod_base = OTHER; note = 2'-fluoroguanosine-3'-phosphate
  modified_base 17: mod_base = OTHER; note = 2'-O-methyladenosine-3'-phosphate
  modified_base 18: mod_base = OTHER; note = 2'-O-methyluridine-3'-phosphate
  modified_base 19: mod_base = OTHER; note = 2'-O-methyluridine-3'-phosphate
  modified_base 20: mod_base = OTHER; note = 2'-O-methylguanosine-3'-phosphate
  modified_base 21: mod_base = OTHER; note = 2'-O-methylguanosine-3'-phosphorothioate
  modified_base 22: mod_base = OTHER; note = 2'-O-methyladenosine-3'-phosphorothioate
  modified_base 23: mod_base = OTHER; note = 2'-O-methyladenosine-3'-phosphate
agacactaaagatgtgattggaa

SEQ ID NO: 2160 - RNA, 21 nt, synthetic construct
  source 1..21: mol_type = other RNA; note = Description of Artificial Sequence: Synthetic oligonucleotide
  modified_base 1: mod_base = OTHER; note = 2'-O-methyluridine-3'-phosphorothioate
  modified_base 2: mod_base = OTHER; note = 2'-O-methylcytidine-3'-phosphorothioate
  modified_base 3: mod_base = OTHER; note = 2'-O-methylcytidine-3'-phosphate
  modified_base 4: mod_base = OTHER; note = 2'-O-methyladenosine-3'-phosphate
  modified_base 5: mod_base = OTHER; note = 2'-O-methyladenosine-3'-phosphate
  modified_base 6: mod_base = OTHER; note = 2'-O-methyluridine-3'-phosphate
  modified_base 7: mod_base = OTHER; note = 2'-fluorocytidine-3'-phosphate
  modified_base 8: mod_base = OTHER; note = 2'-O-methyladenosine-3'-phosphate
  modified_base 9: mod_base = OTHER; note = 2'-fluorocytidine-3'-phosphate
  modified_base 10: mod_base = OTHER; note = 2'-fluoroadenosine-3'-phosphate
  modified_base 11: mod_base = OTHER; note = 2'-fluorouridine-3'-phosphate
  modified_base 12: mod_base = OTHER; note = 2'-O-methylcytidine-3'-phosphate
  modified_base 13: mod_base = OTHER; note = 2'-O-methyluridine-3'-phosphate
  modified_base 14: mod_base = OTHER; note = 2'-O-methyluridine-3'-phosphate
  modified_base 15: mod_base = OTHER; note = 2'-O-methyluridine-3'-phosphate
  modified_base 16: mod_base = OTHER; note = 2'-O-methyladenosine-3'-phosphate
  modified_base 17: mod_base = OTHER; note = 2'-O-methylguanosine-3'-phosphate
  modified_base 18: mod_base = OTHER; note = 2'-O-methyluridine-3'-phosphate
  modified_base 19: mod_base = OTHER; note = 2'-O-methylguanosine-3'-phosphate
  modified_base 20: mod_base = OTHER; note = 2'-O-methyluridine-3'-phosphate
  modified_base 21: mod_base = OTHER; note = 2'-O-methylcytidine-3'-phosphate N-[tris(GalNAc-alkyl)-amidodecanoyl)]-4-hydroxyprolinol Hyp-(GalNAc-alkyl)3
tccaatcacatctttagtgtc

SEQ ID NO: 2161 - RNA, 23 nt, synthetic construct
  source 1..23: mol_type = other RNA; note = Description of Artificial Sequence: Synthetic oligonucleotide
  modified_base 1: mod_base = OTHER; note = 2'-O-methylguanosine-3'-phosphorothioate
  modified_base 2: mod_base = OTHER; note = 2'-fluoroadenosine-3'-phosphorothioate
  modified_base 3: mod_base = OTHER; note = 2'-O-methylcytidine-3'-phosphate
  modified_base 4: mod_base = OTHER; note = 2'-O-methyladenosine-3'-phosphate
  modified_base 5: mod_base = OTHER; note = 2'-O-methylcytidine-3'-phosphate
  modified_base 6: mod_base = OTHER; note = 2'-fluorouridine-3'-phosphate
  modified_base 7: mod_base = OTHER; note = 2'-O-methyladenosine-3'-phosphate
  modified_base 8: mod_base = OTHER; note = 2'-fluoroadenosine-3'-phosphate
  modified_base 9: mod_base = OTHER; note = 2'-fluoroadenosine-3'-phosphate
  modified_base 10: mod_base = OTHER; note = 2'-O-methylguanosine-3'-phosphate
  modified_base 11: mod_base = OTHER; note = 2'-O-methyladenosine-3'-phosphate
  modified_base 12: mod_base = OTHER; note = 2'-O-methyluridine-3'-phosphate
  modified_base 13: mod_base = OTHER; note = 2'-O-methylguanosine-3'-phosphate
  modified_base 14: mod_base = OTHER; note = 2'-fluorouridine-3'-phosphate
  modified_base 15: mod_base = OTHER; note = 2'-O-methylguanosine-3'-phosphate
  modified_base 16: mod_base = OTHER; note = 2'-fluoroadenosine-3'-phosphate
  modified_base 17: mod_base = OTHER; note = 2'-O-methyluridine-3'-phosphate
  modified_base 18: mod_base = OTHER; note = 2'-O-methyluridine-3'-phosphate
  modified_base 19: mod_base = OTHER; note = 2'-O-methylguanosine-3'-phosphate
  modified_base 20: mod_base = OTHER; note = 2'-O-methylguanosine-3'-phosphate
  modified_base 21: mod_base = OTHER; note = 2'-O-methyladenosine-3'-phosphorothioate
  modified_base 22: mod_base = OTHER; note = 2'-O-methyladenosine-3'-phosphorothioate
  modified_base 23: mod_base = OTHER; note = 2'-O-methyladenosine-3'-phosphate
gacactaaagatgtgattggaaa

SEQ ID NO: 2162 - RNA, 21 nt, synthetic construct
  source 1..21: mol_type = other RNA; note = Description of Artificial Sequence: Synthetic oligonucleotide
  modified_base 1: mod_base = OTHER; note = 2'-O-methyladenosine-3'-phosphorothioate
  modified_base 2: mod_base = OTHER; note = 2'-O-methyladenosine-3'-phosphorothioate
  modified_base 3: mod_base = OTHER; note = 2'-O-methyladenosine-3'-phosphate
  modified_base 4: mod_base = OTHER; note = 2'-O-methyluridine-3'-phosphate
  modified_base 5: mod_base = OTHER; note = 2'-O-methylguanosine-3'-phosphate
  modified_base 6: mod_base = OTHER; note = 2'-O-methyluridine-3'-phosphate
  modified_base 7: mod_base = OTHER; note = 2'-fluoroguanosine-3'-phosphate
  modified_base 8: mod_base = OTHER; note = 2'-O-methyluridine-3'-phosphate
  modified_base 9: mod_base = OTHER; note = 2'-fluorouridine-3'-phosphate
  modified_base 10: mod_base = OTHER; note = 2'-fluorouridine-3'-phosphate
  modified_base 11: mod_base = OTHER; note = 2'-fluoroadenosine-3'-phosphate
  modified_base 12: mod_base = OTHER; note = 2'-O-methylguanosine-3'-phosphate
  modified_base 13: mod_base = OTHER; note = 2'-O-methyladenosine-3'-phosphate
  modified_base 14: mod_base = OTHER; note = 2'-O-methylcytidine-3'-phosphate
  modified_base 15: mod_base = OTHER; note = 2'-O-methyladenosine-3'-phosphate
  modified_base 16: mod_base = OTHER; note = 2'-O-methyladenosine-3'-phosphate
  modified_base 17: mod_base = OTHER; note = 2'-O-methylcytidine-3'-phosphate
  modified_base 18: mod_base = OTHER; note = 2'-O-methylguanosine-3'-phosphate
  modified_base 19: mod_base = OTHER; note = 2'-O-methyluridine-3'-phosphate
  modified_base 20: mod_base = OTHER; note = 2'-O-methylcytidine-3'-phosphate
  modified_base 21: mod_base = OTHER; note = 2'-O-methyladenosine-3'-phosphate N-[tris(GalNAc-alkyl)-amidodecanoyl)]-4-hydroxyprolinol Hyp-(GalNAc-alkyl)3
aaatgtgtttagacaacgtca

SEQ ID NO: 2163 - RNA, 23 nt, synthetic construct
  source 1..23: mol_type = other RNA; note = Description of Artificial Sequence: Synthetic oligonucleotide
  modified_base 1: mod_base = OTHER; note = 2'-O-methyluridine-3'-phosphorothioate
  modified_base 2: mod_base = OTHER; note = 2'-fluoroguanosine-3'-phosphorothioate
  modified_base 3: mod_base = OTHER; note = 2'-O-methyladenosine-3'-phosphate
  modified_base 4: mod_base = OTHER; note = 2'-O-methylcytidine-3'-phosphate
  modified_base 5: mod_base = OTHER; note = 2'-O-methylguanosine-3'-phosphate
  modified_base 6: mod_base = OTHER; note = 2'-fluorouridine-3'-phosphate
  modified_base 7: mod_base = OTHER; note = 2'-O-methyluridine-3'-phosphate
  modified_base 8: mod_base = OTHER; note = 2'-fluoroguanosine-3'-phosphate
  modified_base 9: mod_base = OTHER; note = 2'-fluorouridine-3'-phosphate
  modified_base 10: mod_base = OTHER; note = 2'-O-methylcytidine-3'-phosphate
  modified_base 11: mod_base = OTHER; note = 2'-O-methyluridine-3'-phosphate
  modified_base 12: mod_base = OTHER; note = 2'-O-methyladenosine-3'-phosphate
  modified_base 13: mod_base = OTHER; note = 2'-O-methyladenosine-3'-phosphate
  modified_base 14: mod_base = OTHER; note = 2'-fluoroadenosine-3'-phosphate
  modified_base 15: mod_base = OTHER; note = 2'-O-methylcytidine-3'-phosphate
  modified_base 16: mod_base = OTHER; note = 2'-fluoroadenosine-3'-phosphate
  modified_base 17: mod_base = OTHER; note = 2'-O-methylcytidine-3'-phosphate
  modified_base 18: mod_base = OTHER; note = 2'-O-methyladenosine-3'-phosphate
  modified_base 19: mod_base = OTHER; note = 2'-O-methyluridine-3'-phosphate
  modified_base 20: mod_base = OTHER; note = 2'-O-methyluridine-3'-phosphate
  modified_base 21: mod_base = OTHER; note = 2'-O-methyluridine-3'-phosphorothioate
  modified_base 22: mod_base = OTHER; note = 2'-O-methyluridine-3'-phosphorothioate
  modified_base 23: mod_base = OTHER; note = 2'-O-methylcytidine-3'-phosphate
tgacgttgtctaaacacattttc

SEQ ID NO: 2164 - RNA, 21 nt, synthetic construct
  source 1..21: mol_type = other RNA; note = Description of Artificial Sequence: Synthetic oligonucleotide
  modified_base 1: mod_base = OTHER; note = 2'-O-methyladenosine-3'-phosphorothioate
  modified_base 2: mod_base = OTHER; note = 2'-O-methyladenosine-3'-phosphorothioate
  modified_base 3: mod_base = OTHER; note = 2'-O-methyluridine-3'-phosphate
  modified_base 4: mod_base = OTHER; note = 2'-O-methylguanosine-3'-phosphate
  modified_base 5: mod_base = OTHER; note = 2'-O-methyluridine-3'-phosphate
  modified_base 6: mod_base = OTHER; note = 2'-O-methylguanosine-3'-phosphate
  modified_base 7: mod_base = OTHER; note = 2'-fluorouridine-3'-phosphate
  modified_base 8: mod_base = OTHER; note = 2'-O-methyluridine-3'-phosphate
  modified_base 9: mod_base = OTHER; note = 2'-fluorouridine-3'-phosphate
  modified_base 10: mod_base = OTHER; note = 2'-fluoroadenosine-3'-phosphate
  modified_base 11: mod_base = OTHER; note = 2'-fluoroguanosine-3'-phosphate
  modified_base 12: mod_base = OTHER; note = 2'-O-methyladenosine-3'-phosphate
  modified_base 13: mod_base = OTHER; note = 2'-O-methylcytidine-3'-phosphate
  modified_base 14: mod_base = OTHER; note = 2'-O-methyladenosine-3'-phosphate
  modified_base 15: mod_base = OTHER; note = 2'-O-methyladenosine-3'-phosphate
  modified_base 16: mod_base = OTHER; note = 2'-O-methylcytidine-3'-phosphate
  modified_base 17: mod_base = OTHER; note = 2'-O-methylguanosine-3'-phosphate
  modified_base 18: mod_base = OTHER; note = 2'-O-methyluridine-3'-phosphate
  modified_base 19: mod_base = OTHER; note = 2'-O-methylcytidine-3'-phosphate
  modified_base 20: mod_base = OTHER; note = 2'-O-methyladenosine-3'-phosphate
  modified_base 21: mod_base = OTHER; note = 2'-O-methyluridine-3'-phosphate N-[tris(GalNAc-alkyl)-amidodecanoyl)]-4-hydroxyprolinol Hyp-(GalNAc-alkyl)3
aatgtgtttagacaacgtcat

SEQ ID NO: 2165 - RNA, 23 nt, synthetic construct
  source 1..23: mol_type = other RNA; note = Description of Artificial Sequence: Synthetic oligonucleotide
  modified_base 1: mod_base = OTHER; note = 2'-O-methyladenosine-3'-phosphorothioate
  modified_base 2: mod_base = OTHER; note = 2'-fluorouridine -3'-phosphorothioate
  modified_base 3: mod_base = OTHER; note = 2'-O-methylguanosine-3'-phosphate
  modified_base 4: mod_base = OTHER; note = 2'-O-methyladenosine-3'-phosphate
  modified_base 5: mod_base = OTHER; note = 2'-O-methylcytidine-3'-phosphate
  modified_base 6: mod_base = OTHER; note = 2'-fluoroguanosine-3'-phosphate
  modified_base 7: mod_base = OTHER; note = 2'-O-methyluridine-3'-phosphate
  modified_base 8: mod_base = OTHER; note = 2'-fluorouridine-3'-phosphate
  modified_base 9: mod_base = OTHER; note = 2'-fluoroguanosine-3'-phosphate
  modified_base 10: mod_base = OTHER; note = 2'-O-methyluridine-3'-phosphate
  modified_base 11: mod_base = OTHER; note = 2'-O-methylcytidine-3'-phosphate
  modified_base 12: mod_base = OTHER; note = 2'-O-methyluridine-3'-phosphate
  modified_base 13: mod_base = OTHER; note = 2'-O-methyladenosine-3'-phosphate
  modified_base 14: mod_base = OTHER; note = 2'-fluoroadenosine-3'-phosphate
  modified_base 15: mod_base = OTHER; note = 2'-O-methyladenosine-3'-phosphate
  modified_base 16: mod_base = OTHER; note = 2'-fluorocytidine-3'-phosphate
  modified_base 17: mod_base = OTHER; note = 2'-O-methyladenosine-3'-phosphate
  modified_base 18: mod_base = OTHER; note = 2'-O-methylcytidine-3'-phosphate
  modified_base 19: mod_base = OTHER; note = 2'-O-methyladenosine-3'-phosphate
  modified_base 20: mod_base = OTHER; note = 2'-O-methyluridine-3'-phosphate
  modified_base 21: mod_base = OTHER; note = 2'-O-methyluridine-3'-phosphorothioate
  modified_base 22: mod_base = OTHER; note = 2'-O-methyluridine-3'-phosphorothioate
  modified_base 23: mod_base = OTHER; note = 2'-O-methyluridine-3'-phosphate
atgacgttgtctaaacacatttt

SEQ ID NO: 2166 - RNA, 21 nt, synthetic construct
  source 1..21: mol_type = other RNA; note = Description of Artificial Sequence: Synthetic oligonucleotide
  modified_base 1: mod_base = OTHER; note = 2'-O-methyluridine-3'-phosphorothioate
  modified_base 2: mod_base = OTHER; note = 2'-O-methyluridine-3'-phosphorothioate
  modified_base 3: mod_base = OTHER; note = 2'-O-methylguanosine-3'-phosphate
  modified_base 4: mod_base = OTHER; note = 2'-O-methyladenosine-3'-phosphate
  modified_base 5: mod_base = OTHER; note = 2'-O-methyladenosine-3'-phosphate
  modified_base 6: mod_base = OTHER; note = 2'-O-methyladenosine-3'-phosphate
  modified_base 7: mod_base = OTHER; note = 2'-fluoroadenosine-3'-phosphate
  modified_base 8: mod_base = OTHER; note = 2'-O-methyluridine-3'-phosphate
  modified_base 9: mod_base = OTHER; note = 2'-fluoroguanosine-3'-phosphate
  modified_base 10: mod_base = OTHER; note = 2'-fluorouridine-3'-phosphate
  modified_base 11: mod_base = OTHER; note = 2'-fluoroguanosine-3'-phosphate
  modified_base 12: mod_base = OTHER; note = 2'-O-methyluridine-3'-phosphate
  modified_base 13: mod_base = OTHER; note = 2'-O-methyluridine-3'-phosphate
  modified_base 14: mod_base = OTHER; note = 2'-O-methyluridine-3'-phosphate
  modified_base 15: mod_base = OTHER; note = 2'-O-methyladenosine-3'-phosphate
  modified_base 16: mod_base = OTHER; note = 2'-O-methylguanosine-3'-phosphate
  modified_base 17: mod_base = OTHER; note = 2'-O-methyladenosine-3'-phosphate
  modified_base 18: mod_base = OTHER; note = 2'-O-methylcytidine-3'-phosphate
  modified_base 19: mod_base = OTHER; note = 2'-O-methyladenosine-3'-phosphate
  modified_base 20: mod_base = OTHER; note = 2'-O-methyladenosine-3'-phosphate
  modified_base 21: mod_base = OTHER; note = 2'-O-methylcytidine-3'-phosphate N-[tris(GalNAc-alkyl)-amidodecanoyl)]-4-hydroxyprolinol Hyp-(GalNAc-alkyl)3
ttgaaaatgtgtttagacaac

SEQ ID NO: 2167 - RNA, 23 nt, synthetic construct
  source 1..23: mol_type = other RNA; note = Description of Artificial Sequence: Synthetic oligonucleotide
  modified_base 1: mod_base = OTHER; note = 2'-O-methylguanosine-3'-phosphorothioate
  modified_base 2: mod_base = OTHER; note = 2'-fluorouridine -3'-phosphorothioate
  modified_base 3: mod_base = OTHER; note = 2'-O-methyluridine-3'-phosphate
  modified_base 4: mod_base = OTHER; note = 2'-O-methylguanosine-3'-phosphate
  modified_base 5: mod_base = OTHER; note = 2'-O-methyluridine-3'-phosphate
  modified_base 6: mod_base = OTHER; note = 2'-fluorocytidine-3'-phosphate
  modified_base 7: mod_base = OTHER; note = 2'-O-methyluridine-3'-phosphate
  modified_base 8: mod_base = OTHER; note = 2'-fluoroadenosine-3'-phosphate
  modified_base 9: mod_base = OTHER; note = 2'-fluoroadenosine-3'-phosphate
  modified_base 10: mod_base = OTHER; note = 2'-O-methyladenosine-3'-phosphate
  modified_base 11: mod_base = OTHER; note = 2'-O-methylcytidine-3'-phosphate
  modified_base 12: mod_base = OTHER; note = 2'-O-methyladenosine-3'-phosphate
  modified_base 13: mod_base = OTHER; note = 2'-O-methylcytidine-3'-phosphate
  modified_base 14: mod_base = OTHER; note = 2'-fluoroadenosine-3'-phosphate
  modified_base 15: mod_base = OTHER; note = 2'-O-methyluridine-3'-phosphate
  modified_base 16: mod_base = OTHER; note = 2'-fluorouridine-3'-phosphate
  modified_base 17: mod_base = OTHER; note = 2'-O-methyluridine-3'-phosphate
  modified_base 18: mod_base = OTHER; note = 2'-O-methyluridine-3'-phosphate
  modified_base 19: mod_base = OTHER; note = 2'-O-methylcytidine-3'-phosphate
  modified_base 20: mod_base = OTHER; note = 2'-O-methyladenosine-3'-phosphate
  modified_base 21: mod_base = OTHER; note = 2'-O-methyladenosine-3'-phosphorothioate
  modified_base 22: mod_base = OTHER; note = 2'-O-methyluridine-3'-phosphorothioate
  modified_base 23: mod_base = OTHER; note = 2'-O-methylguanosine-3'-phosphate
gttgtctaaacacattttcaatg

SEQ ID NO: 2168 - RNA, 21 nt, synthetic construct
  source 1..21: mol_type = other RNA; note = Description of Artificial Sequence: Synthetic oligonucleotide
  modified_base 1: mod_base = OTHER; note = 2'-O-methyladenosine-3'-phosphorothioate
  modified_base 2: mod_base = OTHER; note = 2'-O-methyluridine-3'-phosphorothioate
  modified_base 3: mod_base = OTHER; note = 2'-O-methyluridine-3'-phosphate
  modified_base 4: mod_base = OTHER; note = 2'-O-methylguanosine-3'-phosphate
  modified_base 5: mod_base = OTHER; note = 2'-O-methyladenosine-3'-phosphate
  modified_base 6: mod_base = OTHER; note = 2'-O-methyladenosine-3'-phosphate
  modified_base 7: mod_base = OTHER; note = 2'-fluoroadenosine-3'-phosphate
  modified_base 8: mod_base = OTHER; note = 2'-O-methyladenosine-3'-phosphate
  modified_base 9: mod_base = OTHER; note = 2'-fluorouridine-3'-phosphate
  modified_base 10: mod_base = OTHER; note = 2'-fluoroguanosine-3'-phosphate
  modified_base 11: mod_base = OTHER; note = 2'-fluorouridine-3'-phosphate
  modified_base 12: mod_base = OTHER; note = 2'-O-methylguanosine-3'-phosphate
  modified_base 13: mod_base = OTHER; note = 2'-O-methyluridine-3'-phosphate
  modified_base 14: mod_base = OTHER; note = 2'-O-methyluridine-3'-phosphate
  modified_base 15: mod_base = OTHER; note = 2'-O-methyluridine-3'-phosphate
  modified_base 16: mod_base = OTHER; note = 2'-O-methyladenosine-3'-phosphate
  modified_base 17: mod_base = OTHER; note = 2'-O-methylguanosine-3'-phosphate
  modified_base 18: mod_base = OTHER; note = 2'-O-methyladenosine-3'-phosphate
  modified_base 19: mod_base = OTHER; note = 2'-O-methylcytidine-3'-phosphate
  modified_base 20: mod_base = OTHER; note = 2'-O-methyladenosine-3'-phosphate
  modified_base 21: mod_base = OTHER; note = 2'-O-methyladenosine-3'-phosphate N-[tris(GalNAc-alkyl)-amidodecanoyl)]-4-hydroxyprolinol Hyp-(GalNAc-alkyl)3
attgaaaatgtgtttagacaa

SEQ ID NO: 2169 - RNA, 23 nt, synthetic construct
  source 1..23: mol_type = other RNA; note = Description of Artificial Sequence: Synthetic oligonucleotide
  modified_base 1: mod_base = OTHER; note = 2'-O-methyluridine-3'-phosphorothioate
  modified_base 2: mod_base = OTHER; note = 2'-fluorouridine -3'-phosphorothioate
  modified_base 3: mod_base = OTHER; note = 2'-O-methylguanosine-3'-phosphate
  modified_base 4: mod_base = OTHER; note = 2'-O-methyluridine-3'-phosphate
  modified_base 5: mod_base = OTHER; note = 2'-O-methylcytidine-3'-phosphate
  modified_base 6: mod_base = OTHER; note = 2'-fluorouridine-3'-phosphate
  modified_base 7: mod_base = OTHER; note = 2'-O-methyladenosine-3'-phosphate
  modified_base 8: mod_base = OTHER; note = 2'-fluoroadenosine-3'-phosphate
  modified_base 9: mod_base = OTHER; note = 2'-fluoroadenosine-3'-phosphate
  modified_base 10: mod_base = OTHER; note = 2'-O-methylcytidine-3'-phosphate
  modified_base 11: mod_base = OTHER; note = 2'-O-methyladenosine-3'-phosphate
  modified_base 12: mod_base = OTHER; note = 2'-O-methylcytidine-3'-phosphate
  modified_base 13: mod_base = OTHER; note = 2'-O-methyladenosine-3'-phosphate
  modified_base 14: mod_base = OTHER; note = 2'-fluorouridine-3'-phosphate
  modified_base 15: mod_base = OTHER; note = 2'-O-methyluridine-3'-phosphate
  modified_base 16: mod_base = OTHER; note = 2'-fluorouridine-3'-phosphate
  modified_base 17: mod_base = OTHER; note = 2'-O-methyluridine-3'-phosphate
  modified_base 18: mod_base = OTHER; note = 2'-O-methylcytidine-3'-phosphate
  modified_base 19: mod_base = OTHER; note = 2'-O-methyladenosine-3'-phosphate
  modified_base 20: mod_base = OTHER; note = 2'-O-methyladenosine-3'-phosphate
  modified_base 21: mod_base = OTHER; note = 2'-O-methyluridine-3'-phosphorothioate
  modified_base 22: mod_base = OTHER; note = 2'-O-methylguanosine-3'-phosphorothioate
  modified_base 23: mod_base = OTHER; note = 2'-O-methyluridine-3'-phosphate
ttgtctaaacacattttcaatgt

SEQ ID NO: 2170 - RNA, 21 nt, synthetic construct
  source 1..21: mol_type = other RNA; note = Description of Artificial Sequence: Synthetic oligonucleotide
  modified_base 1: mod_base = OTHER; note = 2'-O-methyluridine-3'-phosphorothioate
  modified_base 2: mod_base = OTHER; note = 2'-O-methyladenosine-3'-phosphorothioate
  modified_base 3: mod_base = OTHER; note = 2'-O-methylcytidine-3'-phosphate
  modified_base 4: mod_base = OTHER; note = 2'-O-methyluridine-3'-phosphate
  modified_base 5: mod_base = OTHER; note = 2'-O-methyladenosine-3'-phosphate
  modified_base 6: mod_base = OTHER; note = 2'-O-methyladenosine-3'-phosphate
  modified_base 7: mod_base = OTHER; note = 2'-fluoroadenosine-3'-phosphate
  modified_base 8: mod_base = OTHER; note = 2'-O-methylguanosine-3'-phosphate
  modified_base 9: mod_base = OTHER; note = 2'-fluoroguanosine-3'-phosphate
  modified_base 10: mod_base = OTHER; note = 2'-fluoroadenosine-3'-phosphate
  modified_base 11: mod_base = OTHER; note = 2'-fluoroadenosine-3'-phosphate
  modified_base 12: mod_base = OTHER; note = 2'-O-methylguanosine-3'-phosphate
  modified_base 13: mod_base = OTHER; note = 2'-O-methyladenosine-3'-phosphate
  modified_base 14: mod_base = OTHER; note = 2'-O-methyladenosine-3'-phosphate
  modified_base 15: mod_base = OTHER; note = 2'-O-methyluridine-3'-phosphate
  modified_base 16: mod_base = OTHER; note = 2'-O-methyluridine-3'-phosphate
  modified_base 17: mod_base = OTHER; note = 2'-O-methylcytidine-3'-phosphate
  modified_base 18: mod_base = OTHER; note = 2'-O-methylcytidine-3'-phosphate
  modified_base 19: mod_base = OTHER; note = 2'-O-methylguanosine-3'-phosphate
  modified_base 20: mod_base = OTHER; note = 2'-O-methylguanosine-3'-phosphate
  modified_base 21: mod_base = OTHER; note = 2'-O-methyluridine-3'-phosphate N-[tris(GalNAc-alkyl)-amidodecanoyl)]-4-hydroxyprolinol Hyp-(GalNAc-alkyl)3
tactaaaggaagaattccggt

SEQ ID NO: 2171 - RNA, 23 nt, synthetic construct
  source 1..23: mol_type = other RNA; note = Description of Artificial Sequence: Synthetic oligonucleotide
  modified_base 1: mod_base = OTHER; note = 2'-O-methyladenosine-3'-phosphorothioate
  modified_base 2: mod_base = OTHER; note = 2'-fluorocytidine-3'-phosphorothioate
  modified_base 3: mod_base = OTHER; note = 2'-O-methylcytidine-3'-phosphate
  modified_base 4: mod_base = OTHER; note = 2'-O-methylguanosine-3'-phosphate
  modified_base 5: mod_base = OTHER; note = 2'-O-methylguanosine-3'-phosphate
  modified_base 6: mod_base = OTHER; note = 2'-fluoroadenosine-3'-phosphate
  modified_base 7: mod_base = OTHER; note = 2'-O-methyladenosine-3'-phosphate
  modified_base 8: mod_base = OTHER; note = 2'-fluorouridine-3'-phosphate
  modified_base 9: mod_base = OTHER; note = 2'-fluorouridine-3'-phosphate
  modified_base 10: mod_base = OTHER; note = 2'-O-methylcytidine-3'-phosphate
  modified_base 11: mod_base = OTHER; note = 2'-O-methyluridine-3'-phosphate
  modified_base 12: mod_base = OTHER; note = 2'-O-methyluridine-3'-phosphate
  modified_base 13: mod_base = OTHER; note = 2'-O-methylcytidine-3'-phosphate
  modified_base 14: mod_base = OTHER; note = 2'-fluorocytidine-3'-phosphate
  modified_base 15: mod_base = OTHER; note = 2'-O-methyluridine-3'-phosphate
  modified_base 16: mod_base = OTHER; note = 2'-fluorouridine-3'-phosphate
  modified_base 17: mod_base = OTHER; note = 2'-O-methyluridine-3'-phosphate
  modified_base 18: mod_base = OTHER; note = 2'-O-methyladenosine-3'-phosphate
  modified_base 19: mod_base = OTHER; note = 2'-O-methylguanosine-3'-phosphate
  modified_base 20: mod_base = OTHER; note = 2'-O-methyluridine-3'-phosphate
  modified_base 21: mod_base = OTHER; note = 2'-O-methyladenosine-3'-phosphorothioate
  modified_base 22: mod_base = OTHER; note = 2'-O-methyluridine-3'-phosphorothioate
  modified_base 23: mod_base = OTHER; note = 2'-O-methylcytidine-3'-phosphate
accggaattcttcctttagtatc

SEQ ID NO: 2172 - RNA, 21 nt, synthetic construct
  source 1..21: mol_type = other RNA; note = Description of Artificial Sequence: Synthetic oligonucleotide
  modified_base 1: mod_base = OTHER; note = 2'-O-methyladenosine-3'-phosphorothioate
  modified_base 2: mod_base = OTHER; note = 2'-O-methylcytidine-3'-phosphorothioate
  modified_base 3: mod_base = OTHER; note = 2'-O-methyluridine-3'-phosphate
  modified_base 4: mod_base = OTHER; note = 2'-O-methyladenosine-3'-phosphate
  modified_base 5: mod_base = OTHER; note = 2'-O-methyladenosine-3'-phosphate
  modified_base 6: mod_base = OTHER; note = 2'-O-methyladenosine-3'-phosphate
  modified_base 7: mod_base = OTHER; note = 2'-fluoroguanosine-3'-phosphate
  modified_base 8: mod_base = OTHER; note = 2'-O-methylguanosine-3'-phosphate
  modified_base 9: mod_base = OTHER; note = 2'-fluoroadenosine-3'-phosphate
  modified_base 10: mod_base = OTHER; note = 2'-fluoroadenosine-3'-phosphate
  modified_base 11: mod_base = OTHER; note = 2'-fluoroguanosine-3'-phosphate
  modified_base 12: mod_base = OTHER; note = 2'-O-methyladenosine-3'-phosphate
  modified_base 13: mod_base = OTHER; note = 2'-O-methyladenosine-3'-phosphate
  modified_base 14: mod_base = OTHER; note = 2'-O-methyluridine-3'-phosphate
  modified_base 15: mod_base = OTHER; note = 2'-O-methyluridine-3'-phosphate
  modified_base 16: mod_base = OTHER; note = 2'-O-methylcytidine-3'-phosphate
  modified_base 17: mod_base = OTHER; note = 2'-O-methylcytidine-3'-phosphate
  modified_base 18: mod_base = OTHER; note = 2'-O-methylguanosine-3'-phosphate
  modified_base 19: mod_base = OTHER; note = 2'-O-methylguanosine-3'-phosphate
  modified_base 20: mod_base = OTHER; note = 2'-O-methyluridine-3'-phosphate
  modified_base 21: mod_base = OTHER; note = 2'-O-methyluridine-3'-phosphate N-[tris(GalNAc-alkyl)-amidodecanoyl)]-4-hydroxyprolinol Hyp-(GalNAc-alkyl)3
actaaaggaagaattccggtt

SEQ ID NO: 2173 - RNA, 23 nt, synthetic construct
  source 1..23: mol_type = other RNA; note = Description of Artificial Sequence: Synthetic oligonucleotide
  modified_base 1: mod_base = OTHER; note = 2'-O-methyladenosine-3'-phosphorothioate
  modified_base 2: mod_base = OTHER; note = 2'-fluoroadenosine-3'-phosphorothioate
  modified_base 3: mod_base = OTHER; note = 2'-O-methylcytidine-3'-phosphate
  modified_base 4: mod_base = OTHER; note = 2'-O-methylcytidine-3'-phosphate
  modified_base 5: mod_base = OTHER; note = 2'-O-methylguanosine-3'-phosphate
  modified_base 6: mod_base = OTHER; note = 2'-fluoroguanosine-3'-phosphate
  modified_base 7: mod_base = OTHER; note = 2'-O-methyladenosine-3'-phosphate
  modified_base 8: mod_base = OTHER; note = 2'-fluoroadenosine-3'-phosphate
  modified_base 9: mod_base = OTHER; note = 2'-fluorouridine-3'-phosphate
  modified_base 10: mod_base = OTHER; note = 2'-O-methyluridine-3'-phosphate
  modified_base 11: mod_base = OTHER; note = 2'-O-methylcytidine-3'-phosphate
  modified_base 12: mod_base = OTHER; note = 2'-O-methyluridine-3'-phosphate
  modified_base 13: mod_base = OTHER; note = 2'-O-methyluridine-3'-phosphate
  modified_base 14: mod_base = OTHER; note = 2'-fluorocytidine-3'-phosphate
  modified_base 15: mod_base = OTHER; note = 2'-O-methylcytidine-3'-phosphate
  modified_base 16: mod_base = OTHER; note = 2'-fluorouridine-3'-phosphate
  modified_base 17: mod_base = OTHER; note = 2'-O-methyluridine-3'-phosphate
  modified_base 18: mod_base = OTHER; note = 2'-O-methyluridine-3'-phosphate
  modified_base 19: mod_base = OTHER; note = 2'-O-methyladenosine-3'-phosphate
  modified_base 20: mod_base = OTHER; note = 2'-O-methylguanosine-3'-phosphate
  modified_base 21: mod_base = OTHER; note = 2'-O-methyluridine-3'-phosphorothioate
  modified_base 22: mod_base = OTHER; note = 2'-O-methyladenosine-3'-phosphorothioate
  modified_base 23: mod_base = OTHER; note = 2'-O-methyluridine-3'-phosphate
aaccggaattcttcctttagtat

SEQ ID NO: 2174 - RNA, 21 nt, synthetic construct
  source 1..21: mol_type = other RNA; note = Description of Artificial Sequence: Synthetic oligonucleotide
  modified_base 1: mod_base = OTHER; note = 2'-O-methylguanosine-3'-phosphorothioate
  modified_base 2: mod_base = OTHER; note = 2'-O-methyladenosine-3'-phosphorothioate
  modified_base 3: mod_base = OTHER; note = 2'-O-methylguanosine-3'-phosphate
  modified_base 4: mod_base = OTHER; note = 2'-O-methyladenosine-3'-phosphate
  modified_base 5: mod_base = OTHER; note = 2'-O-methyluridine-3'-phosphate
  modified_base 6: mod_base = OTHER; note = 2'-O-methyladenosine-3'-phosphate
  modified_base 7: mod_base = OTHER; note = 2'-fluorocytidine-3'-phosphate
  modified_base 8: mod_base = OTHER; note = 2'-O-methyluridine-3'-phosphate
  modified_base 9: mod_base = OTHER; note = 2'-fluoroadenosine-3'-phosphate
  modified_base 10: mod_base = OTHER; note = 2'-fluoroadenosine-3'-phosphate
  modified_base 11: mod_base = OTHER; note = 2'-fluoroadenosine-3'-phosphate
  modified_base 12: mod_base = OTHER; note = 2'-O-methylguanosine-3'-phosphate
  modified_base 13: mod_base = OTHER; note = 2'-O-methylguanosine-3'-phosphate
  modified_base 14: mod_base = OTHER; note = 2'-O-methyladenosine-3'-phosphate
  modified_base 15: mod_base = OTHER; note = 2'-O-methyladenosine-3'-phosphate
  modified_base 16: mod_base = OTHER; note = 2'-O-methylguanosine-3'-phosphate
  modified_base 17: mod_base = OTHER; note = 2'-O-methyladenosine-3'-phosphate
  modified_base 18: mod_base = OTHER; note = 2'-O-methyladenosine-3'-phosphate
  modified_base 19: mod_base = OTHER; note = 2'-O-methyluridine-3'-phosphate
  modified_base 20: mod_base = OTHER; note = 2'-O-methyluridine-3'-phosphate
  modified_base 21: mod_base = OTHER; note = 2'-O-methylcytidine-3'-phosphate N-[tris(GalNAc-alkyl)-amidodecanoyl)]-4-hydroxyprolinol Hyp-(GalNAc-alkyl)3
gagatactaaaggaagaattc

SEQ ID NO: 2175 - RNA, 23 nt, synthetic construct
  source 1..23: mol_type = other RNA; note = Description of Artificial Sequence: Synthetic oligonucleotide
  modified_base 1: mod_base = OTHER; note = 2'-O-methylguanosine-3'-phosphorothioate
  modified_base 2: mod_base = OTHER; note = 2'-fluoroadenosine-3'-phosphorothioate
  modified_base 3: mod_base = OTHER; note = 2'-O-methyladenosine-3'-phosphate
  modified_base 4: mod_base = OTHER; note = 2'-O-methyluridine-3'-phosphate
  modified_base 5: mod_base = OTHER; note = 2'-O-methyluridine-3'-phosphate
  modified_base 6: mod_base = OTHER; note = 2'-fluorocytidine-3'-phosphate
  modified_base 7: mod_base = OTHER; note = 2'-O-methyluridine-3'-phosphate
  modified_base 8: mod_base = OTHER; note = 2'-fluorouridine-3'-phosphate
  modified_base 9: mod_base = OTHER; note = 2'-fluorocytidine-3'-phosphate
  modified_base 10: mod_base = OTHER; note = 2'-O-methylcytidine-3'-phosphate
  modified_base 11: mod_base = OTHER; note = 2'-O-methyluridine-3'-phosphate
  modified_base 12: mod_base = OTHER; note = 2'-O-methyluridine-3'-phosphate
  modified_base 13: mod_base = OTHER; note = 2'-O-methyluridine-3'-phosphate
  modified_base 14: mod_base = OTHER; note = 2'-fluoroadenosine-3'-phosphate
  modified_base 15: mod_base = OTHER; note = 2'-O-methylguanosine-3'-phosphate
  modified_base 16: mod_base = OTHER; note = 2'-fluorouridine-3'-phosphate
  modified_base 17: mod_base = OTHER; note = 2'-O-methyladenosine-3'-phosphate
  modified_base 18: mod_base = OTHER; note = 2'-O-methyluridine-3'-phosphate
  modified_base 19: mod_base = OTHER; note = 2'-O-methylcytidine-3'-phosphate
  modified_base 20: mod_base = OTHER; note = 2'-O-methyluridine-3'-phosphate
  modified_base 21: mod_base = OTHER; note = 2'-O-methylcytidine-3'-phosphorothioate
  modified_base 22: mod_base = OTHER; note = 2'-O-methylguanosine-3'-phosphorothioate
  modified_base 23: mod_base = OTHER; note = 2'-O-methyladenosine-3'-phosphate
gaattcttcctttagtatctcga

SEQ ID NO: 2176 - RNA, 21 nt, synthetic construct
  source 1..21: mol_type = other RNA; note = Description of Artificial Sequence: Synthetic oligonucleotide
  modified_base 1: mod_base = OTHER; note = 2'-O-methylcytidine-3'-phosphorothioate
  modified_base 2: mod_base = OTHER; note = 2'-O-methylguanosine-3'-phosphorothioate
  modified_base 3: mod_base = OTHER; note = 2'-O-methyladenosine-3'-phosphate
  modified_base 4: mod_base = OTHER; note = 2'-O-methylguanosine-3'-phosphate
  modified_base 5: mod_base = OTHER; note = 2'-O-methyladenosine-3'-phosphate
  modified_base 6: mod_base = OTHER; note = 2'-O-methyluridine-3'-phosphate
  modified_base 7: mod_base = OTHER; note = 2'-fluoroadenosine-3'-phosphate
  modified_base 8: mod_base = OTHER; note = 2'-O-methylcytidine-3'-phosphate
  modified_base 9: mod_base = OTHER; note = 2'-fluorouridine-3'-phosphate
  modified_base 10: mod_base = OTHER; note = 2'-fluoroadenosine-3'-phosphate
  modified_base 11: mod_base = OTHER; note = 2'-fluoroadenosine-3'-phosphate
  modified_base 12: mod_base = OTHER; note = 2'-O-methyladenosine-3'-phosphate
  modified_base 13: mod_base = OTHER; note = 2'-O-methylguanosine-3'-phosphate
  modified_base 14: mod_base = OTHER; note = 2'-O-methylguanosine-3'-phosphate
  modified_base 15: mod_base = OTHER; note = 2'-O-methyladenosine-3'-phosphate
  modified_base 16: mod_base = OTHER; note = 2'-O-methyladenosine-3'-phosphate
  modified_base 17: mod_base = OTHER; note = 2'-O-methylguanosine-3'-phosphate
  modified_base 18: mod_base = OTHER; note = 2'-O-methyladenosine-3'-phosphate
  modified_base 19: mod_base = OTHER; note = 2'-O-methyladenosine-3'-phosphate
  modified_base 20: mod_base = OTHER; note = 2'-O-methyluridine-3'-phosphate
  modified_base 21: mod_base = OTHER; note = 2'-O-methyluridine-3'-phosphate N-[tris(GalNAc-alkyl)-amidodecanoyl)]-4-hydroxyprolinol Hyp-(GalNAc-alkyl)3
cgagatactaaaggaagaatt

SEQ ID NO: 2177 - RNA, 23 nt, synthetic construct
  source 1..23: mol_type = other RNA; note = Description of Artificial Sequence: Synthetic oligonucleotide
  modified_base 1: mod_base = OTHER; note = 2'-O-methyladenosine-3'-phosphorothioate
  modified_base 2: mod_base = OTHER; note = 2'-fluoroadenosine-3'-phosphorothioate
  modified_base 3: mod_base = OTHER; note = 2'-O-methyluridine-3'-phosphate
  modified_base 4: mod_base = OTHER; note = 2'-O-methyluridine-3'-phosphate
  modified_base 5: mod_base = OTHER; note = 2'-O-methylcytidine-3'-phosphate
  modified_base 6: mod_base = OTHER; note = 2'-fluorouridine-3'-phosphate
  modified_base 7: mod_base = OTHER; note = 2'-O-methyluridine-3'-phosphate
  modified_base 8: mod_base = OTHER; note = 2'-fluorocytidine-3'-phosphate
  modified_base 9: mod_base = OTHER; note = 2'-fluorocytidine-3'-phosphate
  modified_base 10: mod_base = OTHER; note = 2'-O-methyluridine-3'-phosphate
  modified_base 11: mod_base = OTHER; note = 2'-O-methyluridine-3'-phosphate
  modified_base 12: mod_base = OTHER; note = 2'-O-methyluridine-3'-phosphate
  modified_base 13: mod_base = OTHER; note = 2'-O-methyladenosine-3'-phosphate
  modified_base 14: mod_base = OTHER; note = 2'-fluoroguanosine-3'-phosphate
  modified_base 15: mod_base = OTHER; note = 2'-O-methyluridine-3'-phosphate
  modified_base 16: mod_base = OTHER; note = 2'-fluoroadenosine-3'-phosphate
  modified_base 17: mod_base = OTHER; note = 2'-O-methyluridine-3'-phosphate
  modified_base 18: mod_base = OTHER; note = 2'-O-methylcytidine-3'-phosphate
  modified_base 19: mod_base = OTHER; note = 2'-O-methyluridine-3'-phosphate
  modified_base 20: mod_base = OTHER; note = 2'-O-methylcytidine-3'-phosphate
  modified_base 21: mod_base = OTHER; note = 2'-O-methylguanosine-3'-phosphorothioate
  modified_base 22: mod_base = OTHER; note = 2'-O-methyladenosine-3'-phosphorothioate
  modified_base 23: mod_base = OTHER; note = 2'-O-methylguanosine-3'-phosphate
aattcttcctttagtatctcgag

SEQ ID NO: 2178 - RNA, 21 nt, synthetic construct
  source 1..21: mol_type = other RNA; note = Description of Artificial Sequence: Synthetic oligonucleotide
  modified_base 1: mod_base = OTHER; note = 2'-O-methyladenosine-3'-phosphorothioate
  modified_base 2: mod_base = OTHER; note = 2'-O-methyladenosine-3'-phosphorothioate
  modified_base 3: mod_base = OTHER; note = 2'-O-methylcytidine-3'-phosphate
  modified_base 4: mod_base = OTHER; note = 2'-O-methyluridine-3'-phosphate
  modified_base 5: mod_base = OTHER; note = 2'-O-methyluridine-3'-phosphate
  modified_base 6: mod_base = OTHER; note = 2'-O-methyluridine-3'-phosphate
  modified_base 7: mod_base = OTHER; note = 2'-fluoroguanosine-3'-phosphate
  modified_base 8: mod_base = OTHER; note = 2'-O-methylguanosine-3'-phosphate
  modified_base 9: mod_base = OTHER; note = 2'-fluorocytidine-3'-phosphate
  modified_base 10: mod_base = OTHER; note = 2'-fluorouridine-3'-phosphate
  modified_base 11: mod_base = OTHER; note = 2'-fluoroguanosine-3'-phosphate
  modified_base 12: mod_base = OTHER; note = 2'-O-methyladenosine-3'-phosphate
  modified_base 13: mod_base = OTHER; note = 2'-O-methyluridine-3'-phosphate
  modified_base 14: mod_base = OTHER; note = 2'-O-methyladenosine-3'-phosphate
  modified_base 15: mod_base = OTHER; note = 2'-O-methyladenosine-3'-phosphate
  modified_base 16: mod_base = OTHER; note = 2'-O-methyluridine-3'-phosphate
  modified_base 17: mod_base = OTHER; note = 2'-O-methyladenosine-3'-phosphate
  modified_base 18: mod_base = OTHER; note = 2'-O-methyluridine-3'-phosphate
  modified_base 19: mod_base = OTHER; note = 2'-O-methyluridine-3'-phosphate
  modified_base 20: mod_base = OTHER; note = 2'-O-methylguanosine-3'-phosphate
  modified_base 21: mod_base = OTHER; note = 2'-O-methylcytidine-3'-phosphate N-[tris(GalNAc-alkyl)-amidodecanoyl)]-4-hydroxyprolinol Hyp-(GalNAc-alkyl)3
aactttggctgataatattgc

SEQ ID NO: 2179 - RNA, 23 nt, synthetic construct
  source 1..23: mol_type = other RNA; note = Description of Artificial Sequence: Synthetic oligonucleotide
  modified_base 1: mod_base = OTHER; note = 2'-O-methylguanosine-3'-phosphorothioate
  modified_base 2: mod_base = OTHER; note = 2'-fluorocytidine-3'-phosphorothioate
  modified_base 3: mod_base = OTHER; note = 2'-O-methyladenosine-3'-phosphate
  modified_base 4: mod_base = OTHER; note = 2'-O-methyladenosine-3'-phosphate
  modified_base 5: mod_base = OTHER; note = 2'-O-methyluridine-3'-phosphate
  modified_base 6: mod_base = OTHER; note = 2'-fluoroadenosine-3'-phosphate
  modified_base 7: mod_base = OTHER; note = 2'-O-methyluridine-3'-phosphate
  modified_base 8: mod_base = OTHER; note = 2'-fluorouridine-3'-phosphate
  modified_base 9: mod_base = OTHER; note = 2'-fluoroadenosine-3'-phosphate
  modified_base 10: mod_base = OTHER; note = 2'-O-methyluridine-3'-phosphate
  modified_base 11: mod_base = OTHER; note = 2'-O-methylcytidine-3'-phosphate
  modified_base 12: mod_base = OTHER; note = 2'-O-methyladenosine-3'-phosphate
  modified_base 13: mod_base = OTHER; note = 2'-O-methylguanosine-3'-phosphate
  modified_base 14: mod_base = OTHER; note = 2'-fluorocytidine-3'-phosphate
  modified_base 15: mod_base = OTHER; note = 2'-O-methylcytidine-3'-phosphate
  modified_base 16: mod_base = OTHER; note = 2'-fluoroadenosine-3'-phosphate
  modified_base 17: mod_base = OTHER; note = 2'-O-methyladenosine-3'-phosphate
  modified_base 18: mod_base = OTHER; note = 2'-O-methyladenosine-3'-phosphate
  modified_base 19: mod_base = OTHER; note = 2'-O-methylguanosine-3'-phosphate
  modified_base 20: mod_base = OTHER; note = 2'-O-methyluridine-3'-phosphate
  modified_base 21: mod_base = OTHER; note = 2'-O-methyluridine-3'-phosphorothioate
  modified_base 22: mod_base = OTHER; note = 2'-O-methyluridine-3'-phosphorothioate
  modified_base 23: mod_base = OTHER; note = 2'-O-methylcytidine-3'-phosphate
gcaatattatcagccaaagtttc

SEQ ID NO: 2180 - RNA, 21 nt, synthetic construct
  source 1..21: mol_type = other RNA; note = Description of Artificial Sequence: Synthetic oligonucleotide
  modified_base 1: mod_base = OTHER; note = 2'-O-methyladenosine-3'-phosphorothioate
  modified_base 2: mod_base = OTHER; note = 2'-O-methylcytidine-3'-phosphorothioate
  modified_base 3: mod_base = OTHER; note = 2'-O-methyluridine-3'-phosphate
  modified_base 4: mod_base = OTHER; note = 2'-O-methyluridine-3'-phosphate
  modified_base 5: mod_base = OTHER; note = 2'-O-methyluridine-3'-phosphate
  modified_base 6: mod_base = OTHER; note = 2'-O-methylguanosine-3'-phosphate
  modified_base 7: mod_base = OTHER; note = 2'-fluoroguanosine-3'-phosphate
  modified_base 8: mod_base = OTHER; note = 2'-O-methylcytidine-3'-phosphate
  modified_base 9: mod_base = OTHER; note = 2'-fluorouridine-3'-phosphate
  modified_base 10: mod_base = OTHER; note = 2'-fluoroguanosine-3'-phosphate
  modified_base 11: mod_base = OTHER; note = 2'-fluoroadenosine-3'-phosphate
  modified_base 12: mod_base = OTHER; note = 2'-O-methyluridine-3'-phosphate
  modified_base 13: mod_base = OTHER; note = 2'-O-methyladenosine-3'-phosphate
  modified_base 14: mod_base = OTHER; note = 2'-O-methyladenosine-3'-phosphate
  modified_base 15: mod_base = OTHER; note = 2'-O-methyluridine-3'-phosphate
  modified_base 16: mod_base = OTHER; note = 2'-O-methyladenosine-3'-phosphate
  modified_base 17: mod_base = OTHER; note = 2'-O-methyluridine-3'-phosphate
  modified_base 18: mod_base = OTHER; note = 2'-O-methyluridine-3'-phosphate
  modified_base 19: mod_base = OTHER; note = 2'-O-methylguanosine-3'-phosphate
  modified_base 20: mod_base = OTHER; note = 2'-O-methylcytidine-3'-phosphate
  modified_base 21: mod_base = OTHER; note = 2'-O-methyladenosine-3'-phosphate N-[tris(GalNAc-alkyl)-amidodecanoyl)]-4-hydroxyprolinol Hyp-(GalNAc-alkyl)3
actttggctgataatattgca

SEQ ID NO: 2181 - RNA, 23 nt, synthetic construct
  source 1..23: mol_type = other RNA; note = Description of Artificial Sequence: Synthetic oligonucleotide
  modified_base 1: mod_base = OTHER; note = 2'-O-methyluridine-3'-phosphorothioate
  modified_base 2: mod_base = OTHER; note = 2'-fluoroguanosine-3'-phosphorothioate
  modified_base 3: mod_base = OTHER; note = 2'-O-methylcytidine-3'-phosphate
  modified_base 4: mod_base = OTHER; note = 2'-O-methyladenosine-3'-phosphate
  modified_base 5: mod_base = OTHER; note = 2'-O-methyladenosine-3'-phosphate
  modified_base 6: mod_base = OTHER; note = 2'-fluorouridine-3'-phosphate
  modified_base 7: mod_base = OTHER; note = 2'-O-methyladenosine-3'-phosphate
  modified_base 8: mod_base = OTHER; note = 2'-fluorouridine-3'-phosphate
  modified_base 9: mod_base = OTHER; note = 2'-fluorouridine-3'-phosphate
  modified_base 10: mod_base = OTHER; note = 2'-O-methyladenosine-3'-phosphate
  modified_base 11: mod_base = OTHER; note = 2'-O-methyluridine-3'-phosphate
  modified_base 12: mod_base = OTHER; note = 2'-O-methylcytidine-3'-phosphate
  modified_base 13: mod_base = OTHER; note = 2'-O-methyladenosine-3'-phosphate
  modified_base 14: mod_base = OTHER; note = 2'-fluoroguanosine-3'-phosphate
  modified_base 15: mod_base = OTHER; note = 2'-O-methylcytidine-3'-phosphate
  modified_base 16: mod_base = OTHER; note = 2'-fluorocytidine-3'-phosphate
  modified_base 17: mod_base = OTHER; note = 2'-O-methyladenosine-3'-phosphate
  modified_base 18: mod_base = OTHER; note = 2'-O-methyladenosine-3'-phosphate
  modified_base 19: mod_base = OTHER; note = 2'-O-methyladenosine-3'-phosphate
  modified_base 20: mod_base = OTHER; note = 2'-O-methylguanosine-3'-phosphate
  modified_base 21: mod_base = OTHER; note = 2'-O-methyluridine-3'-phosphorothioate
  modified_base 22: mod_base = OTHER; note = 2'-O-methyluridine-3'-phosphorothioate
  modified_base 23: mod_base = OTHER; note = 2'-O-methyluridine-3'-phosphate
tgcaatattatcagccaaagttt

SEQ ID NO: 2182 - RNA, 21 nt, synthetic construct
  source 1..21: mol_type = other RNA; note = Description of Artificial Sequence: Synthetic oligonucleotide
  modified_base 1: mod_base = OTHER; note = 2'-O-methyladenosine-3'-phosphorothioate
  modified_base 2: mod_base = OTHER; note = 2'-O-methyladenosine-3'-phosphorothioate
  modified_base 3: mod_base = OTHER; note = 2'-O-methylguanosine-3'-phosphate
  modified_base 4: mod_base = OTHER; note = 2'-O-methyladenosine-3'-phosphate
  modified_base 5: mod_base = OTHER; note = 2'-O-methyladenosine-3'-phosphate
  modified_base 6: mod_base = OTHER; note = 2'-O-methyladenosine-3'-phosphate
  modified_base 7: mod_base = OTHER; note = 2'-fluorocytidine-3'-phosphate
  modified_base 8: mod_base = OTHER; note = 2'-O-methyluridine-3'-phosphate
  modified_base 9: mod_base = OTHER; note = 2'-fluorouridine-3'-phosphate
  modified_base 10: mod_base = OTHER; note = 2'-fluorouridine-3'-phosphate
  modified_base 11: mod_base = OTHER; note = 2'-fluoroguanosine-3'-phosphate
  modified_base 12: mod_base = OTHER; note = 2'-O-methylguanosine-3'-phosphate
  modified_base 13: mod_base = OTHER; note = 2'-O-methylcytidine-3'-phosphate
  modified_base 14: mod_base = OTHER; note = 2'-O-methyluridine-3'-phosphate
  modified_base 15: mod_base = OTHER; note = 2'-O-methylguanosine-3'-phosphate
  modified_base 16: mod_base = OTHER; note = 2'-O-methyladenosine-3'-phosphate
  modified_base 17: mod_base = OTHER; note = 2'-O-methyluridine-3'-phosphate
  modified_base 18: mod_base = OTHER; note = 2'-O-methyladenosine-3'-phosphate
  modified_base 19: mod_base = OTHER; note = 2'-O-methyladenosine-3'-phosphate
  modified_base 20: mod_base = OTHER; note = 2'-O-methyluridine-3'-phosphate
  modified_base 21: mod_base = OTHER; note = 2'-O-methyladenosine-3'-phosphate N-[tris(GalNAc-alkyl)-amidodecanoyl)]-4-hydroxyprolinol Hyp-(GalNAc-alkyl)3
aagaaactttggctgataata

SEQ ID NO: 2183 - RNA, 23 nt, synthetic construct
  source 1..23: mol_type = other RNA; note = Description of Artificial Sequence: Synthetic oligonucleotide
  modified_base 1: mod_base = OTHER; note = 2'-O-methyluridine-3'-phosphorothioate
  modified_base 2: mod_base = OTHER; note = 2'-fluoroadenosine-3'-phosphorothioate
  modified_base 3: mod_base = OTHER; note = 2'-O-methyluridine-3'-phosphate
  modified_base 4: mod_base = OTHER; note = 2'-O-methyluridine-3'-phosphate
  modified_base 5: mod_base = OTHER; note = 2'-O-methyladenosine-3'-phosphate
  modified_base 6: mod_base = OTHER; note = 2'-fluorouridine-3'-phosphate
  modified_base 7: mod_base = OTHER; note = 2'-O-methylcytidine-3'-phosphate
  modified_base 8: mod_base = OTHER; note = 2'-fluoroadenosine-3'-phosphate
  modified_base 9: mod_base = OTHER; note = 2'-fluoroguanosine-3'-phosphate
  modified_base 10: mod_base = OTHER; note = 2'-O-methylcytidine-3'-phosphate
  modified_base 11: mod_base = OTHER; note = 2'-O-methylcytidine-3'-phosphate
  modified_base 12: mod_base = OTHER; note = 2'-O-methyladenosine-3'-phosphate
  modified_base 13: mod_base = OTHER; note = 2'-O-methyladenosine-3'-phosphate
  modified_base 14: mod_base = OTHER; note = 2'-fluoroadenosine-3'-phosphate
  modified_base 15: mod_base = OTHER; note = 2'-O-methylguanosine-3'-phosphate
  modified_base 16: mod_base = OTHER; note = 2'-fluorouridine-3'-phosphate
  modified_base 17: mod_base = OTHER; note = 2'-O-methyluridine-3'-phosphate
  modified_base 18: mod_base = OTHER; note = 2'-O-methyluridine-3'-phosphate
  modified_base 19: mod_base = OTHER; note = 2'-O-methylcytidine-3'-phosphate
  modified_base 20: mod_base = OTHER; note = 2'-O-methyluridine-3'-phosphate
  modified_base 21: mod_base = OTHER; note = 2'-O-methyluridine-3'-phosphorothioate
  modified_base 22: mod_base = OTHER; note = 2'-O-methylcytidine-3'-phosphorothioate
  modified_base 23: mod_base = OTHER; note = 2'-O-methyladenosine-3'-phosphate
tattatcagccaaagtttcttca

SEQ ID NO: 2184 - RNA, 21 nt, synthetic construct
  source 1..21: mol_type = other RNA; note = Description of Artificial Sequence: Synthetic oligonucleotide
  modified_base 1: mod_base = OTHER; note = 2'-O-methylguanosine-3'-phosphorothioate
  modified_base 2: mod_base = OTHER; note = 2'-O-methyladenosine-3'-phosphorothioate
  modified_base 3: mod_base = OTHER; note = 2'-O-methyladenosine-3'-phosphate
  modified_base 4: mod_base = OTHER; note = 2'-O-methylguanosine-3'-phosphate
  modified_base 5: mod_base = OTHER; note = 2'-O-methyladenosine-3'-phosphate
  modified_base 6: mod_base = OTHER; note = 2'-O-methyladenosine-3'-phosphate
  modified_base 7: mod_base = OTHER; note = 2'-fluoroadenosine-3'-phosphate
  modified_base 8: mod_base = OTHER; note = 2'-O-methylcytidine-3'-phosphate
  modified_base 9: mod_base = OTHER; note = 2'-fluorouridine-3'-phosphate
  modified_base 10: mod_base = OTHER; note = 2'-fluorouridine-3'-phosphate
  modified_base 11: mod_base = OTHER; note = 2'-fluorouridine-3'-phosphate
  modified_base 12: mod_base = OTHER; note = 2'-O-methylguanosine-3'-phosphate
  modified_base 13: mod_base = OTHER; note = 2'-O-methylguanosine-3'-phosphate
  modified_base 14: mod_base = OTHER; note = 2'-O-methylcytidine-3'-phosphate
  modified_base 15: mod_base = OTHER; note = 2'-O-methyluridine-3'-phosphate
  modified_base 16: mod_base = OTHER; note = 2'-O-methylguanosine-3'-phosphate
  modified_base 17: mod_base = OTHER; note = 2'-O-methyladenosine-3'-phosphate
  modified_base 18: mod_base = OTHER; note = 2'-O-methyluridine-3'-phosphate
  modified_base 19: mod_base = OTHER; note = 2'-O-methyladenosine-3'-phosphate
  modified_base 20: mod_base = OTHER; note = 2'-O-methyladenosine-3'-phosphate
  modified_base 21: mod_base = OTHER; note = 2'-O-methyluridine-3'-phosphate N-[tris(GalNAc-alkyl)-amidodecanoyl)]-4-hydroxyprolinol Hyp-(GalNAc-alkyl)3
gaagaaactttggctgataat

SEQ ID NO: 2185 - RNA, 23 nt, synthetic construct
  source 1..23: mol_type = other RNA; note = Description of Artificial Sequence: Synthetic oligonucleotide
  modified_base 1: mod_base = OTHER; note = 2'-O-methyladenosine-3'-phosphorothioate
  modified_base 2: mod_base = OTHER; note = 2'-fluorouridine -3'-phosphorothioate
  modified_base 3: mod_base = OTHER; note = 2'-O-methyluridine-3'-phosphate
  modified_base 4: mod_base = OTHER; note = 2'-O-methyladenosine-3'-phosphate
  modified_base 5: mod_base = OTHER; note = 2'-O-methyluridine-3'-phosphate
  modified_base 6: mod_base = OTHER; note = 2'-fluorocytidine-3'-phosphate
  modified_base 7: mod_base = OTHER; note = 2'-O-methyladenosine-3'-phosphate
  modified_base 8: mod_base = OTHER; note = 2'-fluoroguanosine-3'-phosphate
  modified_base 9: mod_base = OTHER; note = 2'-fluorocytidine-3'-phosphate
  modified_base 10: mod_base = OTHER; note = 2'-O-methylcytidine-3'-phosphate
  modified_base 11: mod_base = OTHER; note = 2'-O-methyladenosine-3'-phosphate
  modified_base 12: mod_base = OTHER; note = 2'-O-methyladenosine-3'-phosphate
  modified_base 13: mod_base = OTHER; note = 2'-O-methyladenosine-3'-phosphate
  modified_base 14: mod_base = OTHER; note = 2'-fluoroguanosine-3'-phosphate
  modified_base 15: mod_base = OTHER; note = 2'-O-methyluridine-3'-phosphate
  modified_base 16: mod_base = OTHER; note = 2'-fluorouridine-3'-phosphate
  modified_base 17: mod_base = OTHER; note = 2'-O-methyluridine-3'-phosphate
  modified_base 18: mod_base = OTHER; note = 2'-O-methylcytidine-3'-phosphate
  modified_base 19: mod_base = OTHER; note = 2'-O-methyluridine-3'-phosphate
  modified_base 20: mod_base = OTHER; note = 2'-O-methyluridine-3'-phosphate
  modified_base 21: mod_base = OTHER; note = 2'-O-methylcytidine-3'-phosphorothioate
  modified_base 22: mod_base = OTHER; note = 2'-O-methyladenosine-3'-phosphorothioate
  modified_base 23: mod_base = OTHER; note = 2'-O-methyluridine-3'-phosphate
attatcagccaaagtttcttcat

SEQ ID NO: 2186 - RNA, 21 nt, synthetic construct
  source 1..21: mol_type = other RNA; note = Description of Artificial Sequence: Synthetic oligonucleotide
  modified_base 1: mod_base = OTHER; note = 2'-O-methyladenosine-3'-phosphorothioate
  modified_base 2: mod_base = OTHER; note = 2'-O-methyladenosine-3'-phosphorothioate
  modified_base 3: mod_base = OTHER; note = 2'-O-methyladenosine-3'-phosphate
  modified_base 4: mod_base = OTHER; note = 2'-O-methyluridine-3'-phosphate
  modified_base 5: mod_base = OTHER; note = 2'-O-methylguanosine-3'-phosphate
  modified_base 6: mod_base = OTHER; note = 2'-O-methylguanosine-3'-phosphate
  modified_base 7: mod_base = OTHER; note = 2'-fluorocytidine-3'-phosphate
  modified_base 8: mod_base = OTHER; note = 2'-O-methyluridine-3'-phosphate
  modified_base 9: mod_base = OTHER; note = 2'-fluoroguanosine-3'-phosphate
  modified_base 10: mod_base = OTHER; note = 2'-fluoroadenosine-3'-phosphate
  modified_base 11: mod_base = OTHER; note = 2'-fluoroguanosine-3'-phosphate
  modified_base 12: mod_base = OTHER; note = 2'-O-methyladenosine-3'-phosphate
  modified_base 13: mod_base = OTHER; note = 2'-O-methyladenosine-3'-phosphate
  modified_base 14: mod_base = OTHER; note = 2'-O-methylguanosine-3'-phosphate
  modified_base 15: mod_base = OTHER; note = 2'-O-methyladenosine-3'-phosphate
  modified_base 16: mod_base = OTHER; note = 2'-O-methylcytidine-3'-phosphate
  modified_base 17: mod_base = OTHER; note = 2'-O-methyluridine-3'-phosphate
  modified_base 18: mod_base = OTHER; note = 2'-O-methylguanosine-3'-phosphate
  modified_base 19: mod_base = OTHER; note = 2'-O-methyladenosine-3'-phosphate
  modified_base 20: mod_base = OTHER; note = 2'-O-methylcytidine-3'-phosphate
  modified_base 21: mod_base = OTHER; note = 2'-O-methyladenosine-3'-phosphate N-[tris(GalNAc-alkyl)-amidodecanoyl)]-4-hydroxyprolinol Hyp-(GalNAc-alkyl)3
aaatggctgagaagactgaca

SEQ ID NO: 2187 - RNA, 23 nt, synthetic construct
  source 1..23: mol_type = other RNA; note = Description of Artificial Sequence: Synthetic oligonucleotide
  modified_base 1: mod_base = OTHER; note = 2'-O-methyluridine-3'-phosphorothioate
  modified_base 2: mod_base = OTHER; note = 2'-fluoroguanosine-3'-phosphorothioate
  modified_base 3: mod_base = OTHER; note = 2'-O-methyluridine-3'-phosphate
  modified_base 4: mod_base = OTHER; note = 2'-O-methylcytidine-3'-phosphate
  modified_base 5: mod_base = OTHER; note = 2'-O-methyladenosine-3'-phosphate
  modified_base 6: mod_base = OTHER; note = 2'-fluoroguanosine-3'-phosphate
  modified_base 7: mod_base = OTHER; note = 2'-O-methyluridine-3'-phosphate
  modified_base 8: mod_base = OTHER; note = 2'-fluorocytidine-3'-phosphate
  modified_base 9: mod_base = OTHER; note = 2'-fluorouridine-3'-phosphate
  modified_base 10: mod_base = OTHER; note = 2'-O-methyluridine-3'-phosphate
  modified_base 11: mod_base = OTHER; note = 2'-O-methylcytidine-3'-phosphate
  modified_base 12: mod_base = OTHER; note = 2'-O-methyluridine-3'-phosphate
  modified_base 13: mod_base = OTHER; note = 2'-O-methylcytidine-3'-phosphate
  modified_base 14: mod_base = OTHER; note = 2'-fluoroadenosine-3'-phosphate
  modified_base 15: mod_base = OTHER; note = 2'-O-methylguanosine-3'-phosphate
  modified_base 16: mod_base = OTHER; note = 2'-fluorocytidine-3'-phosphate
  modified_base 17: mod_base = OTHER; note = 2'-O-methylcytidine-3'-phosphate
  modified_base 18: mod_base = OTHER; note = 2'-O-methyladenosine-3'-phosphate
  modified_base 19: mod_base = OTHER; note = 2'-O-methyluridine-3'-phosphate
  modified_base 20: mod_base = OTHER; note = 2'-O-methyluridine-3'-phosphate
  modified_base 21: mod_base = OTHER; note = 2'-O-methyluridine-3'-phosphorothioate
  modified_base 22: mod_base = OTHER; note = 2'-O-methylguanosine-3'-phosphorothioate
  modified_base 23: mod_base = OTHER; note = 2'-O-methyladenosine-3'-phosphate
tgtcagtcttctcagccatttga

SEQ ID NO: 2188 - RNA, 21 nt, synthetic construct
  source 1..21: mol_type = other RNA; note = Description of Artificial Sequence: Synthetic oligonucleotide
  modified_base 1: mod_base = OTHER; note = 2'-O-methyladenosine-3'-phosphorothioate
  modified_base 2: mod_base = OTHER; note = 2'-O-methyladenosine-3'-phosphorothioate
  modified_base 3: mod_base = OTHER; note = 2'-O-methyluridine-3'-phosphate
  modified_base 4: mod_base = OTHER; note = 2'-O-methylguanosine-3'-phosphate
  modified_base 5: mod_base = OTHER; note = 2'-O-methylguanosine-3'-phosphate
  modified_base 6: mod_base = OTHER; note = 2'-O-methylcytidine-3'-phosphate
  modified_base 7: mod_base = OTHER; note = 2'-fluorouridine-3'-phosphate
  modified_base 8: mod_base = OTHER; note = 2'-O-methylguanosine-3'-phosphate
  modified_base 9: mod_base = OTHER; note = 2'-fluoroadenosine-3'-phosphate
  modified_base 10: mod_base = OTHER; note = 2'-fluoroguanosine-3'-phosphate
  modified_base 11: mod_base = OTHER; note = 2'-fluoroadenosine-3'-phosphate
  modified_base 12: mod_base = OTHER; note = 2'-O-methyladenosine-3'-phosphate
  modified_base 13: mod_base = OTHER; note = 2'-O-methylguanosine-3'-phosphate
  modified_base 14: mod_base = OTHER; note = 2'-O-methyladenosine-3'-phosphate
  modified_base 15: mod_base = OTHER; note = 2'-O-methylcytidine-3'-phosphate
  modified_base 16: mod_base = OTHER; note = 2'-O-methyluridine-3'-phosphate
  modified_base 17: mod_base = OTHER; note = 2'-O-methylguanosine-3'-phosphate
  modified_base 18: mod_base = OTHER; note = 2'-O-methyladenosine-3'-phosphate
  modified_base 19: mod_base = OTHER; note = 2'-O-methylcytidine-3'-phosphate
  modified_base 20: mod_base = OTHER; note = 2'-O-methyladenosine-3'-phosphate
  modified_base 21: mod_base = OTHER; note = 2'-O-methyluridine-3'-phosphate N-[tris(GalNAc-alkyl)-amidodecanoyl)]-4-hydroxyprolinol Hyp-(GalNAc-alkyl)3
aatggctgagaagactgacat

SEQ ID NO: 2189 - RNA, 23 nt, synthetic construct
  source 1..23: mol_type = other RNA; note = Description of Artificial Sequence: Synthetic oligonucleotide
  modified_base 1: mod_base = OTHER; note = 2'-O-methyladenosine-3'-phosphorothioate
  modified_base 2: mod_base = OTHER; note = 2'-fluorouridine -3'-phosphorothioate
  modified_base 3: mod_base = OTHER; note = 2'-O-methylguanosine-3'-phosphate
  modified_base 4: mod_base = OTHER; note = 2'-O-methyluridine-3'-phosphate
  modified_base 5: mod_base = OTHER; note = 2'-O-methylcytidine-3'-phosphate
  modified_base 6: mod_base = OTHER; note = 2'-fluoroadenosine-3'-phosphate
  modified_base 7: mod_base = OTHER; note = 2'-O-methylguanosine-3'-phosphate
  modified_base 8: mod_base = OTHER; note = 2'-fluorouridine-3'-phosphate
  modified_base 9: mod_base = OTHER; note = 2'-fluorocytidine-3'-phosphate
  modified_base 10: mod_base = OTHER; note = 2'-O-methyluridine-3'-phosphate
  modified_base 11: mod_base = OTHER; note = 2'-O-methyluridine-3'-phosphate
  modified_base 12: mod_base = OTHER; note = 2'-O-methylcytidine-3'-phosphate
  modified_base 13: mod_base = OTHER; note = 2'-O-methyluridine-3'-phosphate
  modified_base 14: mod_base = OTHER; note = 2'-fluorocytidine-3'-phosphate
  modified_base 15: mod_base = OTHER; note = 2'-O-methyladenosine-3'-phosphate
  modified_base 16: mod_base = OTHER; note = 2'-fluoroguanosine-3'-phosphate
  modified_base 17: mod_base = OTHER; note = 2'-O-methylcytidine-3'-phosphate
  modified_base 18: mod_base = OTHER; note = 2'-O-methylcytidine-3'-phosphate
  modified_base 19: mod_base = OTHER; note = 2'-O-methyladenosine-3'-phosphate
  modified_base 20: mod_base = OTHER; note = 2'-O-methyluridine-3'-phosphate
  modified_base 21: mod_base = OTHER; note = 2'-O-methyluridine-3'-phosphorothioate
  modified_base 22: mod_base = OTHER; note = 2'-O-methyluridine-3'-phosphorothioate
  modified_base 23: mod_base = OTHER; note = 2'-O-methylguanosine-3'-phosphate
atgtcagtcttctcagccatttg

SEQ ID NO: 2190 - RNA, 21 nt, synthetic construct
  source 1..21: mol_type = other RNA; note = Description of Artificial Sequence: Synthetic oligonucleotide
  modified_base 1: mod_base = OTHER; note = 2'-O-methyluridine-3'-phosphorothioate
  modified_base 2: mod_base = OTHER; note = 2'-O-methyladenosine-3'-phosphorothioate
  modified_base 3: mod_base = OTHER; note = 2'-O-methyluridine-3'-phosphate
  modified_base 4: mod_base = OTHER; note = 2'-O-methylcytidine-3'-phosphate
  modified_base 5: mod_base = OTHER; note = 2'-O-methyladenosine-3'-phosphate
  modified_base 6: mod_base = OTHER; note = 2'-O-methyladenosine-3'-phosphate
  modified_base 7: mod_base = OTHER; note = 2'-fluoroadenosine-3'-phosphate
  modified_base 8: mod_base = OTHER; note = 2'-O-methyluridine-3'-phosphate
  modified_base 9: mod_base = OTHER; note = 2'-fluoroguanosine-3'-phosphate
  modified_base 10: mod_base = OTHER; note = 2'-fluoroguanosine-3'-phosphate
  modified_base 11: mod_base = OTHER; note = 2'-fluorocytidine-3'-phosphate
  modified_base 12: mod_base = OTHER; note = 2'-O-methyluridine-3'-phosphate
  modified_base 13: mod_base = OTHER; note = 2'-O-methylguanosine-3'-phosphate
  modified_base 14: mod_base = OTHER; note = 2'-O-methyladenosine-3'-phosphate
  modified_base 15: mod_base = OTHER; note = 2'-O-methylguanosine-3'-phosphate
  modified_base 16: mod_base = OTHER; note = 2'-O-methyladenosine-3'-phosphate
  modified_base 17: mod_base = OTHER; note = 2'-O-methyladenosine-3'-phosphate
  modified_base 18: mod_base = OTHER; note = 2'-O-methylguanosine-3'-phosphate
  modified_base 19: mod_base = OTHER; note = 2'-O-methyladenosine-3'-phosphate
  modified_base 20: mod_base = OTHER; note = 2'-O-methylcytidine-3'-phosphate
  modified_base 21: mod_base = OTHER; note = 2'-O-methyluridine-3'-phosphate N-[tris(GalNAc-alkyl)-amidodecanoyl)]-4-hydroxyprolinol Hyp-(GalNAc-alkyl)3
tatcaaatggctgagaagact

SEQ ID NO: 2191 - RNA, 23 nt, synthetic construct
  source 1..23: mol_type = other RNA; note = Description of Artificial Sequence: Synthetic oligonucleotide
  modified_base 1: mod_base = OTHER; note = 2'-O-methyladenosine-3'-phosphorothioate
  modified_base 2: mod_base = OTHER; note = 2'-fluoroguanosine-3'-phosphorothioate
  modified_base 3: mod_base = OTHER; note = 2'-O-methyluridine-3'-phosphate
  modified_base 4: mod_base = OTHER; note = 2'-O-methylcytidine-3'-phosphate
  modified_base 5: mod_base = OTHER; note = 2'-O-methyluridine-3'-phosphate
  modified_base 6: mod_base = OTHER; note = 2'-fluorouridine-3'-phosphate
  modified_base 7: mod_base = OTHER; note = 2'-O-methylcytidine-3'-phosphate
  modified_base 8: mod_base = OTHER; note = 2'-fluorouridine-3'-phosphate
  modified_base 9: mod_base = OTHER; note = 2'-fluorocytidine-3'-phosphate
  modified_base 10: mod_base = OTHER; note = 2'-O-methyladenosine-3'-phosphate
  modified_base 11: mod_base = OTHER; note = 2'-O-methylguanosine-3'-phosphate
  modified_base 12: mod_base = OTHER; note = 2'-O-methylcytidine-3'-phosphate
  modified_base 13: mod_base = OTHER; note = 2'-O-methylcytidine-3'-phosphate
  modified_base 14: mod_base = OTHER; note = 2'-fluoroadenosine-3'-phosphate
  modified_base 15: mod_base = OTHER; note = 2'-O-methyluridine-3'-phosphate
  modified_base 16: mod_base = OTHER; note = 2'-fluorouridine-3'-phosphate
  modified_base 17: mod_base = OTHER; note = 2'-O-methyluridine-3'-phosphate
  modified_base 18: mod_base = OTHER; note = 2'-O-methylguanosine-3'-phosphate
  modified_base 19: mod_base = OTHER; note = 2'-O-methyladenosine-3'-phosphate
  modified_base 20: mod_base = OTHER; note = 2'-O-methyluridine-3'-phosphate
  modified_base 21: mod_base = OTHER; note = 2'-O-methyladenosine-3'-phosphorothioate
  modified_base 22: mod_base = OTHER; note = 2'-O-methyluridine-3'-phosphorothioate
  modified_base 23: mod_base = OTHER; note = 2'-O-methylcytidine-3'-phosphate
agtcttctcagccatttgatatc

SEQ ID NO: 2192 - RNA, 21 nt, synthetic construct
  source 1..21: mol_type = other RNA; note = Description of Artificial Sequence: Synthetic oligonucleotide
  modified_base 1: mod_base = OTHER; note = 2'-O-methyladenosine-3'-phosphorothioate
  modified_base 2: mod_base = OTHER; note = 2'-O-methyluridine-3'-phosphorothioate
  modified_base 3: mod_base = OTHER; note = 2'-O-methyladenosine-3'-phosphate
  modified_base 4: mod_base = OTHER; note = 2'-O-methyluridine-3'-phosphate
  modified_base 5: mod_base = OTHER; note = 2'-O-methylcytidine-3'-phosphate
  modified_base 6: mod_base = OTHER; note = 2'-O-methyladenosine-3'-phosphate
  modified_base 7: mod_base = OTHER; note = 2'-fluoroadenosine-3'-phosphate
  modified_base 8: mod_base = OTHER; note = 2'-O-methyladenosine-3'-phosphate
  modified_base 9: mod_base = OTHER; note = 2'-fluorouridine-3'-phosphate
  modified_base 10: mod_base = OTHER; note = 2'-fluoroguanosine-3'-phosphate
  modified_base 11: mod_base = OTHER; note = 2'-fluoroguanosine-3'-phosphate
  modified_base 12: mod_base = OTHER; note = 2'-O-methylcytidine-3'-phosphate
  modified_base 13: mod_base = OTHER; note = 2'-O-methyluridine-3'-phosphate
  modified_base 14: mod_base = OTHER; note = 2'-O-methylguanosine-3'-phosphate
  modified_base 15: mod_base = OTHER; note = 2'-O-methyladenosine-3'-phosphate
  modified_base 16: mod_base = OTHER; note = 2'-O-methylguanosine-3'-phosphate
  modified_base 17: mod_base = OTHER; note = 2'-O-methyladenosine-3'-phosphate
  modified_base 18: mod_base = OTHER; note = 2'-O-methyladenosine-3'-phosphate
  modified_base 19: mod_base = OTHER; note = 2'-O-methylguanosine-3'-phosphate
  modified_base 20: mod_base = OTHER; note = 2'-O-methyladenosine-3'-phosphate
  modified_base 21: mod_base = OTHER; note = 2'-O-methylcytidine-3'-phosphate N-[tris(GalNAc-alkyl)-amidodecanoyl)]-4-hydroxyprolinol Hyp-(GalNAc-alkyl)3
atatcaaatggctgagaagac

SEQ ID NO: 2193 - RNA, 23 nt, synthetic construct
  source 1..23: mol_type = other RNA; note = Description of Artificial Sequence: Synthetic oligonucleotide
  modified_base 1: mod_base = OTHER; note = 2'-O-methylguanosine-3'-phosphorothioate
  modified_base 2: mod_base = OTHER; note = 2'-fluorouridine -3'-phosphorothioate
  modified_base 3: mod_base = OTHER; note = 2'-O-methylcytidine-3'-phosphate
  modified_base 4: mod_base = OTHER; note = 2'-O-methyluridine-3'-phosphate
  modified_base 5: mod_base = OTHER; note = 2'-O-methyluridine-3'-phosphate
  modified_base 6: mod_base = OTHER; note = 2'-fluorocytidine-3'-phosphate
  modified_base 7: mod_base = OTHER; note = 2'-O-methyluridine-3'-phosphate
  modified_base 8: mod_base = OTHER; note = 2'-fluorocytidine-3'-phosphate
  modified_base 9: mod_base = OTHER; note = 2'-fluoroadenosine-3'-phosphate
  modified_base 10: mod_base = OTHER; note = 2'-O-methylguanosine-3'-phosphate
  modified_base 11: mod_base = OTHER; note = 2'-O-methylcytidine-3'-phosphate
  modified_base 12: mod_base = OTHER; note = 2'-O-methylcytidine-3'-phosphate
  modified_base 13: mod_base = OTHER; note = 2'-O-methyladenosine-3'-phosphate
  modified_base 14: mod_base = OTHER; note = 2'-fluorouridine-3'-phosphate
  modified_base 15: mod_base = OTHER; note = 2'-O-methyluridine-3'-phosphate
  modified_base 16: mod_base = OTHER; note = 2'-fluorouridine-3'-phosphate
  modified_base 17: mod_base = OTHER; note = 2'-O-methylguanosine-3'-phosphate
  modified_base 18: mod_base = OTHER; note = 2'-O-methyladenosine-3'-phosphate
  modified_base 19: mod_base = OTHER; note = 2'-O-methyluridine-3'-phosphate
  modified_base 20: mod_base = OTHER; note = 2'-O-methyladenosine-3'-phosphate
  modified_base 21: mod_base = OTHER; note = 2'-O-methyluridine-3'-phosphorothioate
  modified_base 22: mod_base = OTHER; note = 2'-O-methylcytidine-3'-phosphorothioate
  modified_base 23: mod_base = OTHER; note = 2'-O-methyluridine-3'-phosphate
gtcttctcagccatttgatatct

SEQ ID NO: 2194 - RNA, 21 nt, synthetic construct
  source 1..21: mol_type = other RNA; note = Description of Artificial Sequence: Synthetic oligonucleotide
  modified_base 1: mod_base = OTHER; note = 2'-O-methylguanosine-3'-phosphorothioate
  modified_base 2: mod_base = OTHER; note = 2'-O-methyluridine-3'-phosphorothioate
  modified_base 3: mod_base = OTHER; note = 2'-O-methylguanosine-3'-phosphate
  modified_base 4: mod_base = OTHER; note = 2'-O-methylguanosine-3'-phosphate
  modified_base 5: mod_base = OTHER; note = 2'-O-methyluridine-3'-phosphate
  modified_base 6: mod_base = OTHER; note = 2'-O-methyluridine-3'-phosphate
  modified_base 7: mod_base = OTHER; note = 2'-fluorocytidine-3'-phosphate
  modified_base 8: mod_base = OTHER; note = 2'-O-methyluridine-3'-phosphate
  modified_base 9: mod_base = OTHER; note = 2'-fluorouridine-3'-phosphate
  modified_base 10: mod_base = OTHER; note = 2'-fluoroadenosine-3'-phosphate
  modified_base 11: mod_base = OTHER; note = 2'-fluoroadenosine-3'-phosphate
  modified_base 12: mod_base = OTHER; note = 2'-O-methyladenosine-3'-phosphate
  modified_base 13: mod_base = OTHER; note = 2'-O-methyluridine-3'-phosphate
  modified_base 14: mod_base = OTHER; note = 2'-O-methyluridine-3'-phosphate
  modified_base 15: mod_base = OTHER; note = 2'-O-methylguanosine-3'-phosphate
  modified_base 16: mod_base = OTHER; note = 2'-O-methyluridine-3'-phosphate
  modified_base 17: mod_base = OTHER; note = 2'-O-methyladenosine-3'-phosphate
  modified_base 18: mod_base = OTHER; note = 2'-O-methyladenosine-3'-phosphate
  modified_base 19: mod_base = OTHER; note = 2'-O-methylguanosine-3'-phosphate
  modified_base 20: mod_base = OTHER; note = 2'-O-methylcytidine-3'-phosphate
  modified_base 21: mod_base = OTHER; note = 2'-O-methyluridine-3'-phosphate N-[tris(GalNAc-alkyl)-amidodecanoyl)]-4-hydroxyprolinol Hyp-(GalNAc-alkyl)3
gtggttcttaaattgtaagct

SEQ ID NO: 2195 - RNA, 23 nt, synthetic construct
  source 1..23: mol_type = other RNA; note = Description of Artificial Sequence: Synthetic oligonucleotide
  modified_base 1: mod_base = OTHER; note = 2'-O-methyladenosine-3'-phosphorothioate
  modified_base 2: mod_base = OTHER; note = 2'-fluoroguanosine-3'-phosphorothioate
  modified_base 3: mod_base = OTHER; note = 2'-O-methylcytidine-3'-phosphate
  modified_base 4: mod_base = OTHER; note = 2'-O-methyluridine-3'-phosphate
  modified_base 5: mod_base = OTHER; note = 2'-O-methyluridine-3'-phosphate
  modified_base 6: mod_base = OTHER; note = 2'-fluoroadenosine-3'-phosphate
  modified_base 7: mod_base = OTHER; note = 2'-O-methylcytidine-3'-phosphate
  modified_base 8: mod_base = OTHER; note = 2'-fluoroadenosine-3'-phosphate
  modified_base 9: mod_base = OTHER; note = 2'-fluoroadenosine-3'-phosphate
  modified_base 10: mod_base = OTHER; note = 2'-O-methyluridine-3'-phosphate
  modified_base 11: mod_base = OTHER; note = 2'-O-methyluridine-3'-phosphate
  modified_base 12: mod_base = OTHER; note = 2'-O-methyluridine-3'-phosphate
  modified_base 13: mod_base = OTHER; note = 2'-O-methyladenosine-3'-phosphate
  modified_base 14: mod_base = OTHER; note = 2'-fluoroadenosine-3'-phosphate
  modified_base 15: mod_base = OTHER; note = 2'-O-methylguanosine-3'-phosphate
  modified_base 16: mod_base = OTHER; note = 2'-fluoroadenosine-3'-phosphate
  modified_base 17: mod_base = OTHER; note = 2'-O-methyladenosine-3'-phosphate
  modified_base 18: mod_base = OTHER; note = 2'-O-methylcytidine-3'-phosphate
  modified_base 19: mod_base = OTHER; note = 2'-O-methylcytidine-3'-phosphate
  modified_base 20: mod_base = OTHER; note = 2'-O-methyladenosine-3'-phosphate
  modified_base 21: mod_base = OTHER; note = 2'-O-methylcytidine-3'-phosphorothioate
  modified_base 22: mod_base = OTHER; note = 2'-O-methyluridine-3'-phosphorothioate
  modified_base 23: mod_base = OTHER; note = 2'-O-methylguanosine-3'-phosphate
agcttacaatttaagaaccactg

SEQ ID NO: 2196 - RNA, 21 nt, synthetic construct
  source 1..21: mol_type = other RNA; note = Description of Artificial Sequence: Synthetic oligonucleotide
  modified_base 1: mod_base = OTHER; note = 2'-O-methyluridine-3'-phosphorothioate
  modified_base 2: mod_base = OTHER; note = 2'-O-methylguanosine-3'-phosphorothioate
  modified_base 3: mod_base = OTHER; note = 2'-O-methylguanosine-3'-phosphate
  modified_base 4: mod_base = OTHER; note = 2'-O-methyluridine-3'-phosphate
  modified_base 5: mod_base = OTHER; note = 2'-O-methyluridine-3'-phosphate
  modified_base 6: mod_base = OTHER; note = 2'-O-methylcytidine-3'-phosphate
  modified_base 7: mod_base = OTHER; note = 2'-fluorouridine-3'-phosphate
  modified_base 8: mod_base = OTHER; note = 2'-O-methyluridine-3'-phosphate
  modified_base 9: mod_base = OTHER; note = 2'-fluoroadenosine-3'-phosphate
  modified_base 10: mod_base = OTHER; note = 2'-fluoroadenosine-3'-phosphate
  modified_base 11: mod_base = OTHER; note = 2'-fluoroadenosine-3'-phosphate
  modified_base 12: mod_base = OTHER; note = 2'-O-methyluridine-3'-phosphate
  modified_base 13: mod_base = OTHER; note = 2'-O-methyluridine-3'-phosphate
  modified_base 14: mod_base = OTHER; note = 2'-O-methylguanosine-3'-phosphate
  modified_base 15: mod_base = OTHER; note = 2'-O-methyluridine-3'-phosphate
  modified_base 16: mod_base = OTHER; note = 2'-O-methyladenosine-3'-phosphate
  modified_base 17: mod_base = OTHER; note = 2'-O-methyladenosine-3'-phosphate
  modified_base 18: mod_base = OTHER; note = 2'-O-methylguanosine-3'-phosphate
  modified_base 19: mod_base = OTHER; note = 2'-O-methylcytidine-3'-phosphate
  modified_base 20: mod_base = OTHER; note = 2'-O-methyluridine-3'-phosphate
  modified_base 21: mod_base = OTHER; note = 2'-O-methylcytidine-3'-phosphate N-[tris(GalNAc-alkyl)-amidodecanoyl)]-4-hydroxyprolinol Hyp-(GalNAc-alkyl)3
tggttcttaaattgtaagctc

SEQ ID NO: 2197 - RNA, 23 nt, synthetic construct
  source 1..23: mol_type = other RNA; note = Description of Artificial Sequence: Synthetic oligonucleotide
  modified_base 1: mod_base = OTHER; note = 2'-O-methylguanosine-3'-phosphorothioate
  modified_base 2: mod_base = OTHER; note = 2'-fluoroadenosine-3'-phosphorothioate
  modified_base 3: mod_base = OTHER; note = 2'-O-methylguanosine-3'-phosphate
  modified_base 4: mod_base = OTHER; note = 2'-O-methylcytidine-3'-phosphate
  modified_base 5: mod_base = OTHER; note = 2'-O-methyluridine-3'-phosphate
  modified_base 6: mod_base = OTHER; note = 2'-fluorouridine-3'-phosphate
  modified_base 7: mod_base = OTHER; note = 2'-O-methyladenosine-3'-phosphate
  modified_base 8: mod_base = OTHER; note = 2'-fluorocytidine-3'-phosphate
  modified_base 9: mod_base = OTHER; note = 2'-fluoroadenosine-3'-phosphate
  modified_base 10: mod_base = OTHER; note = 2'-O-methyladenosine-3'-phosphate
  modified_base 11: mod_base = OTHER; note = 2'-O-methyluridine-3'-phosphate
  modified_base 12: mod_base = OTHER; note = 2'-O-methyluridine-3'-phosphate
  modified_base 13: mod_base = OTHER; note = 2'-O-methyluridine-3'-phosphate
  modified_base 14: mod_base = OTHER; note = 2'-fluoroadenosine-3'-phosphate
  modified_base 15: mod_base = OTHER; note = 2'-O-methyladenosine-3'-phosphate
  modified_base 16: mod_base = OTHER; note = 2'-fluoroguanosine-3'-phosphate
  modified_base 17: mod_base = OTHER; note = 2'-O-methyladenosine-3'-phosphate
  modified_base 18: mod_base = OTHER; note = 2'-O-methyladenosine-3'-phosphate
  modified_base 19: mod_base = OTHER; note = 2'-O-methylcytidine-3'-phosphate
  modified_base 20: mod_base = OTHER; note = 2'-O-methylcytidine-3'-phosphate
  modified_base 21: mod_base = OTHER; note = 2'-O-methyladenosine-3'-phosphorothioate
  modified_base 22: mod_base = OTHER; note = 2'-O-methylcytidine-3'-phosphorothioate
  modified_base 23: mod_base = OTHER; note = 2'-O-methyluridine-3'-phosphate
gagcttacaatttaagaaccact

SEQ ID NO: 2198 - RNA, 21 nt, synthetic construct
  source 1..21: mol_type = other RNA; note = Description of Artificial Sequence: Synthetic oligonucleotide
  modified_base 1: mod_base = OTHER; note = 2'-O-methyladenosine-3'-phosphorothioate
  modified_base 2: mod_base = OTHER; note = 2'-O-methyladenosine-3'-phosphorothioate
  modified_base 3: mod_base = OTHER; note = 2'-O-methylcytidine-3'-phosphate
  modified_base 4: mod_base = OTHER; note = 2'-O-methyladenosine-3'-phosphate
  modified_base 5: mod_base = OTHER; note = 2'-O-methylguanosine-3'-phosphate
  modified_base 6: mod_base = OTHER; note = 2'-O-methyluridine-3'-phosphate
  modified_base 7: mod_base = OTHER; note = 2'-fluoroguanosine-3'-phosphate
  modified_base 8: mod_base = OTHER; note = 2'-O-methylguanosine-3'-phosphate
  modified_base 9: mod_base = OTHER; note = 2'-fluorouridine-3'-phosphate
  modified_base 10: mod_base = OTHER; note = 2'-fluorouridine-3'-phosphate
  modified_base 11: mod_base = OTHER; note = 2'-fluorocytidine-3'-phosphate
  modified_base 12: mod_base = OTHER; note = 2'-O-methyluridine-3'-phosphate
  modified_base 13: mod_base = OTHER; note = 2'-O-methyluridine-3'-phosphate
  modified_base 14: mod_base = OTHER; note = 2'-O-methyladenosine-3'-phosphate
  modified_base 15: mod_base = OTHER; note = 2'-O-methyladenosine-3'-phosphate
  modified_base 16: mod_base = OTHER; note = 2'-O-methyladenosine-3'-phosphate
  modified_base 17: mod_base = OTHER; note = 2'-O-methyluridine-3'-phosphate
  modified_base 18: mod_base = OTHER; note = 2'-O-methyluridine-3'-phosphate
  modified_base 19: mod_base = OTHER; note = 2'-O-methylguanosine-3'-phosphate
  modified_base 20: mod_base = OTHER; note = 2'-O-methyluridine-3'-phosphate
  modified_base 21: mod_base = OTHER; note = 2'-O-methyladenosine-3'-phosphate N-[tris(GalNAc-alkyl)-amidodecanoyl)]-4-hydroxyprolinol Hyp-(GalNAc-alkyl)3
aacagtggttcttaaattgta

SEQ ID NO: 2199 - RNA, 23 nt, synthetic construct
  source 1..23: mol_type = other RNA; note = Description of Artificial Sequence: Synthetic oligonucleotide
  modified_base 1: mod_base = OTHER; note = 2'-O-methyluridine-3'-phosphorothioate
  modified_base 2: mod_base = OTHER; note = 2'-fluoroadenosine-3'-phosphorothioate
  modified_base 3: mod_base = OTHER; note = 2'-O-methylcytidine-3'-phosphate
  modified_base 4: mod_base = OTHER; note = 2'-O-methyladenosine-3'-phosphate
  modified_base 5: mod_base = OTHER; note = 2'-O-methyladenosine-3'-phosphate
  modified_base 6: mod_base = OTHER; note = 2'-fluorouridine-3'-phosphate
  modified_base 7: mod_base = OTHER; note = 2'-O-methyluridine-3'-phosphate
  modified_base 8: mod_base = OTHER; note = 2'-fluorouridine-3'-phosphate
  modified_base 9: mod_base = OTHER; note = 2'-fluoroadenosine-3'-phosphate
  modified_base 10: mod_base = OTHER; note = 2'-O-methyladenosine-3'-phosphate
  modified_base 11: mod_base = OTHER; note = 2'-O-methylguanosine-3'-phosphate
  modified_base 12: mod_base = OTHER; note = 2'-O-methyladenosine-3'-phosphate
  modified_base 13: mod_base = OTHER; note = 2'-O-methyladenosine-3'-phosphate
  modified_base 14: mod_base = OTHER; note = 2'-fluorocytidine-3'-phosphate
  modified_base 15: mod_base = OTHER; note = 2'-O-methylcytidine-3'-phosphate
  modified_base 16: mod_base = OTHER; note = 2'-fluoroadenosine-3'-phosphate
  modified_base 17: mod_base = OTHER; note = 2'-O-methylcytidine-3'-phosphate
  modified_base 18: mod_base = OTHER; note = 2'-O-methyluridine-3'-phosphate
  modified_base 19: mod_base = OTHER; note = 2'-O-methylguanosine-3'-phosphate
  modified_base 20: mod_base = OTHER; note = 2'-O-methyluridine-3'-phosphate
  modified_base 21: mod_base = OTHER; note = 2'-O-methyluridine-3'-phosphorothioate
  modified_base 22: mod_base = OTHER; note = 2'-O-methyluridine-3'-phosphorothioate
  modified_base 23: mod_base = OTHER; note = 2'-O-methyluridine-3'-phosphate
tacaatttaagaaccactgtttt

SEQ ID NO: 2200 - RNA, 21 nt, synthetic construct
  source 1..21: mol_type = other RNA; note = Description of Artificial Sequence: Synthetic oligonucleotide
  modified_base 1: mod_base = OTHER; note = 2'-O-methyladenosine-3'-phosphorothioate
  modified_base 2: mod_base = OTHER; note = 2'-O-methyladenosine-3'-phosphorothioate
  modified_base 3: mod_base = OTHER; note = 2'-O-methyladenosine-3'-phosphate
  modified_base 4: mod_base = OTHER; note = 2'-O-methylcytidine-3'-phosphate
  modified_base 5: mod_base = OTHER; note = 2'-O-methyladenosine-3'-phosphate
  modified_base 6: mod_base = OTHER; note = 2'-O-methylguanosine-3'-phosphate
  modified_base 7: mod_base = OTHER; note = 2'-fluorouridine-3'-phosphate
  modified_base 8: mod_base = OTHER; note = 2'-O-methylguanosine-3'-phosphate
  modified_base 9: mod_base = OTHER; note = 2'-fluoroguanosine-3'-phosphate
  modified_base 10: mod_base = OTHER; note = 2'-fluorouridine-3'-phosphate
  modified_base 11: mod_base = OTHER; note = 2'-fluorouridine-3'-phosphate
  modified_base 12: mod_base = OTHER; note = 2'-O-methylcytidine-3'-phosphate
  modified_base 13: mod_base = OTHER; note = 2'-O-methyluridine-3'-phosphate
  modified_base 14: mod_base = OTHER; note = 2'-O-methyluridine-3'-phosphate
  modified_base 15: mod_base = OTHER; note = 2'-O-methyladenosine-3'-phosphate
  modified_base 16: mod_base = OTHER; note = 2'-O-methyladenosine-3'-phosphate
  modified_base 17: mod_base = OTHER; note = 2'-O-methyladenosine-3'-phosphate
  modified_base 18: mod_base = OTHER; note = 2'-O-methyluridine-3'-phosphate
  modified_base 19: mod_base = OTHER; note = 2'-O-methyluridine-3'-phosphate
  modified_base 20: mod_base = OTHER; note = 2'-O-methylguanosine-3'-phosphate
  modified_base 21: mod_base = OTHER; note = 2'-O-methyluridine-3'-phosphate N-[tris(GalNAc-alkyl)-amidodecanoyl)]-4-hydroxyprolinol Hyp-(GalNAc-alkyl)3
aaacagtggttcttaaattgt

SEQ ID NO: 2201 - RNA, 23 nt, synthetic construct
  source 1..23: mol_type = other RNA; note = Description of Artificial Sequence: Synthetic oligonucleotide
  modified_base 1: mod_base = OTHER; note = 2'-O-methyladenosine-3'-phosphorothioate
  modified_base 2: mod_base = OTHER; note = 2'-fluorocytidine-3'-phosphorothioate
  modified_base 3: mod_base = OTHER; note = 2'-O-methyladenosine-3'-phosphate
  modified_base 4: mod_base = OTHER; note = 2'-O-methyladenosine-3'-phosphate
  modified_base 5: mod_base = OTHER; note = 2'-O-methyluridine-3'-phosphate
  modified_base 6: mod_base = OTHER; note = 2'-fluorouridine-3'-phosphate
  modified_base 7: mod_base = OTHER; note = 2'-O-methyluridine-3'-phosphate
  modified_base 8: mod_base = OTHER; note = 2'-fluoroadenosine-3'-phosphate
  modified_base 9: mod_base = OTHER; note = 2'-fluoroadenosine-3'-phosphate
  modified_base 10: mod_base = OTHER; note = 2'-O-methylguanosine-3'-phosphate
  modified_base 11: mod_base = OTHER; note = 2'-O-methyladenosine-3'-phosphate
  modified_base 12: mod_base = OTHER; note = 2'-O-methyladenosine-3'-phosphate
  modified_base 13: mod_base = OTHER; note = 2'-O-methylcytidine-3'-phosphate
  modified_base 14: mod_base = OTHER; note = 2'-fluorocytidine-3'-phosphate
  modified_base 15: mod_base = OTHER; note = 2'-O-methyladenosine-3'-phosphate
  modified_base 16: mod_base = OTHER; note = 2'-fluorocytidine-3'-phosphate
  modified_base 17: mod_base = OTHER; note = 2'-O-methyluridine-3'-phosphate
  modified_base 18: mod_base = OTHER; note = 2'-O-methylguanosine-3'-phosphate
  modified_base 19: mod_base = OTHER; note = 2'-O-methyluridine-3'-phosphate
  modified_base 20: mod_base = OTHER; note = 2'-O-methyluridine-3'-phosphate
  modified_base 21: mod_base = OTHER; note = 2'-O-methyluridine-3'-phosphorothioate
  modified_base 22: mod_base = OTHER; note = 2'-O-methyluridine-3'-phosphorothioate
  modified_base 23: mod_base = OTHER; note = 2'-O-methyladenosine-3'-phosphate
acaatttaagaaccactgtttta

SEQ ID NO: 2202 - RNA, 21 nt, synthetic construct
  source 1..21: mol_type = other RNA; note = Description of Artificial Sequence: Synthetic oligonucleotide
  modified_base 1: mod_base = OTHER; note = 2'-O-methyladenosine-3'-phosphorothioate
  modified_base 2: mod_base = OTHER; note = 2'-O-methyladenosine-3'-phosphorothioate
  modified_base 3: mod_base = OTHER; note = 2'-O-methylguanosine-3'-phosphate
  modified_base 4: mod_base = OTHER; note = 2'-O-methyluridine-3'-phosphate
  modified_base 5: mod_base = OTHER; note = 2'-O-methylcytidine-3'-phosphate
  modified_base 6: mod_base = OTHER; note = 2'-O-methyladenosine-3'-phosphate
  modified_base 7: mod_base = OTHER; note = 2'-fluorouridine-3'-phosphate
  modified_base 8: mod_base = OTHER; note = 2'-O-methylcytidine-3'-phosphate
  modified_base 9: mod_base = OTHER; note = 2'-fluoroguanosine-3'-phosphate
  modified_base 10: mod_base = OTHER; note = 2'-fluoroadenosine-3'-phosphate
  modified_base 11: mod_base = OTHER; note = 2'-fluorocytidine-3'-phosphate
  modified_base 12: mod_base = OTHER; note = 2'-O-methyladenosine-3'-phosphate
  modified_base 13: mod_base = OTHER; note = 2'-O-methyladenosine-3'-phosphate
  modified_base 14: mod_base = OTHER; note = 2'-O-methylguanosine-3'-phosphate
  modified_base 15: mod_base = OTHER; note = 2'-O-methyladenosine-3'-phosphate
  modified_base 16: mod_base = OTHER; note = 2'-O-methylcytidine-3'-phosphate
  modified_base 17: mod_base = OTHER; note = 2'-O-methyladenosine-3'-phosphate
  modified_base 18: mod_base = OTHER; note = 2'-O-methyluridine-3'-phosphate
  modified_base 19: mod_base = OTHER; note = 2'-O-methyluridine-3'-phosphate
  modified_base 20: mod_base = OTHER; note = 2'-O-methylguanosine-3'-phosphate
  modified_base 21: mod_base = OTHER; note = 2'-O-methylguanosine-3'-phosphate N-[tris(GalNAc-alkyl)-amidodecanoyl)]-4-hydroxyprolinol Hyp-(GalNAc-alkyl)3
aagtcatcgacaagacattgg

SEQ ID NO: 2203 - RNA, 23 nt, synthetic construct
  source 1..23: mol_type = other RNA; note = Description of Artificial Sequence: Synthetic oligonucleotide
  modified_base 1: mod_base = OTHER; note = 2'-O-methylcytidine-3'-phosphorothioate
  modified_base 2: mod_base = OTHER; note = 2'-fluorocytidine-3'-phosphorothioate
  modified_base 3: mod_base = OTHER; note = 2'-O-methyladenosine-3'-phosphate
  modified_base 4: mod_base = OTHER; note = 2'-O-methyladenosine-3'-phosphate
  modified_base 5: mod_base = OTHER; note = 2'-O-methyluridine-3'-phosphate
  modified_base 6: mod_base = OTHER; note = 2'-fluoroguanosine-3'-phosphate
  modified_base 7: mod_base = OTHER; note = 2'-O-methyluridine-3'-phosphate
  modified_base 8: mod_base = OTHER; note = 2'-fluorocytidine-3'-phosphate
  modified_base 9: mod_base = OTHER; note = 2'-fluorouridine-3'-phosphate
  modified_base 10: mod_base = OTHER; note = 2'-O-methyluridine-3'-phosphate
  modified_base 11: mod_base = OTHER; note = 2'-O-methylguanosine-3'-phosphate
  modified_base 12: mod_base = OTHER; note = 2'-O-methyluridine-3'-phosphate
  modified_base 13: mod_base = OTHER; note = 2'-O-methylcytidine-3'-phosphate
  modified_base 14: mod_base = OTHER; note = 2'-fluoroguanosine-3'-phosphate
  modified_base 15: mod_base = OTHER; note = 2'-O-methyladenosine-3'-phosphate
  modified_base 16: mod_base = OTHER; note = 2'-fluorouridine-3'-phosphate
  modified_base 17: mod_base = OTHER; note = 2'-O-methylguanosine-3'-phosphate
  modified_base 18: mod_base = OTHER; note = 2'-O-methyladenosine-3'-phosphate
  modified_base 19: mod_base = OTHER; note = 2'-O-methylcytidine-3'-phosphate
  modified_base 20: mod_base = OTHER; note = 2'-O-methyluridine-3'-phosphate
  modified_base 21: mod_base = OTHER; note = 2'-O-methyluridine-3'-phosphorothioate
  modified_base 22: mod_base = OTHER; note = 2'-O-methyluridine-3'-phosphorothioate
  modified_base 23: mod_base = OTHER; note = 2'-O-methylcytidine-3'-phosphate
ccaatgtcttgtcgatgactttc

SEQ ID NO: 2204 - RNA, 21 nt, synthetic construct
  source 1..21: mol_type = other RNA; note = Description of Artificial Sequence: Synthetic oligonucleotide
  modified_base 1: mod_base = OTHER; note = 2'-O-methyladenosine-3'-phosphorothioate
  modified_base 2: mod_base = OTHER; note = 2'-O-methylguanosine-3'-phosphorothioate
  modified_base 3: mod_base = OTHER; note = 2'-O-methyluridine-3'-phosphate
  modified_base 4: mod_base = OTHER; note = 2'-O-methylcytidine-3'-phosphate
  modified_base 5: mod_base = OTHER; note = 2'-O-methyladenosine-3'-phosphate
  modified_base 6: mod_base = OTHER; note = 2'-O-methyluridine-3'-phosphate
  modified_base 7: mod_base = OTHER; note = 2'-fluorocytidine-3'-phosphate
  modified_base 8: mod_base = OTHER; note = 2'-O-methylguanosine-3'-phosphate
  modified_base 9: mod_base = OTHER; note = 2'-fluoroadenosine-3'-phosphate
  modified_base 10: mod_base = OTHER; note = 2'-fluorocytidine-3'-phosphate
  modified_base 11: mod_base = OTHER; note = 2'-fluoroadenosine-3'-phosphate
  modified_base 12: mod_base = OTHER; note = 2'-O-methyladenosine-3'-phosphate
  modified_base 13: mod_base = OTHER; note = 2'-O-methylguanosine-3'-phosphate
  modified_base 14: mod_base = OTHER; note = 2'-O-methyladenosine-3'-phosphate
  modified_base 15: mod_base = OTHER; note = 2'-O-methylcytidine-3'-phosphate
  modified_base 16: mod_base = OTHER; note = 2'-O-methyladenosine-3'-phosphate
  modified_base 17: mod_base = OTHER; note = 2'-O-methyluridine-3'-phosphate
  modified_base 18: mod_base = OTHER; note = 2'-O-methyluridine-3'-phosphate
  modified_base 19: mod_base = OTHER; note = 2'-O-methylguanosine-3'-phosphate
  modified_base 20: mod_base = OTHER; note = 2'-O-methylguanosine-3'-phosphate
  modified_base 21: mod_base = OTHER; note = 2'-O-methyluridine-3'-phosphate N-[tris(GalNAc-alkyl)-amidodecanoyl)]-4-hydroxyprolinol Hyp-(GalNAc-alkyl)3
agtcatcgacaagacattggt

SEQ ID NO: 2205 - RNA, 23 nt, synthetic construct
  source 1..23: mol_type = other RNA; note = Description of Artificial Sequence: Synthetic oligonucleotide
  modified_base 1: mod_base = OTHER; note = 2'-O-methyladenosine-3'-phosphorothioate
  modified_base 2: mod_base = OTHER; note = 2'-fluorocytidine-3'-phosphorothioate
  modified_base 3: mod_base = OTHER; note = 2'-O-methylcytidine-3'-phosphate
  modified_base 4: mod_base = OTHER; note = 2'-O-methyladenosine-3'-phosphate
  modified_base 5: mod_base = OTHER; note = 2'-O-methyladenosine-3'-phosphate
  modified_base 6: mod_base = OTHER; note = 2'-fluorouridine-3'-phosphate
  modified_base 7: mod_base = OTHER; note = 2'-O-methylguanosine-3'-phosphate
  modified_base 8: mod_base = OTHER; note = 2'-fluorouridine-3'-phosphate
  modified_base 9: mod_base = OTHER; note = 2'-fluorocytidine-3'-phosphate
  modified_base 10: mod_base = OTHER; note = 2'-O-methyluridine-3'-phosphate
  modified_base 11: mod_base = OTHER; note = 2'-O-methyluridine-3'-phosphate
  modified_base 12: mod_base = OTHER; note = 2'-O-methylguanosine-3'-phosphate
  modified_base 13: mod_base = OTHER; note = 2'-O-methyluridine-3'-phosphate
  modified_base 14: mod_base = OTHER; note = 2'-fluorocytidine-3'-phosphate
  modified_base 15: mod_base = OTHER; note = 2'-O-methylguanosine-3'-phosphate
  modified_base 16: mod_base = OTHER; note = 2'-fluoroadenosine-3'-phosphate
  modified_base 17: mod_base = OTHER; note = 2'-O-methyluridine-3'-phosphate
  modified_base 18: mod_base = OTHER; note = 2'-O-methylguanosine-3'-phosphate
  modified_base 19: mod_base = OTHER; note = 2'-O-methyladenosine-3'-phosphate
  modified_base 20: mod_base = OTHER; note = 2'-O-methylcytidine-3'-phosphate
  modified_base 21: mod_base = OTHER; note = 2'-O-methyluridine-3'-phosphorothioate
  modified_base 22: mod_base = OTHER; note = 2'-O-methyluridine-3'-phosphorothioate
  modified_base 23: mod_base = OTHER; note = 2'-O-methyluridine-3'-phosphate
accaatgtcttgtcgatgacttt

SEQ ID NO: 2206 - RNA, 21 nt, synthetic construct
  source 1..21: mol_type = other RNA; note = Description of Artificial Sequence: Synthetic oligonucleotide
  modified_base 1: mod_base = OTHER; note = 2'-O-methylguanosine-3'-phosphorothioate
  modified_base 2: mod_base = OTHER; note = 2'-O-methyluridine-3'-phosphorothioate
  modified_base 3: mod_base = OTHER; note = 2'-O-methylguanosine-3'-phosphate
  modified_base 4: mod_base = OTHER; note = 2'-O-methyladenosine-3'-phosphate
  modified_base 5: mod_base = OTHER; note = 2'-O-methyladenosine-3'-phosphate
  modified_base 6: mod_base = OTHER; note = 2'-O-methyladenosine-3'-phosphate
  modified_base 7: mod_base = OTHER; note = 2'-fluoroguanosine-3'-phosphate
  modified_base 8: mod_base = OTHER; note = 2'-O-methyluridine-3'-phosphate
  modified_base 9: mod_base = OTHER; note = 2'-fluorocytidine-3'-phosphate
  modified_base 10: mod_base = OTHER; note = 2'-fluoroadenosine-3'-phosphate
  modified_base 11: mod_base = OTHER; note = 2'-fluorouridine-3'-phosphate
  modified_base 12: mod_base = OTHER; note = 2'-O-methylcytidine-3'-phosphate
  modified_base 13: mod_base = OTHER; note = 2'-O-methylguanosine-3'-phosphate
  modified_base 14: mod_base = OTHER; note = 2'-O-methyladenosine-3'-phosphate
  modified_base 15: mod_base = OTHER; note = 2'-O-methylcytidine-3'-phosphate
  modified_base 16: mod_base = OTHER; note = 2'-O-methyladenosine-3'-phosphate
  modified_base 17: mod_base = OTHER; note = 2'-O-methyladenosine-3'-phosphate
  modified_base 18: mod_base = OTHER; note = 2'-O-methylguanosine-3'-phosphate
  modified_base 19: mod_base = OTHER; note = 2'-O-methyladenosine-3'-phosphate
  modified_base 20: mod_base = OTHER; note = 2'-O-methylcytidine-3'-phosphate
  modified_base 21: mod_base = OTHER; note = 2'-O-methyladenosine-3'-phosphate N-[tris(GalNAc-alkyl)-amidodecanoyl)]-4-hydroxyprolinol Hyp-(GalNAc-alkyl)3
gtgaaagtcatcgacaagaca

SEQ ID NO: 2207 - RNA, 23 nt, synthetic construct
  source 1..23: mol_type = other RNA; note = Description of Artificial Sequence: Synthetic oligonucleotide
  modified_base 1: mod_base = OTHER; note = 2'-O-methyluridine-3'-phosphorothioate
  modified_base 2: mod_base = OTHER; note = 2'-fluoroguanosine-3'-phosphorothioate
  modified_base 3: mod_base = OTHER; note = 2'-O-methyluridine-3'-phosphate
  modified_base 4: mod_base = OTHER; note = 2'-O-methylcytidine-3'-phosphate
  modified_base 5: mod_base = OTHER; note = 2'-O-methyluridine-3'-phosphate
  modified_base 6: mod_base = OTHER; note = 2'-fluorouridine-3'-phosphate
  modified_base 7: mod_base = OTHER; note = 2'-O-methylguanosine-3'-phosphate
  modified_base 8: mod_base = OTHER; note = 2'-fluorouridine-3'-phosphate
  modified_base 9: mod_base = OTHER; note = 2'-fluorocytidine-3'-phosphate
  modified_base 10: mod_base = OTHER; note = 2'-O-methylguanosine-3'-phosphate
  modified_base 11: mod_base = OTHER; note = 2'-O-methyladenosine-3'-phosphate
  modified_base 12: mod_base = OTHER; note = 2'-O-methyluridine-3'-phosphate
  modified_base 13: mod_base = OTHER; note = 2'-O-methylguanosine-3'-phosphate
  modified_base 14: mod_base = OTHER; note = 2'-fluoroadenosine-3'-phosphate
  modified_base 15: mod_base = OTHER; note = 2'-O-methylcytidine-3'-phosphate
  modified_base 16: mod_base = OTHER; note = 2'-fluorouridine-3'-phosphate
  modified_base 17: mod_base = OTHER; note = 2'-O-methyluridine-3'-phosphate
  modified_base 18: mod_base = OTHER; note = 2'-O-methyluridine-3'-phosphate
  modified_base 19: mod_base = OTHER; note = 2'-O-methylcytidine-3'-phosphate
  modified_base 20: mod_base = OTHER; note = 2'-O-methyladenosine-3'-phosphate
  modified_base 21: mod_base = OTHER; note = 2'-O-methylcytidine-3'-phosphorothioate
  modified_base 22: mod_base = OTHER; note = 2'-O-methyladenosine-3'-phosphorothioate
  modified_base 23: mod_base = OTHER; note = 2'-O-methyluridine-3'-phosphate
tgtcttgtcgatgactttcacat

SEQ ID NO: 2208 - RNA, 21 nt, synthetic construct
  source 1..21: mol_type = other RNA; note = Description of Artificial Sequence: Synthetic oligonucleotide
  modified_base 1: mod_base = OTHER; note = 2'-O-methyluridine-3'-phosphorothioate
  modified_base 2: mod_base = OTHER; note = 2'-O-methylguanosine-3'-phosphorothioate
  modified_base 3: mod_base = OTHER; note = 2'-O-methyluridine-3'-phosphate
  modified_base 4: mod_base = OTHER; note = 2'-O-methylguanosine-3'-phosphate
  modified_base 5: mod_base = OTHER; note = 2'-O-methyladenosine-3'-phosphate
  modified_base 6: mod_base = OTHER; note = 2'-O-methyladenosine-3'-phosphate
  modified_base 7: mod_base = OTHER; note = 2'-fluoroadenosine-3'-phosphate
  modified_base 8: mod_base = OTHER; note = 2'-O-methylguanosine-3'-phosphate
  modified_base 9: mod_base = OTHER; note = 2'-fluorouridine-3'-phosphate
  modified_base 10: mod_base = OTHER; note = 2'-fluorocytidine-3'-phosphate
  modified_base 11: mod_base = OTHER; note = 2'-fluoroadenosine-3'-phosphate
  modified_base 12: mod_base = OTHER; note = 2'-O-methyluridine-3'-phosphate
  modified_base 13: mod_base = OTHER; note = 2'-O-methylcytidine-3'-phosphate
  modified_base 14: mod_base = OTHER; note = 2'-O-methylguanosine-3'-phosphate
  modified_base 15: mod_base = OTHER; note = 2'-O-methyladenosine-3'-phosphate
  modified_base 16: mod_base = OTHER; note = 2'-O-methylcytidine-3'-phosphate
  modified_base 17: mod_base = OTHER; note = 2'-O-methyladenosine-3'-phosphate
  modified_base 18: mod_base = OTHER; note = 2'-O-methyladenosine-3'-phosphate
  modified_base 19: mod_base = OTHER; note = 2'-O-methylguanosine-3'-phosphate
  modified_base 20: mod_base = OTHER; note = 2'-O-methyladenosine-3'-phosphate
  modified_base 21: mod_base = OTHER; note = 2'-O-methylcytidine-3'-phosphate N-[tris(GalNAc-alkyl)-amidodecanoyl)]-4-hydroxyprolinol Hyp-(GalNAc-alkyl)3
tgtgaaagtcatcgacaagac

SEQ ID NO: 2209 - RNA, 23 nt, synthetic construct
  source 1..23: mol_type = other RNA; note = Description of Artificial Sequence: Synthetic oligonucleotide
  modified_base 1: mod_base = OTHER; note = 2'-O-methylguanosine-3'-phosphorothioate
  modified_base 2: mod_base = OTHER; note = 2'-fluorouridine -3'-phosphorothioate
  modified_base 3: mod_base = OTHER; note = 2'-O-methylcytidine-3'-phosphate
  modified_base 4: mod_base = OTHER; note = 2'-O-methyluridine-3'-phosphate
  modified_base 5: mod_base = OTHER; note = 2'-O-methyluridine-3'-phosphate
  modified_base 6: mod_base = OTHER; note = 2'-fluoroguanosine-3'-phosphate
  modified_base 7: mod_base = OTHER; note = 2'-O-methyluridine-3'-phosphate
  modified_base 8: mod_base = OTHER; note = 2'-fluorocytidine-3'-phosphate
  modified_base 9: mod_base = OTHER; note = 2'-fluoroguanosine-3'-phosphate
  modified_base 10: mod_base = OTHER; note = 2'-O-methyladenosine-3'-phosphate
  modified_base 11: mod_base = OTHER; note = 2'-O-methyluridine-3'-phosphate
  modified_base 12: mod_base = OTHER; note = 2'-O-methylguanosine-3'-phosphate
  modified_base 13: mod_base = OTHER; note = 2'-O-methyladenosine-3'-phosphate
  modified_base 14: mod_base = OTHER; note = 2'-fluorocytidine-3'-phosphate
  modified_base 15: mod_base = OTHER; note = 2'-O-methyluridine-3'-phosphate
  modified_base 16: mod_base = OTHER; note = 2'-fluorouridine-3'-phosphate
  modified_base 17: mod_base = OTHER; note = 2'-O-methyluridine-3'-phosphate
  modified_base 18: mod_base = OTHER; note = 2'-O-methylcytidine-3'-phosphate
  modified_base 19: mod_base = OTHER; note = 2'-O-methyladenosine-3'-phosphate
  modified_base 20: mod_base = OTHER; note = 2'-O-methylcytidine-3'-phosphate
  modified_base 21: mod_base = OTHER; note = 2'-O-methyladenosine-3'-phosphorothioate
  modified_base 22: mod_base = OTHER; note = 2'-O-methyluridine-3'-phosphorothioate
  modified_base 23: mod_base = OTHER; note = 2'-O-methyluridine-3'-phosphate
gtcttgtcgatgactttcacatt

SEQ ID NO: 2210 - RNA, 21 nt, synthetic construct
  source 1..21: mol_type = other RNA; note = Description of Artificial Sequence: Synthetic oligonucleotide
  modified_base 1: mod_base = OTHER; note = 2'-O-methylguanosine-3'-phosphorothioate
  modified_base 2: mod_base = OTHER; note = 2'-O-methyladenosine-3'-phosphorothioate
  modified_base 3: mod_base = OTHER; note = 2'-O-methyluridine-3'-phosphate
  modified_base 4: mod_base = OTHER; note = 2'-O-methyladenosine-3'-phosphate
  modified_base 5: mod_base = OTHER; note = 2'-O-methyladenosine-3'-phosphate
  modified_base 6: mod_base = OTHER; note = 2'-O-methyluridine-3'-phosphate
  modified_base 7: mod_base = OTHER; note = 2'-fluoroadenosine-3'-phosphate
  modified_base 8: mod_base = OTHER; note = 2'-O-methyluridine-3'-phosphate
  modified_base 9: mod_base = OTHER; note = 2'-fluorouridine-3'-phosphate
  modified_base 10: mod_base = OTHER; note = 2'-fluoroguanosine-3'-phosphate
  modified_base 11: mod_base = OTHER; note = 2'-fluorocytidine-3'-phosphate
  modified_base 12: mod_base = OTHER; note = 2'-O-methyladenosine-3'-phosphate
  modified_base 13: mod_base = OTHER; note = 2'-O-methylguanosine-3'-phosphate
  modified_base 14: mod_base = OTHER; note = 2'-O-methylcytidine-3'-phosphate
  modified_base 15: mod_base = OTHER; note = 2'-O-methyladenosine-3'-phosphate
  modified_base 16: mod_base = OTHER; note = 2'-O-methyluridine-3'-phosphate
  modified_base 17: mod_base = OTHER; note = 2'-O-methyluridine-3'-phosphate
  modified_base 18: mod_base = OTHER; note = 2'-O-methyluridine-3'-phosphate
  modified_base 19: mod_base = OTHER; note = 2'-O-methyluridine-3'-phosphate
  modified_base 20: mod_base = OTHER; note = 2'-O-methylcytidine-3'-phosphate
  modified_base 21: mod_base = OTHER; note = 2'-O-methylcytidine-3'-phosphate N-[tris(GalNAc-alkyl)-amidodecanoyl)]-4-hydroxyprolinol Hyp-(GalNAc-alkyl)3
gataatattgcagcattttcc

SEQ ID NO: 2211 - RNA, 23 nt, synthetic construct
  source 1..23: mol_type = other RNA; note = Description of Artificial Sequence: Synthetic oligonucleotide
  modified_base 1: mod_base = OTHER; note = 2'-O-methylguanosine-3'-phosphorothioate
  modified_base 2: mod_base = OTHER; note = 2'-fluoroguanosine-3'-phosphorothioate
  modified_base 3: mod_base = OTHER; note = 2'-O-methyladenosine-3'-phosphate
  modified_base 4: mod_base = OTHER; note = 2'-O-methyladenosine-3'-phosphate
  modified_base 5: mod_base = OTHER; note = 2'-O-methyladenosine-3'-phosphate
  modified_base 6: mod_base = OTHER; note = 2'-fluoroadenosine-3'-phosphate
  modified_base 7: mod_base = OTHER; note = 2'-O-methyluridine-3'-phosphate
  modified_base 8: mod_base = OTHER; note = 2'-fluoroguanosine-3'-phosphate
  modified_base 9: mod_base = OTHER; note = 2'-fluorocytidine-3'-phosphate
  modified_base 10: mod_base = OTHER; note = 2'-O-methyluridine-3'-phosphate
  modified_base 11: mod_base = OTHER; note = 2'-O-methylguanosine-3'-phosphate
  modified_base 12: mod_base = OTHER; note = 2'-O-methylcytidine-3'-phosphate
  modified_base 13: mod_base = OTHER; note = 2'-O-methyladenosine-3'-phosphate
  modified_base 14: mod_base = OTHER; note = 2'-fluoroadenosine-3'-phosphate
  modified_base 15: mod_base = OTHER; note = 2'-O-methyluridine-3'-phosphate
  modified_base 16: mod_base = OTHER; note = 2'-fluoroadenosine-3'-phosphate
  modified_base 17: mod_base = OTHER; note = 2'-O-methyluridine-3'-phosphate
  modified_base 18: mod_base = OTHER; note = 2'-O-methyluridine-3'-phosphate
  modified_base 19: mod_base = OTHER; note = 2'-O-methyladenosine-3'-phosphate
  modified_base 20: mod_base = OTHER; note = 2'-O-methyluridine-3'-phosphate
  modified_base 21: mod_base = OTHER; note = 2'-O-methylcytidine-3'-phosphorothioate
  modified_base 22: mod_base = OTHER; note = 2'-O-methyladenosine-3'-phosphorothioate
  modified_base 23: mod_base = OTHER; note = 2'-O-methylguanosine-3'-phosphate
ggaaaatgctgcaatattatcag

SEQ ID NO: 2212 - RNA, 21 nt, synthetic construct
  source 1..21: mol_type = other RNA; note = Description of Artificial Sequence: Synthetic oligonucleotide
  modified_base 1: mod_base = OTHER; note = 2'-O-methyladenosine-3'-phosphorothioate
  modified_base 2: mod_base = OTHER; note = 2'-O-methyluridine-3'-phosphorothioate
  modified_base 3: mod_base = OTHER; note = 2'-O-methyladenosine-3'-phosphate
  modified_base 4: mod_base = OTHER; note = 2'-O-methyladenosine-3'-phosphate
  modified_base 5: mod_base = OTHER; note = 2'-O-methyluridine-3'-phosphate
  modified_base 6: mod_base = OTHER; note = 2'-O-methyladenosine-3'-phosphate
  modified_base 7: mod_base = OTHER; note = 2'-fluorouridine-3'-phosphate
  modified_base 8: mod_base = OTHER; note = 2'-O-methyluridine-3'-phosphate
  modified_base 9: mod_base = OTHER; note = 2'-fluoroguanosine-3'-phosphate
  modified_base 10: mod_base = OTHER; note = 2'-fluorocytidine-3'-phosphate
  modified_base 11: mod_base = OTHER; note = 2'-fluoroadenosine-3'-phosphate
  modified_base 12: mod_base = OTHER; note = 2'-O-methylguanosine-3'-phosphate
  modified_base 13: mod_base = OTHER; note = 2'-O-methylcytidine-3'-phosphate
  modified_base 14: mod_base = OTHER; note = 2'-O-methyladenosine-3'-phosphate
  modified_base 15: mod_base = OTHER; note = 2'-O-methyluridine-3'-phosphate
  modified_base 16: mod_base = OTHER; note = 2'-O-methyluridine-3'-phosphate
  modified_base 17: mod_base = OTHER; note = 2'-O-methyluridine-3'-phosphate
  modified_base 18: mod_base = OTHER; note = 2'-O-methyluridine-3'-phosphate
  modified_base 19: mod_base = OTHER; note = 2'-O-methylcytidine-3'-phosphate
  modified_base 20: mod_base = OTHER; note = 2'-O-methylcytidine-3'-phosphate
  modified_base 21: mod_base = OTHER; note = 2'-O-methyladenosine-3'-phosphate N-[tris(GalNAc-alkyl)-amidodecanoyl)]-4-hydroxyprolinol Hyp-(GalNAc-alkyl)3
ataatattgcagcattttcca

SEQ ID NO: 2213 - RNA, 23 nt, synthetic construct
  source 1..23: mol_type = other RNA; note = Description of Artificial Sequence: Synthetic oligonucleotide
  modified_base 1: mod_base = OTHER; note = 2'-O-methyluridine-3'-phosphorothioate
  modified_base 2: mod_base = OTHER; note = 2'-fluoroguanosine-3'-phosphorothioate
  modified_base 3: mod_base = OTHER; note = 2'-O-methylguanosine-3'-phosphate
  modified_base 4: mod_base = OTHER; note = 2'-O-methyladenosine-3'-phosphate
  modified_base 5: mod_base = OTHER; note = 2'-O-methyladenosine-3'-phosphate
  modified_base 6: mod_base = OTHER; note = 2'-fluoroadenosine-3'-phosphate
  modified_base 7: mod_base = OTHER; note = 2'-O-methyladenosine-3'-phosphate
  modified_base 8: mod_base = OTHER; note = 2'-fluorouridine-3'-phosphate
  modified_base 9: mod_base = OTHER; note = 2'-fluoroguanosine-3'-phosphate
  modified_base 10: mod_base = OTHER; note = 2'-O-methylcytidine-3'-phosphate
  modified_base 11: mod_base = OTHER; note = 2'-O-methyluridine-3'-phosphate
  modified_base 12: mod_base = OTHER; note = 2'-O-methylguanosine-3'-phosphate
  modified_base 13: mod_base = OTHER; note = 2'-O-methylcytidine-3'-phosphate
  modified_base 14: mod_base = OTHER; note = 2'-fluoroadenosine-3'-phosphate
  modified_base 15: mod_base = OTHER; note = 2'-O-methyladenosine-3'-phosphate
  modified_base 16: mod_base = OTHER; note = 2'-fluorouridine-3'-phosphate
  modified_base 17: mod_base = OTHER; note = 2'-O-methyladenosine-3'-phosphate
  modified_base 18: mod_base = OTHER; note = 2'-O-methyluridine-3'-phosphate
  modified_base 19: mod_base = OTHER; note = 2'-O-methyluridine-3'-phosphate
  modified_base 20: mod_base = OTHER; note = 2'-O-methyladenosine-3'-phosphate
  modified_base 21: mod_base = OTHER; note = 2'-O-methyluridine-3'-phosphorothioate
  modified_base 22: mod_base = OTHER; note = 2'-O-methylcytidine-3'-phosphorothioate
  modified_base 23: mod_base = OTHER; note = 2'-O-methyladenosine-3'-phosphate
tggaaaatgctgcaatattatca

SEQ ID NO: 2214 - RNA, 21 nt, synthetic construct
  source 1..21: mol_type = other RNA; note = Description of Artificial Sequence: Synthetic oligonucleotide
  modified_base 1: mod_base = OTHER; note = 2'-O-methylguanosine-3'-phosphorothioate
  modified_base 2: mod_base = OTHER; note = 2'-O-methylguanosine-3'-phosphorothioate
  modified_base 3: mod_base = OTHER; note = 2'-O-methylcytidine-3'-phosphate
  modified_base 4: mod_base = OTHER; note = 2'-O-methyluridine-3'-phosphate
  modified_base 5: mod_base = OTHER; note = 2'-O-methylguanosine-3'-phosphate
  modified_base 6: mod_base = OTHER; note = 2'-O-methyladenosine-3'-phosphate
  modified_base 7: mod_base = OTHER; note = 2'-fluorouridine-3'-phosphate
  modified_base 8: mod_base = OTHER; note = 2'-O-methyladenosine-3'-phosphate
  modified_base 9: mod_base = OTHER; note = 2'-fluoroadenosine-3'-phosphate
  modified_base 10: mod_base = OTHER; note = 2'-fluorouridine-3'-phosphate
  modified_base 11: mod_base = OTHER; note = 2'-fluoroadenosine-3'-phosphate
  modified_base 12: mod_base = OTHER; note = 2'-O-methyluridine-3'-phosphate
  modified_base 13: mod_base = OTHER; note = 2'-O-methyluridine-3'-phosphate
  modified_base 14: mod_base = OTHER; note = 2'-O-methylguanosine-3'-phosphate
  modified_base 15: mod_base = OTHER; note = 2'-O-methylcytidine-3'-phosphate
  modified_base 16: mod_base = OTHER; note = 2'-O-methyladenosine-3'-phosphate
  modified_base 17: mod_base = OTHER; note = 2'-O-methylguanosine-3'-phosphate
  modified_base 18: mod_base = OTHER; note = 2'-O-methylcytidine-3'-phosphate
  modified_base 19: mod_base = OTHER; note = 2'-O-methyladenosine-3'-phosphate
  modified_base 20: mod_base = OTHER; note = 2'-O-methyluridine-3'-phosphate
  modified_base 21: mod_base = OTHER; note = 2'-O-methyluridine-3'-phosphate N-[tris(GalNAc-alkyl)-amidodecanoyl)]-4-hydroxyprolinol Hyp-(GalNAc-alkyl)3
ggctgataatattgcagcatt

SEQ ID NO: 2215 - RNA, 23 nt, synthetic construct
  source 1..23: mol_type = other RNA; note = Description of Artificial Sequence: Synthetic oligonucleotide
  modified_base 1: mod_base = OTHER; note = 2'-O-methyladenosine-3'-phosphorothioate
  modified_base 2: mod_base = OTHER; note = 2'-fluoroadenosine-3'-phosphorothioate
  modified_base 3: mod_base = OTHER; note = 2'-O-methyluridine-3'-phosphate
  modified_base 4: mod_base = OTHER; note = 2'-O-methylguanosine-3'-phosphate
  modified_base 5: mod_base = OTHER; note = 2'-O-methylcytidine-3'-phosphate
  modified_base 6: mod_base = OTHER; note = 2'-fluorouridine-3'-phosphate
  modified_base 7: mod_base = OTHER; note = 2'-O-methylguanosine-3'-phosphate
  modified_base 8: mod_base = OTHER; note = 2'-fluorocytidine-3'-phosphate
  modified_base 9: mod_base = OTHER; note = 2'-fluoroadenosine-3'-phosphate
  modified_base 10: mod_base = OTHER; note = 2'-O-methyladenosine-3'-phosphate
  modified_base 11: mod_base = OTHER; note = 2'-O-methyluridine-3'-phosphate
  modified_base 12: mod_base = OTHER; note = 2'-O-methyladenosine-3'-phosphate
  modified_base 13: mod_base = OTHER; note = 2'-O-methyluridine-3'-phosphate
  modified_base 14: mod_base = OTHER; note = 2'-fluorouridine-3'-phosphate
  modified_base 15: mod_base = OTHER; note = 2'-O-methyladenosine-3'-phosphate
  modified_base 16: mod_base = OTHER; note = 2'-fluorouridine-3'-phosphate
  modified_base 17: mod_base = OTHER; note = 2'-O-methylcytidine-3'-phosphate
  modified_base 18: mod_base = OTHER; note = 2'-O-methyladenosine-3'-phosphate
  modified_base 19: mod_base = OTHER; note = 2'-O-methylguanosine-3'-phosphate
  modified_base 20: mod_base = OTHER; note = 2'-O-methylcytidine-3'-phosphate
  modified_base 21: mod_base = OTHER; note = 2'-O-methylcytidine-3'-phosphorothioate
  modified_base 22: mod_base = OTHER; note = 2'-O-methyladenosine-3'-phosphorothioate
  modified_base 23: mod_base = OTHER; note = 2'-O-methyladenosine-3'-phosphate
aatgctgcaatattatcagccaa

SEQ ID NO: 2216 - RNA, 21 nt, synthetic construct
  source 1..21: mol_type = other RNA; note = Description of Artificial Sequence: Synthetic oligonucleotide
  modified_base 1: mod_base = OTHER; note = 2'-O-methyluridine-3'-phosphorothioate
  modified_base 2: mod_base = OTHER; note = 2'-O-methylguanosine-3'-phosphorothioate
  modified_base 3: mod_base = OTHER; note = 2'-O-methylguanosine-3'-phosphate
  modified_base 4: mod_base = OTHER; note = 2'-O-methylcytidine-3'-phosphate
  modified_base 5: mod_base = OTHER; note = 2'-O-methyluridine-3'-phosphate
  modified_base 6: mod_base = OTHER; note = 2'-O-methylguanosine-3'-phosphate
  modified_base 7: mod_base = OTHER; note = 2'-fluoroadenosine-3'-phosphate
  modified_base 8: mod_base = OTHER; note = 2'-O-methyluridine-3'-phosphate
  modified_base 9: mod_base = OTHER; note = 2'-fluoroadenosine-3'-phosphate
  modified_base 10: mod_base = OTHER; note = 2'-fluoroadenosine-3'-phosphate
  modified_base 11: mod_base = OTHER; note = 2'-fluorouridine-3'-phosphate
  modified_base 12: mod_base = OTHER; note = 2'-O-methyladenosine-3'-phosphate
  modified_base 13: mod_base = OTHER; note = 2'-O-methyluridine-3'-phosphate
  modified_base 14: mod_base = OTHER; note = 2'-O-methyluridine-3'-phosphate
  modified_base 15: mod_base = OTHER; note = 2'-O-methylguanosine-3'-phosphate
  modified_base 16: mod_base = OTHER; note = 2'-O-methylcytidine-3'-phosphate
  modified_base 17: mod_base = OTHER; note = 2'-O-methyladenosine-3'-phosphate
  modified_base 18: mod_base = OTHER; note = 2'-O-methylguanosine-3'-phosphate
  modified_base 19: mod_base = OTHER; note = 2'-O-methylcytidine-3'-phosphate
  modified_base 20: mod_base = OTHER; note = 2'-O-methyladenosine-3'-phosphate
  modified_base 21: mod_base = OTHER; note = 2'-O-methyluridine-3'-phosphate N-[tris(GalNAc-alkyl)-amidodecanoyl)]-4-hydroxyprolinol Hyp-(GalNAc-alkyl)3
tggctgataatattgcagcat

SEQ ID NO: 2217 - RNA, 23 nt, synthetic construct
  source 1..23: mol_type = other RNA; note = Description of Artificial Sequence: Synthetic oligonucleotide
  modified_base 1: mod_base = OTHER; note = 2'-O-methyladenosine-3'-phosphorothioate
  modified_base 2: mod_base = OTHER; note = 2'-fluorouridine -3'-phosphorothioate
  modified_base 3: mod_base = OTHER; note = 2'-O-methylguanosine-3'-phosphate
  modified_base 4: mod_base = OTHER; note = 2'-O-methylcytidine-3'-phosphate
  modified_base 5: mod_base = OTHER; note = 2'-O-methyluridine-3'-phosphate
  modified_base 6: mod_base = OTHER; note = 2'-fluoroguanosine-3'-phosphate
  modified_base 7: mod_base = OTHER; note = 2'-O-methylcytidine-3'-phosphate
  modified_base 8: mod_base = OTHER; note = 2'-fluoroadenosine-3'-phosphate
  modified_base 9: mod_base = OTHER; note = 2'-fluoroadenosine-3'-phosphate
  modified_base 10: mod_base = OTHER; note = 2'-O-methyluridine-3'-phosphate
  modified_base 11: mod_base = OTHER; note = 2'-O-methyladenosine-3'-phosphate
  modified_base 12: mod_base = OTHER; note = 2'-O-methyluridine-3'-phosphate
  modified_base 13: mod_base = OTHER; note = 2'-O-methyluridine-3'-phosphate
  modified_base 14: mod_base = OTHER; note = 2'-fluoroadenosine-3'-phosphate
  modified_base 15: mod_base = OTHER; note = 2'-O-methyluridine-3'-phosphate
  modified_base 16: mod_base = OTHER; note = 2'-fluorocytidine-3'-phosphate
  modified_base 17: mod_base = OTHER; note = 2'-O-methyladenosine-3'-phosphate
  modified_base 18: mod_base = OTHER; note = 2'-O-methylguanosine-3'-phosphate
  modified_base 19: mod_base = OTHER; note = 2'-O-methylcytidine-3'-phosphate
  modified_base 20: mod_base = OTHER; note = 2'-O-methylcytidine-3'-phosphate
  modified_base 21: mod_base = OTHER; note = 2'-O-methyladenosine-3'-phosphorothioate
  modified_base 22: mod_base = OTHER; note = 2'-O-methyladenosine-3'-phosphorothioate
  modified_base 23: mod_base = OTHER; note = 2'-O-methyladenosine-3'-phosphate
atgctgcaatattatcagccaaa

SEQ ID NO: 2218 - RNA, 21 nt, synthetic construct
  source 1..21: mol_type = other RNA; note = Description of Artificial Sequence: Synthetic oligonucleotide
  modified_base 1: mod_base = OTHER; note = 2'-O-methylguanosine-3'-phosphorothioate
  modified_base 2: mod_base = OTHER; note = 2'-O-methylcytidine-3'-phosphorothioate
  modified_base 3: mod_base = OTHER; note = 2'-O-methyluridine-3'-phosphate
  modified_base 4: mod_base = OTHER; note = 2'-O-methyladenosine-3'-phosphate
  modified_base 5: mod_base = OTHER; note = 2'-O-methyladenosine-3'-phosphate
  modified_base 6: mod_base = OTHER; note = 2'-O-methyluridine-3'-phosphate
  modified_base 7: mod_base = OTHER; note = 2'-fluorouridine-3'-phosphate
  modified_base 8: mod_base = OTHER; note = 2'-O-methyluridine-3'-phosphate
  modified_base 9: mod_base = OTHER; note = 2'-fluoroguanosine-3'-phosphate
  modified_base 10: mod_base = OTHER; note = 2'-fluorouridine-3'-phosphate
  modified_base 11: mod_base = OTHER; note = 2'-fluoroadenosine-3'-phosphate
  modified_base 12: mod_base = OTHER; note = 2'-O-methyluridine-3'-phosphate
  modified_base 13: mod_base = OTHER; note = 2'-O-methylcytidine-3'-phosphate
  modified_base 14: mod_base = OTHER; note = 2'-O-methyladenosine-3'-phosphate
  modified_base 15: mod_base = OTHER; note = 2'-O-methyladenosine-3'-phosphate
  modified_base 16: mod_base = OTHER; note = 2'-O-methyluridine-3'-phosphate
  modified_base 17: mod_base = OTHER; note = 2'-O-methylguanosine-3'-phosphate
  modified_base 18: mod_base = OTHER; note = 2'-O-methyladenosine-3'-phosphate
  modified_base 19: mod_base = OTHER; note = 2'-O-methyluridine-3'-phosphate
  modified_base 20: mod_base = OTHER; note = 2'-O-methyluridine-3'-phosphate
  modified_base 21: mod_base = OTHER; note = 2'-O-methyladenosine-3'-phosphate N-[tris(GalNAc-alkyl)-amidodecanoyl)]-4-hydroxyprolinol Hyp-(GalNAc-alkyl)3
gctaatttgtatcaatgatta

SEQ ID NO: 2219 - RNA, 23 nt, synthetic construct
  source 1..23: mol_type = other RNA; note = Description of Artificial Sequence: Synthetic oligonucleotide
  modified_base 1: mod_base = OTHER; note = 2'-O-methyluridine-3'-phosphorothioate
  modified_base 2: mod_base = OTHER; note = 2'-fluoroadenosine-3'-phosphorothioate
  modified_base 3: mod_base = OTHER; note = 2'-O-methyladenosine-3'-phosphate
  modified_base 4: mod_base = OTHER; note = 2'-O-methyluridine-3'-phosphate
  modified_base 5: mod_base = OTHER; note = 2'-O-methylcytidine-3'-phosphate
  modified_base 6: mod_base = OTHER; note = 2'-fluoroadenosine-3'-phosphate
  modified_base 7: mod_base = OTHER; note = 2'-O-methyluridine-3'-phosphate
  modified_base 8: mod_base = OTHER; note = 2'-fluorouridine-3'-phosphate
  modified_base 9: mod_base = OTHER; note = 2'-fluoroguanosine-3'-phosphate
  modified_base 10: mod_base = OTHER; note = 2'-O-methyladenosine-3'-phosphate
  modified_base 11: mod_base = OTHER; note = 2'-O-methyluridine-3'-phosphate
  modified_base 12: mod_base = OTHER; note = 2'-O-methyladenosine-3'-phosphate
  modified_base 13: mod_base = OTHER; note = 2'-O-methylcytidine-3'-phosphate
  modified_base 14: mod_base = OTHER; note = 2'-fluoroadenosine-3'-phosphate
  modified_base 15: mod_base = OTHER; note = 2'-O-methyladenosine-3'-phosphate
  modified_base 16: mod_base = OTHER; note = 2'-fluoroadenosine-3'-phosphate
  modified_base 17: mod_base = OTHER; note = 2'-O-methyluridine-3'-phosphate
  modified_base 18: mod_base = OTHER; note = 2'-O-methyluridine-3'-phosphate
  modified_base 19: mod_base = OTHER; note = 2'-O-methyladenosine-3'-phosphate
  modified_base 20: mod_base = OTHER; note = 2'-O-methylguanosine-3'-phosphate
  modified_base 21: mod_base = OTHER; note = 2'-O-methylcytidine-3'-phosphorothioate
  modified_base 22: mod_base = OTHER; note = 2'-O-methylcytidine-3'-phosphorothioate
  modified_base 23: mod_base = OTHER; note = 2'-O-methylguanosine-3'-phosphate
taatcattgatacaaattagccg

SEQ ID NO: 2220 - RNA, 21 nt, synthetic construct
  source 1..21: mol_type = other RNA; note = Description of Artificial Sequence: Synthetic oligonucleotide
  modified_base 1: mod_base = OTHER; note = 2'-O-methylcytidine-3'-phosphorothioate
  modified_base 2: mod_base = OTHER; note = 2'-O-methyluridine-3'-phosphorothioate
  modified_base 3: mod_base = OTHER; note = 2'-O-methyladenosine-3'-phosphate
  modified_base 4: mod_base = OTHER; note = 2'-O-methyladenosine-3'-phosphate
  modified_base 5: mod_base = OTHER; note = 2'-O-methyluridine-3'-phosphate
  modified_base 6: mod_base = OTHER; note = 2'-O-methyluridine-3'-phosphate
  modified_base 7: mod_base = OTHER; note = 2'-fluorouridine-3'-phosphate
  modified_base 8: mod_base = OTHER; note = 2'-O-methylguanosine-3'-phosphate
  modified_base 9: mod_base = OTHER; note = 2'-fluorouridine-3'-phosphate
  modified_base 10: mod_base = OTHER; note = 2'-fluoroadenosine-3'-phosphate
  modified_base 11: mod_base = OTHER; note = 2'-fluorouridine-3'-phosphate
  modified_base 12: mod_base = OTHER; note = 2'-O-methylcytidine-3'-phosphate
  modified_base 13: mod_base = OTHER; note = 2'-O-methyladenosine-3'-phosphate
  modified_base 14: mod_base = OTHER; note = 2'-O-methyladenosine-3'-phosphate
  modified_base 15: mod_base = OTHER; note = 2'-O-methyluridine-3'-phosphate
  modified_base 16: mod_base = OTHER; note = 2'-O-methylguanosine-3'-phosphate
  modified_base 17: mod_base = OTHER; note = 2'-O-methyladenosine-3'-phosphate
  modified_base 18: mod_base = OTHER; note = 2'-O-methyluridine-3'-phosphate
  modified_base 19: mod_base = OTHER; note = 2'-O-methyluridine-3'-phosphate
  modified_base 20: mod_base = OTHER; note = 2'-O-methyladenosine-3'-phosphate
  modified_base 21: mod_base = OTHER; note = 2'-O-methyluridine-3'-phosphate N-[tris(GalNAc-alkyl)-amidodecanoyl)]-4-hydroxyprolinol Hyp-(GalNAc-alkyl)3
ctaatttgtatcaatgattat

SEQ ID NO: 2221 - RNA, 23 nt, synthetic construct
  source 1..23: mol_type = other RNA; note = Description of Artificial Sequence: Synthetic oligonucleotide
  modified_base 1: mod_base = OTHER; note = 2'-O-methyladenosine-3'-phosphorothioate
  modified_base 2: mod_base = OTHER; note = 2'-fluorouridine -3'-phosphorothioate
  modified_base 3: mod_base = OTHER; note = 2'-O-methyladenosine-3'-phosphate
  modified_base 4: mod_base = OTHER; note = 2'-O-methyladenosine-3'-phosphate
  modified_base 5: mod_base = OTHER; note = 2'-O-methyluridine-3'-phosphate
  modified_base 6: mod_base = OTHER; note = 2'-fluorocytidine-3'-phosphate
  modified_base 7: mod_base = OTHER; note = 2'-O-methyladenosine-3'-phosphate
  modified_base 8: mod_base = OTHER; note = 2'-fluorouridine-3'-phosphate
  modified_base 9: mod_base = OTHER; note = 2'-fluorouridine-3'-phosphate
  modified_base 10: mod_base = OTHER; note = 2'-O-methylguanosine-3'-phosphate
  modified_base 11: mod_base = OTHER; note = 2'-O-methyladenosine-3'-phosphate
  modified_base 12: mod_base = OTHER; note = 2'-O-methyluridine-3'-phosphate
  modified_base 13: mod_base = OTHER; note = 2'-O-methyladenosine-3'-phosphate
  modified_base 14: mod_base = OTHER; note = 2'-fluorocytidine-3'-phosphate
  modified_base 15: mod_base = OTHER; note = 2'-O-methyladenosine-3'-phosphate
  modified_base 16: mod_base = OTHER; note = 2'-fluoroadenosine-3'-phosphate
  modified_base 17: mod_base = OTHER; note = 2'-O-methyladenosine-3'-phosphate
  modified_base 18: mod_base = OTHER; note = 2'-O-methyluridine-3'-phosphate
  modified_base 19: mod_base = OTHER; note = 2'-O-methyluridine-3'-phosphate
  modified_base 20: mod_base = OTHER; note = 2'-O-methyladenosine-3'-phosphate
  modified_base 21: mod_base = OTHER; note = 2'-O-methylguanosine-3'-phosphorothioate
  modified_base 22: mod_base = OTHER; note = 2'-O-methylcytidine-3'-phosphorothioate
  modified_base 23: mod_base = OTHER; note = 2'-O-methylcytidine-3'-phosphate
ataatcattgatacaaattagcc

SEQ ID NO: 2222 - RNA, 21 nt, synthetic construct
  source 1..21: mol_type = other RNA; note = Description of Artificial Sequence: Synthetic oligonucleotide
  modified_base 1: mod_base = OTHER; note = 2'-O-methylcytidine-3'-phosphorothioate
  modified_base 2: mod_base = OTHER; note = 2'-O-methylcytidine-3'-phosphorothioate
  modified_base 3: mod_base = OTHER; note = 2'-O-methylcytidine-3'-phosphate
  modified_base 4: mod_base = OTHER; note = 2'-O-methylguanosine-3'-phosphate
  modified_base 5: mod_base = OTHER; note = 2'-O-methylguanosine-3'-phosphate
  modified_base 6: mod_base = OTHER; note = 2'-O-methylcytidine-3'-phosphate
  modified_base 7: mod_base = OTHER; note = 2'-fluorouridine-3'-phosphate
  modified_base 8: mod_base = OTHER; note = 2'-O-methyladenosine-3'-phosphate
  modified_base 9: mod_base = OTHER; note = 2'-fluoroadenosine-3'-phosphate
  modified_base 10: mod_base = OTHER; note = 2'-fluorouridine-3'-phosphate
  modified_base 11: mod_base = OTHER; note = 2'-fluorouridine-3'-phosphate
  modified_base 12: mod_base = OTHER; note = 2'-O-methyluridine-3'-phosphate
  modified_base 13: mod_base = OTHER; note = 2'-O-methylguanosine-3'-phosphate
  modified_base 14: mod_base = OTHER; note = 2'-O-methyluridine-3'-phosphate
  modified_base 15: mod_base = OTHER; note = 2'-O-methyladenosine-3'-phosphate
  modified_base 16: mod_base = OTHER; note = 2'-O-methyluridine-3'-phosphate
  modified_base 17: mod_base = OTHER; note = 2'-O-methylcytidine-3'-phosphate
  modified_base 18: mod_base = OTHER; note = 2'-O-methyladenosine-3'-phosphate
  modified_base 19: mod_base = OTHER; note = 2'-O-methyladenosine-3'-phosphate
  modified_base 20: mod_base = OTHER; note = 2'-O-methyluridine-3'-phosphate
  modified_base 21: mod_base = OTHER; note = 2'-O-methylguanosine-3'-phosphate N-[tris(GalNAc-alkyl)-amidodecanoyl)]-4-hydroxyprolinol Hyp-(GalNAc-alkyl)3
cccggctaatttgtatcaatg

SEQ ID NO: 2223 - RNA, 23 nt, synthetic construct
  source 1..23: mol_type = other RNA; note = Description of Artificial Sequence: Synthetic oligonucleotide
  modified_base 1: mod_base = OTHER; note = 2'-O-methylcytidine-3'-phosphorothioate
  modified_base 2: mod_base = OTHER; note = 2'-fluoroadenosine-3'-phosphorothioate
  modified_base 3: mod_base = OTHER; note = 2'-O-methyluridine-3'-phosphate
  modified_base 4: mod_base = OTHER; note = 2'-O-methyluridine-3'-phosphate
  modified_base 5: mod_base = OTHER; note = 2'-O-methylguanosine-3'-phosphate
  modified_base 6: mod_base = OTHER; note = 2'-fluoroadenosine-3'-phosphate
  modified_base 7: mod_base = OTHER; note = 2'-O-methyluridine-3'-phosphate
  modified_base 8: mod_base = OTHER; note = 2'-fluoroadenosine-3'-phosphate
  modified_base 9: mod_base = OTHER; note = 2'-fluorocytidine-3'-phosphate
  modified_base 10: mod_base = OTHER; note = 2'-O-methyladenosine-3'-phosphate
  modified_base 11: mod_base = OTHER; note = 2'-O-methyladenosine-3'-phosphate
  modified_base 12: mod_base = OTHER; note = 2'-O-methyladenosine-3'-phosphate
  modified_base 13: mod_base = OTHER; note = 2'-O-methyluridine-3'-phosphate
  modified_base 14: mod_base = OTHER; note = 2'-fluorouridine-3'-phosphate
  modified_base 15: mod_base = OTHER; note = 2'-O-methyladenosine-3'-phosphate
  modified_base 16: mod_base = OTHER; note = 2'-fluoroguanosine-3'-phosphate
  modified_base 17: mod_base = OTHER; note = 2'-O-methylcytidine-3'-phosphate
  modified_base 18: mod_base = OTHER; note = 2'-O-methylcytidine-3'-phosphate
  modified_base 19: mod_base = OTHER; note = 2'-O-methylguanosine-3'-phosphate
  modified_base 20: mod_base = OTHER; note = 2'-O-methylguanosine-3'-phosphate
  modified_base 21: mod_base = OTHER; note = 2'-O-methylguanosine-3'-phosphorothioate
  modified_base 22: mod_base = OTHER; note = 2'-O-methylguanosine-3'-phosphorothioate
  modified_base 23: mod_base = OTHER; note = 2'-O-methylguanosine-3'-phosphate
cattgatacaaattagccggggg

SEQ ID NO: 2224 - RNA, 21 nt, synthetic construct
  source 1..21: mol_type = other RNA; note = Description of Artificial Sequence: Synthetic oligonucleotide
  modified_base 1: mod_base = OTHER; note = 2'-O-methylcytidine-3'-phosphorothioate
  modified_base 2: mod_base = OTHER; note = 2'-O-methylcytidine-3'-phosphorothioate
  modified_base 3: mod_base = OTHER; note = 2'-O-methylcytidine-3'-phosphate
  modified_base 4: mod_base = OTHER; note = 2'-O-methylcytidine-3'-phosphate
  modified_base 5: mod_base = OTHER; note = 2'-O-methylguanosine-3'-phosphate
  modified_base 6: mod_base = OTHER; note = 2'-O-methylguanosine-3'-phosphate
  modified_base 7: mod_base = OTHER; note = 2'-fluorocytidine-3'-phosphate
  modified_base 8: mod_base = OTHER; note = 2'-O-methyluridine-3'-phosphate
  modified_base 9: mod_base = OTHER; note = 2'-fluoroadenosine-3'-phosphate
  modified_base 10: mod_base = OTHER; note = 2'-fluoroadenosine-3'-phosphate
  modified_base 11: mod_base = OTHER; note = 2'-fluorouridine-3'-phosphate
  modified_base 12: mod_base = OTHER; note = 2'-O-methyluridine-3'-phosphate
  modified_base 13: mod_base = OTHER; note = 2'-O-methyluridine-3'-phosphate
  modified_base 14: mod_base = OTHER; note = 2'-O-methylguanosine-3'-phosphate
  modified_base 15: mod_base = OTHER; note = 2'-O-methyluridine-3'-phosphate
  modified_base 16: mod_base = OTHER; note = 2'-O-methyladenosine-3'-phosphate
  modified_base 17: mod_base = OTHER; note = 2'-O-methyluridine-3'-phosphate
  modified_base 18: mod_base = OTHER; note = 2'-O-methylcytidine-3'-phosphate
  modified_base 19: mod_base = OTHER; note = 2'-O-methyladenosine-3'-phosphate
  modified_base 20: mod_base = OTHER; note = 2'-O-methyladenosine-3'-phosphate
  modified_base 21: mod_base = OTHER; note = 2'-O-methyluridine-3'-phosphate N-[tris(GalNAc-alkyl)-amidodecanoyl)]-4-hydroxyprolinol Hyp-(GalNAc-alkyl)3
ccccggctaatttgtatcaat

SEQ ID NO: 2225 - RNA, 23 nt, synthetic construct
  source 1..23: mol_type = other RNA; note = Description of Artificial Sequence: Synthetic oligonucleotide
  modified_base 1: mod_base = OTHER; note = 2'-O-methyladenosine-3'-phosphorothioate
  modified_base 2: mod_base = OTHER; note = 2'-fluorouridine -3'-phosphorothioate
  modified_base 3: mod_base = OTHER; note = 2'-O-methyluridine-3'-phosphate
  modified_base 4: mod_base = OTHER; note = 2'-O-methylguanosine-3'-phosphate
  modified_base 5: mod_base = OTHER; note = 2'-O-methyladenosine-3'-phosphate
  modified_base 6: mod_base = OTHER; note = 2'-fluorouridine-3'-phosphate
  modified_base 7: mod_base = OTHER; note = 2'-O-methyladenosine-3'-phosphate
  modified_base 8: mod_base = OTHER; note = 2'-fluorocytidine-3'-phosphate
  modified_base 9: mod_base = OTHER; note = 2'-fluoroadenosine-3'-phosphate
  modified_base 10: mod_base = OTHER; note = 2'-O-methyladenosine-3'-phosphate
  modified_base 11: mod_base = OTHER; note = 2'-O-methyladenosine-3'-phosphate
  modified_base 12: mod_base = OTHER; note = 2'-O-methyluridine-3'-phosphate
  modified_base 13: mod_base = OTHER; note = 2'-O-methyluridine-3'-phosphate
  modified_base 14: mod_base = OTHER; note = 2'-fluoroadenosine-3'-phosphate
  modified_base 15: mod_base = OTHER; note = 2'-O-methylguanosine-3'-phosphate
  modified_base 16: mod_base = OTHER; note = 2'-fluorocytidine-3'-phosphate
  modified_base 17: mod_base = OTHER; note = 2'-O-methylcytidine-3'-phosphate
  modified_base 18: mod_base = OTHER; note = 2'-O-methylguanosine-3'-phosphate
  modified_base 19: mod_base = OTHER; note = 2'-O-methylguanosine-3'-phosphate
  modified_base 20: mod_base = OTHER; note = 2'-O-methylguanosine-3'-phosphate
  modified_base 21: mod_base = OTHER; note = 2'-O-methylguanosine-3'-phosphorothioate
  modified_base 22: mod_base = OTHER; note = 2'-O-methylguanosine-3'-phosphorothioate
  modified_base 23: mod_base = OTHER; note = 2'-O-methyladenosine-3'-phosphate
attgatacaaattagccggggga

SEQ ID NO: 2226 - RNA, 21 nt, synthetic construct
  source 1..21: mol_type = other RNA; note = Description of Artificial Sequence: Synthetic oligonucleotide
  modified_base 1: mod_base = OTHER; note = 2'-O-methyluridine-3'-phosphorothioate
  modified_base 2: mod_base = OTHER; note = 2'-O-methyladenosine-3'-phosphorothioate
  modified_base 3: mod_base = OTHER; note = 2'-O-methyladenosine-3'-phosphate
  modified_base 4: mod_base = OTHER; note = 2'-O-methyluridine-3'-phosphate
  modified_base 5: mod_base = OTHER; note = 2'-O-methyluridine-3'-phosphate
  modified_base 6: mod_base = OTHER; note = 2'-O-methylguanosine-3'-phosphate
  modified_base 7: mod_base = OTHER; note = 2'-fluoroguanosine-3'-phosphate
  modified_base 8: mod_base = OTHER; note = 2'-O-methyluridine-3'-phosphate
  modified_base 9: mod_base = OTHER; note = 2'-fluoroguanosine-3'-phosphate
  modified_base 10: mod_base = OTHER; note = 2'-fluoroadenosine-3'-phosphate
  modified_base 11: mod_base = OTHER; note = 2'-fluorouridine-3'-phosphate
  modified_base 12: mod_base = OTHER; note = 2'-O-methyladenosine-3'-phosphate
  modified_base 13: mod_base = OTHER; note = 2'-O-methylcytidine-3'-phosphate
  modified_base 14: mod_base = OTHER; note = 2'-O-methyluridine-3'-phosphate
  modified_base 15: mod_base = OTHER; note = 2'-O-methyluridine-3'-phosphate
  modified_base 16: mod_base = OTHER; note = 2'-O-methylcytidine-3'-phosphate
  modified_base 17: mod_base = OTHER; note = 2'-O-methyluridine-3'-phosphate
  modified_base 18: mod_base = OTHER; note = 2'-O-methyluridine-3'-phosphate
  modified_base 19: mod_base = OTHER; note = 2'-O-methyluridine-3'-phosphate
  modified_base 20: mod_base = OTHER; note = 2'-O-methylguanosine-3'-phosphate
  modified_base 21: mod_base = OTHER; note = 2'-O-methyladenosine-3'-phosphate N-[tris(GalNAc-alkyl)-amidodecanoyl)]-4-hydroxyprolinol Hyp-(GalNAc-alkyl)3
taattggtgatacttctttga

SEQ ID NO: 2227 - RNA, 23 nt, synthetic construct
  source 1..23: mol_type = other RNA; note = Description of Artificial Sequence: Synthetic oligonucleotide
  modified_base 1: mod_base = OTHER; note = 2'-O-methyluridine-3'-phosphorothioate
  modified_base 2: mod_base = OTHER; note = 2'-fluorocytidine-3'-phosphorothioate
  modified_base 3: mod_base = OTHER; note = 2'-O-methyladenosine-3'-phosphate
  modified_base 4: mod_base = OTHER; note = 2'-O-methyladenosine-3'-phosphate
  modified_base 5: mod_base = OTHER; note = 2'-O-methyladenosine-3'-phosphate
  modified_base 6: mod_base = OTHER; note = 2'-fluoroguanosine-3'-phosphate
  modified_base 7: mod_base = OTHER; note = 2'-O-methyladenosine-3'-phosphate
  modified_base 8: mod_base = OTHER; note = 2'-fluoroadenosine-3'-phosphate
  modified_base 9: mod_base = OTHER; note = 2'-fluoroguanosine-3'-phosphate
  modified_base 10: mod_base = OTHER; note = 2'-O-methyluridine-3'-phosphate
  modified_base 11: mod_base = OTHER; note = 2'-O-methyladenosine-3'-phosphate
  modified_base 12: mod_base = OTHER; note = 2'-O-methyluridine-3'-phosphate
  modified_base 13: mod_base = OTHER; note = 2'-O-methylcytidine-3'-phosphate
  modified_base 14: mod_base = OTHER; note = 2'-fluoroadenosine-3'-phosphate
  modified_base 15: mod_base = OTHER; note = 2'-O-methylcytidine-3'-phosphate
  modified_base 16: mod_base = OTHER; note = 2'-fluorocytidine-3'-phosphate
  modified_base 17: mod_base = OTHER; note = 2'-O-methyladenosine-3'-phosphate
  modified_base 18: mod_base = OTHER; note = 2'-O-methyladenosine-3'-phosphate
  modified_base 19: mod_base = OTHER; note = 2'-O-methyluridine-3'-phosphate
  modified_base 20: mod_base = OTHER; note = 2'-O-methyluridine-3'-phosphate
  modified_base 21: mod_base = OTHER; note = 2'-O-methyladenosine-3'-phosphorothioate
  modified_base 22: mod_base = OTHER; note = 2'-O-methylcytidine-3'-phosphorothioate
  modified_base 23: mod_base = OTHER; note = 2'-O-methylcytidine-3'-phosphate
tcaaagaagtatcaccaattacc

SEQ ID NO: 2228 - RNA, 21 nt, synthetic construct
  source 1..21: mol_type = other RNA; note = Description of Artificial Sequence: Synthetic oligonucleotide
  modified_base 1: mod_base = OTHER; note = 2'-O-methyladenosine-3'-phosphorothioate
  modified_base 2: mod_base = OTHER; note = 2'-O-methyladenosine-3'-phosphorothioate
  modified_base 3: mod_base = OTHER; note = 2'-O-methyluridine-3'-phosphate
  modified_base 4: mod_base = OTHER; note = 2'-O-methyluridine-3'-phosphate
  modified_base 5: mod_base = OTHER; note = 2'-O-methylguanosine-3'-phosphate
  modified_base 6: mod_base = OTHER; note = 2'-O-methylguanosine-3'-phosphate
  modified_base 7: mod_base = OTHER; note = 2'-fluorouridine-3'-phosphate
  modified_base 8: mod_base = OTHER; note = 2'-O-methylguanosine-3'-phosphate
  modified_base 9: mod_base = OTHER; note = 2'-fluoroadenosine-3'-phosphate
  modified_base 10: mod_base = OTHER; note = 2'-fluorouridine-3'-phosphate
  modified_base 11: mod_base = OTHER; note = 2'-fluoroadenosine-3'-phosphate
  modified_base 12: mod_base = OTHER; note = 2'-O-methylcytidine-3'-phosphate
  modified_base 13: mod_base = OTHER; note = 2'-O-methyluridine-3'-phosphate
  modified_base 14: mod_base = OTHER; note = 2'-O-methyluridine-3'-phosphate
  modified_base 15: mod_base = OTHER; note = 2'-O-methylcytidine-3'-phosphate
  modified_base 16: mod_base = OTHER; note = 2'-O-methyluridine-3'-phosphate
  modified_base 17: mod_base = OTHER; note = 2'-O-methyluridine-3'-phosphate
  modified_base 18: mod_base = OTHER; note = 2'-O-methyluridine-3'-phosphate
  modified_base 19: mod_base = OTHER; note = 2'-O-methylguanosine-3'-phosphate
  modified_base 20: mod_base = OTHER; note = 2'-O-methyladenosine-3'-phosphate
  modified_base 21: mod_base = OTHER; note = 2'-O-methyladenosine-3'-phosphate N-[tris(GalNAc-alkyl)-amidodecanoyl)]-4-hydroxyprolinol Hyp-(GalNAc-alkyl)3
aattggtgatacttctttgaa

SEQ ID NO: 2229 - RNA, 23 nt, synthetic construct
  source 1..23: mol_type = other RNA; note = Description of Artificial Sequence: Synthetic oligonucleotide
  modified_base 1: mod_base = OTHER; note = 2'-O-methyluridine-3'-phosphorothioate
  modified_base 2: mod_base = OTHER; note = 2'-fluorouridine -3'-phosphorothioate
  modified_base 3: mod_base = OTHER; note = 2'-O-methylcytidine-3'-phosphate
  modified_base 4: mod_base = OTHER; note = 2'-O-methyladenosine-3'-phosphate
  modified_base 5: mod_base = OTHER; note = 2'-O-methyladenosine-3'-phosphate
  modified_base 6: mod_base = OTHER; note = 2'-fluoroadenosine-3'-phosphate
  modified_base 7: mod_base = OTHER; note = 2'-O-methylguanosine-3'-phosphate
  modified_base 8: mod_base = OTHER; note = 2'-fluoroadenosine-3'-phosphate
  modified_base 9: mod_base = OTHER; note = 2'-fluoroadenosine-3'-phosphate
  modified_base 10: mod_base = OTHER; note = 2'-O-methylguanosine-3'-phosphate
  modified_base 11: mod_base = OTHER; note = 2'-O-methyluridine-3'-phosphate
  modified_base 12: mod_base = OTHER; note = 2'-O-methyladenosine-3'-phosphate
  modified_base 13: mod_base = OTHER; note = 2'-O-methyluridine-3'-phosphate
  modified_base 14: mod_base = OTHER; note = 2'-fluorocytidine-3'-phosphate
  modified_base 15: mod_base = OTHER; note = 2'-O-methyladenosine-3'-phosphate
  modified_base 16: mod_base = OTHER; note = 2'-fluorocytidine-3'-phosphate
  modified_base 17: mod_base = OTHER; note = 2'-O-methylcytidine-3'-phosphate
  modified_base 18: mod_base = OTHER; note = 2'-O-methyladenosine-3'-phosphate
  modified_base 19: mod_base = OTHER; note = 2'-O-methyladenosine-3'-phosphate
  modified_base 20: mod_base = OTHER; note = 2'-O-methyluridine-3'-phosphate
  modified_base 21: mod_base = OTHER; note = 2'-O-methyluridine-3'-phosphorothioate
  modified_base 22: mod_base = OTHER; note = 2'-O-methyladenosine-3'-phosphorothioate
  modified_base 23: mod_base = OTHER; note = 2'-O-methylcytidine-3'-phosphate
ttcaaagaagtatcaccaattac

SEQ ID NO: 2230 - RNA, 21 nt, synthetic construct
  source 1..21: mol_type = other RNA; note = Description of Artificial Sequence: Synthetic oligonucleotide
  modified_base 1: mod_base = OTHER; note = 2'-O-methylguanosine-3'-phosphorothioate
  modified_base 2: mod_base = OTHER; note = 2'-O-methylcytidine-3'-phosphorothioate
  modified_base 3: mod_base = OTHER; note = 2'-O-methylguanosine-3'-phosphate
  modified_base 4: mod_base = OTHER; note = 2'-O-methylguanosine-3'-phosphate
  modified_base 5: mod_base = OTHER; note = 2'-O-methyluridine-3'-phosphate
  modified_base 6: mod_base = OTHER; note = 2'-O-methyladenosine-3'-phosphate
  modified_base 7: mod_base = OTHER; note = 2'-fluoroadenosine-3'-phosphate
  modified_base 8: mod_base = OTHER; note = 2'-O-methyluridine-3'-phosphate
  modified_base 9: mod_base = OTHER; note = 2'-fluorouridine-3'-phosphate
  modified_base 10: mod_base = OTHER; note = 2'-fluoroguanosine-3'-phosphate
  modified_base 11: mod_base = OTHER; note = 2'-fluoroguanosine-3'-phosphate
  modified_base 12: mod_base = OTHER; note = 2'-O-methyluridine-3'-phosphate
  modified_base 13: mod_base = OTHER; note = 2'-O-methylguanosine-3'-phosphate
  modified_base 14: mod_base = OTHER; note = 2'-O-methyladenosine-3'-phosphate
  modified_base 15: mod_base = OTHER; note = 2'-O-methyluridine-3'-phosphate
  modified_base 16: mod_base = OTHER; note = 2'-O-methyladenosine-3'-phosphate
  modified_base 17: mod_base = OTHER; note = 2'-O-methylcytidine-3'-phosphate
  modified_base 18: mod_base = OTHER; note = 2'-O-methyluridine-3'-phosphate
  modified_base 19: mod_base = OTHER; note = 2'-O-methyluridine-3'-phosphate
  modified_base 20: mod_base = OTHER; note = 2'-O-methylcytidine-3'-phosphate
  modified_base 21: mod_base = OTHER; note = 2'-O-methyluridine-3'-phosphate N-[tris(GalNAc-alkyl)-amidodecanoyl)]-4-hydroxyprolinol Hyp-(GalNAc-alkyl)3
gcggtaattggtgatacttct

SEQ ID NO: 2231 - RNA, 23 nt, synthetic construct
  source 1..23: mol_type = other RNA; note = Description of Artificial Sequence: Synthetic oligonucleotide
  modified_base 1: mod_base = OTHER; note = 2'-O-methyladenosine-3'-phosphorothioate
  modified_base 2: mod_base = OTHER; note = 2'-fluoroguanosine-3'-phosphorothioate
  modified_base 3: mod_base = OTHER; note = 2'-O-methyladenosine-3'-phosphate
  modified_base 4: mod_base = OTHER; note = 2'-O-methyladenosine-3'-phosphate
  modified_base 5: mod_base = OTHER; note = 2'-O-methylguanosine-3'-phosphate
  modified_base 6: mod_base = OTHER; note = 2'-fluorouridine-3'-phosphate
  modified_base 7: mod_base = OTHER; note = 2'-O-methyladenosine-3'-phosphate
  modified_base 8: mod_base = OTHER; note = 2'-fluorouridine-3'-phosphate
  modified_base 9: mod_base = OTHER; note = 2'-fluorocytidine-3'-phosphate
  modified_base 10: mod_base = OTHER; note = 2'-O-methyladenosine-3'-phosphate
  modified_base 11: mod_base = OTHER; note = 2'-O-methylcytidine-3'-phosphate
  modified_base 12: mod_base = OTHER; note = 2'-O-methylcytidine-3'-phosphate
  modified_base 13: mod_base = OTHER; note = 2'-O-methyladenosine-3'-phosphate
  modified_base 14: mod_base = OTHER; note = 2'-fluoroadenosine-3'-phosphate
  modified_base 15: mod_base = OTHER; note = 2'-O-methyluridine-3'-phosphate
  modified_base 16: mod_base = OTHER; note = 2'-fluorouridine-3'-phosphate
  modified_base 17: mod_base = OTHER; note = 2'-O-methyladenosine-3'-phosphate
  modified_base 18: mod_base = OTHER; note = 2'-O-methylcytidine-3'-phosphate
  modified_base 19: mod_base = OTHER; note = 2'-O-methylcytidine-3'-phosphate
  modified_base 20: mod_base = OTHER; note = 2'-O-methylguanosine-3'-phosphate
  modified_base 21: mod_base = OTHER; note = 2'-O-methylcytidine-3'-phosphorothioate
  modified_base 22: mod_base = OTHER; note = 2'-O-methylcytidine-3'-phosphorothioate
  modified_base 23: mod_base = OTHER; note = 2'-O-methyladenosine-3'-phosphate
agaagtatcaccaattaccgcca

SEQ ID NO: 2232 - RNA, 21 nt, synthetic construct
  source 1..21: mol_type = other RNA; note = Description of Artificial Sequence: Synthetic oligonucleotide
  modified_base 1: mod_base = OTHER; note = 2'-O-methylguanosine-3'-phosphorothioate
  modified_base 2: mod_base = OTHER; note = 2'-O-methylguanosine-3'-phosphorothioate
  modified_base 3: mod_base = OTHER; note = 2'-O-methylcytidine-3'-phosphate
  modified_base 4: mod_base = OTHER; note = 2'-O-methylguanosine-3'-phosphate
  modified_base 5: mod_base = OTHER; note = 2'-O-methylguanosine-3'-phosphate
  modified_base 6: mod_base = OTHER; note = 2'-O-methyluridine-3'-phosphate
  modified_base 7: mod_base = OTHER; note = 2'-fluoroadenosine-3'-phosphate
  modified_base 8: mod_base = OTHER; note = 2'-O-methyladenosine-3'-phosphate
  modified_base 9: mod_base = OTHER; note = 2'-fluorouridine-3'-phosphate
  modified_base 10: mod_base = OTHER; note = 2'-fluorouridine-3'-phosphate
  modified_base 11: mod_base = OTHER; note = 2'-fluoroguanosine-3'-phosphate
  modified_base 12: mod_base = OTHER; note = 2'-O-methylguanosine-3'-phosphate
  modified_base 13: mod_base = OTHER; note = 2'-O-methyluridine-3'-phosphate
  modified_base 14: mod_base = OTHER; note = 2'-O-methylguanosine-3'-phosphate
  modified_base 15: mod_base = OTHER; note = 2'-O-methyladenosine-3'-phosphate
  modified_base 16: mod_base = OTHER; note = 2'-O-methyluridine-3'-phosphate
  modified_base 17: mod_base = OTHER; note = 2'-O-methyladenosine-3'-phosphate
  modified_base 18: mod_base = OTHER; note = 2'-O-methylcytidine-3'-phosphate
  modified_base 19: mod_base = OTHER; note = 2'-O-methyluridine-3'-phosphate
  modified_base 20: mod_base = OTHER; note = 2'-O-methyluridine-3'-phosphate
  modified_base 21: mod_base = OTHER; note = 2'-O-methylcytidine-3'-phosphate N-[tris(GalNAc-alkyl)-amidodecanoyl)]-4-hydroxyprolinol Hyp-(GalNAc-alkyl)3
ggcggtaattggtgatacttc

SEQ ID NO: 2233 - RNA, 23 nt, synthetic construct
  source 1..23: mol_type = other RNA; note = Description of Artificial Sequence: Synthetic oligonucleotide
  modified_base 1: mod_base = OTHER; note = 2'-O-methylguanosine-3'-phosphorothioate
  modified_base 2: mod_base = OTHER; note = 2'-fluoroadenosine-3'-phosphorothioate
  modified_base 3: mod_base = OTHER; note = 2'-O-methyladenosine-3'-phosphate
  modified_base 4: mod_base = OTHER; note = 2'-O-methylguanosine-3'-phosphate
  modified_base 5: mod_base = OTHER; note = 2'-O-methyluridine-3'-phosphate
  modified_base 6: mod_base = OTHER; note = 2'-fluoroadenosine-3'-phosphate
  modified_base 7: mod_base = OTHER; note = 2'-O-methyluridine-3'-phosphate
  modified_base 8: mod_base = OTHER; note = 2'-fluorocytidine-3'-phosphate
  modified_base 9: mod_base = OTHER; note = 2'-fluoroadenosine-3'-phosphate
  modified_base 10: mod_base = OTHER; note = 2'-O-methylcytidine-3'-phosphate
  modified_base 11: mod_base = OTHER; note = 2'-O-methylcytidine-3'-phosphate
  modified_base 12: mod_base = OTHER; note = 2'-O-methyladenosine-3'-phosphate
  modified_base 13: mod_base = OTHER; note = 2'-O-methyladenosine-3'-phosphate
  modified_base 14: mod_base = OTHER; note = 2'-fluorouridine-3'-phosphate
  modified_base 15: mod_base = OTHER; note = 2'-O-methyluridine-3'-phosphate
  modified_base 16: mod_base = OTHER; note = 2'-fluoroadenosine-3'-phosphate
  modified_base 17: mod_base = OTHER; note = 2'-O-methylcytidine-3'-phosphate
  modified_base 18: mod_base = OTHER; note = 2'-O-methylcytidine-3'-phosphate
  modified_base 19: mod_base = OTHER; note = 2'-O-methylguanosine-3'-phosphate
  modified_base 20: mod_base = OTHER; note = 2'-O-methylcytidine-3'-phosphate
  modified_base 21: mod_base = OTHER; note = 2'-O-methylcytidine-3'-phosphorothioate
  modified_base 22: mod_base = OTHER; note = 2'-O-methyladenosine-3'-phosphorothioate
  modified_base 23: mod_base = OTHER; note = 2'-O-methylcytidine-3'-phosphate
gaagtatcaccaattaccgccac

SEQ ID NO: 2234 - RNA, 21 nt, synthetic construct
  source 1..21: mol_type = other RNA; note = Description of Artificial Sequence: Synthetic oligonucleotide
  modified_base 1: mod_base = OTHER; note = 2'-O-methylcytidine-3'-phosphorothioate
  modified_base 2: mod_base = OTHER; note = 2'-O-methyladenosine-3'-phosphorothioate
  modified_base 3: mod_base = OTHER; note = 2'-O-methylguanosine-3'-phosphate
  modified_base 4: mod_base = OTHER; note = 2'-O-methyluridine-3'-phosphate
  modified_base 5: mod_base = OTHER; note = 2'-O-methylguanosine-3'-phosphate
  modified_base 6: mod_base = OTHER; note = 2'-O-methylguanosine-3'-phosphate
  modified_base 7: mod_base = OTHER; note = 2'-fluorouridine-3'-phosphate
  modified_base 8: mod_base = OTHER; note = 2'-O-methyluridine-3'-phosphate
  modified_base 9: mod_base = OTHER; note = 2'-fluorocytidine-3'-phosphate
  modified_base 10: mod_base = OTHER; note = 2'-fluorouridine-3'-phosphate
  modified_base 11: mod_base = OTHER; note = 2'-fluorouridine-3'-phosphate
  modified_base 12: mod_base = OTHER; note = 2'-O-methyladenosine-3'-phosphate
  modified_base 13: mod_base = OTHER; note = 2'-O-methyladenosine-3'-phosphate
  modified_base 14: mod_base = OTHER; note = 2'-O-methyladenosine-3'-phosphate
  modified_base 15: mod_base = OTHER; note = 2'-O-methyluridine-3'-phosphate
  modified_base 16: mod_base = OTHER; note = 2'-O-methyluridine-3'-phosphate
  modified_base 17: mod_base = OTHER; note = 2'-O-methylguanosine-3'-phosphate
  modified_base 18: mod_base = OTHER; note = 2'-O-methyluridine-3'-phosphate
  modified_base 19: mod_base = OTHER; note = 2'-O-methyladenosine-3'-phosphate
  modified_base 20: mod_base = OTHER; note = 2'-O-methyladenosine-3'-phosphate
  modified_base 21: mod_base = OTHER; note = 2'-O-methylguanosine-3'-phosphate N-[tris(GalNAc-alkyl)-amidodecanoyl)]-4-hydroxyprolinol Hyp-(GalNAc-alkyl)3
cagtggttcttaaattgtaag

SEQ ID NO: 2235 - RNA, 23 nt, synthetic construct
  source 1..23: mol_type = other RNA; note = Description of Artificial Sequence: Synthetic oligonucleotide
  modified_base 1: mod_base = OTHER; note = 2'-O-methylcytidine-3'-phosphorothioate
  modified_base 2: mod_base = OTHER; note = 2'-fluorouridine -3'-phosphorothioate
  modified_base 3: mod_base = OTHER; note = 2'-O-methyluridine-3'-phosphate
  modified_base 4: mod_base = OTHER; note = 2'-O-methyladenosine-3'-phosphate
  modified_base 5: mod_base = OTHER; note = 2'-O-methylcytidine-3'-phosphate
  modified_base 6: mod_base = OTHER; note = 2'-fluoroadenosine-3'-phosphate
  modified_base 7: mod_base = OTHER; note = 2'-O-methyladenosine-3'-phosphate
  modified_base 8: mod_base = OTHER; note = 2'-fluorouridine-3'-phosphate
  modified_base 9: mod_base = OTHER; note = 2'-fluorouridine-3'-phosphate
  modified_base 10: mod_base = OTHER; note = 2'-O-methyluridine-3'-phosphate
  modified_base 11: mod_base = OTHER; note = 2'-O-methyladenosine-3'-phosphate
  modified_base 12: mod_base = OTHER; note = 2'-O-methyladenosine-3'-phosphate
  modified_base 13: mod_base = OTHER; note = 2'-O-methylguanosine-3'-phosphate
  modified_base 14: mod_base = OTHER; note = 2'-fluoroadenosine-3'-phosphate
  modified_base 15: mod_base = OTHER; note = 2'-O-methyladenosine-3'-phosphate
  modified_base 16: mod_base = OTHER; note = 2'-fluorocytidine-3'-phosphate
  modified_base 17: mod_base = OTHER; note = 2'-O-methylcytidine-3'-phosphate
  modified_base 18: mod_base = OTHER; note = 2'-O-methyladenosine-3'-phosphate
  modified_base 19: mod_base = OTHER; note = 2'-O-methylcytidine-3'-phosphate
  modified_base 20: mod_base = OTHER; note = 2'-O-methyluridine-3'-phosphate
  modified_base 21: mod_base = OTHER; note = 2'-O-methylguanosine-3'-phosphorothioate
  modified_base 22: mod_base = OTHER; note = 2'-O-methyluridine-3'-phosphorothioate
  modified_base 23: mod_base = OTHER; note = 2'-O-methyluridine-3'-phosphate
cttacaatttaagaaccactgtt

SEQ ID NO: 2236 - RNA, 21 nt, synthetic construct
  source 1..21: mol_type = other RNA; note = Description of Artificial Sequence: Synthetic oligonucleotide
  modified_base 1: mod_base = OTHER; note = 2'-O-methyladenosine-3'-phosphorothioate
  modified_base 2: mod_base = OTHER; note = 2'-O-methylguanosine-3'-phosphorothioate
  modified_base 3: mod_base = OTHER; note = 2'-O-methyluridine-3'-phosphate
  modified_base 4: mod_base = OTHER; note = 2'-O-methylguanosine-3'-phosphate
  modified_base 5: mod_base = OTHER; note = 2'-O-methylguanosine-3'-phosphate
  modified_base 6: mod_base = OTHER; note = 2'-O-methyluridine-3'-phosphate
  modified_base 7: mod_base = OTHER; note = 2'-fluorouridine-3'-phosphate
  modified_base 8: mod_base = OTHER; note = 2'-O-methylcytidine-3'-phosphate
  modified_base 9: mod_base = OTHER; note = 2'-fluorouridine-3'-phosphate
  modified_base 10: mod_base = OTHER; note = 2'-fluorouridine-3'-phosphate
  modified_base 11: mod_base = OTHER; note = 2'-fluoroadenosine-3'-phosphate
  modified_base 12: mod_base = OTHER; note = 2'-O-methyladenosine-3'-phosphate
  modified_base 13: mod_base = OTHER; note = 2'-O-methyladenosine-3'-phosphate
  modified_base 14: mod_base = OTHER; note = 2'-O-methyluridine-3'-phosphate
  modified_base 15: mod_base = OTHER; note = 2'-O-methyluridine-3'-phosphate
  modified_base 16: mod_base = OTHER; note = 2'-O-methylguanosine-3'-phosphate
  modified_base 17: mod_base = OTHER; note = 2'-O-methyluridine-3'-phosphate
  modified_base 18: mod_base = OTHER; note = 2'-O-methyladenosine-3'-phosphate
  modified_base 19: mod_base = OTHER; note = 2'-O-methyladenosine-3'-phosphate
  modified_base 20: mod_base = OTHER; note = 2'-O-methylguanosine-3'-phosphate
  modified_base 21: mod_base = OTHER; note = 2'-O-methylcytidine-3'-phosphate N-[tris(GalNAc-alkyl)-amidodecanoyl)]-4-hydroxyprolinol Hyp-(GalNAc-alkyl)3
agtggttcttaaattgtaagc

SEQ ID NO: 2237 - RNA, 23 nt, synthetic construct
  source 1..23: mol_type = other RNA; note = Description of Artificial Sequence: Synthetic oligonucleotide
  modified_base 1: mod_base = OTHER; note = 2'-O-methylguanosine-3'-phosphorothioate
  modified_base 2: mod_base = OTHER; note = 2'-fluorocytidine-3'-phosphorothioate
  modified_base 3: mod_base = OTHER; note = 2'-O-methyluridine-3'-phosphate
  modified_base 4: mod_base = OTHER; note = 2'-O-methyluridine-3'-phosphate
  modified_base 5: mod_base = OTHER; note = 2'-O-methyladenosine-3'-phosphate
  modified_base 6: mod_base = OTHER; note = 2'-fluorocytidine-3'-phosphate
  modified_base 7: mod_base = OTHER; note = 2'-O-methyladenosine-3'-phosphate
  modified_base 8: mod_base = OTHER; note = 2'-fluoroadenosine-3'-phosphate
  modified_base 9: mod_base = OTHER; note = 2'-fluorouridine-3'-phosphate
  modified_base 10: mod_base = OTHER; note = 2'-O-methyluridine-3'-phosphate
  modified_base 11: mod_base = OTHER; note = 2'-O-methyluridine-3'-phosphate
  modified_base 12: mod_base = OTHER; note = 2'-O-methyladenosine-3'-phosphate
  modified_base 13: mod_base = OTHER; note = 2'-O-methyladenosine-3'-phosphate
  modified_base 14: mod_base = OTHER; note = 2'-fluoroguanosine-3'-phosphate
  modified_base 15: mod_base = OTHER; note = 2'-O-methyladenosine-3'-phosphate
  modified_base 16: mod_base = OTHER; note = 2'-fluoroadenosine-3'-phosphate
  modified_base 17: mod_base = OTHER; note = 2'-O-methylcytidine-3'-phosphate
  modified_base 18: mod_base = OTHER; note = 2'-O-methylcytidine-3'-phosphate
  modified_base 19: mod_base = OTHER; note = 2'-O-methyladenosine-3'-phosphate
  modified_base 20: mod_base = OTHER; note = 2'-O-methylcytidine-3'-phosphate
  modified_base 21: mod_base = OTHER; note = 2'-O-methyluridine-3'-phosphorothioate
  modified_base 22: mod_base = OTHER; note = 2'-O-methylguanosine-3'-phosphorothioate
  modified_base 23: mod_base = OTHER; note = 2'-O-methyluridine-3'-phosphate
gcttacaatttaagaaccactgt

SEQ ID NO: 2238 - RNA, 21 nt, synthetic construct
  source 1..21: mol_type = other RNA; note = Description of Artificial Sequence: Synthetic oligonucleotide
  modified_base 1: mod_base = OTHER; note = 2'-O-methyladenosine-3'-phosphorothioate
  modified_base 2: mod_base = OTHER; note = 2'-O-methyladenosine-3'-phosphorothioate
  modified_base 3: mod_base = OTHER; note = 2'-O-methyladenosine-3'-phosphate
  modified_base 4: mod_base = OTHER; note = 2'-O-methyladenosine-3'-phosphate
  modified_base 5: mod_base = OTHER; note = 2'-O-methylcytidine-3'-phosphate
  modified_base 6: mod_base = OTHER; note = 2'-O-methyladenosine-3'-phosphate
  modified_base 7: mod_base = OTHER; note = 2'-fluoroguanosine-3'-phosphate
  modified_base 8: mod_base = OTHER; note = 2'-O-methyluridine-3'-phosphate
  modified_base 9: mod_base = OTHER; note = 2'-fluoroguanosine-3'-phosphate
  modified_base 10: mod_base = OTHER; note = 2'-fluoroguanosine-3'-phosphate
  modified_base 11: mod_base = OTHER; note = 2'-fluorouridine-3'-phosphate
  modified_base 12: mod_base = OTHER; note = 2'-O-methyluridine-3'-phosphate
  modified_base 13: mod_base = OTHER; note = 2'-O-methylcytidine-3'-phosphate
  modified_base 14: mod_base = OTHER; note = 2'-O-methyluridine-3'-phosphate
  modified_base 15: mod_base = OTHER; note = 2'-O-methyluridine-3'-phosphate
  modified_base 16: mod_base = OTHER; note = 2'-O-methyladenosine-3'-phosphate
  modified_base 17: mod_base = OTHER; note = 2'-O-methyladenosine-3'-phosphate
  modified_base 18: mod_base = OTHER; note = 2'-O-methyladenosine-3'-phosphate
  modified_base 19: mod_base = OTHER; note = 2'-O-methyluridine-3'-phosphate
  modified_base 20: mod_base = OTHER; note = 2'-O-methyluridine-3'-phosphate
  modified_base 21: mod_base = OTHER; note = 2'-O-methylguanosine-3'-phosphate N-[tris(GalNAc-alkyl)-amidodecanoyl)]-4-hydroxyprolinol Hyp-(GalNAc-alkyl)3
aaaacagtggttcttaaattg

SEQ ID NO: 2239 - RNA, 23 nt, synthetic construct
  source 1..23: mol_type = other RNA; note = Description of Artificial Sequence: Synthetic oligonucleotide
  modified_base 1: mod_base = OTHER; note = 2'-O-methylcytidine-3'-phosphorothioate
  modified_base 2: mod_base = OTHER; note = 2'-fluoroadenosine-3'-phosphorothioate
  modified_base 3: mod_base = OTHER; note = 2'-O-methyladenosine-3'-phosphate
  modified_base 4: mod_base = OTHER; note = 2'-O-methyluridine-3'-phosphate
  modified_base 5: mod_base = OTHER; note = 2'-O-methyluridine-3'-phosphate
  modified_base 6: mod_base = OTHER; note = 2'-fluorouridine-3'-phosphate
  modified_base 7: mod_base = OTHER; note = 2'-O-methyladenosine-3'-phosphate
  modified_base 8: mod_base = OTHER; note = 2'-fluoroadenosine-3'-phosphate
  modified_base 9: mod_base = OTHER; note = 2'-fluoroguanosine-3'-phosphate
  modified_base 10: mod_base = OTHER; note = 2'-O-methyladenosine-3'-phosphate
  modified_base 11: mod_base = OTHER; note = 2'-O-methyladenosine-3'-phosphate
  modified_base 12: mod_base = OTHER; note = 2'-O-methylcytidine-3'-phosphate
  modified_base 13: mod_base = OTHER; note = 2'-O-methylcytidine-3'-phosphate
  modified_base 14: mod_base = OTHER; note = 2'-fluoroadenosine-3'-phosphate
  modified_base 15: mod_base = OTHER; note = 2'-O-methylcytidine-3'-phosphate
  modified_base 16: mod_base = OTHER; note = 2'-fluorouridine-3'-phosphate
  modified_base 17: mod_base = OTHER; note = 2'-O-methylguanosine-3'-phosphate
  modified_base 18: mod_base = OTHER; note = 2'-O-methyluridine-3'-phosphate
  modified_base 19: mod_base = OTHER; note = 2'-O-methyluridine-3'-phosphate
  modified_base 20: mod_base = OTHER; note = 2'-O-methyluridine-3'-phosphate
  modified_base 21: mod_base = OTHER; note = 2'-O-methyluridine-3'-phosphorothioate
  modified_base 22: mod_base = OTHER; note = 2'-O-methyladenosine-3'-phosphorothioate
  modified_base 23: mod_base = OTHER; note = 2'-O-methyladenosine-3'-phosphate
caatttaagaaccactgttttaa

SEQ ID NO: 2240 - RNA, 21 nt, synthetic construct
  source 1..21: mol_type = other RNA; note = Description of Artificial Sequence: Synthetic oligonucleotide
  modified_base 1: mod_base = OTHER; note = 2'-O-methyluridine-3'-phosphorothioate
  modified_base 2: mod_base = OTHER; note = 2'-O-methyladenosine-3'-phosphorothioate
  modified_base 3: mod_base = OTHER; note = 2'-O-methyladenosine-3'-phosphate
  modified_base 4: mod_base = OTHER; note = 2'-O-methyladenosine-3'-phosphate
  modified_base 5: mod_base = OTHER; note = 2'-O-methyladenosine-3'-phosphate
  modified_base 6: mod_base = OTHER; note = 2'-O-methylcytidine-3'-phosphate
  modified_base 7: mod_base = OTHER; note = 2'-fluoroadenosine-3'-phosphate
  modified_base 8: mod_base = OTHER; note = 2'-O-methylguanosine-3'-phosphate
  modified_base 9: mod_base = OTHER; note = 2'-fluorouridine-3'-phosphate
  modified_base 10: mod_base = OTHER; note = 2'-fluoroguanosine-3'-phosphate
  modified_base 11: mod_base = OTHER; note = 2'-fluoroguanosine-3'-phosphate
  modified_base 12: mod_base = OTHER; note = 2'-O-methyluridine-3'-phosphate
  modified_base 13: mod_base = OTHER; note = 2'-O-methyluridine-3'-phosphate
  modified_base 14: mod_base = OTHER; note = 2'-O-methylcytidine-3'-phosphate
  modified_base 15: mod_base = OTHER; note = 2'-O-methyluridine-3'-phosphate
  modified_base 16: mod_base = OTHER; note = 2'-O-methyluridine-3'-phosphate
  modified_base 17: mod_base = OTHER; note = 2'-O-methyladenosine-3'-phosphate
  modified_base 18: mod_base = OTHER; note = 2'-O-methyladenosine-3'-phosphate
  modified_base 19: mod_base = OTHER; note = 2'-O-methyladenosine-3'-phosphate
  modified_base 20: mod_base = OTHER; note = 2'-O-methyluridine-3'-phosphate
  modified_base 21: mod_base = OTHER; note = 2'-O-methyluridine-3'-phosphate N-[tris(GalNAc-alkyl)-amidodecanoyl)]-4-hydroxyprolinol Hyp-(GalNAc-alkyl)3
taaaacagtggttcttaaatt

SEQ ID NO: 2241 - RNA, 23 nt, synthetic construct
  source 1..23: mol_type = other RNA; note = Description of Artificial Sequence: Synthetic oligonucleotide
  modified_base 1: mod_base = OTHER; note = 2'-O-methyladenosine-3'-phosphorothioate
  modified_base 2: mod_base = OTHER; note = 2'-fluoroadenosine-3'-phosphorothioate
  modified_base 3: mod_base = OTHER; note = 2'-O-methyluridine-3'-phosphate
  modified_base 4: mod_base = OTHER; note = 2'-O-methyluridine-3'-phosphate
  modified_base 5: mod_base = OTHER; note = 2'-O-methyluridine-3'-phosphate
  modified_base 6: mod_base = OTHER; note = 2'-fluoroadenosine-3'-phosphate
  modified_base 7: mod_base = OTHER; note = 2'-O-methyladenosine-3'-phosphate
  modified_base 8: mod_base = OTHER; note = 2'-fluoroguanosine-3'-phosphate
  modified_base 9: mod_base = OTHER; note = 2'-fluoroadenosine-3'-phosphate
  modified_base 10: mod_base = OTHER; note = 2'-O-methyladenosine-3'-phosphate
  modified_base 11: mod_base = OTHER; note = 2'-O-methylcytidine-3'-phosphate
  modified_base 12: mod_base = OTHER; note = 2'-O-methylcytidine-3'-phosphate
  modified_base 13: mod_base = OTHER; note = 2'-O-methyladenosine-3'-phosphate
  modified_base 14: mod_base = OTHER; note = 2'-fluorocytidine-3'-phosphate
  modified_base 15: mod_base = OTHER; note = 2'-O-methyluridine-3'-phosphate
  modified_base 16: mod_base = OTHER; note = 2'-fluoroguanosine-3'-phosphate
  modified_base 17: mod_base = OTHER; note = 2'-O-methyluridine-3'-phosphate
  modified_base 18: mod_base = OTHER; note = 2'-O-methyluridine-3'-phosphate
  modified_base 19: mod_base = OTHER; note = 2'-O-methyluridine-3'-phosphate
  modified_base 20: mod_base = OTHER; note = 2'-O-methyluridine-3'-phosphate
  modified_base 21: mod_base = OTHER; note = 2'-O-methyladenosine-3'-phosphorothioate
  modified_base 22: mod_base = OTHER; note = 2'-O-methyladenosine-3'-phosphorothioate
  modified_base 23: mod_base = OTHER; note = 2'-O-methyladenosine-3'-phosphate
aatttaagaaccactgttttaaa

SEQ ID NO: 2242 - RNA, 21 nt, synthetic construct
  source 1..21: mol_type = other RNA; note = Description of Artificial Sequence: Synthetic oligonucleotide
  modified_base 1: mod_base = OTHER; note = 2'-O-methyladenosine-3'-phosphorothioate
  modified_base 2: mod_base = OTHER; note = 2'-O-methylcytidine-3'-phosphorothioate
  modified_base 3: mod_base = OTHER; note = 2'-O-methylcytidine-3'-phosphate
  modified_base 4: mod_base = OTHER; note = 2'-O-methyluridine-3'-phosphate
  modified_base 5: mod_base = OTHER; note = 2'-O-methylguanosine-3'-phosphate
  modified_base 6: mod_base = OTHER; note = 2'-O-methyluridine-3'-phosphate
  modified_base 7: mod_base = OTHER; note = 2'-fluoroadenosine-3'-phosphate
  modified_base 8: mod_base = OTHER; note = 2'-O-methyluridine-3'-phosphate
  modified_base 9: mod_base = OTHER; note = 2'-fluorouridine-3'-phosphate
  modified_base 10: mod_base = OTHER; note = 2'-fluorocytidine-3'-phosphate
  modified_base 11: mod_base = OTHER; note = 2'-fluorouridine-3'-phosphate
  modified_base 12: mod_base = OTHER; note = 2'-O-methylguanosine-3'-phosphate
  modified_base 13: mod_base = OTHER; note = 2'-O-methyluridine-3'-phosphate
  modified_base 14: mod_base = OTHER; note = 2'-O-methyluridine-3'-phosphate
  modified_base 15: mod_base = OTHER; note = 2'-O-methyluridine-3'-phosphate
  modified_base 16: mod_base = OTHER; note = 2'-O-methyladenosine-3'-phosphate
  modified_base 17: mod_base = OTHER; note = 2'-O-methylcytidine-3'-phosphate
  modified_base 18: mod_base = OTHER; note = 2'-O-methyladenosine-3'-phosphate
  modified_base 19: mod_base = OTHER; note = 2'-O-methyluridine-3'-phosphate
  modified_base 20: mod_base = OTHER; note = 2'-O-methylguanosine-3'-phosphate
  modified_base 21: mod_base = OTHER; note = 2'-O-methyluridine-3'-phosphate N-[tris(GalNAc-alkyl)-amidodecanoyl)]-4-hydroxyprolinol Hyp-(GalNAc-alkyl)3
acctgtattctgtttacatgt

SEQ ID NO: 2243 - RNA, 23 nt, synthetic construct
  source 1..23: mol_type = other RNA; note = Description of Artificial Sequence: Synthetic oligonucleotide
  modified_base 1: mod_base = OTHER; note = 2'-O-methyladenosine-3'-phosphorothioate
  modified_base 2: mod_base = OTHER; note = 2'-fluorocytidine-3'-phosphorothioate
  modified_base 3: mod_base = OTHER; note = 2'-O-methyladenosine-3'-phosphate
  modified_base 4: mod_base = OTHER; note = 2'-O-methyluridine-3'-phosphate
  modified_base 5: mod_base = OTHER; note = 2'-O-methylguanosine-3'-phosphate
  modified_base 6: mod_base = OTHER; note = 2'-fluorouridine-3'-phosphate
  modified_base 7: mod_base = OTHER; note = 2'-O-methyladenosine-3'-phosphate
  modified_base 8: mod_base = OTHER; note = 2'-fluoroadenosine-3'-phosphate
  modified_base 9: mod_base = OTHER; note = 2'-fluoroadenosine-3'-phosphate
  modified_base 10: mod_base = OTHER; note = 2'-O-methylcytidine-3'-phosphate
  modified_base 11: mod_base = OTHER; note = 2'-O-methyladenosine-3'-phosphate
  modified_base 12: mod_base = OTHER; note = 2'-O-methylguanosine-3'-phosphate
  modified_base 13: mod_base = OTHER; note = 2'-O-methyladenosine-3'-phosphate
  modified_base 14: mod_base = OTHER; note = 2'-fluoroadenosine-3'-phosphate
  modified_base 15: mod_base = OTHER; note = 2'-O-methyluridine-3'-phosphate
  modified_base 16: mod_base = OTHER; note = 2'-fluoroadenosine-3'-phosphate
  modified_base 17: mod_base = OTHER; note = 2'-O-methylcytidine-3'-phosphate
  modified_base 18: mod_base = OTHER; note = 2'-O-methyladenosine-3'-phosphate
  modified_base 19: mod_base = OTHER; note = 2'-O-methylguanosine-3'-phosphate
  modified_base 20: mod_base = OTHER; note = 2'-O-methylguanosine-3'-phosphate
  modified_base 21: mod_base = OTHER; note = 2'-O-methyluridine-3'-phosphorothioate
  modified_base 22: mod_base = OTHER; note = 2'-O-methyluridine-3'-phosphorothioate
  modified_base 23: mod_base = OTHER; note = 2'-O-methyladenosine-3'-phosphate
acatgtaaacagaatacaggtta

SEQ ID NO: 2244 - RNA, 21 nt, synthetic construct
  source 1..21: mol_type = other RNA; note = Description of Artificial Sequence: Synthetic oligonucleotide
  modified_base 1: mod_base = OTHER; note = 2'-O-methylcytidine-3'-phosphorothioate
  modified_base 2: mod_base = OTHER; note = 2'-O-methylcytidine-3'-phosphorothioate
  modified_base 3: mod_base = OTHER; note = 2'-O-methyluridine-3'-phosphate
  modified_base 4: mod_base = OTHER; note = 2'-O-methylguanosine-3'-phosphate
  modified_base 5: mod_base = OTHER; note = 2'-O-methyluridine-3'-phosphate
  modified_base 6: mod_base = OTHER; note = 2'-O-methyladenosine-3'-phosphate
  modified_base 7: mod_base = OTHER; note = 2'-fluorouridine-3'-phosphate
  modified_base 8: mod_base = OTHER; note = 2'-O-methyluridine-3'-phosphate
  modified_base 9: mod_base = OTHER; note = 2'-fluorocytidine-3'-phosphate
  modified_base 10: mod_base = OTHER; note = 2'-fluorouridine-3'-phosphate
  modified_base 11: mod_base = OTHER; note = 2'-fluoroguanosine-3'-phosphate
  modified_base 12: mod_base = OTHER; note = 2'-O-methyluridine-3'-phosphate
  modified_base 13: mod_base = OTHER; note = 2'-O-methyluridine-3'-phosphate
  modified_base 14: mod_base = OTHER; note = 2'-O-methyluridine-3'-phosphate
  modified_base 15: mod_base = OTHER; note = 2'-O-methyladenosine-3'-phosphate
  modified_base 16: mod_base = OTHER; note = 2'-O-methylcytidine-3'-phosphate
  modified_base 17: mod_base = OTHER; note = 2'-O-methyladenosine-3'-phosphate
  modified_base 18: mod_base = OTHER; note = 2'-O-methyluridine-3'-phosphate
  modified_base 19: mod_base = OTHER; note = 2'-O-methylguanosine-3'-phosphate
  modified_base 20: mod_base = OTHER; note = 2'-O-methyluridine-3'-phosphate
  modified_base 21: mod_base = OTHER; note = 2'-O-methylcytidine-3'-phosphate N-[tris(GalNAc-alkyl)-amidodecanoyl)]-4-hydroxyprolinol Hyp-(GalNAc-alkyl)3
cctgtattctgtttacatgtc

SEQ ID NO: 2245 - RNA, 23 nt, synthetic construct
  source 1..23: mol_type = other RNA; note = Description of Artificial Sequence: Synthetic oligonucleotide
  modified_base 1: mod_base = OTHER; note = 2'-O-methylguanosine-3'-phosphorothioate
  modified_base 2: mod_base = OTHER; note = 2'-fluoroadenosine-3'-phosphorothioate
  modified_base 3: mod_base = OTHER; note = 2'-O-methylcytidine-3'-phosphate
  modified_base 4: mod_base = OTHER; note = 2'-O-methyladenosine-3'-phosphate
  modified_base 5: mod_base = OTHER; note = 2'-O-methyluridine-3'-phosphate
  modified_base 6: mod_base = OTHER; note = 2'-fluoroguanosine-3'-phosphate
  modified_base 7: mod_base = OTHER; note = 2'-O-methyluridine-3'-phosphate
  modified_base 8: mod_base = OTHER; note = 2'-fluoroadenosine-3'-phosphate
  modified_base 9: mod_base = OTHER; note = 2'-fluoroadenosine-3'-phosphate
  modified_base 10: mod_base = OTHER; note = 2'-O-methyladenosine-3'-phosphate
  modified_base 11: mod_base = OTHER; note = 2'-O-methylcytidine-3'-phosphate
  modified_base 12: mod_base = OTHER; note = 2'-O-methyladenosine-3'-phosphate
  modified_base 13: mod_base = OTHER; note = 2'-O-methylguanosine-3'-phosphate
  modified_base 14: mod_base = OTHER; note = 2'-fluoroadenosine-3'-phosphate
  modified_base 15: mod_base = OTHER; note = 2'-O-methyladenosine-3'-phosphate
  modified_base 16: mod_base = OTHER; note = 2'-fluorouridine-3'-phosphate
  modified_base 17: mod_base = OTHER; note = 2'-O-methyladenosine-3'-phosphate
  modified_base 18: mod_base = OTHER; note = 2'-O-methylcytidine-3'-phosphate
  modified_base 19: mod_base = OTHER; note = 2'-O-methyladenosine-3'-phosphate
  modified_base 20: mod_base = OTHER; note = 2'-O-methylguanosine-3'-phosphate
  modified_base 21: mod_base = OTHER; note = 2'-O-methylguanosine-3'-phosphorothioate
  modified_base 22: mod_base = OTHER; note = 2'-O-methyluridine-3'-phosphorothioate
  modified_base 23: mod_base = OTHER; note = 2'-O-methyluridine-3'-phosphate
gacatgtaaacagaatacaggtt

SEQ ID NO: 2246 - RNA, 21 nt, synthetic construct
  source 1..21: mol_type = other RNA; note = Description of Artificial Sequence: Synthetic oligonucleotide
  modified_base 1: mod_base = OTHER; note = 2'-O-methyladenosine-3'-phosphorothioate
  modified_base 2: mod_base = OTHER; note = 2'-O-methyluridine-3'-phosphorothioate
  modified_base 3: mod_base = OTHER; note = 2'-O-methyluridine-3'-phosphate
  modified_base 4: mod_base = OTHER; note = 2'-O-methyladenosine-3'-phosphate
  modified_base 5: mod_base = OTHER; note = 2'-O-methyladenosine-3'-phosphate
  modified_base 6: mod_base = OTHER; note = 2'-O-methylcytidine-3'-phosphate
  modified_base 7: mod_base = OTHER; note = 2'-fluorocytidine-3'-phosphate
  modified_base 8: mod_base = OTHER; note = 2'-O-methyluridine-3'-phosphate
  modified_base 9: mod_base = OTHER; note = 2'-fluoroguanosine-3'-phosphate
  modified_base 10: mod_base = OTHER; note = 2'-fluorouridine-3'-phosphate
  modified_base 11: mod_base = OTHER; note = 2'-fluoroadenosine-3'-phosphate
  modified_base 12: mod_base = OTHER; note = 2'-O-methyluridine-3'-phosphate
  modified_base 13: mod_base = OTHER; note = 2'-O-methyluridine-3'-phosphate
  modified_base 14: mod_base = OTHER; note = 2'-O-methylcytidine-3'-phosphate
  modified_base 15: mod_base = OTHER; note = 2'-O-methyluridine-3'-phosphate
  modified_base 16: mod_base = OTHER; note = 2'-O-methylguanosine-3'-phosphate
  modified_base 17: mod_base = OTHER; note = 2'-O-methyluridine-3'-phosphate
  modified_base 18: mod_base = OTHER; note = 2'-O-methyluridine-3'-phosphate
  modified_base 19: mod_base = OTHER; note = 2'-O-methyluridine-3'-phosphate
  modified_base 20: mod_base = OTHER; note = 2'-O-methyladenosine-3'-phosphate
  modified_base 21: mod_base = OTHER; note = 2'-O-methylcytidine-3'-phosphate N-[tris(GalNAc-alkyl)-amidodecanoyl)]-4-hydroxyprolinol Hyp-(GalNAc-alkyl)3
attaacctgtattctgtttac

SEQ ID NO: 2247 - RNA, 23 nt, synthetic construct
  source 1..23: mol_type = other RNA; note = Description of Artificial Sequence: Synthetic oligonucleotide
  modified_base 1: mod_base = OTHER; note = 2'-O-methylguanosine-3'-phosphorothioate
  modified_base 2: mod_base = OTHER; note = 2'-fluorouridine -3'-phosphorothioate
  modified_base 3: mod_base = OTHER; note = 2'-O-methyladenosine-3'-phosphate
  modified_base 4: mod_base = OTHER; note = 2'-O-methyladenosine-3'-phosphate
  modified_base 5: mod_base = OTHER; note = 2'-O-methyladenosine-3'-phosphate
  modified_base 6: mod_base = OTHER; note = 2'-fluorocytidine-3'-phosphate
  modified_base 7: mod_base = OTHER; note = 2'-O-methyladenosine-3'-phosphate
  modified_base 8: mod_base = OTHER; note = 2'-fluoroguanosine-3'-phosphate
  modified_base 9: mod_base = OTHER; note = 2'-fluoroadenosine-3'-phosphate
  modified_base 10: mod_base = OTHER; note = 2'-O-methyladenosine-3'-phosphate
  modified_base 11: mod_base = OTHER; note = 2'-O-methyluridine-3'-phosphate
  modified_base 12: mod_base = OTHER; note = 2'-O-methyladenosine-3'-phosphate
  modified_base 13: mod_base = OTHER; note = 2'-O-methylcytidine-3'-phosphate
  modified_base 14: mod_base = OTHER; note = 2'-fluoroadenosine-3'-phosphate
  modified_base 15: mod_base = OTHER; note = 2'-O-methylguanosine-3'-phosphate
  modified_base 16: mod_base = OTHER; note = 2'-fluoroguanosine-3'-phosphate
  modified_base 17: mod_base = OTHER; note = 2'-O-methyluridine-3'-phosphate
  modified_base 18: mod_base = OTHER; note = 2'-O-methyluridine-3'-phosphate
  modified_base 19: mod_base = OTHER; note = 2'-O-methyladenosine-3'-phosphate
  modified_base 20: mod_base = OTHER; note = 2'-O-methyladenosine-3'-phosphate
  modified_base 21: mod_base = OTHER; note = 2'-O-methyluridine-3'-phosphorothioate
  modified_base 22: mod_base = OTHER; note = 2'-O-methyladenosine-3'-phosphorothioate
  modified_base 23: mod_base = OTHER; note = 2'-O-methyladenosine-3'-phosphate
gtaaacagaatacaggttaataa

SEQ ID NO: 2248 - RNA, 21 nt, synthetic construct
  source 1..21: mol_type = other RNA; note = Description of Artificial Sequence: Synthetic oligonucleotide
  modified_base 1: mod_base = OTHER; note = 2'-O-methyluridine-3'-phosphorothioate
  modified_base 2: mod_base = OTHER; note = 2'-O-methyladenosine-3'-phosphorothioate
  modified_base 3: mod_base = OTHER; note = 2'-O-methyluridine-3'-phosphate
  modified_base 4: mod_base = OTHER; note = 2'-O-methyluridine-3'-phosphate
  modified_base 5: mod_base = OTHER; note = 2'-O-methyladenosine-3'-phosphate
  modified_base 6: mod_base = OTHER; note = 2'-O-methyladenosine-3'-phosphate
  modified_base 7: mod_base = OTHER; note = 2'-fluorocytidine-3'-phosphate
  modified_base 8: mod_base = OTHER; note = 2'-O-methylcytidine-3'-phosphate
  modified_base 9: mod_base = OTHER; note = 2'-fluorouridine-3'-phosphate
  modified_base 10: mod_base = OTHER; note = 2'-fluoroguanosine-3'-phosphate
  modified_base 11: mod_base = OTHER; note = 2'-fluorouridine-3'-phosphate
  modified_base 12: mod_base = OTHER; note = 2'-O-methyladenosine-3'-phosphate
  modified_base 13: mod_base = OTHER; note = 2'-O-methyluridine-3'-phosphate
  modified_base 14: mod_base = OTHER; note = 2'-O-methyluridine-3'-phosphate
  modified_base 15: mod_base = OTHER; note = 2'-O-methylcytidine-3'-phosphate
  modified_base 16: mod_base = OTHER; note = 2'-O-methyluridine-3'-phosphate
  modified_base 17: mod_base = OTHER; note = 2'-O-methylguanosine-3'-phosphate
  modified_base 18: mod_base = OTHER; note = 2'-O-methyluridine-3'-phosphate
  modified_base 19: mod_base = OTHER; note = 2'-O-methyluridine-3'-phosphate
  modified_base 20: mod_base = OTHER; note = 2'-O-methyluridine-3'-phosphate
  modified_base 21: mod_base = OTHER; note = 2'-O-methyladenosine-3'-phosphate N-[tris(GalNAc-alkyl)-amidodecanoyl)]-4-hydroxyprolinol Hyp-(GalNAc-alkyl)3
tattaacctgtattctgttta

SEQ ID NO: 2249 - RNA, 23 nt, synthetic construct
  source 1..23: mol_type = other RNA; note = Description of Artificial Sequence: Synthetic oligonucleotide
  modified_base 1: mod_base = OTHER; note = 2'-O-methyluridine-3'-phosphorothioate
  modified_base 2: mod_base = OTHER; note = 2'-fluoroadenosine-3'-phosphorothioate
  modified_base 3: mod_base = OTHER; note = 2'-O-methyladenosine-3'-phosphate
  modified_base 4: mod_base = OTHER; note = 2'-O-methyladenosine-3'-phosphate
  modified_base 5: mod_base = OTHER; note = 2'-O-methylcytidine-3'-phosphate
  modified_base 6: mod_base = OTHER; note = 2'-fluoroadenosine-3'-phosphate
  modified_base 7: mod_base = OTHER; note = 2'-O-methylguanosine-3'-phosphate
  modified_base 8: mod_base = OTHER; note = 2'-fluoroadenosine-3'-phosphate
  modified_base 9: mod_base = OTHER; note = 2'-fluoroadenosine-3'-phosphate
  modified_base 10: mod_base = OTHER; note = 2'-O-methyluridine-3'-phosphate
  modified_base 11: mod_base = OTHER; note = 2'-O-methyladenosine-3'-phosphate
  modified_base 12: mod_base = OTHER; note = 2'-O-methylcytidine-3'-phosphate
  modified_base 13: mod_base = OTHER; note = 2'-O-methyladenosine-3'-phosphate
  modified_base 14: mod_base = OTHER; note = 2'-fluoroguanosine-3'-phosphate
  modified_base 15: mod_base = OTHER; note = 2'-O-methylguanosine-3'-phosphate
  modified_base 16: mod_base = OTHER; note = 2'-fluorouridine-3'-phosphate
  modified_base 17: mod_base = OTHER; note = 2'-O-methyluridine-3'-phosphate
  modified_base 18: mod_base = OTHER; note = 2'-O-methyladenosine-3'-phosphate
  modified_base 19: mod_base = OTHER; note = 2'-O-methyladenosine-3'-phosphate
  modified_base 20: mod_base = OTHER; note = 2'-O-methyluridine-3'-phosphate
  modified_base 21: mod_base = OTHER; note = 2'-O-methyladenosine-3'-phosphorothioate
  modified_base 22: mod_base = OTHER; note = 2'-O-methyladenosine-3'-phosphorothioate
  modified_base 23: mod_base = OTHER; note = 2'-O-methyladenosine-3'-phosphate
taaacagaatacaggttaataaa

SEQ ID NO: 2250 - RNA, 21 nt, synthetic construct
  source 1..21: mol_type = other RNA; note = Description of Artificial Sequence: Synthetic oligonucleotide
  modified_base 1: mod_base = OTHER; note = 2'-O-methyladenosine-3'-phosphorothioate
  modified_base 2: mod_base = OTHER; note = 2'-O-methyladenosine-3'-phosphorothioate
  modified_base 3: mod_base = OTHER; note = 2'-O-methylguanosine-3'-phosphate
  modified_base 4: mod_base = OTHER; note = 2'-O-methyladenosine-3'-phosphate
  modified_base 5: mod_base = OTHER; note = 2'-O-methyladenosine-3'-phosphate
  modified_base 6: mod_base = OTHER; note = 2'-O-methyladenosine-3'-phosphate
  modified_base 7: mod_base = OTHER; note = 2'-fluorocytidine-3'-phosphate
  modified_base 8: mod_base = OTHER; note = 2'-O-methyluridine-3'-phosphate
  modified_base 9: mod_base = OTHER; note = 2'-fluorouridine-3'-phosphate
  modified_base 10: mod_base = OTHER; note = 2'-fluorouridine-3'-phosphate
  modified_base 11: mod_base = OTHER; note = 2'-fluoroguanosine-3'-phosphate
  modified_base 12: mod_base = OTHER; note = 2'-O-methylguanosine-3'-phosphate
  modified_base 13: mod_base = OTHER; note = 2'-O-methylcytidine-3'-phosphate
  modified_base 14: mod_base = OTHER; note = 2'-O-methyluridine-3'-phosphate
  modified_base 15: mod_base = OTHER; note = 2'-O-methylguanosine-3'-phosphate
  modified_base 16: mod_base = OTHER; note = 2'-O-methyladenosine-3'-phosphate
  modified_base 17: mod_base = OTHER; note = 2'-O-methyluridine-3'-phosphate
  modified_base 18: mod_base = OTHER; note = 2'-O-methyladenosine-3'-phosphate
  modified_base 19: mod_base = OTHER; note = 2'-O-methyladenosine-3'-phosphate
  modified_base 20: mod_base = OTHER; note = 2'-O-methyluridine-3'-phosphate
  modified_base 21: mod_base = OTHER; note = 2'-O-methyladenosine-3'-phosphate N-[tris(GalNAc-alkyl)-amidodecanoyl)]-4-hydroxyprolinol Hyp-(GalNAc-alkyl)3
aagaaactttggctgataata

SEQ ID NO: 2251 - RNA, 23 nt, synthetic construct
  source 1..23: mol_type = other RNA; note = Description of Artificial Sequence: Synthetic oligonucleotide
  modified_base 1: mod_base = OTHER; note = 2'-O-methyluridine-3'-phosphorothioate
  modified_base 2: mod_base = OTHER; note = 2'-fluoroadenosine-3'-phosphorothioate
  modified_base 3: mod_base = OTHER; note = 2'-O-methyluridine-3'-phosphate
  modified_base 4: mod_base = OTHER; note = 2'-O-methyluridine-3'-phosphate
  modified_base 5: mod_base = OTHER; note = 2'-O-methyladenosine-3'-phosphate
  modified_base 6: mod_base = OTHER; note = 2'-fluorouridine-3'-phosphate
  modified_base 7: mod_base = OTHER; note = 2'-O-methylcytidine-3'-phosphate
  modified_base 8: mod_base = OTHER; note = 2'-fluoroadenosine-3'-phosphate
  modified_base 9: mod_base = OTHER; note = 2'-fluoroguanosine-3'-phosphate
  modified_base 10: mod_base = OTHER; note = 2'-O-methylcytidine-3'-phosphate
  modified_base 11: mod_base = OTHER; note = 2'-O-methylcytidine-3'-phosphate
  modified_base 12: mod_base = OTHER; note = 2'-O-methyladenosine-3'-phosphate
  modified_base 13: mod_base = OTHER; note = 2'-O-methyladenosine-3'-phosphate
  modified_base 14: mod_base = OTHER; note = 2'-fluoroadenosine-3'-phosphate
  modified_base 15: mod_base = OTHER; note = 2'-O-methylguanosine-3'-phosphate
  modified_base 16: mod_base = OTHER; note = 2'-fluorouridine-3'-phosphate
  modified_base 17: mod_base = OTHER; note = 2'-O-methyluridine-3'-phosphate
  modified_base 18: mod_base = OTHER; note = 2'-O-methyluridine-3'-phosphate
  modified_base 19: mod_base = OTHER; note = 2'-O-methylcytidine-3'-phosphate
  modified_base 20: mod_base = OTHER; note = 2'-O-methyluridine-3'-phosphate
  modified_base 21: mod_base = OTHER; note = 2'-O-methyluridine-3'-phosphorothioate
  modified_base 22: mod_base = OTHER; note = 2'-O-methylcytidine-3'-phosphorothioate
  modified_base 23: mod_base = OTHER; note = 2'-O-methyladenosine-3'-phosphate
tattatcagccaaagtttcttca

SEQ ID NO: 2252 - RNA, 21 nt, synthetic construct
  source 1..21: mol_type = other RNA; note = Description of Artificial Sequence: Synthetic oligonucleotide
  modified_base 1: mod_base = OTHER; note = 2'-O-methyladenosine-3'-phosphorothioate
  modified_base 2: mod_base = OTHER; note = 2'-O-methylguanosine-3'-phosphorothioate
  modified_base 3: mod_base = OTHER; note = 2'-O-methyladenosine-3'-phosphate
  modified_base 4: mod_base = OTHER; note = 2'-O-methyladenosine-3'-phosphate
  modified_base 5: mod_base = OTHER; note = 2'-O-methyladenosine-3'-phosphate
  modified_base 6: mod_base = OTHER; note = 2'-O-methylcytidine-3'-phosphate
  modified_base 7: mod_base = OTHER; note = 2'-fluorouridine-3'-phosphate
  modified_base 8: mod_base = OTHER; note = 2'-O-methyluridine-3'-phosphate
  modified_base 9: mod_base = OTHER; note = 2'-fluorouridine-3'-phosphate
  modified_base 10: mod_base = OTHER; note = 2'-fluoroguanosine-3'-phosphate
  modified_base 11: mod_base = OTHER; note = 2'-fluoroguanosine-3'-phosphate
  modified_base 12: mod_base = OTHER; note = 2'-O-methylcytidine-3'-phosphate
  modified_base 13: mod_base = OTHER; note = 2'-O-methyluridine-3'-phosphate
  modified_base 14: mod_base = OTHER; note = 2'-O-methylguanosine-3'-phosphate
  modified_base 15: mod_base = OTHER; note = 2'-O-methyladenosine-3'-phosphate
  modified_base 16: mod_base = OTHER; note = 2'-O-methyluridine-3'-phosphate
  modified_base 17: mod_base = OTHER; note = 2'-O-methyladenosine-3'-phosphate
  modified_base 18: mod_base = OTHER; note = 2'-O-methyladenosine-3'-phosphate
  modified_base 19: mod_base = OTHER; note = 2'-O-methyluridine-3'-phosphate
  modified_base 20: mod_base = OTHER; note = 2'-O-methyladenosine-3'-phosphate
  modified_base 21: mod_base = OTHER; note = 2'-O-methyluridine-3'-phosphate N-[tris(GalNAc-alkyl)-amidodecanoyl)]-4-hydroxyprolinol Hyp-(GalNAc-alkyl)3
agaaactttggctgataatat

SEQ ID NO: 2253 - RNA, 23 nt, synthetic construct
  source 1..23: mol_type = other RNA; note = Description of Artificial Sequence: Synthetic oligonucleotide
  modified_base 1: mod_base = OTHER; note = 2'-O-methyladenosine-3'-phosphorothioate
  modified_base 2: mod_base = OTHER; note = 2'-fluorouridine -3'-phosphorothioate
  modified_base 3: mod_base = OTHER; note = 2'-O-methyladenosine-3'-phosphate
  modified_base 4: mod_base = OTHER; note = 2'-O-methyluridine-3'-phosphate
  modified_base 5: mod_base = OTHER; note = 2'-O-methyluridine-3'-phosphate
  modified_base 6: mod_base = OTHER; note = 2'-fluoroadenosine-3'-phosphate
  modified_base 7: mod_base = OTHER; note = 2'-O-methyluridine-3'-phosphate
  modified_base 8: mod_base = OTHER; note = 2'-fluorocytidine-3'-phosphate
  modified_base 9: mod_base = OTHER; note = 2'-fluoroadenosine-3'-phosphate
  modified_base 10: mod_base = OTHER; note = 2'-O-methylguanosine-3'-phosphate
  modified_base 11: mod_base = OTHER; note = 2'-O-methylcytidine-3'-phosphate
  modified_base 12: mod_base = OTHER; note = 2'-O-methylcytidine-3'-phosphate
  modified_base 13: mod_base = OTHER; note = 2'-O-methyladenosine-3'-phosphate
  modified_base 14: mod_base = OTHER; note = 2'-fluoroadenosine-3'-phosphate
  modified_base 15: mod_base = OTHER; note = 2'-O-methyladenosine-3'-phosphate
  modified_base 16: mod_base = OTHER; note = 2'-fluoroguanosine-3'-phosphate
  modified_base 17: mod_base = OTHER; note = 2'-O-methyluridine-3'-phosphate
  modified_base 18: mod_base = OTHER; note = 2'-O-methyluridine-3'-phosphate
  modified_base 19: mod_base = OTHER; note = 2'-O-methyluridine-3'-phosphate
  modified_base 20: mod_base = OTHER; note = 2'-O-methylcytidine-3'-phosphate
  modified_base 21: mod_base = OTHER; note = 2'-O-methyluridine-3'-phosphorothioate
  modified_base 22: mod_base = OTHER; note = 2'-O-methyluridine-3'-phosphorothioate
  modified_base 23: mod_base = OTHER; note = 2'-O-methylcytidine-3'-phosphate
atattatcagccaaagtttcttc

SEQ ID NO: 2254 - RNA, 21 nt, synthetic construct
  source 1..21: mol_type = other RNA; note = Description of Artificial Sequence: Synthetic oligonucleotide
  modified_base 1: mod_base = OTHER; note = 2'-O-methylguanosine-3'-phosphorothioate
  modified_base 2: mod_base = OTHER; note = 2'-O-methyladenosine-3'-phosphorothioate
  modified_base 3: mod_base = OTHER; note = 2'-O-methyluridine-3'-phosphate
  modified_base 4: mod_base = OTHER; note = 2'-O-methylguanosine-3'-phosphate
  modified_base 5: mod_base = OTHER; note = 2'-O-methyladenosine-3'-phosphate
  modified_base 6: mod_base = OTHER; note = 2'-O-methyladenosine-3'-phosphate
  modified_base 7: mod_base = OTHER; note = 2'-fluoroguanosine-3'-phosphate
  modified_base 8: mod_base = OTHER; note = 2'-O-methyladenosine-3'-phosphate
  modified_base 9: mod_base = OTHER; note = 2'-fluoroadenosine-3'-phosphate
  modified_base 10: mod_base = OTHER; note = 2'-fluoroadenosine-3'-phosphate
  modified_base 11: mod_base = OTHER; note = 2'-fluorocytidine-3'-phosphate
  modified_base 12: mod_base = OTHER; note = 2'-O-methyluridine-3'-phosphate
  modified_base 13: mod_base = OTHER; note = 2'-O-methyluridine-3'-phosphate
  modified_base 14: mod_base = OTHER; note = 2'-O-methyluridine-3'-phosphate
  modified_base 15: mod_base = OTHER; note = 2'-O-methylguanosine-3'-phosphate
  modified_base 16: mod_base = OTHER; note = 2'-O-methylguanosine-3'-phosphate
  modified_base 17: mod_base = OTHER; note = 2'-O-methylcytidine-3'-phosphate
  modified_base 18: mod_base = OTHER; note = 2'-O-methyluridine-3'-phosphate
  modified_base 19: mod_base = OTHER; note = 2'-O-methylguanosine-3'-phosphate
  modified_base 20: mod_base = OTHER; note = 2'-O-methyladenosine-3'-phosphate
  modified_base 21: mod_base = OTHER; note = 2'-O-methyluridine-3'-phosphate N-[tris(GalNAc-alkyl)-amidodecanoyl)]-4-hydroxyprolinol Hyp-(GalNAc-alkyl)3
gatgaagaaactttggctgat

SEQ ID NO: 2255 - RNA, 23 nt, synthetic construct
  source 1..23: mol_type = other RNA; note = Description of Artificial Sequence: Synthetic oligonucleotide
  modified_base 1: mod_base = OTHER; note = 2'-O-methyladenosine-3'-phosphorothioate
  modified_base 2: mod_base = OTHER; note = 2'-fluorouridine -3'-phosphorothioate
  modified_base 3: mod_base = OTHER; note = 2'-O-methylcytidine-3'-phosphate
  modified_base 4: mod_base = OTHER; note = 2'-O-methyladenosine-3'-phosphate
  modified_base 5: mod_base = OTHER; note = 2'-O-methylguanosine-3'-phosphate
  modified_base 6: mod_base = OTHER; note = 2'-fluorocytidine-3'-phosphate
  modified_base 7: mod_base = OTHER; note = 2'-O-methylcytidine-3'-phosphate
  modified_base 8: mod_base = OTHER; note = 2'-fluoroadenosine-3'-phosphate
  modified_base 9: mod_base = OTHER; note = 2'-fluoroadenosine-3'-phosphate
  modified_base 10: mod_base = OTHER; note = 2'-O-methyladenosine-3'-phosphate
  modified_base 11: mod_base = OTHER; note = 2'-O-methylguanosine-3'-phosphate
  modified_base 12: mod_base = OTHER; note = 2'-O-methyluridine-3'-phosphate
  modified_base 13: mod_base = OTHER; note = 2'-O-methyluridine-3'-phosphate
  modified_base 14: mod_base = OTHER; note = 2'-fluorouridine-3'-phosphate
  modified_base 15: mod_base = OTHER; note = 2'-O-methylcytidine-3'-phosphate
  modified_base 16: mod_base = OTHER; note = 2'-fluorouridine-3'-phosphate
  modified_base 17: mod_base = OTHER; note = 2'-O-methyluridine-3'-phosphate
  modified_base 18: mod_base = OTHER; note = 2'-O-methylcytidine-3'-phosphate
  modified_base 19: mod_base = OTHER; note = 2'-O-methyladenosine-3'-phosphate
  modified_base 20: mod_base = OTHER; note = 2'-O-methyluridine-3'-phosphate
  modified_base 21: mod_base = OTHER; note = 2'-O-methylcytidine-3'-phosphorothioate
  modified_base 22: mod_base = OTHER; note = 2'-O-methyladenosine-3'-phosphorothioate
  modified_base 23: mod_base = OTHER; note = 2'-O-methyluridine-3'-phosphate
atcagccaaagtttcttcatcat

SEQ ID NO: 2256 - RNA, 21 nt, synthetic construct
  source 1..21: mol_type = other RNA; note = Description of Artificial Sequence: Synthetic oligonucleotide
  modified_base 1: mod_base = OTHER; note = 2'-O-methyluridine-3'-phosphorothioate
  modified_base 2: mod_base = OTHER; note = 2'-O-methylguanosine-3'-phosphorothioate
  modified_base 3: mod_base = OTHER; note = 2'-O-methyladenosine-3'-phosphate
  modified_base 4: mod_base = OTHER; note = 2'-O-methyluridine-3'-phosphate
  modified_base 5: mod_base = OTHER; note = 2'-O-methylguanosine-3'-phosphate
  modified_base 6: mod_base = OTHER; note = 2'-O-methyladenosine-3'-phosphate
  modified_base 7: mod_base = OTHER; note = 2'-fluoroadenosine-3'-phosphate
  modified_base 8: mod_base = OTHER; note = 2'-O-methylguanosine-3'-phosphate
  modified_base 9: mod_base = OTHER; note = 2'-fluoroadenosine-3'-phosphate
  modified_base 10: mod_base = OTHER; note = 2'-fluoroadenosine-3'-phosphate
  modified_base 11: mod_base = OTHER; note = 2'-fluoroadenosine-3'-phosphate
  modified_base 12: mod_base = OTHER; note = 2'-O-methylcytidine-3'-phosphate
  modified_base 13: mod_base = OTHER; note = 2'-O-methyluridine-3'-phosphate
  modified_base 14: mod_base = OTHER; note = 2'-O-methyluridine-3'-phosphate
  modified_base 15: mod_base = OTHER; note = 2'-O-methyluridine-3'-phosphate
  modified_base 16: mod_base = OTHER; note = 2'-O-methylguanosine-3'-phosphate
  modified_base 17: mod_base = OTHER; note = 2'-O-methylguanosine-3'-phosphate
  modified_base 18: mod_base = OTHER; note = 2'-O-methylcytidine-3'-phosphate
  modified_base 19: mod_base = OTHER; note = 2'-O-methyluridine-3'-phosphate
  modified_base 20: mod_base = OTHER; note = 2'-O-methylguanosine-3'-phosphate
  modified_base 21: mod_base = OTHER; note = 2'-O-methyladenosine-3'-phosphate N-[tris(GalNAc-alkyl)-amidodecanoyl)]-4-hydroxyprolinol Hyp-(GalNAc-alkyl)3
tgatgaagaaactttggctga

SEQ ID NO: 2257 - RNA, 23 nt, synthetic construct
  source 1..23: mol_type = other RNA; note = Description of Artificial Sequence: Synthetic oligonucleotide
  modified_base 1: mod_base = OTHER; note = 2'-O-methyluridine-3'-phosphorothioate
  modified_base 2: mod_base = OTHER; note = 2'-fluorocytidine-3'-phosphorothioate
  modified_base 3: mod_base = OTHER; note = 2'-O-methyladenosine-3'-phosphate
  modified_base 4: mod_base = OTHER; note = 2'-O-methylguanosine-3'-phosphate
  modified_base 5: mod_base = OTHER; note = 2'-O-methylcytidine-3'-phosphate
  modified_base 6: mod_base = OTHER; note = 2'-fluorocytidine-3'-phosphate
  modified_base 7: mod_base = OTHER; note = 2'-O-methyladenosine-3'-phosphate
  modified_base 8: mod_base = OTHER; note = 2'-fluoroadenosine-3'-phosphate
  modified_base 9: mod_base = OTHER; note = 2'-fluoroadenosine-3'-phosphate
  modified_base 10: mod_base = OTHER; note = 2'-O-methylguanosine-3'-phosphate
  modified_base 11: mod_base = OTHER; note = 2'-O-methyluridine-3'-phosphate
  modified_base 12: mod_base = OTHER; note = 2'-O-methyluridine-3'-phosphate
  modified_base 13: mod_base = OTHER; note = 2'-O-methyluridine-3'-phosphate
  modified_base 14: mod_base = OTHER; note = 2'-fluorocytidine-3'-phosphate
  modified_base 15: mod_base = OTHER; note = 2'-O-methyluridine-3'-phosphate
  modified_base 16: mod_base = OTHER; note = 2'-fluorouridine-3'-phosphate
  modified_base 17: mod_base = OTHER; note = 2'-O-methylcytidine-3'-phosphate
  modified_base 18: mod_base = OTHER; note = 2'-O-methyladenosine-3'-phosphate
  modified_base 19: mod_base = OTHER; note = 2'-O-methyluridine-3'-phosphate
  modified_base 20: mod_base = OTHER; note = 2'-O-methylcytidine-3'-phosphate
  modified_base 21: mod_base = OTHER; note = 2'-O-methyladenosine-3'-phosphorothioate
  modified_base 22: mod_base = OTHER; note = 2'-O-methyluridine-3'-phosphorothioate
  modified_base 23: mod_base = OTHER; note = 2'-O-methyluridine-3'-phosphate
tcagccaaagtttcttcatcatt

SEQ ID NO: 2258 - RNA, 21 nt, synthetic construct
  source 1..21: mol_type = other RNA; note = Description of Artificial Sequence: Synthetic oligonucleotide
  modified_base 1: mod_base = OTHER; note = 2'-O-methylguanosine-3'-phosphorothioate
  modified_base 2: mod_base = OTHER; note = 2'-O-methyladenosine-3'-phosphorothioate
  modified_base 3: mod_base = OTHER; note = 2'-O-methyladenosine-3'-phosphate
  modified_base 4: mod_base = OTHER; note = 2'-O-methyladenosine-3'-phosphate
  modified_base 5: mod_base = OTHER; note = 2'-O-methylguanosine-3'-phosphate
  modified_base 6: mod_base = OTHER; note = 2'-O-methylguanosine-3'-phosphate
  modified_base 7: mod_base = OTHER; note = 2'-fluorouridine-3'-phosphate
  modified_base 8: mod_base = OTHER; note = 2'-O-methylguanosine-3'-phosphate
  modified_base 9: mod_base = OTHER; note = 2'-fluorouridine-3'-phosphate
  modified_base 10: mod_base = OTHER; note = 2'-fluorouridine-3'-phosphate
  modified_base 11: mod_base = OTHER; note = 2'-fluorocytidine-3'-phosphate
  modified_base 12: mod_base = OTHER; note = 2'-O-methyladenosine-3'-phosphate
  modified_base 13: mod_base = OTHER; note = 2'-O-methyladenosine-3'-phosphate
  modified_base 14: mod_base = OTHER; note = 2'-O-methylguanosine-3'-phosphate
  modified_base 15: mod_base = OTHER; note = 2'-O-methyladenosine-3'-phosphate
  modified_base 16: mod_base = OTHER; note = 2'-O-methyluridine-3'-phosphate
  modified_base 17: mod_base = OTHER; note = 2'-O-methylguanosine-3'-phosphate
  modified_base 18: mod_base = OTHER; note = 2'-O-methyluridine-3'-phosphate
  modified_base 19: mod_base = OTHER; note = 2'-O-methylcytidine-3'-phosphate
  modified_base 20: mod_base = OTHER; note = 2'-O-methylcytidine-3'-phosphate
  modified_base 21: mod_base = OTHER; note = 2'-O-methyluridine-3'-phosphate N-[tris(GalNAc-alkyl)-amidodecanoyl)]-4-hydroxyprolinol Hyp-(GalNAc-alkyl)3
gaaaggtgttcaagatgtcct

SEQ ID NO: 2259 - RNA, 23 nt, synthetic construct
  source 1..23: mol_type = other RNA; note = Description of Artificial Sequence: Synthetic oligonucleotide
  modified_base 1: mod_base = OTHER; note = 2'-O-methyladenosine-3'-phosphorothioate
  modified_base 2: mod_base = OTHER; note = 2'-fluoroguanosine-3'-phosphorothioate
  modified_base 3: mod_base = OTHER; note = 2'-O-methylguanosine-3'-phosphate
  modified_base 4: mod_base = OTHER; note = 2'-O-methyladenosine-3'-phosphate
  modified_base 5: mod_base = OTHER; note = 2'-O-methylcytidine-3'-phosphate
  modified_base 6: mod_base = OTHER; note = 2'-fluoroadenosine-3'-phosphate
  modified_base 7: mod_base = OTHER; note = 2'-O-methyluridine-3'-phosphate
  modified_base 8: mod_base = OTHER; note = 2'-fluorocytidine-3'-phosphate
  modified_base 9: mod_base = OTHER; note = 2'-fluorouridine-3'-phosphate
  modified_base 10: mod_base = OTHER; note = 2'-O-methyluridine-3'-phosphate
  modified_base 11: mod_base = OTHER; note = 2'-O-methylguanosine-3'-phosphate
  modified_base 12: mod_base = OTHER; note = 2'-O-methyladenosine-3'-phosphate
  modified_base 13: mod_base = OTHER; note = 2'-O-methyladenosine-3'-phosphate
  modified_base 14: mod_base = OTHER; note = 2'-fluorocytidine-3'-phosphate
  modified_base 15: mod_base = OTHER; note = 2'-O-methyladenosine-3'-phosphate
  modified_base 16: mod_base = OTHER; note = 2'-fluorocytidine-3'-phosphate
  modified_base 17: mod_base = OTHER; note = 2'-O-methylcytidine-3'-phosphate
  modified_base 18: mod_base = OTHER; note = 2'-O-methyluridine-3'-phosphate
  modified_base 19: mod_base = OTHER; note = 2'-O-methyluridine-3'-phosphate
  modified_base 20: mod_base = OTHER; note = 2'-O-methyluridine-3'-phosphate
  modified_base 21: mod_base = OTHER; note = 2'-O-methylcytidine-3'-phosphorothioate
  modified_base 22: mod_base = OTHER; note = 2'-O-methyluridine-3'-phosphorothioate
  modified_base 23: mod_base = OTHER; note = 2'-O-methylcytidine-3'-phosphate
aggacatcttgaacacctttctc

SEQ ID NO: 2260 - RNA, 21 nt, synthetic construct
  source 1..21: mol_type = other RNA; note = Description of Artificial Sequence: Synthetic oligonucleotide
  modified_base 1: mod_base = OTHER; note = 2'-O-methyladenosine-3'-phosphorothioate
  modified_base 2: mod_base = OTHER; note = 2'-O-methyladenosine-3'-phosphorothioate
  modified_base 3: mod_base = OTHER; note = 2'-O-methyladenosine-3'-phosphate
  modified_base 4: mod_base = OTHER; note = 2'-O-methylguanosine-3'-phosphate
  modified_base 5: mod_base = OTHER; note = 2'-O-methylguanosine-3'-phosphate
  modified_base 6: mod_base = OTHER; note = 2'-O-methyluridine-3'-phosphate
  modified_base 7: mod_base = OTHER; note = 2'-fluoroguanosine-3'-phosphate
  modified_base 8: mod_base = OTHER; note = 2'-O-methyluridine-3'-phosphate
  modified_base 9: mod_base = OTHER; note = 2'-fluorouridine-3'-phosphate
  modified_base 10: mod_base = OTHER; note = 2'-fluorocytidine-3'-phosphate
  modified_base 11: mod_base = OTHER; note = 2'-fluoroadenosine-3'-phosphate
  modified_base 12: mod_base = OTHER; note = 2'-O-methyladenosine-3'-phosphate
  modified_base 13: mod_base = OTHER; note = 2'-O-methylguanosine-3'-phosphate
  modified_base 14: mod_base = OTHER; note = 2'-O-methyladenosine-3'-phosphate
  modified_base 15: mod_base = OTHER; note = 2'-O-methyluridine-3'-phosphate
  modified_base 16: mod_base = OTHER; note = 2'-O-methylguanosine-3'-phosphate
  modified_base 17: mod_base = OTHER; note = 2'-O-methyluridine-3'-phosphate
  modified_base 18: mod_base = OTHER; note = 2'-O-methylcytidine-3'-phosphate
  modified_base 19: mod_base = OTHER; note = 2'-O-methylcytidine-3'-phosphate
  modified_base 20: mod_base = OTHER; note = 2'-O-methyluridine-3'-phosphate
  modified_base 21: mod_base = OTHER; note = 2'-O-methylcytidine-3'-phosphate N-[tris(GalNAc-alkyl)-amidodecanoyl)]-4-hydroxyprolinol Hyp-(GalNAc-alkyl)3
aaaggtgttcaagatgtcctc

SEQ ID NO: 2261 - RNA, 23 nt, synthetic construct
  source 1..23: mol_type = other RNA; note = Description of Artificial Sequence: Synthetic oligonucleotide
  modified_base 1: mod_base = OTHER; note = 2'-O-methylguanosine-3'-phosphorothioate
  modified_base 2: mod_base = OTHER; note = 2'-fluoroadenosine-3'-phosphorothioate
  modified_base 3: mod_base = OTHER; note = 2'-O-methylguanosine-3'-phosphate
  modified_base 4: mod_base = OTHER; note = 2'-O-methylguanosine-3'-phosphate
  modified_base 5: mod_base = OTHER; note = 2'-O-methyladenosine-3'-phosphate
  modified_base 6: mod_base = OTHER; note = 2'-fluorocytidine-3'-phosphate
  modified_base 7: mod_base = OTHER; note = 2'-O-methyladenosine-3'-phosphate
  modified_base 8: mod_base = OTHER; note = 2'-fluorouridine-3'-phosphate
  modified_base 9: mod_base = OTHER; note = 2'-fluorocytidine-3'-phosphate
  modified_base 10: mod_base = OTHER; note = 2'-O-methyluridine-3'-phosphate
  modified_base 11: mod_base = OTHER; note = 2'-O-methyluridine-3'-phosphate
  modified_base 12: mod_base = OTHER; note = 2'-O-methylguanosine-3'-phosphate
  modified_base 13: mod_base = OTHER; note = 2'-O-methyladenosine-3'-phosphate
  modified_base 14: mod_base = OTHER; note = 2'-fluoroadenosine-3'-phosphate
  modified_base 15: mod_base = OTHER; note = 2'-O-methylcytidine-3'-phosphate
  modified_base 16: mod_base = OTHER; note = 2'-fluoroadenosine-3'-phosphate
  modified_base 17: mod_base = OTHER; note = 2'-O-methylcytidine-3'-phosphate
  modified_base 18: mod_base = OTHER; note = 2'-O-methylcytidine-3'-phosphate
  modified_base 19: mod_base = OTHER; note = 2'-O-methyluridine-3'-phosphate
  modified_base 20: mod_base = OTHER; note = 2'-O-methyluridine-3'-phosphate
  modified_base 21: mod_base = OTHER; note = 2'-O-methyluridine-3'-phosphorothioate
  modified_base 22: mod_base = OTHER; note = 2'-O-methylcytidine-3'-phosphorothioate
  modified_base 23: mod_base = OTHER; note = 2'-O-methyluridine-3'-phosphate
gaggacatcttgaacacctttct

SEQ ID NO: 2262 - RNA, 21 nt, synthetic construct
  source 1..21: mol_type = other RNA; note = Description of Artificial Sequence: Synthetic oligonucleotide
  modified_base 1: mod_base = OTHER; note = 2'-O-methylguanosine-3'-phosphorothioate
  modified_base 2: mod_base = OTHER; note = 2'-O-methylguanosine-3'-phosphorothioate
  modified_base 3: mod_base = OTHER; note = 2'-O-methylguanosine-3'-phosphate
  modified_base 4: mod_base = OTHER; note = 2'-O-methyladenosine-3'-phosphate
  modified_base 5: mod_base = OTHER; note = 2'-O-methylguanosine-3'-phosphate
  modified_base 6: mod_base = OTHER; note = 2'-O-methyladenosine-3'-phosphate
  modified_base 7: mod_base = OTHER; note = 2'-fluoroadenosine-3'-phosphate
  modified_base 8: mod_base = OTHER; note = 2'-O-methyladenosine-3'-phosphate
  modified_base 9: mod_base = OTHER; note = 2'-fluoroguanosine-3'-phosphate
  modified_base 10: mod_base = OTHER; note = 2'-fluoroguanosine-3'-phosphate
  modified_base 11: mod_base = OTHER; note = 2'-fluorouridine-3'-phosphate
  modified_base 12: mod_base = OTHER; note = 2'-O-methylguanosine-3'-phosphate
  modified_base 13: mod_base = OTHER; note = 2'-O-methyluridine-3'-phosphate
  modified_base 14: mod_base = OTHER; note = 2'-O-methyluridine-3'-phosphate
  modified_base 15: mod_base = OTHER; note = 2'-O-methylcytidine-3'-phosphate
  modified_base 16: mod_base = OTHER; note = 2'-O-methyladenosine-3'-phosphate
  modified_base 17: mod_base = OTHER; note = 2'-O-methyladenosine-3'-phosphate
  modified_base 18: mod_base = OTHER; note = 2'-O-methylguanosine-3'-phosphate
  modified_base 19: mod_base = OTHER; note = 2'-O-methyladenosine-3'-phosphate
  modified_base 20: mod_base = OTHER; note = 2'-O-methyluridine-3'-phosphate
  modified_base 21: mod_base = OTHER; note = 2'-O-methylguanosine-3'-phosphate N-[tris(GalNAc-alkyl)-amidodecanoyl)]-4-hydroxyprolinol Hyp-(GalNAc-alkyl)3
gggagaaaggtgttcaagatg

SEQ ID NO: 2263 - RNA, 23 nt, synthetic construct
  source 1..23: mol_type = other RNA; note = Description of Artificial Sequence: Synthetic oligonucleotide
  modified_base 1: mod_base = OTHER; note = 2'-O-methylcytidine-3'-phosphorothioate
  modified_base 2: mod_base = OTHER; note = 2'-fluoroadenosine-3'-phosphorothioate
  modified_base 3: mod_base = OTHER; note = 2'-O-methyluridine-3'-phosphate
  modified_base 4: mod_base = OTHER; note = 2'-O-methylcytidine-3'-phosphate
  modified_base 5: mod_base = OTHER; note = 2'-O-methyluridine-3'-phosphate
  modified_base 6: mod_base = OTHER; note = 2'-fluorouridine-3'-phosphate
  modified_base 7: mod_base = OTHER; note = 2'-O-methylguanosine-3'-phosphate
  modified_base 8: mod_base = OTHER; note = 2'-fluoroadenosine-3'-phosphate
  modified_base 9: mod_base = OTHER; note = 2'-fluoroadenosine-3'-phosphate
  modified_base 10: mod_base = OTHER; note = 2'-O-methylcytidine-3'-phosphate
  modified_base 11: mod_base = OTHER; note = 2'-O-methyladenosine-3'-phosphate
  modified_base 12: mod_base = OTHER; note = 2'-O-methylcytidine-3'-phosphate
  modified_base 13: mod_base = OTHER; note = 2'-O-methylcytidine-3'-phosphate
  modified_base 14: mod_base = OTHER; note = 2'-fluorouridine-3'-phosphate
  modified_base 15: mod_base = OTHER; note = 2'-O-methyluridine-3'-phosphate
  modified_base 16: mod_base = OTHER; note = 2'-fluorouridine-3'-phosphate
  modified_base 17: mod_base = OTHER; note = 2'-O-methylcytidine-3'-phosphate
  modified_base 18: mod_base = OTHER; note = 2'-O-methyluridine-3'-phosphate
  modified_base 19: mod_base = OTHER; note = 2'-O-methylcytidine-3'-phosphate
  modified_base 20: mod_base = OTHER; note = 2'-O-methylcytidine-3'-phosphate
  modified_base 21: mod_base = OTHER; note = 2'-O-methylcytidine-3'-phosphorothioate
  modified_base 22: mod_base = OTHER; note = 2'-O-methylcytidine-3'-phosphorothioate
  modified_base 23: mod_base = OTHER; note = 2'-O-methylcytidine-3'-phosphate
catcttgaacacctttctccccc

SEQ ID NO: 2264 - RNA, 21 nt, synthetic construct
  source 1..21: mol_type = other RNA; note = Description of Artificial Sequence: Synthetic oligonucleotide
  modified_base 1: mod_base = OTHER; note = 2'-O-methylguanosine-3'-phosphorothioate
  modified_base 2: mod_base = OTHER; note = 2'-O-methylguanosine-3'-phosphorothioate
  modified_base 3: mod_base = OTHER; note = 2'-O-methylguanosine-3'-phosphate
  modified_base 4: mod_base = OTHER; note = 2'-O-methylguanosine-3'-phosphate
  modified_base 5: mod_base = OTHER; note = 2'-O-methyladenosine-3'-phosphate
  modified_base 6: mod_base = OTHER; note = 2'-O-methylguanosine-3'-phosphate
  modified_base 7: mod_base = OTHER; note = 2'-fluoroadenosine-3'-phosphate
  modified_base 8: mod_base = OTHER; note = 2'-O-methyladenosine-3'-phosphate
  modified_base 9: mod_base = OTHER; note = 2'-fluoroadenosine-3'-phosphate
  modified_base 10: mod_base = OTHER; note = 2'-fluoroguanosine-3'-phosphate
  modified_base 11: mod_base = OTHER; note = 2'-fluoroguanosine-3'-phosphate
  modified_base 12: mod_base = OTHER; note = 2'-O-methyluridine-3'-phosphate
  modified_base 13: mod_base = OTHER; note = 2'-O-methylguanosine-3'-phosphate
  modified_base 14: mod_base = OTHER; note = 2'-O-methyluridine-3'-phosphate
  modified_base 15: mod_base = OTHER; note = 2'-O-methyluridine-3'-phosphate
  modified_base 16: mod_base = OTHER; note = 2'-O-methylcytidine-3'-phosphate
  modified_base 17: mod_base = OTHER; note = 2'-O-methyladenosine-3'-phosphate
  modified_base 18: mod_base = OTHER; note = 2'-O-methyladenosine-3'-phosphate
  modified_base 19: mod_base = OTHER; note = 2'-O-methylguanosine-3'-phosphate
  modified_base 20: mod_base = OTHER; note = 2'-O-methyladenosine-3'-phosphate
  modified_base 21: mod_base = OTHER; note = 2'-O-methyluridine-3'-phosphate N-[tris(GalNAc-alkyl)-amidodecanoyl)]-4-hydroxyprolinol Hyp-(GalNAc-alkyl)3
ggggagaaaggtgttcaagat

SEQ ID NO: 2265 - RNA, 23 nt, synthetic construct
  source 1..23: mol_type = other RNA; note = Description of Artificial Sequence: Synthetic oligonucleotide
  modified_base 1: mod_base = OTHER; note = 2'-O-methyladenosine-3'-phosphorothioate
  modified_base 2: mod_base = OTHER; note = 2'-fluorouridine -3'-phosphorothioate
  modified_base 3: mod_base = OTHER; note = 2'-O-methylcytidine-3'-phosphate
  modified_base 4: mod_base = OTHER; note = 2'-O-methyluridine-3'-phosphate
  modified_base 5: mod_base = OTHER; note = 2'-O-methyluridine-3'-phosphate
  modified_base 6: mod_base = OTHER; note = 2'-fluoroguanosine-3'-phosphate
  modified_base 7: mod_base = OTHER; note = 2'-O-methyladenosine-3'-phosphate
  modified_base 8: mod_base = OTHER; note = 2'-fluoroadenosine-3'-phosphate
  modified_base 9: mod_base = OTHER; note = 2'-fluorocytidine-3'-phosphate
  modified_base 10: mod_base = OTHER; note = 2'-O-methyladenosine-3'-phosphate
  modified_base 11: mod_base = OTHER; note = 2'-O-methylcytidine-3'-phosphate
  modified_base 12: mod_base = OTHER; note = 2'-O-methylcytidine-3'-phosphate
  modified_base 13: mod_base = OTHER; note = 2'-O-methyluridine-3'-phosphate
  modified_base 14: mod_base = OTHER; note = 2'-fluorouridine-3'-phosphate
  modified_base 15: mod_base = OTHER; note = 2'-O-methyluridine-3'-phosphate
  modified_base 16: mod_base = OTHER; note = 2'-fluorocytidine-3'-phosphate
  modified_base 17: mod_base = OTHER; note = 2'-O-methyluridine-3'-phosphate
  modified_base 18: mod_base = OTHER; note = 2'-O-methylcytidine-3'-phosphate
  modified_base 19: mod_base = OTHER; note = 2'-O-methylcytidine-3'-phosphate
  modified_base 20: mod_base = OTHER; note = 2'-O-methylcytidine-3'-phosphate
  modified_base 21: mod_base = OTHER; note = 2'-O-methylcytidine-3'-phosphorothioate
  modified_base 22: mod_base = OTHER; note = 2'-O-methylcytidine-3'-phosphorothioate
  modified_base 23: mod_base = OTHER; note = 2'-O-methyluridine-3'-phosphate
atcttgaacacctttctccccct

SEQ ID NO: 2266 - RNA, 21 nt, synthetic construct
  source 1..21: mol_type = other RNA; note = Description of Artificial Sequence: Synthetic oligonucleotide
  modified_base 1: mod_base = OTHER; note = 2'-O-methyladenosine-3'-phosphorothioate
  modified_base 2: mod_base = OTHER; note = 2'-O-methyluridine-3'-phosphorothioate
  modified_base 3: mod_base = OTHER; note = 2'-O-methylcytidine-3'-phosphate
  modified_base 4: mod_base = OTHER; note = 2'-O-methyluridine-3'-phosphate
  modified_base 5: mod_base = OTHER; note = 2'-O-methyluridine-3'-phosphate
  modified_base 6: mod_base = OTHER; note = 2'-O-methylguanosine-3'-phosphate
  modified_base 7: mod_base = OTHER; note = 2'-fluoroguanosine-3'-phosphate
  modified_base 8: mod_base = OTHER; note = 2'-O-methyluridine-3'-phosphate
  modified_base 9: mod_base = OTHER; note = 2'-fluoroguanosine-3'-phosphate
  modified_base 10: mod_base = OTHER; note = 2'-fluorouridine-3'-phosphate
  modified_base 11: mod_base = OTHER; note = 2'-fluorocytidine-3'-phosphate
  modified_base 12: mod_base = OTHER; note = 2'-O-methylguanosine-3'-phosphate
  modified_base 13: mod_base = OTHER; note = 2'-O-methyladenosine-3'-phosphate
  modified_base 14: mod_base = OTHER; note = 2'-O-methyladenosine-3'-phosphate
  modified_base 15: mod_base = OTHER; note = 2'-O-methyluridine-3'-phosphate
  modified_base 16: mod_base = OTHER; note = 2'-O-methylcytidine-3'-phosphate
  modified_base 17: mod_base = OTHER; note = 2'-O-methyladenosine-3'-phosphate
  modified_base 18: mod_base = OTHER; note = 2'-O-methyluridine-3'-phosphate
  modified_base 19: mod_base = OTHER; note = 2'-O-methylguanosine-3'-phosphate
  modified_base 20: mod_base = OTHER; note = 2'-O-methylguanosine-3'-phosphate
  modified_base 21: mod_base = OTHER; note = 2'-O-methylguanosine-3'-phosphate N-[tris(GalNAc-alkyl)-amidodecanoyl)]-4-hydroxyprolinol Hyp-(GalNAc-alkyl)3
atcttggtgtcgaatcatggg

SEQ ID NO: 2267 - RNA, 23 nt, synthetic construct
  source 1..23: mol_type = other RNA; note = Description of Artificial Sequence: Synthetic oligonucleotide
  modified_base 1: mod_base = OTHER; note = 2'-O-methylcytidine-3'-phosphorothioate
  modified_base 2: mod_base = OTHER; note = 2'-fluorocytidine-3'-phosphorothioate
  modified_base 3: mod_base = OTHER; note = 2'-O-methylcytidine-3'-phosphate
  modified_base 4: mod_base = OTHER; note = 2'-O-methyladenosine-3'-phosphate
  modified_base 5: mod_base = OTHER; note = 2'-O-methyluridine-3'-phosphate
  modified_base 6: mod_base = OTHER; note = 2'-fluoroguanosine-3'-phosphate
  modified_base 7: mod_base = OTHER; note = 2'-O-methyladenosine-3'-phosphate
  modified_base 8: mod_base = OTHER; note = 2'-fluorouridine-3'-phosphate
  modified_base 9: mod_base = OTHER; note = 2'-fluorouridine-3'-phosphate
  modified_base 10: mod_base = OTHER; note = 2'-O-methylcytidine-3'-phosphate
  modified_base 11: mod_base = OTHER; note = 2'-O-methylguanosine-3'-phosphate
  modified_base 12: mod_base = OTHER; note = 2'-O-methyladenosine-3'-phosphate
  modified_base 13: mod_base = OTHER; note = 2'-O-methylcytidine-3'-phosphate
  modified_base 14: mod_base = OTHER; note = 2'-fluoroadenosine-3'-phosphate
  modified_base 15: mod_base = OTHER; note = 2'-O-methylcytidine-3'-phosphate
  modified_base 16: mod_base = OTHER; note = 2'-fluorocytidine-3'-phosphate
  modified_base 17: mod_base = OTHER; note = 2'-O-methyladenosine-3'-phosphate
  modified_base 18: mod_base = OTHER; note = 2'-O-methyladenosine-3'-phosphate
  modified_base 19: mod_base = OTHER; note = 2'-O-methylguanosine-3'-phosphate
  modified_base 20: mod_base = OTHER; note = 2'-O-methyladenosine-3'-phosphate
  modified_base 21: mod_base = OTHER; note = 2'-O-methyluridine-3'-phosphorothioate
  modified_base 22: mod_base = OTHER; note = 2'-O-methylcytidine-3'-phosphorothioate
  modified_base 23: mod_base = OTHER; note = 2'-O-methylcytidine-3'-phosphate
cccatgattcgacaccaagatcc

SEQ ID NO: 2268 - RNA, 21 nt, synthetic construct
  source 1..21: mol_type = other RNA; note = Description of Artificial Sequence: Synthetic oligonucleotide
  modified_base 1: mod_base = OTHER; note = 2'-O-methyluridine-3'-phosphorothioate
  modified_base 2: mod_base = OTHER; note = 2'-O-methylcytidine-3'-phosphorothioate
  modified_base 3: mod_base = OTHER; note = 2'-O-methyluridine-3'-phosphate
  modified_base 4: mod_base = OTHER; note = 2'-O-methyluridine-3'-phosphate
  modified_base 5: mod_base = OTHER; note = 2'-O-methylguanosine-3'-phosphate
  modified_base 6: mod_base = OTHER; note = 2'-O-methylguanosine-3'-phosphate
  modified_base 7: mod_base = OTHER; note = 2'-fluorouridine-3'-phosphate
  modified_base 8: mod_base = OTHER; note = 2'-O-methylguanosine-3'-phosphate
  modified_base 9: mod_base = OTHER; note = 2'-fluorouridine-3'-phosphate
  modified_base 10: mod_base = OTHER; note = 2'-fluorocytidine-3'-phosphate
  modified_base 11: mod_base = OTHER; note = 2'-fluoroguanosine-3'-phosphate
  modified_base 12: mod_base = OTHER; note = 2'-O-methyladenosine-3'-phosphate
  modified_base 13: mod_base = OTHER; note = 2'-O-methyladenosine-3'-phosphate
  modified_base 14: mod_base = OTHER; note = 2'-O-methyluridine-3'-phosphate
  modified_base 15: mod_base = OTHER; note = 2'-O-methylcytidine-3'-phosphate
  modified_base 16: mod_base = OTHER; note = 2'-O-methyladenosine-3'-phosphate
  modified_base 17: mod_base = OTHER; note = 2'-O-methyluridine-3'-phosphate
  modified_base 18: mod_base = OTHER; note = 2'-O-methylguanosine-3'-phosphate
  modified_base 19: mod_base = OTHER; note = 2'-O-methylguanosine-3'-phosphate
  modified_base 20: mod_base = OTHER; note = 2'-O-methylguanosine-3'-phosphate
  modified_base 21: mod_base = OTHER; note = 2'-O-methylguanosine-3'-phosphate N-[tris(GalNAc-alkyl)-amidodecanoyl)]-4-hydroxyprolinol Hyp-(GalNAc-alkyl)3
tcttggtgtcgaatcatgggg

SEQ ID NO: 2269 - RNA, 23 nt, synthetic construct
  source 1..23: mol_type = other RNA; note = Description of Artificial Sequence: Synthetic oligonucleotide
  modified_base 1: mod_base = OTHER; note = 2'-O-methylcytidine-3'-phosphorothioate
  modified_base 2: mod_base = OTHER; note = 2'-fluorocytidine-3'-phosphorothioate
  modified_base 3: mod_base = OTHER; note = 2'-O-methylcytidine-3'-phosphate
  modified_base 4: mod_base = OTHER; note = 2'-O-methylcytidine-3'-phosphate
  modified_base 5: mod_base = OTHER; note = 2'-O-methyladenosine-3'-phosphate
  modified_base 6: mod_base = OTHER; note = 2'-fluorouridine-3'-phosphate
  modified_base 7: mod_base = OTHER; note = 2'-O-methylguanosine-3'-phosphate
  modified_base 8: mod_base = OTHER; note = 2'-fluoroadenosine-3'-phosphate
  modified_base 9: mod_base = OTHER; note = 2'-fluorouridine-3'-phosphate
  modified_base 10: mod_base = OTHER; note = 2'-O-methyluridine-3'-phosphate
  modified_base 11: mod_base = OTHER; note = 2'-O-methylcytidine-3'-phosphate
  modified_base 12: mod_base = OTHER; note = 2'-O-methylguanosine-3'-phosphate
  modified_base 13: mod_base = OTHER; note = 2'-O-methyladenosine-3'-phosphate
  modified_base 14: mod_base = OTHER; note = 2'-fluorocytidine-3'-phosphate
  modified_base 15: mod_base = OTHER; note = 2'-O-methyladenosine-3'-phosphate
  modified_base 16: mod_base = OTHER; note = 2'-fluorocytidine-3'-phosphate
  modified_base 17: mod_base = OTHER; note = 2'-O-methylcytidine-3'-phosphate
  modified_base 18: mod_base = OTHER; note = 2'-O-methyladenosine-3'-phosphate
  modified_base 19: mod_base = OTHER; note = 2'-O-methyladenosine-3'-phosphate
  modified_base 20: mod_base = OTHER; note = 2'-O-methylguanosine-3'-phosphate
  modified_base 21: mod_base = OTHER; note = 2'-O-methyladenosine-3'-phosphorothioate
  modified_base 22: mod_base = OTHER; note = 2'-O-methyluridine-3'-phosphorothioate
  modified_base 23: mod_base = OTHER; note = 2'-O-methylcytidine-3'-phosphate
ccccatgattcgacaccaagatc

SEQ ID NO: 2270 - RNA, 21 nt, synthetic construct
  source 1..21: mol_type = other RNA; note = Description of Artificial Sequence: Synthetic oligonucleotide
  modified_base 1: mod_base = OTHER; note = 2'-O-methyluridine-3'-phosphorothioate
  modified_base 2: mod_base = OTHER; note = 2'-O-methylguanosine-3'-phosphorothioate
  modified_base 3: mod_base = OTHER; note = 2'-O-methylguanosine-3'-phosphate
  modified_base 4: mod_base = OTHER; note = 2'-O-methylguanosine-3'-phosphate
  modified_base 5: mod_base = OTHER; note = 2'-O-methyladenosine-3'-phosphate
  modified_base 6: mod_base = OTHER; note = 2'-O-methyluridine-3'-phosphate
  modified_base 7: mod_base = OTHER; note = 2'-fluorocytidine-3'-phosphate
  modified_base 8: mod_base = OTHER; note = 2'-O-methyluridine-3'-phosphate
  modified_base 9: mod_base = OTHER; note = 2'-fluorouridine-3'-phosphate
  modified_base 10: mod_base = OTHER; note = 2'-fluoroguanosine-3'-phosphate
  modified_base 11: mod_base = OTHER; note = 2'-fluoroguanosine-3'-phosphate
  modified_base 12: mod_base = OTHER; note = 2'-O-methyluridine-3'-phosphate
  modified_base 13: mod_base = OTHER; note = 2'-O-methylguanosine-3'-phosphate
  modified_base 14: mod_base = OTHER; note = 2'-O-methyluridine-3'-phosphate
  modified_base 15: mod_base = OTHER; note = 2'-O-methylcytidine-3'-phosphate
  modified_base 16: mod_base = OTHER; note = 2'-O-methylguanosine-3'-phosphate
  modified_base 17: mod_base = OTHER; note = 2'-O-methyladenosine-3'-phosphate
  modified_base 18: mod_base = OTHER; note = 2'-O-methyladenosine-3'-phosphate
  modified_base 19: mod_base = OTHER; note = 2'-O-methyluridine-3'-phosphate
  modified_base 20: mod_base = OTHER; note = 2'-O-methylcytidine-3'-phosphate
  modified_base 21: mod_base = OTHER; note = 2'-O-methyladenosine-3'-phosphate N-[tris(GalNAc-alkyl)-amidodecanoyl)]-4-hydroxyprolinol Hyp-(GalNAc-alkyl)3
tgggatcttggtgtcgaatca

SEQ ID NO: 2271 - RNA, 23 nt, synthetic construct
  source 1..23: mol_type = other RNA; note = Description of Artificial Sequence: Synthetic oligonucleotide
  modified_base 1: mod_base = OTHER; note = 2'-O-methyluridine-3'-phosphorothioate
  modified_base 2: mod_base = OTHER; note = 2'-fluoroguanosine-3'-phosphorothioate
  modified_base 3: mod_base = OTHER; note = 2'-O-methyladenosine-3'-phosphate
  modified_base 4: mod_base = OTHER; note = 2'-O-methyluridine-3'-phosphate
  modified_base 5: mod_base = OTHER; note = 2'-O-methyluridine-3'-phosphate
  modified_base 6: mod_base = OTHER; note = 2'-fluorocytidine-3'-phosphate
  modified_base 7: mod_base = OTHER; note = 2'-O-methylguanosine-3'-phosphate
  modified_base 8: mod_base = OTHER; note = 2'-fluoroadenosine-3'-phosphate
  modified_base 9: mod_base = OTHER; note = 2'-fluorocytidine-3'-phosphate
  modified_base 10: mod_base = OTHER; note = 2'-O-methyladenosine-3'-phosphate
  modified_base 11: mod_base = OTHER; note = 2'-O-methylcytidine-3'-phosphate
  modified_base 12: mod_base = OTHER; note = 2'-O-methylcytidine-3'-phosphate
  modified_base 13: mod_base = OTHER; note = 2'-O-methyladenosine-3'-phosphate
  modified_base 14: mod_base = OTHER; note = 2'-fluoroadenosine-3'-phosphate
  modified_base 15: mod_base = OTHER; note = 2'-O-methylguanosine-3'-phosphate
  modified_base 16: mod_base = OTHER; note = 2'-fluoroadenosine-3'-phosphate
  modified_base 17: mod_base = OTHER; note = 2'-O-methyluridine-3'-phosphate
  modified_base 18: mod_base = OTHER; note = 2'-O-methylcytidine-3'-phosphate
  modified_base 19: mod_base = OTHER; note = 2'-O-methylcytidine-3'-phosphate
  modified_base 20: mod_base = OTHER; note = 2'-O-methylcytidine-3'-phosphate
  modified_base 21: mod_base = OTHER; note = 2'-O-methyladenosine-3'-phosphorothioate
  modified_base 22: mod_base = OTHER; note = 2'-O-methyluridine-3'-phosphorothioate
  modified_base 23: mod_base = OTHER; note = 2'-O-methyluridine-3'-phosphate
tgattcgacaccaagatcccatt

SEQ ID NO: 2272 - RNA, 21 nt, synthetic construct
  source 1..21: mol_type = other RNA; note = Description of Artificial Sequence: Synthetic oligonucleotide
  modified_base 1: mod_base = OTHER; note = 2'-O-methyladenosine-3'-phosphorothioate
  modified_base 2: mod_base = OTHER; note = 2'-O-methyluridine-3'-phosphorothioate
  modified_base 3: mod_base = OTHER; note = 2'-O-methylguanosine-3'-phosphate
  modified_base 4: mod_base = OTHER; note = 2'-O-methylguanosine-3'-phosphate
  modified_base 5: mod_base = OTHER; note = 2'-O-methylguanosine-3'-phosphate
  modified_base 6: mod_base = OTHER; note = 2'-O-methyladenosine-3'-phosphate
  modified_base 7: mod_base = OTHER; note = 2'-fluorouridine-3'-phosphate
  modified_base 8: mod_base = OTHER; note = 2'-O-methylcytidine-3'-phosphate
  modified_base 9: mod_base = OTHER; note = 2'-fluorouridine-3'-phosphate
  modified_base 10: mod_base = OTHER; note = 2'-fluorouridine-3'-phosphate
  modified_base 11: mod_base = OTHER; note = 2'-fluoroguanosine-3'-phosphate
  modified_base 12: mod_base = OTHER; note = 2'-O-methylguanosine-3'-phosphate
  modified_base 13: mod_base = OTHER; note = 2'-O-methyluridine-3'-phosphate
  modified_base 14: mod_base = OTHER; note = 2'-O-methylguanosine-3'-phosphate
  modified_base 15: mod_base = OTHER; note = 2'-O-methyluridine-3'-phosphate
  modified_base 16: mod_base = OTHER; note = 2'-O-methylcytidine-3'-phosphate
  modified_base 17: mod_base = OTHER; note = 2'-O-methylguanosine-3'-phosphate
  modified_base 18: mod_base = OTHER; note = 2'-O-methyladenosine-3'-phosphate
  modified_base 19: mod_base = OTHER; note = 2'-O-methyladenosine-3'-phosphate
  modified_base 20: mod_base = OTHER; note = 2'-O-methyluridine-3'-phosphate
  modified_base 21: mod_base = OTHER; note = 2'-O-methylcytidine-3'-phosphate N-[tris(GalNAc-alkyl)-amidodecanoyl)]-4-hydroxyprolinol Hyp-(GalNAc-alkyl)3
atgggatcttggtgtcgaatc

SEQ ID NO: 2273 - RNA, 23 nt, synthetic construct
  source 1..23: mol_type = other RNA; note = Description of Artificial Sequence: Synthetic oligonucleotide
  modified_base 1: mod_base = OTHER; note = 2'-O-methylguanosine-3'-phosphorothioate
  modified_base 2: mod_base = OTHER; note = 2'-fluoroadenosine-3'-phosphorothioate
  modified_base 3: mod_base = OTHER; note = 2'-O-methyluridine-3'-phosphate
  modified_base 4: mod_base = OTHER; note = 2'-O-methyluridine-3'-phosphate
  modified_base 5: mod_base = OTHER; note = 2'-O-methylcytidine-3'-phosphate
  modified_base 6: mod_base = OTHER; note = 2'-fluoroguanosine-3'-phosphate
  modified_base 7: mod_base = OTHER; note = 2'-O-methyladenosine-3'-phosphate
  modified_base 8: mod_base = OTHER; note = 2'-fluorocytidine-3'-phosphate
  modified_base 9: mod_base = OTHER; note = 2'-fluoroadenosine-3'-phosphate
  modified_base 10: mod_base = OTHER; note = 2'-O-methylcytidine-3'-phosphate
  modified_base 11: mod_base = OTHER; note = 2'-O-methylcytidine-3'-phosphate
  modified_base 12: mod_base = OTHER; note = 2'-O-methyladenosine-3'-phosphate
  modified_base 13: mod_base = OTHER; note = 2'-O-methyladenosine-3'-phosphate
  modified_base 14: mod_base = OTHER; note = 2'-fluoroguanosine-3'-phosphate
  modified_base 15: mod_base = OTHER; note = 2'-O-methyladenosine-3'-phosphate
  modified_base 16: mod_base = OTHER; note = 2'-fluorouridine-3'-phosphate
  modified_base 17: mod_base = OTHER; note = 2'-O-methylcytidine-3'-phosphate
  modified_base 18: mod_base = OTHER; note = 2'-O-methylcytidine-3'-phosphate
  modified_base 19: mod_base = OTHER; note = 2'-O-methylcytidine-3'-phosphate
  modified_base 20: mod_base = OTHER; note = 2'-O-methyladenosine-3'-phosphate
  modified_base 21: mod_base = OTHER; note = 2'-O-methyluridine-3'-phosphorothioate
  modified_base 22: mod_base = OTHER; note = 2'-O-methyluridine-3'-phosphorothioate
  modified_base 23: mod_base = OTHER; note = 2'-O-methylcytidine-3'-phosphate
gattcgacaccaagatcccattc

SEQ ID NO: 2274 - RNA, 21 nt, synthetic construct
  source 1..21: mol_type = other RNA; note = Description of Artificial Sequence: Synthetic oligonucleotide
  modified_base 1: mod_base = OTHER; note = 2'-O-methylguanosine-3'-phosphorothioate
  modified_base 2: mod_base = OTHER; note = 2'-O-methylcytidine-3'-phosphorothioate
  modified_base 3: mod_base = OTHER; note = 2'-O-methyluridine-3'-phosphate
  modified_base 4: mod_base = OTHER; note = 2'-O-methyladenosine-3'-phosphate
  modified_base 5: mod_base = OTHER; note = 2'-O-methylcytidine-3'-phosphate
  modified_base 6: mod_base = OTHER; note = 2'-O-methyladenosine-3'-phosphate
  modified_base 7: mod_base = OTHER; note = 2'-fluoroadenosine-3'-phosphate
  modified_base 8: mod_base = OTHER; note = 2'-O-methylguanosine-3'-phosphate
  modified_base 9: mod_base = OTHER; note = 2'-fluoroguanosine-3'-phosphate
  modified_base 10: mod_base = OTHER; note = 2'-fluorocytidine-3'-phosphate
  modified_base 11: mod_base = OTHER; note = 2'-fluorocytidine-3'-phosphate
  modified_base 12: mod_base = OTHER; note = 2'-O-methyladenosine-3'-phosphate
  modified_base 13: mod_base = OTHER; note = 2'-O-methyluridine-3'-phosphate
  modified_base 14: mod_base = OTHER; note = 2'-O-methyladenosine-3'-phosphate
  modified_base 15: mod_base = OTHER; note = 2'-O-methyluridine-3'-phosphate
  modified_base 16: mod_base = OTHER; note = 2'-O-methyluridine-3'-phosphate
  modified_base 17: mod_base = OTHER; note = 2'-O-methyluridine-3'-phosphate
  modified_base 18: mod_base = OTHER; note = 2'-O-methylguanosine-3'-phosphate
  modified_base 19: mod_base = OTHER; note = 2'-O-methyluridine-3'-phosphate
  modified_base 20: mod_base = OTHER; note = 2'-O-methylguanosine-3'-phosphate
  modified_base 21: mod_base = OTHER; note = 2'-O-methyladenosine-3'-phosphate N-[tris(GalNAc-alkyl)-amidodecanoyl)]-4-hydroxyprolinol Hyp-(GalNAc-alkyl)3
gctacaaggccatatttgtga

SEQ ID NO: 2275 - RNA, 23 nt, synthetic construct
  source 1..23: mol_type = other RNA; note = Description of Artificial Sequence: Synthetic oligonucleotide
  modified_base 1: mod_base = OTHER; note = 2'-O-methyluridine-3'-phosphorothioate
  modified_base 2: mod_base = OTHER; note = 2'-fluorocytidine-3'-phosphorothioate
  modified_base 3: mod_base = OTHER; note = 2'-O-methyladenosine-3'-phosphate
  modified_base 4: mod_base = OTHER; note = 2'-O-methylcytidine-3'-phosphate
  modified_base 5: mod_base = OTHER; note = 2'-O-methyladenosine-3'-phosphate
  modified_base 6: mod_base = OTHER; note = 2'-fluoroadenosine-3'-phosphate
  modified_base 7: mod_base = OTHER; note = 2'-O-methyladenosine-3'-phosphate
  modified_base 8: mod_base = OTHER; note = 2'-fluorouridine-3'-phosphate
  modified_base 9: mod_base = OTHER; note = 2'-fluoroadenosine-3'-phosphate
  modified_base 10: mod_base = OTHER; note = 2'-O-methyluridine-3'-phosphate
  modified_base 11: mod_base = OTHER; note = 2'-O-methylguanosine-3'-phosphate
  modified_base 12: mod_base = OTHER; note = 2'-O-methylguanosine-3'-phosphate
  modified_base 13: mod_base = OTHER; note = 2'-O-methylcytidine-3'-phosphate
  modified_base 14: mod_base = OTHER; note = 2'-fluorocytidine-3'-phosphate
  modified_base 15: mod_base = OTHER; note = 2'-O-methyluridine-3'-phosphate
  modified_base 16: mod_base = OTHER; note = 2'-fluorouridine-3'-phosphate
  modified_base 17: mod_base = OTHER; note = 2'-O-methylguanosine-3'-phosphate
  modified_base 18: mod_base = OTHER; note = 2'-O-methyluridine-3'-phosphate
  modified_base 19: mod_base = OTHER; note = 2'-O-methyladenosine-3'-phosphate
  modified_base 20: mod_base = OTHER; note = 2'-O-methylguanosine-3'-phosphate
  modified_base 21: mod_base = OTHER; note = 2'-O-methylcytidine-3'-phosphorothioate
  modified_base 22: mod_base = OTHER; note = 2'-O-methylcytidine-3'-phosphorothioate
  modified_base 23: mod_base = OTHER; note = 2'-O-methylcytidine-3'-phosphate
tcacaaatatggccttgtagccc

SEQ ID NO: 2276 - RNA, 21 nt, synthetic construct
  source 1..21: mol_type = other RNA; note = Description of Artificial Sequence: Synthetic oligonucleotide
  modified_base 1: mod_base = OTHER; note = 2'-O-methylcytidine-3'-phosphorothioate
  modified_base 2: mod_base = OTHER; note = 2'-O-methyluridine-3'-phosphorothioate
  modified_base 3: mod_base = OTHER; note = 2'-O-methyladenosine-3'-phosphate
  modified_base 4: mod_base = OTHER; note = 2'-O-methylcytidine-3'-phosphate
  modified_base 5: mod_base = OTHER; note = 2'-O-methyladenosine-3'-phosphate
  modified_base 6: mod_base = OTHER; note = 2'-O-methyladenosine-3'-phosphate
  modified_base 7: mod_base = OTHER; note = 2'-fluoroguanosine-3'-phosphate
  modified_base 8: mod_base = OTHER; note = 2'-O-methylguanosine-3'-phosphate
  modified_base 9: mod_base = OTHER; note = 2'-fluorocytidine-3'-phosphate
  modified_base 10: mod_base = OTHER; note = 2'-fluorocytidine-3'-phosphate
  modified_base 11: mod_base = OTHER; note = 2'-fluoroadenosine-3'-phosphate
  modified_base 12: mod_base = OTHER; note = 2'-O-methyluridine-3'-phosphate
  modified_base 13: mod_base = OTHER; note = 2'-O-methyladenosine-3'-phosphate
  modified_base 14: mod_base = OTHER; note = 2'-O-methyluridine-3'-phosphate
  modified_base 15: mod_base = OTHER; note = 2'-O-methyluridine-3'-phosphate
  modified_base 16: mod_base = OTHER; note = 2'-O-methyluridine-3'-phosphate
  modified_base 17: mod_base = OTHER; note = 2'-O-methylguanosine-3'-phosphate
  modified_base 18: mod_base = OTHER; note = 2'-O-methyluridine-3'-phosphate
  modified_base 19: mod_base = OTHER; note = 2'-O-methylguanosine-3'-phosphate
  modified_base 20: mod_base = OTHER; note = 2'-O-methyladenosine-3'-phosphate
  modified_base 21: mod_base = OTHER; note = 2'-O-methylcytidine-3'-phosphate N-[tris(GalNAc-alkyl)-amidodecanoyl)]-4-hydroxyprolinol Hyp-(GalNAc-alkyl)3
ctacaaggccatatttgtgac

SEQ ID NO: 2277 - RNA, 23 nt, synthetic construct
  source 1..23: mol_type = other RNA; note = Description of Artificial Sequence: Synthetic oligonucleotide
  modified_base 1: mod_base = OTHER; note = 2'-O-methylguanosine-3'-phosphorothioate
  modified_base 2: mod_base = OTHER; note = 2'-fluorouridine -3'-phosphorothioate
  modified_base 3: mod_base = OTHER; note = 2'-O-methylcytidine-3'-phosphate
  modified_base 4: mod_base = OTHER; note = 2'-O-methyladenosine-3'-phosphate
  modified_base 5: mod_base = OTHER; note = 2'-O-methylcytidine-3'-phosphate
  modified_base 6: mod_base = OTHER; note = 2'-fluoroadenosine-3'-phosphate
  modified_base 7: mod_base = OTHER; note = 2'-O-methyladenosine-3'-phosphate
  modified_base 8: mod_base = OTHER; note = 2'-fluoroadenosine-3'-phosphate
  modified_base 9: mod_base = OTHER; note = 2'-fluorouridine-3'-phosphate
  modified_base 10: mod_base = OTHER; note = 2'-O-methyladenosine-3'-phosphate
  modified_base 11: mod_base = OTHER; note = 2'-O-methyluridine-3'-phosphate
  modified_base 12: mod_base = OTHER; note = 2'-O-methylguanosine-3'-phosphate
  modified_base 13: mod_base = OTHER; note = 2'-O-methylguanosine-3'-phosphate
  modified_base 14: mod_base = OTHER; note = 2'-fluorocytidine-3'-phosphate
  modified_base 15: mod_base = OTHER; note = 2'-O-methylcytidine-3'-phosphate
  modified_base 16: mod_base = OTHER; note = 2'-fluorouridine-3'-phosphate
  modified_base 17: mod_base = OTHER; note = 2'-O-methyluridine-3'-phosphate
  modified_base 18: mod_base = OTHER; note = 2'-O-methylguanosine-3'-phosphate
  modified_base 19: mod_base = OTHER; note = 2'-O-methyluridine-3'-phosphate
  modified_base 20: mod_base = OTHER; note = 2'-O-methyladenosine-3'-phosphate
  modified_base 21: mod_base = OTHER; note = 2'-O-methylguanosine-3'-phosphorothioate
  modified_base 22: mod_base = OTHER; note = 2'-O-methylcytidine-3'-phosphorothioate
  modified_base 23: mod_base = OTHER; note = 2'-O-methylcytidine-3'-phosphate
gtcacaaatatggccttgtagcc

SEQ ID NO: 2278 - RNA, 21 nt, synthetic construct
  source 1..21: mol_type = other RNA; note = Description of Artificial Sequence: Synthetic oligonucleotide
  modified_base 1: mod_base = OTHER; note = 2'-O-methyladenosine-3'-phosphorothioate
  modified_base 2: mod_base = OTHER; note = 2'-O-methyluridine-3'-phosphorothioate
  modified_base 3: mod_base = OTHER; note = 2'-O-methylguanosine-3'-phosphate
  modified_base 4: mod_base = OTHER; note = 2'-O-methylguanosine-3'-phosphate
  modified_base 5: mod_base = OTHER; note = 2'-O-methylguanosine-3'-phosphate
  modified_base 6: mod_base = OTHER; note = 2'-O-methylcytidine-3'-phosphate
  modified_base 7: mod_base = OTHER; note = 2'-fluorouridine-3'-phosphate
  modified_base 8: mod_base = OTHER; note = 2'-O-methyladenosine-3'-phosphate
  modified_base 9: mod_base = OTHER; note = 2'-fluorocytidine-3'-phosphate
  modified_base 10: mod_base = OTHER; note = 2'-fluoroadenosine-3'-phosphate
  modified_base 11: mod_base = OTHER; note = 2'-fluoroadenosine-3'-phosphate
  modified_base 12: mod_base = OTHER; note = 2'-O-methylguanosine-3'-phosphate
  modified_base 13: mod_base = OTHER; note = 2'-O-methylguanosine-3'-phosphate
  modified_base 14: mod_base = OTHER; note = 2'-O-methylcytidine-3'-phosphate
  modified_base 15: mod_base = OTHER; note = 2'-O-methylcytidine-3'-phosphate
  modified_base 16: mod_base = OTHER; note = 2'-O-methyladenosine-3'-phosphate
  modified_base 17: mod_base = OTHER; note = 2'-O-methyluridine-3'-phosphate
  modified_base 18: mod_base = OTHER; note = 2'-O-methyladenosine-3'-phosphate
  modified_base 19: mod_base = OTHER; note = 2'-O-methyluridine-3'-phosphate
  modified_base 20: mod_base = OTHER; note = 2'-O-methyluridine-3'-phosphate
  modified_base 21: mod_base = OTHER; note = 2'-O-methyluridine-3'-phosphate N-[tris(GalNAc-alkyl)-amidodecanoyl)]-4-hydroxyprolinol Hyp-(GalNAc-alkyl)3
atgggctacaaggccatattt

SEQ ID NO: 2279 - RNA, 23 nt, synthetic construct
  source 1..23: mol_type = other RNA; note = Description of Artificial Sequence: Synthetic oligonucleotide
  modified_base 1: mod_base = OTHER; note = 2'-O-methyladenosine-3'-phosphorothioate
  modified_base 2: mod_base = OTHER; note = 2'-fluoroadenosine-3'-phosphorothioate
  modified_base 3: mod_base = OTHER; note = 2'-O-methyladenosine-3'-phosphate
  modified_base 4: mod_base = OTHER; note = 2'-O-methyluridine-3'-phosphate
  modified_base 5: mod_base = OTHER; note = 2'-O-methyladenosine-3'-phosphate
  modified_base 6: mod_base = OTHER; note = 2'-fluorouridine-3'-phosphate
  modified_base 7: mod_base = OTHER; note = 2'-O-methylguanosine-3'-phosphate
  modified_base 8: mod_base = OTHER; note = 2'-fluoroguanosine-3'-phosphate
  modified_base 9: mod_base = OTHER; note = 2'-fluorocytidine-3'-phosphate
  modified_base 10: mod_base = OTHER; note = 2'-O-methylcytidine-3'-phosphate
  modified_base 11: mod_base = OTHER; note = 2'-O-methyluridine-3'-phosphate
  modified_base 12: mod_base = OTHER; note = 2'-O-methyluridine-3'-phosphate
  modified_base 13: mod_base = OTHER; note = 2'-O-methylguanosine-3'-phosphate
  modified_base 14: mod_base = OTHER; note = 2'-fluorouridine-3'-phosphate
  modified_base 15: mod_base = OTHER; note = 2'-O-methyladenosine-3'-phosphate
  modified_base 16: mod_base = OTHER; note = 2'-fluoroguanosine-3'-phosphate
  modified_base 17: mod_base = OTHER; note = 2'-O-methylcytidine-3'-phosphate
  modified_base 18: mod_base = OTHER; note = 2'-O-methylcytidine-3'-phosphate
  modified_base 19: mod_base = OTHER; note = 2'-O-methylcytidine-3'-phosphate
  modified_base 20: mod_base = OTHER; note = 2'-O-methyladenosine-3'-phosphate
  modified_base 21: mod_base = OTHER; note = 2'-O-methyluridine-3'-phosphorothioate
  modified_base 22: mod_base = OTHER; note = 2'-O-methylcytidine-3'-phosphorothioate
  modified_base 23: mod_base = OTHER; note = 2'-O-methyluridine-3'-phosphate
aaatatggccttgtagcccatct

SEQ ID NO: 2280 - RNA, 21 nt, synthetic construct
  source 1..21: mol_type = other RNA; note = Description of Artificial Sequence: Synthetic oligonucleotide
  modified_base 1: mod_base = OTHER; note = 2'-O-methylguanosine-3'-phosphorothioate
  modified_base 2: mod_base = OTHER; note = 2'-O-methyladenosine-3'-phosphorothioate
  modified_base 3: mod_base = OTHER; note = 2'-O-methyluridine-3'-phosphate
  modified_base 4: mod_base = OTHER; note = 2'-O-methylguanosine-3'-phosphate
  modified_base 5: mod_base = OTHER; note = 2'-O-methylguanosine-3'-phosphate
  modified_base 6: mod_base = OTHER; note = 2'-O-methylguanosine-3'-phosphate
  modified_base 7: mod_base = OTHER; note = 2'-fluorocytidine-3'-phosphate
  modified_base 8: mod_base = OTHER; note = 2'-O-methyluridine-3'-phosphate
  modified_base 9: mod_base = OTHER; note = 2'-fluoroadenosine-3'-phosphate
  modified_base 10: mod_base = OTHER; note = 2'-fluorocytidine-3'-phosphate
  modified_base 11: mod_base = OTHER; note = 2'-fluoroadenosine-3'-phosphate
  modified_base 12: mod_base = OTHER; note = 2'-O-methyladenosine-3'-phosphate
  modified_base 13: mod_base = OTHER; note = 2'-O-methylguanosine-3'-phosphate
  modified_base 14: mod_base = OTHER; note = 2'-O-methylguanosine-3'-phosphate
  modified_base 15: mod_base = OTHER; note = 2'-O-methylcytidine-3'-phosphate
  modified_base 16: mod_base = OTHER; note = 2'-O-methylcytidine-3'-phosphate
  modified_base 17: mod_base = OTHER; note = 2'-O-methyladenosine-3'-phosphate
  modified_base 18: mod_base = OTHER; note = 2'-O-methyluridine-3'-phosphate
  modified_base 19: mod_base = OTHER; note = 2'-O-methyladenosine-3'-phosphate
  modified_base 20: mod_base = OTHER; note = 2'-O-methyluridine-3'-phosphate
  modified_base 21: mod_base = OTHER; note = 2'-O-methyluridine-3'-phosphate N-[tris(GalNAc-alkyl)-amidodecanoyl)]-4-hydroxyprolinol Hyp-(GalNAc-alkyl)3
gatgggctacaaggccatatt

SEQ ID NO: 2281 - RNA, 23 nt, synthetic construct
  source 1..23: mol_type = other RNA; note = Description of Artificial Sequence: Synthetic oligonucleotide
  modified_base 1: mod_base = OTHER; note = 2'-O-methyladenosine-3'-phosphorothioate
  modified_base 2: mod_base = OTHER; note = 2'-fluoroadenosine-3'-phosphorothioate
  modified_base 3: mod_base = OTHER; note = 2'-O-methyluridine-3'-phosphate
  modified_base 4: mod_base = OTHER; note = 2'-O-methyladenosine-3'-phosphate
  modified_base 5: mod_base = OTHER; note = 2'-O-methyluridine-3'-phosphate
  modified_base 6: mod_base = OTHER; note = 2'-fluoroguanosine-3'-phosphate
  modified_base 7: mod_base = OTHER; note = 2'-O-methylguanosine-3'-phosphate
  modified_base 8: mod_base = OTHER; note = 2'-fluorocytidine-3'-phosphate
  modified_base 9: mod_base = OTHER; note = 2'-fluorocytidine-3'-phosphate
  modified_base 10: mod_base = OTHER; note = 2'-O-methyluridine-3'-phosphate
  modified_base 11: mod_base = OTHER; note = 2'-O-methyluridine-3'-phosphate
  modified_base 12: mod_base = OTHER; note = 2'-O-methylguanosine-3'-phosphate
  modified_base 13: mod_base = OTHER; note = 2'-O-methyluridine-3'-phosphate
  modified_base 14: mod_base = OTHER; note = 2'-fluoroadenosine-3'-phosphate
  modified_base 15: mod_base = OTHER; note = 2'-O-methylguanosine-3'-phosphate
  modified_base 16: mod_base = OTHER; note = 2'-fluorocytidine-3'-phosphate
  modified_base 17: mod_base = OTHER; note = 2'-O-methylcytidine-3'-phosphate
  modified_base 18: mod_base = OTHER; note = 2'-O-methylcytidine-3'-phosphate
  modified_base 19: mod_base = OTHER; note = 2'-O-methyladenosine-3'-phosphate
  modified_base 20: mod_base = OTHER; note = 2'-O-methyluridine-3'-phosphate
  modified_base 21: mod_base = OTHER; note = 2'-O-methylcytidine-3'-phosphorothioate
  modified_base 22: mod_base = OTHER; note = 2'-O-methyluridine-3'-phosphorothioate
  modified_base 23: mod_base = OTHER; note = 2'-O-methyluridine-3'-phosphate
aatatggccttgtagcccatctt

SEQ ID NO: 2282 - RNA, 21 nt, synthetic construct
  source 1..21: mol_type = other RNA; note = Description of Artificial Sequence: Synthetic oligonucleotide
  modified_base 1: mod_base = OTHER; note = 2'-O-methyladenosine-3'-phosphorothioate
  modified_base 2: mod_base = OTHER; note = 2'-O-methylcytidine-3'-phosphorothioate
  modified_base 3: mod_base = OTHER; note = 2'-O-methyluridine-3'-phosphate
  modified_base 4: mod_base = OTHER; note = 2'-O-methylguanosine-3'-phosphate
  modified_base 5: mod_base = OTHER; note = 2'-O-methylguanosine-3'-phosphate
  modified_base 6: mod_base = OTHER; note = 2'-O-methyladenosine-3'-phosphate
  modified_base 7: mod_base = OTHER; note = 2'-fluoroguanosine-3'-phosphate
  modified_base 8: mod_base = OTHER; note = 2'-O-methyladenosine-3'-phosphate
  modified_base 9: mod_base = OTHER; note = 2'-fluoroguanosine-3'-phosphate
  modified_base 10: mod_base = OTHER; note = 2'-fluoroadenosine-3'-phosphate
  modified_base 11: mod_base = OTHER; note = 2'-fluoroadenosine-3'-phosphate
  modified_base 12: mod_base = OTHER; note = 2'-O-methyluridine-3'-phosphate
  modified_base 13: mod_base = OTHER; note = 2'-O-methyluridine-3'-phosphate
  modified_base 14: mod_base = OTHER; note = 2'-O-methylguanosine-3'-phosphate
  modified_base 15: mod_base = OTHER; note = 2'-O-methylguanosine-3'-phosphate
  modified_base 16: mod_base = OTHER; note = 2'-O-methyladenosine-3'-phosphate
  modified_base 17: mod_base = OTHER; note = 2'-O-methyladenosine-3'-phosphate
  modified_base 18: mod_base = OTHER; note = 2'-O-methyluridine-3'-phosphate
  modified_base 19: mod_base = OTHER; note = 2'-O-methylguanosine-3'-phosphate
  modified_base 20: mod_base = OTHER; note = 2'-O-methylguanosine-3'-phosphate
  modified_base 21: mod_base = OTHER; note = 2'-O-methylguanosine-3'-phosphate N-[tris(GalNAc-alkyl)-amidodecanoyl)]-4-hydroxyprolinol Hyp-(GalNAc-alkyl)3
actggagagaattggaatggg

SEQ ID NO: 2283 - RNA, 23 nt, synthetic construct
  source 1..23: mol_type = other RNA; note = Description of Artificial Sequence: Synthetic oligonucleotide
  modified_base 1: mod_base = OTHER; note = 2'-O-methylcytidine-3'-phosphorothioate
  modified_base 2: mod_base = OTHER; note = 2'-fluorocytidine-3'-phosphorothioate
  modified_base 3: mod_base = OTHER; note = 2'-O-methylcytidine-3'-phosphate
  modified_base 4: mod_base = OTHER; note = 2'-O-methyladenosine-3'-phosphate
  modified_base 5: mod_base = OTHER; note = 2'-O-methyluridine-3'-phosphate
  modified_base 6: mod_base = OTHER; note = 2'-fluorouridine-3'-phosphate
  modified_base 7: mod_base = OTHER; note = 2'-O-methylcytidine-3'-phosphate
  modified_base 8: mod_base = OTHER; note = 2'-fluorocytidine-3'-phosphate
  modified_base 9: mod_base = OTHER; note = 2'-fluoroadenosine-3'-phosphate
  modified_base 10: mod_base = OTHER; note = 2'-O-methyladenosine-3'-phosphate
  modified_base 11: mod_base = OTHER; note = 2'-O-methyluridine-3'-phosphate
  modified_base 12: mod_base = OTHER; note = 2'-O-methyluridine-3'-phosphate
  modified_base 13: mod_base = OTHER; note = 2'-O-methylcytidine-3'-phosphate
  modified_base 14: mod_base = OTHER; note = 2'-fluorouridine-3'-phosphate
  modified_base 15: mod_base = OTHER; note = 2'-O-methylcytidine-3'-phosphate
  modified_base 16: mod_base = OTHER; note = 2'-fluorouridine-3'-phosphate
  modified_base 17: mod_base = OTHER; note = 2'-O-methylcytidine-3'-phosphate
  modified_base 18: mod_base = OTHER; note = 2'-O-methylcytidine-3'-phosphate
  modified_base 19: mod_base = OTHER; note = 2'-O-methyladenosine-3'-phosphate
  modified_base 20: mod_base = OTHER; note = 2'-O-methylguanosine-3'-phosphate
  modified_base 21: mod_base = OTHER; note = 2'-O-methyluridine-3'-phosphorothioate
  modified_base 22: mod_base = OTHER; note = 2'-O-methylguanosine-3'-phosphorothioate
  modified_base 23: mod_base = OTHER; note = 2'-O-methylcytidine-3'-phosphate
cccattccaattctctccagtgc

SEQ ID NO: 2284 - RNA, 21 nt, synthetic construct
  source 1..21: mol_type = other RNA; note = Description of Artificial Sequence: Synthetic oligonucleotide
  modified_base 1: mod_base = OTHER; note = 2'-O-methylcytidine-3'-phosphorothioate
  modified_base 2: mod_base = OTHER; note = 2'-O-methyluridine-3'-phosphorothioate
  modified_base 3: mod_base = OTHER; note = 2'-O-methylguanosine-3'-phosphate
  modified_base 4: mod_base = OTHER; note = 2'-O-methylguanosine-3'-phosphate
  modified_base 5: mod_base = OTHER; note = 2'-O-methyladenosine-3'-phosphate
  modified_base 6: mod_base = OTHER; note = 2'-O-methylguanosine-3'-phosphate
  modified_base 7: mod_base = OTHER; note = 2'-fluoroadenosine-3'-phosphate
  modified_base 8: mod_base = OTHER; note = 2'-O-methylguanosine-3'-phosphate
  modified_base 9: mod_base = OTHER; note = 2'-fluoroadenosine-3'-phosphate
  modified_base 10: mod_base = OTHER; note = 2'-fluoroadenosine-3'-phosphate
  modified_base 11: mod_base = OTHER; note = 2'-fluorouridine-3'-phosphate
  modified_base 12: mod_base = OTHER; note = 2'-O-methyluridine-3'-phosphate
  modified_base 13: mod_base = OTHER; note = 2'-O-methylguanosine-3'-phosphate
  modified_base 14: mod_base = OTHER; note = 2'-O-methylguanosine-3'-phosphate
  modified_base 15: mod_base = OTHER; note = 2'-O-methyladenosine-3'-phosphate
  modified_base 16: mod_base = OTHER; note = 2'-O-methyladenosine-3'-phosphate
  modified_base 17: mod_base = OTHER; note = 2'-O-methyluridine-3'-phosphate
  modified_base 18: mod_base = OTHER; note = 2'-O-methylguanosine-3'-phosphate
  modified_base 19: mod_base = OTHER; note = 2'-O-methylguanosine-3'-phosphate
  modified_base 20: mod_base = OTHER; note = 2'-O-methylguanosine-3'-phosphate
  modified_base 21: mod_base = OTHER; note = 2'-O-methyluridine-3'-phosphate N-[tris(GalNAc-alkyl)-amidodecanoyl)]-4-hydroxyprolinol Hyp-(GalNAc-alkyl)3
ctggagagaattggaatgggt

SEQ ID NO: 2285 - RNA, 23 nt, synthetic construct
  source 1..23: mol_type = other RNA; note = Description of Artificial Sequence: Synthetic oligonucleotide
  modified_base 1: mod_base = OTHER; note = 2'-O-methyladenosine-3'-phosphorothioate
  modified_base 2: mod_base = OTHER; note = 2'-fluorocytidine-3'-phosphorothioate
  modified_base 3: mod_base = OTHER; note = 2'-O-methylcytidine-3'-phosphate
  modified_base 4: mod_base = OTHER; note = 2'-O-methylcytidine-3'-phosphate
  modified_base 5: mod_base = OTHER; note = 2'-O-methyladenosine-3'-phosphate
  modified_base 6: mod_base = OTHER; note = 2'-fluorouridine-3'-phosphate
  modified_base 7: mod_base = OTHER; note = 2'-O-methyluridine-3'-phosphate
  modified_base 8: mod_base = OTHER; note = 2'-fluorocytidine-3'-phosphate
  modified_base 9: mod_base = OTHER; note = 2'-fluorocytidine-3'-phosphate
  modified_base 10: mod_base = OTHER; note = 2'-O-methyladenosine-3'-phosphate
  modified_base 11: mod_base = OTHER; note = 2'-O-methyladenosine-3'-phosphate
  modified_base 12: mod_base = OTHER; note = 2'-O-methyluridine-3'-phosphate
  modified_base 13: mod_base = OTHER; note = 2'-O-methyluridine-3'-phosphate
  modified_base 14: mod_base = OTHER; note = 2'-fluorocytidine-3'-phosphate
  modified_base 15: mod_base = OTHER; note = 2'-O-methyluridine-3'-phosphate
  modified_base 16: mod_base = OTHER; note = 2'-fluorocytidine-3'-phosphate
  modified_base 17: mod_base = OTHER; note = 2'-O-methyluridine-3'-phosphate
  modified_base 18: mod_base = OTHER; note = 2'-O-methylcytidine-3'-phosphate
  modified_base 19: mod_base = OTHER; note = 2'-O-methylcytidine-3'-phosphate
  modified_base 20: mod_base = OTHER; note = 2'-O-methyladenosine-3'-phosphate
  modified_base 21: mod_base = OTHER; note = 2'-O-methylguanosine-3'-phosphorothioate
  modified_base 22: mod_base = OTHER; note = 2'-O-methyluridine-3'-phosphorothioate
  modified_base 23: mod_base = OTHER; note = 2'-O-methylguanosine-3'-phosphate
acccattccaattctctccagtg

SEQ ID NO: 2286 - RNA, 21 nt, synthetic construct
  source 1..21: mol_type = other RNA; note = Description of Artificial Sequence: Synthetic oligonucleotide
  modified_base 1: mod_base = OTHER; note = 2'-O-methyluridine-3'-phosphorothioate
  modified_base 2: mod_base = OTHER; note = 2'-O-methyladenosine-3'-phosphorothioate
  modified_base 3: mod_base = OTHER; note = 2'-O-methylguanosine-3'-phosphate
  modified_base 4: mod_base = OTHER; note = 2'-O-methylcytidine-3'-phosphate
  modified_base 5: mod_base = OTHER; note = 2'-O-methyladenosine-3'-phosphate
  modified_base 6: mod_base = OTHER; note = 2'-O-methylcytidine-3'-phosphate
  modified_base 7: mod_base = OTHER; note = 2'-fluorouridine-3'-phosphate
  modified_base 8: mod_base = OTHER; note = 2'-O-methylguanosine-3'-phosphate
  modified_base 9: mod_base = OTHER; note = 2'-fluoroguanosine-3'-phosphate
  modified_base 10: mod_base = OTHER; note = 2'-fluoroadenosine-3'-phosphate
  modified_base 11: mod_base = OTHER; note = 2'-fluoroguanosine-3'-phosphate
  modified_base 12: mod_base = OTHER; note = 2'-O-methyladenosine-3'-phosphate
  modified_base 13: mod_base = OTHER; note = 2'-O-methylguanosine-3'-phosphate
  modified_base 14: mod_base = OTHER; note = 2'-O-methyladenosine-3'-phosphate
  modified_base 15: mod_base = OTHER; note = 2'-O-methyladenosine-3'-phosphate
  modified_base 16: mod_base = OTHER; note = 2'-O-methyluridine-3'-phosphate
  modified_base 17: mod_base = OTHER; note = 2'-O-methyluridine-3'-phosphate
  modified_base 18: mod_base = OTHER; note = 2'-O-methylguanosine-3'-phosphate
  modified_base 19: mod_base = OTHER; note = 2'-O-methylguanosine-3'-phosphate
  modified_base 20: mod_base = OTHER; note = 2'-O-methyladenosine-3'-phosphate
  modified_base 21: mod_base = OTHER; note = 2'-O-methyladenosine-3'-phosphate N-[tris(GalNAc-alkyl)-amidodecanoyl)]-4-hydroxyprolinol Hyp-(GalNAc-alkyl)3
tagcactggagagaattggaa

SEQ ID NO: 2287 - RNA, 23 nt, synthetic construct
  source 1..23: mol_type = other RNA; note = Description of Artificial Sequence: Synthetic oligonucleotide
  modified_base 1: mod_base = OTHER; note = 2'-O-methyluridine-3'-phosphorothioate
  modified_base 2: mod_base = OTHER; note = 2'-fluorouridine -3'-phosphorothioate
  modified_base 3: mod_base = OTHER; note = 2'-O-methylcytidine-3'-phosphate
  modified_base 4: mod_base = OTHER; note = 2'-O-methylcytidine-3'-phosphate
  modified_base 5: mod_base = OTHER; note = 2'-O-methyladenosine-3'-phosphate
  modified_base 6: mod_base = OTHER; note = 2'-fluoroadenosine-3'-phosphate
  modified_base 7: mod_base = OTHER; note = 2'-O-methyluridine-3'-phosphate
  modified_base 8: mod_base = OTHER; note = 2'-fluorouridine-3'-phosphate
  modified_base 9: mod_base = OTHER; note = 2'-fluorocytidine-3'-phosphate
  modified_base 10: mod_base = OTHER; note = 2'-O-methyluridine-3'-phosphate
  modified_base 11: mod_base = OTHER; note = 2'-O-methylcytidine-3'-phosphate
  modified_base 12: mod_base = OTHER; note = 2'-O-methyluridine-3'-phosphate
  modified_base 13: mod_base = OTHER; note = 2'-O-methylcytidine-3'-phosphate
  modified_base 14: mod_base = OTHER; note = 2'-fluorocytidine-3'-phosphate
  modified_base 15: mod_base = OTHER; note = 2'-O-methyladenosine-3'-phosphate
  modified_base 16: mod_base = OTHER; note = 2'-fluoroguanosine-3'-phosphate
  modified_base 17: mod_base = OTHER; note = 2'-O-methyluridine-3'-phosphate
  modified_base 18: mod_base = OTHER; note = 2'-O-methylguanosine-3'-phosphate
  modified_base 19: mod_base = OTHER; note = 2'-O-methylcytidine-3'-phosphate
  modified_base 20: mod_base = OTHER; note = 2'-O-methyluridine-3'-phosphate
  modified_base 21: mod_base = OTHER; note = 2'-O-methyladenosine-3'-phosphorothioate
  modified_base 22: mod_base = OTHER; note = 2'-O-methylcytidine-3'-phosphorothioate
  modified_base 23: mod_base = OTHER; note = 2'-O-methylcytidine-3'-phosphate
ttccaattctctccagtgctacc

SEQ ID NO: 2288 - RNA, 21 nt, synthetic construct
  source 1..21: mol_type = other RNA; note = Description of Artificial Sequence: Synthetic oligonucleotide
  modified_base 1: mod_base = OTHER; note = 2'-O-methylguanosine-3'-phosphorothioate
  modified_base 2: mod_base = OTHER; note = 2'-O-methyluridine-3'-phosphorothioate
  modified_base 3: mod_base = OTHER; note = 2'-O-methyladenosine-3'-phosphate
  modified_base 4: mod_base = OTHER; note = 2'-O-methylguanosine-3'-phosphate
  modified_base 5: mod_base = OTHER; note = 2'-O-methylcytidine-3'-phosphate
  modified_base 6: mod_base = OTHER; note = 2'-O-methyladenosine-3'-phosphate
  modified_base 7: mod_base = OTHER; note = 2'-fluorocytidine-3'-phosphate
  modified_base 8: mod_base = OTHER; note = 2'-O-methyluridine-3'-phosphate
  modified_base 9: mod_base = OTHER; note = 2'-fluoroguanosine-3'-phosphate
  modified_base 10: mod_base = OTHER; note = 2'-fluoroguanosine-3'-phosphate
  modified_base 11: mod_base = OTHER; note = 2'-fluoroadenosine-3'-phosphate
  modified_base 12: mod_base = OTHER; note = 2'-O-methylguanosine-3'-phosphate
  modified_base 13: mod_base = OTHER; note = 2'-O-methyladenosine-3'-phosphate
  modified_base 14: mod_base = OTHER; note = 2'-O-methylguanosine-3'-phosphate
  modified_base 15: mod_base = OTHER; note = 2'-O-methyladenosine-3'-phosphate
  modified_base 16: mod_base = OTHER; note = 2'-O-methyladenosine-3'-phosphate
  modified_base 17: mod_base = OTHER; note = 2'-O-methyluridine-3'-phosphate
  modified_base 18: mod_base = OTHER; note = 2'-O-methyluridine-3'-phosphate
  modified_base 19: mod_base = OTHER; note = 2'-O-methylguanosine-3'-phosphate
  modified_base 20: mod_base = OTHER; note = 2'-O-methylguanosine-3'-phosphate
  modified_base 21: mod_base = OTHER; note = 2'-O-methyladenosine-3'-phosphate N-[tris(GalNAc-alkyl)-amidodecanoyl)]-4-hydroxyprolinol Hyp-(GalNAc-alkyl)3
gtagcactggagagaattgga

SEQ ID NO: 2289 - RNA, 23 nt, synthetic construct
  source 1..23: mol_type = other RNA; note = Description of Artificial Sequence: Synthetic oligonucleotide
  modified_base 1: mod_base = OTHER; note = 2'-O-methyluridine-3'-phosphorothioate
  modified_base 2: mod_base = OTHER; note = 2'-fluorocytidine-3'-phosphorothioate
  modified_base 3: mod_base = OTHER; note = 2'-O-methylcytidine-3'-phosphate
  modified_base 4: mod_base = OTHER; note = 2'-O-methyladenosine-3'-phosphate
  modified_base 5: mod_base = OTHER; note = 2'-O-methyladenosine-3'-phosphate
  modified_base 6: mod_base = OTHER; note = 2'-fluorouridine-3'-phosphate
  modified_base 7: mod_base = OTHER; note = 2'-O-methyluridine-3'-phosphate
  modified_base 8: mod_base = OTHER; note = 2'-fluorocytidine-3'-phosphate
  modified_base 9: mod_base = OTHER; note = 2'-fluorouridine-3'-phosphate
  modified_base 10: mod_base = OTHER; note = 2'-O-methylcytidine-3'-phosphate
  modified_base 11: mod_base = OTHER; note = 2'-O-methyluridine-3'-phosphate
  modified_base 12: mod_base = OTHER; note = 2'-O-methylcytidine-3'-phosphate
  modified_base 13: mod_base = OTHER; note = 2'-O-methylcytidine-3'-phosphate
  modified_base 14: mod_base = OTHER; note = 2'-fluoroadenosine-3'-phosphate
  modified_base 15: mod_base = OTHER; note = 2'-O-methylguanosine-3'-phosphate
  modified_base 16: mod_base = OTHER; note = 2'-fluorouridine-3'-phosphate
  modified_base 17: mod_base = OTHER; note = 2'-O-methylguanosine-3'-phosphate
  modified_base 18: mod_base = OTHER; note = 2'-O-methylcytidine-3'-phosphate
  modified_base 19: mod_base = OTHER; note = 2'-O-methyluridine-3'-phosphate
  modified_base 20: mod_base = OTHER; note = 2'-O-methyladenosine-3'-phosphate
  modified_base 21: mod_base = OTHER; note = 2'-O-methylcytidine-3'-phosphorothioate
  modified_base 22: mod_base = OTHER; note = 2'-O-methylcytidine-3'-phosphorothioate
  modified_base 23: mod_base = OTHER; note = 2'-O-methyluridine-3'-phosphate
tccaattctctccagtgctacct

SEQ ID NO: 2290 - RNA, 21 nt, synthetic construct
  source 1..21: mol_type = other RNA; note = Description of Artificial Sequence: Synthetic oligonucleotide
  modified_base 1: mod_base = OTHER; note = 2'-O-methyladenosine-3'-phosphorothioate
  modified_base 2: mod_base = OTHER; note = 2'-O-methylcytidine-3'-phosphorothioate
  modified_base 3: mod_base = OTHER; note = 2'-O-methyladenosine-3'-phosphate
  modified_base 4: mod_base = OTHER; note = 2'-O-methylguanosine-3'-phosphate
  modified_base 5: mod_base = OTHER; note = 2'-O-methyluridine-3'-phosphate
  modified_base 6: mod_base = OTHER; note = 2'-O-methylguanosine-3'-phosphate
  modified_base 7: mod_base = OTHER; note = 2'-fluoroguanosine-3'-phosphate
  modified_base 8: mod_base = OTHER; note = 2'-O-methyladenosine-3'-phosphate
  modified_base 9: mod_base = OTHER; note = 2'-fluorocytidine-3'-phosphate
  modified_base 10: mod_base = OTHER; note = 2'-fluoroadenosine-3'-phosphate
  modified_base 11: mod_base = OTHER; note = 2'-fluorocytidine-3'-phosphate
  modified_base 12: mod_base = OTHER; note = 2'-O-methyladenosine-3'-phosphate
  modified_base 13: mod_base = OTHER; note = 2'-O-methylcytidine-3'-phosphate
  modified_base 14: mod_base = OTHER; note = 2'-O-methylcytidine-3'-phosphate
  modified_base 15: mod_base = OTHER; note = 2'-O-methyluridine-3'-phosphate
  modified_base 16: mod_base = OTHER; note = 2'-O-methyluridine-3'-phosphate
  modified_base 17: mod_base = OTHER; note = 2'-O-methyladenosine-3'-phosphate
  modified_base 18: mod_base = OTHER; note = 2'-O-methylcytidine-3'-phosphate
  modified_base 19: mod_base = OTHER; note = 2'-O-methylcytidine-3'-phosphate
  modified_base 20: mod_base = OTHER; note = 2'-O-methyluridine-3'-phosphate
  modified_base 21: mod_base = OTHER; note = 2'-O-methylguanosine-3'-phosphate N-[tris(GalNAc-alkyl)-amidodecanoyl)]-4-hydroxyprolinol Hyp-(GalNAc-alkyl)3
acagtggacacaccttacctg

SEQ ID NO: 2291 - RNA, 23 nt, synthetic construct
  source 1..23: mol_type = other RNA; note = Description of Artificial Sequence: Synthetic oligonucleotide
  modified_base 1: mod_base = OTHER; note = 2'-O-methylcytidine-3'-phosphorothioate
  modified_base 2: mod_base = OTHER; note = 2'-fluoroadenosine-3'-phosphorothioate
  modified_base 3: mod_base = OTHER; note = 2'-O-methylguanosine-3'-phosphate
  modified_base 4: mod_base = OTHER; note = 2'-O-methylguanosine-3'-phosphate
  modified_base 5: mod_base = OTHER; note = 2'-O-methyluridine-3'-phosphate
  modified_base 6: mod_base = OTHER; note = 2'-fluoroadenosine-3'-phosphate
  modified_base 7: mod_base = OTHER; note = 2'-O-methyladenosine-3'-phosphate
  modified_base 8: mod_base = OTHER; note = 2'-fluoroguanosine-3'-phosphate
  modified_base 9: mod_base = OTHER; note = 2'-fluoroguanosine-3'-phosphate
  modified_base 10: mod_base = OTHER; note = 2'-O-methyluridine-3'-phosphate
  modified_base 11: mod_base = OTHER; note = 2'-O-methylguanosine-3'-phosphate
  modified_base 12: mod_base = OTHER; note = 2'-O-methyluridine-3'-phosphate
  modified_base 13: mod_base = OTHER; note = 2'-O-methylguanosine-3'-phosphate
  modified_base 14: mod_base = OTHER; note = 2'-fluorouridine-3'-phosphate
  modified_base 15: mod_base = OTHER; note = 2'-O-methylcytidine-3'-phosphate
  modified_base 16: mod_base = OTHER; note = 2'-fluorocytidine-3'-phosphate
  modified_base 17: mod_base = OTHER; note = 2'-O-methyladenosine-3'-phosphate
  modified_base 18: mod_base = OTHER; note = 2'-O-methylcytidine-3'-phosphate
  modified_base 19: mod_base = OTHER; note = 2'-O-methyluridine-3'-phosphate
  modified_base 20: mod_base = OTHER; note = 2'-O-methylguanosine-3'-phosphate
  modified_base 21: mod_base = OTHER; note = 2'-O-methyluridine-3'-phosphorothioate
  modified_base 22: mod_base = OTHER; note = 2'-O-methylcytidine-3'-phosphorothioate
  modified_base 23: mod_base = OTHER; note = 2'-O-methyladenosine-3'-phosphate
caggtaaggtgtgtccactgtca

SEQ ID NO: 2292 - RNA, 21 nt, synthetic construct
  source 1..21: mol_type = other RNA; note = Description of Artificial Sequence: Synthetic oligonucleotide
  modified_base 1: mod_base = OTHER; note = 2'-O-methylcytidine-3'-phosphorothioate
  modified_base 2: mod_base = OTHER; note = 2'-O-methyladenosine-3'-phosphorothioate
  modified_base 3: mod_base = OTHER; note = 2'-O-methylguanosine-3'-phosphate
  modified_base 4: mod_base = OTHER; note = 2'-O-methyluridine-3'-phosphate
  modified_base 5: mod_base = OTHER; note = 2'-O-methylguanosine-3'-phosphate
  modified_base 6: mod_base = OTHER; note = 2'-O-methylguanosine-3'-phosphate
  modified_base 7: mod_base = OTHER; note = 2'-fluoroadenosine-3'-phosphate
  modified_base 8: mod_base = OTHER; note = 2'-O-methylcytidine-3'-phosphate
  modified_base 9: mod_base = OTHER; note = 2'-fluoroadenosine-3'-phosphate
  modified_base 10: mod_base = OTHER; note = 2'-fluorocytidine-3'-phosphate
  modified_base 11: mod_base = OTHER; note = 2'-fluoroadenosine-3'-phosphate
  modified_base 12: mod_base = OTHER; note = 2'-O-methylcytidine-3'-phosphate
  modified_base 13: mod_base = OTHER; note = 2'-O-methylcytidine-3'-phosphate
  modified_base 14: mod_base = OTHER; note = 2'-O-methyluridine-3'-phosphate
  modified_base 15: mod_base = OTHER; note = 2'-O-methyluridine-3'-phosphate
  modified_base 16: mod_base = OTHER; note = 2'-O-methyladenosine-3'-phosphate
  modified_base 17: mod_base = OTHER; note = 2'-O-methylcytidine-3'-phosphate
  modified_base 18: mod_base = OTHER; note = 2'-O-methylcytidine-3'-phosphate
  modified_base 19: mod_base = OTHER; note = 2'-O-methyluridine-3'-phosphate
  modified_base 20: mod_base = OTHER; note = 2'-O-methylguanosine-3'-phosphate
  modified_base 21: mod_base = OTHER; note = 2'-O-methylguanosine-3'-phosphate N-[tris(GalNAc-alkyl)-amidodecanoyl)]-4-hydroxyprolinol Hyp-(GalNAc-alkyl)3
cagtggacacaccttacctgg

SEQ ID NO: 2293 - RNA, 23 nt, synthetic construct
  source 1..23: mol_type = other RNA; note = Description of Artificial Sequence: Synthetic oligonucleotide
  modified_base 1: mod_base = OTHER; note = 2'-O-methylcytidine-3'-phosphorothioate
  modified_base 2: mod_base = OTHER; note = 2'-fluorocytidine-3'-phosphorothioate
  modified_base 3: mod_base = OTHER; note = 2'-O-methyladenosine-3'-phosphate
  modified_base 4: mod_base = OTHER; note = 2'-O-methylguanosine-3'-phosphate
  modified_base 5: mod_base = OTHER; note = 2'-O-methylguanosine-3'-phosphate
  modified_base 6: mod_base = OTHER; note = 2'-fluorouridine-3'-phosphate
  modified_base 7: mod_base = OTHER; note = 2'-O-methyladenosine-3'-phosphate
  modified_base 8: mod_base = OTHER; note = 2'-fluoroadenosine-3'-phosphate
  modified_base 9: mod_base = OTHER; note = 2'-fluoroguanosine-3'-phosphate
  modified_base 10: mod_base = OTHER; note = 2'-O-methylguanosine-3'-phosphate
  modified_base 11: mod_base = OTHER; note = 2'-O-methyluridine-3'-phosphate
  modified_base 12: mod_base = OTHER; note = 2'-O-methylguanosine-3'-phosphate
  modified_base 13: mod_base = OTHER; note = 2'-O-methyluridine-3'-phosphate
  modified_base 14: mod_base = OTHER; note = 2'-fluoroguanosine-3'-phosphate
  modified_base 15: mod_base = OTHER; note = 2'-O-methyluridine-3'-phosphate
  modified_base 16: mod_base = OTHER; note = 2'-fluorocytidine-3'-phosphate
  modified_base 17: mod_base = OTHER; note = 2'-O-methylcytidine-3'-phosphate
  modified_base 18: mod_base = OTHER; note = 2'-O-methyladenosine-3'-phosphate
  modified_base 19: mod_base = OTHER; note = 2'-O-methylcytidine-3'-phosphate
  modified_base 20: mod_base = OTHER; note = 2'-O-methyluridine-3'-phosphate
  modified_base 21: mod_base = OTHER; note = 2'-O-methylguanosine-3'-phosphorothioate
  modified_base 22: mod_base = OTHER; note = 2'-O-methyluridine-3'-phosphorothioate
  modified_base 23: mod_base = OTHER; note = 2'-O-methylcytidine-3'-phosphate
ccaggtaaggtgtgtccactgtc

SEQ ID NO: 2294 - RNA, 21 nt, synthetic construct
  source 1..21: mol_type = other RNA; note = Description of Artificial Sequence: Synthetic oligonucleotide
  modified_base 1: mod_base = OTHER; note = 2'-O-methyluridine-3'-phosphorothioate
  modified_base 2: mod_base = OTHER; note = 2'-O-methylguanosine-3'-phosphorothioate
  modified_base 3: mod_base = OTHER; note = 2'-O-methyluridine-3'-phosphate
  modified_base 4: mod_base = OTHER; note = 2'-O-methylguanosine-3'-phosphate
  modified_base 5: mod_base = OTHER; note = 2'-O-methyladenosine-3'-phosphate
  modified_base 6: mod_base = OTHER; note = 2'-O-methylcytidine-3'-phosphate
  modified_base 7: mod_base = OTHER; note = 2'-fluoroadenosine-3'-phosphate
  modified_base 8: mod_base = OTHER; note = 2'-O-methylguanosine-3'-phosphate
  modified_base 9: mod_base = OTHER; note = 2'-fluorouridine-3'-phosphate
  modified_base 10: mod_base = OTHER; note = 2'-fluoroguanosine-3'-phosphate
  modified_base 11: mod_base = OTHER; note = 2'-fluoroguanosine-3'-phosphate
  modified_base 12: mod_base = OTHER; note = 2'-O-methyladenosine-3'-phosphate
  modified_base 13: mod_base = OTHER; note = 2'-O-methylcytidine-3'-phosphate
  modified_base 14: mod_base = OTHER; note = 2'-O-methyladenosine-3'-phosphate
  modified_base 15: mod_base = OTHER; note = 2'-O-methylcytidine-3'-phosphate
  modified_base 16: mod_base = OTHER; note = 2'-O-methyladenosine-3'-phosphate
  modified_base 17: mod_base = OTHER; note = 2'-O-methylcytidine-3'-phosphate
  modified_base 18: mod_base = OTHER; note = 2'-O-methylcytidine-3'-phosphate
  modified_base 19: mod_base = OTHER; note = 2'-O-methyluridine-3'-phosphate
  modified_base 20: mod_base = OTHER; note = 2'-O-methyluridine-3'-phosphate
  modified_base 21: mod_base = OTHER; note = 2'-O-methyladenosine-3'-phosphate N-[tris(GalNAc-alkyl)-amidodecanoyl)]-4-hydroxyprolinol Hyp-(GalNAc-alkyl)3
tgtgacagtggacacacctta

SEQ ID NO: 2295 - RNA, 23 nt, synthetic construct
  source 1..23: mol_type = other RNA; note = Description of Artificial Sequence: Synthetic oligonucleotide
  modified_base 1: mod_base = OTHER; note = 2'-O-methyluridine-3'-phosphorothioate
  modified_base 2: mod_base = OTHER; note = 2'-fluoroadenosine-3'-phosphorothioate
  modified_base 3: mod_base = OTHER; note = 2'-O-methyladenosine-3'-phosphate
  modified_base 4: mod_base = OTHER; note = 2'-O-methylguanosine-3'-phosphate
  modified_base 5: mod_base = OTHER; note = 2'-O-methylguanosine-3'-phosphate
  modified_base 6: mod_base = OTHER; note = 2'-fluorouridine-3'-phosphate
  modified_base 7: mod_base = OTHER; note = 2'-O-methylguanosine-3'-phosphate
  modified_base 8: mod_base = OTHER; note = 2'-fluorouridine-3'-phosphate
  modified_base 9: mod_base = OTHER; note = 2'-fluoroguanosine-3'-phosphate
  modified_base 10: mod_base = OTHER; note = 2'-O-methyluridine-3'-phosphate
  modified_base 11: mod_base = OTHER; note = 2'-O-methylcytidine-3'-phosphate
  modified_base 12: mod_base = OTHER; note = 2'-O-methylcytidine-3'-phosphate
  modified_base 13: mod_base = OTHER; note = 2'-O-methyladenosine-3'-phosphate
  modified_base 14: mod_base = OTHER; note = 2'-fluorocytidine-3'-phosphate
  modified_base 15: mod_base = OTHER; note = 2'-O-methyluridine-3'-phosphate
  modified_base 16: mod_base = OTHER; note = 2'-fluoroguanosine-3'-phosphate
  modified_base 17: mod_base = OTHER; note = 2'-O-methyluridine-3'-phosphate
  modified_base 18: mod_base = OTHER; note = 2'-O-methylcytidine-3'-phosphate
  modified_base 19: mod_base = OTHER; note = 2'-O-methyladenosine-3'-phosphate
  modified_base 20: mod_base = OTHER; note = 2'-O-methylcytidine-3'-phosphate
  modified_base 21: mod_base = OTHER; note = 2'-O-methyladenosine-3'-phosphorothioate
  modified_base 22: mod_base = OTHER; note = 2'-O-methyladenosine-3'-phosphorothioate
  modified_base 23: mod_base = OTHER; note = 2'-O-methyladenosine-3'-phosphate
taaggtgtgtccactgtcacaaa

SEQ ID NO: 2296 - RNA, 21 nt, synthetic construct
  source 1..21: mol_type = other RNA; note = Description of Artificial Sequence: Synthetic oligonucleotide
  modified_base 1: mod_base = OTHER; note = 2'-O-methyluridine-3'-phosphorothioate
  modified_base 2: mod_base = OTHER; note = 2'-O-methyluridine-3'-phosphorothioate
  modified_base 3: mod_base = OTHER; note = 2'-O-methylguanosine-3'-phosphate
  modified_base 4: mod_base = OTHER; note = 2'-O-methyluridine-3'-phosphate
  modified_base 5: mod_base = OTHER; note = 2'-O-methylguanosine-3'-phosphate
  modified_base 6: mod_base = OTHER; note = 2'-O-methyladenosine-3'-phosphate
  modified_base 7: mod_base = OTHER; note = 2'-fluorocytidine-3'-phosphate
  modified_base 8: mod_base = OTHER; note = 2'-O-methyladenosine-3'-phosphate
  modified_base 9: mod_base = OTHER; note = 2'-fluoroguanosine-3'-phosphate
  modified_base 10: mod_base = OTHER; note = 2'-fluorouridine-3'-phosphate
  modified_base 11: mod_base = OTHER; note = 2'-fluoroguanosine-3'-phosphate
  modified_base 12: mod_base = OTHER; note = 2'-O-methylguanosine-3'-phosphate
  modified_base 13: mod_base = OTHER; note = 2'-O-methyladenosine-3'-phosphate
  modified_base 14: mod_base = OTHER; note = 2'-O-methylcytidine-3'-phosphate
  modified_base 15: mod_base = OTHER; note = 2'-O-methyladenosine-3'-phosphate
  modified_base 16: mod_base = OTHER; note = 2'-O-methylcytidine-3'-phosphate
  modified_base 17: mod_base = OTHER; note = 2'-O-methyladenosine-3'-phosphate
  modified_base 18: mod_base = OTHER; note = 2'-O-methylcytidine-3'-phosphate
  modified_base 19: mod_base = OTHER; note = 2'-O-methylcytidine-3'-phosphate
  modified_base 20: mod_base = OTHER; note = 2'-O-methyluridine-3'-phosphate
  modified_base 21: mod_base = OTHER; note = 2'-O-methyluridine-3'-phosphate N-[tris(GalNAc-alkyl)-amidodecanoyl)]-4-hydroxyprolinol Hyp-(GalNAc-alkyl)3
ttgtgacagtggacacacctt

SEQ ID NO: 2297 - RNA, 23 nt, synthetic construct
  source 1..23: mol_type = other RNA; note = Description of Artificial Sequence: Synthetic oligonucleotide
  modified_base 1: mod_base = OTHER; note = 2'-O-methyladenosine-3'-phosphorothioate
  modified_base 2: mod_base = OTHER; note = 2'-fluoroadenosine-3'-phosphorothioate
  modified_base 3: mod_base = OTHER; note = 2'-O-methylguanosine-3'-phosphate
  modified_base 4: mod_base = OTHER; note = 2'-O-methylguanosine-3'-phosphate
  modified_base 5: mod_base = OTHER; note = 2'-O-methyluridine-3'-phosphate
  modified_base 6: mod_base = OTHER; note = 2'-fluoroguanosine-3'-phosphate
  modified_base 7: mod_base = OTHER; note = 2'-O-methyluridine-3'-phosphate
  modified_base 8: mod_base = OTHER; note = 2'-fluoroguanosine-3'-phosphate
  modified_base 9: mod_base = OTHER; note = 2'-fluorouridine-3'-phosphate
  modified_base 10: mod_base = OTHER; note = 2'-O-methylcytidine-3'-phosphate
  modified_base 11: mod_base = OTHER; note = 2'-O-methylcytidine-3'-phosphate
  modified_base 12: mod_base = OTHER; note = 2'-O-methyladenosine-3'-phosphate
  modified_base 13: mod_base = OTHER; note = 2'-O-methylcytidine-3'-phosphate
  modified_base 14: mod_base = OTHER; note = 2'-fluorouridine-3'-phosphate
  modified_base 15: mod_base = OTHER; note = 2'-O-methylguanosine-3'-phosphate
  modified_base 16: mod_base = OTHER; note = 2'-fluorouridine-3'-phosphate
  modified_base 17: mod_base = OTHER; note = 2'-O-methylcytidine-3'-phosphate
  modified_base 18: mod_base = OTHER; note = 2'-O-methyladenosine-3'-phosphate
  modified_base 19: mod_base = OTHER; note = 2'-O-methylcytidine-3'-phosphate
  modified_base 20: mod_base = OTHER; note = 2'-O-methyladenosine-3'-phosphate
  modified_base 21: mod_base = OTHER; note = 2'-O-methyladenosine-3'-phosphorothioate
  modified_base 22: mod_base = OTHER; note = 2'-O-methyladenosine-3'-phosphorothioate
  modified_base 23: mod_base = OTHER; note = 2'-O-methyluridine-3'-phosphate
aaggtgtgtccactgtcacaaat

SEQ ID NO: 2298 - RNA, 21 nt, synthetic construct
  source 1..21: mol_type = other RNA; note = Description of Artificial Sequence: Synthetic oligonucleotide
  modified_base 1: mod_base = OTHER; note = 2'-O-methylguanosine-3'-phosphorothioate
  modified_base 2: mod_base = OTHER; note = 2'-O-methyladenosine-3'-phosphorothioate
  modified_base 3: mod_base = OTHER; note = 2'-O-methyladenosine-3'-phosphate
  modified_base 4: mod_base = OTHER; note = 2'-O-methylguanosine-3'-phosphate
  modified_base 5: mod_base = OTHER; note = 2'-O-methyladenosine-3'-phosphate
  modified_base 6: mod_base = OTHER; note = 2'-O-methylcytidine-3'-phosphate
  modified_base 7: mod_base = OTHER; note = 2'-fluorouridine-3'-phosphate
  modified_base 8: mod_base = OTHER; note = 2'-O-methylguanosine-3'-phosphate
  modified_base 9: mod_base = OTHER; note = 2'-fluoroadenosine-3'-phosphate
  modified_base 10: mod_base = OTHER; note = 2'-fluorocytidine-3'-phosphate
  modified_base 11: mod_base = OTHER; note = 2'-fluoroadenosine-3'-phosphate
  modified_base 12: mod_base = OTHER; note = 2'-O-methyluridine-3'-phosphate
  modified_base 13: mod_base = OTHER; note = 2'-O-methylcytidine-3'-phosphate
  modified_base 14: mod_base = OTHER; note = 2'-O-methyladenosine-3'-phosphate
  modified_base 15: mod_base = OTHER; note = 2'-O-methyluridine-3'-phosphate
  modified_base 16: mod_base = OTHER; note = 2'-O-methyluridine-3'-phosphate
  modified_base 17: mod_base = OTHER; note = 2'-O-methylguanosine-3'-phosphate
  modified_base 18: mod_base = OTHER; note = 2'-O-methylcytidine-3'-phosphate
  modified_base 19: mod_base = OTHER; note = 2'-O-methylcytidine-3'-phosphate
  modified_base 20: mod_base = OTHER; note = 2'-O-methyladenosine-3'-phosphate
  modified_base 21: mod_base = OTHER; note = 2'-O-methyladenosine-3'-phosphate N-[tris(GalNAc-alkyl)-amidodecanoyl)]-4-hydroxyprolinol Hyp-(GalNAc-alkyl)3
gaagactgacatcattgccaa

SEQ ID NO: 2299 - RNA, 23 nt, synthetic construct
  source 1..23: mol_type = other RNA; note = Description of Artificial Sequence: Synthetic oligonucleotide
  modified_base 1: mod_base = OTHER; note = 2'-O-methyluridine-3'-phosphorothioate
  modified_base 2: mod_base = OTHER; note = 2'-fluorouridine -3'-phosphorothioate
  modified_base 3: mod_base = OTHER; note = 2'-O-methylguanosine-3'-phosphate
  modified_base 4: mod_base = OTHER; note = 2'-O-methylguanosine-3'-phosphate
  modified_base 5: mod_base = OTHER; note = 2'-O-methylcytidine-3'-phosphate
  modified_base 6: mod_base = OTHER; note = 2'-fluoroadenosine-3'-phosphate
  modified_base 7: mod_base = OTHER; note = 2'-O-methyladenosine-3'-phosphate
  modified_base 8: mod_base = OTHER; note = 2'-fluorouridine-3'-phosphate
  modified_base 9: mod_base = OTHER; note = 2'-fluoroguanosine-3'-phosphate
  modified_base 10: mod_base = OTHER; note = 2'-O-methyladenosine-3'-phosphate
  modified_base 11: mod_base = OTHER; note = 2'-O-methyluridine-3'-phosphate
  modified_base 12: mod_base = OTHER; note = 2'-O-methylguanosine-3'-phosphate
  modified_base 13: mod_base = OTHER; note = 2'-O-methyluridine-3'-phosphate
  modified_base 14: mod_base = OTHER; note = 2'-fluorocytidine-3'-phosphate
  modified_base 15: mod_base = OTHER; note = 2'-O-methyladenosine-3'-phosphate
  modified_base 16: mod_base = OTHER; note = 2'-fluoroguanosine-3'-phosphate
  modified_base 17: mod_base = OTHER; note = 2'-O-methyluridine-3'-phosphate
  modified_base 18: mod_base = OTHER; note = 2'-O-methylcytidine-3'-phosphate
  modified_base 19: mod_base = OTHER; note = 2'-O-methyluridine-3'-phosphate
  modified_base 20: mod_base = OTHER; note = 2'-O-methyluridine-3'-phosphate
  modified_base 21: mod_base = OTHER; note = 2'-O-methylcytidine-3'-phosphorothioate
  modified_base 22: mod_base = OTHER; note = 2'-O-methyluridine-3'-phosphorothioate
  modified_base 23: mod_base = OTHER; note = 2'-O-methylcytidine-3'-phosphate
ttggcaatgatgtcagtcttctc

SEQ ID NO: 2300 - RNA, 21 nt, synthetic construct
  source 1..21: mol_type = other RNA; note = Description of Artificial Sequence: Synthetic oligonucleotide
  modified_base 1: mod_base = OTHER; note = 2'-O-methyladenosine-3'-phosphorothioate
  modified_base 2: mod_base = OTHER; note = 2'-O-methyladenosine-3'-phosphorothioate
  modified_base 3: mod_base = OTHER; note = 2'-O-methylguanosine-3'-phosphate
  modified_base 4: mod_base = OTHER; note = 2'-O-methyladenosine-3'-phosphate
  modified_base 5: mod_base = OTHER; note = 2'-O-methylcytidine-3'-phosphate
  modified_base 6: mod_base = OTHER; note = 2'-O-methyluridine-3'-phosphate
  modified_base 7: mod_base = OTHER; note = 2'-fluoroguanosine-3'-phosphate
  modified_base 8: mod_base = OTHER; note = 2'-O-methyladenosine-3'-phosphate
  modified_base 9: mod_base = OTHER; note = 2'-fluorocytidine-3'-phosphate
  modified_base 10: mod_base = OTHER; note = 2'-fluoroadenosine-3'-phosphate
  modified_base 11: mod_base = OTHER; note = 2'-fluorouridine-3'-phosphate
  modified_base 12: mod_base = OTHER; note = 2'-O-methylcytidine-3'-phosphate
  modified_base 13: mod_base = OTHER; note = 2'-O-methyladenosine-3'-phosphate
  modified_base 14: mod_base = OTHER; note = 2'-O-methyluridine-3'-phosphate
  modified_base 15: mod_base = OTHER; note = 2'-O-methyluridine-3'-phosphate
  modified_base 16: mod_base = OTHER; note = 2'-O-methylguanosine-3'-phosphate
  modified_base 17: mod_base = OTHER; note = 2'-O-methylcytidine-3'-phosphate
  modified_base 18: mod_base = OTHER; note = 2'-O-methylcytidine-3'-phosphate
  modified_base 19: mod_base = OTHER; note = 2'-O-methyladenosine-3'-phosphate
  modified_base 20: mod_base = OTHER; note = 2'-O-methyladenosine-3'-phosphate
  modified_base 21: mod_base = OTHER; note = 2'-O-methyluridine-3'-phosphate N-[tris(GalNAc-alkyl)-amidodecanoyl)]-4-hydroxyprolinol Hyp-(GalNAc-alkyl)3
aagactgacatcattgccaat

SEQ ID NO: 2301 - RNA, 23 nt, synthetic construct
  source 1..23: mol_type = other RNA; note = Description of Artificial Sequence: Synthetic oligonucleotide
  modified_base 1: mod_base = OTHER; note = 2'-O-methyladenosine-3'-phosphorothioate
  modified_base 2: mod_base = OTHER; note = 2'-fluorouridine -3'-phosphorothioate
  modified_base 3: mod_base = OTHER; note = 2'-O-methyluridine-3'-phosphate
  modified_base 4: mod_base = OTHER; note = 2'-O-methylguanosine-3'-phosphate
  modified_base 5: mod_base = OTHER; note = 2'-O-methylguanosine-3'-phosphate
  modified_base 6: mod_base = OTHER; note = 2'-fluorocytidine-3'-phosphate
  modified_base 7: mod_base = OTHER; note = 2'-O-methyladenosine-3'-phosphate
  modified_base 8: mod_base = OTHER; note = 2'-fluoroadenosine-3'-phosphate
  modified_base 9: mod_base = OTHER; note = 2'-fluorouridine-3'-phosphate
  modified_base 10: mod_base = OTHER; note = 2'-O-methylguanosine-3'-phosphate
  modified_base 11: mod_base = OTHER; note = 2'-O-methyladenosine-3'-phosphate
  modified_base 12: mod_base = OTHER; note = 2'-O-methyluridine-3'-phosphate
  modified_base 13: mod_base = OTHER; note = 2'-O-methylguanosine-3'-phosphate
  modified_base 14: mod_base = OTHER; note = 2'-fluorouridine-3'-phosphate
  modified_base 15: mod_base = OTHER; note = 2'-O-methylcytidine-3'-phosphate
  modified_base 16: mod_base = OTHER; note = 2'-fluoroadenosine-3'-phosphate
  modified_base 17: mod_base = OTHER; note = 2'-O-methylguanosine-3'-phosphate
  modified_base 18: mod_base = OTHER; note = 2'-O-methyluridine-3'-phosphate
  modified_base 19: mod_base = OTHER; note = 2'-O-methylcytidine-3'-phosphate
  modified_base 20: mod_base = OTHER; note = 2'-O-methyluridine-3'-phosphate
  modified_base 21: mod_base = OTHER; note = 2'-O-methyluridine-3'-phosphorothioate
  modified_base 22: mod_base = OTHER; note = 2'-O-methylcytidine-3'-phosphorothioate
  modified_base 23: mod_base = OTHER; note = 2'-O-methyluridine-3'-phosphate
attggcaatgatgtcagtcttct

SEQ ID NO: 2302 - RNA, 21 nt, synthetic construct
  source 1..21: mol_type = other RNA; note = Description of Artificial Sequence: Synthetic oligonucleotide
  modified_base 1: mod_base = OTHER; note = 2'-O-methylcytidine-3'-phosphorothioate
  modified_base 2: mod_base = OTHER; note = 2'-O-methyluridine-3'-phosphorothioate
  modified_base 3: mod_base = OTHER; note = 2'-O-methylguanosine-3'-phosphate
  modified_base 4: mod_base = OTHER; note = 2'-O-methyladenosine-3'-phosphate
  modified_base 5: mod_base = OTHER; note = 2'-O-methylguanosine-3'-phosphate
  modified_base 6: mod_base = OTHER; note = 2'-O-methyladenosine-3'-phosphate
  modified_base 7: mod_base = OTHER; note = 2'-fluoroadenosine-3'-phosphate
  modified_base 8: mod_base = OTHER; note = 2'-O-methylguanosine-3'-phosphate
  modified_base 9: mod_base = OTHER; note = 2'-fluoroadenosine-3'-phosphate
  modified_base 10: mod_base = OTHER; note = 2'-fluorocytidine-3'-phosphate
  modified_base 11: mod_base = OTHER; note = 2'-fluorouridine-3'-phosphate
  modified_base 12: mod_base = OTHER; note = 2'-O-methylguanosine-3'-phosphate
  modified_base 13: mod_base = OTHER; note = 2'-O-methyladenosine-3'-phosphate
  modified_base 14: mod_base = OTHER; note = 2'-O-methylcytidine-3'-phosphate
  modified_base 15: mod_base = OTHER; note = 2'-O-methyladenosine-3'-phosphate
  modified_base 16: mod_base = OTHER; note = 2'-O-methyluridine-3'-phosphate
  modified_base 17: mod_base = OTHER; note = 2'-O-methylcytidine-3'-phosphate
  modified_base 18: mod_base = OTHER; note = 2'-O-methyladenosine-3'-phosphate
  modified_base 19: mod_base = OTHER; note = 2'-O-methyluridine-3'-phosphate
  modified_base 20: mod_base = OTHER; note = 2'-O-methyluridine-3'-phosphate
  modified_base 21: mod_base = OTHER; note = 2'-O-methylguanosine-3'-phosphate N-[tris(GalNAc-alkyl)-amidodecanoyl)]-4-hydroxyprolinol Hyp-(GalNAc-alkyl)3
ctgagaagactgacatcattg

SEQ ID NO: 2303 - RNA, 23 nt, synthetic construct
  source 1..23: mol_type = other RNA; note = Description of Artificial Sequence: Synthetic oligonucleotide
  modified_base 1: mod_base = OTHER; note = 2'-O-methylcytidine-3'-phosphorothioate
  modified_base 2: mod_base = OTHER; note = 2'-fluoroadenosine-3'-phosphorothioate
  modified_base 3: mod_base = OTHER; note = 2'-O-methyladenosine-3'-phosphate
  modified_base 4: mod_base = OTHER; note = 2'-O-methyluridine-3'-phosphate
  modified_base 5: mod_base = OTHER; note = 2'-O-methylguanosine-3'-phosphate
  modified_base 6: mod_base = OTHER; note = 2'-fluoroadenosine-3'-phosphate
  modified_base 7: mod_base = OTHER; note = 2'-O-methyluridine-3'-phosphate
  modified_base 8: mod_base = OTHER; note = 2'-fluoroguanosine-3'-phosphate
  modified_base 9: mod_base = OTHER; note = 2'-fluorouridine-3'-phosphate
  modified_base 10: mod_base = OTHER; note = 2'-O-methylcytidine-3'-phosphate
  modified_base 11: mod_base = OTHER; note = 2'-O-methyladenosine-3'-phosphate
  modified_base 12: mod_base = OTHER; note = 2'-O-methylguanosine-3'-phosphate
  modified_base 13: mod_base = OTHER; note = 2'-O-methyluridine-3'-phosphate
  modified_base 14: mod_base = OTHER; note = 2'-fluorocytidine-3'-phosphate
  modified_base 15: mod_base = OTHER; note = 2'-O-methyluridine-3'-phosphate
  modified_base 16: mod_base = OTHER; note = 2'-fluorouridine-3'-phosphate
  modified_base 17: mod_base = OTHER; note = 2'-O-methylcytidine-3'-phosphate
  modified_base 18: mod_base = OTHER; note = 2'-O-methyluridine-3'-phosphate
  modified_base 19: mod_base = OTHER; note = 2'-O-methylcytidine-3'-phosphate
  modified_base 20: mod_base = OTHER; note = 2'-O-methyladenosine-3'-phosphate
  modified_base 21: mod_base = OTHER; note = 2'-O-methylguanosine-3'-phosphorothioate
  modified_base 22: mod_base = OTHER; note = 2'-O-methylcytidine-3'-phosphorothioate
  modified_base 23: mod_base = OTHER; note = 2'-O-methylcytidine-3'-phosphate
caatgatgtcagtcttctcagcc

SEQ ID NO: 2304 - RNA, 21 nt, synthetic construct
  source 1..21: mol_type = other RNA; note = Description of Artificial Sequence: Synthetic oligonucleotide
  modified_base 1: mod_base = OTHER; note = 2'-O-methylguanosine-3'-phosphorothioate
  modified_base 2: mod_base = OTHER; note = 2'-O-methylcytidine-3'-phosphorothioate
  modified_base 3: mod_base = OTHER; note = 2'-O-methyluridine-3'-phosphate
  modified_base 4: mod_base = OTHER; note = 2'-O-methylguanosine-3'-phosphate
  modified_base 5: mod_base = OTHER; note = 2'-O-methyladenosine-3'-phosphate
  modified_base 6: mod_base = OTHER; note = 2'-O-methylguanosine-3'-phosphate
  modified_base 7: mod_base = OTHER; note = 2'-fluoroadenosine-3'-phosphate
  modified_base 8: mod_base = OTHER; note = 2'-O-methyladenosine-3'-phosphate
  modified_base 9: mod_base = OTHER; note = 2'-fluoroguanosine-3'-phosphate
  modified_base 10: mod_base = OTHER; note = 2'-fluoroadenosine-3'-phosphate
  modified_base 11: mod_base = OTHER; note = 2'-fluorocytidine-3'-phosphate
  modified_base 12: mod_base = OTHER; note = 2'-O-methyluridine-3'-phosphate
  modified_base 13: mod_base = OTHER; note = 2'-O-methylguanosine-3'-phosphate
  modified_base 14: mod_base = OTHER; note = 2'-O-methyladenosine-3'-phosphate
  modified_base 15: mod_base = OTHER; note = 2'-O-methylcytidine-3'-phosphate
  modified_base 16: mod_base = OTHER; note = 2'-O-methyladenosine-3'-phosphate
  modified_base 17: mod_base = OTHER; note = 2'-O-methyluridine-3'-phosphate
  modified_base 18: mod_base = OTHER; note = 2'-O-methylcytidine-3'-phosphate
  modified_base 19: mod_base = OTHER; note = 2'-O-methyladenosine-3'-phosphate
  modified_base 20: mod_base = OTHER; note = 2'-O-methyluridine-3'-phosphate
  modified_base 21: mod_base = OTHER; note = 2'-O-methyluridine-3'-phosphate N-[tris(GalNAc-alkyl)-amidodecanoyl)]-4-hydroxyprolinol Hyp-(GalNAc-alkyl)3
gctgagaagactgacatcatt

SEQ ID NO: 2305 - RNA, 23 nt, synthetic construct
  source 1..23: mol_type = other RNA; note = Description of Artificial Sequence: Synthetic oligonucleotide
  modified_base 1: mod_base = OTHER; note = 2'-O-methyladenosine-3'-phosphorothioate
  modified_base 2: mod_base = OTHER; note = 2'-fluoroadenosine-3'-phosphorothioate
  modified_base 3: mod_base = OTHER; note = 2'-O-methyluridine-3'-phosphate
  modified_base 4: mod_base = OTHER; note = 2'-O-methylguanosine-3'-phosphate
  modified_base 5: mod_base = OTHER; note = 2'-O-methyladenosine-3'-phosphate
  modified_base 6: mod_base = OTHER; note = 2'-fluorouridine-3'-phosphate
  modified_base 7: mod_base = OTHER; note = 2'-O-methylguanosine-3'-phosphate
  modified_base 8: mod_base = OTHER; note = 2'-fluorouridine-3'-phosphate
  modified_base 9: mod_base = OTHER; note = 2'-fluorocytidine-3'-phosphate
  modified_base 10: mod_base = OTHER; note = 2'-O-methyladenosine-3'-phosphate
  modified_base 11: mod_base = OTHER; note = 2'-O-methylguanosine-3'-phosphate
  modified_base 12: mod_base = OTHER; note = 2'-O-methyluridine-3'-phosphate
  modified_base 13: mod_base = OTHER; note = 2'-O-methylcytidine-3'-phosphate
  modified_base 14: mod_base = OTHER; note = 2'-fluorouridine-3'-phosphate
  modified_base 15: mod_base = OTHER; note = 2'-O-methyluridine-3'-phosphate
  modified_base 16: mod_base = OTHER; note = 2'-fluorocytidine-3'-phosphate
  modified_base 17: mod_base = OTHER; note = 2'-O-methyluridine-3'-phosphate
  modified_base 18: mod_base = OTHER; note = 2'-O-methylcytidine-3'-phosphate
  modified_base 19: mod_base = OTHER; note = 2'-O-methyladenosine-3'-phosphate
  modified_base 20: mod_base = OTHER; note = 2'-O-methylguanosine-3'-phosphate
  modified_base 21: mod_base = OTHER; note = 2'-O-methylcytidine-3'-phosphorothioate
  modified_base 22: mod_base = OTHER; note = 2'-O-methylcytidine-3'-phosphorothioate
  modified_base 23: mod_base = OTHER; note = 2'-O-methyladenosine-3'-phosphate
aatgatgtcagtcttctcagcca

SEQ ID NO: 2306 - RNA, 21 nt, synthetic construct
  source 1..21: mol_type = other RNA; note = Description of Artificial Sequence: Synthetic oligonucleotide
  modified_base 1: mod_base = OTHER; note = 2'-O-methylguanosine-3'-phosphorothioate
  modified_base 2: mod_base = OTHER; note = 2'-O-methylcytidine-3'-phosphorothioate
  modified_base 3: mod_base = OTHER; note = 2'-O-methyluridine-3'-phosphate
  modified_base 4: mod_base = OTHER; note = 2'-O-methylcytidine-3'-phosphate
  modified_base 5: mod_base = OTHER; note = 2'-O-methyladenosine-3'-phosphate
  modified_base 6: mod_base = OTHER; note = 2'-O-methylguanosine-3'-phosphate
  modified_base 7: mod_base = OTHER; note = 2'-fluoroguanosine-3'-phosphate
  modified_base 8: mod_base = OTHER; note = 2'-O-methyluridine-3'-phosphate
  modified_base 9: mod_base = OTHER; note = 2'-fluorouridine-3'-phosphate
  modified_base 10: mod_base = OTHER; note = 2'-fluorocytidine-3'-phosphate
  modified_base 11: mod_base = OTHER; note = 2'-fluoroadenosine-3'-phosphate
  modified_base 12: mod_base = OTHER; note = 2'-O-methyladenosine-3'-phosphate
  modified_base 13: mod_base = OTHER; note = 2'-O-methyladenosine-3'-phosphate
  modified_base 14: mod_base = OTHER; note = 2'-O-methylguanosine-3'-phosphate
  modified_base 15: mod_base = OTHER; note = 2'-O-methyluridine-3'-phosphate
  modified_base 16: mod_base = OTHER; note = 2'-O-methylguanosine-3'-phosphate
  modified_base 17: mod_base = OTHER; note = 2'-O-methyluridine-3'-phosphate
  modified_base 18: mod_base = OTHER; note = 2'-O-methyluridine-3'-phosphate
  modified_base 19: mod_base = OTHER; note = 2'-O-methylguanosine-3'-phosphate
  modified_base 20: mod_base = OTHER; note = 2'-O-methylguanosine-3'-phosphate
  modified_base 21: mod_base = OTHER; note = 2'-O-methyluridine-3'-phosphate N-[tris(GalNAc-alkyl)-amidodecanoyl)]-4-hydroxyprolinol Hyp-(GalNAc-alkyl)3
gctcaggttcaaagtgttggt

SEQ ID NO: 2307 - RNA, 23 nt, synthetic construct
  source 1..23: mol_type = other RNA; note = Description of Artificial Sequence: Synthetic oligonucleotide
  modified_base 1: mod_base = OTHER; note = 2'-O-methyladenosine-3'-phosphorothioate
  modified_base 2: mod_base = OTHER; note = 2'-fluorocytidine-3'-phosphorothioate
  modified_base 3: mod_base = OTHER; note = 2'-O-methylcytidine-3'-phosphate
  modified_base 4: mod_base = OTHER; note = 2'-O-methyladenosine-3'-phosphate
  modified_base 5: mod_base = OTHER; note = 2'-O-methyladenosine-3'-phosphate
  modified_base 6: mod_base = OTHER; note = 2'-fluorocytidine-3'-phosphate
  modified_base 7: mod_base = OTHER; note = 2'-O-methyladenosine-3'-phosphate
  modified_base 8: mod_base = OTHER; note = 2'-fluorocytidine-3'-phosphate
  modified_base 9: mod_base = OTHER; note = 2'-fluorouridine-3'-phosphate
  modified_base 10: mod_base = OTHER; note = 2'-O-methyluridine-3'-phosphate
  modified_base 11: mod_base = OTHER; note = 2'-O-methyluridine-3'-phosphate
  modified_base 12: mod_base = OTHER; note = 2'-O-methylguanosine-3'-phosphate
  modified_base 13: mod_base = OTHER; note = 2'-O-methyladenosine-3'-phosphate
  modified_base 14: mod_base = OTHER; note = 2'-fluoroadenosine-3'-phosphate
  modified_base 15: mod_base = OTHER; note = 2'-O-methylcytidine-3'-phosphate
  modified_base 16: mod_base = OTHER; note = 2'-fluorocytidine-3'-phosphate
  modified_base 17: mod_base = OTHER; note = 2'-O-methyluridine-3'-phosphate
  modified_base 18: mod_base = OTHER; note = 2'-O-methylguanosine-3'-phosphate
  modified_base 19: mod_base = OTHER; note = 2'-O-methyladenosine-3'-phosphate
  modified_base 20: mod_base = OTHER; note = 2'-O-methylguanosine-3'-phosphate
  modified_base 21: mod_base = OTHER; note = 2'-O-methylcytidine-3'-phosphorothioate
  modified_base 22: mod_base = OTHER; note = 2'-O-methyluridine-3'-phosphorothioate
  modified_base 23: mod_base = OTHER; note = 2'-O-methyluridine-3'-phosphate
accaacactttgaacctgagctt

SEQ ID NO: 2308 - RNA, 21 nt, synthetic construct
  source 1..21: mol_type = other RNA; note = Description of Artificial Sequence: Synthetic oligonucleotide
  modified_base 1: mod_base = OTHER; note = 2'-O-methylcytidine-3'-phosphorothioate
  modified_base 2: mod_base = OTHER; note = 2'-O-methyluridine-3'-phosphorothioate
  modified_base 3: mod_base = OTHER; note = 2'-O-methylcytidine-3'-phosphate
  modified_base 4: mod_base = OTHER; note = 2'-O-methyladenosine-3'-phosphate
  modified_base 5: mod_base = OTHER; note = 2'-O-methylguanosine-3'-phosphate
  modified_base 6: mod_base = OTHER; note = 2'-O-methylguanosine-3'-phosphate
  modified_base 7: mod_base = OTHER; note = 2'-fluorouridine-3'-phosphate
  modified_base 8: mod_base = OTHER; note = 2'-O-methyluridine-3'-phosphate
  modified_base 9: mod_base = OTHER; note = 2'-fluorocytidine-3'-phosphate
  modified_base 10: mod_base = OTHER; note = 2'-fluoroadenosine-3'-phosphate
  modified_base 11: mod_base = OTHER; note = 2'-fluoroadenosine-3'-phosphate
  modified_base 12: mod_base = OTHER; note = 2'-O-methyladenosine-3'-phosphate
  modified_base 13: mod_base = OTHER; note = 2'-O-methylguanosine-3'-phosphate
  modified_base 14: mod_base = OTHER; note = 2'-O-methyluridine-3'-phosphate
  modified_base 15: mod_base = OTHER; note = 2'-O-methylguanosine-3'-phosphate
  modified_base 16: mod_base = OTHER; note = 2'-O-methyluridine-3'-phosphate
  modified_base 17: mod_base = OTHER; note = 2'-O-methyluridine-3'-phosphate
  modified_base 18: mod_base = OTHER; note = 2'-O-methylguanosine-3'-phosphate
  modified_base 19: mod_base = OTHER; note = 2'-O-methylguanosine-3'-phosphate
  modified_base 20: mod_base = OTHER; note = 2'-O-methyluridine-3'-phosphate
  modified_base 21: mod_base = OTHER; note = 2'-O-methyladenosine-3'-phosphate N-[tris(GalNAc-alkyl)-amidodecanoyl)]-4-hydroxyprolinol Hyp-(GalNAc-alkyl)3
ctcaggttcaaagtgttggta

SEQ ID NO: 2309 - RNA, 23 nt, synthetic construct
  source 1..23: mol_type = other RNA; note = Description of Artificial Sequence: Synthetic oligonucleotide
  modified_base 1: mod_base = OTHER; note = 2'-O-methyluridine-3'-phosphorothioate
  modified_base 2: mod_base = OTHER; note = 2'-fluoroadenosine-3'-phosphorothioate
  modified_base 3: mod_base = OTHER; note = 2'-O-methylcytidine-3'-phosphate
  modified_base 4: mod_base = OTHER; note = 2'-O-methylcytidine-3'-phosphate
  modified_base 5: mod_base = OTHER; note = 2'-O-methyladenosine-3'-phosphate
  modified_base 6: mod_base = OTHER; note = 2'-fluoroadenosine-3'-phosphate
  modified_base 7: mod_base = OTHER; note = 2'-O-methylcytidine-3'-phosphate
  modified_base 8: mod_base = OTHER; note = 2'-fluoroadenosine-3'-phosphate
  modified_base 9: mod_base = OTHER; note = 2'-fluorocytidine-3'-phosphate
  modified_base 10: mod_base = OTHER; note = 2'-O-methyluridine-3'-phosphate
  modified_base 11: mod_base = OTHER; note = 2'-O-methyluridine-3'-phosphate
  modified_base 12: mod_base = OTHER; note = 2'-O-methyluridine-3'-phosphate
  modified_base 13: mod_base = OTHER; note = 2'-O-methylguanosine-3'-phosphate
  modified_base 14: mod_base = OTHER; note = 2'-fluoroadenosine-3'-phosphate
  modified_base 15: mod_base = OTHER; note = 2'-O-methyladenosine-3'-phosphate
  modified_base 16: mod_base = OTHER; note = 2'-fluorocytidine-3'-phosphate
  modified_base 17: mod_base = OTHER; note = 2'-O-methylcytidine-3'-phosphate
  modified_base 18: mod_base = OTHER; note = 2'-O-methyluridine-3'-phosphate
  modified_base 19: mod_base = OTHER; note = 2'-O-methylguanosine-3'-phosphate
  modified_base 20: mod_base = OTHER; note = 2'-O-methyladenosine-3'-phosphate
  modified_base 21: mod_base = OTHER; note = 2'-O-methylguanosine-3'-phosphorothioate
  modified_base 22: mod_base = OTHER; note = 2'-O-methylcytidine-3'-phosphorothioate
  modified_base 23: mod_base = OTHER; note = 2'-O-methyluridine-3'-phosphate
taccaacactttgaacctgagct

SEQ ID NO: 2310 - RNA, 21 nt, synthetic construct
  source 1..21: mol_type = other RNA; note = Description of Artificial Sequence: Synthetic oligonucleotide
  modified_base 1: mod_base = OTHER; note = 2'-O-methylguanosine-3'-phosphorothioate
  modified_base 2: mod_base = OTHER; note = 2'-O-methyluridine-3'-phosphorothioate
  modified_base 3: mod_base = OTHER; note = 2'-O-methyladenosine-3'-phosphate
  modified_base 4: mod_base = OTHER; note = 2'-O-methyladenosine-3'-phosphate
  modified_base 5: mod_base = OTHER; note = 2'-O-methylguanosine-3'-phosphate
  modified_base 6: mod_base = OTHER; note = 2'-O-methylcytidine-3'-phosphate
  modified_base 7: mod_base = OTHER; note = 2'-fluorouridine-3'-phosphate
  modified_base 8: mod_base = OTHER; note = 2'-O-methylcytidine-3'-phosphate
  modified_base 9: mod_base = OTHER; note = 2'-fluoroadenosine-3'-phosphate
  modified_base 10: mod_base = OTHER; note = 2'-fluoroguanosine-3'-phosphate
  modified_base 11: mod_base = OTHER; note = 2'-fluoroguanosine-3'-phosphate
  modified_base 12: mod_base = OTHER; note = 2'-O-methyluridine-3'-phosphate
  modified_base 13: mod_base = OTHER; note = 2'-O-methyluridine-3'-phosphate
  modified_base 14: mod_base = OTHER; note = 2'-O-methylcytidine-3'-phosphate
  modified_base 15: mod_base = OTHER; note = 2'-O-methyladenosine-3'-phosphate
  modified_base 16: mod_base = OTHER; note = 2'-O-methyladenosine-3'-phosphate
  modified_base 17: mod_base = OTHER; note = 2'-O-methyladenosine-3'-phosphate
  modified_base 18: mod_base = OTHER; note = 2'-O-methylguanosine-3'-phosphate
  modified_base 19: mod_base = OTHER; note = 2'-O-methyluridine-3'-phosphate
  modified_base 20: mod_base = OTHER; note = 2'-O-methylguanosine-3'-phosphate
  modified_base 21: mod_base = OTHER; note = 2'-O-methyluridine-3'-phosphate N-[tris(GalNAc-alkyl)-amidodecanoyl)]-4-hydroxyprolinol Hyp-(GalNAc-alkyl)3
gtaagctcaggttcaaagtgt

SEQ ID NO: 2311 - RNA, 23 nt, synthetic construct
  source 1..23: mol_type = other RNA; note = Description of Artificial Sequence: Synthetic oligonucleotide
  modified_base 1: mod_base = OTHER; note = 2'-O-methyladenosine-3'-phosphorothioate
  modified_base 2: mod_base = OTHER; note = 2'-fluorocytidine-3'-phosphorothioate
  modified_base 3: mod_base = OTHER; note = 2'-O-methyladenosine-3'-phosphate
  modified_base 4: mod_base = OTHER; note = 2'-O-methylcytidine-3'-phosphate
  modified_base 5: mod_base = OTHER; note = 2'-O-methyluridine-3'-phosphate
  modified_base 6: mod_base = OTHER; note = 2'-fluorouridine-3'-phosphate
  modified_base 7: mod_base = OTHER; note = 2'-O-methyluridine-3'-phosphate
  modified_base 8: mod_base = OTHER; note = 2'-fluoroguanosine-3'-phosphate
  modified_base 9: mod_base = OTHER; note = 2'-fluoroadenosine-3'-phosphate
  modified_base 10: mod_base = OTHER; note = 2'-O-methyladenosine-3'-phosphate
  modified_base 11: mod_base = OTHER; note = 2'-O-methylcytidine-3'-phosphate
  modified_base 12: mod_base = OTHER; note = 2'-O-methylcytidine-3'-phosphate
  modified_base 13: mod_base = OTHER; note = 2'-O-methyluridine-3'-phosphate
  modified_base 14: mod_base = OTHER; note = 2'-fluoroguanosine-3'-phosphate
  modified_base 15: mod_base = OTHER; note = 2'-O-methyladenosine-3'-phosphate
  modified_base 16: mod_base = OTHER; note = 2'-fluoroguanosine-3'-phosphate
  modified_base 17: mod_base = OTHER; note = 2'-O-methylcytidine-3'-phosphate
  modified_base 18: mod_base = OTHER; note = 2'-O-methyluridine-3'-phosphate
  modified_base 19: mod_base = OTHER; note = 2'-O-methyluridine-3'-phosphate
  modified_base 20: mod_base = OTHER; note = 2'-O-methyladenosine-3'-phosphate
  modified_base 21: mod_base = OTHER; note = 2'-O-methylcytidine-3'-phosphorothioate
  modified_base 22: mod_base = OTHER; note = 2'-O-methyladenosine-3'-phosphorothioate
  modified_base 23: mod_base = OTHER; note = 2'-O-methyladenosine-3'-phosphate
acactttgaacctgagcttacaa

SEQ ID NO: 2312 - RNA, 21 nt, synthetic construct
  source 1..21: mol_type = other RNA; note = Description of Artificial Sequence: Synthetic oligonucleotide
  modified_base 1: mod_base = OTHER; note = 2'-O-methyluridine-3'-phosphorothioate
  modified_base 2: mod_base = OTHER; note = 2'-O-methylguanosine-3'-phosphorothioate
  modified_base 3: mod_base = OTHER; note = 2'-O-methyluridine-3'-phosphate
  modified_base 4: mod_base = OTHER; note = 2'-O-methyladenosine-3'-phosphate
  modified_base 5: mod_base = OTHER; note = 2'-O-methyladenosine-3'-phosphate
  modified_base 6: mod_base = OTHER; note = 2'-O-methylguanosine-3'-phosphate
  modified_base 7: mod_base = OTHER; note = 2'-fluorocytidine-3'-phosphate
  modified_base 8: mod_base = OTHER; note = 2'-O-methyluridine-3'-phosphate
  modified_base 9: mod_base = OTHER; note = 2'-fluorocytidine-3'-phosphate
  modified_base 10: mod_base = OTHER; note = 2'-fluoroadenosine-3'-phosphate
  modified_base 11: mod_base = OTHER; note = 2'-fluoroguanosine-3'-phosphate
  modified_base 12: mod_base = OTHER; note = 2'-O-methylguanosine-3'-phosphate
  modified_base 13: mod_base = OTHER; note = 2'-O-methyluridine-3'-phosphate
  modified_base 14: mod_base = OTHER; note = 2'-O-methyluridine-3'-phosphate
  modified_base 15: mod_base = OTHER; note = 2'-O-methylcytidine-3'-phosphate
  modified_base 16: mod_base = OTHER; note = 2'-O-methyladenosine-3'-phosphate
  modified_base 17: mod_base = OTHER; note = 2'-O-methyladenosine-3'-phosphate
  modified_base 18: mod_base = OTHER; note = 2'-O-methyladenosine-3'-phosphate
  modified_base 19: mod_base = OTHER; note = 2'-O-methylguanosine-3'-phosphate
  modified_base 20: mod_base = OTHER; note = 2'-O-methyluridine-3'-phosphate
  modified_base 21: mod_base = OTHER; note = 2'-O-methylguanosine-3'-phosphate N-[tris(GalNAc-alkyl)-amidodecanoyl)]-4-hydroxyprolinol Hyp-(GalNAc-alkyl)3
tgtaagctcaggttcaaagtg

SEQ ID NO: 2313 - RNA, 23 nt, synthetic construct
  source 1..23: mol_type = other RNA; note = Description of Artificial Sequence: Synthetic oligonucleotide
  modified_base 1: mod_base = OTHER; note = 2'-O-methylcytidine-3'-phosphorothioate
  modified_base 2: mod_base = OTHER; note = 2'-fluoroadenosine-3'-phosphorothioate
  modified_base 3: mod_base = OTHER; note = 2'-O-methylcytidine-3'-phosphate
  modified_base 4: mod_base = OTHER; note = 2'-O-methyluridine-3'-phosphate
  modified_base 5: mod_base = OTHER; note = 2'-O-methyluridine-3'-phosphate
  modified_base 6: mod_base = OTHER; note = 2'-fluorouridine-3'-phosphate
  modified_base 7: mod_base = OTHER; note = 2'-O-methylguanosine-3'-phosphate
  modified_base 8: mod_base = OTHER; note = 2'-fluoroadenosine-3'-phosphate
  modified_base 9: mod_base = OTHER; note = 2'-fluoroadenosine-3'-phosphate
  modified_base 10: mod_base = OTHER; note = 2'-O-methylcytidine-3'-phosphate
  modified_base 11: mod_base = OTHER; note = 2'-O-methylcytidine-3'-phosphate
  modified_base 12: mod_base = OTHER; note = 2'-O-methyluridine-3'-phosphate
  modified_base 13: mod_base = OTHER; note = 2'-O-methylguanosine-3'-phosphate
  modified_base 14: mod_base = OTHER; note = 2'-fluoroadenosine-3'-phosphate
  modified_base 15: mod_base = OTHER; note = 2'-O-methylguanosine-3'-phosphate
  modified_base 16: mod_base = OTHER; note = 2'-fluorocytidine-3'-phosphate
  modified_base 17: mod_base = OTHER; note = 2'-O-methyluridine-3'-phosphate
  modified_base 18: mod_base = OTHER; note = 2'-O-methyluridine-3'-phosphate
  modified_base 19: mod_base = OTHER; note = 2'-O-methyladenosine-3'-phosphate
  modified_base 20: mod_base = OTHER; note = 2'-O-methylcytidine-3'-phosphate
  modified_base 21: mod_base = OTHER; note = 2'-O-methyladenosine-3'-phosphorothioate
  modified_base 22: mod_base = OTHER; note = 2'-O-methyladenosine-3'-phosphorothioate
  modified_base 23: mod_base = OTHER; note = 2'-O-methyluridine-3'-phosphate
cactttgaacctgagcttacaat

SEQ ID NO: 2314 - RNA, 21 nt, synthetic construct
  source 1..21: mol_type = other RNA; note = Description of Artificial Sequence: Synthetic oligonucleotide
  modified_base 1: mod_base = OTHER; note = 2'-O-methyladenosine-3'-phosphorothioate
  modified_base 2: mod_base = OTHER; note = 2'-O-methyluridine-3'-phosphorothioate
  modified_base 3: mod_base = OTHER; note = 2'-O-methylguanosine-3'-phosphate
  modified_base 4: mod_base = OTHER; note = 2'-O-methyluridine-3'-phosphate
  modified_base 5: mod_base = OTHER; note = 2'-O-methyladenosine-3'-phosphate
  modified_base 6: mod_base = OTHER; note = 2'-O-methyluridine-3'-phosphate
  modified_base 7: mod_base = OTHER; note = 2'-fluorouridine-3'-phosphate
  modified_base 8: mod_base = OTHER; note = 2'-O-methyladenosine-3'-phosphate
  modified_base 9: mod_base = OTHER; note = 2'-fluorocytidine-3'-phosphate
  modified_base 10: mod_base = OTHER; note = 2'-fluorouridine-3'-phosphate
  modified_base 11: mod_base = OTHER; note = 2'-fluorouridine-3'-phosphate
  modified_base 12: mod_base = OTHER; note = 2'-O-methylguanosine-3'-phosphate
  modified_base 13: mod_base = OTHER; note = 2'-O-methyladenosine-3'-phosphate
  modified_base 14: mod_base = OTHER; note = 2'-O-methylcytidine-3'-phosphate
  modified_base 15: mod_base = OTHER; note = 2'-O-methyladenosine-3'-phosphate
  modified_base 16: mod_base = OTHER; note = 2'-O-methyladenosine-3'-phosphate
  modified_base 17: mod_base = OTHER; note = 2'-O-methyladenosine-3'-phosphate
  modified_base 18: mod_base = OTHER; note = 2'-O-methylguanosine-3'-phosphate
  modified_base 19: mod_base = OTHER; note = 2'-O-methyladenosine-3'-phosphate
  modified_base 20: mod_base = OTHER; note = 2'-O-methylguanosine-3'-phosphate
  modified_base 21: mod_base = OTHER; note = 2'-O-methyladenosine-3'-phosphate N-[tris(GalNAc-alkyl)-amidodecanoyl)]-4-hydroxyprolinol Hyp-(GalNAc-alkyl)3
atgtattacttgacaaagaga

SEQ ID NO: 2315 - RNA, 23 nt, synthetic construct
  source 1..23: mol_type = other RNA; note = Description of Artificial Sequence: Synthetic oligonucleotide
  modified_base 1: mod_base = OTHER; note = 2'-O-methyluridine-3'-phosphorothioate
  modified_base 2: mod_base = OTHER; note = 2'-fluorocytidine-3'-phosphorothioate
  modified_base 3: mod_base = OTHER; note = 2'-O-methyluridine-3'-phosphate
  modified_base 4: mod_base = OTHER; note = 2'-O-methylcytidine-3'-phosphate
  modified_base 5: mod_base = OTHER; note = 2'-O-methyluridine-3'-phosphate
  modified_base 6: mod_base = OTHER; note = 2'-fluorouridine-3'-phosphate
  modified_base 7: mod_base = OTHER; note = 2'-O-methyluridine-3'-phosphate
  modified_base 8: mod_base = OTHER; note = 2'-fluoroguanosine-3'-phosphate
  modified_base 9: mod_base = OTHER; note = 2'-fluorouridine-3'-phosphate
  modified_base 10: mod_base = OTHER; note = 2'-O-methylcytidine-3'-phosphate
  modified_base 11: mod_base = OTHER; note = 2'-O-methyladenosine-3'-phosphate
  modified_base 12: mod_base = OTHER; note = 2'-O-methyladenosine-3'-phosphate
  modified_base 13: mod_base = OTHER; note = 2'-O-methylguanosine-3'-phosphate
  modified_base 14: mod_base = OTHER; note = 2'-fluorouridine-3'-phosphate
  modified_base 15: mod_base = OTHER; note = 2'-O-methyladenosine-3'-phosphate
  modified_base 16: mod_base = OTHER; note = 2'-fluoroadenosine-3'-phosphate
  modified_base 17: mod_base = OTHER; note = 2'-O-methyluridine-3'-phosphate
  modified_base 18: mod_base = OTHER; note = 2'-O-methyladenosine-3'-phosphate
  modified_base 19: mod_base = OTHER; note = 2'-O-methylcytidine-3'-phosphate
  modified_base 20: mod_base = OTHER; note = 2'-O-methyladenosine-3'-phosphate
  modified_base 21: mod_base = OTHER; note = 2'-O-methyluridine-3'-phosphorothioate
  modified_base 22: mod_base = OTHER; note = 2'-O-methylguanosine-3'-phosphorothioate
  modified_base 23: mod_base = OTHER; note = 2'-O-methylcytidine-3'-phosphate
tctctttgtcaagtaatacatgc

SEQ ID NO: 2316 - RNA, 21 nt, synthetic construct
  source 1..21: mol_type = other RNA; note = Description of Artificial Sequence: Synthetic oligonucleotide
  modified_base 1: mod_base = OTHER; note = 2'-O-methyluridine-3'-phosphorothioate
  modified_base 2: mod_base = OTHER; note = 2'-O-methylguanosine-3'-phosphorothioate
  modified_base 3: mod_base = OTHER; note = 2'-O-methyluridine-3'-phosphate
  modified_base 4: mod_base = OTHER; note = 2'-O-methyladenosine-3'-phosphate
  modified_base 5: mod_base = OTHER; note = 2'-O-methyluridine-3'-phosphate
  modified_base 6: mod_base = OTHER; note = 2'-O-methyluridine-3'-phosphate
  modified_base 7: mod_base = OTHER; note = 2'-fluoroadenosine-3'-phosphate
  modified_base 8: mod_base = OTHER; note = 2'-O-methylcytidine-3'-phosphate
  modified_base 9: mod_base = OTHER; note = 2'-fluorouridine-3'-phosphate
  modified_base 10: mod_base = OTHER; note = 2'-fluorouridine-3'-phosphate
  modified_base 11: mod_base = OTHER; note = 2'-fluoroguanosine-3'-phosphate
  modified_base 12: mod_base = OTHER; note = 2'-O-methyladenosine-3'-phosphate
  modified_base 13: mod_base = OTHER; note = 2'-O-methylcytidine-3'-phosphate
  modified_base 14: mod_base = OTHER; note = 2'-O-methyladenosine-3'-phosphate
  modified_base 15: mod_base = OTHER; note = 2'-O-methyladenosine-3'-phosphate
  modified_base 16: mod_base = OTHER; note = 2'-O-methyladenosine-3'-phosphate
  modified_base 17: mod_base = OTHER; note = 2'-O-methylguanosine-3'-phosphate
  modified_base 18: mod_base = OTHER; note = 2'-O-methyladenosine-3'-phosphate
  modified_base 19: mod_base = OTHER; note = 2'-O-methylguanosine-3'-phosphate
  modified_base 20: mod_base = OTHER; note = 2'-O-methyladenosine-3'-phosphate
  modified_base 21: mod_base = OTHER; note = 2'-O-methylcytidine-3'-phosphate N-[tris(GalNAc-alkyl)-amidodecanoyl)]-4-hydroxyprolinol Hyp-(GalNAc-alkyl)3
tgtattacttgacaaagagac

SEQ ID NO: 2317 - RNA, 23 nt, synthetic construct
  source 1..23: mol_type = other RNA; note = Description of Artificial Sequence: Synthetic oligonucleotide
  modified_base 1: mod_base = OTHER; note = 2'-O-methylguanosine-3'-phosphorothioate
  modified_base 2: mod_base = OTHER; note = 2'-fluorouridine -3'-phosphorothioate
  modified_base 3: mod_base = OTHER; note = 2'-O-methylcytidine-3'-phosphate
  modified_base 4: mod_base = OTHER; note = 2'-O-methyluridine-3'-phosphate
  modified_base 5: mod_base = OTHER; note = 2'-O-methylcytidine-3'-phosphate
  modified_base 6: mod_base = OTHER; note = 2'-fluorouridine-3'-phosphate
  modified_base 7: mod_base = OTHER; note = 2'-O-methyluridine-3'-phosphate
  modified_base 8: mod_base = OTHER; note = 2'-fluorouridine-3'-phosphate
  modified_base 9: mod_base = OTHER; note = 2'-fluoroguanosine-3'-phosphate
  modified_base 10: mod_base = OTHER; note = 2'-O-methyluridine-3'-phosphate
  modified_base 11: mod_base = OTHER; note = 2'-O-methylcytidine-3'-phosphate
  modified_base 12: mod_base = OTHER; note = 2'-O-methyladenosine-3'-phosphate
  modified_base 13: mod_base = OTHER; note = 2'-O-methyladenosine-3'-phosphate
  modified_base 14: mod_base = OTHER; note = 2'-fluoroguanosine-3'-phosphate
  modified_base 15: mod_base = OTHER; note = 2'-O-methyluridine-3'-phosphate
  modified_base 16: mod_base = OTHER; note = 2'-fluoroadenosine-3'-phosphate
  modified_base 17: mod_base = OTHER; note = 2'-O-methyladenosine-3'-phosphate
  modified_base 18: mod_base = OTHER; note = 2'-O-methyluridine-3'-phosphate
  modified_base 19: mod_base = OTHER; note = 2'-O-methyladenosine-3'-phosphate
  modified_base 20: mod_base = OTHER; note = 2'-O-methylcytidine-3'-phosphate
  modified_base 21: mod_base = OTHER; note = 2'-O-methyladenosine-3'-phosphorothioate
  modified_base 22: mod_base = OTHER; note = 2'-O-methyluridine-3'-phosphorothioate
  modified_base 23: mod_base = OTHER; note = 2'-O-methylguanosine-3'-phosphate
gtctctttgtcaagtaatacatg

SEQ ID NO: 2318 - RNA, 21 nt, synthetic construct
  source 1..21: mol_type = other RNA; note = Description of Artificial Sequence: Synthetic oligonucleotide
  modified_base 1: mod_base = OTHER; note = 2'-O-methylcytidine-3'-phosphorothioate
  modified_base 2: mod_base = OTHER; note = 2'-O-methyladenosine-3'-phosphorothioate
  modified_base 3: mod_base = OTHER; note = 2'-O-methylguanosine-3'-phosphate
  modified_base 4: mod_base = OTHER; note = 2'-O-methylcytidine-3'-phosphate
  modified_base 5: mod_base = OTHER; note = 2'-O-methyladenosine-3'-phosphate
  modified_base 6: mod_base = OTHER; note = 2'-O-methyluridine-3'-phosphate
  modified_base 7: mod_base = OTHER; note = 2'-fluoroguanosine-3'-phosphate
  modified_base 8: mod_base = OTHER; note = 2'-O-methyluridine-3'-phosphate
  modified_base 9: mod_base = OTHER; note = 2'-fluoroadenosine-3'-phosphate
  modified_base 10: mod_base = OTHER; note = 2'-fluorouridine-3'-phosphate
  modified_base 11: mod_base = OTHER; note = 2'-fluorouridine-3'-phosphate
  modified_base 12: mod_base = OTHER; note = 2'-O-methyladenosine-3'-phosphate
  modified_base 13: mod_base = OTHER; note = 2'-O-methylcytidine-3'-phosphate
  modified_base 14: mod_base = OTHER; note = 2'-O-methyluridine-3'-phosphate
  modified_base 15: mod_base = OTHER; note = 2'-O-methyluridine-3'-phosphate
  modified_base 16: mod_base = OTHER; note = 2'-O-methylguanosine-3'-phosphate
  modified_base 17: mod_base = OTHER; note = 2'-O-methyladenosine-3'-phosphate
  modified_base 18: mod_base = OTHER; note = 2'-O-methylcytidine-3'-phosphate
  modified_base 19: mod_base = OTHER; note = 2'-O-methyladenosine-3'-phosphate
  modified_base 20: mod_base = OTHER; note = 2'-O-methyladenosine-3'-phosphate
  modified_base 21: mod_base = OTHER; note = 2'-O-methyladenosine-3'-phosphate N-[tris(GalNAc-alkyl)-amidodecanoyl)]-4-hydroxyprolinol Hyp-(GalNAc-alkyl)3
cagcatgtattacttgacaaa

SEQ ID NO: 2319 - RNA, 23 nt, synthetic construct
  source 1..23: mol_type = other RNA; note = Description of Artificial Sequence: Synthetic oligonucleotide
  modified_base 1: mod_base = OTHER; note = 2'-O-methyluridine-3'-phosphorothioate
  modified_base 2: mod_base = OTHER; note = 2'-fluorouridine -3'-phosphorothioate
  modified_base 3: mod_base = OTHER; note = 2'-O-methyluridine-3'-phosphate
  modified_base 4: mod_base = OTHER; note = 2'-O-methylguanosine-3'-phosphate
  modified_base 5: mod_base = OTHER; note = 2'-O-methyluridine-3'-phosphate
  modified_base 6: mod_base = OTHER; note = 2'-fluorocytidine-3'-phosphate
  modified_base 7: mod_base = OTHER; note = 2'-O-methyladenosine-3'-phosphate
  modified_base 8: mod_base = OTHER; note = 2'-fluoroadenosine-3'-phosphate
  modified_base 9: mod_base = OTHER; note = 2'-fluoroguanosine-3'-phosphate
  modified_base 10: mod_base = OTHER; note = 2'-O-methyluridine-3'-phosphate
  modified_base 11: mod_base = OTHER; note = 2'-O-methyladenosine-3'-phosphate
  modified_base 12: mod_base = OTHER; note = 2'-O-methyladenosine-3'-phosphate
  modified_base 13: mod_base = OTHER; note = 2'-O-methyluridine-3'-phosphate
  modified_base 14: mod_base = OTHER; note = 2'-fluoroadenosine-3'-phosphate
  modified_base 15: mod_base = OTHER; note = 2'-O-methylcytidine-3'-phosphate
  modified_base 16: mod_base = OTHER; note = 2'-fluoroadenosine-3'-phosphate
  modified_base 17: mod_base = OTHER; note = 2'-O-methyluridine-3'-phosphate
  modified_base 18: mod_base = OTHER; note = 2'-O-methylguanosine-3'-phosphate
  modified_base 19: mod_base = OTHER; note = 2'-O-methylcytidine-3'-phosphate
  modified_base 20: mod_base = OTHER; note = 2'-O-methyluridine-3'-phosphate
  modified_base 21: mod_base = OTHER; note = 2'-O-methylguanosine-3'-phosphorothioate
  modified_base 22: mod_base = OTHER; note = 2'-O-methyladenosine-3'-phosphorothioate
  modified_base 23: mod_base = OTHER; note = 2'-O-methyladenosine-3'-phosphate
tttgtcaagtaatacatgctgaa

SEQ ID NO: 2320 - RNA, 21 nt, synthetic construct
  source 1..21: mol_type = other RNA; note = Description of Artificial Sequence: Synthetic oligonucleotide
  modified_base 1: mod_base = OTHER; note = 2'-O-methyluridine-3'-phosphorothioate
  modified_base 2: mod_base = OTHER; note = 2'-O-methylcytidine-3'-phosphorothioate
  modified_base 3: mod_base = OTHER; note = 2'-O-methyladenosine-3'-phosphate
  modified_base 4: mod_base = OTHER; note = 2'-O-methylguanosine-3'-phosphate
  modified_base 5: mod_base = OTHER; note = 2'-O-methylcytidine-3'-phosphate
  modified_base 6: mod_base = OTHER; note = 2'-O-methyladenosine-3'-phosphate
  modified_base 7: mod_base = OTHER; note = 2'-fluorouridine-3'-phosphate
  modified_base 8: mod_base = OTHER; note = 2'-O-methylguanosine-3'-phosphate
  modified_base 9: mod_base = OTHER; note = 2'-fluorouridine-3'-phosphate
  modified_base 10: mod_base = OTHER; note = 2'-fluoroadenosine-3'-phosphate
  modified_base 11: mod_base = OTHER; note = 2'-fluorouridine-3'-phosphate
  modified_base 12: mod_base = OTHER; note = 2'-O-methyluridine-3'-phosphate
  modified_base 13: mod_base = OTHER; note = 2'-O-methyladenosine-3'-phosphate
  modified_base 14: mod_base = OTHER; note = 2'-O-methylcytidine-3'-phosphate
  modified_base 15: mod_base = OTHER; note = 2'-O-methyluridine-3'-phosphate
  modified_base 16: mod_base = OTHER; note = 2'-O-methyluridine-3'-phosphate
  modified_base 17: mod_base = OTHER; note = 2'-O-methylguanosine-3'-phosphate
  modified_base 18: mod_base = OTHER; note = 2'-O-methyladenosine-3'-phosphate
  modified_base 19: mod_base = OTHER; note = 2'-O-methylcytidine-3'-phosphate
  modified_base 20: mod_base = OTHER; note = 2'-O-methyladenosine-3'-phosphate
  modified_base 21: mod_base = OTHER; note = 2'-O-methyladenosine-3'-phosphate N-[tris(GalNAc-alkyl)-amidodecanoyl)]-4-hydroxyprolinol Hyp-(GalNAc-alkyl)3
tcagcatgtattacttgacaa

SEQ ID NO: 2321 - RNA, 23 nt, synthetic construct
  source 1..23: mol_type = other RNA; note = Description of Artificial Sequence: Synthetic oligonucleotide
  modified_base 1: mod_base = OTHER; note = 2'-O-methyluridine-3'-phosphorothioate
  modified_base 2: mod_base = OTHER; note = 2'-fluorouridine -3'-phosphorothioate
  modified_base 3: mod_base = OTHER; note = 2'-O-methylguanosine-3'-phosphate
  modified_base 4: mod_base = OTHER; note = 2'-O-methyluridine-3'-phosphate
  modified_base 5: mod_base = OTHER; note = 2'-O-methylcytidine-3'-phosphate
  modified_base 6: mod_base = OTHER; note = 2'-fluoroadenosine-3'-phosphate
  modified_base 7: mod_base = OTHER; note = 2'-O-methyladenosine-3'-phosphate
  modified_base 8: mod_base = OTHER; note = 2'-fluoroguanosine-3'-phosphate
  modified_base 9: mod_base = OTHER; note = 2'-fluorouridine-3'-phosphate
  modified_base 10: mod_base = OTHER; note = 2'-O-methyladenosine-3'-phosphate
  modified_base 11: mod_base = OTHER; note = 2'-O-methyladenosine-3'-phosphate
  modified_base 12: mod_base = OTHER; note = 2'-O-methyluridine-3'-phosphate
  modified_base 13: mod_base = OTHER; note = 2'-O-methyladenosine-3'-phosphate
  modified_base 14: mod_base = OTHER; note = 2'-fluorocytidine-3'-phosphate
  modified_base 15: mod_base = OTHER; note = 2'-O-methyladenosine-3'-phosphate
  modified_base 16: mod_base = OTHER; note = 2'-fluorouridine-3'-phosphate
  modified_base 17: mod_base = OTHER; note = 2'-O-methylguanosine-3'-phosphate
  modified_base 18: mod_base = OTHER; note = 2'-O-methylcytidine-3'-phosphate
  modified_base 19: mod_base = OTHER; note = 2'-O-methyluridine-3'-phosphate
  modified_base 20: mod_base = OTHER; note = 2'-O-methylguanosine-3'-phosphate
  modified_base 21: mod_base = OTHER; note = 2'-O-methyladenosine-3'-phosphorothioate
  modified_base 22: mod_base = OTHER; note = 2'-O-methyladenosine-3'-phosphorothioate
  modified_base 23: mod_base = OTHER; note = 2'-O-methyladenosine-3'-phosphate
ttgtcaagtaatacatgctgaaa

SEQ ID NO: 2322 - RNA, 21 nt, synthetic construct
  source 1..21: mol_type = other RNA; note = Description of Artificial Sequence: Synthetic oligonucleotide
  modified_base 1: mod_base = OTHER; note = 2'-O-methylcytidine-3'-phosphorothioate
  modified_base 2: mod_base = OTHER; note = 2'-O-methyluridine-3'-phosphorothioate
  modified_base 3: mod_base = OTHER; note = 2'-O-methylguanosine-3'-phosphate
  modified_base 4: mod_base = OTHER; note = 2'-O-methylcytidine-3'-phosphate
  modified_base 5: mod_base = OTHER; note = 2'-O-methyladenosine-3'-phosphate
  modified_base 6: mod_base = OTHER; note = 2'-O-methyladenosine-3'-phosphate
  modified_base 7: mod_base = OTHER; note = 2'-fluorocytidine-3'-phosphate
  modified_base 8: mod_base = OTHER; note = 2'-O-methyluridine-3'-phosphate
  modified_base 9: mod_base = OTHER; note = 2'-fluoroguanosine-3'-phosphate
  modified_base 10: mod_base = OTHER; note = 2'-fluorouridine-3'-phosphate
  modified_base 11: mod_base = OTHER; note = 2'-fluoroadenosine-3'-phosphate
  modified_base 12: mod_base = OTHER; note = 2'-O-methyluridine-3'-phosphate
  modified_base 13: mod_base = OTHER; note = 2'-O-methyladenosine-3'-phosphate
  modified_base 14: mod_base = OTHER; note = 2'-O-methyluridine-3'-phosphate
  modified_base 15: mod_base = OTHER; note = 2'-O-methylcytidine-3'-phosphate
  modified_base 16: mod_base = OTHER; note = 2'-O-methyluridine-3'-phosphate
  modified_base 17: mod_base = OTHER; note = 2'-O-methyladenosine-3'-phosphate
  modified_base 18: mod_base = OTHER; note = 2'-O-methylcytidine-3'-phosphate
  modified_base 19: mod_base = OTHER; note = 2'-O-methyladenosine-3'-phosphate
  modified_base 20: mod_base = OTHER; note = 2'-O-methyladenosine-3'-phosphate
  modified_base 21: mod_base = OTHER; note = 2'-O-methylguanosine-3'-phosphate N-[tris(GalNAc-alkyl)-amidodecanoyl)]-4-hydroxyprolinol Hyp-(GalNAc-alkyl)3
ctgcaactgtatatctacaag

SEQ ID NO: 2323 - RNA, 23 nt, synthetic construct
  source 1..23: mol_type = other RNA; note = Description of Artificial Sequence: Synthetic oligonucleotide
  modified_base 1: mod_base = OTHER; note = 2'-O-methylcytidine-3'-phosphorothioate
  modified_base 2: mod_base = OTHER; note = 2'-fluorouridine -3'-phosphorothioate
  modified_base 3: mod_base = OTHER; note = 2'-O-methyluridine-3'-phosphate
  modified_base 4: mod_base = OTHER; note = 2'-O-methylguanosine-3'-phosphate
  modified_base 5: mod_base = OTHER; note = 2'-O-methyluridine-3'-phosphate
  modified_base 6: mod_base = OTHER; note = 2'-fluoroadenosine-3'-phosphate
  modified_base 7: mod_base = OTHER; note = 2'-O-methylguanosine-3'-phosphate
  modified_base 8: mod_base = OTHER; note = 2'-fluoroadenosine-3'-phosphate
  modified_base 9: mod_base = OTHER; note = 2'-fluorouridine-3'-phosphate
  modified_base 10: mod_base = OTHER; note = 2'-O-methyladenosine-3'-phosphate
  modified_base 11: mod_base = OTHER; note = 2'-O-methyluridine-3'-phosphate
  modified_base 12: mod_base = OTHER; note = 2'-O-methyladenosine-3'-phosphate
  modified_base 13: mod_base = OTHER; note = 2'-O-methylcytidine-3'-phosphate
  modified_base 14: mod_base = OTHER; note = 2'-fluoroadenosine-3'-phosphate
  modified_base 15: mod_base = OTHER; note = 2'-O-methylguanosine-3'-phosphate
  modified_base 16: mod_base = OTHER; note = 2'-fluorouridine-3'-phosphate
  modified_base 17: mod_base = OTHER; note = 2'-O-methyluridine-3'-phosphate
  modified_base 18: mod_base = OTHER; note = 2'-O-methylguanosine-3'-phosphate
  modified_base 19: mod_base = OTHER; note = 2'-O-methylcytidine-3'-phosphate
  modified_base 20: mod_base = OTHER; note = 2'-O-methyladenosine-3'-phosphate
  modified_base 21: mod_base = OTHER; note = 2'-O-methylguanosine-3'-phosphorothioate
  modified_base 22: mod_base = OTHER; note = 2'-O-methylcytidine-3'-phosphorothioate
  modified_base 23: mod_base = OTHER; note = 2'-O-methylcytidine-3'-phosphate
cttgtagatatacagttgcagcc

SEQ ID NO: 2324 - RNA, 21 nt, synthetic construct
  source 1..21: mol_type = other RNA; note = Description of Artificial Sequence: Synthetic oligonucleotide
  modified_base 1: mod_base = OTHER; note = 2'-O-methyluridine-3'-phosphorothioate
  modified_base 2: mod_base = OTHER; note = 2'-O-methylguanosine-3'-phosphorothioate
  modified_base 3: mod_base = OTHER; note = 2'-O-methylcytidine-3'-phosphate
  modified_base 4: mod_base = OTHER; note = 2'-O-methyladenosine-3'-phosphate
  modified_base 5: mod_base = OTHER; note = 2'-O-methyladenosine-3'-phosphate
  modified_base 6: mod_base = OTHER; note = 2'-O-methylcytidine-3'-phosphate
  modified_base 7: mod_base = OTHER; note = 2'-fluorouridine-3'-phosphate
  modified_base 8: mod_base = OTHER; note = 2'-O-methylguanosine-3'-phosphate
  modified_base 9: mod_base = OTHER; note = 2'-fluorouridine-3'-phosphate
  modified_base 10: mod_base = OTHER; note = 2'-fluoroadenosine-3'-phosphate
  modified_base 11: mod_base = OTHER; note = 2'-fluorouridine-3'-phosphate
  modified_base 12: mod_base = OTHER; note = 2'-O-methyladenosine-3'-phosphate
  modified_base 13: mod_base = OTHER; note = 2'-O-methyluridine-3'-phosphate
  modified_base 14: mod_base = OTHER; note = 2'-O-methylcytidine-3'-phosphate
  modified_base 15: mod_base = OTHER; note = 2'-O-methyluridine-3'-phosphate
  modified_base 16: mod_base = OTHER; note = 2'-O-methyladenosine-3'-phosphate
  modified_base 17: mod_base = OTHER; note = 2'-O-methylcytidine-3'-phosphate
  modified_base 18: mod_base = OTHER; note = 2'-O-methyladenosine-3'-phosphate
  modified_base 19: mod_base = OTHER; note = 2'-O-methyladenosine-3'-phosphate
  modified_base 20: mod_base = OTHER; note = 2'-O-methylguanosine-3'-phosphate
  modified_base 21: mod_base = OTHER; note = 2'-O-methylguanosine-3'-phosphate N-[tris(GalNAc-alkyl)-amidodecanoyl)]-4-hydroxyprolinol Hyp-(GalNAc-alkyl)3
tgcaactgtatatctacaagg

SEQ ID NO: 2325 - RNA, 23 nt, synthetic construct
  source 1..23: mol_type = other RNA; note = Description of Artificial Sequence: Synthetic oligonucleotide
  modified_base 1: mod_base = OTHER; note = 2'-O-methylcytidine-3'-phosphorothioate
  modified_base 2: mod_base = OTHER; note = 2'-fluorocytidine-3'-phosphorothioate
  modified_base 3: mod_base = OTHER; note = 2'-O-methyluridine-3'-phosphate
  modified_base 4: mod_base = OTHER; note = 2'-O-methyluridine-3'-phosphate
  modified_base 5: mod_base = OTHER; note = 2'-O-methylguanosine-3'-phosphate
  modified_base 6: mod_base = OTHER; note = 2'-fluorouridine-3'-phosphate
  modified_base 7: mod_base = OTHER; note = 2'-O-methyladenosine-3'-phosphate
  modified_base 8: mod_base = OTHER; note = 2'-fluoroguanosine-3'-phosphate
  modified_base 9: mod_base = OTHER; note = 2'-fluoroadenosine-3'-phosphate
  modified_base 10: mod_base = OTHER; note = 2'-O-methyluridine-3'-phosphate
  modified_base 11: mod_base = OTHER; note = 2'-O-methyladenosine-3'-phosphate
  modified_base 12: mod_base = OTHER; note = 2'-O-methyluridine-3'-phosphate
  modified_base 13: mod_base = OTHER; note = 2'-O-methyladenosine-3'-phosphate
  modified_base 14: mod_base = OTHER; note = 2'-fluorocytidine-3'-phosphate
  modified_base 15: mod_base = OTHER; note = 2'-O-methyladenosine-3'-phosphate
  modified_base 16: mod_base = OTHER; note = 2'-fluoroguanosine-3'-phosphate
  modified_base 17: mod_base = OTHER; note = 2'-O-methyluridine-3'-phosphate
  modified_base 18: mod_base = OTHER; note = 2'-O-methyluridine-3'-phosphate
  modified_base 19: mod_base = OTHER; note = 2'-O-methylguanosine-3'-phosphate
  modified_base 20: mod_base = OTHER; note = 2'-O-methylcytidine-3'-phosphate
  modified_base 21: mod_base = OTHER; note = 2'-O-methyladenosine-3'-phosphorothioate
  modified_base 22: mod_base = OTHER; note = 2'-O-methylguanosine-3'-phosphorothioate
  modified_base 23: mod_base = OTHER; note = 2'-O-methylcytidine-3'-phosphate
ccttgtagatatacagttgcagc

SEQ ID NO: 2326 - RNA, 21 nt, synthetic construct
  source 1..21: mol_type = other RNA; note = Description of Artificial Sequence: Synthetic oligonucleotide
  modified_base 1: mod_base = OTHER; note = 2'-O-methyluridine-3'-phosphorothioate
  modified_base 2: mod_base = OTHER; note = 2'-O-methyluridine-3'-phosphorothioate
  modified_base 3: mod_base = OTHER; note = 2'-O-methylguanosine-3'-phosphate
  modified_base 4: mod_base = OTHER; note = 2'-O-methylguanosine-3'-phosphate
  modified_base 5: mod_base = OTHER; note = 2'-O-methylcytidine-3'-phosphate
  modified_base 6: mod_base = OTHER; note = 2'-O-methyluridine-3'-phosphate
  modified_base 7: mod_base = OTHER; note = 2'-fluoroguanosine-3'-phosphate
  modified_base 8: mod_base = OTHER; note = 2'-O-methylcytidine-3'-phosphate
  modified_base 9: mod_base = OTHER; note = 2'-fluoroadenosine-3'-phosphate
  modified_base 10: mod_base = OTHER; note = 2'-fluoroadenosine-3'-phosphate
  modified_base 11: mod_base = OTHER; note = 2'-fluorocytidine-3'-phosphate
  modified_base 12: mod_base = OTHER; note = 2'-O-methyluridine-3'-phosphate
  modified_base 13: mod_base = OTHER; note = 2'-O-methylguanosine-3'-phosphate
  modified_base 14: mod_base = OTHER; note = 2'-O-methyluridine-3'-phosphate
  modified_base 15: mod_base = OTHER; note = 2'-O-methyladenosine-3'-phosphate
  modified_base 16: mod_base = OTHER; note = 2'-O-methyluridine-3'-phosphate
  modified_base 17: mod_base = OTHER; note = 2'-O-methyladenosine-3'-phosphate
  modified_base 18: mod_base = OTHER; note = 2'-O-methyluridine-3'-phosphate
  modified_base 19: mod_base = OTHER; note = 2'-O-methylcytidine-3'-phosphate
  modified_base 20: mod_base = OTHER; note = 2'-O-methyluridine-3'-phosphate
  modified_base 21: mod_base = OTHER; note = 2'-O-methyladenosine-3'-phosphate N-[tris(GalNAc-alkyl)-amidodecanoyl)]-4-hydroxyprolinol Hyp-(GalNAc-alkyl)3
ttggctgcaactgtatatcta

SEQ ID NO: 2327 - RNA, 23 nt, synthetic construct
  source 1..23: mol_type = other RNA; note = Description of Artificial Sequence: Synthetic oligonucleotide
  modified_base 1: mod_base = OTHER; note = 2'-O-methyluridine-3'-phosphorothioate
  modified_base 2: mod_base = OTHER; note = 2'-fluoroadenosine-3'-phosphorothioate
  modified_base 3: mod_base = OTHER; note = 2'-O-methylguanosine-3'-phosphate
  modified_base 4: mod_base = OTHER; note = 2'-O-methyladenosine-3'-phosphate
  modified_base 5: mod_base = OTHER; note = 2'-O-methyluridine-3'-phosphate
  modified_base 6: mod_base = OTHER; note = 2'-fluoroadenosine-3'-phosphate
  modified_base 7: mod_base = OTHER; note = 2'-O-methyluridine-3'-phosphate
  modified_base 8: mod_base = OTHER; note = 2'-fluoroadenosine-3'-phosphate
  modified_base 9: mod_base = OTHER; note = 2'-fluorocytidine-3'-phosphate
  modified_base 10: mod_base = OTHER; note = 2'-O-methyladenosine-3'-phosphate
  modified_base 11: mod_base = OTHER; note = 2'-O-methylguanosine-3'-phosphate
  modified_base 12: mod_base = OTHER; note = 2'-O-methyluridine-3'-phosphate
  modified_base 13: mod_base = OTHER; note = 2'-O-methyluridine-3'-phosphate
  modified_base 14: mod_base = OTHER; note = 2'-fluoroguanosine-3'-phosphate
  modified_base 15: mod_base = OTHER; note = 2'-O-methylcytidine-3'-phosphate
  modified_base 16: mod_base = OTHER; note = 2'-fluoroadenosine-3'-phosphate
  modified_base 17: mod_base = OTHER; note = 2'-O-methylguanosine-3'-phosphate
  modified_base 18: mod_base = OTHER; note = 2'-O-methylcytidine-3'-phosphate
  modified_base 19: mod_base = OTHER; note = 2'-O-methylcytidine-3'-phosphate
  modified_base 20: mod_base = OTHER; note = 2'-O-methyladenosine-3'-phosphate
  modified_base 21: mod_base = OTHER; note = 2'-O-methyladenosine-3'-phosphorothioate
  modified_base 22: mod_base = OTHER; note = 2'-O-methylcytidine-3'-phosphorothioate
  modified_base 23: mod_base = OTHER; note = 2'-O-methylguanosine-3'-phosphate
tagatatacagttgcagccaacg

SEQ ID NO: 2328 - RNA, 21 nt, synthetic construct
  source 1..21: mol_type = other RNA; note = Description of Artificial Sequence: Synthetic oligonucleotide
  modified_base 1: mod_base = OTHER; note = 2'-O-methylguanosine-3'-phosphorothioate
  modified_base 2: mod_base = OTHER; note = 2'-O-methyluridine-3'-phosphorothioate
  modified_base 3: mod_base = OTHER; note = 2'-O-methyluridine-3'-phosphate
  modified_base 4: mod_base = OTHER; note = 2'-O-methylguanosine-3'-phosphate
  modified_base 5: mod_base = OTHER; note = 2'-O-methylguanosine-3'-phosphate
  modified_base 6: mod_base = OTHER; note = 2'-O-methylcytidine-3'-phosphate
  modified_base 7: mod_base = OTHER; note = 2'-fluorouridine-3'-phosphate
  modified_base 8: mod_base = OTHER; note = 2'-O-methylguanosine-3'-phosphate
  modified_base 9: mod_base = OTHER; note = 2'-fluorocytidine-3'-phosphate
  modified_base 10: mod_base = OTHER; note = 2'-fluoroadenosine-3'-phosphate
  modified_base 11: mod_base = OTHER; note = 2'-fluoroadenosine-3'-phosphate
  modified_base 12: mod_base = OTHER; note = 2'-O-methylcytidine-3'-phosphate
  modified_base 13: mod_base = OTHER; note = 2'-O-methyluridine-3'-phosphate
  modified_base 14: mod_base = OTHER; note = 2'-O-methylguanosine-3'-phosphate
  modified_base 15: mod_base = OTHER; note = 2'-O-methyluridine-3'-phosphate
  modified_base 16: mod_base = OTHER; note = 2'-O-methyladenosine-3'-phosphate
  modified_base 17: mod_base = OTHER; note = 2'-O-methyluridine-3'-phosphate
  modified_base 18: mod_base = OTHER; note = 2'-O-methyladenosine-3'-phosphate
  modified_base 19: mod_base = OTHER; note = 2'-O-methyluridine-3'-phosphate
  modified_base 20: mod_base = OTHER; note = 2'-O-methylcytidine-3'-phosphate
  modified_base 21: mod_base = OTHER; note = 2'-O-methyluridine-3'-phosphate N-[tris(GalNAc-alkyl)-amidodecanoyl)]-4-hydroxyprolinol Hyp-(GalNAc-alkyl)3
gttggctgcaactgtatatct

SEQ ID NO: 2329 - RNA, 23 nt, synthetic construct
  source 1..23: mol_type = other RNA; note = Description of Artificial Sequence: Synthetic oligonucleotide
  modified_base 1: mod_base = OTHER; note = 2'-O-methyladenosine-3'-phosphorothioate
  modified_base 2: mod_base = OTHER; note = 2'-fluoroguanosine-3'-phosphorothioate
  modified_base 3: mod_base = OTHER; note = 2'-O-methyladenosine-3'-phosphate
  modified_base 4: mod_base = OTHER; note = 2'-O-methyluridine-3'-phosphate
  modified_base 5: mod_base = OTHER; note = 2'-O-methyladenosine-3'-phosphate
  modified_base 6: mod_base = OTHER; note = 2'-fluorouridine-3'-phosphate
  modified_base 7: mod_base = OTHER; note = 2'-O-methyladenosine-3'-phosphate
  modified_base 8: mod_base = OTHER; note = 2'-fluorocytidine-3'-phosphate
  modified_base 9: mod_base = OTHER; note = 2'-fluoroadenosine-3'-phosphate
  modified_base 10: mod_base = OTHER; note = 2'-O-methylguanosine-3'-phosphate
  modified_base 11: mod_base = OTHER; note = 2'-O-methyluridine-3'-phosphate
  modified_base 12: mod_base = OTHER; note = 2'-O-methyluridine-3'-phosphate
  modified_base 13: mod_base = OTHER; note = 2'-O-methylguanosine-3'-phosphate
  modified_base 14: mod_base = OTHER; note = 2'-fluorocytidine-3'-phosphate
  modified_base 15: mod_base = OTHER; note = 2'-O-methyladenosine-3'-phosphate
  modified_base 16: mod_base = OTHER; note = 2'-fluoroguanosine-3'-phosphate
  modified_base 17: mod_base = OTHER; note = 2'-O-methylcytidine-3'-phosphate
  modified_base 18: mod_base = OTHER; note = 2'-O-methylcytidine-3'-phosphate
  modified_base 19: mod_base = OTHER; note = 2'-O-methyladenosine-3'-phosphate
  modified_base 20: mod_base = OTHER; note = 2'-O-methyladenosine-3'-phosphate
  modified_base 21: mod_base = OTHER; note = 2'-O-methylcytidine-3'-phosphorothioate
  modified_base 22: mod_base = OTHER; note = 2'-O-methylguanosine-3'-phosphorothioate
  modified_base 23: mod_base = OTHER; note = 2'-O-methyladenosine-3'-phosphate
agatatacagttgcagccaacga

SEQ ID NO: 2330 - RNA, 21 nt, synthetic construct
  source 1..21: mol_type = other RNA; note = Description of Artificial Sequence: Synthetic oligonucleotide
  modified_base 1: mod_base = OTHER; note = 2'-O-methylcytidine-3'-phosphorothioate
  modified_base 2: mod_base = OTHER; note = 2'-O-methyladenosine-3'-phosphorothioate
  modified_base 3: mod_base = OTHER; note = 2'-O-methyladenosine-3'-phosphate
  modified_base 4: mod_base = OTHER; note = 2'-O-methyladenosine-3'-phosphate
  modified_base 5: mod_base = OTHER; note = 2'-O-methyluridine-3'-phosphate
  modified_base 6: mod_base = OTHER; note = 2'-O-methylguanosine-3'-phosphate
  modified_base 7: mod_base = OTHER; note = 2'-fluoroadenosine-3'-phosphate
  modified_base 8: mod_base = OTHER; note = 2'-O-methyluridine-3'-phosphate
  modified_base 9: mod_base = OTHER; note = 2'-fluoroguanosine-3'-phosphate
  modified_base 10: mod_base = OTHER; note = 2'-fluoroadenosine-3'-phosphate
  modified_base 11: mod_base = OTHER; note = 2'-fluoroadenosine-3'-phosphate
  modified_base 12: mod_base = OTHER; note = 2'-O-methylguanosine-3'-phosphate
  modified_base 13: mod_base = OTHER; note = 2'-O-methyladenosine-3'-phosphate
  modified_base 14: mod_base = OTHER; note = 2'-O-methyladenosine-3'-phosphate
  modified_base 15: mod_base = OTHER; note = 2'-O-methyladenosine-3'-phosphate
  modified_base 16: mod_base = OTHER; note = 2'-O-methylcytidine-3'-phosphate
  modified_base 17: mod_base = OTHER; note = 2'-O-methyluridine-3'-phosphate
  modified_base 18: mod_base = OTHER; note = 2'-O-methyluridine-3'-phosphate
  modified_base 19: mod_base = OTHER; note = 2'-O-methyluridine-3'-phosphate
  modified_base 20: mod_base = OTHER; note = 2'-O-methylguanosine-3'-phosphate
  modified_base 21: mod_base = OTHER; note = 2'-O-methylguanosine-3'-phosphate N-[tris(GalNAc-alkyl)-amidodecanoyl)]-4-hydroxyprolinol Hyp-(GalNAc-alkyl)3
caaatgatgaagaaactttgg

SEQ ID NO: 2331 - RNA, 23 nt, synthetic construct
  source 1..23: mol_type = other RNA; note = Description of Artificial Sequence: Synthetic oligonucleotide
  modified_base 1: mod_base = OTHER; note = 2'-O-methylcytidine-3'-phosphorothioate
  modified_base 2: mod_base = OTHER; note = 2'-fluorocytidine-3'-phosphorothioate
  modified_base 3: mod_base = OTHER; note = 2'-O-methyladenosine-3'-phosphate
  modified_base 4: mod_base = OTHER; note = 2'-O-methyladenosine-3'-phosphate
  modified_base 5: mod_base = OTHER; note = 2'-O-methyladenosine-3'-phosphate
  modified_base 6: mod_base = OTHER; note = 2'-fluoroguanosine-3'-phosphate
  modified_base 7: mod_base = OTHER; note = 2'-O-methyluridine-3'-phosphate
  modified_base 8: mod_base = OTHER; note = 2'-fluorouridine-3'-phosphate
  modified_base 9: mod_base = OTHER; note = 2'-fluorouridine-3'-phosphate
  modified_base 10: mod_base = OTHER; note = 2'-O-methylcytidine-3'-phosphate
  modified_base 11: mod_base = OTHER; note = 2'-O-methyluridine-3'-phosphate
  modified_base 12: mod_base = OTHER; note = 2'-O-methyluridine-3'-phosphate
  modified_base 13: mod_base = OTHER; note = 2'-O-methylcytidine-3'-phosphate
  modified_base 14: mod_base = OTHER; note = 2'-fluoroadenosine-3'-phosphate
  modified_base 15: mod_base = OTHER; note = 2'-O-methyluridine-3'-phosphate
  modified_base 16: mod_base = OTHER; note = 2'-fluorocytidine-3'-phosphate
  modified_base 17: mod_base = OTHER; note = 2'-O-methyladenosine-3'-phosphate
  modified_base 18: mod_base = OTHER; note = 2'-O-methyluridine-3'-phosphate
  modified_base 19: mod_base = OTHER; note = 2'-O-methyluridine-3'-phosphate
  modified_base 20: mod_base = OTHER; note = 2'-O-methyluridine-3'-phosphate
  modified_base 21: mod_base = OTHER; note = 2'-O-methylguanosine-3'-phosphorothioate
  modified_base 22: mod_base = OTHER; note = 2'-O-methylcytidine-3'-phosphorothioate
  modified_base 23: mod_base = OTHER; note = 2'-O-methylcytidine-3'-phosphate
ccaaagtttcttcatcatttgcc

SEQ ID NO: 2332 - RNA, 21 nt, synthetic construct
  source 1..21: mol_type = other RNA; note = Description of Artificial Sequence: Synthetic oligonucleotide
  modified_base 1: mod_base = OTHER; note = 2'-O-methyladenosine-3'-phosphorothioate
  modified_base 2: mod_base = OTHER; note = 2'-O-methyladenosine-3'-phosphorothioate
  modified_base 3: mod_base = OTHER; note = 2'-O-methyladenosine-3'-phosphate
  modified_base 4: mod_base = OTHER; note = 2'-O-methyluridine-3'-phosphate
  modified_base 5: mod_base = OTHER; note = 2'-O-methylguanosine-3'-phosphate
  modified_base 6: mod_base = OTHER; note = 2'-O-methyladenosine-3'-phosphate
  modified_base 7: mod_base = OTHER; note = 2'-fluorouridine-3'-phosphate
  modified_base 8: mod_base = OTHER; note = 2'-O-methylguanosine-3'-phosphate
  modified_base 9: mod_base = OTHER; note = 2'-fluoroadenosine-3'-phosphate
  modified_base 10: mod_base = OTHER; note = 2'-fluoroadenosine-3'-phosphate
  modified_base 11: mod_base = OTHER; note = 2'-fluoroguanosine-3'-phosphate
  modified_base 12: mod_base = OTHER; note = 2'-O-methyladenosine-3'-phosphate
  modified_base 13: mod_base = OTHER; note = 2'-O-methyladenosine-3'-phosphate
  modified_base 14: mod_base = OTHER; note = 2'-O-methyladenosine-3'-phosphate
  modified_base 15: mod_base = OTHER; note = 2'-O-methylcytidine-3'-phosphate
  modified_base 16: mod_base = OTHER; note = 2'-O-methyluridine-3'-phosphate
  modified_base 17: mod_base = OTHER; note = 2'-O-methyluridine-3'-phosphate
  modified_base 18: mod_base = OTHER; note = 2'-O-methyluridine-3'-phosphate
  modified_base 19: mod_base = OTHER; note = 2'-O-methylguanosine-3'-phosphate
  modified_base 20: mod_base = OTHER; note = 2'-O-methylguanosine-3'-phosphate
  modified_base 21: mod_base = OTHER; note = 2'-O-methylcytidine-3'-phosphate N-[tris(GalNAc-alkyl)-amidodecanoyl)]-4-hydroxyprolinol Hyp-(GalNAc-alkyl)3
aaatgatgaagaaactttggc

SEQ ID NO: 2333 - RNA, 23 nt, synthetic construct
  source 1..23: mol_type = other RNA; note = Description of Artificial Sequence: Synthetic oligonucleotide
  modified_base 1: mod_base = OTHER; note = 2'-O-methylguanosine-3'-phosphorothioate
  modified_base 2: mod_base = OTHER; note = 2'-fluorocytidine-3'-phosphorothioate
  modified_base 3: mod_base = OTHER; note = 2'-O-methylcytidine-3'-phosphate
  modified_base 4: mod_base = OTHER; note = 2'-O-methyladenosine-3'-phosphate
  modified_base 5: mod_base = OTHER; note = 2'-O-methyladenosine-3'-phosphate
  modified_base 6: mod_base = OTHER; note = 2'-fluoroadenosine-3'-phosphate
  modified_base 7: mod_base = OTHER; note = 2'-O-methylguanosine-3'-phosphate
  modified_base 8: mod_base = OTHER; note = 2'-fluorouridine-3'-phosphate
  modified_base 9: mod_base = OTHER; note = 2'-fluorouridine-3'-phosphate
  modified_base 10: mod_base = OTHER; note = 2'-O-methyluridine-3'-phosphate
  modified_base 11: mod_base = OTHER; note = 2'-O-methylcytidine-3'-phosphate
  modified_base 12: mod_base = OTHER; note = 2'-O-methyluridine-3'-phosphate
  modified_base 13: mod_base = OTHER; note = 2'-O-methyluridine-3'-phosphate
  modified_base 14: mod_base = OTHER; note = 2'-fluorocytidine-3'-phosphate
  modified_base 15: mod_base = OTHER; note = 2'-O-methyladenosine-3'-phosphate
  modified_base 16: mod_base = OTHER; note = 2'-fluorouridine-3'-phosphate
  modified_base 17: mod_base = OTHER; note = 2'-O-methylcytidine-3'-phosphate
  modified_base 18: mod_base = OTHER; note = 2'-O-methyladenosine-3'-phosphate
  modified_base 19: mod_base = OTHER; note = 2'-O-methyluridine-3'-phosphate
  modified_base 20: mod_base = OTHER; note = 2'-O-methyluridine-3'-phosphate
  modified_base 21: mod_base = OTHER; note = 2'-O-methyluridine-3'-phosphorothioate
  modified_base 22: mod_base = OTHER; note = 2'-O-methylguanosine-3'-phosphorothioate
  modified_base 23: mod_base = OTHER; note = 2'-O-methylcytidine-3'-phosphate
gccaaagtttcttcatcatttgc

SEQ ID NO: 2334 - RNA, 21 nt, synthetic construct
  source 1..21: mol_type = other RNA; note = Description of Artificial Sequence: Synthetic oligonucleotide
  modified_base 1: mod_base = OTHER; note = 2'-O-methylguanosine-3'-phosphorothioate
  modified_base 2: mod_base = OTHER; note = 2'-O-methylguanosine-3'-phosphorothioate
  modified_base 3: mod_base = OTHER; note = 2'-O-methylguanosine-3'-phosphate
  modified_base 4: mod_base = OTHER; note = 2'-O-methylguanosine-3'-phosphate
  modified_base 5: mod_base = OTHER; note = 2'-O-methylcytidine-3'-phosphate
  modified_base 6: mod_base = OTHER; note = 2'-O-methyladenosine-3'-phosphate
  modified_base 7: mod_base = OTHER; note = 2'-fluoroadenosine-3'-phosphate
  modified_base 8: mod_base = OTHER; note = 2'-O-methyladenosine-3'-phosphate
  modified_base 9: mod_base = OTHER; note = 2'-fluorouridine-3'-phosphate
  modified_base 10: mod_base = OTHER; note = 2'-fluoroguanosine-3'-phosphate
  modified_base 11: mod_base = OTHER; note = 2'-fluoroadenosine-3'-phosphate
  modified_base 12: mod_base = OTHER; note = 2'-O-methyluridine-3'-phosphate
  modified_base 13: mod_base = OTHER; note = 2'-O-methylguanosine-3'-phosphate
  modified_base 14: mod_base = OTHER; note = 2'-O-methyladenosine-3'-phosphate
  modified_base 15: mod_base = OTHER; note = 2'-O-methyladenosine-3'-phosphate
  modified_base 16: mod_base = OTHER; note = 2'-O-methylguanosine-3'-phosphate
  modified_base 17: mod_base = OTHER; note = 2'-O-methyladenosine-3'-phosphate
  modified_base 18: mod_base = OTHER; note = 2'-O-methyladenosine-3'-phosphate
  modified_base 19: mod_base = OTHER; note = 2'-O-methyladenosine-3'-phosphate
  modified_base 20: mod_base = OTHER; note = 2'-O-methylcytidine-3'-phosphate
  modified_base 21: mod_base = OTHER; note = 2'-O-methyluridine-3'-phosphate N-[tris(GalNAc-alkyl)-amidodecanoyl)]-4-hydroxyprolinol Hyp-(GalNAc-alkyl)3
ggggcaaatgatgaagaaact

SEQ ID NO: 2335 - RNA, 23 nt, synthetic construct
  source 1..23: mol_type = other RNA; note = Description of Artificial Sequence: Synthetic oligonucleotide
  modified_base 1: mod_base = OTHER; note = 2'-O-methyladenosine-3'-phosphorothioate
  modified_base 2: mod_base = OTHER; note = 2'-fluoroguanosine-3'-phosphorothioate
  modified_base 3: mod_base = OTHER; note = 2'-O-methyluridine-3'-phosphate
  modified_base 4: mod_base = OTHER; note = 2'-O-methyluridine-3'-phosphate
  modified_base 5: mod_base = OTHER; note = 2'-O-methyluridine-3'-phosphate
  modified_base 6: mod_base = OTHER; note = 2'-fluorocytidine-3'-phosphate
  modified_base 7: mod_base = OTHER; note = 2'-O-methyluridine-3'-phosphate
  modified_base 8: mod_base = OTHER; note = 2'-fluorouridine-3'-phosphate
  modified_base 9: mod_base = OTHER; note = 2'-fluorocytidine-3'-phosphate
  modified_base 10: mod_base = OTHER; note = 2'-O-methyladenosine-3'-phosphate
  modified_base 11: mod_base = OTHER; note = 2'-O-methyluridine-3'-phosphate
  modified_base 12: mod_base = OTHER; note = 2'-O-methylcytidine-3'-phosphate
  modified_base 13: mod_base = OTHER; note = 2'-O-methyladenosine-3'-phosphate
  modified_base 14: mod_base = OTHER; note = 2'-fluorouridine-3'-phosphate
  modified_base 15: mod_base = OTHER; note = 2'-O-methyluridine-3'-phosphate
  modified_base 16: mod_base = OTHER; note = 2'-fluorouridine-3'-phosphate
  modified_base 17: mod_base = OTHER; note = 2'-O-methylguanosine-3'-phosphate
  modified_base 18: mod_base = OTHER; note = 2'-O-methylcytidine-3'-phosphate
  modified_base 19: mod_base = OTHER; note = 2'-O-methylcytidine-3'-phosphate
  modified_base 20: mod_base = OTHER; note = 2'-O-methylcytidine-3'-phosphate
  modified_base 21: mod_base = OTHER; note = 2'-O-methylcytidine-3'-phosphorothioate
  modified_base 22: mod_base = OTHER; note = 2'-O-methyladenosine-3'-phosphorothioate
  modified_base 23: mod_base = OTHER; note = 2'-O-methylguanosine-3'-phosphate
agtttcttcatcatttgccccag

SEQ ID NO: 2336 - RNA, 21 nt, synthetic construct
  source 1..21: mol_type = other RNA; note = Description of Artificial Sequence: Synthetic oligonucleotide
  modified_base 1: mod_base = OTHER; note = 2'-O-methyluridine-3'-phosphorothioate
  modified_base 2: mod_base = OTHER; note = 2'-O-methylguanosine-3'-phosphorothioate
  modified_base 3: mod_base = OTHER; note = 2'-O-methylguanosine-3'-phosphate
  modified_base 4: mod_base = OTHER; note = 2'-O-methylguanosine-3'-phosphate
  modified_base 5: mod_base = OTHER; note = 2'-O-methylguanosine-3'-phosphate
  modified_base 6: mod_base = OTHER; note = 2'-O-methylcytidine-3'-phosphate
  modified_base 7: mod_base = OTHER; note = 2'-fluoroadenosine-3'-phosphate
  modified_base 8: mod_base = OTHER; note = 2'-O-methyladenosine-3'-phosphate
  modified_base 9: mod_base = OTHER; note = 2'-fluoroadenosine-3'-phosphate
  modified_base 10: mod_base = OTHER; note = 2'-fluorouridine-3'-phosphate
  modified_base 11: mod_base = OTHER; note = 2'-fluoroguanosine-3'-phosphate
  modified_base 12: mod_base = OTHER; note = 2'-O-methyladenosine-3'-phosphate
  modified_base 13: mod_base = OTHER; note = 2'-O-methyluridine-3'-phosphate
  modified_base 14: mod_base = OTHER; note = 2'-O-methylguanosine-3'-phosphate
  modified_base 15: mod_base = OTHER; note = 2'-O-methyladenosine-3'-phosphate
  modified_base 16: mod_base = OTHER; note = 2'-O-methyladenosine-3'-phosphate
  modified_base 17: mod_base = OTHER; note = 2'-O-methylguanosine-3'-phosphate
  modified_base 18: mod_base = OTHER; note = 2'-O-methyladenosine-3'-phosphate
  modified_base 19: mod_base = OTHER; note = 2'-O-methyladenosine-3'-phosphate
  modified_base 20: mod_base = OTHER; note = 2'-O-methyladenosine-3'-phosphate
  modified_base 21: mod_base = OTHER; note = 2'-O-methylcytidine-3'-phosphate N-[tris(GalNAc-alkyl)-amidodecanoyl)]-4-hydroxyprolinol Hyp-(GalNAc-alkyl)3
tggggcaaatgatgaagaaac

SEQ ID NO: 2337 - RNA, 23 nt, synthetic construct
  source 1..23: mol_type = other RNA; note = Description of Artificial Sequence: Synthetic oligonucleotide
  modified_base 1: mod_base = OTHER; note = 2'-O-methylguanosine-3'-phosphorothioate
  modified_base 2: mod_base = OTHER; note = 2'-fluorouridine -3'-phosphorothioate
  modified_base 3: mod_base = OTHER; note = 2'-O-methyluridine-3'-phosphate
  modified_base 4: mod_base = OTHER; note = 2'-O-methyluridine-3'-phosphate
  modified_base 5: mod_base = OTHER; note = 2'-O-methylcytidine-3'-phosphate
  modified_base 6: mod_base = OTHER; note = 2'-fluorouridine-3'-phosphate
  modified_base 7: mod_base = OTHER; note = 2'-O-methyluridine-3'-phosphate
  modified_base 8: mod_base = OTHER; note = 2'-fluorocytidine-3'-phosphate
  modified_base 9: mod_base = OTHER; note = 2'-fluoroadenosine-3'-phosphate
  modified_base 10: mod_base = OTHER; note = 2'-O-methyluridine-3'-phosphate
  modified_base 11: mod_base = OTHER; note = 2'-O-methylcytidine-3'-phosphate
  modified_base 12: mod_base = OTHER; note = 2'-O-methyladenosine-3'-phosphate
  modified_base 13: mod_base = OTHER; note = 2'-O-methyluridine-3'-phosphate
  modified_base 14: mod_base = OTHER; note = 2'-fluorouridine-3'-phosphate
  modified_base 15: mod_base = OTHER; note = 2'-O-methyluridine-3'-phosphate
  modified_base 16: mod_base = OTHER; note = 2'-fluoroguanosine-3'-phosphate
  modified_base 17: mod_base = OTHER; note = 2'-O-methylcytidine-3'-phosphate
  modified_base 18: mod_base = OTHER; note = 2'-O-methylcytidine-3'-phosphate
  modified_base 19: mod_base = OTHER; note = 2'-O-methylcytidine-3'-phosphate
  modified_base 20: mod_base = OTHER; note = 2'-O-methylcytidine-3'-phosphate
  modified_base 21: mod_base = OTHER; note = 2'-O-methyladenosine-3'-phosphorothioate
  modified_base 22: mod_base = OTHER; note = 2'-O-methylguanosine-3'-phosphorothioate
  modified_base 23: mod_base = OTHER; note = 2'-O-methyladenosine-3'-phosphate
gtttcttcatcatttgccccaga

SEQ ID NO: 2338 - RNA, 21 nt, synthetic construct
  source 1..21: mol_type = other RNA; note = Description of Artificial Sequence: Synthetic oligonucleotide
  modified_base 1: mod_base = OTHER; note = 2'-O-methylcytidine-3'-phosphorothioate
  modified_base 2: mod_base = OTHER; note = 2'-O-methyladenosine-3'-phosphorothioate
  modified_base 3: mod_base = OTHER; note = 2'-O-methyladenosine-3'-phosphate
  modified_base 4: mod_base = OTHER; note = 2'-O-methyladenosine-3'-phosphate
  modified_base 5: mod_base = OTHER; note = 2'-O-methylguanosine-3'-phosphate
  modified_base 6: mod_base = OTHER; note = 2'-O-methylguanosine-3'-phosphate
  modified_base 7: mod_base = OTHER; note = 2'-fluoroguanosine-3'-phosphate
  modified_base 8: mod_base = OTHER; note = 2'-O-methyluridine-3'-phosphate
  modified_base 9: mod_base = OTHER; note = 2'-fluoroguanosine-3'-phosphate
  modified_base 10: mod_base = OTHER; note = 2'-fluorouridine-3'-phosphate
  modified_base 11: mod_base = OTHER; note = 2'-fluorocytidine-3'-phosphate
  modified_base 12: mod_base = OTHER; note = 2'-O-methylguanosine-3'-phosphate
  modified_base 13: mod_base = OTHER; note = 2'-O-methyluridine-3'-phosphate
  modified_base 14: mod_base = OTHER; note = 2'-O-methyluridine-3'-phosphate
  modified_base 15: mod_base = OTHER; note = 2'-O-methylcytidine-3'-phosphate
  modified_base 16: mod_base = OTHER; note = 2'-O-methyluridine-3'-phosphate
  modified_base 17: mod_base = OTHER; note = 2'-O-methyluridine-3'-phosphate
  modified_base 18: mod_base = OTHER; note = 2'-O-methyluridine-3'-phosphate
  modified_base 19: mod_base = OTHER; note = 2'-O-methyluridine-3'-phosphate
  modified_base 20: mod_base = OTHER; note = 2'-O-methylcytidine-3'-phosphate
  modified_base 21: mod_base = OTHER; note = 2'-O-methylcytidine-3'-phosphate N-[tris(GalNAc-alkyl)-amidodecanoyl)]-4-hydroxyprolinol Hyp-(GalNAc-alkyl)3
caaagggtgtcgttcttttcc

SEQ ID NO: 2339 - RNA, 23 nt, synthetic construct
  source 1..23: mol_type = other RNA; note = Description of Artificial Sequence: Synthetic oligonucleotide
  modified_base 1: mod_base = OTHER; note = 2'-O-methylguanosine-3'-phosphorothioate
  modified_base 2: mod_base = OTHER; note = 2'-fluoroguanosine-3'-phosphorothioate
  modified_base 3: mod_base = OTHER; note = 2'-O-methyladenosine-3'-phosphate
  modified_base 4: mod_base = OTHER; note = 2'-O-methyladenosine-3'-phosphate
  modified_base 5: mod_base = OTHER; note = 2'-O-methyladenosine-3'-phosphate
  modified_base 6: mod_base = OTHER; note = 2'-fluoroadenosine-3'-phosphate
  modified_base 7: mod_base = OTHER; note = 2'-O-methylguanosine-3'-phosphate
  modified_base 8: mod_base = OTHER; note = 2'-fluoroadenosine-3'-phosphate
  modified_base 9: mod_base = OTHER; note = 2'-fluoroadenosine-3'-phosphate
  modified_base 10: mod_base = OTHER; note = 2'-O-methylcytidine-3'-phosphate
  modified_base 11: mod_base = OTHER; note = 2'-O-methylguanosine-3'-phosphate
  modified_base 12: mod_base = OTHER; note = 2'-O-methyladenosine-3'-phosphate
  modified_base 13: mod_base = OTHER; note = 2'-O-methylcytidine-3'-phosphate
  modified_base 14: mod_base = OTHER; note = 2'-fluoroadenosine-3'-phosphate
  modified_base 15: mod_base = OTHER; note = 2'-O-methylcytidine-3'-phosphate
  modified_base 16: mod_base = OTHER; note = 2'-fluorocytidine-3'-phosphate
  modified_base 17: mod_base = OTHER; note = 2'-O-methylcytidine-3'-phosphate
  modified_base 18: mod_base = OTHER; note = 2'-O-methyluridine-3'-phosphate
  modified_base 19: mod_base = OTHER; note = 2'-O-methyluridine-3'-phosphate
  modified_base 20: mod_base = OTHER; note = 2'-O-methyluridine-3'-phosphate
  modified_base 21: mod_base = OTHER; note = 2'-O-methylguanosine-3'-phosphorothioate
  modified_base 22: mod_base = OTHER; note = 2'-O-methyluridine-3'-phosphorothioate
  modified_base 23: mod_base = OTHER; note = 2'-O-methyladenosine-3'-phosphate
ggaaaagaacgacaccctttgta

SEQ ID NO: 2340 - RNA, 21 nt, synthetic construct
  source 1..21: mol_type = other RNA; note = Description of Artificial Sequence: Synthetic oligonucleotide
  modified_base 1: mod_base = OTHER; note = 2'-O-methyladenosine-3'-phosphorothioate
  modified_base 2: mod_base = OTHER; note = 2'-O-methyladenosine-3'-phosphorothioate
  modified_base 3: mod_base = OTHER; note = 2'-O-methyladenosine-3'-phosphate
  modified_base 4: mod_base = OTHER; note = 2'-O-methylguanosine-3'-phosphate
  modified_base 5: mod_base = OTHER; note = 2'-O-methylguanosine-3'-phosphate
  modified_base 6: mod_base = OTHER; note = 2'-O-methylguanosine-3'-phosphate
  modified_base 7: mod_base = OTHER; note = 2'-fluorouridine-3'-phosphate
  modified_base 8: mod_base = OTHER; note = 2'-O-methylguanosine-3'-phosphate
  modified_base 9: mod_base = OTHER; note = 2'-fluorouridine-3'-phosphate
  modified_base 10: mod_base = OTHER; note = 2'-fluorocytidine-3'-phosphate
  modified_base 11: mod_base = OTHER; note = 2'-fluoroguanosine-3'-phosphate
  modified_base 12: mod_base = OTHER; note = 2'-O-methyluridine-3'-phosphate
  modified_base 13: mod_base = OTHER; note = 2'-O-methyluridine-3'-phosphate
  modified_base 14: mod_base = OTHER; note = 2'-O-methylcytidine-3'-phosphate
  modified_base 15: mod_base = OTHER; note = 2'-O-methyluridine-3'-phosphate
  modified_base 16: mod_base = OTHER; note = 2'-O-methyluridine-3'-phosphate
  modified_base 17: mod_base = OTHER; note = 2'-O-methyluridine-3'-phosphate
  modified_base 18: mod_base = OTHER; note = 2'-O-methyluridine-3'-phosphate
  modified_base 19: mod_base = OTHER; note = 2'-O-methylcytidine-3'-phosphate
  modified_base 20: mod_base = OTHER; note = 2'-O-methylcytidine-3'-phosphate
  modified_base 21: mod_base = OTHER; note = 2'-O-methyladenosine-3'-phosphate N-[tris(GalNAc-alkyl)-amidodecanoyl)]-4-hydroxyprolinol Hyp-(GalNAc-alkyl)3
aaagggtgtcgttcttttcca

SEQ ID NO: 2341 - RNA, 23 nt, synthetic construct
  source 1..23: mol_type = other RNA; note = Description of Artificial Sequence: Synthetic oligonucleotide
  modified_base 1: mod_base = OTHER; note = 2'-O-methyluridine-3'-phosphorothioate
  modified_base 2: mod_base = OTHER; note = 2'-fluoroguanosine-3'-phosphorothioate
  modified_base 3: mod_base = OTHER; note = 2'-O-methylguanosine-3'-phosphate
  modified_base 4: mod_base = OTHER; note = 2'-O-methyladenosine-3'-phosphate
  modified_base 5: mod_base = OTHER; note = 2'-O-methyladenosine-3'-phosphate
  modified_base 6: mod_base = OTHER; note = 2'-fluoroadenosine-3'-phosphate
  modified_base 7: mod_base = OTHER; note = 2'-O-methyladenosine-3'-phosphate
  modified_base 8: mod_base = OTHER; note = 2'-fluoroguanosine-3'-phosphate
  modified_base 9: mod_base = OTHER; note = 2'-fluoroadenosine-3'-phosphate
  modified_base 10: mod_base = OTHER; note = 2'-O-methyladenosine-3'-phosphate
  modified_base 11: mod_base = OTHER; note = 2'-O-methylcytidine-3'-phosphate
  modified_base 12: mod_base = OTHER; note = 2'-O-methylguanosine-3'-phosphate
  modified_base 13: mod_base = OTHER; note = 2'-O-methyladenosine-3'-phosphate
  modified_base 14: mod_base = OTHER; note = 2'-fluorocytidine-3'-phosphate
  modified_base 15: mod_base = OTHER; note = 2'-O-methyladenosine-3'-phosphate
  modified_base 16: mod_base = OTHER; note = 2'-fluorocytidine-3'-phosphate
  modified_base 17: mod_base = OTHER; note = 2'-O-methylcytidine-3'-phosphate
  modified_base 18: mod_base = OTHER; note = 2'-O-methylcytidine-3'-phosphate
  modified_base 19: mod_base = OTHER; note = 2'-O-methyluridine-3'-phosphate
  modified_base 20: mod_base = OTHER; note = 2'-O-methyluridine-3'-phosphate
  modified_base 21: mod_base = OTHER; note = 2'-O-methyluridine-3'-phosphorothioate
  modified_base 22: mod_base = OTHER; note = 2'-O-methylguanosine-3'-phosphorothioate
  modified_base 23: mod_base = OTHER; note = 2'-O-methyluridine-3'-phosphate
tggaaaagaacgacaccctttgt

SEQ ID NO: 2342 - RNA, 21 nt, synthetic construct
  source 1..21: mol_type = other RNA; note = Description of Artificial Sequence: Synthetic oligonucleotide
  modified_base 1: mod_base = OTHER; note = 2'-O-methyladenosine-3'-phosphorothioate
  modified_base 2: mod_base = OTHER; note = 2'-O-methyladenosine-3'-phosphorothioate
  modified_base 3: mod_base = OTHER; note = 2'-O-methyluridine-3'-phosphate
  modified_base 4: mod_base = OTHER; note = 2'-O-methyladenosine-3'-phosphate
  modified_base 5: mod_base = OTHER; note = 2'-O-methylcytidine-3'-phosphate
  modified_base 6: mod_base = OTHER; note = 2'-O-methyladenosine-3'-phosphate
  modified_base 7: mod_base = OTHER; note = 2'-fluoroadenosine-3'-phosphate
  modified_base 8: mod_base = OTHER; note = 2'-O-methyladenosine-3'-phosphate
  modified_base 9: mod_base = OTHER; note = 2'-fluoroguanosine-3'-phosphate
  modified_base 10: mod_base = OTHER; note = 2'-fluoroguanosine-3'-phosphate
  modified_base 11: mod_base = OTHER; note = 2'-fluoroguanosine-3'-phosphate
  modified_base 12: mod_base = OTHER; note = 2'-O-methyluridine-3'-phosphate
  modified_base 13: mod_base = OTHER; note = 2'-O-methylguanosine-3'-phosphate
  modified_base 14: mod_base = OTHER; note = 2'-O-methyluridine-3'-phosphate
  modified_base 15: mod_base = OTHER; note = 2'-O-methylcytidine-3'-phosphate
  modified_base 16: mod_base = OTHER; note = 2'-O-methylguanosine-3'-phosphate
  modified_base 17: mod_base = OTHER; note = 2'-O-methyluridine-3'-phosphate
  modified_base 18: mod_base = OTHER; note = 2'-O-methyluridine-3'-phosphate
  modified_base 19: mod_base = OTHER; note = 2'-O-methylcytidine-3'-phosphate
  modified_base 20: mod_base = OTHER; note = 2'-O-methyluridine-3'-phosphate
  modified_base 21: mod_base = OTHER; note = 2'-O-methyluridine-3'-phosphate N-[tris(GalNAc-alkyl)-amidodecanoyl)]-4-hydroxyprolinol Hyp-(GalNAc-alkyl)3
aatacaaagggtgtcgttctt

SEQ ID NO: 2343 - RNA, 23 nt, synthetic construct
  source 1..23: mol_type = other RNA; note = Description of Artificial Sequence: Synthetic oligonucleotide
  modified_base 1: mod_base = OTHER; note = 2'-O-methyladenosine-3'-phosphorothioate
  modified_base 2: mod_base = OTHER; note = 2'-fluoroadenosine-3'-phosphorothioate
  modified_base 3: mod_base = OTHER; note = 2'-O-methylguanosine-3'-phosphate
  modified_base 4: mod_base = OTHER; note = 2'-O-methyladenosine-3'-phosphate
  modified_base 5: mod_base = OTHER; note = 2'-O-methyladenosine-3'-phosphate
  modified_base 6: mod_base = OTHER; note = 2'-fluorocytidine-3'-phosphate
  modified_base 7: mod_base = OTHER; note = 2'-O-methylguanosine-3'-phosphate
  modified_base 8: mod_base = OTHER; note = 2'-fluoroadenosine-3'-phosphate
  modified_base 9: mod_base = OTHER; note = 2'-fluorocytidine-3'-phosphate
  modified_base 10: mod_base = OTHER; note = 2'-O-methyladenosine-3'-phosphate
  modified_base 11: mod_base = OTHER; note = 2'-O-methylcytidine-3'-phosphate
  modified_base 12: mod_base = OTHER; note = 2'-O-methylcytidine-3'-phosphate
  modified_base 13: mod_base = OTHER; note = 2'-O-methylcytidine-3'-phosphate
  modified_base 14: mod_base = OTHER; note = 2'-fluorouridine-3'-phosphate
  modified_base 15: mod_base = OTHER; note = 2'-O-methyluridine-3'-phosphate
  modified_base 16: mod_base = OTHER; note = 2'-fluorouridine-3'-phosphate
  modified_base 17: mod_base = OTHER; note = 2'-O-methylguanosine-3'-phosphate
  modified_base 18: mod_base = OTHER; note = 2'-O-methyluridine-3'-phosphate
  modified_base 19: mod_base = OTHER; note = 2'-O-methyladenosine-3'-phosphate
  modified_base 20: mod_base = OTHER; note = 2'-O-methyluridine-3'-phosphate
  modified_base 21: mod_base = OTHER; note = 2'-O-methyluridine-3'-phosphorothioate
  modified_base 22: mod_base = OTHER; note = 2'-O-methylguanosine-3'-phosphorothioate
  modified_base 23: mod_base = OTHER; note = 2'-O-methyladenosine-3'-phosphate
aagaacgacaccctttgtattga

SEQ ID NO: 2344 - RNA, 21 nt, synthetic construct
  source 1..21: mol_type = other RNA; note = Description of Artificial Sequence: Synthetic oligonucleotide
  modified_base 1: mod_base = OTHER; note = 2'-O-methylcytidine-3'-phosphorothioate
  modified_base 2: mod_base = OTHER; note = 2'-O-methyladenosine-3'-phosphorothioate
  modified_base 3: mod_base = OTHER; note = 2'-O-methyladenosine-3'-phosphate
  modified_base 4: mod_base = OTHER; note = 2'-O-methyluridine-3'-phosphate
  modified_base 5: mod_base = OTHER; note = 2'-O-methyladenosine-3'-phosphate
  modified_base 6: mod_base = OTHER; note = 2'-O-methylcytidine-3'-phosphate
  modified_base 7: mod_base = OTHER; note = 2'-fluoroadenosine-3'-phosphate
  modified_base 8: mod_base = OTHER; note = 2'-O-methyladenosine-3'-phosphate
  modified_base 9: mod_base = OTHER; note = 2'-fluoroadenosine-3'-phosphate
  modified_base 10: mod_base = OTHER; note = 2'-fluoroguanosine-3'-phosphate
  modified_base 11: mod_base = OTHER; note = 2'-fluoroguanosine-3'-phosphate
  modified_base 12: mod_base = OTHER; note = 2'-O-methylguanosine-3'-phosphate
  modified_base 13: mod_base = OTHER; note = 2'-O-methyluridine-3'-phosphate
  modified_base 14: mod_base = OTHER; note = 2'-O-methylguanosine-3'-phosphate
  modified_base 15: mod_base = OTHER; note = 2'-O-methyluridine-3'-phosphate
  modified_base 16: mod_base = OTHER; note = 2'-O-methylcytidine-3'-phosphate
  modified_base 17: mod_base = OTHER; note = 2'-O-methylguanosine-3'-phosphate
  modified_base 18: mod_base = OTHER; note = 2'-O-methyluridine-3'-phosphate
  modified_base 19: mod_base = OTHER; note = 2'-O-methyluridine-3'-phosphate
  modified_base 20: mod_base = OTHER; note = 2'-O-methylcytidine-3'-phosphate
  modified_base 21: mod_base = OTHER; note = 2'-O-methyluridine-3'-phosphate N-[tris(GalNAc-alkyl)-amidodecanoyl)]-4-hydroxyprolinol Hyp-(GalNAc-alkyl)3
caatacaaagggtgtcgttct

SEQ ID NO: 2345 - RNA, 23 nt, synthetic construct
  source 1..23: mol_type = other RNA; note = Description of Artificial Sequence: Synthetic oligonucleotide
  modified_base 1: mod_base = OTHER; note = 2'-O-methyladenosine-3'-phosphorothioate
  modified_base 2: mod_base = OTHER; note = 2'-fluoroguanosine-3'-phosphorothioate
  modified_base 3: mod_base = OTHER; note = 2'-O-methyladenosine-3'-phosphate
  modified_base 4: mod_base = OTHER; note = 2'-O-methyladenosine-3'-phosphate
  modified_base 5: mod_base = OTHER; note = 2'-O-methylcytidine-3'-phosphate
  modified_base 6: mod_base = OTHER; note = 2'-fluoroguanosine-3'-phosphate
  modified_base 7: mod_base = OTHER; note = 2'-O-methyladenosine-3'-phosphate
  modified_base 8: mod_base = OTHER; note = 2'-fluorocytidine-3'-phosphate
  modified_base 9: mod_base = OTHER; note = 2'-fluoroadenosine-3'-phosphate
  modified_base 10: mod_base = OTHER; note = 2'-O-methylcytidine-3'-phosphate
  modified_base 11: mod_base = OTHER; note = 2'-O-methylcytidine-3'-phosphate
  modified_base 12: mod_base = OTHER; note = 2'-O-methylcytidine-3'-phosphate
  modified_base 13: mod_base = OTHER; note = 2'-O-methyluridine-3'-phosphate
  modified_base 14: mod_base = OTHER; note = 2'-fluorouridine-3'-phosphate
  modified_base 15: mod_base = OTHER; note = 2'-O-methyluridine-3'-phosphate
  modified_base 16: mod_base = OTHER; note = 2'-fluoroguanosine-3'-phosphate
  modified_base 17: mod_base = OTHER; note = 2'-O-methyluridine-3'-phosphate
  modified_base 18: mod_base = OTHER; note = 2'-O-methyladenosine-3'-phosphate
  modified_base 19: mod_base = OTHER; note = 2'-O-methyluridine-3'-phosphate
  modified_base 20: mod_base = OTHER; note = 2'-O-methyluridine-3'-phosphate
  modified_base 21: mod_base = OTHER; note = 2'-O-methylguanosine-3'-phosphorothioate
  modified_base 22: mod_base = OTHER; note = 2'-O-methyladenosine-3'-phosphorothioate
  modified_base 23: mod_base = OTHER; note = 2'-O-methyladenosine-3'-phosphate
agaacgacaccctttgtattgaa

SEQ ID NO: 2346 - RNA, 21 nt, synthetic construct
  source 1..21: mol_type = other RNA; note = Description of Artificial Sequence: Synthetic oligonucleotide
  modified_base 1: mod_base = OTHER; note = 2'-O-methyladenosine-3'-phosphorothioate
  modified_base 2: mod_base = OTHER; note = 2'-O-methyladenosine-3'-phosphorothioate
  modified_base 3: mod_base = OTHER; note = 2'-O-methyladenosine-3'-phosphate
  modified_base 4: mod_base = OTHER; note = 2'-O-methylguanosine-3'-phosphate
  modified_base 5: mod_base = OTHER; note = 2'-O-methylguanosine-3'-phosphate
  modified_base 6: mod_base = OTHER; note = 2'-O-methylcytidine-3'-phosphate
  modified_base 7: mod_base = OTHER; note = 2'-fluoroadenosine-3'-phosphate
  modified_base 8: mod_base = OTHER; note = 2'-O-methylcytidine-3'-phosphate
  modified_base 9: mod_base = OTHER; note = 2'-fluorouridine-3'-phosphate
  modified_base 10: mod_base = OTHER; note = 2'-fluoroguanosine-3'-phosphate
  modified_base 11: mod_base = OTHER; note = 2'-fluoroadenosine-3'-phosphate
  modified_base 12: mod_base = OTHER; note = 2'-O-methyluridine-3'-phosphate
  modified_base 13: mod_base = OTHER; note = 2'-O-methylguanosine-3'-phosphate
  modified_base 14: mod_base = OTHER; note = 2'-O-methyluridine-3'-phosphate
  modified_base 15: mod_base = OTHER; note = 2'-O-methyluridine-3'-phosphate
  modified_base 16: mod_base = OTHER; note = 2'-O-methylcytidine-3'-phosphate
  modified_base 17: mod_base = OTHER; note = 2'-O-methyluridine-3'-phosphate
  modified_base 18: mod_base = OTHER; note = 2'-O-methylguanosine-3'-phosphate
  modified_base 19: mod_base = OTHER; note = 2'-O-methyladenosine-3'-phosphate
  modified_base 20: mod_base = OTHER; note = 2'-O-methyladenosine-3'-phosphate
  modified_base 21: mod_base = OTHER; note = 2'-O-methyladenosine-3'-phosphate N-[tris(GalNAc-alkyl)-amidodecanoyl)]-4-hydroxyprolinol Hyp-(GalNAc-alkyl)3
aaaggcactgatgttctgaaa

SEQ ID NO: 2347 - RNA, 23 nt, synthetic construct
  source 1..23: mol_type = other RNA; note = Description of Artificial Sequence: Synthetic oligonucleotide
  modified_base 1: mod_base = OTHER; note = 2'-O-methyluridine-3'-phosphorothioate
  modified_base 2: mod_base = OTHER; note = 2'-fluorouridine -3'-phosphorothioate
  modified_base 3: mod_base = OTHER; note = 2'-O-methyluridine-3'-phosphate
  modified_base 4: mod_base = OTHER; note = 2'-O-methylcytidine-3'-phosphate
  modified_base 5: mod_base = OTHER; note = 2'-O-methyladenosine-3'-phosphate
  modified_base 6: mod_base = OTHER; note = 2'-fluoroguanosine-3'-phosphate
  modified_base 7: mod_base = OTHER; note = 2'-O-methyladenosine-3'-phosphate
  modified_base 8: mod_base = OTHER; note = 2'-fluoroadenosine-3'-phosphate
  modified_base 9: mod_base = OTHER; note = 2'-fluorocytidine-3'-phosphate
  modified_base 10: mod_base = OTHER; note = 2'-O-methyladenosine-3'-phosphate
  modified_base 11: mod_base = OTHER; note = 2'-O-methyluridine-3'-phosphate
  modified_base 12: mod_base = OTHER; note = 2'-O-methylcytidine-3'-phosphate
  modified_base 13: mod_base = OTHER; note = 2'-O-methyladenosine-3'-phosphate
  modified_base 14: mod_base = OTHER; note = 2'-fluoroguanosine-3'-phosphate
  modified_base 15: mod_base = OTHER; note = 2'-O-methyluridine-3'-phosphate
  modified_base 16: mod_base = OTHER; note = 2'-fluoroguanosine-3'-phosphate
  modified_base 17: mod_base = OTHER; note = 2'-O-methylcytidine-3'-phosphate
  modified_base 18: mod_base = OTHER; note = 2'-O-methylcytidine-3'-phosphate
  modified_base 19: mod_base = OTHER; note = 2'-O-methyluridine-3'-phosphate
  modified_base 20: mod_base = OTHER; note = 2'-O-methyluridine-3'-phosphate
  modified_base 21: mod_base = OTHER; note = 2'-O-methyluridine-3'-phosphorothioate
  modified_base 22: mod_base = OTHER; note = 2'-O-methylcytidine-3'-phosphorothioate
  modified_base 23: mod_base = OTHER; note = 2'-O-methylcytidine-3'-phosphate
tttcagaacatcagtgcctttcc

SEQ ID NO: 2348 - RNA, 21 nt, synthetic construct
  source 1..21: mol_type = other RNA; note = Description of Artificial Sequence: Synthetic oligonucleotide
  modified_base 1: mod_base = OTHER; note = 2'-O-methyladenosine-3'-phosphorothioate
  modified_base 2: mod_base = OTHER; note = 2'-O-methyladenosine-3'-phosphorothioate
  modified_base 3: mod_base = OTHER; note = 2'-O-methylguanosine-3'-phosphate
  modified_base 4: mod_base = OTHER; note = 2'-O-methylguanosine-3'-phosphate
  modified_base 5: mod_base = OTHER; note = 2'-O-methylcytidine-3'-phosphate
  modified_base 6: mod_base = OTHER; note = 2'-O-methyladenosine-3'-phosphate
  modified_base 7: mod_base = OTHER; note = 2'-fluorocytidine-3'-phosphate
  modified_base 8: mod_base = OTHER; note = 2'-O-methyluridine-3'-phosphate
  modified_base 9: mod_base = OTHER; note = 2'-fluoroguanosine-3'-phosphate
  modified_base 10: mod_base = OTHER; note = 2'-fluoroadenosine-3'-phosphate
  modified_base 11: mod_base = OTHER; note = 2'-fluorouridine-3'-phosphate
  modified_base 12: mod_base = OTHER; note = 2'-O-methylguanosine-3'-phosphate
  modified_base 13: mod_base = OTHER; note = 2'-O-methyluridine-3'-phosphate
  modified_base 14: mod_base = OTHER; note = 2'-O-methyluridine-3'-phosphate
  modified_base 15: mod_base = OTHER; note = 2'-O-methylcytidine-3'-phosphate
  modified_base 16: mod_base = OTHER; note = 2'-O-methyluridine-3'-phosphate
  modified_base 17: mod_base = OTHER; note = 2'-O-methylguanosine-3'-phosphate
  modified_base 18: mod_base = OTHER; note = 2'-O-methyladenosine-3'-phosphate
  modified_base 19: mod_base = OTHER; note = 2'-O-methyladenosine-3'-phosphate
  modified_base 20: mod_base = OTHER; note = 2'-O-methyladenosine-3'-phosphate
  modified_base 21: mod_base = OTHER; note = 2'-O-methylguanosine-3'-phosphate N-[tris(GalNAc-alkyl)-amidodecanoyl)]-4-hydroxyprolinol Hyp-(GalNAc-alkyl)3
aaggcactgatgttctgaaag

SEQ ID NO: 2349 - RNA, 23 nt, synthetic construct
  source 1..23: mol_type = other RNA; note = Description of Artificial Sequence: Synthetic oligonucleotide
  modified_base 1: mod_base = OTHER; note = 2'-O-methylcytidine-3'-phosphorothioate
  modified_base 2: mod_base = OTHER; note = 2'-fluorouridine -3'-phosphorothioate
  modified_base 3: mod_base = OTHER; note = 2'-O-methyluridine-3'-phosphate
  modified_base 4: mod_base = OTHER; note = 2'-O-methyluridine-3'-phosphate
  modified_base 5: mod_base = OTHER; note = 2'-O-methylcytidine-3'-phosphate
  modified_base 6: mod_base = OTHER; note = 2'-fluoroadenosine-3'-phosphate
  modified_base 7: mod_base = OTHER; note = 2'-O-methylguanosine-3'-phosphate
  modified_base 8: mod_base = OTHER; note = 2'-fluoroadenosine-3'-phosphate
  modified_base 9: mod_base = OTHER; note = 2'-fluoroadenosine-3'-phosphate
  modified_base 10: mod_base = OTHER; note = 2'-O-methylcytidine-3'-phosphate
  modified_base 11: mod_base = OTHER; note = 2'-O-methyladenosine-3'-phosphate
  modified_base 12: mod_base = OTHER; note = 2'-O-methyluridine-3'-phosphate
  modified_base 13: mod_base = OTHER; note = 2'-O-methylcytidine-3'-phosphate
  modified_base 14: mod_base = OTHER; note = 2'-fluoroadenosine-3'-phosphate
  modified_base 15: mod_base = OTHER; note = 2'-O-methylguanosine-3'-phosphate
  modified_base 16: mod_base = OTHER; note = 2'-fluorouridine-3'-phosphate
  modified_base 17: mod_base = OTHER; note = 2'-O-methylguanosine-3'-phosphate
  modified_base 18: mod_base = OTHER; note = 2'-O-methylcytidine-3'-phosphate
  modified_base 19: mod_base = OTHER; note = 2'-O-methylcytidine-3'-phosphate
  modified_base 20: mod_base = OTHER; note = 2'-O-methyluridine-3'-phosphate
  modified_base 21: mod_base = OTHER; note = 2'-O-methyluridine-3'-phosphorothioate
  modified_base 22: mod_base = OTHER; note = 2'-O-methyluridine-3'-phosphorothioate
  modified_base 23: mod_base = OTHER; note = 2'-O-methylcytidine-3'-phosphate
ctttcagaacatcagtgcctttc

SEQ ID NO: 2350 - RNA, 21 nt, synthetic construct
  source 1..21: mol_type = other RNA; note = Description of Artificial Sequence: Synthetic oligonucleotide
  modified_base 1: mod_base = OTHER; note = 2'-O-methylguanosine-3'-phosphorothioate
  modified_base 2: mod_base = OTHER; note = 2'-O-methylcytidine-3'-phosphorothioate
  modified_base 3: mod_base = OTHER; note = 2'-O-methylguanosine-3'-phosphate
  modified_base 4: mod_base = OTHER; note = 2'-O-methylguanosine-3'-phosphate
  modified_base 5: mod_base = OTHER; note = 2'-O-methyladenosine-3'-phosphate
  modified_base 6: mod_base = OTHER; note = 2'-O-methyladenosine-3'-phosphate
  modified_base 7: mod_base = OTHER; note = 2'-fluoroadenosine-3'-phosphate
  modified_base 8: mod_base = OTHER; note = 2'-O-methylguanosine-3'-phosphate
  modified_base 9: mod_base = OTHER; note = 2'-fluoroguanosine-3'-phosphate
  modified_base 10: mod_base = OTHER; note = 2'-fluorocytidine-3'-phosphate
  modified_base 11: mod_base = OTHER; note = 2'-fluoroadenosine-3'-phosphate
  modified_base 12: mod_base = OTHER; note = 2'-O-methylcytidine-3'-phosphate
  modified_base 13: mod_base = OTHER; note = 2'-O-methyluridine-3'-phosphate
  modified_base 14: mod_base = OTHER; note = 2'-O-methylguanosine-3'-phosphate
  modified_base 15: mod_base = OTHER; note = 2'-O-methyladenosine-3'-phosphate
  modified_base 16: mod_base = OTHER; note = 2'-O-methyluridine-3'-phosphate
  modified_base 17: mod_base = OTHER; note = 2'-O-methylguanosine-3'-phosphate
  modified_base 18: mod_base = OTHER; note = 2'-O-methyluridine-3'-phosphate
  modified_base 19: mod_base = OTHER; note = 2'-O-methyluridine-3'-phosphate
  modified_base 20: mod_base = OTHER; note = 2'-O-methylcytidine-3'-phosphate
  modified_base 21: mod_base = OTHER; note = 2'-O-methyluridine-3'-phosphate N-[tris(GalNAc-alkyl)-amidodecanoyl)]-4-hydroxyprolinol Hyp-(GalNAc-alkyl)3
gcggaaaggcactgatgttct

SEQ ID NO: 2351 - RNA, 23 nt, synthetic construct
  source 1..23: mol_type = other RNA; note = Description of Artificial Sequence: Synthetic oligonucleotide
  modified_base 1: mod_base = OTHER; note = 2'-O-methyladenosine-3'-phosphorothioate
  modified_base 2: mod_base = OTHER; note = 2'-fluoroguanosine-3'-phosphorothioate
  modified_base 3: mod_base = OTHER; note = 2'-O-methyladenosine-3'-phosphate
  modified_base 4: mod_base = OTHER; note = 2'-O-methyladenosine-3'-phosphate
  modified_base 5: mod_base = OTHER; note = 2'-O-methylcytidine-3'-phosphate
  modified_base 6: mod_base = OTHER; note = 2'-fluoroadenosine-3'-phosphate
  modified_base 7: mod_base = OTHER; note = 2'-O-methyluridine-3'-phosphate
  modified_base 8: mod_base = OTHER; note = 2'-fluorocytidine-3'-phosphate
  modified_base 9: mod_base = OTHER; note = 2'-fluoroadenosine-3'-phosphate
  modified_base 10: mod_base = OTHER; note = 2'-O-methylguanosine-3'-phosphate
  modified_base 11: mod_base = OTHER; note = 2'-O-methyluridine-3'-phosphate
  modified_base 12: mod_base = OTHER; note = 2'-O-methylguanosine-3'-phosphate
  modified_base 13: mod_base = OTHER; note = 2'-O-methylcytidine-3'-phosphate
  modified_base 14: mod_base = OTHER; note = 2'-fluorocytidine-3'-phosphate
  modified_base 15: mod_base = OTHER; note = 2'-O-methyluridine-3'-phosphate
  modified_base 16: mod_base = OTHER; note = 2'-fluorouridine-3'-phosphate
  modified_base 17: mod_base = OTHER; note = 2'-O-methyluridine-3'-phosphate
  modified_base 18: mod_base = OTHER; note = 2'-O-methylcytidine-3'-phosphate
  modified_base 19: mod_base = OTHER; note = 2'-O-methylcytidine-3'-phosphate
  modified_base 20: mod_base = OTHER; note = 2'-O-methylguanosine-3'-phosphate
  modified_base 21: mod_base = OTHER; note = 2'-O-methylcytidine-3'-phosphorothioate
  modified_base 22: mod_base = OTHER; note = 2'-O-methyladenosine-3'-phosphorothioate
  modified_base 23: mod_base = OTHER; note = 2'-O-methylcytidine-3'-phosphate
agaacatcagtgcctttccgcac

SEQ ID NO: 2352 - RNA, 21 nt, synthetic construct
  source 1..21: mol_type = other RNA; note = Description of Artificial Sequence: Synthetic oligonucleotide
  modified_base 1: mod_base = OTHER; note = 2'-O-methyluridine-3'-phosphorothioate
  modified_base 2: mod_base = OTHER; note = 2'-O-methylguanosine-3'-phosphorothioate
  modified_base 3: mod_base = OTHER; note = 2'-O-methylcytidine-3'-phosphate
  modified_base 4: mod_base = OTHER; note = 2'-O-methylguanosine-3'-phosphate
  modified_base 5: mod_base = OTHER; note = 2'-O-methylguanosine-3'-phosphate
  modified_base 6: mod_base = OTHER; note = 2'-O-methyladenosine-3'-phosphate
  modified_base 7: mod_base = OTHER; note = 2'-fluoroadenosine-3'-phosphate
  modified_base 8: mod_base = OTHER; note = 2'-O-methyladenosine-3'-phosphate
  modified_base 9: mod_base = OTHER; note = 2'-fluoroguanosine-3'-phosphate
  modified_base 10: mod_base = OTHER; note = 2'-fluoroguanosine-3'-phosphate
  modified_base 11: mod_base = OTHER; note = 2'-fluorocytidine-3'-phosphate
  modified_base 12: mod_base = OTHER; note = 2'-O-methyladenosine-3'-phosphate
  modified_base 13: mod_base = OTHER; note = 2'-O-methylcytidine-3'-phosphate
  modified_base 14: mod_base = OTHER; note = 2'-O-methyluridine-3'-phosphate
  modified_base 15: mod_base = OTHER; note = 2'-O-methylguanosine-3'-phosphate
  modified_base 16: mod_base = OTHER; note = 2'-O-methyladenosine-3'-phosphate
  modified_base 17: mod_base = OTHER; note = 2'-O-methyluridine-3'-phosphate
  modified_base 18: mod_base = OTHER; note = 2'-O-methylguanosine-3'-phosphate
  modified_base 19: mod_base = OTHER; note = 2'-O-methyluridine-3'-phosphate
  modified_base 20: mod_base = OTHER; note = 2'-O-methyluridine-3'-phosphate
  modified_base 21: mod_base = OTHER; note = 2'-O-methylcytidine-3'-phosphate N-[tris(GalNAc-alkyl)-amidodecanoyl)]-4-hydroxyprolinol Hyp-(GalNAc-alkyl)3
tgcggaaaggcactgatgttc

SEQ ID NO: 2353 - RNA, 23 nt, synthetic construct
  source 1..23: mol_type = other RNA; note = Description of Artificial Sequence: Synthetic oligonucleotide
  modified_base 1: mod_base = OTHER; note = 2'-O-methylguanosine-3'-phosphorothioate
  modified_base 2: mod_base = OTHER; note = 2'-fluoroadenosine-3'-phosphorothioate
  modified_base 3: mod_base = OTHER; note = 2'-O-methyladenosine-3'-phosphate
  modified_base 4: mod_base = OTHER; note = 2'-O-methylcytidine-3'-phosphate
  modified_base 5: mod_base = OTHER; note = 2'-O-methyladenosine-3'-phosphate
  modified_base 6: mod_base = OTHER; note = 2'-fluorouridine-3'-phosphate
  modified_base 7: mod_base = OTHER; note = 2'-O-methylcytidine-3'-phosphate
  modified_base 8: mod_base = OTHER; note = 2'-fluoroadenosine-3'-phosphate
  modified_base 9: mod_base = OTHER; note = 2'-fluoroguanosine-3'-phosphate
  modified_base 10: mod_base = OTHER; note = 2'-O-methyluridine-3'-phosphate
  modified_base 11: mod_base = OTHER; note = 2'-O-methylguanosine-3'-phosphate
  modified_base 12: mod_base = OTHER; note = 2'-O-methylcytidine-3'-phosphate
  modified_base 13: mod_base = OTHER; note = 2'-O-methylcytidine-3'-phosphate
  modified_base 14: mod_base = OTHER; note = 2'-fluorouridine-3'-phosphate
  modified_base 15: mod_base = OTHER; note = 2'-O-methyluridine-3'-phosphate
  modified_base 16: mod_base = OTHER; note = 2'-fluorouridine-3'-phosphate
  modified_base 17: mod_base = OTHER; note = 2'-O-methylcytidine-3'-phosphate
  modified_base 18: mod_base = OTHER; note = 2'-O-methylcytidine-3'-phosphate
  modified_base 19: mod_base = OTHER; note = 2'-O-methylguanosine-3'-phosphate
  modified_base 20: mod_base = OTHER; note = 2'-O-methylcytidine-3'-phosphate
  modified_base 21: mod_base = OTHER; note = 2'-O-methyladenosine-3'-phosphorothioate
  modified_base 22: mod_base = OTHER; note = 2'-O-methylcytidine-3'-phosphorothioate
  modified_base 23: mod_base = OTHER; note = 2'-O-methyladenosine-3'-phosphate
gaacatcagtgcctttccgcaca

SEQ ID NO: 2354 - RNA, 21 nt, synthetic construct
  source 1..21: mol_type = other RNA; note = Description of Artificial Sequence: Synthetic oligonucleotide
  modified_base 1: mod_base = OTHER; note = 2'-O-methyladenosine-3'-phosphorothioate
  modified_base 2: mod_base = OTHER; note = 2'-O-methyladenosine-3'-phosphorothioate
  modified_base 3: mod_base = OTHER; note = 2'-O-methylguanosine-3'-phosphate
  modified_base 4: mod_base = OTHER; note = 2'-O-methylguanosine-3'-phosphate
  modified_base 5: mod_base = OTHER; note = 2'-O-methyladenosine-3'-phosphate
  modified_base 6: mod_base = OTHER; note = 2'-O-methyluridine-3'-phosphate
  modified_base 7: mod_base = OTHER; note = 2'-fluoroguanosine-3'-phosphate
  modified_base 8: mod_base = OTHER; note = 2'-O-methylcytidine-3'-phosphate
  modified_base 9: mod_base = OTHER; note = 2'-fluorouridine-3'-phosphate
  modified_base 10: mod_base = OTHER; note = 2'-fluorocytidine-3'-phosphate
  modified_base 11: mod_base = OTHER; note = 2'-fluorocytidine-3'-phosphate
  modified_base 12: mod_base = OTHER; note = 2'-O-methylguanosine-3'-phosphate
  modified_base 13: mod_base = OTHER; note = 2'-O-methylguanosine-3'-phosphate
  modified_base 14: mod_base = OTHER; note = 2'-O-methyladenosine-3'-phosphate
  modified_base 15: mod_base = OTHER; note = 2'-O-methyladenosine-3'-phosphate
  modified_base 16: mod_base = OTHER; note = 2'-O-methyluridine-3'-phosphate
  modified_base 17: mod_base = OTHER; note = 2'-O-methylguanosine-3'-phosphate
  modified_base 18: mod_base = OTHER; note = 2'-O-methyluridine-3'-phosphate
  modified_base 19: mod_base = OTHER; note = 2'-O-methyluridine-3'-phosphate
  modified_base 20: mod_base = OTHER; note = 2'-O-methylguanosine-3'-phosphate
  modified_base 21: mod_base = OTHER; note = 2'-O-methylcytidine-3'-phosphate N-[tris(GalNAc-alkyl)-amidodecanoyl)]-4-hydroxyprolinol Hyp-(GalNAc-alkyl)3
aaggatgctccggaatgttgc

SEQ ID NO: 2355 - RNA, 23 nt, synthetic construct
  source 1..23: mol_type = other RNA; note = Description of Artificial Sequence: Synthetic oligonucleotide
  modified_base 1: mod_base = OTHER; note = 2'-O-methylguanosine-3'-phosphorothioate
  modified_base 2: mod_base = OTHER; note = 2'-fluorocytidine-3'-phosphorothioate
  modified_base 3: mod_base = OTHER; note = 2'-O-methyladenosine-3'-phosphate
  modified_base 4: mod_base = OTHER; note = 2'-O-methyladenosine-3'-phosphate
  modified_base 5: mod_base = OTHER; note = 2'-O-methylcytidine-3'-phosphate
  modified_base 6: mod_base = OTHER; note = 2'-fluoroadenosine-3'-phosphate
  modified_base 7: mod_base = OTHER; note = 2'-O-methyluridine-3'-phosphate
  modified_base 8: mod_base = OTHER; note = 2'-fluorouridine-3'-phosphate
  modified_base 9: mod_base = OTHER; note = 2'-fluorocytidine-3'-phosphate
  modified_base 10: mod_base = OTHER; note = 2'-O-methylcytidine-3'-phosphate
  modified_base 11: mod_base = OTHER; note = 2'-O-methylguanosine-3'-phosphate
  modified_base 12: mod_base = OTHER; note = 2'-O-methylguanosine-3'-phosphate
  modified_base 13: mod_base = OTHER; note = 2'-O-methyladenosine-3'-phosphate
  modified_base 14: mod_base = OTHER; note = 2'-fluoroguanosine-3'-phosphate
  modified_base 15: mod_base = OTHER; note = 2'-O-methylcytidine-3'-phosphate
  modified_base 16: mod_base = OTHER; note = 2'-fluoroadenosine-3'-phosphate
  modified_base 17: mod_base = OTHER; note = 2'-O-methyluridine-3'-phosphate
  modified_base 18: mod_base = OTHER; note = 2'-O-methylcytidine-3'-phosphate
  modified_base 19: mod_base = OTHER; note = 2'-O-methylcytidine-3'-phosphate
  modified_base 20: mod_base = OTHER; note = 2'-O-methyluridine-3'-phosphate
  modified_base 21: mod_base = OTHER; note = 2'-O-methyluridine-3'-phosphorothioate
  modified_base 22: mod_base = OTHER; note = 2'-O-methylguanosine-3'-phosphorothioate
  modified_base 23: mod_base = OTHER; note = 2'-O-methylguanosine-3'-phosphate
gcaacattccggagcatccttgg

SEQ ID NO: 2356 - RNA, 21 nt, synthetic construct
  source 1..21: mol_type = other RNA; note = Description of Artificial Sequence: Synthetic oligonucleotide
  modified_base 1: mod_base = OTHER; note = 2'-O-methyladenosine-3'-phosphorothioate
  modified_base 2: mod_base = OTHER; note = 2'-O-methylguanosine-3'-phosphorothioate
  modified_base 3: mod_base = OTHER; note = 2'-O-methylguanosine-3'-phosphate
  modified_base 4: mod_base = OTHER; note = 2'-O-methyladenosine-3'-phosphate
  modified_base 5: mod_base = OTHER; note = 2'-O-methyluridine-3'-phosphate
  modified_base 6: mod_base = OTHER; note = 2'-O-methylguanosine-3'-phosphate
  modified_base 7: mod_base = OTHER; note = 2'-fluorocytidine-3'-phosphate
  modified_base 8: mod_base = OTHER; note = 2'-O-methyluridine-3'-phosphate
  modified_base 9: mod_base = OTHER; note = 2'-fluorocytidine-3'-phosphate
  modified_base 10: mod_base = OTHER; note = 2'-fluorocytidine-3'-phosphate
  modified_base 11: mod_base = OTHER; note = 2'-fluoroguanosine-3'-phosphate
  modified_base 12: mod_base = OTHER; note = 2'-O-methylguanosine-3'-phosphate
  modified_base 13: mod_base = OTHER; note = 2'-O-methyladenosine-3'-phosphate
  modified_base 14: mod_base = OTHER; note = 2'-O-methyladenosine-3'-phosphate
  modified_base 15: mod_base = OTHER; note = 2'-O-methyluridine-3'-phosphate
  modified_base 16: mod_base = OTHER; note = 2'-O-methylguanosine-3'-phosphate
  modified_base 17: mod_base = OTHER; note = 2'-O-methyluridine-3'-phosphate
  modified_base 18: mod_base = OTHER; note = 2'-O-methyluridine-3'-phosphate
  modified_base 19: mod_base = OTHER; note = 2'-O-methylguanosine-3'-phosphate
  modified_base 20: mod_base = OTHER; note = 2'-O-methylcytidine-3'-phosphate
  modified_base 21: mod_base = OTHER; note = 2'-O-methyluridine-3'-phosphate N-[tris(GalNAc-alkyl)-amidodecanoyl)]-4-hydroxyprolinol Hyp-(GalNAc-alkyl)3
aggatgctccggaatgttgct

SEQ ID NO: 2357 - RNA, 23 nt, synthetic construct
  source 1..23: mol_type = other RNA; note = Description of Artificial Sequence: Synthetic oligonucleotide
  modified_base 1: mod_base = OTHER; note = 2'-O-methyladenosine-3'-phosphorothioate
  modified_base 2: mod_base = OTHER; note = 2'-fluoroguanosine-3'-phosphorothioate
  modified_base 3: mod_base = OTHER; note = 2'-O-methylcytidine-3'-phosphate
  modified_base 4: mod_base = OTHER; note = 2'-O-methyladenosine-3'-phosphate
  modified_base 5: mod_base = OTHER; note = 2'-O-methyladenosine-3'-phosphate
  modified_base 6: mod_base = OTHER; note = 2'-fluorocytidine-3'-phosphate
  modified_base 7: mod_base = OTHER; note = 2'-O-methyladenosine-3'-phosphate
  modified_base 8: mod_base = OTHER; note = 2'-fluorouridine-3'-phosphate
  modified_base 9: mod_base = OTHER; note = 2'-fluorouridine-3'-phosphate
  modified_base 10: mod_base = OTHER; note = 2'-O-methylcytidine-3'-phosphate
  modified_base 11: mod_base = OTHER; note = 2'-O-methylcytidine-3'-phosphate
  modified_base 12: mod_base = OTHER; note = 2'-O-methylguanosine-3'-phosphate
  modified_base 13: mod_base = OTHER; note = 2'-O-methylguanosine-3'-phosphate
  modified_base 14: mod_base = OTHER; note = 2'-fluoroadenosine-3'-phosphate
  modified_base 15: mod_base = OTHER; note = 2'-O-methylguanosine-3'-phosphate
  modified_base 16: mod_base = OTHER; note = 2'-fluorocytidine-3'-phosphate
  modified_base 17: mod_base = OTHER; note = 2'-O-methyladenosine-3'-phosphate
  modified_base 18: mod_base = OTHER; note = 2'-O-methyluridine-3'-phosphate
  modified_base 19: mod_base = OTHER; note = 2'-O-methylcytidine-3'-phosphate
  modified_base 20: mod_base = OTHER; note = 2'-O-methylcytidine-3'-phosphate
  modified_base 21: mod_base = OTHER; note = 2'-O-methyluridine-3'-phosphorothioate
  modified_base 22: mod_base = OTHER; note = 2'-O-methyluridine-3'-phosphorothioate
  modified_base 23: mod_base = OTHER; note = 2'-O-methylguanosine-3'-phosphate
agcaacattccggagcatccttg

SEQ ID NO: 2358 - RNA, 21 nt, synthetic construct
  source 1..21: mol_type = other RNA; note = Description of Artificial Sequence: Synthetic oligonucleotide
  modified_base 1: mod_base = OTHER; note = 2'-O-methyladenosine-3'-phosphorothioate
  modified_base 2: mod_base = OTHER; note = 2'-O-methyluridine-3'-phosphorothioate
  modified_base 3: mod_base = OTHER; note = 2'-O-methylcytidine-3'-phosphate
  modified_base 4: mod_base = OTHER; note = 2'-O-methylcytidine-3'-phosphate
  modified_base 5: mod_base = OTHER; note = 2'-O-methyladenosine-3'-phosphate
  modified_base 6: mod_base = OTHER; note = 2'-O-methyladenosine-3'-phosphate
  modified_base 7: mod_base = OTHER; note = 2'-fluoroguanosine-3'-phosphate
  modified_base 8: mod_base = OTHER; note = 2'-O-methylguanosine-3'-phosphate
  modified_base 9: mod_base = OTHER; note = 2'-fluoroadenosine-3'-phosphate
  modified_base 10: mod_base = OTHER; note = 2'-fluorouridine-3'-phosphate
  modified_base 11: mod_base = OTHER; note = 2'-fluoroguanosine-3'-phosphate
  modified_base 12: mod_base = OTHER; note = 2'-O-methylcytidine-3'-phosphate
  modified_base 13: mod_base = OTHER; note = 2'-O-methyluridine-3'-phosphate
  modified_base 14: mod_base = OTHER; note = 2'-O-methylcytidine-3'-phosphate
  modified_base 15: mod_base = OTHER; note = 2'-O-methylcytidine-3'-phosphate
  modified_base 16: mod_base = OTHER; note = 2'-O-methylguanosine-3'-phosphate
  modified_base 17: mod_base = OTHER; note = 2'-O-methylguanosine-3'-phosphate
  modified_base 18: mod_base = OTHER; note = 2'-O-methyladenosine-3'-phosphate
  modified_base 19: mod_base = OTHER; note = 2'-O-methyladenosine-3'-phosphate
  modified_base 20: mod_base = OTHER; note = 2'-O-methyluridine-3'-phosphate
  modified_base 21: mod_base = OTHER; note = 2'-O-methylguanosine-3'-phosphate N-[tris(GalNAc-alkyl)-amidodecanoyl)]-4-hydroxyprolinol Hyp-(GalNAc-alkyl)3
atccaaggatgctccggaatg

SEQ ID NO: 2359 - RNA, 23 nt, synthetic construct
  source 1..23: mol_type = other RNA; note = Description of Artificial Sequence: Synthetic oligonucleotide
  modified_base 1: mod_base = OTHER; note = 2'-O-methylcytidine-3'-phosphorothioate
  modified_base 2: mod_base = OTHER; note = 2'-fluoroadenosine-3'-phosphorothioate
  modified_base 3: mod_base = OTHER; note = 2'-O-methyluridine-3'-phosphate
  modified_base 4: mod_base = OTHER; note = 2'-O-methyluridine-3'-phosphate
  modified_base 5: mod_base = OTHER; note = 2'-O-methylcytidine-3'-phosphate
  modified_base 6: mod_base = OTHER; note = 2'-fluorocytidine-3'-phosphate
  modified_base 7: mod_base = OTHER; note = 2'-O-methylguanosine-3'-phosphate
  modified_base 8: mod_base = OTHER; note = 2'-fluoroguanosine-3'-phosphate
  modified_base 9: mod_base = OTHER; note = 2'-fluoroadenosine-3'-phosphate
  modified_base 10: mod_base = OTHER; note = 2'-O-methylguanosine-3'-phosphate
  modified_base 11: mod_base = OTHER; note = 2'-O-methylcytidine-3'-phosphate
  modified_base 12: mod_base = OTHER; note = 2'-O-methyladenosine-3'-phosphate
  modified_base 13: mod_base = OTHER; note = 2'-O-methyluridine-3'-phosphate
  modified_base 14: mod_base = OTHER; note = 2'-fluorocytidine-3'-phosphate
  modified_base 15: mod_base = OTHER; note = 2'-O-methylcytidine-3'-phosphate
  modified_base 16: mod_base = OTHER; note = 2'-fluorouridine-3'-phosphate
  modified_base 17: mod_base = OTHER; note = 2'-O-methyluridine-3'-phosphate
  modified_base 18: mod_base = OTHER; note = 2'-O-methylguanosine-3'-phosphate
  modified_base 19: mod_base = OTHER; note = 2'-O-methylguanosine-3'-phosphate
  modified_base 20: mod_base = OTHER; note = 2'-O-methyladenosine-3'-phosphate
  modified_base 21: mod_base = OTHER; note = 2'-O-methyluridine-3'-phosphorothioate
  modified_base 22: mod_base = OTHER; note = 2'-O-methyladenosine-3'-phosphorothioate
  modified_base 23: mod_base = OTHER; note = 2'-O-methylcytidine-3'-phosphate
cattccggagcatccttggatac

SEQ ID NO: 2360 - RNA, 21 nt, synthetic construct
  source 1..21: mol_type = other RNA; note = Description of Artificial Sequence: Synthetic oligonucleotide
  modified_base 1: mod_base = OTHER; note = 2'-O-methyluridine-3'-phosphorothioate
  modified_base 2: mod_base = OTHER; note = 2'-O-methyladenosine-3'-phosphorothioate
  modified_base 3: mod_base = OTHER; note = 2'-O-methyluridine-3'-phosphate
  modified_base 4: mod_base = OTHER; note = 2'-O-methylcytidine-3'-phosphate
  modified_base 5: mod_base = OTHER; note = 2'-O-methylcytidine-3'-phosphate
  modified_base 6: mod_base = OTHER; note = 2'-O-methyladenosine-3'-phosphate
  modified_base 7: mod_base = OTHER; note = 2'-fluoroadenosine-3'-phosphate
  modified_base 8: mod_base = OTHER; note = 2'-O-methylguanosine-3'-phosphate
  modified_base 9: mod_base = OTHER; note = 2'-fluoroguanosine-3'-phosphate
  modified_base 10: mod_base = OTHER; note = 2'-fluoroadenosine-3'-phosphate
  modified_base 11: mod_base = OTHER; note = 2'-fluorouridine-3'-phosphate
  modified_base 12: mod_base = OTHER; note = 2'-O-methylguanosine-3'-phosphate
  modified_base 13: mod_base = OTHER; note = 2'-O-methylcytidine-3'-phosphate
  modified_base 14: mod_base = OTHER; note = 2'-O-methyluridine-3'-phosphate
  modified_base 15: mod_base = OTHER; note = 2'-O-methylcytidine-3'-phosphate
  modified_base 16: mod_base = OTHER; note = 2'-O-methylcytidine-3'-phosphate
  modified_base 17: mod_base = OTHER; note = 2'-O-methylguanosine-3'-phosphate
  modified_base 18: mod_base = OTHER; note = 2'-O-methylguanosine-3'-phosphate
  modified_base 19: mod_base = OTHER; note = 2'-O-methyladenosine-3'-phosphate
  modified_base 20: mod_base = OTHER; note = 2'-O-methyladenosine-3'-phosphate
  modified_base 21: mod_base = OTHER; note = 2'-O-methyluridine-3'-phosphate N-[tris(GalNAc-alkyl)-amidodecanoyl)]-4-hydroxyprolinol Hyp-(GalNAc-alkyl)3
tatccaaggatgctccggaat

SEQ ID NO: 2361 - RNA, 23 nt, synthetic construct
  source 1..23: mol_type = other RNA; note = Description of Artificial Sequence: Synthetic oligonucleotide
  modified_base 1: mod_base = OTHER; note = 2'-O-methyladenosine-3'-phosphorothioate
  modified_base 2: mod_base = OTHER; note = 2'-fluorouridine -3'-phosphorothioate
  modified_base 3: mod_base = OTHER; note = 2'-O-methyluridine-3'-phosphate
  modified_base 4: mod_base = OTHER; note = 2'-O-methylcytidine-3'-phosphate
  modified_base 5: mod_base = OTHER; note = 2'-O-methylcytidine-3'-phosphate
  modified_base 6: mod_base = OTHER; note = 2'-fluoroguanosine-3'-phosphate
  modified_base 7: mod_base = OTHER; note = 2'-O-methylguanosine-3'-phosphate
  modified_base 8: mod_base = OTHER; note = 2'-fluoroadenosine-3'-phosphate
  modified_base 9: mod_base = OTHER; note = 2'-fluoroguanosine-3'-phosphate
  modified_base 10: mod_base = OTHER; note = 2'-O-methylcytidine-3'-phosphate
  modified_base 11: mod_base = OTHER; note = 2'-O-methyladenosine-3'-phosphate
  modified_base 12: mod_base = OTHER; note = 2'-O-methyluridine-3'-phosphate
  modified_base 13: mod_base = OTHER; note = 2'-O-methylcytidine-3'-phosphate
  modified_base 14: mod_base = OTHER; note = 2'-fluorocytidine-3'-phosphate
  modified_base 15: mod_base = OTHER; note = 2'-O-methyluridine-3'-phosphate
  modified_base 16: mod_base = OTHER; note = 2'-fluorouridine-3'-phosphate
  modified_base 17: mod_base = OTHER; note = 2'-O-methylguanosine-3'-phosphate
  modified_base 18: mod_base = OTHER; note = 2'-O-methylguanosine-3'-phosphate
  modified_base 19: mod_base = OTHER; note = 2'-O-methyladenosine-3'-phosphate
  modified_base 20: mod_base = OTHER; note = 2'-O-methyluridine-3'-phosphate
  modified_base 21: mod_base = OTHER; note = 2'-O-methyladenosine-3'-phosphorothioate
  modified_base 22: mod_base = OTHER; note = 2'-O-methylcytidine-3'-phosphorothioate
  modified_base 23: mod_base = OTHER; note = 2'-O-methyladenosine-3'-phosphate
attccggagcatccttggataca

SEQ ID NO: 2362 - RNA, 21 nt, synthetic construct
  source 1..21: mol_type = other RNA; note = Description of Artificial Sequence: Synthetic oligonucleotide
  modified_base 1: mod_base = OTHER; note = 2'-O-methyladenosine-3'-phosphorothioate
  modified_base 2: mod_base = OTHER; note = 2'-O-methyladenosine-3'-phosphorothioate
  modified_base 3: mod_base = OTHER; note = 2'-O-methyluridine-3'-phosphate
  modified_base 4: mod_base = OTHER; note = 2'-O-methylguanosine-3'-phosphate
  modified_base 5: mod_base = OTHER; note = 2'-O-methylguanosine-3'-phosphate
  modified_base 6: mod_base = OTHER; note = 2'-O-methylguanosine-3'-phosphate
  modified_base 7: mod_base = OTHER; note = 2'-fluorouridine-3'-phosphate
  modified_base 8: mod_base = OTHER; note = 2'-O-methylguanosine-3'-phosphate
  modified_base 9: mod_base = OTHER; note = 2'-fluoroguanosine-3'-phosphate
  modified_base 10: mod_base = OTHER; note = 2'-fluorocytidine-3'-phosphate
  modified_base 11: mod_base = OTHER; note = 2'-fluoroguanosine-3'-phosphate
  modified_base 12: mod_base = OTHER; note = 2'-O-methylguanosine-3'-phosphate
  modified_base 13: mod_base = OTHER; note = 2'-O-methyluridine-3'-phosphate
  modified_base 14: mod_base = OTHER; note = 2'-O-methyladenosine-3'-phosphate
  modified_base 15: mod_base = OTHER; note = 2'-O-methyladenosine-3'-phosphate
  modified_base 16: mod_base = OTHER; note = 2'-O-methyluridine-3'-phosphate
  modified_base 17: mod_base = OTHER; note = 2'-O-methyluridine-3'-phosphate
  modified_base 18: mod_base = OTHER; note = 2'-O-methylguanosine-3'-phosphate
  modified_base 19: mod_base = OTHER; note = 2'-O-methylguanosine-3'-phosphate
  modified_base 20: mod_base = OTHER; note = 2'-O-methyluridine-3'-phosphate
  modified_base 21: mod_base = OTHER; note = 2'-O-methylguanosine-3'-phosphate N-[tris(GalNAc-alkyl)-amidodecanoyl)]-4-hydroxyprolinol Hyp-(GalNAc-alkyl)3
aatgggtggcggtaattggtg

SEQ ID NO: 2363 - RNA, 23 nt, synthetic construct
  source 1..23: mol_type = other RNA; note = Description of Artificial Sequence: Synthetic oligonucleotide
  modified_base 1: mod_base = OTHER; note = 2'-O-methylcytidine-3'-phosphorothioate
  modified_base 2: mod_base = OTHER; note = 2'-fluoroadenosine-3'-phosphorothioate
  modified_base 3: mod_base = OTHER; note = 2'-O-methylcytidine-3'-phosphate
  modified_base 4: mod_base = OTHER; note = 2'-O-methylcytidine-3'-phosphate
  modified_base 5: mod_base = OTHER; note = 2'-O-methyladenosine-3'-phosphate
  modified_base 6: mod_base = OTHER; note = 2'-fluoroadenosine-3'-phosphate
  modified_base 7: mod_base = OTHER; note = 2'-O-methyluridine-3'-phosphate
  modified_base 8: mod_base = OTHER; note = 2'-fluorouridine-3'-phosphate
  modified_base 9: mod_base = OTHER; note = 2'-fluoroadenosine-3'-phosphate
  modified_base 10: mod_base = OTHER; note = 2'-O-methylcytidine-3'-phosphate
  modified_base 11: mod_base = OTHER; note = 2'-O-methylcytidine-3'-phosphate
  modified_base 12: mod_base = OTHER; note = 2'-O-methylguanosine-3'-phosphate
  modified_base 13: mod_base = OTHER; note = 2'-O-methylcytidine-3'-phosphate
  modified_base 14: mod_base = OTHER; note = 2'-fluorocytidine-3'-phosphate
  modified_base 15: mod_base = OTHER; note = 2'-O-methyladenosine-3'-phosphate
  modified_base 16: mod_base = OTHER; note = 2'-fluorocytidine-3'-phosphate
  modified_base 17: mod_base = OTHER; note = 2'-O-methylcytidine-3'-phosphate
  modified_base 18: mod_base = OTHER; note = 2'-O-methylcytidine-3'-phosphate
  modified_base 19: mod_base = OTHER; note = 2'-O-methyladenosine-3'-phosphate
  modified_base 20: mod_base = OTHER; note = 2'-O-methyluridine-3'-phosphate
  modified_base 21: mod_base = OTHER; note = 2'-O-methyluridine-3'-phosphorothioate
  modified_base 22: mod_base = OTHER; note = 2'-O-methylcytidine-3'-phosphorothioate
  modified_base 23: mod_base = OTHER; note = 2'-O-methylcytidine-3'-phosphate
caccaattaccgccacccattcc

SEQ ID NO: 2364 - RNA, 21 nt, synthetic construct
  source 1..21: mol_type = other RNA; note = Description of Artificial Sequence: Synthetic oligonucleotide
  modified_base 1: mod_base = OTHER; note = 2'-O-methyladenosine-3'-phosphorothioate
  modified_base 2: mod_base = OTHER; note = 2'-O-methyluridine-3'-phosphorothioate
  modified_base 3: mod_base = OTHER; note = 2'-O-methylguanosine-3'-phosphate
  modified_base 4: mod_base = OTHER; note = 2'-O-methylguanosine-3'-phosphate
  modified_base 5: mod_base = OTHER; note = 2'-O-methylguanosine-3'-phosphate
  modified_base 6: mod_base = OTHER; note = 2'-O-methyluridine-3'-phosphate
  modified_base 7: mod_base = OTHER; note = 2'-fluoroguanosine-3'-phosphate
  modified_base 8: mod_base = OTHER; note = 2'-O-methylguanosine-3'-phosphate
  modified_base 9: mod_base = OTHER; note = 2'-fluorocytidine-3'-phosphate
  modified_base 10: mod_base = OTHER; note = 2'-fluoroguanosine-3'-phosphate
  modified_base 11: mod_base = OTHER; note = 2'-fluoroguanosine-3'-phosphate
  modified_base 12: mod_base = OTHER; note = 2'-O-methyluridine-3'-phosphate
  modified_base 13: mod_base = OTHER; note = 2'-O-methyladenosine-3'-phosphate
  modified_base 14: mod_base = OTHER; note = 2'-O-methyladenosine-3'-phosphate
  modified_base 15: mod_base = OTHER; note = 2'-O-methyluridine-3'-phosphate
  modified_base 16: mod_base = OTHER; note = 2'-O-methyluridine-3'-phosphate
  modified_base 17: mod_base = OTHER; note = 2'-O-methylguanosine-3'-phosphate
  modified_base 18: mod_base = OTHER; note = 2'-O-methylguanosine-3'-phosphate
  modified_base 19: mod_base = OTHER; note = 2'-O-methyluridine-3'-phosphate
  modified_base 20: mod_base = OTHER; note = 2'-O-methylguanosine-3'-phosphate
  modified_base 21: mod_base = OTHER; note = 2'-O-methyladenosine-3'-phosphate N-[tris(GalNAc-alkyl)-amidodecanoyl)]-4-hydroxyprolinol Hyp-(GalNAc-alkyl)3
atgggtggcggtaattggtga

SEQ ID NO: 2365 - RNA, 23 nt, synthetic construct
  source 1..23: mol_type = other RNA; note = Description of Artificial Sequence: Synthetic oligonucleotide
  modified_base 1: mod_base = OTHER; note = 2'-O-methyluridine-3'-phosphorothioate
  modified_base 2: mod_base = OTHER; note = 2'-fluorocytidine-3'-phosphorothioate
  modified_base 3: mod_base = OTHER; note = 2'-O-methyladenosine-3'-phosphate
  modified_base 4: mod_base = OTHER; note = 2'-O-methylcytidine-3'-phosphate
  modified_base 5: mod_base = OTHER; note = 2'-O-methylcytidine-3'-phosphate
  modified_base 6: mod_base = OTHER; note = 2'-fluoroadenosine-3'-phosphate
  modified_base 7: mod_base = OTHER; note = 2'-O-methyladenosine-3'-phosphate
  modified_base 8: mod_base = OTHER; note = 2'-fluorouridine-3'-phosphate
  modified_base 9: mod_base = OTHER; note = 2'-fluorouridine-3'-phosphate
  modified_base 10: mod_base = OTHER; note = 2'-O-methyladenosine-3'-phosphate
  modified_base 11: mod_base = OTHER; note = 2'-O-methylcytidine-3'-phosphate
  modified_base 12: mod_base = OTHER; note = 2'-O-methylcytidine-3'-phosphate
  modified_base 13: mod_base = OTHER; note = 2'-O-methylguanosine-3'-phosphate
  modified_base 14: mod_base = OTHER; note = 2'-fluorocytidine-3'-phosphate
  modified_base 15: mod_base = OTHER; note = 2'-O-methylcytidine-3'-phosphate
  modified_base 16: mod_base = OTHER; note = 2'-fluoroadenosine-3'-phosphate
  modified_base 17: mod_base = OTHER; note = 2'-O-methylcytidine-3'-phosphate
  modified_base 18: mod_base = OTHER; note = 2'-O-methylcytidine-3'-phosphate
  modified_base 19: mod_base = OTHER; note = 2'-O-methylcytidine-3'-phosphate
  modified_base 20: mod_base = OTHER; note = 2'-O-methyladenosine-3'-phosphate
  modified_base 21: mod_base = OTHER; note = 2'-O-methyluridine-3'-phosphorothioate
  modified_base 22: mod_base = OTHER; note = 2'-O-methyluridine-3'-phosphorothioate
  modified_base 23: mod_base = OTHER; note = 2'-O-methylcytidine-3'-phosphate
tcaccaattaccgccacccattc

SEQ ID NO: 2366 - RNA, 21 nt, synthetic construct
  source 1..21: mol_type = other RNA; note = Description of Artificial Sequence: Synthetic oligonucleotide
  modified_base 1: mod_base = OTHER; note = 2'-O-methyluridine-3'-phosphorothioate
  modified_base 2: mod_base = OTHER; note = 2'-O-methyluridine-3'-phosphorothioate
  modified_base 3: mod_base = OTHER; note = 2'-O-methylguanosine-3'-phosphate
  modified_base 4: mod_base = OTHER; note = 2'-O-methylguanosine-3'-phosphate
  modified_base 5: mod_base = OTHER; note = 2'-O-methyladenosine-3'-phosphate
  modified_base 6: mod_base = OTHER; note = 2'-O-methyladenosine-3'-phosphate
  modified_base 7: mod_base = OTHER; note = 2'-fluorouridine-3'-phosphate
  modified_base 8: mod_base = OTHER; note = 2'-O-methylguanosine-3'-phosphate
  modified_base 9: mod_base = OTHER; note = 2'-fluoroguanosine-3'-phosphate
  modified_base 10: mod_base = OTHER; note = 2'-fluoroguanosine-3'-phosphate
  modified_base 11: mod_base = OTHER; note = 2'-fluorouridine-3'-phosphate
  modified_base 12: mod_base = OTHER; note = 2'-O-methylguanosine-3'-phosphate
  modified_base 13: mod_base = OTHER; note = 2'-O-methylguanosine-3'-phosphate
  modified_base 14: mod_base = OTHER; note = 2'-O-methylcytidine-3'-phosphate
  modified_base 15: mod_base = OTHER; note = 2'-O-methylguanosine-3'-phosphate
  modified_base 16: mod_base = OTHER; note = 2'-O-methylguanosine-3'-phosphate
  modified_base 17: mod_base = OTHER; note = 2'-O-methyluridine-3'-phosphate
  modified_base 18: mod_base = OTHER; note = 2'-O-methyladenosine-3'-phosphate
  modified_base 19: mod_base = OTHER; note = 2'-O-methyladenosine-3'-phosphate
  modified_base 20: mod_base = OTHER; note = 2'-O-methyluridine-3'-phosphate
  modified_base 21: mod_base = OTHER; note = 2'-O-methyluridine-3'-phosphate N-[tris(GalNAc-alkyl)-amidodecanoyl)]-4-hydroxyprolinol Hyp-(GalNAc-alkyl)3
ttggaatgggtggcggtaatt

SEQ ID NO: 2367 - RNA, 23 nt, synthetic construct
  source 1..23: mol_type = other RNA; note = Description of Artificial Sequence: Synthetic oligonucleotide
  modified_base 1: mod_base = OTHER; note = 2'-O-methyladenosine-3'-phosphorothioate
  modified_base 2: mod_base = OTHER; note = 2'-fluoroadenosine-3'-phosphorothioate
  modified_base 3: mod_base = OTHER; note = 2'-O-methyluridine-3'-phosphate
  modified_base 4: mod_base = OTHER; note = 2'-O-methyluridine-3'-phosphate
  modified_base 5: mod_base = OTHER; note = 2'-O-methyladenosine-3'-phosphate
  modified_base 6: mod_base = OTHER; note = 2'-fluorocytidine-3'-phosphate
  modified_base 7: mod_base = OTHER; note = 2'-O-methylcytidine-3'-phosphate
  modified_base 8: mod_base = OTHER; note = 2'-fluoroguanosine-3'-phosphate
  modified_base 9: mod_base = OTHER; note = 2'-fluorocytidine-3'-phosphate
  modified_base 10: mod_base = OTHER; note = 2'-O-methylcytidine-3'-phosphate
  modified_base 11: mod_base = OTHER; note = 2'-O-methyladenosine-3'-phosphate
  modified_base 12: mod_base = OTHER; note = 2'-O-methylcytidine-3'-phosphate
  modified_base 13: mod_base = OTHER; note = 2'-O-methylcytidine-3'-phosphate
  modified_base 14: mod_base = OTHER; note = 2'-fluorocytidine-3'-phosphate
  modified_base 15: mod_base = OTHER; note = 2'-O-methyladenosine-3'-phosphate
  modified_base 16: mod_base = OTHER; note = 2'-fluorouridine-3'-phosphate
  modified_base 17: mod_base = OTHER; note = 2'-O-methyluridine-3'-phosphate
  modified_base 18: mod_base = OTHER; note = 2'-O-methylcytidine-3'-phosphate
  modified_base 19: mod_base = OTHER; note = 2'-O-methylcytidine-3'-phosphate
  modified_base 20: mod_base = OTHER; note = 2'-O-methyladenosine-3'-phosphate
  modified_base 21: mod_base = OTHER; note = 2'-O-methyladenosine-3'-phosphorothioate
  modified_base 22: mod_base = OTHER; note = 2'-O-methyluridine-3'-phosphorothioate
  modified_base 23: mod_base = OTHER; note = 2'-O-methyluridine-3'-phosphate
aattaccgccacccattccaatt

SEQ ID NO: 2368 - RNA, 21 nt, synthetic construct
  source 1..21: mol_type = other RNA; note = Description of Artificial Sequence: Synthetic oligonucleotide
  modified_base 1: mod_base = OTHER; note = 2'-O-methyladenosine-3'-phosphorothioate
  modified_base 2: mod_base = OTHER; note = 2'-O-methyluridine-3'-phosphorothioate
  modified_base 3: mod_base = OTHER; note = 2'-O-methyluridine-3'-phosphate
  modified_base 4: mod_base = OTHER; note = 2'-O-methylguanosine-3'-phosphate
  modified_base 5: mod_base = OTHER; note = 2'-O-methylguanosine-3'-phosphate
  modified_base 6: mod_base = OTHER; note = 2'-O-methyladenosine-3'-phosphate
  modified_base 7: mod_base = OTHER; note = 2'-fluoroadenosine-3'-phosphate
  modified_base 8: mod_base = OTHER; note = 2'-O-methyluridine-3'-phosphate
  modified_base 9: mod_base = OTHER; note = 2'-fluoroguanosine-3'-phosphate
  modified_base 10: mod_base = OTHER; note = 2'-fluoroguanosine-3'-phosphate
  modified_base 11: mod_base = OTHER; note = 2'-fluoroguanosine-3'-phosphate
  modified_base 12: mod_base = OTHER; note = 2'-O-methyluridine-3'-phosphate
  modified_base 13: mod_base = OTHER; note = 2'-O-methylguanosine-3'-phosphate
  modified_base 14: mod_base = OTHER; note = 2'-O-methylguanosine-3'-phosphate
  modified_base 15: mod_base = OTHER; note = 2'-O-methylcytidine-3'-phosphate
  modified_base 16: mod_base = OTHER; note = 2'-O-methylguanosine-3'-phosphate
  modified_base 17: mod_base = OTHER; note = 2'-O-methylguanosine-3'-phosphate
  modified_base 18: mod_base = OTHER; note = 2'-O-methyluridine-3'-phosphate
  modified_base 19: mod_base = OTHER; note = 2'-O-methyladenosine-3'-phosphate
  modified_base 20: mod_base = OTHER; note = 2'-O-methyladenosine-3'-phosphate
  modified_base 21: mod_base = OTHER; note = 2'-O-methyluridine-3'-phosphate N-[tris(GalNAc-alkyl)-amidodecanoyl)]-4-hydroxyprolinol Hyp-(GalNAc-alkyl)3
attggaatgggtggcggtaat

SEQ ID NO: 2369 - RNA, 23 nt, synthetic construct
  source 1..23: mol_type = other RNA; note = Description of Artificial Sequence: Synthetic oligonucleotide
  modified_base 1: mod_base = OTHER; note = 2'-O-methyladenosine-3'-phosphorothioate
  modified_base 2: mod_base = OTHER; note = 2'-fluorouridine -3'-phosphorothioate
  modified_base 3: mod_base = OTHER; note = 2'-O-methyluridine-3'-phosphate
  modified_base 4: mod_base = OTHER; note = 2'-O-methyladenosine-3'-phosphate
  modified_base 5: mod_base = OTHER; note = 2'-O-methylcytidine-3'-phosphate
  modified_base 6: mod_base = OTHER; note = 2'-fluorocytidine-3'-phosphate
  modified_base 7: mod_base = OTHER; note = 2'-O-methylguanosine-3'-phosphate
  modified_base 8: mod_base = OTHER; note = 2'-fluorocytidine-3'-phosphate
  modified_base 9: mod_base = OTHER; note = 2'-fluorocytidine-3'-phosphate
  modified_base 10: mod_base = OTHER; note = 2'-O-methyladenosine-3'-phosphate
  modified_base 11: mod_base = OTHER; note = 2'-O-methylcytidine-3'-phosphate
  modified_base 12: mod_base = OTHER; note = 2'-O-methylcytidine-3'-phosphate
  modified_base 13: mod_base = OTHER; note = 2'-O-methylcytidine-3'-phosphate
  modified_base 14: mod_base = OTHER; note = 2'-fluoroadenosine-3'-phosphate
  modified_base 15: mod_base = OTHER; note = 2'-O-methyluridine-3'-phosphate
  modified_base 16: mod_base = OTHER; note = 2'-fluorouridine-3'-phosphate
  modified_base 17: mod_base = OTHER; note = 2'-O-methylcytidine-3'-phosphate
  modified_base 18: mod_base = OTHER; note = 2'-O-methylcytidine-3'-phosphate
  modified_base 19: mod_base = OTHER; note = 2'-O-methyladenosine-3'-phosphate
  modified_base 20: mod_base = OTHER; note = 2'-O-methyladenosine-3'-phosphate
  modified_base 21: mod_base = OTHER; note = 2'-O-methyluridine-3'-phosphorothioate
  modified_base 22: mod_base = OTHER; note = 2'-O-methyluridine-3'-phosphorothioate
  modified_base 23: mod_base = OTHER; note = 2'-O-methylcytidine-3'-phosphate
attaccgccacccattccaattc

SEQ ID NO: 2370 - RNA, 21 nt, synthetic construct
  source 1..21: mol_type = other RNA; note = Description of Artificial Sequence: Synthetic oligonucleotide
  modified_base 1: mod_base = OTHER; note = 2'-O-methylguanosine-3'-phosphorothioate
  modified_base 2: mod_base = OTHER; note = 2'-O-methylguanosine-3'-phosphorothioate
  modified_base 3: mod_base = OTHER; note = 2'-O-methyladenosine-3'-phosphate
  modified_base 4: mod_base = OTHER; note = 2'-O-methyladenosine-3'-phosphate
  modified_base 5: mod_base = OTHER; note = 2'-O-methyladenosine-3'-phosphate
  modified_base 6: mod_base = OTHER; note = 2'-O-methylguanosine-3'-phosphate
  modified_base 7: mod_base = OTHER; note = 2'-fluoroguanosine-3'-phosphate
  modified_base 8: mod_base = OTHER; note = 2'-O-methylcytidine-3'-phosphate
  modified_base 9: mod_base = OTHER; note = 2'-fluoroadenosine-3'-phosphate
  modified_base 10: mod_base = OTHER; note = 2'-fluorocytidine-3'-phosphate
  modified_base 11: mod_base = OTHER; note = 2'-fluorouridine-3'-phosphate
  modified_base 12: mod_base = OTHER; note = 2'-O-methylguanosine-3'-phosphate
  modified_base 13: mod_base = OTHER; note = 2'-O-methyladenosine-3'-phosphate
  modified_base 14: mod_base = OTHER; note = 2'-O-methyluridine-3'-phosphate
  modified_base 15: mod_base = OTHER; note = 2'-O-methylguanosine-3'-phosphate
  modified_base 16: mod_base = OTHER; note = 2'-O-methyluridine-3'-phosphate
  modified_base 17: mod_base = OTHER; note = 2'-O-methyluridine-3'-phosphate
  modified_base 18: mod_base = OTHER; note = 2'-O-methylcytidine-3'-phosphate
  modified_base 19: mod_base = OTHER; note = 2'-O-methyluridine-3'-phosphate
  modified_base 20: mod_base = OTHER; note = 2'-O-methylguanosine-3'-phosphate
  modified_base 21: mod_base = OTHER; note = 2'-O-methyladenosine-3'-phosphate N-[tris(GalNAc-alkyl)-amidodecanoyl)]-4-hydroxyprolinol Hyp-(GalNAc-alkyl)3
ggaaaggcactgatgttctga

SEQ ID NO: 2371 - RNA, 23 nt, synthetic construct
  source 1..23: mol_type = other RNA; note = Description of Artificial Sequence: Synthetic oligonucleotide
  modified_base 1: mod_base = OTHER; note = 2'-O-methyluridine-3'-phosphorothioate
  modified_base 2: mod_base = OTHER; note = 2'-fluorocytidine-3'-phosphorothioate
  modified_base 3: mod_base = OTHER; note = 2'-O-methyladenosine-3'-phosphate
  modified_base 4: mod_base = OTHER; note = 2'-O-methylguanosine-3'-phosphate
  modified_base 5: mod_base = OTHER; note = 2'-O-methyladenosine-3'-phosphate
  modified_base 6: mod_base = OTHER; note = 2'-fluoroadenosine-3'-phosphate
  modified_base 7: mod_base = OTHER; note = 2'-O-methylcytidine-3'-phosphate
  modified_base 8: mod_base = OTHER; note = 2'-fluoroadenosine-3'-phosphate
  modified_base 9: mod_base = OTHER; note = 2'-fluorouridine-3'-phosphate
  modified_base 10: mod_base = OTHER; note = 2'-O-methylcytidine-3'-phosphate
  modified_base 11: mod_base = OTHER; note = 2'-O-methyladenosine-3'-phosphate
  modified_base 12: mod_base = OTHER; note = 2'-O-methylguanosine-3'-phosphate
  modified_base 13: mod_base = OTHER; note = 2'-O-methyluridine-3'-phosphate
  modified_base 14: mod_base = OTHER; note = 2'-fluoroguanosine-3'-phosphate
  modified_base 15: mod_base = OTHER; note = 2'-O-methylcytidine-3'-phosphate
  modified_base 16: mod_base = OTHER; note = 2'-fluorocytidine-3'-phosphate
  modified_base 17: mod_base = OTHER; note = 2'-O-methyluridine-3'-phosphate
  modified_base 18: mod_base = OTHER; note = 2'-O-methyluridine-3'-phosphate
  modified_base 19: mod_base = OTHER; note = 2'-O-methyluridine-3'-phosphate
  modified_base 20: mod_base = OTHER; note = 2'-O-methylcytidine-3'-phosphate
  modified_base 21: mod_base = OTHER; note = 2'-O-methylcytidine-3'-phosphorothioate
  modified_base 22: mod_base = OTHER; note = 2'-O-methylguanosine-3'-phosphorothioate
  modified_base 23: mod_base = OTHER; note = 2'-O-methylcytidine-3'-phosphate
tcagaacatcagtgcctttccgc

SEQ ID NO: 2372 - RNA, 21 nt, synthetic construct
  source 1..21: mol_type = other RNA; note = Description of Artificial Sequence: Synthetic oligonucleotide
  modified_base 1: mod_base = OTHER; note = 2'-O-methylguanosine-3'-phosphorothioate
  modified_base 2: mod_base = OTHER; note = 2'-O-methyladenosine-3'-phosphorothioate
  modified_base 3: mod_base = OTHER; note = 2'-O-methyladenosine-3'-phosphate
  modified_base 4: mod_base = OTHER; note = 2'-O-methyladenosine-3'-phosphate
  modified_base 5: mod_base = OTHER; note = 2'-O-methylguanosine-3'-phosphate
  modified_base 6: mod_base = OTHER; note = 2'-O-methylguanosine-3'-phosphate
  modified_base 7: mod_base = OTHER; note = 2'-fluorocytidine-3'-phosphate
  modified_base 8: mod_base = OTHER; note = 2'-O-methyladenosine-3'-phosphate
  modified_base 9: mod_base = OTHER; note = 2'-fluorocytidine-3'-phosphate
  modified_base 10: mod_base = OTHER; note = 2'-fluorouridine-3'-phosphate
  modified_base 11: mod_base = OTHER; note = 2'-fluoroguanosine-3'-phosphate
  modified_base 12: mod_base = OTHER; note = 2'-O-methyladenosine-3'-phosphate
  modified_base 13: mod_base = OTHER; note = 2'-O-methyluridine-3'-phosphate
  modified_base 14: mod_base = OTHER; note = 2'-O-methylguanosine-3'-phosphate
  modified_base 15: mod_base = OTHER; note = 2'-O-methyluridine-3'-phosphate
  modified_base 16: mod_base = OTHER; note = 2'-O-methyluridine-3'-phosphate
  modified_base 17: mod_base = OTHER; note = 2'-O-methylcytidine-3'-phosphate
  modified_base 18: mod_base = OTHER; note = 2'-O-methyluridine-3'-phosphate
  modified_base 19: mod_base = OTHER; note = 2'-O-methylguanosine-3'-phosphate
  modified_base 20: mod_base = OTHER; note = 2'-O-methyladenosine-3'-phosphate
  modified_base 21: mod_base = OTHER; note = 2'-O-methyladenosine-3'-phosphate N-[tris(GalNAc-alkyl)-amidodecanoyl)]-4-hydroxyprolinol Hyp-(GalNAc-alkyl)3
gaaaggcactgatgttctgaa

SEQ ID NO: 2373 - RNA, 23 nt, synthetic construct
  source 1..23: mol_type = other RNA; note = Description of Artificial Sequence: Synthetic oligonucleotide
  modified_base 1: mod_base = OTHER; note = 2'-O-methyluridine-3'-phosphorothioate
  modified_base 2: mod_base = OTHER; note = 2'-fluorouridine -3'-phosphorothioate
  modified_base 3: mod_base = OTHER; note = 2'-O-methylcytidine-3'-phosphate
  modified_base 4: mod_base = OTHER; note = 2'-O-methyladenosine-3'-phosphate
  modified_base 5: mod_base = OTHER; note = 2'-O-methylguanosine-3'-phosphate
  modified_base 6: mod_base = OTHER; note = 2'-fluoroadenosine-3'-phosphate
  modified_base 7: mod_base = OTHER; note = 2'-O-methyladenosine-3'-phosphate
  modified_base 8: mod_base = OTHER; note = 2'-fluorocytidine-3'-phosphate
  modified_base 9: mod_base = OTHER; note = 2'-fluoroadenosine-3'-phosphate
  modified_base 10: mod_base = OTHER; note = 2'-O-methyluridine-3'-phosphate
  modified_base 11: mod_base = OTHER; note = 2'-O-methylcytidine-3'-phosphate
  modified_base 12: mod_base = OTHER; note = 2'-O-methyladenosine-3'-phosphate
  modified_base 13: mod_base = OTHER; note = 2'-O-methylguanosine-3'-phosphate
  modified_base 14: mod_base = OTHER; note = 2'-fluorouridine-3'-phosphate
  modified_base 15: mod_base = OTHER; note = 2'-O-methylguanosine-3'-phosphate
  modified_base 16: mod_base = OTHER; note = 2'-fluorocytidine-3'-phosphate
  modified_base 17: mod_base = OTHER; note = 2'-O-methylcytidine-3'-phosphate
  modified_base 18: mod_base = OTHER; note = 2'-O-methyluridine-3'-phosphate
  modified_base 19: mod_base = OTHER; note = 2'-O-methyluridine-3'-phosphate
  modified_base 20: mod_base = OTHER; note = 2'-O-methyluridine-3'-phosphate
  modified_base 21: mod_base = OTHER; note = 2'-O-methylcytidine-3'-phosphorothioate
  modified_base 22: mod_base = OTHER; note = 2'-O-methylcytidine-3'-phosphorothioate
  modified_base 23: mod_base = OTHER; note = 2'-O-methylguanosine-3'-phosphate
ttcagaacatcagtgcctttccg

SEQ ID NO: 2374 - RNA, 21 nt, synthetic construct
  source 1..21: mol_type = other RNA; note = Description of Artificial Sequence: Synthetic oligonucleotide
  modified_base 1: mod_base = OTHER; note = 2'-O-methylguanosine-3'-phosphorothioate
  modified_base 2: mod_base = OTHER; note = 2'-O-methyluridine-3'-phosphorothioate
  modified_base 3: mod_base = OTHER; note = 2'-O-methylguanosine-3'-phosphate
  modified_base 4: mod_base = OTHER; note = 2'-O-methylcytidine-3'-phosphate
  modified_base 5: mod_base = OTHER; note = 2'-O-methylguanosine-3'-phosphate
  modified_base 6: mod_base = OTHER; note = 2'-O-methylguanosine-3'-phosphate
  modified_base 7: mod_base = OTHER; note = 2'-fluoroadenosine-3'-phosphate
  modified_base 8: mod_base = OTHER; note = 2'-O-methyladenosine-3'-phosphate
  modified_base 9: mod_base = OTHER; note = 2'-fluoroadenosine-3'-phosphate
  modified_base 10: mod_base = OTHER; note = 2'-fluoroguanosine-3'-phosphate
  modified_base 11: mod_base = OTHER; note = 2'-fluoroguanosine-3'-phosphate
  modified_base 12: mod_base = OTHER; note = 2'-O-methylcytidine-3'-phosphate
  modified_base 13: mod_base = OTHER; note = 2'-O-methyladenosine-3'-phosphate
  modified_base 14: mod_base = OTHER; note = 2'-O-methylcytidine-3'-phosphate
  modified_base 15: mod_base = OTHER; note = 2'-O-methyluridine-3'-phosphate
  modified_base 16: mod_base = OTHER; note = 2'-O-methylguanosine-3'-phosphate
  modified_base 17: mod_base = OTHER; note = 2'-O-methyladenosine-3'-phosphate
  modified_base 18: mod_base = OTHER; note = 2'-O-methyluridine-3'-phosphate
  modified_base 19: mod_base = OTHER; note = 2'-O-methylguanosine-3'-phosphate
  modified_base 20: mod_base = OTHER; note = 2'-O-methyluridine-3'-phosphate
  modified_base 21: mod_base = OTHER; note = 2'-O-methyluridine-3'-phosphate N-[tris(GalNAc-alkyl)-amidodecanoyl)]-4-hydroxyprolinol Hyp-(GalNAc-alkyl)3
gtgcggaaaggcactgatgtt

SEQ ID NO: 2375 - RNA, 23 nt, synthetic construct
  source 1..23: mol_type = other RNA; note = Description of Artificial Sequence: Synthetic oligonucleotide
  modified_base 1: mod_base = OTHER; note = 2'-O-methyladenosine-3'-phosphorothioate
  modified_base 2: mod_base = OTHER; note = 2'-fluoroadenosine-3'-phosphorothioate
  modified_base 3: mod_base = OTHER; note = 2'-O-methylcytidine-3'-phosphate
  modified_base 4: mod_base = OTHER; note = 2'-O-methyladenosine-3'-phosphate
  modified_base 5: mod_base = OTHER; note = 2'-O-methyluridine-3'-phosphate
  modified_base 6: mod_base = OTHER; note = 2'-fluorocytidine-3'-phosphate
  modified_base 7: mod_base = OTHER; note = 2'-O-methyladenosine-3'-phosphate
  modified_base 8: mod_base = OTHER; note = 2'-fluoroguanosine-3'-phosphate
  modified_base 9: mod_base = OTHER; note = 2'-fluorouridine-3'-phosphate
  modified_base 10: mod_base = OTHER; note = 2'-O-methylguanosine-3'-phosphate
  modified_base 11: mod_base = OTHER; note = 2'-O-methylcytidine-3'-phosphate
  modified_base 12: mod_base = OTHER; note = 2'-O-methylcytidine-3'-phosphate
  modified_base 13: mod_base = OTHER; note = 2'-O-methyluridine-3'-phosphate
  modified_base 14: mod_base = OTHER; note = 2'-fluorouridine-3'-phosphate
  modified_base 15: mod_base = OTHER; note = 2'-O-methyluridine-3'-phosphate
  modified_base 16: mod_base = OTHER; note = 2'-fluorocytidine-3'-phosphate
  modified_base 17: mod_base = OTHER; note = 2'-O-methylcytidine-3'-phosphate
  modified_base 18: mod_base = OTHER; note = 2'-O-methylguanosine-3'-phosphate
  modified_base 19: mod_base = OTHER; note = 2'-O-methylcytidine-3'-phosphate
  modified_base 20: mod_base = OTHER; note = 2'-O-methyladenosine-3'-phosphate
  modified_base 21: mod_base = OTHER; note = 2'-O-methylcytidine-3'-phosphorothioate
  modified_base 22: mod_base = OTHER; note = 2'-O-methyladenosine-3'-phosphorothioate
  modified_base 23: mod_base = OTHER; note = 2'-O-methylcytidine-3'-phosphate
aacatcagtgcctttccgcacac

SEQ ID NO: 2376 - RNA, 21 nt, synthetic construct
  source 1..21: mol_type = other RNA; note = Description of Artificial Sequence: Synthetic oligonucleotide
  modified_base 1: mod_base = OTHER; note = 2'-O-methyluridine-3'-phosphorothioate
  modified_base 2: mod_base = OTHER; note = 2'-O-methylguanosine-3'-phosphorothioate
  modified_base 3: mod_base = OTHER; note = 2'-O-methyluridine-3'-phosphate
  modified_base 4: mod_base = OTHER; note = 2'-O-methylguanosine-3'-phosphate
  modified_base 5: mod_base = OTHER; note = 2'-O-methylcytidine-3'-phosphate
  modified_base 6: mod_base = OTHER; note = 2'-O-methylguanosine-3'-phosphate
  modified_base 7: mod_base = OTHER; note = 2'-fluoroguanosine-3'-phosphate
  modified_base 8: mod_base = OTHER; note = 2'-O-methyladenosine-3'-phosphate
  modified_base 9: mod_base = OTHER; note = 2'-fluoroadenosine-3'-phosphate
  modified_base 10: mod_base = OTHER; note = 2'-fluoroadenosine-3'-phosphate
  modified_base 11: mod_base = OTHER; note = 2'-fluoroguanosine-3'-phosphate
  modified_base 12: mod_base = OTHER; note = 2'-O-methylguanosine-3'-phosphate
  modified_base 13: mod_base = OTHER; note = 2'-O-methylcytidine-3'-phosphate
  modified_base 14: mod_base = OTHER; note = 2'-O-methyladenosine-3'-phosphate
  modified_base 15: mod_base = OTHER; note = 2'-O-methylcytidine-3'-phosphate
  modified_base 16: mod_base = OTHER; note = 2'-O-methyluridine-3'-phosphate
  modified_base 17: mod_base = OTHER; note = 2'-O-methylguanosine-3'-phosphate
  modified_base 18: mod_base = OTHER; note = 2'-O-methyladenosine-3'-phosphate
  modified_base 19: mod_base = OTHER; note = 2'-O-methyluridine-3'-phosphate
  modified_base 20: mod_base = OTHER; note = 2'-O-methylguanosine-3'-phosphate
  modified_base 21: mod_base = OTHER; note = 2'-O-methyluridine-3'-phosphate N-[tris(GalNAc-alkyl)-amidodecanoyl)]-4-hydroxyprolinol Hyp-(GalNAc-alkyl)3
tgtgcggaaaggcactgatgt

SEQ ID NO: 2377 - RNA, 23 nt, synthetic construct
  source 1..23: mol_type = other RNA; note = Description of Artificial Sequence: Synthetic oligonucleotide
  modified_base 1: mod_base = OTHER; note = 2'-O-methyladenosine-3'-phosphorothioate
  modified_base 2: mod_base = OTHER; note = 2'-fluorocytidine-3'-phosphorothioate
  modified_base 3: mod_base = OTHER; note = 2'-O-methyladenosine-3'-phosphate
  modified_base 4: mod_base = OTHER; note = 2'-O-methyluridine-3'-phosphate
  modified_base 5: mod_base = OTHER; note = 2'-O-methylcytidine-3'-phosphate
  modified_base 6: mod_base = OTHER; note = 2'-fluoroadenosine-3'-phosphate
  modified_base 7: mod_base = OTHER; note = 2'-O-methylguanosine-3'-phosphate
  modified_base 8: mod_base = OTHER; note = 2'-fluorouridine-3'-phosphate
  modified_base 9: mod_base = OTHER; note = 2'-fluoroguanosine-3'-phosphate
  modified_base 10: mod_base = OTHER; note = 2'-O-methylcytidine-3'-phosphate
  modified_base 11: mod_base = OTHER; note = 2'-O-methylcytidine-3'-phosphate
  modified_base 12: mod_base = OTHER; note = 2'-O-methyluridine-3'-phosphate
  modified_base 13: mod_base = OTHER; note = 2'-O-methyluridine-3'-phosphate
  modified_base 14: mod_base = OTHER; note = 2'-fluorouridine-3'-phosphate
  modified_base 15: mod_base = OTHER; note = 2'-O-methylcytidine-3'-phosphate
  modified_base 16: mod_base = OTHER; note = 2'-fluorocytidine-3'-phosphate
  modified_base 17: mod_base = OTHER; note = 2'-O-methylguanosine-3'-phosphate
  modified_base 18: mod_base = OTHER; note = 2'-O-methylcytidine-3'-phosphate
  modified_base 19: mod_base = OTHER; note = 2'-O-methyladenosine-3'-phosphate
  modified_base 20: mod_base = OTHER; note = 2'-O-methylcytidine-3'-phosphate
  modified_base 21: mod_base = OTHER; note = 2'-O-methyladenosine-3'-phosphorothioate
  modified_base 22: mod_base = OTHER; note = 2'-O-methylcytidine-3'-phosphorothioate
  modified_base 23: mod_base = OTHER; note = 2'-O-methylcytidine-3'-phosphate
acatcagtgcctttccgcacacc

SEQ ID NO: 2378 - RNA, 21 nt, synthetic construct
  source 1..21: mol_type = other RNA; note = Description of Artificial Sequence: Synthetic oligonucleotide
  modified_base 1: mod_base = OTHER; note = 2'-O-methyladenosine-3'-phosphorothioate
  modified_base 2: mod_base = OTHER; note = 2'-O-methyladenosine-3'-phosphorothioate
  modified_base 3: mod_base = OTHER; note = 2'-O-methyluridine-3'-phosphate
  modified_base 4: mod_base = OTHER; note = 2'-O-methyluridine-3'-phosphate
  modified_base 5: mod_base = OTHER; note = 2'-O-methylguanosine-3'-phosphate
  modified_base 6: mod_base = OTHER; note = 2'-O-methyluridine-3'-phosphate
  modified_base 7: mod_base = OTHER; note = 2'-fluoroadenosine-3'-phosphate
  modified_base 8: mod_base = OTHER; note = 2'-O-methyladenosine-3'-phosphate
  modified_base 9: mod_base = OTHER; note = 2'-fluoroguanosine-3'-phosphate
  modified_base 10: mod_base = OTHER; note = 2'-fluorocytidine-3'-phosphate
  modified_base 11: mod_base = OTHER; note = 2'-fluorouridine-3'-phosphate
  modified_base 12: mod_base = OTHER; note = 2'-O-methylcytidine-3'-phosphate
  modified_base 13: mod_base = OTHER; note = 2'-O-methyladenosine-3'-phosphate
  modified_base 14: mod_base = OTHER; note = 2'-O-methylguanosine-3'-phosphate
  modified_base 15: mod_base = OTHER; note = 2'-O-methylguanosine-3'-phosphate
  modified_base 16: mod_base = OTHER; note = 2'-O-methyluridine-3'-phosphate
  modified_base 17: mod_base = OTHER; note = 2'-O-methyluridine-3'-phosphate
  modified_base 18: mod_base = OTHER; note = 2'-O-methylcytidine-3'-phosphate
  modified_base 19: mod_base = OTHER; note = 2'-O-methyladenosine-3'-phosphate
  modified_base 20: mod_base = OTHER; note = 2'-O-methyladenosine-3'-phosphate
  modified_base 21: mod_base = OTHER; note = 2'-O-methyladenosine-3'-phosphate N-[tris(GalNAc-alkyl)-amidodecanoyl)]-4-hydroxyprolinol Hyp-(GalNAc-alkyl)3
aattgtaagctcaggttcaaa

SEQ ID NO: 2379 - RNA, 23 nt, synthetic construct
  source 1..23: mol_type = other RNA; note = Description of Artificial Sequence: Synthetic oligonucleotide
  modified_base 1: mod_base = OTHER; note = 2'-O-methyluridine-3'-phosphorothioate
  modified_base 2: mod_base = OTHER; note = 2'-fluorouridine -3'-phosphorothioate
  modified_base 3: mod_base = OTHER; note = 2'-O-methyluridine-3'-phosphate
  modified_base 4: mod_base = OTHER; note = 2'-O-methylguanosine-3'-phosphate
  modified_base 5: mod_base = OTHER; note = 2'-O-methyladenosine-3'-phosphate
  modified_base 6: mod_base = OTHER; note = 2'-fluoroadenosine-3'-phosphate
  modified_base 7: mod_base = OTHER; note = 2'-O-methylcytidine-3'-phosphate
  modified_base 8: mod_base = OTHER; note = 2'-fluorocytidine-3'-phosphate
  modified_base 9: mod_base = OTHER; note = 2'-fluorouridine-3'-phosphate
  modified_base 10: mod_base = OTHER; note = 2'-O-methylguanosine-3'-phosphate
  modified_base 11: mod_base = OTHER; note = 2'-O-methyladenosine-3'-phosphate
  modified_base 12: mod_base = OTHER; note = 2'-O-methylguanosine-3'-phosphate
  modified_base 13: mod_base = OTHER; note = 2'-O-methylcytidine-3'-phosphate
  modified_base 14: mod_base = OTHER; note = 2'-fluorouridine-3'-phosphate
  modified_base 15: mod_base = OTHER; note = 2'-O-methyluridine-3'-phosphate
  modified_base 16: mod_base = OTHER; note = 2'-fluoroadenosine-3'-phosphate
  modified_base 17: mod_base = OTHER; note = 2'-O-methylcytidine-3'-phosphate
  modified_base 18: mod_base = OTHER; note = 2'-O-methyladenosine-3'-phosphate
  modified_base 19: mod_base = OTHER; note = 2'-O-methyladenosine-3'-phosphate
  modified_base 20: mod_base = OTHER; note = 2'-O-methyluridine-3'-phosphate
  modified_base 21: mod_base = OTHER; note = 2'-O-methyluridine-3'-phosphorothioate
  modified_base 22: mod_base = OTHER; note = 2'-O-methyluridine-3'-phosphorothioate
  modified_base 23: mod_base = OTHER; note = 2'-O-methyladenosine-3'-phosphate
tttgaacctgagcttacaattta

SEQ ID NO: 2380 - RNA, 21 nt, synthetic construct
  source 1..21: mol_type = other RNA; note = Description of Artificial Sequence: Synthetic oligonucleotide
  modified_base 1: mod_base = OTHER; note = 2'-O-methyladenosine-3'-phosphorothioate
  modified_base 2: mod_base = OTHER; note = 2'-O-methyluridine-3'-phosphorothioate
  modified_base 3: mod_base = OTHER; note = 2'-O-methyluridine-3'-phosphate
  modified_base 4: mod_base = OTHER; note = 2'-O-methylguanosine-3'-phosphate
  modified_base 5: mod_base = OTHER; note = 2'-O-methyluridine-3'-phosphate
  modified_base 6: mod_base = OTHER; note = 2'-O-methyladenosine-3'-phosphate
  modified_base 7: mod_base = OTHER; note = 2'-fluoroadenosine-3'-phosphate
  modified_base 8: mod_base = OTHER; note = 2'-O-methylguanosine-3'-phosphate
  modified_base 9: mod_base = OTHER; note = 2'-fluorocytidine-3'-phosphate
  modified_base 10: mod_base = OTHER; note = 2'-fluorouridine-3'-phosphate
  modified_base 11: mod_base = OTHER; note = 2'-fluorocytidine-3'-phosphate
  modified_base 12: mod_base = OTHER; note = 2'-O-methyladenosine-3'-phosphate
  modified_base 13: mod_base = OTHER; note = 2'-O-methylguanosine-3'-phosphate
  modified_base 14: mod_base = OTHER; note = 2'-O-methylguanosine-3'-phosphate
  modified_base 15: mod_base = OTHER; note = 2'-O-methyluridine-3'-phosphate
  modified_base 16: mod_base = OTHER; note = 2'-O-methyluridine-3'-phosphate
  modified_base 17: mod_base = OTHER; note = 2'-O-methylcytidine-3'-phosphate
  modified_base 18: mod_base = OTHER; note = 2'-O-methyladenosine-3'-phosphate
  modified_base 19: mod_base = OTHER; note = 2'-O-methyladenosine-3'-phosphate
  modified_base 20: mod_base = OTHER; note = 2'-O-methyladenosine-3'-phosphate
  modified_base 21: mod_base = OTHER; note = 2'-O-methylguanosine-3'-phosphate N-[tris(GalNAc-alkyl)-amidodecanoyl)]-4-hydroxyprolinol Hyp-(GalNAc-alkyl)3
attgtaagctcaggttcaaag

SEQ ID NO: 2381 - RNA, 23 nt, synthetic construct
  source 1..23: mol_type = other RNA; note = Description of Artificial Sequence: Synthetic oligonucleotide
  modified_base 1: mod_base = OTHER; note = 2'-O-methylcytidine-3'-phosphorothioate
  modified_base 2: mod_base = OTHER; note = 2'-fluorouridine -3'-phosphorothioate
  modified_base 3: mod_base = OTHER; note = 2'-O-methyluridine-3'-phosphate
  modified_base 4: mod_base = OTHER; note = 2'-O-methyluridine-3'-phosphate
  modified_base 5: mod_base = OTHER; note = 2'-O-methylguanosine-3'-phosphate
  modified_base 6: mod_base = OTHER; note = 2'-fluoroadenosine-3'-phosphate
  modified_base 7: mod_base = OTHER; note = 2'-O-methyladenosine-3'-phosphate
  modified_base 8: mod_base = OTHER; note = 2'-fluorocytidine-3'-phosphate
  modified_base 9: mod_base = OTHER; note = 2'-fluorocytidine-3'-phosphate
  modified_base 10: mod_base = OTHER; note = 2'-O-methyluridine-3'-phosphate
  modified_base 11: mod_base = OTHER; note = 2'-O-methylguanosine-3'-phosphate
  modified_base 12: mod_base = OTHER; note = 2'-O-methyladenosine-3'-phosphate
  modified_base 13: mod_base = OTHER; note = 2'-O-methylguanosine-3'-phosphate
  modified_base 14: mod_base = OTHER; note = 2'-fluorocytidine-3'-phosphate
  modified_base 15: mod_base = OTHER; note = 2'-O-methyluridine-3'-phosphate
  modified_base 16: mod_base = OTHER; note = 2'-fluorouridine-3'-phosphate
  modified_base 17: mod_base = OTHER; note = 2'-O-methyladenosine-3'-phosphate
  modified_base 18: mod_base = OTHER; note = 2'-O-methylcytidine-3'-phosphate
  modified_base 19: mod_base = OTHER; note = 2'-O-methyladenosine-3'-phosphate
  modified_base 20: mod_base = OTHER; note = 2'-O-methyladenosine-3'-phosphate
  modified_base 21: mod_base = OTHER; note = 2'-O-methyluridine-3'-phosphorothioate
  modified_base 22: mod_base = OTHER; note = 2'-O-methyluridine-3'-phosphorothioate
  modified_base 23: mod_base = OTHER; note = 2'-O-methyluridine-3'-phosphate
ctttgaacctgagcttacaattt

SEQ ID NO: 2382 - RNA, 21 nt, synthetic construct
  source 1..21: mol_type = other RNA; note = Description of Artificial Sequence: Synthetic oligonucleotide
  modified_base 1: mod_base = OTHER; note = 2'-O-methylcytidine-3'-phosphorothioate
  modified_base 2: mod_base = OTHER; note = 2'-O-methyluridine-3'-phosphorothioate
  modified_base 3: mod_base = OTHER; note = 2'-O-methyluridine-3'-phosphate
  modified_base 4: mod_base = OTHER; note = 2'-O-methyladenosine-3'-phosphate
  modified_base 5: mod_base = OTHER; note = 2'-O-methyladenosine-3'-phosphate
  modified_base 6: mod_base = OTHER; note = 2'-O-methyladenosine-3'-phosphate
  modified_base 7: mod_base = OTHER; note = 2'-fluorouridine-3'-phosphate
  modified_base 8: mod_base = OTHER; note = 2'-O-methyluridine-3'-phosphate
  modified_base 9: mod_base = OTHER; note = 2'-fluoroguanosine-3'-phosphate
  modified_base 10: mod_base = OTHER; note = 2'-fluorouridine-3'-phosphate
  modified_base 11: mod_base = OTHER; note = 2'-fluoroadenosine-3'-phosphate
  modified_base 12: mod_base = OTHER; note = 2'-O-methyladenosine-3'-phosphate
  modified_base 13: mod_base = OTHER; note = 2'-O-methylguanosine-3'-phosphate
  modified_base 14: mod_base = OTHER; note = 2'-O-methylcytidine-3'-phosphate
  modified_base 15: mod_base = OTHER; note = 2'-O-methyluridine-3'-phosphate
  modified_base 16: mod_base = OTHER; note = 2'-O-methylcytidine-3'-phosphate
  modified_base 17: mod_base = OTHER; note = 2'-O-methyladenosine-3'-phosphate
  modified_base 18: mod_base = OTHER; note = 2'-O-methylguanosine-3'-phosphate
  modified_base 19: mod_base = OTHER; note = 2'-O-methylguanosine-3'-phosphate
  modified_base 20: mod_base = OTHER; note = 2'-O-methyluridine-3'-phosphate
  modified_base 21: mod_base = OTHER; note = 2'-O-methyluridine-3'-phosphate N-[tris(GalNAc-alkyl)-amidodecanoyl)]-4-hydroxyprolinol Hyp-(GalNAc-alkyl)3
cttaaattgtaagctcaggtt

SEQ ID NO: 2383 - RNA, 23 nt, synthetic construct
  source 1..23: mol_type = other RNA; note = Description of Artificial Sequence: Synthetic oligonucleotide
  modified_base 1: mod_base = OTHER; note = 2'-O-methyladenosine-3'-phosphorothioate
  modified_base 2: mod_base = OTHER; note = 2'-fluoroadenosine-3'-phosphorothioate
  modified_base 3: mod_base = OTHER; note = 2'-O-methylcytidine-3'-phosphate
  modified_base 4: mod_base = OTHER; note = 2'-O-methylcytidine-3'-phosphate
  modified_base 5: mod_base = OTHER; note = 2'-O-methyluridine-3'-phosphate
  modified_base 6: mod_base = OTHER; note = 2'-fluoroguanosine-3'-phosphate
  modified_base 7: mod_base = OTHER; note = 2'-O-methyladenosine-3'-phosphate
  modified_base 8: mod_base = OTHER; note = 2'-fluoroguanosine-3'-phosphate
  modified_base 9: mod_base = OTHER; note = 2'-fluorocytidine-3'-phosphate
  modified_base 10: mod_base = OTHER; note = 2'-O-methyluridine-3'-phosphate
  modified_base 11: mod_base = OTHER; note = 2'-O-methyluridine-3'-phosphate
  modified_base 12: mod_base = OTHER; note = 2'-O-methyladenosine-3'-phosphate
  modified_base 13: mod_base = OTHER; note = 2'-O-methylcytidine-3'-phosphate
  modified_base 14: mod_base = OTHER; note = 2'-fluoroadenosine-3'-phosphate
  modified_base 15: mod_base = OTHER; note = 2'-O-methyladenosine-3'-phosphate
  modified_base 16: mod_base = OTHER; note = 2'-fluorouridine-3'-phosphate
  modified_base 17: mod_base = OTHER; note = 2'-O-methyluridine-3'-phosphate
  modified_base 18: mod_base = OTHER; note = 2'-O-methyluridine-3'-phosphate
  modified_base 19: mod_base = OTHER; note = 2'-O-methyladenosine-3'-phosphate
  modified_base 20: mod_base = OTHER; note = 2'-O-methyladenosine-3'-phosphate
  modified_base 21: mod_base = OTHER; note = 2'-O-methylguanosine-3'-phosphorothioate
  modified_base 22: mod_base = OTHER; note = 2'-O-methyladenosine-3'-phosphorothioate
  modified_base 23: mod_base = OTHER; note = 2'-O-methyladenosine-3'-phosphate
aacctgagcttacaatttaagaa

SEQ ID NO: 2384 - RNA, 21 nt, synthetic construct
  source 1..21: mol_type = other RNA; note = Description of Artificial Sequence: Synthetic oligonucleotide
  modified_base 1: mod_base = OTHER; note = 2'-O-methyluridine-3'-phosphorothioate
  modified_base 2: mod_base = OTHER; note = 2'-O-methylcytidine-3'-phosphorothioate
  modified_base 3: mod_base = OTHER; note = 2'-O-methyluridine-3'-phosphate
  modified_base 4: mod_base = OTHER; note = 2'-O-methyluridine-3'-phosphate
  modified_base 5: mod_base = OTHER; note = 2'-O-methyladenosine-3'-phosphate
  modified_base 6: mod_base = OTHER; note = 2'-O-methyladenosine-3'-phosphate
  modified_base 7: mod_base = OTHER; note = 2'-fluoroadenosine-3'-phosphate
  modified_base 8: mod_base = OTHER; note = 2'-O-methyluridine-3'-phosphate
  modified_base 9: mod_base = OTHER; note = 2'-fluorouridine-3'-phosphate
  modified_base 10: mod_base = OTHER; note = 2'-fluoroguanosine-3'-phosphate
  modified_base 11: mod_base = OTHER; note = 2'-fluorouridine-3'-phosphate
  modified_base 12: mod_base = OTHER; note = 2'-O-methyladenosine-3'-phosphate
  modified_base 13: mod_base = OTHER; note = 2'-O-methyladenosine-3'-phosphate
  modified_base 14: mod_base = OTHER; note = 2'-O-methylguanosine-3'-phosphate
  modified_base 15: mod_base = OTHER; note = 2'-O-methylcytidine-3'-phosphate
  modified_base 16: mod_base = OTHER; note = 2'-O-methyluridine-3'-phosphate
  modified_base 17: mod_base = OTHER; note = 2'-O-methylcytidine-3'-phosphate
  modified_base 18: mod_base = OTHER; note = 2'-O-methyladenosine-3'-phosphate
  modified_base 19: mod_base = OTHER; note = 2'-O-methylguanosine-3'-phosphate
  modified_base 20: mod_base = OTHER; note = 2'-O-methylguanosine-3'-phosphate
  modified_base 21: mod_base = OTHER; note = 2'-O-methyluridine-3'-phosphate N-[tris(GalNAc-alkyl)-amidodecanoyl)]-4-hydroxyprolinol Hyp-(GalNAc-alkyl)3
tcttaaattgtaagctcaggt

SEQ ID NO: 2385 - RNA, 23 nt, synthetic construct
  source 1..23: mol_type = other RNA; note = Description of Artificial Sequence: Synthetic oligonucleotide
  modified_base 1: mod_base = OTHER; note = 2'-O-methyladenosine-3'-phosphorothioate
  modified_base 2: mod_base = OTHER; note = 2'-fluorocytidine-3'-phosphorothioate
  modified_base 3: mod_base = OTHER; note = 2'-O-methylcytidine-3'-phosphate
  modified_base 4: mod_base = OTHER; note = 2'-O-methyluridine-3'-phosphate
  modified_base 5: mod_base = OTHER; note = 2'-O-methylguanosine-3'-phosphate
  modified_base 6: mod_base = OTHER; note = 2'-fluoroadenosine-3'-phosphate
  modified_base 7: mod_base = OTHER; note = 2'-O-methylguanosine-3'-phosphate
  modified_base 8: mod_base = OTHER; note = 2'-fluorocytidine-3'-phosphate
  modified_base 9: mod_base = OTHER; note = 2'-fluorouridine-3'-phosphate
  modified_base 10: mod_base = OTHER; note = 2'-O-methyluridine-3'-phosphate
  modified_base 11: mod_base = OTHER; note = 2'-O-methyladenosine-3'-phosphate
  modified_base 12: mod_base = OTHER; note = 2'-O-methylcytidine-3'-phosphate
  modified_base 13: mod_base = OTHER; note = 2'-O-methyladenosine-3'-phosphate
  modified_base 14: mod_base = OTHER; note = 2'-fluoroadenosine-3'-phosphate
  modified_base 15: mod_base = OTHER; note = 2'-O-methyluridine-3'-phosphate
  modified_base 16: mod_base = OTHER; note = 2'-fluorouridine-3'-phosphate
  modified_base 17: mod_base = OTHER; note = 2'-O-methyluridine-3'-phosphate
  modified_base 18: mod_base = OTHER; note = 2'-O-methyladenosine-3'-phosphate
  modified_base 19: mod_base = OTHER; note = 2'-O-methyladenosine-3'-phosphate
  modified_base 20: mod_base = OTHER; note = 2'-O-methylguanosine-3'-phosphate
  modified_base 21: mod_base = OTHER; note = 2'-O-methyladenosine-3'-phosphorothioate
  modified_base 22: mod_base = OTHER; note = 2'-O-methyladenosine-3'-phosphorothioate
  modified_base 23: mod_base = OTHER; note = 2'-O-methylcytidine-3'-phosphate
acctgagcttacaatttaagaac

SEQ ID NO: 2386 - RNA, 21 nt, synthetic construct
  source 1..21: mol_type = other RNA; note = Description of Artificial Sequence: Synthetic oligonucleotide
  modified_base 1: mod_base = OTHER; note = 2'-O-methylguanosine-3'-phosphorothioate
  modified_base 2: mod_base = OTHER; note = 2'-O-methylcytidine-3'-phosphorothioate
  modified_base 3: mod_base = OTHER; note = 2'-O-methyladenosine-3'-phosphate
  modified_base 4: mod_base = OTHER; note = 2'-O-methyladenosine-3'-phosphate
  modified_base 5: mod_base = OTHER; note = 2'-O-methyladenosine-3'-phosphate
  modified_base 6: mod_base = OTHER; note = 2'-O-methylcytidine-3'-phosphate
  modified_base 7: mod_base = OTHER; note = 2'-fluoroadenosine-3'-phosphate
  modified_base 8: mod_base = OTHER; note = 2'-O-methylcytidine-3'-phosphate
  modified_base 9: mod_base = OTHER; note = 2'-fluorouridine-3'-phosphate
  modified_base 10: mod_base = OTHER; note = 2'-fluoroadenosine-3'-phosphate
  modified_base 11: mod_base = OTHER; note = 2'-fluoroadenosine-3'-phosphate
  modified_base 12: mod_base = OTHER; note = 2'-O-methylguanosine-3'-phosphate
  modified_base 13: mod_base = OTHER; note = 2'-O-methylguanosine-3'-phosphate
  modified_base 14: mod_base = OTHER; note = 2'-O-methyluridine-3'-phosphate
  modified_base 15: mod_base = OTHER; note = 2'-O-methylguanosine-3'-phosphate
  modified_base 16: mod_base = OTHER; note = 2'-O-methyladenosine-3'-phosphate
  modified_base 17: mod_base = OTHER; note = 2'-O-methyladenosine-3'-phosphate
  modified_base 18: mod_base = OTHER; note = 2'-O-methyladenosine-3'-phosphate
  modified_base 19: mod_base = OTHER; note = 2'-O-methyladenosine-3'-phosphate
  modified_base 20: mod_base = OTHER; note = 2'-O-methylguanosine-3'-phosphate
  modified_base 21: mod_base = OTHER; note = 2'-O-methyladenosine-3'-phosphate N-[tris(GalNAc-alkyl)-amidodecanoyl)]-4-hydroxyprolinol Hyp-(GalNAc-alkyl)3
gcaaacactaaggtgaaaaga

SEQ ID NO: 2387 - RNA, 23 nt, synthetic construct
  source 1..23: mol_type = other RNA; note = Description of Artificial Sequence: Synthetic oligonucleotide
  modified_base 1: mod_base = OTHER; note = 2'-O-methyluridine-3'-phosphorothioate
  modified_base 2: mod_base = OTHER; note = 2'-fluorocytidine-3'-phosphorothioate
  modified_base 3: mod_base = OTHER; note = 2'-O-methyluridine-3'-phosphate
  modified_base 4: mod_base = OTHER; note = 2'-O-methyluridine-3'-phosphate
  modified_base 5: mod_base = OTHER; note = 2'-O-methyluridine-3'-phosphate
  modified_base 6: mod_base = OTHER; note = 2'-fluorouridine-3'-phosphate
  modified_base 7: mod_base = OTHER; note = 2'-O-methylcytidine-3'-phosphate
  modified_base 8: mod_base = OTHER; note = 2'-fluoroadenosine-3'-phosphate
  modified_base 9: mod_base = OTHER; note = 2'-fluorocytidine-3'-phosphate
  modified_base 10: mod_base = OTHER; note = 2'-O-methylcytidine-3'-phosphate
  modified_base 11: mod_base = OTHER; note = 2'-O-methyluridine-3'-phosphate
  modified_base 12: mod_base = OTHER; note = 2'-O-methyluridine-3'-phosphate
  modified_base 13: mod_base = OTHER; note = 2'-O-methyladenosine-3'-phosphate
  modified_base 14: mod_base = OTHER; note = 2'-fluoroguanosine-3'-phosphate
  modified_base 15: mod_base = OTHER; note = 2'-O-methyluridine-3'-phosphate
  modified_base 16: mod_base = OTHER; note = 2'-fluoroguanosine-3'-phosphate
  modified_base 17: mod_base = OTHER; note = 2'-O-methyluridine-3'-phosphate
  modified_base 18: mod_base = OTHER; note = 2'-O-methyluridine-3'-phosphate
  modified_base 19: mod_base = OTHER; note = 2'-O-methyluridine-3'-phosphate
  modified_base 20: mod_base = OTHER; note = 2'-O-methylguanosine-3'-phosphate
  modified_base 21: mod_base = OTHER; note = 2'-O-methylcytidine-3'-phosphorothioate
  modified_base 22: mod_base = OTHER; note = 2'-O-methyluridine-3'-phosphorothioate
  modified_base 23: mod_base = OTHER; note = 2'-O-methyladenosine-3'-phosphate
tcttttcaccttagtgtttgcta

SEQ ID NO: 2388 - RNA, 21 nt, synthetic construct
  source 1..21: mol_type = other RNA; note = Description of Artificial Sequence: Synthetic oligonucleotide
  modified_base 1: mod_base = OTHER; note = 2'-O-methylcytidine-3'-phosphorothioate
  modified_base 2: mod_base = OTHER; note = 2'-O-methyladenosine-3'-phosphorothioate
  modified_base 3: mod_base = OTHER; note = 2'-O-methyladenosine-3'-phosphate
  modified_base 4: mod_base = OTHER; note = 2'-O-methyladenosine-3'-phosphate
  modified_base 5: mod_base = OTHER; note = 2'-O-methylcytidine-3'-phosphate
  modified_base 6: mod_base = OTHER; note = 2'-O-methyladenosine-3'-phosphate
  modified_base 7: mod_base = OTHER; note = 2'-fluorocytidine-3'-phosphate
  modified_base 8: mod_base = OTHER; note = 2'-O-methyluridine-3'-phosphate
  modified_base 9: mod_base = OTHER; note = 2'-fluoroadenosine-3'-phosphate
  modified_base 10: mod_base = OTHER; note = 2'-fluoroadenosine-3'-phosphate
  modified_base 11: mod_base = OTHER; note = 2'-fluoroguanosine-3'-phosphate
  modified_base 12: mod_base = OTHER; note = 2'-O-methylguanosine-3'-phosphate
  modified_base 13: mod_base = OTHER; note = 2'-O-methyluridine-3'-phosphate
  modified_base 14: mod_base = OTHER; note = 2'-O-methylguanosine-3'-phosphate
  modified_base 15: mod_base = OTHER; note = 2'-O-methyladenosine-3'-phosphate
  modified_base 16: mod_base = OTHER; note = 2'-O-methyladenosine-3'-phosphate
  modified_base 17: mod_base = OTHER; note = 2'-O-methyladenosine-3'-phosphate
  modified_base 18: mod_base = OTHER; note = 2'-O-methyladenosine-3'-phosphate
  modified_base 19: mod_base = OTHER; note = 2'-O-methylguanosine-3'-phosphate
  modified_base 20: mod_base = OTHER; note = 2'-O-methyladenosine-3'-phosphate
  modified_base 21: mod_base = OTHER; note = 2'-O-methyluridine-3'-phosphate N-[tris(GalNAc-alkyl)-amidodecanoyl)]-4-hydroxyprolinol Hyp-(GalNAc-alkyl)3
caaacactaaggtgaaaagat

SEQ ID NO: 2389 - RNA, 23 nt, synthetic construct
  source 1..23: mol_type = other RNA; note = Description of Artificial Sequence: Synthetic oligonucleotide
  modified_base 1: mod_base = OTHER; note = 2'-O-methyladenosine-3'-phosphorothioate
  modified_base 2: mod_base = OTHER; note = 2'-fluorouridine -3'-phosphorothioate
  modified_base 3: mod_base = OTHER; note = 2'-O-methylcytidine-3'-phosphate
  modified_base 4: mod_base = OTHER; note = 2'-O-methyluridine-3'-phosphate
  modified_base 5: mod_base = OTHER; note = 2'-O-methyluridine-3'-phosphate
  modified_base 6: mod_base = OTHER; note = 2'-fluorouridine-3'-phosphate
  modified_base 7: mod_base = OTHER; note = 2'-O-methyluridine-3'-phosphate
  modified_base 8: mod_base = OTHER; note = 2'-fluorocytidine-3'-phosphate
  modified_base 9: mod_base = OTHER; note = 2'-fluoroadenosine-3'-phosphate
  modified_base 10: mod_base = OTHER; note = 2'-O-methylcytidine-3'-phosphate
  modified_base 11: mod_base = OTHER; note = 2'-O-methylcytidine-3'-phosphate
  modified_base 12: mod_base = OTHER; note = 2'-O-methyluridine-3'-phosphate
  modified_base 13: mod_base = OTHER; note = 2'-O-methyluridine-3'-phosphate
  modified_base 14: mod_base = OTHER; note = 2'-fluoroadenosine-3'-phosphate
  modified_base 15: mod_base = OTHER; note = 2'-O-methylguanosine-3'-phosphate
  modified_base 16: mod_base = OTHER; note = 2'-fluorouridine-3'-phosphate
  modified_base 17: mod_base = OTHER; note = 2'-O-methylguanosine-3'-phosphate
  modified_base 18: mod_base = OTHER; note = 2'-O-methyluridine-3'-phosphate
  modified_base 19: mod_base = OTHER; note = 2'-O-methyluridine-3'-phosphate
  modified_base 20: mod_base = OTHER; note = 2'-O-methyluridine-3'-phosphate
  modified_base 21: mod_base = OTHER; note = 2'-O-methylguanosine-3'-phosphorothioate
  modified_base 22: mod_base = OTHER; note = 2'-O-methylcytidine-3'-phosphorothioate
  modified_base 23: mod_base = OTHER; note = 2'-O-methyluridine-3'-phosphate
atcttttcaccttagtgtttgct

SEQ ID NO: 2390 - RNA, 21 nt, synthetic construct
  source 1..21: mol_type = other RNA; note = Description of Artificial Sequence: Synthetic oligonucleotide
  modified_base 1: mod_base = OTHER; note = 2'-O-methylguanosine-3'-phosphorothioate
  modified_base 2: mod_base = OTHER; note = 2'-O-methylguanosine-3'-phosphorothioate
  modified_base 3: mod_base = OTHER; note = 2'-O-methyluridine-3'-phosphate
  modified_base 4: mod_base = OTHER; note = 2'-O-methyladenosine-3'-phosphate
  modified_base 5: mod_base = OTHER; note = 2'-O-methylguanosine-3'-phosphate
  modified_base 6: mod_base = OTHER; note = 2'-O-methylcytidine-3'-phosphate
  modified_base 7: mod_base = OTHER; note = 2'-fluoroadenosine-3'-phosphate
  modified_base 8: mod_base = OTHER; note = 2'-O-methyladenosine-3'-phosphate
  modified_base 9: mod_base = OTHER; note = 2'-fluoroadenosine-3'-phosphate
  modified_base 10: mod_base = OTHER; note = 2'-fluorocytidine-3'-phosphate
  modified_base 11: mod_base = OTHER; note = 2'-fluoroadenosine-3'-phosphate
  modified_base 12: mod_base = OTHER; note = 2'-O-methylcytidine-3'-phosphate
  modified_base 13: mod_base = OTHER; note = 2'-O-methyluridine-3'-phosphate
  modified_base 14: mod_base = OTHER; note = 2'-O-methyladenosine-3'-phosphate
  modified_base 15: mod_base = OTHER; note = 2'-O-methyladenosine-3'-phosphate
  modified_base 16: mod_base = OTHER; note = 2'-O-methylguanosine-3'-phosphate
  modified_base 17: mod_base = OTHER; note = 2'-O-methylguanosine-3'-phosphate
  modified_base 18: mod_base = OTHER; note = 2'-O-methyluridine-3'-phosphate
  modified_base 19: mod_base = OTHER; note = 2'-O-methylguanosine-3'-phosphate
  modified_base 20: mod_base = OTHER; note = 2'-O-methyladenosine-3'-phosphate
  modified_base 21: mod_base = OTHER; note = 2'-O-methyladenosine-3'-phosphate N-[tris(GalNAc-alkyl)-amidodecanoyl)]-4-hydroxyprolinol Hyp-(GalNAc-alkyl)3
ggtagcaaacactaaggtgaa

SEQ ID NO: 2391 - RNA, 23 nt, synthetic construct
  source 1..23: mol_type = other RNA; note = Description of Artificial Sequence: Synthetic oligonucleotide
  modified_base 1: mod_base = OTHER; note = 2'-O-methyluridine-3'-phosphorothioate
  modified_base 2: mod_base = OTHER; note = 2'-fluorouridine -3'-phosphorothioate
  modified_base 3: mod_base = OTHER; note = 2'-O-methylcytidine-3'-phosphate
  modified_base 4: mod_base = OTHER; note = 2'-O-methyladenosine-3'-phosphate
  modified_base 5: mod_base = OTHER; note = 2'-O-methylcytidine-3'-phosphate
  modified_base 6: mod_base = OTHER; note = 2'-fluorocytidine-3'-phosphate
  modified_base 7: mod_base = OTHER; note = 2'-O-methyluridine-3'-phosphate
  modified_base 8: mod_base = OTHER; note = 2'-fluorouridine-3'-phosphate
  modified_base 9: mod_base = OTHER; note = 2'-fluoroadenosine-3'-phosphate
  modified_base 10: mod_base = OTHER; note = 2'-O-methylguanosine-3'-phosphate
  modified_base 11: mod_base = OTHER; note = 2'-O-methyluridine-3'-phosphate
  modified_base 12: mod_base = OTHER; note = 2'-O-methylguanosine-3'-phosphate
  modified_base 13: mod_base = OTHER; note = 2'-O-methyluridine-3'-phosphate
  modified_base 14: mod_base = OTHER; note = 2'-fluorouridine-3'-phosphate
  modified_base 15: mod_base = OTHER; note = 2'-O-methyluridine-3'-phosphate
  modified_base 16: mod_base = OTHER; note = 2'-fluoroguanosine-3'-phosphate
  modified_base 17: mod_base = OTHER; note = 2'-O-methylcytidine-3'-phosphate
  modified_base 18: mod_base = OTHER; note = 2'-O-methyluridine-3'-phosphate
  modified_base 19: mod_base = OTHER; note = 2'-O-methyladenosine-3'-phosphate
  modified_base 20: mod_base = OTHER; note = 2'-O-methylcytidine-3'-phosphate
  modified_base 21: mod_base = OTHER; note = 2'-O-methylcytidine-3'-phosphorothioate
  modified_base 22: mod_base = OTHER; note = 2'-O-methyluridine-3'-phosphorothioate
  modified_base 23: mod_base = OTHER; note = 2'-O-methylcytidine-3'-phosphate
ttcaccttagtgtttgctacctc

SEQ ID NO: 2392 - RNA, 21 nt, synthetic construct
  source 1..21: mol_type = other RNA; note = Description of Artificial Sequence: Synthetic oligonucleotide
  modified_base 1: mod_base = OTHER; note = 2'-O-methyladenosine-3'-phosphorothioate
  modified_base 2: mod_base = OTHER; note = 2'-O-methylguanosine-3'-phosphorothioate
  modified_base 3: mod_base = OTHER; note = 2'-O-methylguanosine-3'-phosphate
  modified_base 4: mod_base = OTHER; note = 2'-O-methyluridine-3'-phosphate
  modified_base 5: mod_base = OTHER; note = 2'-O-methyladenosine-3'-phosphate
  modified_base 6: mod_base = OTHER; note = 2'-O-methylguanosine-3'-phosphate
  modified_base 7: mod_base = OTHER; note = 2'-fluorocytidine-3'-phosphate
  modified_base 8: mod_base = OTHER; note = 2'-O-methyladenosine-3'-phosphate
  modified_base 9: mod_base = OTHER; note = 2'-fluoroadenosine-3'-phosphate
  modified_base 10: mod_base = OTHER; note = 2'-fluoroadenosine-3'-phosphate
  modified_base 11: mod_base = OTHER; note = 2'-fluorocytidine-3'-phosphate
  modified_base 12: mod_base = OTHER; note = 2'-O-methyladenosine-3'-phosphate
  modified_base 13: mod_base = OTHER; note = 2'-O-methylcytidine-3'-phosphate
  modified_base 14: mod_base = OTHER; note = 2'-O-methyluridine-3'-phosphate
  modified_base 15: mod_base = OTHER; note = 2'-O-methyladenosine-3'-phosphate
  modified_base 16: mod_base = OTHER; note = 2'-O-methyladenosine-3'-phosphate
  modified_base 17: mod_base = OTHER; note = 2'-O-methylguanosine-3'-phosphate
  modified_base 18: mod_base = OTHER; note = 2'-O-methylguanosine-3'-phosphate
  modified_base 19: mod_base = OTHER; note = 2'-O-methyluridine-3'-phosphate
  modified_base 20: mod_base = OTHER; note = 2'-O-methylguanosine-3'-phosphate
  modified_base 21: mod_base = OTHER; note = 2'-O-methyladenosine-3'-phosphate N-[tris(GalNAc-alkyl)-amidodecanoyl)]-4-hydroxyprolinol Hyp-(GalNAc-alkyl)3
aggtagcaaacactaaggtga

SEQ ID NO: 2393 - RNA, 23 nt, synthetic construct
  source 1..23: mol_type = other RNA; note = Description of Artificial Sequence: Synthetic oligonucleotide
  modified_base 1: mod_base = OTHER; note = 2'-O-methyluridine-3'-phosphorothioate
  modified_base 2: mod_base = OTHER; note = 2'-fluorocytidine-3'-phosphorothioate
  modified_base 3: mod_base = OTHER; note = 2'-O-methyladenosine-3'-phosphate
  modified_base 4: mod_base = OTHER; note = 2'-O-methylcytidine-3'-phosphate
  modified_base 5: mod_base = OTHER; note = 2'-O-methylcytidine-3'-phosphate
  modified_base 6: mod_base = OTHER; note = 2'-fluorouridine-3'-phosphate
  modified_base 7: mod_base = OTHER; note = 2'-O-methyluridine-3'-phosphate
  modified_base 8: mod_base = OTHER; note = 2'-fluoroadenosine-3'-phosphate
  modified_base 9: mod_base = OTHER; note = 2'-fluoroguanosine-3'-phosphate
  modified_base 10: mod_base = OTHER; note = 2'-O-methyluridine-3'-phosphate
  modified_base 11: mod_base = OTHER; note = 2'-O-methylguanosine-3'-phosphate
  modified_base 12: mod_base = OTHER; note = 2'-O-methyluridine-3'-phosphate
  modified_base 13: mod_base = OTHER; note = 2'-O-methyluridine-3'-phosphate
  modified_base 14: mod_base = OTHER; note = 2'-fluorouridine-3'-phosphate
  modified_base 15: mod_base = OTHER; note = 2'-O-methylguanosine-3'-phosphate
  modified_base 16: mod_base = OTHER; note = 2'-fluorocytidine-3'-phosphate
  modified_base 17: mod_base = OTHER; note = 2'-O-methyluridine-3'-phosphate
  modified_base 18: mod_base = OTHER; note = 2'-O-methyladenosine-3'-phosphate
  modified_base 19: mod_base = OTHER; note = 2'-O-methylcytidine-3'-phosphate
  modified_base 20: mod_base = OTHER; note = 2'-O-methylcytidine-3'-phosphate
  modified_base 21: mod_base = OTHER; note = 2'-O-methyluridine-3'-phosphorothioate
  modified_base 22: mod_base = OTHER; note = 2'-O-methylcytidine-3'-phosphorothioate
  modified_base 23: mod_base = OTHER; note = 2'-O-methylcytidine-3'-phosphate
tcaccttagtgtttgctacctcc

SEQ ID NO: 2394 - RNA, 21 nt, synthetic construct
  source 1..21: mol_type = other RNA; note = Description of Artificial Sequence: Synthetic oligonucleotide
  modified_base 1: mod_base = OTHER; note = 2'-O-methyladenosine-3'-phosphorothioate
  modified_base 2: mod_base = OTHER; note = 2'-O-methylguanosine-3'-phosphorothioate
  modified_base 3: mod_base = OTHER; note = 2'-O-methylguanosine-3'-phosphate
  modified_base 4: mod_base = OTHER; note = 2'-O-methyluridine-3'-phosphate
  modified_base 5: mod_base = OTHER; note = 2'-O-methyladenosine-3'-phosphate
  modified_base 6: mod_base = OTHER; note = 2'-O-methylguanosine-3'-phosphate
  modified_base 7: mod_base = OTHER; note = 2'-fluorocytidine-3'-phosphate
  modified_base 8: mod_base = OTHER; note = 2'-O-methyladenosine-3'-phosphate
  modified_base 9: mod_base = OTHER; note = 2'-fluoroadenosine-3'-phosphate
  modified_base 10: mod_base = OTHER; note = 2'-fluoroadenosine-3'-phosphate
  modified_base 11: mod_base = OTHER; note = 2'-fluorocytidine-3'-phosphate
  modified_base 12: mod_base = OTHER; note = 2'-O-methyladenosine-3'-phosphate
  modified_base 13: mod_base = OTHER; note = 2'-O-methylcytidine-3'-phosphate
  modified_base 14: mod_base = OTHER; note = 2'-O-methyluridine-3'-phosphate
  modified_base 15: mod_base = OTHER; note = 2'-O-methyladenosine-3'-phosphate
  modified_base 16: mod_base = OTHER; note = 2'-O-methyladenosine-3'-phosphate
  modified_base 17: mod_base = OTHER; note = 2'-O-methylguanosine-3'-phosphate
  modified_base 18: mod_base = OTHER; note = 2'-O-methylguanosine-3'-phosphate
  modified_base 19: mod_base = OTHER; note = 2'-O-methyluridine-3'-phosphate
  modified_base 20: mod_base = OTHER; note = 2'-O-methylguanosine-3'-phosphate
  modified_base 21: mod_base = OTHER; note = 2'-O-methyladenosine-3'-phosphate N-[tris(GalNAc-alkyl)-amidodecanoyl)]-4-hydroxyprolinol Hyp-(GalNAc-alkyl)3
aggtagcaaacactaaggtga

SEQ ID NO: 2395 - RNA, 23 nt, synthetic construct
  source 1..23: mol_type = other RNA; note = Description of Artificial Sequence: Synthetic oligonucleotide
  modified_base 1: mod_base = OTHER; note = 2'-O-methyluridine-3'-phosphorothioate
  modified_base 2: mod_base = OTHER; note = 2'-fluorocytidine-3'-phosphorothioate
  modified_base 3: mod_base = OTHER; note = 2'-O-methyladenosine-3'-phosphate
  modified_base 4: mod_base = OTHER; note = 2'-O-methylcytidine-3'-phosphate
  modified_base 5: mod_base = OTHER; note = 2'-O-methylcytidine-3'-phosphate
  modified_base 6: mod_base = OTHER; note = 2'-fluorouridine-3'-phosphate
  modified_base 7: mod_base = OTHER; note = 2'-O-methyluridine-3'-phosphate
  modified_base 8: mod_base = OTHER; note = 2'-fluoroadenosine-3'-phosphate
  modified_base 9: mod_base = OTHER; note = 2'-fluoroguanosine-3'-phosphate
  modified_base 10: mod_base = OTHER; note = 2'-O-methyluridine-3'-phosphate
  modified_base 11: mod_base = OTHER; note = 2'-O-methylguanosine-3'-phosphate
  modified_base 12: mod_base = OTHER; note = 2'-O-methyluridine-3'-phosphate
  modified_base 13: mod_base = OTHER; note = 2'-O-methyluridine-3'-phosphate
  modified_base 14: mod_base = OTHER; note = 2'-fluorouridine-3'-phosphate
  modified_base 15: mod_base = OTHER; note = 2'-O-methylguanosine-3'-phosphate
  modified_base 16: mod_base = OTHER; note = 2'-fluorocytidine-3'-phosphate
  modified_base 17: mod_base = OTHER; note = 2'-O-methyluridine-3'-phosphate
  modified_base 18: mod_base = OTHER; note = 2'-O-methyladenosine-3'-phosphate
  modified_base 19: mod_base = OTHER; note = 2'-O-methylcytidine-3'-phosphate
  modified_base 20: mod_base = OTHER; note = 2'-O-methylcytidine-3'-phosphate
  modified_base 21: mod_base = OTHER; note = 2'-O-methyluridine-3'-phosphorothioate
  modified_base 22: mod_base = OTHER; note = 2'-O-methylcytidine-3'-phosphorothioate
  modified_base 23: mod_base = OTHER; note = 2'-O-methylcytidine-3'-phosphate
tcaccttagtgtttgctacctcc

SEQ ID NO: 2396 - RNA, 21 nt, synthetic construct
  source 1..21: mol_type = other RNA; note = Description of Artificial Sequence: Synthetic oligonucleotide
  modified_base 1: mod_base = OTHER; note = 2'-O-methylguanosine-3'-phosphorothioate
  modified_base 2: mod_base = OTHER; note = 2'-O-methylguanosine-3'-phosphorothioate
  modified_base 3: mod_base = OTHER; note = 2'-O-methyluridine-3'-phosphate
  modified_base 4: mod_base = OTHER; note = 2'-O-methyladenosine-3'-phosphate
  modified_base 5: mod_base = OTHER; note = 2'-O-methylguanosine-3'-phosphate
  modified_base 6: mod_base = OTHER; note = 2'-O-methylcytidine-3'-phosphate
  modified_base 7: mod_base = OTHER; note = 2'-fluoroadenosine-3'-phosphate
  modified_base 8: mod_base = OTHER; note = 2'-O-methyladenosine-3'-phosphate
  modified_base 9: mod_base = OTHER; note = 2'-fluoroadenosine-3'-phosphate
  modified_base 10: mod_base = OTHER; note = 2'-fluorocytidine-3'-phosphate
  modified_base 11: mod_base = OTHER; note = 2'-fluoroadenosine-3'-phosphate
  modified_base 12: mod_base = OTHER; note = 2'-O-methylcytidine-3'-phosphate
  modified_base 13: mod_base = OTHER; note = 2'-O-methyluridine-3'-phosphate
  modified_base 14: mod_base = OTHER; note = 2'-O-methyladenosine-3'-phosphate
  modified_base 15: mod_base = OTHER; note = 2'-O-methyladenosine-3'-phosphate
  modified_base 16: mod_base = OTHER; note = 2'-O-methylguanosine-3'-phosphate
  modified_base 17: mod_base = OTHER; note = 2'-O-methylguanosine-3'-phosphate
  modified_base 18: mod_base = OTHER; note = 2'-O-methyluridine-3'-phosphate
  modified_base 19: mod_base = OTHER; note = 2'-O-methylguanosine-3'-phosphate
  modified_base 20: mod_base = OTHER; note = 2'-O-methyladenosine-3'-phosphate
  modified_base 21: mod_base = OTHER; note = 2'-O-methyladenosine-3'-phosphate N-[tris(GalNAc-alkyl)-amidodecanoyl)]-4-hydroxyprolinol Hyp-(GalNAc-alkyl)3
ggtagcaaacactaaggtgaa

SEQ ID NO: 2397 - RNA, 23 nt, synthetic construct
  source 1..23: mol_type = other RNA; note = Description of Artificial Sequence: Synthetic oligonucleotide
  modified_base 1: mod_base = OTHER; note = 2'-O-methyluridine-3'-phosphorothioate
  modified_base 2: mod_base = OTHER; note = 2'-fluorouridine -3'-phosphorothioate
  modified_base 3: mod_base = OTHER; note = 2'-O-methylcytidine-3'-phosphate
  modified_base 4: mod_base = OTHER; note = 2'-O-methyladenosine-3'-phosphate
  modified_base 5: mod_base = OTHER; note = 2'-O-methylcytidine-3'-phosphate
  modified_base 6: mod_base = OTHER; note = 2'-fluorocytidine-3'-phosphate
  modified_base 7: mod_base = OTHER; note = 2'-O-methyluridine-3'-phosphate
  modified_base 8: mod_base = OTHER; note = 2'-fluorouridine-3'-phosphate
  modified_base 9: mod_base = OTHER; note = 2'-fluoroadenosine-3'-phosphate
  modified_base 10: mod_base = OTHER; note = 2'-O-methylguanosine-3'-phosphate
  modified_base 11: mod_base = OTHER; note = 2'-O-methyluridine-3'-phosphate
  modified_base 12: mod_base = OTHER; note = 2'-O-methylguanosine-3'-phosphate
  modified_base 13: mod_base = OTHER; note = 2'-O-methyluridine-3'-phosphate
  modified_base 14: mod_base = OTHER; note = 2'-fluorouridine-3'-phosphate
  modified_base 15: mod_base = OTHER; note = 2'-O-methyluridine-3'-phosphate
  modified_base 16: mod_base = OTHER; note = 2'-fluoroguanosine-3'-phosphate
  modified_base 17: mod_base = OTHER; note = 2'-O-methylcytidine-3'-phosphate
  modified_base 18: mod_base = OTHER; note = 2'-O-methyluridine-3'-phosphate
  modified_base 19: mod_base = OTHER; note = 2'-O-methyladenosine-3'-phosphate
  modified_base 20: mod_base = OTHER; note = 2'-O-methylcytidine-3'-phosphate
  modified_base 21: mod_base = OTHER; note = 2'-O-methylcytidine-3'-phosphorothioate
  modified_base 22: mod_base = OTHER; note = 2'-O-methyluridine-3'-phosphorothioate
  modified_base 23: mod_base = OTHER; note = 2'-O-methylcytidine-3'-phosphate
ttcaccttagtgtttgctacctc

SEQ ID NO: 2398 - RNA, 21 nt, synthetic construct
  source 1..21: mol_type = other RNA; note = Description of Artificial Sequence: Synthetic oligonucleotide
  modified_base 1: mod_base = OTHER; note = 2'-O-methyluridine-3'-phosphorothioate
  modified_base 2: mod_base = OTHER; note = 2'-O-methyluridine-3'-phosphorothioate
  modified_base 3: mod_base = OTHER; note = 2'-O-methylguanosine-3'-phosphate
  modified_base 4: mod_base = OTHER; note = 2'-O-methylguanosine-3'-phosphate
  modified_base 5: mod_base = OTHER; note = 2'-O-methyladenosine-3'-phosphate
  modified_base 6: mod_base = OTHER; note = 2'-O-methylguanosine-3'-phosphate
  modified_base 7: mod_base = OTHER; note = 2'-fluoroguanosine-3'-phosphate
  modified_base 8: mod_base = OTHER; note = 2'-O-methyluridine-3'-phosphate
  modified_base 9: mod_base = OTHER; note = 2'-fluoroadenosine-3'-phosphate
  modified_base 10: mod_base = OTHER; note = 2'-fluoroguanosine-3'-phosphate
  modified_base 11: mod_base = OTHER; note = 2'-fluorocytidine-3'-phosphate
  modified_base 12: mod_base = OTHER; note = 2'-O-methyladenosine-3'-phosphate
  modified_base 13: mod_base = OTHER; note = 2'-O-methyladenosine-3'-phosphate
  modified_base 14: mod_base = OTHER; note = 2'-O-methyladenosine-3'-phosphate
  modified_base 15: mod_base = OTHER; note = 2'-O-methylcytidine-3'-phosphate
  modified_base 16: mod_base = OTHER; note = 2'-O-methyladenosine-3'-phosphate
  modified_base 17: mod_base = OTHER; note = 2'-O-methylcytidine-3'-phosphate
  modified_base 18: mod_base = OTHER; note = 2'-O-methyluridine-3'-phosphate
  modified_base 19: mod_base = OTHER; note = 2'-O-methyladenosine-3'-phosphate
  modified_base 20: mod_base = OTHER; note = 2'-O-methyladenosine-3'-phosphate
  modified_base 21: mod_base = OTHER; note = 2'-O-methylguanosine-3'-phosphate N-[tris(GalNAc-alkyl)-amidodecanoyl)]-4-hydroxyprolinol Hyp-(GalNAc-alkyl)3
ttggaggtagcaaacactaag

SEQ ID NO: 2399 - RNA, 23 nt, synthetic construct
  source 1..23: mol_type = other RNA; note = Description of Artificial Sequence: Synthetic oligonucleotide
  modified_base 1: mod_base = OTHER; note = 2'-O-methylcytidine-3'-phosphorothioate
  modified_base 2: mod_base = OTHER; note = 2'-fluorouridine -3'-phosphorothioate
  modified_base 3: mod_base = OTHER; note = 2'-O-methyluridine-3'-phosphate
  modified_base 4: mod_base = OTHER; note = 2'-O-methyladenosine-3'-phosphate
  modified_base 5: mod_base = OTHER; note = 2'-O-methylguanosine-3'-phosphate
  modified_base 6: mod_base = OTHER; note = 2'-fluorouridine-3'-phosphate
  modified_base 7: mod_base = OTHER; note = 2'-O-methylguanosine-3'-phosphate
  modified_base 8: mod_base = OTHER; note = 2'-fluorouridine-3'-phosphate
  modified_base 9: mod_base = OTHER; note = 2'-fluorouridine-3'-phosphate
  modified_base 10: mod_base = OTHER; note = 2'-O-methyluridine-3'-phosphate
  modified_base 11: mod_base = OTHER; note = 2'-O-methylguanosine-3'-phosphate
  modified_base 12: mod_base = OTHER; note = 2'-O-methylcytidine-3'-phosphate
  modified_base 13: mod_base = OTHER; note = 2'-O-methyluridine-3'-phosphate
  modified_base 14: mod_base = OTHER; note = 2'-fluoroadenosine-3'-phosphate
  modified_base 15: mod_base = OTHER; note = 2'-O-methylcytidine-3'-phosphate
  modified_base 16: mod_base = OTHER; note = 2'-fluorocytidine-3'-phosphate
  modified_base 17: mod_base = OTHER; note = 2'-O-methyluridine-3'-phosphate
  modified_base 18: mod_base = OTHER; note = 2'-O-methylcytidine-3'-phosphate
  modified_base 19: mod_base = OTHER; note = 2'-O-methylcytidine-3'-phosphate
  modified_base 20: mod_base = OTHER; note = 2'-O-methyladenosine-3'-phosphate
  modified_base 21: mod_base = OTHER; note = 2'-O-methyladenosine-3'-phosphorothioate
  modified_base 22: mod_base = OTHER; note = 2'-O-methyluridine-3'-phosphorothioate
  modified_base 23: mod_base = OTHER; note = 2'-O-methyluridine-3'-phosphate
cttagtgtttgctacctccaatt

SEQ ID NO: 2400 - RNA, 21 nt, synthetic construct
  source 1..21: mol_type = other RNA; note = Description of Artificial Sequence: Synthetic oligonucleotide
  modified_base 1: mod_base = OTHER; note = 2'-O-methyladenosine-3'-phosphorothioate
  modified_base 2: mod_base = OTHER; note = 2'-O-methyluridine-3'-phosphorothioate
  modified_base 3: mod_base = OTHER; note = 2'-O-methyluridine-3'-phosphate
  modified_base 4: mod_base = OTHER; note = 2'-O-methylguanosine-3'-phosphate
  modified_base 5: mod_base = OTHER; note = 2'-O-methylguanosine-3'-phosphate
  modified_base 6: mod_base = OTHER; note = 2'-O-methyladenosine-3'-phosphate
  modified_base 7: mod_base = OTHER; note = 2'-fluoroguanosine-3'-phosphate
  modified_base 8: mod_base = OTHER; note = 2'-O-methylguanosine-3'-phosphate
  modified_base 9: mod_base = OTHER; note = 2'-fluorouridine-3'-phosphate
  modified_base 10: mod_base = OTHER; note = 2'-fluoroadenosine-3'-phosphate
  modified_base 11: mod_base = OTHER; note = 2'-fluoroguanosine-3'-phosphate
  modified_base 12: mod_base = OTHER; note = 2'-O-methylcytidine-3'-phosphate
  modified_base 13: mod_base = OTHER; note = 2'-O-methyladenosine-3'-phosphate
  modified_base 14: mod_base = OTHER; note = 2'-O-methyladenosine-3'-phosphate
  modified_base 15: mod_base = OTHER; note = 2'-O-methyladenosine-3'-phosphate
  modified_base 16: mod_base = OTHER; note = 2'-O-methylcytidine-3'-phosphate
  modified_base 17: mod_base = OTHER; note = 2'-O-methyladenosine-3'-phosphate
  modified_base 18: mod_base = OTHER; note = 2'-O-methylcytidine-3'-phosphate
  modified_base 19: mod_base = OTHER; note = 2'-O-methyluridine-3'-phosphate
  modified_base 20: mod_base = OTHER; note = 2'-O-methyladenosine-3'-phosphate
  modified_base 21: mod_base = OTHER; note = 2'-O-methyladenosine-3'-phosphate N-[tris(GalNAc-alkyl)-amidodecanoyl)]-4-hydroxyprolinol Hyp-(GalNAc-alkyl)3
attggaggtagcaaacactaa

SEQ ID NO: 2401 - RNA, 23 nt, synthetic construct
  source 1..23: mol_type = other RNA; note = Description of Artificial Sequence: Synthetic oligonucleotide
  modified_base 1: mod_base = OTHER; note = 2'-O-methyluridine-3'-phosphorothioate
  modified_base 2: mod_base = OTHER; note = 2'-fluorouridine -3'-phosphorothioate
  modified_base 3: mod_base = OTHER; note = 2'-O-methyladenosine-3'-phosphate
  modified_base 4: mod_base = OTHER; note = 2'-O-methylguanosine-3'-phosphate
  modified_base 5: mod_base = OTHER; note = 2'-O-methyluridine-3'-phosphate
  modified_base 6: mod_base = OTHER; note = 2'-fluoroguanosine-3'-phosphate
  modified_base 7: mod_base = OTHER; note = 2'-O-methyluridine-3'-phosphate
  modified_base 8: mod_base = OTHER; note = 2'-fluorouridine-3'-phosphate
  modified_base 9: mod_base = OTHER; note = 2'-fluorouridine-3'-phosphate
  modified_base 10: mod_base = OTHER; note = 2'-O-methylguanosine-3'-phosphate
  modified_base 11: mod_base = OTHER; note = 2'-O-methylcytidine-3'-phosphate
  modified_base 12: mod_base = OTHER; note = 2'-O-methyluridine-3'-phosphate
  modified_base 13: mod_base = OTHER; note = 2'-O-methyladenosine-3'-phosphate
  modified_base 14: mod_base = OTHER; note = 2'-fluorocytidine-3'-phosphate
  modified_base 15: mod_base = OTHER; note = 2'-O-methylcytidine-3'-phosphate
  modified_base 16: mod_base = OTHER; note = 2'-fluorouridine-3'-phosphate
  modified_base 17: mod_base = OTHER; note = 2'-O-methylcytidine-3'-phosphate
  modified_base 18: mod_base = OTHER; note = 2'-O-methylcytidine-3'-phosphate
  modified_base 19: mod_base = OTHER; note = 2'-O-methyladenosine-3'-phosphate
  modified_base 20: mod_base = OTHER; note = 2'-O-methyladenosine-3'-phosphate
  modified_base 21: mod_base = OTHER; note = 2'-O-methyluridine-3'-phosphorothioate
  modified_base 22: mod_base = OTHER; note = 2'-O-methyluridine-3'-phosphorothioate
  modified_base 23: mod_base = OTHER; note = 2'-O-methyluridine-3'-phosphate
ttagtgtttgctacctccaattt

SEQ ID NO: 2402 - RNA, 21 nt, synthetic construct
  source 1..21: mol_type = other RNA; note = Description of Artificial Sequence: Synthetic oligonucleotide
  modified_base 1: mod_base = OTHER; note = 2'-O-methyluridine-3'-phosphorothioate
  modified_base 2: mod_base = OTHER; note = 2'-O-methyladenosine-3'-phosphorothioate
  modified_base 3: mod_base = OTHER; note = 2'-O-methyladenosine-3'-phosphate
  modified_base 4: mod_base = OTHER; note = 2'-O-methyladenosine-3'-phosphate
  modified_base 5: mod_base = OTHER; note = 2'-O-methylguanosine-3'-phosphate
  modified_base 6: mod_base = OTHER; note = 2'-O-methyluridine-3'-phosphate
  modified_base 7: mod_base = OTHER; note = 2'-fluoroguanosine-3'-phosphate
  modified_base 8: mod_base = OTHER; note = 2'-O-methylcytidine-3'-phosphate
  modified_base 9: mod_base = OTHER; note = 2'-fluorouridine-3'-phosphate
  modified_base 10: mod_base = OTHER; note = 2'-fluoroguanosine-3'-phosphate
  modified_base 11: mod_base = OTHER; note = 2'-fluorouridine-3'-phosphate
  modified_base 12: mod_base = OTHER; note = 2'-O-methyladenosine-3'-phosphate
  modified_base 13: mod_base = OTHER; note = 2'-O-methyluridine-3'-phosphate
  modified_base 14: mod_base = OTHER; note = 2'-O-methylcytidine-3'-phosphate
  modified_base 15: mod_base = OTHER; note = 2'-O-methylcytidine-3'-phosphate
  modified_base 16: mod_base = OTHER; note = 2'-O-methyluridine-3'-phosphate
  modified_base 17: mod_base = OTHER; note = 2'-O-methyluridine-3'-phosphate
  modified_base 18: mod_base = OTHER; note = 2'-O-methyluridine-3'-phosphate
  modified_base 19: mod_base = OTHER; note = 2'-O-methyladenosine-3'-phosphate
  modified_base 20: mod_base = OTHER; note = 2'-O-methylguanosine-3'-phosphate
  modified_base 21: mod_base = OTHER; note = 2'-O-methyluridine-3'-phosphate N-[tris(GalNAc-alkyl)-amidodecanoyl)]-4-hydroxyprolinol Hyp-(GalNAc-alkyl)3
taaagtgctgtatcctttagt

SEQ ID NO: 2403 - RNA, 23 nt, synthetic construct
  source 1..23: mol_type = other RNA; note = Description of Artificial Sequence: Synthetic oligonucleotide
  modified_base 1: mod_base = OTHER; note = 2'-O-methyladenosine-3'-phosphorothioate
  modified_base 2: mod_base = OTHER; note = 2'-fluorocytidine-3'-phosphorothioate
  modified_base 3: mod_base = OTHER; note = 2'-O-methyluridine-3'-phosphate
  modified_base 4: mod_base = OTHER; note = 2'-O-methyladenosine-3'-phosphate
  modified_base 5: mod_base = OTHER; note = 2'-O-methyladenosine-3'-phosphate
  modified_base 6: mod_base = OTHER; note = 2'-fluoroadenosine-3'-phosphate
  modified_base 7: mod_base = OTHER; note = 2'-O-methylguanosine-3'-phosphate
  modified_base 8: mod_base = OTHER; note = 2'-fluoroguanosine-3'-phosphate
  modified_base 9: mod_base = OTHER; note = 2'-fluoroadenosine-3'-phosphate
  modified_base 10: mod_base = OTHER; note = 2'-O-methyluridine-3'-phosphate
  modified_base 11: mod_base = OTHER; note = 2'-O-methyladenosine-3'-phosphate
  modified_base 12: mod_base = OTHER; note = 2'-O-methylcytidine-3'-phosphate
  modified_base 13: mod_base = OTHER; note = 2'-O-methyladenosine-3'-phosphate
  modified_base 14: mod_base = OTHER; note = 2'-fluoroguanosine-3'-phosphate
  modified_base 15: mod_base = OTHER; note = 2'-O-methylcytidine-3'-phosphate
  modified_base 16: mod_base = OTHER; note = 2'-fluoroadenosine-3'-phosphate
  modified_base 17: mod_base = OTHER; note = 2'-O-methylcytidine-3'-phosphate
  modified_base 18: mod_base = OTHER; note = 2'-O-methyluridine-3'-phosphate
  modified_base 19: mod_base = OTHER; note = 2'-O-methyluridine-3'-phosphate
  modified_base 20: mod_base = OTHER; note = 2'-O-methyluridine-3'-phosphate
  modified_base 21: mod_base = OTHER; note = 2'-O-methyladenosine-3'-phosphorothioate
  modified_base 22: mod_base = OTHER; note = 2'-O-methylguanosine-3'-phosphorothioate
  modified_base 23: mod_base = OTHER; note = 2'-O-methylcytidine-3'-phosphate
actaaaggatacagcactttagc

SEQ ID NO: 2404 - RNA, 21 nt, synthetic construct
  source 1..21: mol_type = other RNA; note = Description of Artificial Sequence: Synthetic oligonucleotide
  modified_base 1: mod_base = OTHER; note = 2'-O-methyladenosine-3'-phosphorothioate
  modified_base 2: mod_base = OTHER; note = 2'-O-methyladenosine-3'-phosphorothioate
  modified_base 3: mod_base = OTHER; note = 2'-O-methyladenosine-3'-phosphate
  modified_base 4: mod_base = OTHER; note = 2'-O-methylguanosine-3'-phosphate
  modified_base 5: mod_base = OTHER; note = 2'-O-methyluridine-3'-phosphate
  modified_base 6: mod_base = OTHER; note = 2'-O-methylguanosine-3'-phosphate
  modified_base 7: mod_base = OTHER; note = 2'-fluorocytidine-3'-phosphate
  modified_base 8: mod_base = OTHER; note = 2'-O-methyluridine-3'-phosphate
  modified_base 9: mod_base = OTHER; note = 2'-fluoroguanosine-3'-phosphate
  modified_base 10: mod_base = OTHER; note = 2'-fluorouridine-3'-phosphate
  modified_base 11: mod_base = OTHER; note = 2'-fluoroadenosine-3'-phosphate
  modified_base 12: mod_base = OTHER; note = 2'-O-methyluridine-3'-phosphate
  modified_base 13: mod_base = OTHER; note = 2'-O-methylcytidine-3'-phosphate
  modified_base 14: mod_base = OTHER; note = 2'-O-methylcytidine-3'-phosphate
  modified_base 15: mod_base = OTHER; note = 2'-O-methyluridine-3'-phosphate
  modified_base 16: mod_base = OTHER; note = 2'-O-methyluridine-3'-phosphate
  modified_base 17: mod_base = OTHER; note = 2'-O-methyluridine-3'-phosphate
  modified_base 18: mod_base = OTHER; note = 2'-O-methyladenosine-3'-phosphate
  modified_base 19: mod_base = OTHER; note = 2'-O-methylguanosine-3'-phosphate
  modified_base 20: mod_base = OTHER; note = 2'-O-methyluridine-3'-phosphate
  modified_base 21: mod_base = OTHER; note = 2'-O-methyladenosine-3'-phosphate N-[tris(GalNAc-alkyl)-amidodecanoyl)]-4-hydroxyprolinol Hyp-(GalNAc-alkyl)3
aaagtgctgtatcctttagta

SEQ ID NO: 2405 - RNA, 23 nt, synthetic construct
  source 1..23: mol_type = other RNA; note = Description of Artificial Sequence: Synthetic oligonucleotide
  modified_base 1: mod_base = OTHER; note = 2'-O-methyluridine-3'-phosphorothioate
  modified_base 2: mod_base = OTHER; note = 2'-fluoroadenosine-3'-phosphorothioate
  modified_base 3: mod_base = OTHER; note = 2'-O-methylcytidine-3'-phosphate
  modified_base 4: mod_base = OTHER; note = 2'-O-methyluridine-3'-phosphate
  modified_base 5: mod_base = OTHER; note = 2'-O-methyladenosine-3'-phosphate
  modified_base 6: mod_base = OTHER; note = 2'-fluoroadenosine-3'-phosphate
  modified_base 7: mod_base = OTHER; note = 2'-O-methyladenosine-3'-phosphate
  modified_base 8: mod_base = OTHER; note = 2'-fluoroguanosine-3'-phosphate
  modified_base 9: mod_base = OTHER; note = 2'-fluoroguanosine-3'-phosphate
  modified_base 10: mod_base = OTHER; note = 2'-O-methyladenosine-3'-phosphate
  modified_base 11: mod_base = OTHER; note = 2'-O-methyluridine-3'-phosphate
  modified_base 12: mod_base = OTHER; note = 2'-O-methyladenosine-3'-phosphate
  modified_base 13: mod_base = OTHER; note = 2'-O-methylcytidine-3'-phosphate
  modified_base 14: mod_base = OTHER; note = 2'-fluoroadenosine-3'-phosphate
  modified_base 15: mod_base = OTHER; note = 2'-O-methylguanosine-3'-phosphate
  modified_base 16: mod_base = OTHER; note = 2'-fluorocytidine-3'-phosphate
  modified_base 17: mod_base = OTHER; note = 2'-O-methyladenosine-3'-phosphate
  modified_base 18: mod_base = OTHER; note = 2'-O-methylcytidine-3'-phosphate
  modified_base 19: mod_base = OTHER; note = 2'-O-methyluridine-3'-phosphate
  modified_base 20: mod_base = OTHER; note = 2'-O-methyluridine-3'-phosphate
  modified_base 21: mod_base = OTHER; note = 2'-O-methyluridine-3'-phosphorothioate
  modified_base 22: mod_base = OTHER; note = 2'-O-methyladenosine-3'-phosphorothioate
  modified_base 23: mod_base = OTHER; note = 2'-O-methylguanosine-3'-phosphate
tactaaaggatacagcactttag

SEQ ID NO: 2406 - RNA, 21 nt, synthetic construct
  source 1..21: mol_type = other RNA; note = Description of Artificial Sequence: Synthetic oligonucleotide
  modified_base 1: mod_base = OTHER; note = 2'-O-methyladenosine-3'-phosphorothioate
  modified_base 2: mod_base = OTHER; note = 2'-O-methylguanosine-3'-phosphorothioate
  modified_base 3: mod_base = OTHER; note = 2'-O-methylguanosine-3'-phosphate
  modified_base 4: mod_base = OTHER; note = 2'-O-methylcytidine-3'-phosphate
  modified_base 5: mod_base = OTHER; note = 2'-O-methyluridine-3'-phosphate
  modified_base 6: mod_base = OTHER; note = 2'-O-methyladenosine-3'-phosphate
  modified_base 7: mod_base = OTHER; note = 2'-fluoroadenosine-3'-phosphate
  modified_base 8: mod_base = OTHER; note = 2'-O-methyladenosine-3'-phosphate
  modified_base 9: mod_base = OTHER; note = 2'-fluoroguanosine-3'-phosphate
  modified_base 10: mod_base = OTHER; note = 2'-fluorouridine-3'-phosphate
  modified_base 11: mod_base = OTHER; note = 2'-fluoroguanosine-3'-phosphate
  modified_base 12: mod_base = OTHER; note = 2'-O-methylcytidine-3'-phosphate
  modified_base 13: mod_base = OTHER; note = 2'-O-methyluridine-3'-phosphate
  modified_base 14: mod_base = OTHER; note = 2'-O-methylguanosine-3'-phosphate
  modified_base 15: mod_base = OTHER; note = 2'-O-methyluridine-3'-phosphate
  modified_base 16: mod_base = OTHER; note = 2'-O-methyladenosine-3'-phosphate
  modified_base 17: mod_base = OTHER; note = 2'-O-methyluridine-3'-phosphate
  modified_base 18: mod_base = OTHER; note = 2'-O-methylcytidine-3'-phosphate
  modified_base 19: mod_base = OTHER; note = 2'-O-methylcytidine-3'-phosphate
  modified_base 20: mod_base = OTHER; note = 2'-O-methyluridine-3'-phosphate
  modified_base 21: mod_base = OTHER; note = 2'-O-methyluridine-3'-phosphate N-[tris(GalNAc-alkyl)-amidodecanoyl)]-4-hydroxyprolinol Hyp-(GalNAc-alkyl)3
aggctaaagtgctgtatcctt

SEQ ID NO: 2407 - RNA, 23 nt, synthetic construct
  source 1..23: mol_type = other RNA; note = Description of Artificial Sequence: Synthetic oligonucleotide
  modified_base 1: mod_base = OTHER; note = 2'-O-methyladenosine-3'-phosphorothioate
  modified_base 2: mod_base = OTHER; note = 2'-fluoroadenosine-3'-phosphorothioate
  modified_base 3: mod_base = OTHER; note = 2'-O-methylguanosine-3'-phosphate
  modified_base 4: mod_base = OTHER; note = 2'-O-methylguanosine-3'-phosphate
  modified_base 5: mod_base = OTHER; note = 2'-O-methyladenosine-3'-phosphate
  modified_base 6: mod_base = OTHER; note = 2'-fluorouridine-3'-phosphate
  modified_base 7: mod_base = OTHER; note = 2'-O-methyladenosine-3'-phosphate
  modified_base 8: mod_base = OTHER; note = 2'-fluorocytidine-3'-phosphate
  modified_base 9: mod_base = OTHER; note = 2'-fluoroadenosine-3'-phosphate
  modified_base 10: mod_base = OTHER; note = 2'-O-methylguanosine-3'-phosphate
  modified_base 11: mod_base = OTHER; note = 2'-O-methylcytidine-3'-phosphate
  modified_base 12: mod_base = OTHER; note = 2'-O-methyladenosine-3'-phosphate
  modified_base 13: mod_base = OTHER; note = 2'-O-methylcytidine-3'-phosphate
  modified_base 14: mod_base = OTHER; note = 2'-fluorouridine-3'-phosphate
  modified_base 15: mod_base = OTHER; note = 2'-O-methyluridine-3'-phosphate
  modified_base 16: mod_base = OTHER; note = 2'-fluorouridine-3'-phosphate
  modified_base 17: mod_base = OTHER; note = 2'-O-methyladenosine-3'-phosphate
  modified_base 18: mod_base = OTHER; note = 2'-O-methylguanosine-3'-phosphate
  modified_base 19: mod_base = OTHER; note = 2'-O-methylcytidine-3'-phosphate
  modified_base 20: mod_base = OTHER; note = 2'-O-methylcytidine-3'-phosphate
  modified_base 21: mod_base = OTHER; note = 2'-O-methyluridine-3'-phosphorothioate
  modified_base 22: mod_base = OTHER; note = 2'-O-methylguanosine-3'-phosphorothioate
  modified_base 23: mod_base = OTHER; note = 2'-O-methylcytidine-3'-phosphate
aaggatacagcactttagcctgc

SEQ ID NO: 2408 - RNA, 21 nt, synthetic construct
  source 1..21: mol_type = other RNA; note = Description of Artificial Sequence: Synthetic oligonucleotide
  modified_base 1: mod_base = OTHER; note = 2'-O-methylcytidine-3'-phosphorothioate
  modified_base 2: mod_base = OTHER; note = 2'-O-methyladenosine-3'-phosphorothioate
  modified_base 3: mod_base = OTHER; note = 2'-O-methylguanosine-3'-phosphate
  modified_base 4: mod_base = OTHER; note = 2'-O-methylguanosine-3'-phosphate
  modified_base 5: mod_base = OTHER; note = 2'-O-methylcytidine-3'-phosphate
  modified_base 6: mod_base = OTHER; note = 2'-O-methyluridine-3'-phosphate
  modified_base 7: mod_base = OTHER; note = 2'-fluoroadenosine-3'-phosphate
  modified_base 8: mod_base = OTHER; note = 2'-O-methyladenosine-3'-phosphate
  modified_base 9: mod_base = OTHER; note = 2'-fluoroadenosine-3'-phosphate
  modified_base 10: mod_base = OTHER; note = 2'-fluoroguanosine-3'-phosphate
  modified_base 11: mod_base = OTHER; note = 2'-fluorouridine-3'-phosphate
  modified_base 12: mod_base = OTHER; note = 2'-O-methylguanosine-3'-phosphate
  modified_base 13: mod_base = OTHER; note = 2'-O-methylcytidine-3'-phosphate
  modified_base 14: mod_base = OTHER; note = 2'-O-methyluridine-3'-phosphate
  modified_base 15: mod_base = OTHER; note = 2'-O-methylguanosine-3'-phosphate
  modified_base 16: mod_base = OTHER; note = 2'-O-methyluridine-3'-phosphate
  modified_base 17: mod_base = OTHER; note = 2'-O-methyladenosine-3'-phosphate
  modified_base 18: mod_base = OTHER; note = 2'-O-methyluridine-3'-phosphate
  modified_base 19: mod_base = OTHER; note = 2'-O-methylcytidine-3'-phosphate
  modified_base 20: mod_base = OTHER; note = 2'-O-methylcytidine-3'-phosphate
  modified_base 21: mod_base = OTHER; note = 2'-O-methyluridine-3'-phosphate N-[tris(GalNAc-alkyl)-amidodecanoyl)]-4-hydroxyprolinol Hyp-(GalNAc-alkyl)3
caggctaaagtgctgtatcct

SEQ ID NO: 2409 - RNA, 23 nt, synthetic construct
  source 1..23: mol_type = other RNA; note = Description of Artificial Sequence: Synthetic oligonucleotide
  modified_base 1: mod_base = OTHER; note = 2'-O-methyladenosine-3'-phosphorothioate
  modified_base 2: mod_base = OTHER; note = 2'-fluoroguanosine-3'-phosphorothioate
  modified_base 3: mod_base = OTHER; note = 2'-O-methylguanosine-3'-phosphate
  modified_base 4: mod_base = OTHER; note = 2'-O-methyladenosine-3'-phosphate
  modified_base 5: mod_base = OTHER; note = 2'-O-methyluridine-3'-phosphate
  modified_base 6: mod_base = OTHER; note = 2'-fluoroadenosine-3'-phosphate
  modified_base 7: mod_base = OTHER; note = 2'-O-methylcytidine-3'-phosphate
  modified_base 8: mod_base = OTHER; note = 2'-fluoroadenosine-3'-phosphate
  modified_base 9: mod_base = OTHER; note = 2'-fluoroguanosine-3'-phosphate
  modified_base 10: mod_base = OTHER; note = 2'-O-methylcytidine-3'-phosphate
  modified_base 11: mod_base = OTHER; note = 2'-O-methyladenosine-3'-phosphate
  modified_base 12: mod_base = OTHER; note = 2'-O-methylcytidine-3'-phosphate
  modified_base 13: mod_base = OTHER; note = 2'-O-methyluridine-3'-phosphate
  modified_base 14: mod_base = OTHER; note = 2'-fluorouridine-3'-phosphate
  modified_base 15: mod_base = OTHER; note = 2'-O-methyluridine-3'-phosphate
  modified_base 16: mod_base = OTHER; note = 2'-fluoroadenosine-3'-phosphate
  modified_base 17: mod_base = OTHER; note = 2'-O-methylguanosine-3'-phosphate
  modified_base 18: mod_base = OTHER; note = 2'-O-methylcytidine-3'-phosphate
  modified_base 19: mod_base = OTHER; note = 2'-O-methylcytidine-3'-phosphate
  modified_base 20: mod_base = OTHER; note = 2'-O-methyluridine-3'-phosphate
  modified_base 21: mod_base = OTHER; note = 2'-O-methylguanosine-3'-phosphorothioate
  modified_base 22: mod_base = OTHER; note = 2'-O-methylcytidine-3'-phosphorothioate
  modified_base 23: mod_base = OTHER; note = 2'-O-methylcytidine-3'-phosphate
aggatacagcactttagcctgcc

SEQ ID NO: 2410 - RNA, 21 nt, synthetic construct
  source 1..21: mol_type = other RNA; note = Description of Artificial Sequence: Synthetic oligonucleotide
  modified_base 1: mod_base = OTHER; note = 2'-O-methyladenosine-3'-phosphorothioate
  modified_base 2: mod_base = OTHER; note = 2'-O-methyladenosine-3'-phosphorothioate
  modified_base 3: mod_base = OTHER; note = 2'-O-methylguanosine-3'-phosphate
  modified_base 4: mod_base = OTHER; note = 2'-O-methyladenosine-3'-phosphate
  modified_base 5: mod_base = OTHER; note = 2'-O-methylcytidine-3'-phosphate
  modified_base 6: mod_base = OTHER; note = 2'-O-methyladenosine-3'-phosphate
  modified_base 7: mod_base = OTHER; note = 2'-fluorouridine-3'-phosphate
  modified_base 8: mod_base = OTHER; note = 2'-O-methyluridine-3'-phosphate
  modified_base 9: mod_base = OTHER; note = 2'-fluoroguanosine-3'-phosphate
  modified_base 10: mod_base = OTHER; note = 2'-fluoroguanosine-3'-phosphate
  modified_base 11: mod_base = OTHER; note = 2'-fluorouridine-3'-phosphate
  modified_base 12: mod_base = OTHER; note = 2'-O-methylguanosine-3'-phosphate
  modified_base 13: mod_base = OTHER; note = 2'-O-methyladenosine-3'-phosphate
  modified_base 14: mod_base = OTHER; note = 2'-O-methylguanosine-3'-phosphate
  modified_base 15: mod_base = OTHER; note = 2'-O-methylguanosine-3'-phosphate
  modified_base 16: mod_base = OTHER; note = 2'-O-methyladenosine-3'-phosphate
  modified_base 17: mod_base = OTHER; note = 2'-O-methyladenosine-3'-phosphate
  modified_base 18: mod_base = OTHER; note = 2'-O-methyladenosine-3'-phosphate
  modified_base 19: mod_base = OTHER; note = 2'-O-methyladenosine-3'-phosphate
  modified_base 20: mod_base = OTHER; note = 2'-O-methyladenosine-3'-phosphate
  modified_base 21: mod_base = OTHER; note = 2'-O-methyluridine-3'-phosphate N-[tris(GalNAc-alkyl)-amidodecanoyl)]-4-hydroxyprolinol Hyp-(GalNAc-alkyl)3
aagacattggtgaggaaaaat

SEQ ID NO: 2411 - RNA, 23 nt, synthetic construct
  source 1..23: mol_type = other RNA; note = Description of Artificial Sequence: Synthetic oligonucleotide
  modified_base 1: mod_base = OTHER; note = 2'-O-methyladenosine-3'-phosphorothioate
  modified_base 2: mod_base = OTHER; note = 2'-fluorouridine -3'-phosphorothioate
  modified_base 3: mod_base = OTHER; note = 2'-O-methyluridine-3'-phosphate
  modified_base 4: mod_base = OTHER; note = 2'-O-methyluridine-3'-phosphate
  modified_base 5: mod_base = OTHER; note = 2'-O-methyluridine-3'-phosphate
  modified_base 6: mod_base = OTHER; note = 2'-fluorouridine-3'-phosphate
  modified_base 7: mod_base = OTHER; note = 2'-O-methylcytidine-3'-phosphate
  modified_base 8: mod_base = OTHER; note = 2'-fluorocytidine-3'-phosphate
  modified_base 9: mod_base = OTHER; note = 2'-fluorouridine-3'-phosphate
  modified_base 10: mod_base = OTHER; note = 2'-O-methylcytidine-3'-phosphate
  modified_base 11: mod_base = OTHER; note = 2'-O-methyladenosine-3'-phosphate
  modified_base 12: mod_base = OTHER; note = 2'-O-methylcytidine-3'-phosphate
  modified_base 13: mod_base = OTHER; note = 2'-O-methylcytidine-3'-phosphate
  modified_base 14: mod_base = OTHER; note = 2'-fluoroadenosine-3'-phosphate
  modified_base 15: mod_base = OTHER; note = 2'-O-methyladenosine-3'-phosphate
  modified_base 16: mod_base = OTHER; note = 2'-fluorouridine-3'-phosphate
  modified_base 17: mod_base = OTHER; note = 2'-O-methylguanosine-3'-phosphate
  modified_base 18: mod_base = OTHER; note = 2'-O-methyluridine-3'-phosphate
  modified_base 19: mod_base = OTHER; note = 2'-O-methylcytidine-3'-phosphate
  modified_base 20: mod_base = OTHER; note = 2'-O-methyluridine-3'-phosphate
  modified_base 21: mod_base = OTHER; note = 2'-O-methyluridine-3'-phosphorothioate
  modified_base 22: mod_base = OTHER; note = 2'-O-methylguanosine-3'-phosphorothioate
  modified_base 23: mod_base = OTHER; note = 2'-O-methyluridine-3'-phosphate
atttttcctcaccaatgtcttgt

SEQ ID NO: 2412 - RNA, 21 nt, synthetic construct
  source 1..21: mol_type = other RNA; note = Description of Artificial Sequence: Synthetic oligonucleotide
  modified_base 1: mod_base = OTHER; note = 2'-O-methyladenosine-3'-phosphorothioate
  modified_base 2: mod_base = OTHER; note = 2'-O-methylguanosine-3'-phosphorothioate
  modified_base 3: mod_base = OTHER; note = 2'-O-methyladenosine-3'-phosphate
  modified_base 4: mod_base = OTHER; note = 2'-O-methylcytidine-3'-phosphate
  modified_base 5: mod_base = OTHER; note = 2'-O-methyladenosine-3'-phosphate
  modified_base 6: mod_base = OTHER; note = 2'-O-methyluridine-3'-phosphate
  modified_base 7: mod_base = OTHER; note = 2'-fluorouridine-3'-phosphate
  modified_base 8: mod_base = OTHER; note = 2'-O-methylguanosine-3'-phosphate
  modified_base 9: mod_base = OTHER; note = 2'-fluoroguanosine-3'-phosphate
  modified_base 10: mod_base = OTHER; note = 2'-fluorouridine-3'-phosphate
  modified_base 11: mod_base = OTHER; note = 2'-fluoroguanosine-3'-phosphate
  modified_base 12: mod_base = OTHER; note = 2'-O-methyladenosine-3'-phosphate
  modified_base 13: mod_base = OTHER; note = 2'-O-methylguanosine-3'-phosphate
  modified_base 14: mod_base = OTHER; note = 2'-O-methylguanosine-3'-phosphate
  modified_base 15: mod_base = OTHER; note = 2'-O-methyladenosine-3'-phosphate
  modified_base 16: mod_base = OTHER; note = 2'-O-methyladenosine-3'-phosphate
  modified_base 17: mod_base = OTHER; note = 2'-O-methyladenosine-3'-phosphate
  modified_base 18: mod_base = OTHER; note = 2'-O-methyladenosine-3'-phosphate
  modified_base 19: mod_base = OTHER; note = 2'-O-methyladenosine-3'-phosphate
  modified_base 20: mod_base = OTHER; note = 2'-O-methyluridine-3'-phosphate
  modified_base 21: mod_base = OTHER; note = 2'-O-methylcytidine-3'-phosphate N-[tris(GalNAc-alkyl)-amidodecanoyl)]-4-hydroxyprolinol Hyp-(GalNAc-alkyl)3
agacattggtgaggaaaaatc

SEQ ID NO: 2413 - RNA, 23 nt, synthetic construct
  source 1..23: mol_type = other RNA; note = Description of Artificial Sequence: Synthetic oligonucleotide
  modified_base 1: mod_base = OTHER; note = 2'-O-methylguanosine-3'-phosphorothioate
  modified_base 2: mod_base = OTHER; note = 2'-fluoroadenosine-3'-phosphorothioate
  modified_base 3: mod_base = OTHER; note = 2'-O-methyluridine-3'-phosphate
  modified_base 4: mod_base = OTHER; note = 2'-O-methyluridine-3'-phosphate
  modified_base 5: mod_base = OTHER; note = 2'-O-methyluridine-3'-phosphate
  modified_base 6: mod_base = OTHER; note = 2'-fluorouridine-3'-phosphate
  modified_base 7: mod_base = OTHER; note = 2'-O-methyluridine-3'-phosphate
  modified_base 8: mod_base = OTHER; note = 2'-fluorocytidine-3'-phosphate
  modified_base 9: mod_base = OTHER; note = 2'-fluorocytidine-3'-phosphate
  modified_base 10: mod_base = OTHER; note = 2'-O-methyluridine-3'-phosphate
  modified_base 11: mod_base = OTHER; note = 2'-O-methylcytidine-3'-phosphate
  modified_base 12: mod_base = OTHER; note = 2'-O-methyladenosine-3'-phosphate
  modified_base 13: mod_base = OTHER; note = 2'-O-methylcytidine-3'-phosphate
  modified_base 14: mod_base = OTHER; note = 2'-fluorocytidine-3'-phosphate
  modified_base 15: mod_base = OTHER; note = 2'-O-methyladenosine-3'-phosphate
  modified_base 16: mod_base = OTHER; note = 2'-fluoroadenosine-3'-phosphate
  modified_base 17: mod_base = OTHER; note = 2'-O-methyluridine-3'-phosphate
  modified_base 18: mod_base = OTHER; note = 2'-O-methylguanosine-3'-phosphate
  modified_base 19: mod_base = OTHER; note = 2'-O-methyluridine-3'-phosphate
  modified_base 20: mod_base = OTHER; note = 2'-O-methylcytidine-3'-phosphate
  modified_base 21: mod_base = OTHER; note = 2'-O-methyluridine-3'-phosphorothioate
  modified_base 22: mod_base = OTHER; note = 2'-O-methyluridine-3'-phosphorothioate
  modified_base 23: mod_base = OTHER; note = 2'-O-methylguanosine-3'-phosphate
gatttttcctcaccaatgtcttg

SEQ ID NO: 2414 - RNA, 21 nt, synthetic construct
  source 1..21: mol_type = other RNA; note = Description of Artificial Sequence: Synthetic oligonucleotide
  modified_base 1: mod_base = OTHER; note = 2'-O-methylcytidine-3'-phosphorothioate
  modified_base 2: mod_base = OTHER; note = 2'-O-methylguanosine-3'-phosphorothioate
  modified_base 3: mod_base = OTHER; note = 2'-O-methyladenosine-3'-phosphate
  modified_base 4: mod_base = OTHER; note = 2'-O-methylcytidine-3'-phosphate
  modified_base 5: mod_base = OTHER; note = 2'-O-methyladenosine-3'-phosphate
  modified_base 6: mod_base = OTHER; note = 2'-O-methyladenosine-3'-phosphate
  modified_base 7: mod_base = OTHER; note = 2'-fluoroguanosine-3'-phosphate
  modified_base 8: mod_base = OTHER; note = 2'-O-methyladenosine-3'-phosphate
  modified_base 9: mod_base = OTHER; note = 2'-fluorocytidine-3'-phosphate
  modified_base 10: mod_base = OTHER; note = 2'-fluoroadenosine-3'-phosphate
  modified_base 11: mod_base = OTHER; note = 2'-fluorouridine-3'-phosphate
  modified_base 12: mod_base = OTHER; note = 2'-O-methyluridine-3'-phosphate
  modified_base 13: mod_base = OTHER; note = 2'-O-methylguanosine-3'-phosphate
  modified_base 14: mod_base = OTHER; note = 2'-O-methylguanosine-3'-phosphate
  modified_base 15: mod_base = OTHER; note = 2'-O-methyluridine-3'-phosphate
  modified_base 16: mod_base = OTHER; note = 2'-O-methylguanosine-3'-phosphate
  modified_base 17: mod_base = OTHER; note = 2'-O-methyladenosine-3'-phosphate
  modified_base 18: mod_base = OTHER; note = 2'-O-methylguanosine-3'-phosphate
  modified_base 19: mod_base = OTHER; note = 2'-O-methylguanosine-3'-phosphate
  modified_base 20: mod_base = OTHER; note = 2'-O-methyladenosine-3'-phosphate
  modified_base 21: mod_base = OTHER; note = 2'-O-methyladenosine-3'-phosphate N-[tris(GalNAc-alkyl)-amidodecanoyl)]-4-hydroxyprolinol Hyp-(GalNAc-alkyl)3
cgacaagacattggtgaggaa

SEQ ID NO: 2415 - RNA, 23 nt, synthetic construct
  source 1..23: mol_type = other RNA; note = Description of Artificial Sequence: Synthetic oligonucleotide
  modified_base 1: mod_base = OTHER; note = 2'-O-methyluridine-3'-phosphorothioate
  modified_base 2: mod_base = OTHER; note = 2'-fluorouridine -3'-phosphorothioate
  modified_base 3: mod_base = OTHER; note = 2'-O-methylcytidine-3'-phosphate
  modified_base 4: mod_base = OTHER; note = 2'-O-methylcytidine-3'-phosphate
  modified_base 5: mod_base = OTHER; note = 2'-O-methyluridine-3'-phosphate
  modified_base 6: mod_base = OTHER; note = 2'-fluorocytidine-3'-phosphate
  modified_base 7: mod_base = OTHER; note = 2'-O-methyladenosine-3'-phosphate
  modified_base 8: mod_base = OTHER; note = 2'-fluorocytidine-3'-phosphate
  modified_base 9: mod_base = OTHER; note = 2'-fluorocytidine-3'-phosphate
  modified_base 10: mod_base = OTHER; note = 2'-O-methyladenosine-3'-phosphate
  modified_base 11: mod_base = OTHER; note = 2'-O-methyladenosine-3'-phosphate
  modified_base 12: mod_base = OTHER; note = 2'-O-methyluridine-3'-phosphate
  modified_base 13: mod_base = OTHER; note = 2'-O-methylguanosine-3'-phosphate
  modified_base 14: mod_base = OTHER; note = 2'-fluorouridine-3'-phosphate
  modified_base 15: mod_base = OTHER; note = 2'-O-methylcytidine-3'-phosphate
  modified_base 16: mod_base = OTHER; note = 2'-fluorouridine-3'-phosphate
  modified_base 17: mod_base = OTHER; note = 2'-O-methyluridine-3'-phosphate
  modified_base 18: mod_base = OTHER; note = 2'-O-methylguanosine-3'-phosphate
  modified_base 19: mod_base = OTHER; note = 2'-O-methyluridine-3'-phosphate
  modified_base 20: mod_base = OTHER; note = 2'-O-methylcytidine-3'-phosphate
  modified_base 21: mod_base = OTHER; note = 2'-O-methylguanosine-3'-phosphorothioate
  modified_base 22: mod_base = OTHER; note = 2'-O-methyladenosine-3'-phosphorothioate
  modified_base 23: mod_base = OTHER; note = 2'-O-methyluridine-3'-phosphate
ttcctcaccaatgtcttgtcgat

SEQ ID NO: 2416 - RNA, 21 nt, synthetic construct
  source 1..21: mol_type = other RNA; note = Description of Artificial Sequence: Synthetic oligonucleotide
  modified_base 1: mod_base = OTHER; note = 2'-O-methyluridine-3'-phosphorothioate
  modified_base 2: mod_base = OTHER; note = 2'-O-methylcytidine-3'-phosphorothioate
  modified_base 3: mod_base = OTHER; note = 2'-O-methylguanosine-3'-phosphate
  modified_base 4: mod_base = OTHER; note = 2'-O-methyladenosine-3'-phosphate
  modified_base 5: mod_base = OTHER; note = 2'-O-methylcytidine-3'-phosphate
  modified_base 6: mod_base = OTHER; note = 2'-O-methyladenosine-3'-phosphate
  modified_base 7: mod_base = OTHER; note = 2'-fluoroadenosine-3'-phosphate
  modified_base 8: mod_base = OTHER; note = 2'-O-methylguanosine-3'-phosphate
  modified_base 9: mod_base = OTHER; note = 2'-fluoroadenosine-3'-phosphate
  modified_base 10: mod_base = OTHER; note = 2'-fluorocytidine-3'-phosphate
  modified_base 11: mod_base = OTHER; note = 2'-fluoroadenosine-3'-phosphate
  modified_base 12: mod_base = OTHER; note = 2'-O-methyluridine-3'-phosphate
  modified_base 13: mod_base = OTHER; note = 2'-O-methyluridine-3'-phosphate
  modified_base 14: mod_base = OTHER; note = 2'-O-methylguanosine-3'-phosphate
  modified_base 15: mod_base = OTHER; note = 2'-O-methylguanosine-3'-phosphate
  modified_base 16: mod_base = OTHER; note = 2'-O-methyluridine-3'-phosphate
  modified_base 17: mod_base = OTHER; note = 2'-O-methylguanosine-3'-phosphate
  modified_base 18: mod_base = OTHER; note = 2'-O-methyladenosine-3'-phosphate
  modified_base 19: mod_base = OTHER; note = 2'-O-methylguanosine-3'-phosphate
  modified_base 20: mod_base = OTHER; note = 2'-O-methylguanosine-3'-phosphate
  modified_base 21: mod_base = OTHER; note = 2'-O-methyladenosine-3'-phosphate N-[tris(GalNAc-alkyl)-amidodecanoyl)]-4-hydroxyprolinol Hyp-(GalNAc-alkyl)3
tcgacaagacattggtgagga

SEQ ID NO: 2417 - RNA, 23 nt, synthetic construct
  source 1..23: mol_type = other RNA; note = Description of Artificial Sequence: Synthetic oligonucleotide
  modified_base 1: mod_base = OTHER; note = 2'-O-methyluridine-3'-phosphorothioate
  modified_base 2: mod_base = OTHER; note = 2'-fluorocytidine-3'-phosphorothioate
  modified_base 3: mod_base = OTHER; note = 2'-O-methylcytidine-3'-phosphate
  modified_base 4: mod_base = OTHER; note = 2'-O-methyluridine-3'-phosphate
  modified_base 5: mod_base = OTHER; note = 2'-O-methylcytidine-3'-phosphate
  modified_base 6: mod_base = OTHER; note = 2'-fluoroadenosine-3'-phosphate
  modified_base 7: mod_base = OTHER; note = 2'-O-methylcytidine-3'-phosphate
  modified_base 8: mod_base = OTHER; note = 2'-fluorocytidine-3'-phosphate
  modified_base 9: mod_base = OTHER; note = 2'-fluoroadenosine-3'-phosphate
  modified_base 10: mod_base = OTHER; note = 2'-O-methyladenosine-3'-phosphate
  modified_base 11: mod_base = OTHER; note = 2'-O-methyluridine-3'-phosphate
  modified_base 12: mod_base = OTHER; note = 2'-O-methylguanosine-3'-phosphate
  modified_base 13: mod_base = OTHER; note = 2'-O-methyluridine-3'-phosphate
  modified_base 14: mod_base = OTHER; note = 2'-fluorocytidine-3'-phosphate
  modified_base 15: mod_base = OTHER; note = 2'-O-methyluridine-3'-phosphate
  modified_base 16: mod_base = OTHER; note = 2'-fluorouridine-3'-phosphate
  modified_base 17: mod_base = OTHER; note = 2'-O-methylguanosine-3'-phosphate
  modified_base 18: mod_base = OTHER; note = 2'-O-methyluridine-3'-phosphate
  modified_base 19: mod_base = OTHER; note = 2'-O-methylcytidine-3'-phosphate
  modified_base 20: mod_base = OTHER; note = 2'-O-methylguanosine-3'-phosphate
  modified_base 21: mod_base = OTHER; note = 2'-O-methyladenosine-3'-phosphorothioate
  modified_base 22: mod_base = OTHER; note = 2'-O-methyluridine-3'-phosphorothioate
  modified_base 23: mod_base = OTHER; note = 2'-O-methylguanosine-3'-phosphate
tcctcaccaatgtcttgtcgatg

SEQ ID NO: 2418 - RNA, 21 nt, synthetic construct
  source 1..21: mol_type = other RNA; note = Description of Artificial Sequence: Synthetic oligonucleotide
  modified_base 1: mod_base = OTHER; note = 2'-O-methyladenosine-3'-phosphorothioate
  modified_base 2: mod_base = OTHER; note = 2'-O-methyladenosine-3'-phosphorothioate
  modified_base 3: mod_base = OTHER; note = 2'-O-methylguanosine-3'-phosphate
  modified_base 4: mod_base = OTHER; note = 2'-O-methyladenosine-3'-phosphate
  modified_base 5: mod_base = OTHER; note = 2'-O-methyluridine-3'-phosphate
  modified_base 6: mod_base = OTHER; note = 2'-O-methylguanosine-3'-phosphate
  modified_base 7: mod_base = OTHER; note = 2'-fluorouridine-3'-phosphate
  modified_base 8: mod_base = OTHER; note = 2'-O-methylcytidine-3'-phosphate
  modified_base 9: mod_base = OTHER; note = 2'-fluorocytidine-3'-phosphate
  modified_base 10: mod_base = OTHER; note = 2'-fluorouridine-3'-phosphate
  modified_base 11: mod_base = OTHER; note = 2'-fluorocytidine-3'-phosphate
  modified_base 12: mod_base = OTHER; note = 2'-O-methylguanosine-3'-phosphate
  modified_base 13: mod_base = OTHER; note = 2'-O-methyladenosine-3'-phosphate
  modified_base 14: mod_base = OTHER; note = 2'-O-methylguanosine-3'-phosphate
  modified_base 15: mod_base = OTHER; note = 2'-O-methyladenosine-3'-phosphate
  modified_base 16: mod_base = OTHER; note = 2'-O-methyluridine-3'-phosphate
  modified_base 17: mod_base = OTHER; note = 2'-O-methyladenosine-3'-phosphate
  modified_base 18: mod_base = OTHER; note = 2'-O-methylcytidine-3'-phosphate
  modified_base 19: mod_base = OTHER; note = 2'-O-methyluridine-3'-phosphate
  modified_base 20: mod_base = OTHER; note = 2'-O-methyladenosine-3'-phosphate
  modified_base 21: mod_base = OTHER; note = 2'-O-methyladenosine-3'-phosphate N-[tris(GalNAc-alkyl)-amidodecanoyl)]-4-hydroxyprolinol Hyp-(GalNAc-alkyl)3
aagatgtcctcgagatactaa

SEQ ID NO: 2419 - RNA, 23 nt, synthetic construct
  source 1..23: mol_type = other RNA; note = Description of Artificial Sequence: Synthetic oligonucleotide
  modified_base 1: mod_base = OTHER; note = 2'-O-methyluridine-3'-phosphorothioate
  modified_base 2: mod_base = OTHER; note = 2'-fluorouridine -3'-phosphorothioate
  modified_base 3: mod_base = OTHER; note = 2'-O-methyladenosine-3'-phosphate
  modified_base 4: mod_base = OTHER; note = 2'-O-methylguanosine-3'-phosphate
  modified_base 5: mod_base = OTHER; note = 2'-O-methyluridine-3'-phosphate
  modified_base 6: mod_base = OTHER; note = 2'-fluoroadenosine-3'-phosphate
  modified_base 7: mod_base = OTHER; note = 2'-O-methyluridine-3'-phosphate
  modified_base 8: mod_base = OTHER; note = 2'-fluorocytidine-3'-phosphate
  modified_base 9: mod_base = OTHER; note = 2'-fluorouridine-3'-phosphate
  modified_base 10: mod_base = OTHER; note = 2'-O-methylcytidine-3'-phosphate
  modified_base 11: mod_base = OTHER; note = 2'-O-methylguanosine-3'-phosphate
  modified_base 12: mod_base = OTHER; note = 2'-O-methyladenosine-3'-phosphate
  modified_base 13: mod_base = OTHER; note = 2'-O-methylguanosine-3'-phosphate
  modified_base 14: mod_base = OTHER; note = 2'-fluoroguanosine-3'-phosphate
  modified_base 15: mod_base = OTHER; note = 2'-O-methyladenosine-3'-phosphate
  modified_base 16: mod_base = OTHER; note = 2'-fluorocytidine-3'-phosphate
  modified_base 17: mod_base = OTHER; note = 2'-O-methyladenosine-3'-phosphate
  modified_base 18: mod_base = OTHER; note = 2'-O-methyluridine-3'-phosphate
  modified_base 19: mod_base = OTHER; note = 2'-O-methylcytidine-3'-phosphate
  modified_base 20: mod_base = OTHER; note = 2'-O-methyluridine-3'-phosphate
  modified_base 21: mod_base = OTHER; note = 2'-O-methyluridine-3'-phosphorothioate
  modified_base 22: mod_base = OTHER; note = 2'-O-methylguanosine-3'-phosphorothioate
  modified_base 23: mod_base = OTHER; note = 2'-O-methyladenosine-3'-phosphate
ttagtatctcgaggacatcttga

SEQ ID NO: 2420 - RNA, 21 nt, synthetic construct
  source 1..21: mol_type = other RNA; note = Description of Artificial Sequence: Synthetic oligonucleotide
  modified_base 1: mod_base = OTHER; note = 2'-O-methyladenosine-3'-phosphorothioate
  modified_base 2: mod_base = OTHER; note = 2'-O-methylguanosine-3'-phosphorothioate
  modified_base 3: mod_base = OTHER; note = 2'-O-methyladenosine-3'-phosphate
  modified_base 4: mod_base = OTHER; note = 2'-O-methyluridine-3'-phosphate
  modified_base 5: mod_base = OTHER; note = 2'-O-methylguanosine-3'-phosphate
  modified_base 6: mod_base = OTHER; note = 2'-O-methyluridine-3'-phosphate
  modified_base 7: mod_base = OTHER; note = 2'-fluorocytidine-3'-phosphate
  modified_base 8: mod_base = OTHER; note = 2'-O-methylcytidine-3'-phosphate
  modified_base 9: mod_base = OTHER; note = 2'-fluorouridine-3'-phosphate
  modified_base 10: mod_base = OTHER; note = 2'-fluorocytidine-3'-phosphate
  modified_base 11: mod_base = OTHER; note = 2'-fluoroguanosine-3'-phosphate
  modified_base 12: mod_base = OTHER; note = 2'-O-methyladenosine-3'-phosphate
  modified_base 13: mod_base = OTHER; note = 2'-O-methylguanosine-3'-phosphate
  modified_base 14: mod_base = OTHER; note = 2'-O-methyladenosine-3'-phosphate
  modified_base 15: mod_base = OTHER; note = 2'-O-methyluridine-3'-phosphate
  modified_base 16: mod_base = OTHER; note = 2'-O-methyladenosine-3'-phosphate
  modified_base 17: mod_base = OTHER; note = 2'-O-methylcytidine-3'-phosphate
  modified_base 18: mod_base = OTHER; note = 2'-O-methyluridine-3'-phosphate
  modified_base 19: mod_base = OTHER; note = 2'-O-methyladenosine-3'-phosphate
  modified_base 20: mod_base = OTHER; note = 2'-O-methyladenosine-3'-phosphate
  modified_base 21: mod_base = OTHER; note = 2'-O-methyladenosine-3'-phosphate N-[tris(GalNAc-alkyl)-amidodecanoyl)]-4-hydroxyprolinol Hyp-(GalNAc-alkyl)3
agatgtcctcgagatactaaa

SEQ ID NO: 2421 - RNA, 23 nt, synthetic construct
  source 1..23: mol_type = other RNA; note = Description of Artificial Sequence: Synthetic oligonucleotide
  modified_base 1: mod_base = OTHER; note = 2'-O-methyluridine-3'-phosphorothioate
  modified_base 2: mod_base = OTHER; note = 2'-fluorouridine -3'-phosphorothioate
  modified_base 3: mod_base = OTHER; note = 2'-O-methyluridine-3'-phosphate
  modified_base 4: mod_base = OTHER; note = 2'-O-methyladenosine-3'-phosphate
  modified_base 5: mod_base = OTHER; note = 2'-O-methylguanosine-3'-phosphate
  modified_base 6: mod_base = OTHER; note = 2'-fluorouridine-3'-phosphate
  modified_base 7: mod_base = OTHER; note = 2'-O-methyladenosine-3'-phosphate
  modified_base 8: mod_base = OTHER; note = 2'-fluorouridine-3'-phosphate
  modified_base 9: mod_base = OTHER; note = 2'-fluorocytidine-3'-phosphate
  modified_base 10: mod_base = OTHER; note = 2'-O-methyluridine-3'-phosphate
  modified_base 11: mod_base = OTHER; note = 2'-O-methylcytidine-3'-phosphate
  modified_base 12: mod_base = OTHER; note = 2'-O-methylguanosine-3'-phosphate
  modified_base 13: mod_base = OTHER; note = 2'-O-methyladenosine-3'-phosphate
  modified_base 14: mod_base = OTHER; note = 2'-fluoroguanosine-3'-phosphate
  modified_base 15: mod_base = OTHER; note = 2'-O-methylguanosine-3'-phosphate
  modified_base 16: mod_base = OTHER; note = 2'-fluoroadenosine-3'-phosphate
  modified_base 17: mod_base = OTHER; note = 2'-O-methylcytidine-3'-phosphate
  modified_base 18: mod_base = OTHER; note = 2'-O-methyladenosine-3'-phosphate
  modified_base 19: mod_base = OTHER; note = 2'-O-methyluridine-3'-phosphate
  modified_base 20: mod_base = OTHER; note = 2'-O-methylcytidine-3'-phosphate
  modified_base 21: mod_base = OTHER; note = 2'-O-methyluridine-3'-phosphorothioate
  modified_base 22: mod_base = OTHER; note = 2'-O-methyluridine-3'-phosphorothioate
  modified_base 23: mod_base = OTHER; note = 2'-O-methylguanosine-3'-phosphate
tttagtatctcgaggacatcttg

SEQ ID NO: 2422 - RNA, 21 nt, synthetic construct
  source 1..21: mol_type = other RNA; note = Description of Artificial Sequence: Synthetic oligonucleotide
  modified_base 1: mod_base = OTHER; note = 2'-O-methylguanosine-3'-phosphorothioate
  modified_base 2: mod_base = OTHER; note = 2'-O-methyluridine-3'-phosphorothioate
  modified_base 3: mod_base = OTHER; note = 2'-O-methyluridine-3'-phosphate
  modified_base 4: mod_base = OTHER; note = 2'-O-methylcytidine-3'-phosphate
  modified_base 5: mod_base = OTHER; note = 2'-O-methyladenosine-3'-phosphate
  modified_base 6: mod_base = OTHER; note = 2'-O-methyladenosine-3'-phosphate
  modified_base 7: mod_base = OTHER; note = 2'-fluoroguanosine-3'-phosphate
  modified_base 8: mod_base = OTHER; note = 2'-O-methyladenosine-3'-phosphate
  modified_base 9: mod_base = OTHER; note = 2'-fluorouridine-3'-phosphate
  modified_base 10: mod_base = OTHER; note = 2'-fluoroguanosine-3'-phosphate
  modified_base 11: mod_base = OTHER; note = 2'-fluorouridine-3'-phosphate
  modified_base 12: mod_base = OTHER; note = 2'-O-methylcytidine-3'-phosphate
  modified_base 13: mod_base = OTHER; note = 2'-O-methylcytidine-3'-phosphate
  modified_base 14: mod_base = OTHER; note = 2'-O-methyluridine-3'-phosphate
  modified_base 15: mod_base = OTHER; note = 2'-O-methylcytidine-3'-phosphate
  modified_base 16: mod_base = OTHER; note = 2'-O-methylguanosine-3'-phosphate
  modified_base 17: mod_base = OTHER; note = 2'-O-methyladenosine-3'-phosphate
  modified_base 18: mod_base = OTHER; note = 2'-O-methylguanosine-3'-phosphate
  modified_base 19: mod_base = OTHER; note = 2'-O-methyladenosine-3'-phosphate
  modified_base 20: mod_base = OTHER; note = 2'-O-methyluridine-3'-phosphate
  modified_base 21: mod_base = OTHER; note = 2'-O-methyladenosine-3'-phosphate N-[tris(GalNAc-alkyl)-amidodecanoyl)]-4-hydroxyprolinol Hyp-(GalNAc-alkyl)3
gttcaagatgtcctcgagata

SEQ ID NO: 2423 - RNA, 23 nt, synthetic construct
  source 1..23: mol_type = other RNA; note = Description of Artificial Sequence: Synthetic oligonucleotide
  modified_base 1: mod_base = OTHER; note = 2'-O-methyluridine-3'-phosphorothioate
  modified_base 2: mod_base = OTHER; note = 2'-fluoroadenosine-3'-phosphorothioate
  modified_base 3: mod_base = OTHER; note = 2'-O-methyluridine-3'-phosphate
  modified_base 4: mod_base = OTHER; note = 2'-O-methylcytidine-3'-phosphate
  modified_base 5: mod_base = OTHER; note = 2'-O-methyluridine-3'-phosphate
  modified_base 6: mod_base = OTHER; note = 2'-fluorocytidine-3'-phosphate
  modified_base 7: mod_base = OTHER; note = 2'-O-methylguanosine-3'-phosphate
  modified_base 8: mod_base = OTHER; note = 2'-fluoroadenosine-3'-phosphate
  modified_base 9: mod_base = OTHER; note = 2'-fluoroguanosine-3'-phosphate
  modified_base 10: mod_base = OTHER; note = 2'-O-methylguanosine-3'-phosphate
  modified_base 11: mod_base = OTHER; note = 2'-O-methyladenosine-3'-phosphate
  modified_base 12: mod_base = OTHER; note = 2'-O-methylcytidine-3'-phosphate
  modified_base 13: mod_base = OTHER; note = 2'-O-methyladenosine-3'-phosphate
  modified_base 14: mod_base = OTHER; note = 2'-fluorouridine-3'-phosphate
  modified_base 15: mod_base = OTHER; note = 2'-O-methylcytidine-3'-phosphate
  modified_base 16: mod_base = OTHER; note = 2'-fluorouridine-3'-phosphate
  modified_base 17: mod_base = OTHER; note = 2'-O-methyluridine-3'-phosphate
  modified_base 18: mod_base = OTHER; note = 2'-O-methylguanosine-3'-phosphate
  modified_base 19: mod_base = OTHER; note = 2'-O-methyladenosine-3'-phosphate
  modified_base 20: mod_base = OTHER; note = 2'-O-methyladenosine-3'-phosphate
  modified_base 21: mod_base = OTHER; note = 2'-O-methylcytidine-3'-phosphorothioate
  modified_base 22: mod_base = OTHER; note = 2'-O-methyladenosine-3'-phosphorothioate
  modified_base 23: mod_base = OTHER; note = 2'-O-methylcytidine-3'-phosphate
tatctcgaggacatcttgaacac

SEQ ID NO: 2424 - RNA, 21 nt, synthetic construct
  source 1..21: mol_type = other RNA; note = Description of Artificial Sequence: Synthetic oligonucleotide
  modified_base 1: mod_base = OTHER; note = 2'-O-methyluridine-3'-phosphorothioate
  modified_base 2: mod_base = OTHER; note = 2'-O-methylguanosine-3'-phosphorothioate
  modified_base 3: mod_base = OTHER; note = 2'-O-methyluridine-3'-phosphate
  modified_base 4: mod_base = OTHER; note = 2'-O-methyluridine-3'-phosphate
  modified_base 5: mod_base = OTHER; note = 2'-O-methylcytidine-3'-phosphate
  modified_base 6: mod_base = OTHER; note = 2'-O-methyladenosine-3'-phosphate
  modified_base 7: mod_base = OTHER; note = 2'-fluoroadenosine-3'-phosphate
  modified_base 8: mod_base = OTHER; note = 2'-O-methylguanosine-3'-phosphate
  modified_base 9: mod_base = OTHER; note = 2'-fluoroadenosine-3'-phosphate
  modified_base 10: mod_base = OTHER; note = 2'-fluorouridine-3'-phosphate
  modified_base 11: mod_base = OTHER; note = 2'-fluoroguanosine-3'-phosphate
  modified_base 12: mod_base = OTHER; note = 2'-O-methyluridine-3'-phosphate
  modified_base 13: mod_base = OTHER; note = 2'-O-methylcytidine-3'-phosphate
  modified_base 14: mod_base = OTHER; note = 2'-O-methylcytidine-3'-phosphate
  modified_base 15: mod_base = OTHER; note = 2'-O-methyluridine-3'-phosphate
  modified_base 16: mod_base = OTHER; note = 2'-O-methylcytidine-3'-phosphate
  modified_base 17: mod_base = OTHER; note = 2'-O-methylguanosine-3'-phosphate
  modified_base 18: mod_base = OTHER; note = 2'-O-methyladenosine-3'-phosphate
  modified_base 19: mod_base = OTHER; note = 2'-O-methylguanosine-3'-phosphate
  modified_base 20: mod_base = OTHER; note = 2'-O-methyladenosine-3'-phosphate
  modified_base 21: mod_base = OTHER; note = 2'-O-methyluridine-3'-phosphate N-[tris(GalNAc-alkyl)-amidodecanoyl)]-4-hydroxyprolinol Hyp-(GalNAc-alkyl)3
tgttcaagatgtcctcgagat

SEQ ID NO: 2425 - RNA, 23 nt, synthetic construct
  source 1..23: mol_type = other RNA; note = Description of Artificial Sequence: Synthetic oligonucleotide
  modified_base 1: mod_base = OTHER; note = 2'-O-methyladenosine-3'-phosphorothioate
  modified_base 2: mod_base = OTHER; note = 2'-fluorouridine -3'-phosphorothioate
  modified_base 3: mod_base = OTHER; note = 2'-O-methylcytidine-3'-phosphate
  modified_base 4: mod_base = OTHER; note = 2'-O-methyluridine-3'-phosphate
  modified_base 5: mod_base = OTHER; note = 2'-O-methylcytidine-3'-phosphate
  modified_base 6: mod_base = OTHER; note = 2'-fluoroguanosine-3'-phosphate
  modified_base 7: mod_base = OTHER; note = 2'-O-methyladenosine-3'-phosphate
  modified_base 8: mod_base = OTHER; note = 2'-fluoroguanosine-3'-phosphate
  modified_base 9: mod_base = OTHER; note = 2'-fluoroguanosine-3'-phosphate
  modified_base 10: mod_base = OTHER; note = 2'-O-methyladenosine-3'-phosphate
  modified_base 11: mod_base = OTHER; note = 2'-O-methylcytidine-3'-phosphate
  modified_base 12: mod_base = OTHER; note = 2'-O-methyladenosine-3'-phosphate
  modified_base 13: mod_base = OTHER; note = 2'-O-methyluridine-3'-phosphate
  modified_base 14: mod_base = OTHER; note = 2'-fluorocytidine-3'-phosphate
  modified_base 15: mod_base = OTHER; note = 2'-O-methyluridine-3'-phosphate
  modified_base 16: mod_base = OTHER; note = 2'-fluorouridine-3'-phosphate
  modified_base 17: mod_base = OTHER; note = 2'-O-methylguanosine-3'-phosphate
  modified_base 18: mod_base = OTHER; note = 2'-O-methyladenosine-3'-phosphate
  modified_base 19: mod_base = OTHER; note = 2'-O-methyladenosine-3'-phosphate
  modified_base 20: mod_base = OTHER; note = 2'-O-methylcytidine-3'-phosphate
  modified_base 21: mod_base = OTHER; note = 2'-O-methyladenosine-3'-phosphorothioate
  modified_base 22: mod_base = OTHER; note = 2'-O-methylcytidine-3'-phosphorothioate
  modified_base 23: mod_base = OTHER; note = 2'-O-methylcytidine-3'-phosphate
atctcgaggacatcttgaacacc

SEQ ID NO: 2426 - RNA, 21 nt, synthetic construct
  source 1..21: mol_type = other RNA; note = Description of Artificial Sequence: Synthetic oligonucleotide
  modified_base 1: mod_base = OTHER; note = 2'-O-methylguanosine-3'-phosphorothioate
  modified_base 2: mod_base = OTHER; note = 2'-O-methyladenosine-3'-phosphorothioate
  modified_base 3: mod_base = OTHER; note = 2'-O-methylguanosine-3'-phosphate
  modified_base 4: mod_base = OTHER; note = 2'-O-methyladenosine-3'-phosphate
  modified_base 5: mod_base = OTHER; note = 2'-O-methyladenosine-3'-phosphate
  modified_base 6: mod_base = OTHER; note = 2'-O-methyladenosine-3'-phosphate
  modified_base 7: mod_base = OTHER; note = 2'-fluoroguanosine-3'-phosphate
  modified_base 8: mod_base = OTHER; note = 2'-O-methylguanosine-3'-phosphate
  modified_base 9: mod_base = OTHER; note = 2'-fluorouridine-3'-phosphate
  modified_base 10: mod_base = OTHER; note = 2'-fluoroguanosine-3'-phosphate
  modified_base 11: mod_base = OTHER; note = 2'-fluorouridine-3'-phosphate
  modified_base 12: mod_base = OTHER; note = 2'-O-methyluridine-3'-phosphate
  modified_base 13: mod_base = OTHER; note = 2'-O-methylcytidine-3'-phosphate
  modified_base 14: mod_base = OTHER; note = 2'-O-methyladenosine-3'-phosphate
  modified_base 15: mod_base = OTHER; note = 2'-O-methyladenosine-3'-phosphate
  modified_base 16: mod_base = OTHER; note = 2'-O-methylguanosine-3'-phosphate
  modified_base 17: mod_base = OTHER; note = 2'-O-methyladenosine-3'-phosphate
  modified_base 18: mod_base = OTHER; note = 2'-O-methyluridine-3'-phosphate
  modified_base 19: mod_base = OTHER; note = 2'-O-methylguanosine-3'-phosphate
  modified_base 20: mod_base = OTHER; note = 2'-O-methyluridine-3'-phosphate
  modified_base 21: mod_base = OTHER; note = 2'-O-methylcytidine-3'-phosphate N-[tris(GalNAc-alkyl)-amidodecanoyl)]-4-hydroxyprolinol Hyp-(GalNAc-alkyl)3
gagaaaggtgttcaagatgtc

SEQ ID NO: 2427 - RNA, 23 nt, synthetic construct
  source 1..23: mol_type = other RNA; note = Description of Artificial Sequence: Synthetic oligonucleotide
  modified_base 1: mod_base = OTHER; note = 2'-O-methylguanosine-3'-phosphorothioate
  modified_base 2: mod_base = OTHER; note = 2'-fluoroadenosine-3'-phosphorothioate
  modified_base 3: mod_base = OTHER; note = 2'-O-methylcytidine-3'-phosphate
  modified_base 4: mod_base = OTHER; note = 2'-O-methyladenosine-3'-phosphate
  modified_base 5: mod_base = OTHER; note = 2'-O-methyluridine-3'-phosphate
  modified_base 6: mod_base = OTHER; note = 2'-fluorocytidine-3'-phosphate
  modified_base 7: mod_base = OTHER; note = 2'-O-methyluridine-3'-phosphate
  modified_base 8: mod_base = OTHER; note = 2'-fluorouridine-3'-phosphate
  modified_base 9: mod_base = OTHER; note = 2'-fluoroguanosine-3'-phosphate
  modified_base 10: mod_base = OTHER; note = 2'-O-methyladenosine-3'-phosphate
  modified_base 11: mod_base = OTHER; note = 2'-O-methyladenosine-3'-phosphate
  modified_base 12: mod_base = OTHER; note = 2'-O-methylcytidine-3'-phosphate
  modified_base 13: mod_base = OTHER; note = 2'-O-methyladenosine-3'-phosphate
  modified_base 14: mod_base = OTHER; note = 2'-fluorocytidine-3'-phosphate
  modified_base 15: mod_base = OTHER; note = 2'-O-methylcytidine-3'-phosphate
  modified_base 16: mod_base = OTHER; note = 2'-fluorouridine-3'-phosphate
  modified_base 17: mod_base = OTHER; note = 2'-O-methyluridine-3'-phosphate
  modified_base 18: mod_base = OTHER; note = 2'-O-methyluridine-3'-phosphate
  modified_base 19: mod_base = OTHER; note = 2'-O-methylcytidine-3'-phosphate
  modified_base 20: mod_base = OTHER; note = 2'-O-methyluridine-3'-phosphate
  modified_base 21: mod_base = OTHER; note = 2'-O-methylcytidine-3'-phosphorothioate
  modified_base 22: mod_base = OTHER; note = 2'-O-methylcytidine-3'-phosphorothioate
  modified_base 23: mod_base = OTHER; note = 2'-O-methylcytidine-3'-phosphate
gacatcttgaacacctttctccc

SEQ ID NO: 2428 - RNA, 21 nt, synthetic construct
  source 1..21: mol_type = other RNA; note = Description of Artificial Sequence: Synthetic oligonucleotide
  modified_base 1: mod_base = OTHER; note = 2'-O-methyladenosine-3'-phosphorothioate
  modified_base 2: mod_base = OTHER; note = 2'-O-methylguanosine-3'-phosphorothioate
  modified_base 3: mod_base = OTHER; note = 2'-O-methyladenosine-3'-phosphate
  modified_base 4: mod_base = OTHER; note = 2'-O-methyladenosine-3'-phosphate
  modified_base 5: mod_base = OTHER; note = 2'-O-methyladenosine-3'-phosphate
  modified_base 6: mod_base = OTHER; note = 2'-O-methylguanosine-3'-phosphate
  modified_base 7: mod_base = OTHER; note = 2'-fluoroguanosine-3'-phosphate
  modified_base 8: mod_base = OTHER; note = 2'-O-methyluridine-3'-phosphate
  modified_base 9: mod_base = OTHER; note = 2'-fluoroguanosine-3'-phosphate
  modified_base 10: mod_base = OTHER; note = 2'-fluorouridine-3'-phosphate
  modified_base 11: mod_base = OTHER; note = 2'-fluorouridine-3'-phosphate
  modified_base 12: mod_base = OTHER; note = 2'-O-methylcytidine-3'-phosphate
  modified_base 13: mod_base = OTHER; note = 2'-O-methyladenosine-3'-phosphate
  modified_base 14: mod_base = OTHER; note = 2'-O-methyladenosine-3'-phosphate
  modified_base 15: mod_base = OTHER; note = 2'-O-methylguanosine-3'-phosphate
  modified_base 16: mod_base = OTHER; note = 2'-O-methyladenosine-3'-phosphate
  modified_base 17: mod_base = OTHER; note = 2'-O-methyluridine-3'-phosphate
  modified_base 18: mod_base = OTHER; note = 2'-O-methylguanosine-3'-phosphate
  modified_base 19: mod_base = OTHER; note = 2'-O-methyluridine-3'-phosphate
  modified_base 20: mod_base = OTHER; note = 2'-O-methylcytidine-3'-phosphate
  modified_base 21: mod_base = OTHER; note = 2'-O-methylcytidine-3'-phosphate N-[tris(GalNAc-alkyl)-amidodecanoyl)]-4-hydroxyprolinol Hyp-(GalNAc-alkyl)3
agaaaggtgttcaagatgtcc

SEQ ID NO: 2429 - RNA, 23 nt, synthetic construct
  source 1..23: mol_type = other RNA; note = Description of Artificial Sequence: Synthetic oligonucleotide
  modified_base 1: mod_base = OTHER; note = 2'-O-methylguanosine-3'-phosphorothioate
  modified_base 2: mod_base = OTHER; note = 2'-fluoroguanosine-3'-phosphorothioate
  modified_base 3: mod_base = OTHER; note = 2'-O-methyladenosine-3'-phosphate
  modified_base 4: mod_base = OTHER; note = 2'-O-methylcytidine-3'-phosphate
  modified_base 5: mod_base = OTHER; note = 2'-O-methyladenosine-3'-phosphate
  modified_base 6: mod_base = OTHER; note = 2'-fluorouridine-3'-phosphate
  modified_base 7: mod_base = OTHER; note = 2'-O-methylcytidine-3'-phosphate
  modified_base 8: mod_base = OTHER; note = 2'-fluorouridine-3'-phosphate
  modified_base 9: mod_base = OTHER; note = 2'-fluorouridine-3'-phosphate
  modified_base 10: mod_base = OTHER; note = 2'-O-methylguanosine-3'-phosphate
  modified_base 11: mod_base = OTHER; note = 2'-O-methyladenosine-3'-phosphate
  modified_base 12: mod_base = OTHER; note = 2'-O-methyladenosine-3'-phosphate
  modified_base 13: mod_base = OTHER; note = 2'-O-methylcytidine-3'-phosphate
  modified_base 14: mod_base = OTHER; note = 2'-fluoroadenosine-3'-phosphate
  modified_base 15: mod_base = OTHER; note = 2'-O-methylcytidine-3'-phosphate
  modified_base 16: mod_base = OTHER; note = 2'-fluorocytidine-3'-phosphate
  modified_base 17: mod_base = OTHER; note = 2'-O-methyluridine-3'-phosphate
  modified_base 18: mod_base = OTHER; note = 2'-O-methyluridine-3'-phosphate
  modified_base 19: mod_base = OTHER; note = 2'-O-methyluridine-3'-phosphate
  modified_base 20: mod_base = OTHER; note = 2'-O-methylcytidine-3'-phosphate
  modified_base 21: mod_base = OTHER; note = 2'-O-methyluridine-3'-phosphorothioate
  modified_base 22: mod_base = OTHER; note = 2'-O-methylcytidine-3'-phosphorothioate
  modified_base 23: mod_base = OTHER; note = 2'-O-methylcytidine-3'-phosphate
ggacatcttgaacacctttctcc

SEQ ID NO: 2430 - RNA, 21 nt, synthetic construct
  source 1..21: mol_type = other RNA; note = Description of Artificial Sequence: Synthetic oligonucleotide
  modified_base 1: mod_base = OTHER; note = 2'-O-methylguanosine-3'-phosphorothioate
  modified_base 2: mod_base = OTHER; note = 2'-O-methylguanosine-3'-phosphorothioate
  modified_base 3: mod_base = OTHER; note = 2'-O-methylguanosine-3'-phosphate
  modified_base 4: mod_base = OTHER; note = 2'-O-methylguanosine-3'-phosphate
  modified_base 5: mod_base = OTHER; note = 2'-O-methylguanosine-3'-phosphate
  modified_base 6: mod_base = OTHER; note = 2'-O-methyladenosine-3'-phosphate
  modified_base 7: mod_base = OTHER; note = 2'-fluoroguanosine-3'-phosphate
  modified_base 8: mod_base = OTHER; note = 2'-O-methyladenosine-3'-phosphate
  modified_base 9: mod_base = OTHER; note = 2'-fluoroadenosine-3'-phosphate
  modified_base 10: mod_base = OTHER; note = 2'-fluoroadenosine-3'-phosphate
  modified_base 11: mod_base = OTHER; note = 2'-fluoroguanosine-3'-phosphate
  modified_base 12: mod_base = OTHER; note = 2'-O-methylguanosine-3'-phosphate
  modified_base 13: mod_base = OTHER; note = 2'-O-methyluridine-3'-phosphate
  modified_base 14: mod_base = OTHER; note = 2'-O-methylguanosine-3'-phosphate
  modified_base 15: mod_base = OTHER; note = 2'-O-methyluridine-3'-phosphate
  modified_base 16: mod_base = OTHER; note = 2'-O-methyluridine-3'-phosphate
  modified_base 17: mod_base = OTHER; note = 2'-O-methylcytidine-3'-phosphate
  modified_base 18: mod_base = OTHER; note = 2'-O-methyladenosine-3'-phosphate
  modified_base 19: mod_base = OTHER; note = 2'-O-methyladenosine-3'-phosphate
  modified_base 20: mod_base = OTHER; note = 2'-O-methylguanosine-3'-phosphate
  modified_base 21: mod_base = OTHER; note = 2'-O-methyladenosine-3'-phosphate N-[tris(GalNAc-alkyl)-amidodecanoyl)]-4-hydroxyprolinol Hyp-(GalNAc-alkyl)3
gggggagaaaggtgttcaaga

SEQ ID NO: 2431 - RNA, 23 nt, synthetic construct
  source 1..23: mol_type = other RNA; note = Description of Artificial Sequence: Synthetic oligonucleotide
  modified_base 1: mod_base = OTHER; note = 2'-O-methyluridine-3'-phosphorothioate
  modified_base 2: mod_base = OTHER; note = 2'-fluorocytidine-3'-phosphorothioate
  modified_base 3: mod_base = OTHER; note = 2'-O-methyluridine-3'-phosphate
  modified_base 4: mod_base = OTHER; note = 2'-O-methyluridine-3'-phosphate
  modified_base 5: mod_base = OTHER; note = 2'-O-methylguanosine-3'-phosphate
  modified_base 6: mod_base = OTHER; note = 2'-fluoroadenosine-3'-phosphate
  modified_base 7: mod_base = OTHER; note = 2'-O-methyladenosine-3'-phosphate
  modified_base 8: mod_base = OTHER; note = 2'-fluorocytidine-3'-phosphate
  modified_base 9: mod_base = OTHER; note = 2'-fluoroadenosine-3'-phosphate
  modified_base 10: mod_base = OTHER; note = 2'-O-methylcytidine-3'-phosphate
  modified_base 11: mod_base = OTHER; note = 2'-O-methylcytidine-3'-phosphate
  modified_base 12: mod_base = OTHER; note = 2'-O-methyluridine-3'-phosphate
  modified_base 13: mod_base = OTHER; note = 2'-O-methyluridine-3'-phosphate
  modified_base 14: mod_base = OTHER; note = 2'-fluorouridine-3'-phosphate
  modified_base 15: mod_base = OTHER; note = 2'-O-methylcytidine-3'-phosphate
  modified_base 16: mod_base = OTHER; note = 2'-fluorouridine-3'-phosphate
  modified_base 17: mod_base = OTHER; note = 2'-O-methylcytidine-3'-phosphate
  modified_base 18: mod_base = OTHER; note = 2'-O-methylcytidine-3'-phosphate
  modified_base 19: mod_base = OTHER; note = 2'-O-methylcytidine-3'-phosphate
  modified_base 20: mod_base = OTHER; note = 2'-O-methylcytidine-3'-phosphate
  modified_base 21: mod_base = OTHER; note = 2'-O-methylcytidine-3'-phosphorothioate
  modified_base 22: mod_base = OTHER; note = 2'-O-methyluridine-3'-phosphorothioate
  modified_base 23: mod_base = OTHER; note = 2'-O-methylguanosine-3'-phosphate
tcttgaacacctttctccccctg

SEQ ID NO: 2432 - RNA, 21 nt, synthetic construct
  source 1..21: mol_type = other RNA; note = Description of Artificial Sequence: Synthetic oligonucleotide
  modified_base 1: mod_base = OTHER; note = 2'-O-methyladenosine-3'-phosphorothioate
  modified_base 2: mod_base = OTHER; note = 2'-O-methylguanosine-3'-phosphorothioate
  modified_base 3: mod_base = OTHER; note = 2'-O-methylguanosine-3'-phosphate
  modified_base 4: mod_base = OTHER; note = 2'-O-methylguanosine-3'-phosphate
  modified_base 5: mod_base = OTHER; note = 2'-O-methylguanosine-3'-phosphate
  modified_base 6: mod_base = OTHER; note = 2'-O-methylguanosine-3'-phosphate
  modified_base 7: mod_base = OTHER; note = 2'-fluoroadenosine-3'-phosphate
  modified_base 8: mod_base = OTHER; note = 2'-O-methylguanosine-3'-phosphate
  modified_base 9: mod_base = OTHER; note = 2'-fluoroadenosine-3'-phosphate
  modified_base 10: mod_base = OTHER; note = 2'-fluoroadenosine-3'-phosphate
  modified_base 11: mod_base = OTHER; note = 2'-fluoroadenosine-3'-phosphate
  modified_base 12: mod_base = OTHER; note = 2'-O-methylguanosine-3'-phosphate
  modified_base 13: mod_base = OTHER; note = 2'-O-methylguanosine-3'-phosphate
  modified_base 14: mod_base = OTHER; note = 2'-O-methyluridine-3'-phosphate
  modified_base 15: mod_base = OTHER; note = 2'-O-methylguanosine-3'-phosphate
  modified_base 16: mod_base = OTHER; note = 2'-O-methyluridine-3'-phosphate
  modified_base 17: mod_base = OTHER; note = 2'-O-methyluridine-3'-phosphate
  modified_base 18: mod_base = OTHER; note = 2'-O-methylcytidine-3'-phosphate
  modified_base 19: mod_base = OTHER; note = 2'-O-methyladenosine-3'-phosphate
  modified_base 20: mod_base = OTHER; note = 2'-O-methyladenosine-3'-phosphate
  modified_base 21: mod_base = OTHER; note = 2'-O-methylguanosine-3'-phosphate N-[tris(GalNAc-alkyl)-amidodecanoyl)]-4-hydroxyprolinol Hyp-(GalNAc-alkyl)3
agggggagaaaggtgttcaag

SEQ ID NO: 2433 - RNA, 23 nt, synthetic construct
  source 1..23: mol_type = other RNA; note = Description of Artificial Sequence: Synthetic oligonucleotide
  modified_base 1: mod_base = OTHER; note = 2'-O-methylcytidine-3'-phosphorothioate
  modified_base 2: mod_base = OTHER; note = 2'-fluorouridine -3'-phosphorothioate
  modified_base 3: mod_base = OTHER; note = 2'-O-methyluridine-3'-phosphate
  modified_base 4: mod_base = OTHER; note = 2'-O-methylguanosine-3'-phosphate
  modified_base 5: mod_base = OTHER; note = 2'-O-methyladenosine-3'-phosphate
  modified_base 6: mod_base = OTHER; note = 2'-fluoroadenosine-3'-phosphate
  modified_base 7: mod_base = OTHER; note = 2'-O-methylcytidine-3'-phosphate
  modified_base 8: mod_base = OTHER; note = 2'-fluoroadenosine-3'-phosphate
  modified_base 9: mod_base = OTHER; note = 2'-fluorocytidine-3'-phosphate
  modified_base 10: mod_base = OTHER; note = 2'-O-methylcytidine-3'-phosphate
  modified_base 11: mod_base = OTHER; note = 2'-O-methyluridine-3'-phosphate
  modified_base 12: mod_base = OTHER; note = 2'-O-methyluridine-3'-phosphate
  modified_base 13: mod_base = OTHER; note = 2'-O-methyluridine-3'-phosphate
  modified_base 14: mod_base = OTHER; note = 2'-fluorocytidine-3'-phosphate
  modified_base 15: mod_base = OTHER; note = 2'-O-methyluridine-3'-phosphate
  modified_base 16: mod_base = OTHER; note = 2'-fluorocytidine-3'-phosphate
  modified_base 17: mod_base = OTHER; note = 2'-O-methylcytidine-3'-phosphate
  modified_base 18: mod_base = OTHER; note = 2'-O-methylcytidine-3'-phosphate
  modified_base 19: mod_base = OTHER; note = 2'-O-methylcytidine-3'-phosphate
  modified_base 20: mod_base = OTHER; note = 2'-O-methylcytidine-3'-phosphate
  modified_base 21: mod_base = OTHER; note = 2'-O-methyluridine-3'-phosphorothioate
  modified_base 22: mod_base = OTHER; note = 2'-O-methylguanosine-3'-phosphorothioate
  modified_base 23: mod_base = OTHER; note = 2'-O-methylguanosine-3'-phosphate
cttgaacacctttctccccctgg

SEQ ID NO: 2434 - RNA, 21 nt, synthetic construct
  source 1..21: mol_type = other RNA; note = Description of Artificial Sequence: Synthetic oligonucleotide
  modified_base 1: mod_base = OTHER; note = 2'-O-methylguanosine-3'-phosphorothioate
  modified_base 2: mod_base = OTHER; note = 2'-O-methylcytidine-3'-phosphorothioate
  modified_base 3: mod_base = OTHER; note = 2'-O-methyluridine-3'-phosphate
  modified_base 4: mod_base = OTHER; note = 2'-O-methylguanosine-3'-phosphate
  modified_base 5: mod_base = OTHER; note = 2'-O-methylguanosine-3'-phosphate
  modified_base 6: mod_base = OTHER; note = 2'-O-methylguanosine-3'-phosphate
  modified_base 7: mod_base = OTHER; note = 2'-fluoroadenosine-3'-phosphate
  modified_base 8: mod_base = OTHER; note = 2'-O-methyladenosine-3'-phosphate
  modified_base 9: mod_base = OTHER; note = 2'-fluoroguanosine-3'-phosphate
  modified_base 10: mod_base = OTHER; note = 2'-fluoroadenosine-3'-phosphate
  modified_base 11: mod_base = OTHER; note = 2'-fluorouridine-3'-phosphate
  modified_base 12: mod_base = OTHER; note = 2'-O-methyladenosine-3'-phosphate
  modified_base 13: mod_base = OTHER; note = 2'-O-methyluridine-3'-phosphate
  modified_base 14: mod_base = OTHER; note = 2'-O-methylcytidine-3'-phosphate
  modified_base 15: mod_base = OTHER; note = 2'-O-methyladenosine-3'-phosphate
  modified_base 16: mod_base = OTHER; note = 2'-O-methyladenosine-3'-phosphate
  modified_base 17: mod_base = OTHER; note = 2'-O-methyladenosine-3'-phosphate
  modified_base 18: mod_base = OTHER; note = 2'-O-methyluridine-3'-phosphate
  modified_base 19: mod_base = OTHER; note = 2'-O-methylguanosine-3'-phosphate
  modified_base 20: mod_base = OTHER; note = 2'-O-methylguanosine-3'-phosphate
  modified_base 21: mod_base = OTHER; note = 2'-O-methylcytidine-3'-phosphate N-[tris(GalNAc-alkyl)-amidodecanoyl)]-4-hydroxyprolinol Hyp-(GalNAc-alkyl)3
gctgggaagatatcaaatggc

SEQ ID NO: 2435 - RNA, 23 nt, synthetic construct
  source 1..23: mol_type = other RNA; note = Description of Artificial Sequence: Synthetic oligonucleotide
  modified_base 1: mod_base = OTHER; note = 2'-O-methylguanosine-3'-phosphorothioate
  modified_base 2: mod_base = OTHER; note = 2'-fluorocytidine-3'-phosphorothioate
  modified_base 3: mod_base = OTHER; note = 2'-O-methylcytidine-3'-phosphate
  modified_base 4: mod_base = OTHER; note = 2'-O-methyladenosine-3'-phosphate
  modified_base 5: mod_base = OTHER; note = 2'-O-methyluridine-3'-phosphate
  modified_base 6: mod_base = OTHER; note = 2'-fluorouridine-3'-phosphate
  modified_base 7: mod_base = OTHER; note = 2'-O-methyluridine-3'-phosphate
  modified_base 8: mod_base = OTHER; note = 2'-fluoroguanosine-3'-phosphate
  modified_base 9: mod_base = OTHER; note = 2'-fluoroadenosine-3'-phosphate
  modified_base 10: mod_base = OTHER; note = 2'-O-methyluridine-3'-phosphate
  modified_base 11: mod_base = OTHER; note = 2'-O-methyladenosine-3'-phosphate
  modified_base 12: mod_base = OTHER; note = 2'-O-methyluridine-3'-phosphate
  modified_base 13: mod_base = OTHER; note = 2'-O-methylcytidine-3'-phosphate
  modified_base 14: mod_base = OTHER; note = 2'-fluorouridine-3'-phosphate
  modified_base 15: mod_base = OTHER; note = 2'-O-methyluridine-3'-phosphate
  modified_base 16: mod_base = OTHER; note = 2'-fluorocytidine-3'-phosphate
  modified_base 17: mod_base = OTHER; note = 2'-O-methylcytidine-3'-phosphate
  modified_base 18: mod_base = OTHER; note = 2'-O-methylcytidine-3'-phosphate
  modified_base 19: mod_base = OTHER; note = 2'-O-methyladenosine-3'-phosphate
  modified_base 20: mod_base = OTHER; note = 2'-O-methylguanosine-3'-phosphate
  modified_base 21: mod_base = OTHER; note = 2'-O-methylcytidine-3'-phosphorothioate
  modified_base 22: mod_base = OTHER; note = 2'-O-methyluridine-3'-phosphorothioate
  modified_base 23: mod_base = OTHER; note = 2'-O-methylguanosine-3'-phosphate
gccatttgatatcttcccagctg

SEQ ID NO: 2436 - RNA, 21 nt, synthetic construct
  source 1..21: mol_type = other RNA; note = Description of Artificial Sequence: Synthetic oligonucleotide
  modified_base 1: mod_base = OTHER; note = 2'-O-methylcytidine-3'-phosphorothioate
  modified_base 2: mod_base = OTHER; note = 2'-O-methyluridine-3'-phosphorothioate
  modified_base 3: mod_base = OTHER; note = 2'-O-methylguanosine-3'-phosphate
  modified_base 4: mod_base = OTHER; note = 2'-O-methylguanosine-3'-phosphate
  modified_base 5: mod_base = OTHER; note = 2'-O-methylguanosine-3'-phosphate
  modified_base 6: mod_base = OTHER; note = 2'-O-methyladenosine-3'-phosphate
  modified_base 7: mod_base = OTHER; note = 2'-fluoroadenosine-3'-phosphate
  modified_base 8: mod_base = OTHER; note = 2'-O-methylguanosine-3'-phosphate
  modified_base 9: mod_base = OTHER; note = 2'-fluoroadenosine-3'-phosphate
  modified_base 10: mod_base = OTHER; note = 2'-fluorouridine-3'-phosphate
  modified_base 11: mod_base = OTHER; note = 2'-fluoroadenosine-3'-phosphate
  modified_base 12: mod_base = OTHER; note = 2'-O-methyluridine-3'-phosphate
  modified_base 13: mod_base = OTHER; note = 2'-O-methylcytidine-3'-phosphate
  modified_base 14: mod_base = OTHER; note = 2'-O-methyladenosine-3'-phosphate
  modified_base 15: mod_base = OTHER; note = 2'-O-methyladenosine-3'-phosphate
  modified_base 16: mod_base = OTHER; note = 2'-O-methyladenosine-3'-phosphate
  modified_base 17: mod_base = OTHER; note = 2'-O-methyluridine-3'-phosphate
  modified_base 18: mod_base = OTHER; note = 2'-O-methylguanosine-3'-phosphate
  modified_base 19: mod_base = OTHER; note = 2'-O-methylguanosine-3'-phosphate
  modified_base 20: mod_base = OTHER; note = 2'-O-methylcytidine-3'-phosphate
  modified_base 21: mod_base = OTHER; note = 2'-O-methyluridine-3'-phosphate N-[tris(GalNAc-alkyl)-amidodecanoyl)]-4-hydroxyprolinol Hyp-(GalNAc-alkyl)3
ctgggaagatatcaaatggct

SEQ ID NO: 2437 - RNA, 23 nt, synthetic construct
  source 1..23: mol_type = other RNA; note = Description of Artificial Sequence: Synthetic oligonucleotide
  modified_base 1: mod_base = OTHER; note = 2'-O-methyladenosine-3'-phosphorothioate
  modified_base 2: mod_base = OTHER; note = 2'-fluoroguanosine-3'-phosphorothioate
  modified_base 3: mod_base = OTHER; note = 2'-O-methylcytidine-3'-phosphate
  modified_base 4: mod_base = OTHER; note = 2'-O-methylcytidine-3'-phosphate
  modified_base 5: mod_base = OTHER; note = 2'-O-methyladenosine-3'-phosphate
  modified_base 6: mod_base = OTHER; note = 2'-fluorouridine-3'-phosphate
  modified_base 7: mod_base = OTHER; note = 2'-O-methyluridine-3'-phosphate
  modified_base 8: mod_base = OTHER; note = 2'-fluorouridine-3'-phosphate
  modified_base 9: mod_base = OTHER; note = 2'-fluoroguanosine-3'-phosphate
  modified_base 10: mod_base = OTHER; note = 2'-O-methyladenosine-3'-phosphate
  modified_base 11: mod_base = OTHER; note = 2'-O-methyluridine-3'-phosphate
  modified_base 12: mod_base = OTHER; note = 2'-O-methyladenosine-3'-phosphate
  modified_base 13: mod_base = OTHER; note = 2'-O-methyluridine-3'-phosphate
  modified_base 14: mod_base = OTHER; note = 2'-fluorocytidine-3'-phosphate
  modified_base 15: mod_base = OTHER; note = 2'-O-methyluridine-3'-phosphate
  modified_base 16: mod_base = OTHER; note = 2'-fluorouridine-3'-phosphate
  modified_base 17: mod_base = OTHER; note = 2'-O-methylcytidine-3'-phosphate
  modified_base 18: mod_base = OTHER; note = 2'-O-methylcytidine-3'-phosphate
  modified_base 19: mod_base = OTHER; note = 2'-O-methylcytidine-3'-phosphate
  modified_base 20: mod_base = OTHER; note = 2'-O-methyladenosine-3'-phosphate
  modified_base 21: mod_base = OTHER; note = 2'-O-methylguanosine-3'-phosphorothioate
  modified_base 22: mod_base = OTHER; note = 2'-O-methylcytidine-3'-phosphorothioate
  modified_base 23: mod_base = OTHER; note = 2'-O-methyluridine-3'-phosphate
agccatttgatatcttcccagct

SEQ ID NO: 2438 - RNA, 21 nt, synthetic construct
  source 1..21: mol_type = other RNA; note = Description of Artificial Sequence: Synthetic oligonucleotide
  modified_base 1: mod_base = OTHER; note = 2'-O-methyladenosine-3'-phosphorothioate
  modified_base 2: mod_base = OTHER; note = 2'-O-methyluridine-3'-phosphorothioate
  modified_base 3: mod_base = OTHER; note = 2'-O-methylcytidine-3'-phosphate
  modified_base 4: mod_base = OTHER; note = 2'-O-methyladenosine-3'-phosphate
  modified_base 5: mod_base = OTHER; note = 2'-O-methylguanosine-3'-phosphate
  modified_base 6: mod_base = OTHER; note = 2'-O-methylcytidine-3'-phosphate
  modified_base 7: mod_base = OTHER; note = 2'-fluorouridine-3'-phosphate
  modified_base 8: mod_base = OTHER; note = 2'-O-methylguanosine-3'-phosphate
  modified_base 9: mod_base = OTHER; note = 2'-fluoroguanosine-3'-phosphate
  modified_base 10: mod_base = OTHER; note = 2'-fluoroguanosine-3'-phosphate
  modified_base 11: mod_base = OTHER; note = 2'-fluoroadenosine-3'-phosphate
  modified_base 12: mod_base = OTHER; note = 2'-O-methyladenosine-3'-phosphate
  modified_base 13: mod_base = OTHER; note = 2'-O-methylguanosine-3'-phosphate
  modified_base 14: mod_base = OTHER; note = 2'-O-methyladenosine-3'-phosphate
  modified_base 15: mod_base = OTHER; note = 2'-O-methyluridine-3'-phosphate
  modified_base 16: mod_base = OTHER; note = 2'-O-methyladenosine-3'-phosphate
  modified_base 17: mod_base = OTHER; note = 2'-O-methyluridine-3'-phosphate
  modified_base 18: mod_base = OTHER; note = 2'-O-methylcytidine-3'-phosphate
  modified_base 19: mod_base = OTHER; note = 2'-O-methyladenosine-3'-phosphate
  modified_base 20: mod_base = OTHER; note = 2'-O-methyladenosine-3'-phosphate
  modified_base 21: mod_base = OTHER; note = 2'-O-methyladenosine-3'-phosphate N-[tris(GalNAc-alkyl)-amidodecanoyl)]-4-hydroxyprolinol Hyp-(GalNAc-alkyl)3
atcagctgggaagatatcaaa

SEQ ID NO: 2439 - RNA, 23 nt, synthetic construct
  source 1..23: mol_type = other RNA; note = Description of Artificial Sequence: Synthetic oligonucleotide
  modified_base 1: mod_base = OTHER; note = 2'-O-methyluridine-3'-phosphorothioate
  modified_base 2: mod_base = OTHER; note = 2'-fluorouridine -3'-phosphorothioate
  modified_base 3: mod_base = OTHER; note = 2'-O-methyluridine-3'-phosphate
  modified_base 4: mod_base = OTHER; note = 2'-O-methylguanosine-3'-phosphate
  modified_base 5: mod_base = OTHER; note = 2'-O-methyladenosine-3'-phosphate
  modified_base 6: mod_base = OTHER; note = 2'-fluorouridine-3'-phosphate
  modified_base 7: mod_base = OTHER; note = 2'-O-methyladenosine-3'-phosphate
  modified_base 8: mod_base = OTHER; note = 2'-fluorouridine-3'-phosphate
  modified_base 9: mod_base = OTHER; note = 2'-fluorocytidine-3'-phosphate
  modified_base 10: mod_base = OTHER; note = 2'-O-methyluridine-3'-phosphate
  modified_base 11: mod_base = OTHER; note = 2'-O-methyluridine-3'-phosphate
  modified_base 12: mod_base = OTHER; note = 2'-O-methylcytidine-3'-phosphate
  modified_base 13: mod_base = OTHER; note = 2'-O-methylcytidine-3'-phosphate
  modified_base 14: mod_base = OTHER; note = 2'-fluorocytidine-3'-phosphate
  modified_base 15: mod_base = OTHER; note = 2'-O-methyladenosine-3'-phosphate
  modified_base 16: mod_base = OTHER; note = 2'-fluoroguanosine-3'-phosphate
  modified_base 17: mod_base = OTHER; note = 2'-O-methylcytidine-3'-phosphate
  modified_base 18: mod_base = OTHER; note = 2'-O-methyluridine-3'-phosphate
  modified_base 19: mod_base = OTHER; note = 2'-O-methylguanosine-3'-phosphate
  modified_base 20: mod_base = OTHER; note = 2'-O-methyladenosine-3'-phosphate
  modified_base 21: mod_base = OTHER; note = 2'-O-methyluridine-3'-phosphorothioate
  modified_base 22: mod_base = OTHER; note = 2'-O-methyladenosine-3'-phosphorothioate
  modified_base 23: mod_base = OTHER; note = 2'-O-methylguanosine-3'-phosphate
tttgatatcttcccagctgatag

SEQ ID NO: 2440 - RNA, 21 nt, synthetic construct
  source 1..21: mol_type = other RNA; note = Description of Artificial Sequence: Synthetic oligonucleotide
  modified_base 1: mod_base = OTHER; note = 2'-O-methyluridine-3'-phosphorothioate
  modified_base 2: mod_base = OTHER; note = 2'-O-methyladenosine-3'-phosphorothioate
  modified_base 3: mod_base = OTHER; note = 2'-O-methyluridine-3'-phosphate
  modified_base 4: mod_base = OTHER; note = 2'-O-methylcytidine-3'-phosphate
  modified_base 5: mod_base = OTHER; note = 2'-O-methyladenosine-3'-phosphate
  modified_base 6: mod_base = OTHER; note = 2'-O-methylguanosine-3'-phosphate
  modified_base 7: mod_base = OTHER; note = 2'-fluorocytidine-3'-phosphate
  modified_base 8: mod_base = OTHER; note = 2'-O-methyluridine-3'-phosphate
  modified_base 9: mod_base = OTHER; note = 2'-fluoroguanosine-3'-phosphate
  modified_base 10: mod_base = OTHER; note = 2'-fluoroguanosine-3'-phosphate
  modified_base 11: mod_base = OTHER; note = 2'-fluoroguanosine-3'-phosphate
  modified_base 12: mod_base = OTHER; note = 2'-O-methyladenosine-3'-phosphate
  modified_base 13: mod_base = OTHER; note = 2'-O-methyladenosine-3'-phosphate
  modified_base 14: mod_base = OTHER; note = 2'-O-methylguanosine-3'-phosphate
  modified_base 15: mod_base = OTHER; note = 2'-O-methyladenosine-3'-phosphate
  modified_base 16: mod_base = OTHER; note = 2'-O-methyluridine-3'-phosphate
  modified_base 17: mod_base = OTHER; note = 2'-O-methyladenosine-3'-phosphate
  modified_base 18: mod_base = OTHER; note = 2'-O-methyluridine-3'-phosphate
  modified_base 19: mod_base = OTHER; note = 2'-O-methylcytidine-3'-phosphate
  modified_base 20: mod_base = OTHER; note = 2'-O-methyladenosine-3'-phosphate
  modified_base 21: mod_base = OTHER; note = 2'-O-methyladenosine-3'-phosphate N-[tris(GalNAc-alkyl)-amidodecanoyl)]-4-hydroxyprolinol Hyp-(GalNAc-alkyl)3
tatcagctgggaagatatcaa

SEQ ID NO: 2441 - RNA, 23 nt, synthetic construct
  source 1..23: mol_type = other RNA; note = Description of Artificial Sequence: Synthetic oligonucleotide
  modified_base 1: mod_base = OTHER; note = 2'-O-methyluridine-3'-phosphorothioate
  modified_base 2: mod_base = OTHER; note = 2'-fluorouridine -3'-phosphorothioate
  modified_base 3: mod_base = OTHER; note = 2'-O-methylguanosine-3'-phosphate
  modified_base 4: mod_base = OTHER; note = 2'-O-methyladenosine-3'-phosphate
  modified_base 5: mod_base = OTHER; note = 2'-O-methyluridine-3'-phosphate
  modified_base 6: mod_base = OTHER; note = 2'-fluoroadenosine-3'-phosphate
  modified_base 7: mod_base = OTHER; note = 2'-O-methyluridine-3'-phosphate
  modified_base 8: mod_base = OTHER; note = 2'-fluorocytidine-3'-phosphate
  modified_base 9: mod_base = OTHER; note = 2'-fluorouridine-3'-phosphate
  modified_base 10: mod_base = OTHER; note = 2'-O-methyluridine-3'-phosphate
  modified_base 11: mod_base = OTHER; note = 2'-O-methylcytidine-3'-phosphate
  modified_base 12: mod_base = OTHER; note = 2'-O-methylcytidine-3'-phosphate
  modified_base 13: mod_base = OTHER; note = 2'-O-methylcytidine-3'-phosphate
  modified_base 14: mod_base = OTHER; note = 2'-fluoroadenosine-3'-phosphate
  modified_base 15: mod_base = OTHER; note = 2'-O-methylguanosine-3'-phosphate
  modified_base 16: mod_base = OTHER; note = 2'-fluorocytidine-3'-phosphate
  modified_base 17: mod_base = OTHER; note = 2'-O-methyluridine-3'-phosphate
  modified_base 18: mod_base = OTHER; note = 2'-O-methylguanosine-3'-phosphate
  modified_base 19: mod_base = OTHER; note = 2'-O-methyladenosine-3'-phosphate
  modified_base 20: mod_base = OTHER; note = 2'-O-methyluridine-3'-phosphate
  modified_base 21: mod_base = OTHER; note = 2'-O-methyladenosine-3'-phosphorothioate
  modified_base 22: mod_base = OTHER; note = 2'-O-methylguanosine-3'-phosphorothioate
  modified_base 23: mod_base = OTHER; note = 2'-O-methyladenosine-3'-phosphate
ttgatatcttcccagctgataga

SEQ ID NO: 2442 - RNA, 21 nt, synthetic construct
  source 1..21: mol_type = other RNA; note = Description of Artificial Sequence: Synthetic oligonucleotide
  modified_base 1: mod_base = OTHER; note = 2'-O-methyluridine-3'-phosphorothioate
  modified_base 2: mod_base = OTHER; note = 2'-O-methylcytidine-3'-phosphorothioate
  modified_base 3: mod_base = OTHER; note = 2'-O-methyluridine-3'-phosphate
  modified_base 4: mod_base = OTHER; note = 2'-O-methylguanosine-3'-phosphate
  modified_base 5: mod_base = OTHER; note = 2'-O-methyluridine-3'-phosphate
  modified_base 6: mod_base = OTHER; note = 2'-O-methylcytidine-3'-phosphate
  modified_base 7: mod_base = OTHER; note = 2'-fluoroguanosine-3'-phosphate
  modified_base 8: mod_base = OTHER; note = 2'-O-methyladenosine-3'-phosphate
  modified_base 9: mod_base = OTHER; note = 2'-fluorocytidine-3'-phosphate
  modified_base 10: mod_base = OTHER; note = 2'-fluorouridine-3'-phosphate
  modified_base 11: mod_base = OTHER; note = 2'-fluorouridine-3'-phosphate
  modified_base 12: mod_base = OTHER; note = 2'-O-methylcytidine-3'-phosphate
  modified_base 13: mod_base = OTHER; note = 2'-O-methyluridine-3'-phosphate
  modified_base 14: mod_base = OTHER; note = 2'-O-methylguanosine-3'-phosphate
  modified_base 15: mod_base = OTHER; note = 2'-O-methyluridine-3'-phosphate
  modified_base 16: mod_base = OTHER; note = 2'-O-methyluridine-3'-phosphate
  modified_base 17: mod_base = OTHER; note = 2'-O-methyluridine-3'-phosphate
  modified_base 18: mod_base = OTHER; note = 2'-O-methyluridine-3'-phosphate
  modified_base 19: mod_base = OTHER; note = 2'-O-methyladenosine-3'-phosphate
  modified_base 20: mod_base = OTHER; note = 2'-O-methylguanosine-3'-phosphate
  modified_base 21: mod_base = OTHER; note = 2'-O-methylguanosine-3'-phosphate N-[tris(GalNAc-alkyl)-amidodecanoyl)]-4-hydroxyprolinol Hyp-(GalNAc-alkyl)3
tctgtcgacttctgttttagg

SEQ ID NO: 2443 - RNA, 23 nt, synthetic construct
  source 1..23: mol_type = other RNA; note = Description of Artificial Sequence: Synthetic oligonucleotide
  modified_base 1: mod_base = OTHER; note = 2'-O-methylcytidine-3'-phosphorothioate
  modified_base 2: mod_base = OTHER; note = 2'-fluorocytidine-3'-phosphorothioate
  modified_base 3: mod_base = OTHER; note = 2'-O-methyluridine-3'-phosphate
  modified_base 4: mod_base = OTHER; note = 2'-O-methyladenosine-3'-phosphate
  modified_base 5: mod_base = OTHER; note = 2'-O-methyladenosine-3'-phosphate
  modified_base 6: mod_base = OTHER; note = 2'-fluoroadenosine-3'-phosphate
  modified_base 7: mod_base = OTHER; note = 2'-O-methyladenosine-3'-phosphate
  modified_base 8: mod_base = OTHER; note = 2'-fluorocytidine-3'-phosphate
  modified_base 9: mod_base = OTHER; note = 2'-fluoroadenosine-3'-phosphate
  modified_base 10: mod_base = OTHER; note = 2'-O-methylguanosine-3'-phosphate
  modified_base 11: mod_base = OTHER; note = 2'-O-methyladenosine-3'-phosphate
  modified_base 12: mod_base = OTHER; note = 2'-O-methyladenosine-3'-phosphate
  modified_base 13: mod_base = OTHER; note = 2'-O-methylguanosine-3'-phosphate
  modified_base 14: mod_base = OTHER; note = 2'-fluorouridine-3'-phosphate
  modified_base 15: mod_base = OTHER; note = 2'-O-methylcytidine-3'-phosphate
  modified_base 16: mod_base = OTHER; note = 2'-fluoroguanosine-3'-phosphate
  modified_base 17: mod_base = OTHER; note = 2'-O-methyladenosine-3'-phosphate
  modified_base 18: mod_base = OTHER; note = 2'-O-methylcytidine-3'-phosphate
  modified_base 19: mod_base = OTHER; note = 2'-O-methyladenosine-3'-phosphate
  modified_base 20: mod_base = OTHER; note = 2'-O-methylguanosine-3'-phosphate
  modified_base 21: mod_base = OTHER; note = 2'-O-methyladenosine-3'-phosphorothioate
  modified_base 22: mod_base = OTHER; note = 2'-O-methyluridine-3'-phosphorothioate
  modified_base 23: mod_base = OTHER; note = 2'-O-methylcytidine-3'-phosphate
cctaaaacagaagtcgacagatc

SEQ ID NO: 2444 - RNA, 21 nt, synthetic construct
  source 1..21: mol_type = other RNA; note = Description of Artificial Sequence: Synthetic oligonucleotide
  modified_base 1: mod_base = OTHER; note = 2'-O-methylcytidine-3'-phosphorothioate
  modified_base 2: mod_base = OTHER; note = 2'-O-methyluridine-3'-phosphorothioate
  modified_base 3: mod_base = OTHER; note = 2'-O-methylguanosine-3'-phosphate
  modified_base 4: mod_base = OTHER; note = 2'-O-methyluridine-3'-phosphate
  modified_base 5: mod_base = OTHER; note = 2'-O-methylcytidine-3'-phosphate
  modified_base 6: mod_base = OTHER; note = 2'-O-methylguanosine-3'-phosphate
  modified_base 7: mod_base = OTHER; note = 2'-fluoroadenosine-3'-phosphate
  modified_base 8: mod_base = OTHER; note = 2'-O-methylcytidine-3'-phosphate
  modified_base 9: mod_base = OTHER; note = 2'-fluorouridine-3'-phosphate
  modified_base 10: mod_base = OTHER; note = 2'-fluorouridine-3'-phosphate
  modified_base 11: mod_base = OTHER; note = 2'-fluorocytidine-3'-phosphate
  modified_base 12: mod_base = OTHER; note = 2'-O-methyluridine-3'-phosphate
  modified_base 13: mod_base = OTHER; note = 2'-O-methylguanosine-3'-phosphate
  modified_base 14: mod_base = OTHER; note = 2'-O-methyluridine-3'-phosphate
  modified_base 15: mod_base = OTHER; note = 2'-O-methyluridine-3'-phosphate
  modified_base 16: mod_base = OTHER; note = 2'-O-methyluridine-3'-phosphate
  modified_base 17: mod_base = OTHER; note = 2'-O-methyluridine-3'-phosphate
  modified_base 18: mod_base = OTHER; note = 2'-O-methyladenosine-3'-phosphate
  modified_base 19: mod_base = OTHER; note = 2'-O-methylguanosine-3'-phosphate
  modified_base 20: mod_base = OTHER; note = 2'-O-methylguanosine-3'-phosphate
  modified_base 21: mod_base = OTHER; note = 2'-O-methyladenosine-3'-phosphate N-[tris(GalNAc-alkyl)-amidodecanoyl)]-4-hydroxyprolinol Hyp-(GalNAc-alkyl)3
ctgtcgacttctgttttagga

SEQ ID NO: 2445 - RNA, 23 nt, synthetic construct
  source 1..23: mol_type = other RNA; note = Description of Artificial Sequence: Synthetic oligonucleotide
  modified_base 1: mod_base = OTHER; note = 2'-O-methyluridine-3'-phosphorothioate
  modified_base 2: mod_base = OTHER; note = 2'-fluorocytidine-3'-phosphorothioate
  modified_base 3: mod_base = OTHER; note = 2'-O-methylcytidine-3'-phosphate
  modified_base 4: mod_base = OTHER; note = 2'-O-methyluridine-3'-phosphate
  modified_base 5: mod_base = OTHER; note = 2'-O-methyladenosine-3'-phosphate
  modified_base 6: mod_base = OTHER; note = 2'-fluoroadenosine-3'-phosphate
  modified_base 7: mod_base = OTHER; note = 2'-O-methyladenosine-3'-phosphate
  modified_base 8: mod_base = OTHER; note = 2'-fluoroadenosine-3'-phosphate
  modified_base 9: mod_base = OTHER; note = 2'-fluorocytidine-3'-phosphate
  modified_base 10: mod_base = OTHER; note = 2'-O-methyladenosine-3'-phosphate
  modified_base 11: mod_base = OTHER; note = 2'-O-methylguanosine-3'-phosphate
  modified_base 12: mod_base = OTHER; note = 2'-O-methyladenosine-3'-phosphate
  modified_base 13: mod_base = OTHER; note = 2'-O-methyladenosine-3'-phosphate
  modified_base 14: mod_base = OTHER; note = 2'-fluoroguanosine-3'-phosphate
  modified_base 15: mod_base = OTHER; note = 2'-O-methyluridine-3'-phosphate
  modified_base 16: mod_base = OTHER; note = 2'-fluorocytidine-3'-phosphate
  modified_base 17: mod_base = OTHER; note = 2'-O-methylguanosine-3'-phosphate
  modified_base 18: mod_base = OTHER; note = 2'-O-methyladenosine-3'-phosphate
  modified_base 19: mod_base = OTHER; note = 2'-O-methylcytidine-3'-phosphate
  modified_base 20: mod_base = OTHER; note = 2'-O-methyladenosine-3'-phosphate
  modified_base 21: mod_base = OTHER; note = 2'-O-methylguanosine-3'-phosphorothioate
  modified_base 22: mod_base = OTHER; note = 2'-O-methyladenosine-3'-phosphorothioate
  modified_base 23: mod_base = OTHER; note = 2'-O-methyluridine-3'-phosphate
tcctaaaacagaagtcgacagat

SEQ ID NO: 2446 - RNA, 21 nt, synthetic construct
  source 1..21: mol_type = other RNA; note = Description of Artificial Sequence: Synthetic oligonucleotide
  modified_base 1: mod_base = OTHER; note = 2'-O-methylcytidine-3'-phosphorothioate
  modified_base 2: mod_base = OTHER; note = 2'-O-methyladenosine-3'-phosphorothioate
  modified_base 3: mod_base = OTHER; note = 2'-O-methylguanosine-3'-phosphate
  modified_base 4: mod_base = OTHER; note = 2'-O-methyladenosine-3'-phosphate
  modified_base 5: mod_base = OTHER; note = 2'-O-methyluridine-3'-phosphate
  modified_base 6: mod_base = OTHER; note = 2'-O-methylcytidine-3'-phosphate
  modified_base 7: mod_base = OTHER; note = 2'-fluorouridine-3'-phosphate
  modified_base 8: mod_base = OTHER; note = 2'-O-methylguanosine-3'-phosphate
  modified_base 9: mod_base = OTHER; note = 2'-fluorouridine-3'-phosphate
  modified_base 10: mod_base = OTHER; note = 2'-fluorocytidine-3'-phosphate
  modified_base 11: mod_base = OTHER; note = 2'-fluoroguanosine-3'-phosphate
  modified_base 12: mod_base = OTHER; note = 2'-O-methyladenosine-3'-phosphate
  modified_base 13: mod_base = OTHER; note = 2'-O-methylcytidine-3'-phosphate
  modified_base 14: mod_base = OTHER; note = 2'-O-methyluridine-3'-phosphate
  modified_base 15: mod_base = OTHER; note = 2'-O-methyluridine-3'-phosphate
  modified_base 16: mod_base = OTHER; note = 2'-O-methylcytidine-3'-phosphate
  modified_base 17: mod_base = OTHER; note = 2'-O-methyluridine-3'-phosphate
  modified_base 18: mod_base = OTHER; note = 2'-O-methylguanosine-3'-phosphate
  modified_base 19: mod_base = OTHER; note = 2'-O-methyluridine-3'-phosphate
  modified_base 20: mod_base = OTHER; note = 2'-O-methyluridine-3'-phosphate
  modified_base 21: mod_base = OTHER; note = 2'-O-methyluridine-3'-phosphate N-[tris(GalNAc-alkyl)-amidodecanoyl)]-4-hydroxyprolinol Hyp-(GalNAc-alkyl)3
cagatctgtcgacttctgttt

SEQ ID NO: 2447 - RNA, 23 nt, synthetic construct
  source 1..23: mol_type = other RNA; note = Description of Artificial Sequence: Synthetic oligonucleotide
  modified_base 1: mod_base = OTHER; note = 2'-O-methyladenosine-3'-phosphorothioate
  modified_base 2: mod_base = OTHER; note = 2'-fluoroadenosine-3'-phosphorothioate
  modified_base 3: mod_base = OTHER; note = 2'-O-methyladenosine-3'-phosphate
  modified_base 4: mod_base = OTHER; note = 2'-O-methylcytidine-3'-phosphate
  modified_base 5: mod_base = OTHER; note = 2'-O-methyladenosine-3'-phosphate
  modified_base 6: mod_base = OTHER; note = 2'-fluoroguanosine-3'-phosphate
  modified_base 7: mod_base = OTHER; note = 2'-O-methyladenosine-3'-phosphate
  modified_base 8: mod_base = OTHER; note = 2'-fluoroadenosine-3'-phosphate
  modified_base 9: mod_base = OTHER; note = 2'-fluoroguanosine-3'-phosphate
  modified_base 10: mod_base = OTHER; note = 2'-O-methyluridine-3'-phosphate
  modified_base 11: mod_base = OTHER; note = 2'-O-methylcytidine-3'-phosphate
  modified_base 12: mod_base = OTHER; note = 2'-O-methylguanosine-3'-phosphate
  modified_base 13: mod_base = OTHER; note = 2'-O-methyladenosine-3'-phosphate
  modified_base 14: mod_base = OTHER; note = 2'-fluorocytidine-3'-phosphate
  modified_base 15: mod_base = OTHER; note = 2'-O-methyladenosine-3'-phosphate
  modified_base 16: mod_base = OTHER; note = 2'-fluoroguanosine-3'-phosphate
  modified_base 17: mod_base = OTHER; note = 2'-O-methyladenosine-3'-phosphate
  modified_base 18: mod_base = OTHER; note = 2'-O-methyluridine-3'-phosphate
  modified_base 19: mod_base = OTHER; note = 2'-O-methylcytidine-3'-phosphate
  modified_base 20: mod_base = OTHER; note = 2'-O-methyluridine-3'-phosphate
  modified_base 21: mod_base = OTHER; note = 2'-O-methylguanosine-3'-phosphorothioate
  modified_base 22: mod_base = OTHER; note = 2'-O-methyluridine-3'-phosphorothioate
  modified_base 23: mod_base = OTHER; note = 2'-O-methyluridine-3'-phosphate
aaacagaagtcgacagatctgtt

SEQ ID NO: 2448 - RNA, 21 nt, synthetic construct
  source 1..21: mol_type = other RNA; note = Description of Artificial Sequence: Synthetic oligonucleotide
  modified_base 1: mod_base = OTHER; note = 2'-O-methyladenosine-3'-phosphorothioate
  modified_base 2: mod_base = OTHER; note = 2'-O-methylcytidine-3'-phosphorothioate
  modified_base 3: mod_base = OTHER; note = 2'-O-methyladenosine-3'-phosphate
  modified_base 4: mod_base = OTHER; note = 2'-O-methylguanosine-3'-phosphate
  modified_base 5: mod_base = OTHER; note = 2'-O-methyladenosine-3'-phosphate
  modified_base 6: mod_base = OTHER; note = 2'-O-methyluridine-3'-phosphate
  modified_base 7: mod_base = OTHER; note = 2'-fluorocytidine-3'-phosphate
  modified_base 8: mod_base = OTHER; note = 2'-O-methyluridine-3'-phosphate
  modified_base 9: mod_base = OTHER; note = 2'-fluoroguanosine-3'-phosphate
  modified_base 10: mod_base = OTHER; note = 2'-fluorouridine-3'-phosphate
  modified_base 11: mod_base = OTHER; note = 2'-fluorocytidine-3'-phosphate
  modified_base 12: mod_base = OTHER; note = 2'-O-methylguanosine-3'-phosphate
  modified_base 13: mod_base = OTHER; note = 2'-O-methyladenosine-3'-phosphate
  modified_base 14: mod_base = OTHER; note = 2'-O-methylcytidine-3'-phosphate
  modified_base 15: mod_base = OTHER; note = 2'-O-methyluridine-3'-phosphate
  modified_base 16: mod_base = OTHER; note = 2'-O-methyluridine-3'-phosphate
  modified_base 17: mod_base = OTHER; note = 2'-O-methylcytidine-3'-phosphate
  modified_base 18: mod_base = OTHER; note = 2'-O-methyluridine-3'-phosphate
  modified_base 19: mod_base = OTHER; note = 2'-O-methylguanosine-3'-phosphate
  modified_base 20: mod_base = OTHER; note = 2'-O-methyluridine-3'-phosphate
  modified_base 21: mod_base = OTHER; note = 2'-O-methyluridine-3'-phosphate N-[tris(GalNAc-alkyl)-amidodecanoyl)]-4-hydroxyprolinol Hyp-(GalNAc-alkyl)3
acagatctgtcgacttctgtt

SEQ ID NO: 2449 - RNA, 23 nt, synthetic construct
  source 1..23: mol_type = other RNA; note = Description of Artificial Sequence: Synthetic oligonucleotide
  modified_base 1: mod_base = OTHER; note = 2'-O-methyladenosine-3'-phosphorothioate
  modified_base 2: mod_base = OTHER; note = 2'-fluoroadenosine-3'-phosphorothioate
  modified_base 3: mod_base = OTHER; note = 2'-O-methylcytidine-3'-phosphate
  modified_base 4: mod_base = OTHER; note = 2'-O-methyladenosine-3'-phosphate
  modified_base 5: mod_base = OTHER; note = 2'-O-methylguanosine-3'-phosphate
  modified_base 6: mod_base = OTHER; note = 2'-fluoroadenosine-3'-phosphate
  modified_base 7: mod_base = OTHER; note = 2'-O-methyladenosine-3'-phosphate
  modified_base 8: mod_base = OTHER; note = 2'-fluoroguanosine-3'-phosphate
  modified_base 9: mod_base = OTHER; note = 2'-fluorouridine-3'-phosphate
  modified_base 10: mod_base = OTHER; note = 2'-O-methylcytidine-3'-phosphate
  modified_base 11: mod_base = OTHER; note = 2'-O-methylguanosine-3'-phosphate
  modified_base 12: mod_base = OTHER; note = 2'-O-methyladenosine-3'-phosphate
  modified_base 13: mod_base = OTHER; note = 2'-O-methylcytidine-3'-phosphate
  modified_base 14: mod_base = OTHER; note = 2'-fluoroadenosine-3'-phosphate
  modified_base 15: mod_base = OTHER; note = 2'-O-methylguanosine-3'-phosphate
  modified_base 16: mod_base = OTHER; note = 2'-fluoroadenosine-3'-phosphate
  modified_base 17: mod_base = OTHER; note = 2'-O-methyluridine-3'-phosphate
  modified_base 18: mod_base = OTHER; note = 2'-O-methylcytidine-3'-phosphate
  modified_base 19: mod_base = OTHER; note = 2'-O-methyluridine-3'-phosphate
  modified_base 20: mod_base = OTHER; note = 2'-O-methylguanosine-3'-phosphate
  modified_base 21: mod_base = OTHER; note = 2'-O-methyluridine-3'-phosphorothioate
  modified_base 22: mod_base = OTHER; note = 2'-O-methyluridine-3'-phosphorothioate
  modified_base 23: mod_base = OTHER; note = 2'-O-methyluridine-3'-phosphate
aacagaagtcgacagatctgttt

SEQ ID NO: 2450 - RNA, 21 nt, synthetic construct
  source 1..21: mol_type = other RNA; note = Description of Artificial Sequence: Synthetic oligonucleotide
  modified_base 1: mod_base = OTHER; note = 2'-O-methyluridine-3'-phosphorothioate
  modified_base 2: mod_base = OTHER; note = 2'-O-methyladenosine-3'-phosphorothioate
  modified_base 3: mod_base = OTHER; note = 2'-O-methylcytidine-3'-phosphate
  modified_base 4: mod_base = OTHER; note = 2'-O-methyluridine-3'-phosphate
  modified_base 5: mod_base = OTHER; note = 2'-O-methyluridine-3'-phosphate
  modified_base 6: mod_base = OTHER; note = 2'-O-methylcytidine-3'-phosphate
  modified_base 7: mod_base = OTHER; note = 2'-fluorouridine-3'-phosphate
  modified_base 8: mod_base = OTHER; note = 2'-O-methyluridine-3'-phosphate
  modified_base 9: mod_base = OTHER; note = 2'-fluorouridine-3'-phosphate
  modified_base 10: mod_base = OTHER; note = 2'-fluoroguanosine-3'-phosphate
  modified_base 11: mod_base = OTHER; note = 2'-fluoroadenosine-3'-phosphate
  modified_base 12: mod_base = OTHER; note = 2'-O-methyladenosine-3'-phosphate
  modified_base 13: mod_base = OTHER; note = 2'-O-methyluridine-3'-phosphate
  modified_base 14: mod_base = OTHER; note = 2'-O-methylguanosine-3'-phosphate
  modified_base 15: mod_base = OTHER; note = 2'-O-methyluridine-3'-phosphate
  modified_base 16: mod_base = OTHER; note = 2'-O-methyladenosine-3'-phosphate
  modified_base 17: mod_base = OTHER; note = 2'-O-methylguanosine-3'-phosphate
  modified_base 18: mod_base = OTHER; note = 2'-O-methyladenosine-3'-phosphate
  modified_base 19: mod_base = OTHER; note = 2'-O-methyluridine-3'-phosphate
  modified_base 20: mod_base = OTHER; note = 2'-O-methyluridine-3'-phosphate
  modified_base 21: mod_base = OTHER; note = 2'-O-methyluridine-3'-phosphate N-[tris(GalNAc-alkyl)-amidodecanoyl)]-4-hydroxyprolinol Hyp-(GalNAc-alkyl)3
tacttctttgaatgtagattt

SEQ ID NO: 2451 - RNA, 23 nt, synthetic construct
  source 1..23: mol_type = other RNA; note = Description of Artificial Sequence: Synthetic oligonucleotide
  modified_base 1: mod_base = OTHER; note = 2'-O-methyladenosine-3'-phosphorothioate
  modified_base 2: mod_base = OTHER; note = 2'-fluoroadenosine-3'-phosphorothioate
  modified_base 3: mod_base = OTHER; note = 2'-O-methyladenosine-3'-phosphate
  modified_base 4: mod_base = OTHER; note = 2'-O-methyluridine-3'-phosphate
  modified_base 5: mod_base = OTHER; note = 2'-O-methylcytidine-3'-phosphate
  modified_base 6: mod_base = OTHER; note = 2'-fluorouridine-3'-phosphate
  modified_base 7: mod_base = OTHER; note = 2'-O-methyladenosine-3'-phosphate
  modified_base 8: mod_base = OTHER; note = 2'-fluorocytidine-3'-phosphate
  modified_base 9: mod_base = OTHER; note = 2'-fluoroadenosine-3'-phosphate
  modified_base 10: mod_base = OTHER; note = 2'-O-methyluridine-3'-phosphate
  modified_base 11: mod_base = OTHER; note = 2'-O-methyluridine-3'-phosphate
  modified_base 12: mod_base = OTHER; note = 2'-O-methylcytidine-3'-phosphate
  modified_base 13: mod_base = OTHER; note = 2'-O-methyladenosine-3'-phosphate
  modified_base 14: mod_base = OTHER; note = 2'-fluoroadenosine-3'-phosphate
  modified_base 15: mod_base = OTHER; note = 2'-O-methyladenosine-3'-phosphate
  modified_base 16: mod_base = OTHER; note = 2'-fluoroguanosine-3'-phosphate
  modified_base 17: mod_base = OTHER; note = 2'-O-methyladenosine-3'-phosphate
  modified_base 18: mod_base = OTHER; note = 2'-O-methyladenosine-3'-phosphate
  modified_base 19: mod_base = OTHER; note = 2'-O-methylguanosine-3'-phosphate
  modified_base 20: mod_base = OTHER; note = 2'-O-methyluridine-3'-phosphate
  modified_base 21: mod_base = OTHER; note = 2'-O-methyladenosine-3'-phosphorothioate
  modified_base 22: mod_base = OTHER; note = 2'-O-methyluridine-3'-phosphorothioate
  modified_base 23: mod_base = OTHER; note = 2'-O-methylcytidine-3'-phosphate
aaatctacattcaaagaagtatc

SEQ ID NO: 2452 - RNA, 21 nt, synthetic construct
  source 1..21: mol_type = other RNA; note = Description of Artificial Sequence: Synthetic oligonucleotide
  modified_base 1: mod_base = OTHER; note = 2'-O-methyladenosine-3'-phosphorothioate
  modified_base 2: mod_base = OTHER; note = 2'-O-methylcytidine-3'-phosphorothioate
  modified_base 3: mod_base = OTHER; note = 2'-O-methyluridine-3'-phosphate
  modified_base 4: mod_base = OTHER; note = 2'-O-methyluridine-3'-phosphate
  modified_base 5: mod_base = OTHER; note = 2'-O-methylcytidine-3'-phosphate
  modified_base 6: mod_base = OTHER; note = 2'-O-methyluridine-3'-phosphate
  modified_base 7: mod_base = OTHER; note = 2'-fluorouridine-3'-phosphate
  modified_base 8: mod_base = OTHER; note = 2'-O-methyluridine-3'-phosphate
  modified_base 9: mod_base = OTHER; note = 2'-fluoroguanosine-3'-phosphate
  modified_base 10: mod_base = OTHER; note = 2'-fluoroadenosine-3'-phosphate
  modified_base 11: mod_base = OTHER; note = 2'-fluoroadenosine-3'-phosphate
  modified_base 12: mod_base = OTHER; note = 2'-O-methyluridine-3'-phosphate
  modified_base 13: mod_base = OTHER; note = 2'-O-methylguanosine-3'-phosphate
  modified_base 14: mod_base = OTHER; note = 2'-O-methyluridine-3'-phosphate
  modified_base 15: mod_base = OTHER; note = 2'-O-methyladenosine-3'-phosphate
  modified_base 16: mod_base = OTHER; note = 2'-O-methylguanosine-3'-phosphate
  modified_base 17: mod_base = OTHER; note = 2'-O-methyladenosine-3'-phosphate
  modified_base 18: mod_base = OTHER; note = 2'-O-methyluridine-3'-phosphate
  modified_base 19: mod_base = OTHER; note = 2'-O-methyluridine-3'-phosphate
  modified_base 20: mod_base = OTHER; note = 2'-O-methyluridine-3'-phosphate
  modified_base 21: mod_base = OTHER; note = 2'-O-methylcytidine-3'-phosphate N-[tris(GalNAc-alkyl)-amidodecanoyl)]-4-hydroxyprolinol Hyp-(GalNAc-alkyl)3
acttctttgaatgtagatttc

SEQ ID NO: 2453 - RNA, 23 nt, synthetic construct
  source 1..23: mol_type = other RNA; note = Description of Artificial Sequence: Synthetic oligonucleotide
  modified_base 1: mod_base = OTHER; note = 2'-O-methylguanosine-3'-phosphorothioate
  modified_base 2: mod_base = OTHER; note = 2'-fluoroadenosine-3'-phosphorothioate
  modified_base 3: mod_base = OTHER; note = 2'-O-methyladenosine-3'-phosphate
  modified_base 4: mod_base = OTHER; note = 2'-O-methyladenosine-3'-phosphate
  modified_base 5: mod_base = OTHER; note = 2'-O-methyluridine-3'-phosphate
  modified_base 6: mod_base = OTHER; note = 2'-fluorocytidine-3'-phosphate
  modified_base 7: mod_base = OTHER; note = 2'-O-methyluridine-3'-phosphate
  modified_base 8: mod_base = OTHER; note = 2'-fluoroadenosine-3'-phosphate
  modified_base 9: mod_base = OTHER; note = 2'-fluorocytidine-3'-phosphate
  modified_base 10: mod_base = OTHER; note = 2'-O-methyladenosine-3'-phosphate
  modified_base 11: mod_base = OTHER; note = 2'-O-methyluridine-3'-phosphate
  modified_base 12: mod_base = OTHER; note = 2'-O-methyluridine-3'-phosphate
  modified_base 13: mod_base = OTHER; note = 2'-O-methylcytidine-3'-phosphate
  modified_base 14: mod_base = OTHER; note = 2'-fluoroadenosine-3'-phosphate
  modified_base 15: mod_base = OTHER; note = 2'-O-methyladenosine-3'-phosphate
  modified_base 16: mod_base = OTHER; note = 2'-fluoroadenosine-3'-phosphate
  modified_base 17: mod_base = OTHER; note = 2'-O-methylguanosine-3'-phosphate
  modified_base 18: mod_base = OTHER; note = 2'-O-methyladenosine-3'-phosphate
  modified_base 19: mod_base = OTHER; note = 2'-O-methyladenosine-3'-phosphate
  modified_base 20: mod_base = OTHER; note = 2'-O-methylguanosine-3'-phosphate
  modified_base 21: mod_base = OTHER; note = 2'-O-methyluridine-3'-phosphorothioate
  modified_base 22: mod_base = OTHER; note = 2'-O-methyladenosine-3'-phosphorothioate
  modified_base 23: mod_base = OTHER; note = 2'-O-methyluridine-3'-phosphate
gaaatctacattcaaagaagtat

SEQ ID NO: 2454 - RNA, 21 nt, synthetic construct
  source 1..21: mol_type = other RNA; note = Description of Artificial Sequence: Synthetic oligonucleotide
  modified_base 1: mod_base = OTHER; note = 2'-O-methylguanosine-3'-phosphorothioate
  modified_base 2: mod_base = OTHER; note = 2'-O-methyluridine-3'-phosphorothioate
  modified_base 3: mod_base = OTHER; note = 2'-O-methylguanosine-3'-phosphate
  modified_base 4: mod_base = OTHER; note = 2'-O-methyladenosine-3'-phosphate
  modified_base 5: mod_base = OTHER; note = 2'-O-methyluridine-3'-phosphate
  modified_base 6: mod_base = OTHER; note = 2'-O-methyladenosine-3'-phosphate
  modified_base 7: mod_base = OTHER; note = 2'-fluorocytidine-3'-phosphate
  modified_base 8: mod_base = OTHER; note = 2'-O-methyluridine-3'-phosphate
  modified_base 9: mod_base = OTHER; note = 2'-fluorouridine-3'-phosphate
  modified_base 10: mod_base = OTHER; note = 2'-fluorocytidine-3'-phosphate
  modified_base 11: mod_base = OTHER; note = 2'-fluorouridine-3'-phosphate
  modified_base 12: mod_base = OTHER; note = 2'-O-methyluridine-3'-phosphate
  modified_base 13: mod_base = OTHER; note = 2'-O-methyluridine-3'-phosphate
  modified_base 14: mod_base = OTHER; note = 2'-O-methylguanosine-3'-phosphate
  modified_base 15: mod_base = OTHER; note = 2'-O-methyladenosine-3'-phosphate
  modified_base 16: mod_base = OTHER; note = 2'-O-methyladenosine-3'-phosphate
  modified_base 17: mod_base = OTHER; note = 2'-O-methyluridine-3'-phosphate
  modified_base 18: mod_base = OTHER; note = 2'-O-methylguanosine-3'-phosphate
  modified_base 19: mod_base = OTHER; note = 2'-O-methyluridine-3'-phosphate
  modified_base 20: mod_base = OTHER; note = 2'-O-methyladenosine-3'-phosphate
  modified_base 21: mod_base = OTHER; note = 2'-O-methylguanosine-3'-phosphate N-[tris(GalNAc-alkyl)-amidodecanoyl)]-4-hydroxyprolinol Hyp-(GalNAc-alkyl)3
gtgatacttctttgaatgtag

SEQ ID NO: 2455 - RNA, 23 nt, synthetic construct
  source 1..23: mol_type = other RNA; note = Description of Artificial Sequence: Synthetic oligonucleotide
  modified_base 1: mod_base = OTHER; note = 2'-O-methylcytidine-3'-phosphorothioate
  modified_base 2: mod_base = OTHER; note = 2'-fluorouridine -3'-phosphorothioate
  modified_base 3: mod_base = OTHER; note = 2'-O-methyladenosine-3'-phosphate
  modified_base 4: mod_base = OTHER; note = 2'-O-methylcytidine-3'-phosphate
  modified_base 5: mod_base = OTHER; note = 2'-O-methyladenosine-3'-phosphate
  modified_base 6: mod_base = OTHER; note = 2'-fluorouridine-3'-phosphate
  modified_base 7: mod_base = OTHER; note = 2'-O-methyluridine-3'-phosphate
  modified_base 8: mod_base = OTHER; note = 2'-fluorocytidine-3'-phosphate
  modified_base 9: mod_base = OTHER; note = 2'-fluoroadenosine-3'-phosphate
  modified_base 10: mod_base = OTHER; note = 2'-O-methyladenosine-3'-phosphate
  modified_base 11: mod_base = OTHER; note = 2'-O-methyladenosine-3'-phosphate
  modified_base 12: mod_base = OTHER; note = 2'-O-methylguanosine-3'-phosphate
  modified_base 13: mod_base = OTHER; note = 2'-O-methyladenosine-3'-phosphate
  modified_base 14: mod_base = OTHER; note = 2'-fluoroadenosine-3'-phosphate
  modified_base 15: mod_base = OTHER; note = 2'-O-methylguanosine-3'-phosphate
  modified_base 16: mod_base = OTHER; note = 2'-fluorouridine-3'-phosphate
  modified_base 17: mod_base = OTHER; note = 2'-O-methyladenosine-3'-phosphate
  modified_base 18: mod_base = OTHER; note = 2'-O-methyluridine-3'-phosphate
  modified_base 19: mod_base = OTHER; note = 2'-O-methylcytidine-3'-phosphate
  modified_base 20: mod_base = OTHER; note = 2'-O-methyladenosine-3'-phosphate
  modified_base 21: mod_base = OTHER; note = 2'-O-methylcytidine-3'-phosphorothioate
  modified_base 22: mod_base = OTHER; note = 2'-O-methylcytidine-3'-phosphorothioate
  modified_base 23: mod_base = OTHER; note = 2'-O-methyladenosine-3'-phosphate
ctacattcaaagaagtatcacca

SEQ ID NO: 2456 - RNA, 21 nt, synthetic construct
  source 1..21: mol_type = other RNA; note = Description of Artificial Sequence: Synthetic oligonucleotide
  modified_base 1: mod_base = OTHER; note = 2'-O-methylguanosine-3'-phosphorothioate
  modified_base 2: mod_base = OTHER; note = 2'-O-methylguanosine-3'-phosphorothioate
  modified_base 3: mod_base = OTHER; note = 2'-O-methyluridine-3'-phosphate
  modified_base 4: mod_base = OTHER; note = 2'-O-methylguanosine-3'-phosphate
  modified_base 5: mod_base = OTHER; note = 2'-O-methyladenosine-3'-phosphate
  modified_base 6: mod_base = OTHER; note = 2'-O-methyluridine-3'-phosphate
  modified_base 7: mod_base = OTHER; note = 2'-fluoroadenosine-3'-phosphate
  modified_base 8: mod_base = OTHER; note = 2'-O-methylcytidine-3'-phosphate
  modified_base 9: mod_base = OTHER; note = 2'-fluorouridine-3'-phosphate
  modified_base 10: mod_base = OTHER; note = 2'-fluorouridine-3'-phosphate
  modified_base 11: mod_base = OTHER; note = 2'-fluorocytidine-3'-phosphate
  modified_base 12: mod_base = OTHER; note = 2'-O-methyluridine-3'-phosphate
  modified_base 13: mod_base = OTHER; note = 2'-O-methyluridine-3'-phosphate
  modified_base 14: mod_base = OTHER; note = 2'-O-methyluridine-3'-phosphate
  modified_base 15: mod_base = OTHER; note = 2'-O-methylguanosine-3'-phosphate
  modified_base 16: mod_base = OTHER; note = 2'-O-methyladenosine-3'-phosphate
  modified_base 17: mod_base = OTHER; note = 2'-O-methyladenosine-3'-phosphate
  modified_base 18: mod_base = OTHER; note = 2'-O-methyluridine-3'-phosphate
  modified_base 19: mod_base = OTHER; note = 2'-O-methylguanosine-3'-phosphate
  modified_base 20: mod_base = OTHER; note = 2'-O-methyluridine-3'-phosphate
  modified_base 21: mod_base = OTHER; note = 2'-O-methyladenosine-3'-phosphate N-[tris(GalNAc-alkyl)-amidodecanoyl)]-4-hydroxyprolinol Hyp-(GalNAc-alkyl)3
ggtgatacttctttgaatgta

SEQ ID NO: 2457 - RNA, 23 nt, synthetic construct
  source 1..23: mol_type = other RNA; note = Description of Artificial Sequence: Synthetic oligonucleotide
  modified_base 1: mod_base = OTHER; note = 2'-O-methyluridine-3'-phosphorothioate
  modified_base 2: mod_base = OTHER; note = 2'-fluoroadenosine-3'-phosphorothioate
  modified_base 3: mod_base = OTHER; note = 2'-O-methylcytidine-3'-phosphate
  modified_base 4: mod_base = OTHER; note = 2'-O-methyladenosine-3'-phosphate
  modified_base 5: mod_base = OTHER; note = 2'-O-methyluridine-3'-phosphate
  modified_base 6: mod_base = OTHER; note = 2'-fluorouridine-3'-phosphate
  modified_base 7: mod_base = OTHER; note = 2'-O-methylcytidine-3'-phosphate
  modified_base 8: mod_base = OTHER; note = 2'-fluoroadenosine-3'-phosphate
  modified_base 9: mod_base = OTHER; note = 2'-fluoroadenosine-3'-phosphate
  modified_base 10: mod_base = OTHER; note = 2'-O-methyladenosine-3'-phosphate
  modified_base 11: mod_base = OTHER; note = 2'-O-methylguanosine-3'-phosphate
  modified_base 12: mod_base = OTHER; note = 2'-O-methyladenosine-3'-phosphate
  modified_base 13: mod_base = OTHER; note = 2'-O-methyladenosine-3'-phosphate
  modified_base 14: mod_base = OTHER; note = 2'-fluoroguanosine-3'-phosphate
  modified_base 15: mod_base = OTHER; note = 2'-O-methyluridine-3'-phosphate
  modified_base 16: mod_base = OTHER; note = 2'-fluoroadenosine-3'-phosphate
  modified_base 17: mod_base = OTHER; note = 2'-O-methyluridine-3'-phosphate
  modified_base 18: mod_base = OTHER; note = 2'-O-methylcytidine-3'-phosphate
  modified_base 19: mod_base = OTHER; note = 2'-O-methyladenosine-3'-phosphate
  modified_base 20: mod_base = OTHER; note = 2'-O-methylcytidine-3'-phosphate
  modified_base 21: mod_base = OTHER; note = 2'-O-methylcytidine-3'-phosphorothioate
  modified_base 22: mod_base = OTHER; note = 2'-O-methyladenosine-3'-phosphorothioate
  modified_base 23: mod_base = OTHER; note = 2'-O-methyladenosine-3'-phosphate
tacattcaaagaagtatcaccaa

SEQ ID NO: 2458 - RNA, 21 nt, synthetic construct
  source 1..21: mol_type = other RNA; note = Description of Artificial Sequence: Synthetic oligonucleotide
  modified_base 1: mod_base = OTHER; note = 2'-O-methyluridine-3'-phosphorothioate
  modified_base 2: mod_base = OTHER; note = 2'-O-methylguanosine-3'-phosphorothioate
  modified_base 3: mod_base = OTHER; note = 2'-O-methylguanosine-3'-phosphate
  modified_base 4: mod_base = OTHER; note = 2'-O-methylguanosine-3'-phosphate
  modified_base 5: mod_base = OTHER; note = 2'-O-methyladenosine-3'-phosphate
  modified_base 6: mod_base = OTHER; note = 2'-O-methyladenosine-3'-phosphate
  modified_base 7: mod_base = OTHER; note = 2'-fluoroguanosine-3'-phosphate
  modified_base 8: mod_base = OTHER; note = 2'-O-methyladenosine-3'-phosphate
  modified_base 9: mod_base = OTHER; note = 2'-fluorouridine-3'-phosphate
  modified_base 10: mod_base = OTHER; note = 2'-fluoroadenosine-3'-phosphate
  modified_base 11: mod_base = OTHER; note = 2'-fluorouridine-3'-phosphate
  modified_base 12: mod_base = OTHER; note = 2'-O-methylcytidine-3'-phosphate
  modified_base 13: mod_base = OTHER; note = 2'-O-methyladenosine-3'-phosphate
  modified_base 14: mod_base = OTHER; note = 2'-O-methyladenosine-3'-phosphate
  modified_base 15: mod_base = OTHER; note = 2'-O-methyladenosine-3'-phosphate
  modified_base 16: mod_base = OTHER; note = 2'-O-methyluridine-3'-phosphate
  modified_base 17: mod_base = OTHER; note = 2'-O-methylguanosine-3'-phosphate
  modified_base 18: mod_base = OTHER; note = 2'-O-methylguanosine-3'-phosphate
  modified_base 19: mod_base = OTHER; note = 2'-O-methylcytidine-3'-phosphate
  modified_base 20: mod_base = OTHER; note = 2'-O-methyluridine-3'-phosphate
  modified_base 21: mod_base = OTHER; note = 2'-O-methylguanosine-3'-phosphate N-[tris(GalNAc-alkyl)-amidodecanoyl)]-4-hydroxyprolinol Hyp-(GalNAc-alkyl)3
tgggaagatatcaaatggctg

SEQ ID NO: 2459 - RNA, 23 nt, synthetic construct
  source 1..23: mol_type = other RNA; note = Description of Artificial Sequence: Synthetic oligonucleotide
  modified_base 1: mod_base = OTHER; note = 2'-O-methylcytidine-3'-phosphorothioate
  modified_base 2: mod_base = OTHER; note = 2'-fluoroadenosine-3'-phosphorothioate
  modified_base 3: mod_base = OTHER; note = 2'-O-methylguanosine-3'-phosphate
  modified_base 4: mod_base = OTHER; note = 2'-O-methylcytidine-3'-phosphate
  modified_base 5: mod_base = OTHER; note = 2'-O-methylcytidine-3'-phosphate
  modified_base 6: mod_base = OTHER; note = 2'-fluoroadenosine-3'-phosphate
  modified_base 7: mod_base = OTHER; note = 2'-O-methyluridine-3'-phosphate
  modified_base 8: mod_base = OTHER; note = 2'-fluorouridine-3'-phosphate
  modified_base 9: mod_base = OTHER; note = 2'-fluorouridine-3'-phosphate
  modified_base 10: mod_base = OTHER; note = 2'-O-methylguanosine-3'-phosphate
  modified_base 11: mod_base = OTHER; note = 2'-O-methyladenosine-3'-phosphate
  modified_base 12: mod_base = OTHER; note = 2'-O-methyluridine-3'-phosphate
  modified_base 13: mod_base = OTHER; note = 2'-O-methyladenosine-3'-phosphate
  modified_base 14: mod_base = OTHER; note = 2'-fluorouridine-3'-phosphate
  modified_base 15: mod_base = OTHER; note = 2'-O-methylcytidine-3'-phosphate
  modified_base 16: mod_base = OTHER; note = 2'-fluorouridine-3'-phosphate
  modified_base 17: mod_base = OTHER; note = 2'-O-methyluridine-3'-phosphate
  modified_base 18: mod_base = OTHER; note = 2'-O-methylcytidine-3'-phosphate
  modified_base 19: mod_base = OTHER; note = 2'-O-methylcytidine-3'-phosphate
  modified_base 20: mod_base = OTHER; note = 2'-O-methylcytidine-3'-phosphate
  modified_base 21: mod_base = OTHER; note = 2'-O-methyladenosine-3'-phosphorothioate
  modified_base 22: mod_base = OTHER; note = 2'-O-methylguanosine-3'-phosphorothioate
  modified_base 23: mod_base = OTHER; note = 2'-O-methylcytidine-3'-phosphate
cagccatttgatatcttcccagc

SEQ ID NO: 2460 - RNA, 21 nt, synthetic construct
  source 1..21: mol_type = other RNA; note = Description of Artificial Sequence: Synthetic oligonucleotide
  modified_base 1: mod_base = OTHER; note = 2'-O-methylguanosine-3'-phosphorothioate
  modified_base 2: mod_base = OTHER; note = 2'-O-methylguanosine-3'-phosphorothioate
  modified_base 3: mod_base = OTHER; note = 2'-O-methylguanosine-3'-phosphate
  modified_base 4: mod_base = OTHER; note = 2'-O-methyladenosine-3'-phosphate
  modified_base 5: mod_base = OTHER; note = 2'-O-methyladenosine-3'-phosphate
  modified_base 6: mod_base = OTHER; note = 2'-O-methylguanosine-3'-phosphate
  modified_base 7: mod_base = OTHER; note = 2'-fluoroadenosine-3'-phosphate
  modified_base 8: mod_base = OTHER; note = 2'-O-methyluridine-3'-phosphate
  modified_base 9: mod_base = OTHER; note = 2'-fluoroadenosine-3'-phosphate
  modified_base 10: mod_base = OTHER; note = 2'-fluorouridine-3'-phosphate
  modified_base 11: mod_base = OTHER; note = 2'-fluorocytidine-3'-phosphate
  modified_base 12: mod_base = OTHER; note = 2'-O-methyladenosine-3'-phosphate
  modified_base 13: mod_base = OTHER; note = 2'-O-methyladenosine-3'-phosphate
  modified_base 14: mod_base = OTHER; note = 2'-O-methyladenosine-3'-phosphate
  modified_base 15: mod_base = OTHER; note = 2'-O-methyluridine-3'-phosphate
  modified_base 16: mod_base = OTHER; note = 2'-O-methylguanosine-3'-phosphate
  modified_base 17: mod_base = OTHER; note = 2'-O-methylguanosine-3'-phosphate
  modified_base 18: mod_base = OTHER; note = 2'-O-methylcytidine-3'-phosphate
  modified_base 19: mod_base = OTHER; note = 2'-O-methyluridine-3'-phosphate
  modified_base 20: mod_base = OTHER; note = 2'-O-methylguanosine-3'-phosphate
  modified_base 21: mod_base = OTHER; note = 2'-O-methyladenosine-3'-phosphate N-[tris(GalNAc-alkyl)-amidodecanoyl)]-4-hydroxyprolinol Hyp-(GalNAc-alkyl)3
gggaagatatcaaatggctga

SEQ ID NO: 2461 - RNA, 23 nt, synthetic construct
  source 1..23: mol_type = other RNA; note = Description of Artificial Sequence: Synthetic oligonucleotide
  modified_base 1: mod_base = OTHER; note = 2'-O-methyluridine-3'-phosphorothioate
  modified_base 2: mod_base = OTHER; note = 2'-fluorocytidine-3'-phosphorothioate
  modified_base 3: mod_base = OTHER; note = 2'-O-methyladenosine-3'-phosphate
  modified_base 4: mod_base = OTHER; note = 2'-O-methylguanosine-3'-phosphate
  modified_base 5: mod_base = OTHER; note = 2'-O-methylcytidine-3'-phosphate
  modified_base 6: mod_base = OTHER; note = 2'-fluorocytidine-3'-phosphate
  modified_base 7: mod_base = OTHER; note = 2'-O-methyladenosine-3'-phosphate
  modified_base 8: mod_base = OTHER; note = 2'-fluorouridine-3'-phosphate
  modified_base 9: mod_base = OTHER; note = 2'-fluorouridine-3'-phosphate
  modified_base 10: mod_base = OTHER; note = 2'-O-methyluridine-3'-phosphate
  modified_base 11: mod_base = OTHER; note = 2'-O-methylguanosine-3'-phosphate
  modified_base 12: mod_base = OTHER; note = 2'-O-methyladenosine-3'-phosphate
  modified_base 13: mod_base = OTHER; note = 2'-O-methyluridine-3'-phosphate
  modified_base 14: mod_base = OTHER; note = 2'-fluoroadenosine-3'-phosphate
  modified_base 15: mod_base = OTHER; note = 2'-O-methyluridine-3'-phosphate
  modified_base 16: mod_base = OTHER; note = 2'-fluorocytidine-3'-phosphate
  modified_base 17: mod_base = OTHER; note = 2'-O-methyluridine-3'-phosphate
  modified_base 18: mod_base = OTHER; note = 2'-O-methyluridine-3'-phosphate
  modified_base 19: mod_base = OTHER; note = 2'-O-methylcytidine-3'-phosphate
  modified_base 20: mod_base = OTHER; note = 2'-O-methylcytidine-3'-phosphate
  modified_base 21: mod_base = OTHER; note = 2'-O-methylcytidine-3'-phosphorothioate
  modified_base 22: mod_base = OTHER; note = 2'-O-methyladenosine-3'-phosphorothioate
  modified_base 23: mod_base = OTHER; note = 2'-O-methylguanosine-3'-phosphate
tcagccatttgatatcttcccag

SEQ ID NO: 2462 - RNA, 21 nt, synthetic construct
  source 1..21: mol_type = other RNA; note = Description of Artificial Sequence: Synthetic oligonucleotide
  modified_base 1: mod_base = OTHER; note = 2'-O-methylcytidine-3'-phosphorothioate
  modified_base 2: mod_base = OTHER; note = 2'-O-methyladenosine-3'-phosphorothioate
  modified_base 3: mod_base = OTHER; note = 2'-O-methylguanosine-3'-phosphate
  modified_base 4: mod_base = OTHER; note = 2'-O-methylcytidine-3'-phosphate
  modified_base 5: mod_base = OTHER; note = 2'-O-methyluridine-3'-phosphate
  modified_base 6: mod_base = OTHER; note = 2'-O-methylguanosine-3'-phosphate
  modified_base 7: mod_base = OTHER; note = 2'-fluoroguanosine-3'-phosphate
  modified_base 8: mod_base = OTHER; note = 2'-O-methylguanosine-3'-phosphate
  modified_base 9: mod_base = OTHER; note = 2'-fluoroadenosine-3'-phosphate
  modified_base 10: mod_base = OTHER; note = 2'-fluoroadenosine-3'-phosphate
  modified_base 11: mod_base = OTHER; note = 2'-fluoroguanosine-3'-phosphate
  modified_base 12: mod_base = OTHER; note = 2'-O-methyladenosine-3'-phosphate
  modified_base 13: mod_base = OTHER; note = 2'-O-methyluridine-3'-phosphate
  modified_base 14: mod_base = OTHER; note = 2'-O-methyladenosine-3'-phosphate
  modified_base 15: mod_base = OTHER; note = 2'-O-methyluridine-3'-phosphate
  modified_base 16: mod_base = OTHER; note = 2'-O-methylcytidine-3'-phosphate
  modified_base 17: mod_base = OTHER; note = 2'-O-methyladenosine-3'-phosphate
  modified_base 18: mod_base = OTHER; note = 2'-O-methyladenosine-3'-phosphate
  modified_base 19: mod_base = OTHER; note = 2'-O-methyladenosine-3'-phosphate
  modified_base 20: mod_base = OTHER; note = 2'-O-methyluridine-3'-phosphate
  modified_base 21: mod_base = OTHER; note = 2'-O-methylguanosine-3'-phosphate N-[tris(GalNAc-alkyl)-amidodecanoyl)]-4-hydroxyprolinol Hyp-(GalNAc-alkyl)3
cagctgggaagatatcaaatg

SEQ ID NO: 2463 - RNA, 23 nt, synthetic construct
  source 1..23: mol_type = other RNA; note = Description of Artificial Sequence: Synthetic oligonucleotide
  modified_base 1: mod_base = OTHER; note = 2'-O-methylcytidine-3'-phosphorothioate
  modified_base 2: mod_base = OTHER; note = 2'-fluoroadenosine-3'-phosphorothioate
  modified_base 3: mod_base = OTHER; note = 2'-O-methyluridine-3'-phosphate
  modified_base 4: mod_base = OTHER; note = 2'-O-methyluridine-3'-phosphate
  modified_base 5: mod_base = OTHER; note = 2'-O-methyluridine-3'-phosphate
  modified_base 6: mod_base = OTHER; note = 2'-fluoroguanosine-3'-phosphate
  modified_base 7: mod_base = OTHER; note = 2'-O-methyladenosine-3'-phosphate
  modified_base 8: mod_base = OTHER; note = 2'-fluorouridine-3'-phosphate
  modified_base 9: mod_base = OTHER; note = 2'-fluoroadenosine-3'-phosphate
  modified_base 10: mod_base = OTHER; note = 2'-O-methyluridine-3'-phosphate
  modified_base 11: mod_base = OTHER; note = 2'-O-methylcytidine-3'-phosphate
  modified_base 12: mod_base = OTHER; note = 2'-O-methyluridine-3'-phosphate
  modified_base 13: mod_base = OTHER; note = 2'-O-methyluridine-3'-phosphate
  modified_base 14: mod_base = OTHER; note = 2'-fluorocytidine-3'-phosphate
  modified_base 15: mod_base = OTHER; note = 2'-O-methylcytidine-3'-phosphate
  modified_base 16: mod_base = OTHER; note = 2'-fluorocytidine-3'-phosphate
  modified_base 17: mod_base = OTHER; note = 2'-O-methyladenosine-3'-phosphate
  modified_base 18: mod_base = OTHER; note = 2'-O-methylguanosine-3'-phosphate
  modified_base 19: mod_base = OTHER; note = 2'-O-methylcytidine-3'-phosphate
  modified_base 20: mod_base = OTHER; note = 2'-O-methyluridine-3'-phosphate
  modified_base 21: mod_base = OTHER; note = 2'-O-methylguanosine-3'-phosphorothioate
  modified_base 22: mod_base = OTHER; note = 2'-O-methyladenosine-3'-phosphorothioate
  modified_base 23: mod_base = OTHER; note = 2'-O-methyluridine-3'-phosphate
catttgatatcttcccagctgat

SEQ ID NO: 2464 - RNA, 21 nt, synthetic construct
  source 1..21: mol_type = other RNA; note = Description of Artificial Sequence: Synthetic oligonucleotide
  modified_base 1: mod_base = OTHER; note = 2'-O-methyluridine-3'-phosphorothioate
  modified_base 2: mod_base = OTHER; note = 2'-O-methylcytidine-3'-phosphorothioate
  modified_base 3: mod_base = OTHER; note = 2'-O-methyladenosine-3'-phosphate
  modified_base 4: mod_base = OTHER; note = 2'-O-methylguanosine-3'-phosphate
  modified_base 5: mod_base = OTHER; note = 2'-O-methylcytidine-3'-phosphate
  modified_base 6: mod_base = OTHER; note = 2'-O-methyluridine-3'-phosphate
  modified_base 7: mod_base = OTHER; note = 2'-fluoroguanosine-3'-phosphate
  modified_base 8: mod_base = OTHER; note = 2'-O-methylguanosine-3'-phosphate
  modified_base 9: mod_base = OTHER; note = 2'-fluoroguanosine-3'-phosphate
  modified_base 10: mod_base = OTHER; note = 2'-fluoroadenosine-3'-phosphate
  modified_base 11: mod_base = OTHER; note = 2'-fluoroadenosine-3'-phosphate
  modified_base 12: mod_base = OTHER; note = 2'-O-methylguanosine-3'-phosphate
  modified_base 13: mod_base = OTHER; note = 2'-O-methyladenosine-3'-phosphate
  modified_base 14: mod_base = OTHER; note = 2'-O-methyluridine-3'-phosphate
  modified_base 15: mod_base = OTHER; note = 2'-O-methyladenosine-3'-phosphate
  modified_base 16: mod_base = OTHER; note = 2'-O-methyluridine-3'-phosphate
  modified_base 17: mod_base = OTHER; note = 2'-O-methylcytidine-3'-phosphate
  modified_base 18: mod_base = OTHER; note = 2'-O-methyladenosine-3'-phosphate
  modified_base 19: mod_base = OTHER; note = 2'-O-methyladenosine-3'-phosphate
  modified_base 20: mod_base = OTHER; note = 2'-O-methyladenosine-3'-phosphate
  modified_base 21: mod_base = OTHER; note = 2'-O-methyluridine-3'-phosphate N-[tris(GalNAc-alkyl)-amidodecanoyl)]-4-hydroxyprolinol Hyp-(GalNAc-alkyl)3
tcagctgggaagatatcaaat

SEQ ID NO: 2465 - RNA, 23 nt, synthetic construct
  source 1..23: mol_type = other RNA; note = Description of Artificial Sequence: Synthetic oligonucleotide
  modified_base 1: mod_base = OTHER; note = 2'-O-methyladenosine-3'-phosphorothioate
  modified_base 2: mod_base = OTHER; note = 2'-fluorouridine -3'-phosphorothioate
  modified_base 3: mod_base = OTHER; note = 2'-O-methyluridine-3'-phosphate
  modified_base 4: mod_base = OTHER; note = 2'-O-methyluridine-3'-phosphate
  modified_base 5: mod_base = OTHER; note = 2'-O-methylguanosine-3'-phosphate
  modified_base 6: mod_base = OTHER; note = 2'-fluoroadenosine-3'-phosphate
  modified_base 7: mod_base = OTHER; note = 2'-O-methyluridine-3'-phosphate
  modified_base 8: mod_base = OTHER; note = 2'-fluoroadenosine-3'-phosphate
  modified_base 9: mod_base = OTHER; note = 2'-fluorouridine-3'-phosphate
  modified_base 10: mod_base = OTHER; note = 2'-O-methylcytidine-3'-phosphate
  modified_base 11: mod_base = OTHER; note = 2'-O-methyluridine-3'-phosphate
  modified_base 12: mod_base = OTHER; note = 2'-O-methyluridine-3'-phosphate
  modified_base 13: mod_base = OTHER; note = 2'-O-methylcytidine-3'-phosphate
  modified_base 14: mod_base = OTHER; note = 2'-fluorocytidine-3'-phosphate
  modified_base 15: mod_base = OTHER; note = 2'-O-methylcytidine-3'-phosphate
  modified_base 16: mod_base = OTHER; note = 2'-fluoroadenosine-3'-phosphate
  modified_base 17: mod_base = OTHER; note = 2'-O-methylguanosine-3'-phosphate
  modified_base 18: mod_base = OTHER; note = 2'-O-methylcytidine-3'-phosphate
  modified_base 19: mod_base = OTHER; note = 2'-O-methyluridine-3'-phosphate
  modified_base 20: mod_base = OTHER; note = 2'-O-methylguanosine-3'-phosphate
  modified_base 21: mod_base = OTHER; note = 2'-O-methyladenosine-3'-phosphorothioate
  modified_base 22: mod_base = OTHER; note = 2'-O-methyluridine-3'-phosphorothioate
  modified_base 23: mod_base = OTHER; note = 2'-O-methyladenosine-3'-phosphate
atttgatatcttcccagctgata

SEQ ID NO: 2466 - RNA, 21 nt, synthetic construct
  source 1..21: mol_type = other RNA; note = Description of Artificial Sequence: Synthetic oligonucleotide
  modified_base 1: mod_base = OTHER; note = 2'-O-methyluridine-3'-phosphorothioate
  modified_base 2: mod_base = OTHER; note = 2'-O-methylcytidine-3'-phosphorothioate
  modified_base 3: mod_base = OTHER; note = 2'-O-methylcytidine-3'-phosphate
  modified_base 4: mod_base = OTHER; note = 2'-O-methyladenosine-3'-phosphate
  modified_base 5: mod_base = OTHER; note = 2'-O-methyladenosine-3'-phosphate
  modified_base 6: mod_base = OTHER; note = 2'-O-methyladenosine-3'-phosphate
  modified_base 7: mod_base = OTHER; note = 2'-fluoroguanosine-3'-phosphate
  modified_base 8: mod_base = OTHER; note = 2'-O-methyluridine-3'-phosphate
  modified_base 9: mod_base = OTHER; note = 2'-fluorocytidine-3'-phosphate
  modified_base 10: mod_base = OTHER; note = 2'-fluorouridine-3'-phosphate
  modified_base 11: mod_base = OTHER; note = 2'-fluoroadenosine-3'-phosphate
  modified_base 12: mod_base = OTHER; note = 2'-O-methyluridine-3'-phosphate
  modified_base 13: mod_base = OTHER; note = 2'-O-methyladenosine-3'-phosphate
  modified_base 14: mod_base = OTHER; note = 2'-O-methyluridine-3'-phosphate
  modified_base 15: mod_base = OTHER; note = 2'-O-methyladenosine-3'-phosphate
  modified_base 16: mod_base = OTHER; note = 2'-O-methyluridine-3'-phosphate
  modified_base 17: mod_base = OTHER; note = 2'-O-methylguanosine-3'-phosphate
  modified_base 18: mod_base = OTHER; note = 2'-O-methyladenosine-3'-phosphate
  modified_base 19: mod_base = OTHER; note = 2'-O-methylcytidine-3'-phosphate
  modified_base 20: mod_base = OTHER; note = 2'-O-methyluridine-3'-phosphate
  modified_base 21: mod_base = OTHER; note = 2'-O-methyladenosine-3'-phosphate N-[tris(GalNAc-alkyl)-amidodecanoyl)]-4-hydroxyprolinol Hyp-(GalNAc-alkyl)3
tccaaagtctatatatgacta

SEQ ID NO: 2467 - RNA, 23 nt, synthetic construct
  source 1..23: mol_type = other RNA; note = Description of Artificial Sequence: Synthetic oligonucleotide
  modified_base 1: mod_base = OTHER; note = 2'-O-methyluridine-3'-phosphorothioate
  modified_base 2: mod_base = OTHER; note = 2'-fluoroadenosine-3'-phosphorothioate
  modified_base 3: mod_base = OTHER; note = 2'-O-methylguanosine-3'-phosphate
  modified_base 4: mod_base = OTHER; note = 2'-O-methyluridine-3'-phosphate
  modified_base 5: mod_base = OTHER; note = 2'-O-methylcytidine-3'-phosphate
  modified_base 6: mod_base = OTHER; note = 2'-fluoroadenosine-3'-phosphate
  modified_base 7: mod_base = OTHER; note = 2'-O-methyluridine-3'-phosphate
  modified_base 8: mod_base = OTHER; note = 2'-fluoroadenosine-3'-phosphate
  modified_base 9: mod_base = OTHER; note = 2'-fluorouridine-3'-phosphate
  modified_base 10: mod_base = OTHER; note = 2'-O-methyladenosine-3'-phosphate
  modified_base 11: mod_base = OTHER; note = 2'-O-methyluridine-3'-phosphate
  modified_base 12: mod_base = OTHER; note = 2'-O-methyladenosine-3'-phosphate
  modified_base 13: mod_base = OTHER; note = 2'-O-methylguanosine-3'-phosphate
  modified_base 14: mod_base = OTHER; note = 2'-fluoroadenosine-3'-phosphate
  modified_base 15: mod_base = OTHER; note = 2'-O-methylcytidine-3'-phosphate
  modified_base 16: mod_base = OTHER; note = 2'-fluorouridine-3'-phosphate
  modified_base 17: mod_base = OTHER; note = 2'-O-methyluridine-3'-phosphate
  modified_base 18: mod_base = OTHER; note = 2'-O-methyluridine-3'-phosphate
  modified_base 19: mod_base = OTHER; note = 2'-O-methylguanosine-3'-phosphate
  modified_base 20: mod_base = OTHER; note = 2'-O-methylguanosine-3'-phosphate
  modified_base 21: mod_base = OTHER; note = 2'-O-methyladenosine-3'-phosphorothioate
  modified_base 22: mod_base = OTHER; note = 2'-O-methyladenosine-3'-phosphorothioate
  modified_base 23: mod_base = OTHER; note = 2'-O-methylguanosine-3'-phosphate
tagtcatatatagactttggaag

SEQ ID NO: 2468 - RNA, 21 nt, synthetic construct
  source 1..21: mol_type = other RNA; note = Description of Artificial Sequence: Synthetic oligonucleotide
  modified_base 1: mod_base = OTHER; note = 2'-O-methylcytidine-3'-phosphorothioate
  modified_base 2: mod_base = OTHER; note = 2'-O-methylcytidine-3'-phosphorothioate
  modified_base 3: mod_base = OTHER; note = 2'-O-methyladenosine-3'-phosphate
  modified_base 4: mod_base = OTHER; note = 2'-O-methyladenosine-3'-phosphate
  modified_base 5: mod_base = OTHER; note = 2'-O-methyladenosine-3'-phosphate
  modified_base 6: mod_base = OTHER; note = 2'-O-methylguanosine-3'-phosphate
  modified_base 7: mod_base = OTHER; note = 2'-fluorouridine-3'-phosphate
  modified_base 8: mod_base = OTHER; note = 2'-O-methylcytidine-3'-phosphate
  modified_base 9: mod_base = OTHER; note = 2'-fluorouridine-3'-phosphate
  modified_base 10: mod_base = OTHER; note = 2'-fluoroadenosine-3'-phosphate
  modified_base 11: mod_base = OTHER; note = 2'-fluorouridine-3'-phosphate
  modified_base 12: mod_base = OTHER; note = 2'-O-methyladenosine-3'-phosphate
  modified_base 13: mod_base = OTHER; note = 2'-O-methyluridine-3'-phosphate
  modified_base 14: mod_base = OTHER; note = 2'-O-methyladenosine-3'-phosphate
  modified_base 15: mod_base = OTHER; note = 2'-O-methyluridine-3'-phosphate
  modified_base 16: mod_base = OTHER; note = 2'-O-methylguanosine-3'-phosphate
  modified_base 17: mod_base = OTHER; note = 2'-O-methyladenosine-3'-phosphate
  modified_base 18: mod_base = OTHER; note = 2'-O-methylcytidine-3'-phosphate
  modified_base 19: mod_base = OTHER; note = 2'-O-methyluridine-3'-phosphate
  modified_base 20: mod_base = OTHER; note = 2'-O-methyladenosine-3'-phosphate
  modified_base 21: mod_base = OTHER; note = 2'-O-methyluridine-3'-phosphate N-[tris(GalNAc-alkyl)-amidodecanoyl)]-4-hydroxyprolinol Hyp-(GalNAc-alkyl)3
ccaaagtctatatatgactat

SEQ ID NO: 2469 - RNA, 23 nt, synthetic construct
  source 1..23: mol_type = other RNA; note = Description of Artificial Sequence: Synthetic oligonucleotide
  modified_base 1: mod_base = OTHER; note = 2'-O-methyladenosine-3'-phosphorothioate
  modified_base 2: mod_base = OTHER; note = 2'-fluorouridine -3'-phosphorothioate
  modified_base 3: mod_base = OTHER; note = 2'-O-methyladenosine-3'-phosphate
  modified_base 4: mod_base = OTHER; note = 2'-O-methylguanosine-3'-phosphate
  modified_base 5: mod_base = OTHER; note = 2'-O-methyluridine-3'-phosphate
  modified_base 6: mod_base = OTHER; note = 2'-fluorocytidine-3'-phosphate
  modified_base 7: mod_base = OTHER; note = 2'-O-methyladenosine-3'-phosphate
  modified_base 8: mod_base = OTHER; note = 2'-fluorouridine-3'-phosphate
  modified_base 9: mod_base = OTHER; note = 2'-fluoroadenosine-3'-phosphate
  modified_base 10: mod_base = OTHER; note = 2'-O-methyluridine-3'-phosphate
  modified_base 11: mod_base = OTHER; note = 2'-O-methyladenosine-3'-phosphate
  modified_base 12: mod_base = OTHER; note = 2'-O-methyluridine-3'-phosphate
  modified_base 13: mod_base = OTHER; note = 2'-O-methyladenosine-3'-phosphate
  modified_base 14: mod_base = OTHER; note = 2'-fluoroguanosine-3'-phosphate
  modified_base 15: mod_base = OTHER; note = 2'-O-methyladenosine-3'-phosphate
  modified_base 16: mod_base = OTHER; note = 2'-fluorocytidine-3'-phosphate
  modified_base 17: mod_base = OTHER; note = 2'-O-methyluridine-3'-phosphate
  modified_base 18: mod_base = OTHER; note = 2'-O-methyluridine-3'-phosphate
  modified_base 19: mod_base = OTHER; note = 2'-O-methyluridine-3'-phosphate
  modified_base 20: mod_base = OTHER; note = 2'-O-methylguanosine-3'-phosphate
  modified_base 21: mod_base = OTHER; note = 2'-O-methylguanosine-3'-phosphorothioate
  modified_base 22: mod_base = OTHER; note = 2'-O-methyladenosine-3'-phosphorothioate
  modified_base 23: mod_base = OTHER; note = 2'-O-methyladenosine-3'-phosphate
atagtcatatatagactttggaa

SEQ ID NO: 2470 - RNA, 21 nt, synthetic construct
  source 1..21: mol_type = other RNA; note = Description of Artificial Sequence: Synthetic oligonucleotide
  modified_base 1: mod_base = OTHER; note = 2'-O-methyluridine-3'-phosphorothioate
  modified_base 2: mod_base = OTHER; note = 2'-O-methyladenosine-3'-phosphorothioate
  modified_base 3: mod_base = OTHER; note = 2'-O-methylcytidine-3'-phosphate
  modified_base 4: mod_base = OTHER; note = 2'-O-methyluridine-3'-phosphate
  modified_base 5: mod_base = OTHER; note = 2'-O-methyluridine-3'-phosphate
  modified_base 6: mod_base = OTHER; note = 2'-O-methylcytidine-3'-phosphate
  modified_base 7: mod_base = OTHER; note = 2'-fluorocytidine-3'-phosphate
  modified_base 8: mod_base = OTHER; note = 2'-O-methyladenosine-3'-phosphate
  modified_base 9: mod_base = OTHER; note = 2'-fluoroadenosine-3'-phosphate
  modified_base 10: mod_base = OTHER; note = 2'-fluoroadenosine-3'-phosphate
  modified_base 11: mod_base = OTHER; note = 2'-fluoroguanosine-3'-phosphate
  modified_base 12: mod_base = OTHER; note = 2'-O-methyluridine-3'-phosphate
  modified_base 13: mod_base = OTHER; note = 2'-O-methylcytidine-3'-phosphate
  modified_base 14: mod_base = OTHER; note = 2'-O-methyluridine-3'-phosphate
  modified_base 15: mod_base = OTHER; note = 2'-O-methyladenosine-3'-phosphate
  modified_base 16: mod_base = OTHER; note = 2'-O-methyluridine-3'-phosphate
  modified_base 17: mod_base = OTHER; note = 2'-O-methyladenosine-3'-phosphate
  modified_base 18: mod_base = OTHER; note = 2'-O-methyluridine-3'-phosphate
  modified_base 19: mod_base = OTHER; note = 2'-O-methyladenosine-3'-phosphate
  modified_base 20: mod_base = OTHER; note = 2'-O-methyluridine-3'-phosphate
  modified_base 21: mod_base = OTHER; note = 2'-O-methylguanosine-3'-phosphate N-[tris(GalNAc-alkyl)-amidodecanoyl)]-4-hydroxyprolinol Hyp-(GalNAc-alkyl)3
tacttccaaagtctatatatg

SEQ ID NO: 2471 - RNA, 23 nt, synthetic construct
  source 1..23: mol_type = other RNA; note = Description of Artificial Sequence: Synthetic oligonucleotide
  modified_base 1: mod_base = OTHER; note = 2'-O-methylcytidine-3'-phosphorothioate
  modified_base 2: mod_base = OTHER; note = 2'-fluoroadenosine-3'-phosphorothioate
  modified_base 3: mod_base = OTHER; note = 2'-O-methyluridine-3'-phosphate
  modified_base 4: mod_base = OTHER; note = 2'-O-methyladenosine-3'-phosphate
  modified_base 5: mod_base = OTHER; note = 2'-O-methyluridine-3'-phosphate
  modified_base 6: mod_base = OTHER; note = 2'-fluoroadenosine-3'-phosphate
  modified_base 7: mod_base = OTHER; note = 2'-O-methyluridine-3'-phosphate
  modified_base 8: mod_base = OTHER; note = 2'-fluoroadenosine-3'-phosphate
  modified_base 9: mod_base = OTHER; note = 2'-fluoroguanosine-3'-phosphate
  modified_base 10: mod_base = OTHER; note = 2'-O-methyladenosine-3'-phosphate
  modified_base 11: mod_base = OTHER; note = 2'-O-methylcytidine-3'-phosphate
  modified_base 12: mod_base = OTHER; note = 2'-O-methyluridine-3'-phosphate
  modified_base 13: mod_base = OTHER; note = 2'-O-methyluridine-3'-phosphate
  modified_base 14: mod_base = OTHER; note = 2'-fluorouridine-3'-phosphate
  modified_base 15: mod_base = OTHER; note = 2'-O-methylguanosine-3'-phosphate
  modified_base 16: mod_base = OTHER; note = 2'-fluoroguanosine-3'-phosphate
  modified_base 17: mod_base = OTHER; note = 2'-O-methyladenosine-3'-phosphate
  modified_base 18: mod_base = OTHER; note = 2'-O-methyladenosine-3'-phosphate
  modified_base 19: mod_base = OTHER; note = 2'-O-methylguanosine-3'-phosphate
  modified_base 20: mod_base = OTHER; note = 2'-O-methyluridine-3'-phosphate
  modified_base 21: mod_base = OTHER; note = 2'-O-methyladenosine-3'-phosphorothioate
  modified_base 22: mod_base = OTHER; note = 2'-O-methylcytidine-3'-phosphorothioate
  modified_base 23: mod_base = OTHER; note = 2'-O-methyluridine-3'-phosphate
catatatagactttggaagtact

SEQ ID NO: 2472 - RNA, 21 nt, synthetic construct
  source 1..21: mol_type = other RNA; note = Description of Artificial Sequence: Synthetic oligonucleotide
  modified_base 1: mod_base = OTHER; note = 2'-O-methylguanosine-3'-phosphorothioate
  modified_base 2: mod_base = OTHER; note = 2'-O-methyluridine-3'-phosphorothioate
  modified_base 3: mod_base = OTHER; note = 2'-O-methyladenosine-3'-phosphate
  modified_base 4: mod_base = OTHER; note = 2'-O-methylcytidine-3'-phosphate
  modified_base 5: mod_base = OTHER; note = 2'-O-methyluridine-3'-phosphate
  modified_base 6: mod_base = OTHER; note = 2'-O-methyluridine-3'-phosphate
  modified_base 7: mod_base = OTHER; note = 2'-fluorocytidine-3'-phosphate
  modified_base 8: mod_base = OTHER; note = 2'-O-methylcytidine-3'-phosphate
  modified_base 9: mod_base = OTHER; note = 2'-fluoroadenosine-3'-phosphate
  modified_base 10: mod_base = OTHER; note = 2'-fluoroadenosine-3'-phosphate
  modified_base 11: mod_base = OTHER; note = 2'-fluoroadenosine-3'-phosphate
  modified_base 12: mod_base = OTHER; note = 2'-O-methylguanosine-3'-phosphate
  modified_base 13: mod_base = OTHER; note = 2'-O-methyluridine-3'-phosphate
  modified_base 14: mod_base = OTHER; note = 2'-O-methylcytidine-3'-phosphate
  modified_base 15: mod_base = OTHER; note = 2'-O-methyluridine-3'-phosphate
  modified_base 16: mod_base = OTHER; note = 2'-O-methyladenosine-3'-phosphate
  modified_base 17: mod_base = OTHER; note = 2'-O-methyluridine-3'-phosphate
  modified_base 18: mod_base = OTHER; note = 2'-O-methyladenosine-3'-phosphate
  modified_base 19: mod_base = OTHER; note = 2'-O-methyluridine-3'-phosphate
  modified_base 20: mod_base = OTHER; note = 2'-O-methyladenosine-3'-phosphate
  modified_base 21: mod_base = OTHER; note = 2'-O-methyluridine-3'-phosphate N-[tris(GalNAc-alkyl)-amidodecanoyl)]-4-hydroxyprolinol Hyp-(GalNAc-alkyl)3
gtacttccaaagtctatatat

SEQ ID NO: 2473 - RNA, 23 nt, synthetic construct
  source 1..23: mol_type = other RNA; note = Description of Artificial Sequence: Synthetic oligonucleotide
  modified_base 1: mod_base = OTHER; note = 2'-O-methyladenosine-3'-phosphorothioate
  modified_base 2: mod_base = OTHER; note = 2'-fluorouridine -3'-phosphorothioate
  modified_base 3: mod_base = OTHER; note = 2'-O-methyladenosine-3'-phosphate
  modified_base 4: mod_base = OTHER; note = 2'-O-methyluridine-3'-phosphate
  modified_base 5: mod_base = OTHER; note = 2'-O-methyladenosine-3'-phosphate
  modified_base 6: mod_base = OTHER; note = 2'-fluorouridine-3'-phosphate
  modified_base 7: mod_base = OTHER; note = 2'-O-methyladenosine-3'-phosphate
  modified_base 8: mod_base = OTHER; note = 2'-fluoroguanosine-3'-phosphate
  modified_base 9: mod_base = OTHER; note = 2'-fluoroadenosine-3'-phosphate
  modified_base 10: mod_base = OTHER; note = 2'-O-methylcytidine-3'-phosphate
  modified_base 11: mod_base = OTHER; note = 2'-O-methyluridine-3'-phosphate
  modified_base 12: mod_base = OTHER; note = 2'-O-methyluridine-3'-phosphate
  modified_base 13: mod_base = OTHER; note = 2'-O-methyluridine-3'-phosphate
  modified_base 14: mod_base = OTHER; note = 2'-fluoroguanosine-3'-phosphate
  modified_base 15: mod_base = OTHER; note = 2'-O-methylguanosine-3'-phosphate
  modified_base 16: mod_base = OTHER; note = 2'-fluoroadenosine-3'-phosphate
  modified_base 17: mod_base = OTHER; note = 2'-O-methyladenosine-3'-phosphate
  modified_base 18: mod_base = OTHER; note = 2'-O-methylguanosine-3'-phosphate
  modified_base 19: mod_base = OTHER; note = 2'-O-methyluridine-3'-phosphate
  modified_base 20: mod_base = OTHER; note = 2'-O-methyladenosine-3'-phosphate
  modified_base 21: mod_base = OTHER; note = 2'-O-methylcytidine-3'-phosphorothioate
  modified_base 22: mod_base = OTHER; note = 2'-O-methyluridine-3'-phosphorothioate
  modified_base 23: mod_base = OTHER; note = 2'-O-methylguanosine-3'-phosphate
atatatagactttggaagtactg

SEQ ID NO: 2474 - RNA, 21 nt, synthetic construct
  source 1..21: mol_type = other RNA; note = Description of Artificial Sequence: Synthetic oligonucleotide
  modified_base 1: mod_base = OTHER; note = 2'-O-methyluridine-3'-phosphorothioate
  modified_base 2: mod_base = OTHER; note = 2'-O-methyluridine-3'-phosphorothioate
  modified_base 3: mod_base = OTHER; note = 2'-O-methyladenosine-3'-phosphate
  modified_base 4: mod_base = OTHER; note = 2'-O-methyluridine-3'-phosphate
  modified_base 5: mod_base = OTHER; note = 2'-O-methylguanosine-3'-phosphate
  modified_base 6: mod_base = OTHER; note = 2'-O-methyladenosine-3'-phosphate
  modified_base 7: mod_base = OTHER; note = 2'-fluoroadenosine-3'-phosphate
  modified_base 8: mod_base = OTHER; note = 2'-O-methylcytidine-3'-phosphate
  modified_base 9: mod_base = OTHER; note = 2'-fluoroadenosine-3'-phosphate
  modified_base 10: mod_base = OTHER; note = 2'-fluoroadenosine-3'-phosphate
  modified_base 11: mod_base = OTHER; note = 2'-fluorocytidine-3'-phosphate
  modified_base 12: mod_base = OTHER; note = 2'-O-methyladenosine-3'-phosphate
  modified_base 13: mod_base = OTHER; note = 2'-O-methyluridine-3'-phosphate
  modified_base 14: mod_base = OTHER; note = 2'-O-methylguanosine-3'-phosphate
  modified_base 15: mod_base = OTHER; note = 2'-O-methylcytidine-3'-phosphate
  modified_base 16: mod_base = OTHER; note = 2'-O-methyluridine-3'-phosphate
  modified_base 17: mod_base = OTHER; note = 2'-O-methyladenosine-3'-phosphate
  modified_base 18: mod_base = OTHER; note = 2'-O-methyladenosine-3'-phosphate
  modified_base 19: mod_base = OTHER; note = 2'-O-methyladenosine-3'-phosphate
  modified_base 20: mod_base = OTHER; note = 2'-O-methyluridine-3'-phosphate
  modified_base 21: mod_base = OTHER; note = 2'-O-methylcytidine-3'-phosphate N-[tris(GalNAc-alkyl)-amidodecanoyl)]-4-hydroxyprolinol Hyp-(GalNAc-alkyl)3
ttatgaacaacatgctaaatc

SEQ ID NO: 2475 - RNA, 23 nt, synthetic construct
  source 1..23: mol_type = other RNA; note = Description of Artificial Sequence: Synthetic oligonucleotide
  modified_base 1: mod_base = OTHER; note = 2'-O-methylguanosine-3'-phosphorothioate
  modified_base 2: mod_base = OTHER; note = 2'-fluoroadenosine-3'-phosphorothioate
  modified_base 3: mod_base = OTHER; note = 2'-O-methyluridine-3'-phosphate
  modified_base 4: mod_base = OTHER; note = 2'-O-methyluridine-3'-phosphate
  modified_base 5: mod_base = OTHER; note = 2'-O-methyluridine-3'-phosphate
  modified_base 6: mod_base = OTHER; note = 2'-fluoroadenosine-3'-phosphate
  modified_base 7: mod_base = OTHER; note = 2'-O-methylguanosine-3'-phosphate
  modified_base 8: mod_base = OTHER; note = 2'-fluorocytidine-3'-phosphate
  modified_base 9: mod_base = OTHER; note = 2'-fluoroadenosine-3'-phosphate
  modified_base 10: mod_base = OTHER; note = 2'-O-methyluridine-3'-phosphate
  modified_base 11: mod_base = OTHER; note = 2'-O-methylguanosine-3'-phosphate
  modified_base 12: mod_base = OTHER; note = 2'-O-methyluridine-3'-phosphate
  modified_base 13: mod_base = OTHER; note = 2'-O-methyluridine-3'-phosphate
  modified_base 14: mod_base = OTHER; note = 2'-fluoroguanosine-3'-phosphate
  modified_base 15: mod_base = OTHER; note = 2'-O-methyluridine-3'-phosphate
  modified_base 16: mod_base = OTHER; note = 2'-fluorouridine-3'-phosphate
  modified_base 17: mod_base = OTHER; note = 2'-O-methylcytidine-3'-phosphate
  modified_base 18: mod_base = OTHER; note = 2'-O-methyladenosine-3'-phosphate
  modified_base 19: mod_base = OTHER; note = 2'-O-methyluridine-3'-phosphate
  modified_base 20: mod_base = OTHER; note = 2'-O-methyladenosine-3'-phosphate
  modified_base 21: mod_base = OTHER; note = 2'-O-methyladenosine-3'-phosphorothioate
  modified_base 22: mod_base = OTHER; note = 2'-O-methyluridine-3'-phosphorothioate
  modified_base 23: mod_base = OTHER; note = 2'-O-methylcytidine-3'-phosphate
gatttagcatgttgttcataatc

SEQ ID NO: 2476 - RNA, 21 nt, synthetic construct
  source 1..21: mol_type = other RNA; note = Description of Artificial Sequence: Synthetic oligonucleotide
  modified_base 1: mod_base = OTHER; note = 2'-O-methyluridine-3'-phosphorothioate
  modified_base 2: mod_base = OTHER; note = 2'-O-methyladenosine-3'-phosphorothioate
  modified_base 3: mod_base = OTHER; note = 2'-O-methyluridine-3'-phosphate
  modified_base 4: mod_base = OTHER; note = 2'-O-methylguanosine-3'-phosphate
  modified_base 5: mod_base = OTHER; note = 2'-O-methyladenosine-3'-phosphate
  modified_base 6: mod_base = OTHER; note = 2'-O-methyladenosine-3'-phosphate
  modified_base 7: mod_base = OTHER; note = 2'-fluorocytidine-3'-phosphate
  modified_base 8: mod_base = OTHER; note = 2'-O-methyladenosine-3'-phosphate
  modified_base 9: mod_base = OTHER; note = 2'-fluoroadenosine-3'-phosphate
  modified_base 10: mod_base = OTHER; note = 2'-fluorocytidine-3'-phosphate
  modified_base 11: mod_base = OTHER; note = 2'-fluoroadenosine-3'-phosphate
  modified_base 12: mod_base = OTHER; note = 2'-O-methyluridine-3'-phosphate
  modified_base 13: mod_base = OTHER; note = 2'-O-methylguanosine-3'-phosphate
  modified_base 14: mod_base = OTHER; note = 2'-O-methylcytidine-3'-phosphate
  modified_base 15: mod_base = OTHER; note = 2'-O-methyluridine-3'-phosphate
  modified_base 16: mod_base = OTHER; note = 2'-O-methyladenosine-3'-phosphate
  modified_base 17: mod_base = OTHER; note = 2'-O-methyladenosine-3'-phosphate
  modified_base 18: mod_base = OTHER; note = 2'-O-methyladenosine-3'-phosphate
  modified_base 19: mod_base = OTHER; note = 2'-O-methyluridine-3'-phosphate
  modified_base 20: mod_base = OTHER; note = 2'-O-methylcytidine-3'-phosphate
  modified_base 21: mod_base = OTHER; note = 2'-O-methyladenosine-3'-phosphate N-[tris(GalNAc-alkyl)-amidodecanoyl)]-4-hydroxyprolinol Hyp-(GalNAc-alkyl)3
tatgaacaacatgctaaatca

SEQ ID NO: 2477 - RNA, 23 nt, synthetic construct
  source 1..23: mol_type = other RNA; note = Description of Artificial Sequence: Synthetic oligonucleotide
  modified_base 1: mod_base = OTHER; note = 2'-O-methyluridine-3'-phosphorothioate
  modified_base 2: mod_base = OTHER; note = 2'-fluoroguanosine-3'-phosphorothioate
  modified_base 3: mod_base = OTHER; note = 2'-O-methyladenosine-3'-phosphate
  modified_base 4: mod_base = OTHER; note = 2'-O-methyluridine-3'-phosphate
  modified_base 5: mod_base = OTHER; note = 2'-O-methyluridine-3'-phosphate
  modified_base 6: mod_base = OTHER; note = 2'-fluorouridine-3'-phosphate
  modified_base 7: mod_base = OTHER; note = 2'-O-methyladenosine-3'-phosphate
  modified_base 8: mod_base = OTHER; note = 2'-fluoroguanosine-3'-phosphate
  modified_base 9: mod_base = OTHER; note = 2'-fluorocytidine-3'-phosphate
  modified_base 10: mod_base = OTHER; note = 2'-O-methyladenosine-3'-phosphate
  modified_base 11: mod_base = OTHER; note = 2'-O-methyluridine-3'-phosphate
  modified_base 12: mod_base = OTHER; note = 2'-O-methylguanosine-3'-phosphate
  modified_base 13: mod_base = OTHER; note = 2'-O-methyluridine-3'-phosphate
  modified_base 14: mod_base = OTHER; note = 2'-fluorouridine-3'-phosphate
  modified_base 15: mod_base = OTHER; note = 2'-O-methylguanosine-3'-phosphate
  modified_base 16: mod_base = OTHER; note = 2'-fluorouridine-3'-phosphate
  modified_base 17: mod_base = OTHER; note = 2'-O-methyluridine-3'-phosphate
  modified_base 18: mod_base = OTHER; note = 2'-O-methylcytidine-3'-phosphate
  modified_base 19: mod_base = OTHER; note = 2'-O-methyladenosine-3'-phosphate
  modified_base 20: mod_base = OTHER; note = 2'-O-methyluridine-3'-phosphate
  modified_base 21: mod_base = OTHER; note = 2'-O-methyladenosine-3'-phosphorothioate
  modified_base 22: mod_base = OTHER; note = 2'-O-methyladenosine-3'-phosphorothioate
  modified_base 23: mod_base = OTHER; note = 2'-O-methyluridine-3'-phosphate
tgatttagcatgttgttcataat

SEQ ID NO: 2478 - RNA, 21 nt, synthetic construct
  source 1..21: mol_type = other RNA; note = Description of Artificial Sequence: Synthetic oligonucleotide
  modified_base 1: mod_base = OTHER; note = 2'-O-methyladenosine-3'-phosphorothioate
  modified_base 2: mod_base = OTHER; note = 2'-O-methyluridine-3'-phosphorothioate
  modified_base 3: mod_base = OTHER; note = 2'-O-methylguanosine-3'-phosphate
  modified_base 4: mod_base = OTHER; note = 2'-O-methyladenosine-3'-phosphate
  modified_base 5: mod_base = OTHER; note = 2'-O-methyluridine-3'-phosphate
  modified_base 6: mod_base = OTHER; note = 2'-O-methyluridine-3'-phosphate
  modified_base 7: mod_base = OTHER; note = 2'-fluoroadenosine-3'-phosphate
  modified_base 8: mod_base = OTHER; note = 2'-O-methyluridine-3'-phosphate
  modified_base 9: mod_base = OTHER; note = 2'-fluoroguanosine-3'-phosphate
  modified_base 10: mod_base = OTHER; note = 2'-fluoroadenosine-3'-phosphate
  modified_base 11: mod_base = OTHER; note = 2'-fluoroadenosine-3'-phosphate
  modified_base 12: mod_base = OTHER; note = 2'-O-methylcytidine-3'-phosphate
  modified_base 13: mod_base = OTHER; note = 2'-O-methyladenosine-3'-phosphate
  modified_base 14: mod_base = OTHER; note = 2'-O-methyladenosine-3'-phosphate
  modified_base 15: mod_base = OTHER; note = 2'-O-methylcytidine-3'-phosphate
  modified_base 16: mod_base = OTHER; note = 2'-O-methyladenosine-3'-phosphate
  modified_base 17: mod_base = OTHER; note = 2'-O-methyluridine-3'-phosphate
  modified_base 18: mod_base = OTHER; note = 2'-O-methylguanosine-3'-phosphate
  modified_base 19: mod_base = OTHER; note = 2'-O-methylcytidine-3'-phosphate
  modified_base 20: mod_base = OTHER; note = 2'-O-methyluridine-3'-phosphate
  modified_base 21: mod_base = OTHER; note = 2'-O-methyladenosine-3'-phosphate N-[tris(GalNAc-alkyl)-amidodecanoyl)]-4-hydroxyprolinol Hyp-(GalNAc-alkyl)3
atgattatgaacaacatgcta

SEQ ID NO: 2479 - RNA, 23 nt, synthetic construct
  source 1..23: mol_type = other RNA; note = Description of Artificial Sequence: Synthetic oligonucleotide
  modified_base 1: mod_base = OTHER; note = 2'-O-methyluridine-3'-phosphorothioate
  modified_base 2: mod_base = OTHER; note = 2'-fluoroadenosine-3'-phosphorothioate
  modified_base 3: mod_base = OTHER; note = 2'-O-methylguanosine-3'-phosphate
  modified_base 4: mod_base = OTHER; note = 2'-O-methylcytidine-3'-phosphate
  modified_base 5: mod_base = OTHER; note = 2'-O-methyladenosine-3'-phosphate
  modified_base 6: mod_base = OTHER; note = 2'-fluorouridine-3'-phosphate
  modified_base 7: mod_base = OTHER; note = 2'-O-methylguanosine-3'-phosphate
  modified_base 8: mod_base = OTHER; note = 2'-fluorouridine-3'-phosphate
  modified_base 9: mod_base = OTHER; note = 2'-fluorouridine-3'-phosphate
  modified_base 10: mod_base = OTHER; note = 2'-O-methylguanosine-3'-phosphate
  modified_base 11: mod_base = OTHER; note = 2'-O-methyluridine-3'-phosphate
  modified_base 12: mod_base = OTHER; note = 2'-O-methyluridine-3'-phosphate
  modified_base 13: mod_base = OTHER; note = 2'-O-methylcytidine-3'-phosphate
  modified_base 14: mod_base = OTHER; note = 2'-fluoroadenosine-3'-phosphate
  modified_base 15: mod_base = OTHER; note = 2'-O-methyluridine-3'-phosphate
  modified_base 16: mod_base = OTHER; note = 2'-fluoroadenosine-3'-phosphate
  modified_base 17: mod_base = OTHER; note = 2'-O-methyladenosine-3'-phosphate
  modified_base 18: mod_base = OTHER; note = 2'-O-methyluridine-3'-phosphate
  modified_base 19: mod_base = OTHER; note = 2'-O-methylcytidine-3'-phosphate
  modified_base 20: mod_base = OTHER; note = 2'-O-methyladenosine-3'-phosphate
  modified_base 21: mod_base = OTHER; note = 2'-O-methyluridine-3'-phosphorothioate
  modified_base 22: mod_base = OTHER; note = 2'-O-methyluridine-3'-phosphorothioate
  modified_base 23: mod_base = OTHER; note = 2'-O-methylguanosine-3'-phosphate
tagcatgttgttcataatcattg

SEQ ID NO: 2480 - RNA, 21 nt, synthetic construct
  source 1..21: mol_type = other RNA; note = Description of Artificial Sequence: Synthetic oligonucleotide
  modified_base 1: mod_base = OTHER; note = 2'-O-methyladenosine-3'-phosphorothioate
  modified_base 2: mod_base = OTHER; note = 2'-O-methyladenosine-3'-phosphorothioate
  modified_base 3: mod_base = OTHER; note = 2'-O-methyluridine-3'-phosphate
  modified_base 4: mod_base = OTHER; note = 2'-O-methylguanosine-3'-phosphate
  modified_base 5: mod_base = OTHER; note = 2'-O-methyladenosine-3'-phosphate
  modified_base 6: mod_base = OTHER; note = 2'-O-methyluridine-3'-phosphate
  modified_base 7: mod_base = OTHER; note = 2'-fluorouridine-3'-phosphate
  modified_base 8: mod_base = OTHER; note = 2'-O-methyladenosine-3'-phosphate
  modified_base 9: mod_base = OTHER; note = 2'-fluorouridine-3'-phosphate
  modified_base 10: mod_base = OTHER; note = 2'-fluoroguanosine-3'-phosphate
  modified_base 11: mod_base = OTHER; note = 2'-fluoroadenosine-3'-phosphate
  modified_base 12: mod_base = OTHER; note = 2'-O-methyladenosine-3'-phosphate
  modified_base 13: mod_base = OTHER; note = 2'-O-methylcytidine-3'-phosphate
  modified_base 14: mod_base = OTHER; note = 2'-O-methyladenosine-3'-phosphate
  modified_base 15: mod_base = OTHER; note = 2'-O-methyladenosine-3'-phosphate
  modified_base 16: mod_base = OTHER; note = 2'-O-methylcytidine-3'-phosphate
  modified_base 17: mod_base = OTHER; note = 2'-O-methyladenosine-3'-phosphate
  modified_base 18: mod_base = OTHER; note = 2'-O-methyluridine-3'-phosphate
  modified_base 19: mod_base = OTHER; note = 2'-O-methylguanosine-3'-phosphate
  modified_base 20: mod_base = OTHER; note = 2'-O-methylcytidine-3'-phosphate
  modified_base 21: mod_base = OTHER; note = 2'-O-methyluridine-3'-phosphate N-[tris(GalNAc-alkyl)-amidodecanoyl)]-4-hydroxyprolinol Hyp-(GalNAc-alkyl)3
aatgattatgaacaacatgct

SEQ ID NO: 2481 - RNA, 23 nt, synthetic construct
  source 1..23: mol_type = other RNA; note = Description of Artificial Sequence: Synthetic oligonucleotide
  modified_base 1: mod_base = OTHER; note = 2'-O-methyladenosine-3'-phosphorothioate
  modified_base 2: mod_base = OTHER; note = 2'-fluoroguanosine-3'-phosphorothioate
  modified_base 3: mod_base = OTHER; note = 2'-O-methylcytidine-3'-phosphate
  modified_base 4: mod_base = OTHER; note = 2'-O-methyladenosine-3'-phosphate
  modified_base 5: mod_base = OTHER; note = 2'-O-methyluridine-3'-phosphate
  modified_base 6: mod_base = OTHER; note = 2'-fluoroguanosine-3'-phosphate
  modified_base 7: mod_base = OTHER; note = 2'-O-methyluridine-3'-phosphate
  modified_base 8: mod_base = OTHER; note = 2'-fluorouridine-3'-phosphate
  modified_base 9: mod_base = OTHER; note = 2'-fluoroguanosine-3'-phosphate
  modified_base 10: mod_base = OTHER; note = 2'-O-methyluridine-3'-phosphate
  modified_base 11: mod_base = OTHER; note = 2'-O-methyluridine-3'-phosphate
  modified_base 12: mod_base = OTHER; note = 2'-O-methylcytidine-3'-phosphate
  modified_base 13: mod_base = OTHER; note = 2'-O-methyladenosine-3'-phosphate
  modified_base 14: mod_base = OTHER; note = 2'-fluorouridine-3'-phosphate
  modified_base 15: mod_base = OTHER; note = 2'-O-methyladenosine-3'-phosphate
  modified_base 16: mod_base = OTHER; note = 2'-fluoroadenosine-3'-phosphate
  modified_base 17: mod_base = OTHER; note = 2'-O-methyluridine-3'-phosphate
  modified_base 18: mod_base = OTHER; note = 2'-O-methylcytidine-3'-phosphate
  modified_base 19: mod_base = OTHER; note = 2'-O-methyladenosine-3'-phosphate
  modified_base 20: mod_base = OTHER; note = 2'-O-methyluridine-3'-phosphate
  modified_base 21: mod_base = OTHER; note = 2'-O-methyluridine-3'-phosphorothioate
  modified_base 22: mod_base = OTHER; note = 2'-O-methylguanosine-3'-phosphorothioate
  modified_base 23: mod_base = OTHER; note = 2'-O-methyladenosine-3'-phosphate
agcatgttgttcataatcattga

SEQ ID NO: 2482 - RNA, 21 nt, synthetic construct
  source 1..21: mol_type = other RNA; note = Description of Artificial Sequence: Synthetic oligonucleotide
  modified_base 1: mod_base = OTHER; note = 2'-O-methyladenosine-3'-phosphorothioate
  modified_base 2: mod_base = OTHER; note = 2'-O-methyladenosine-3'-phosphorothioate
  modified_base 3: mod_base = OTHER; note = 2'-O-methyluridine-3'-phosphate
  modified_base 4: mod_base = OTHER; note = 2'-O-methyluridine-3'-phosphate
  modified_base 5: mod_base = OTHER; note = 2'-O-methylcytidine-3'-phosphate
  modified_base 6: mod_base = OTHER; note = 2'-O-methylcytidine-3'-phosphate
  modified_base 7: mod_base = OTHER; note = 2'-fluorocytidine-3'-phosphate
  modified_base 8: mod_base = OTHER; note = 2'-O-methylcytidine-3'-phosphate
  modified_base 9: mod_base = OTHER; note = 2'-fluoroadenosine-3'-phosphate
  modified_base 10: mod_base = OTHER; note = 2'-fluorocytidine-3'-phosphate
  modified_base 11: mod_base = OTHER; note = 2'-fluorouridine-3'-phosphate
  modified_base 12: mod_base = OTHER; note = 2'-O-methyluridine-3'-phosphate
  modified_base 13: mod_base = OTHER; note = 2'-O-methylcytidine-3'-phosphate
  modified_base 14: mod_base = OTHER; note = 2'-O-methyladenosine-3'-phosphate
  modified_base 15: mod_base = OTHER; note = 2'-O-methyladenosine-3'-phosphate
  modified_base 16: mod_base = OTHER; note = 2'-O-methyluridine-3'-phosphate
  modified_base 17: mod_base = OTHER; note = 2'-O-methyladenosine-3'-phosphate
  modified_base 18: mod_base = OTHER; note = 2'-O-methylcytidine-3'-phosphate
  modified_base 19: mod_base = OTHER; note = 2'-O-methyladenosine-3'-phosphate
  modified_base 20: mod_base = OTHER; note = 2'-O-methyladenosine-3'-phosphate
  modified_base 21: mod_base = OTHER; note = 2'-O-methyladenosine-3'-phosphate N-[tris(GalNAc-alkyl)-amidodecanoyl)]-4-hydroxyprolinol Hyp-(GalNAc-alkyl)3
aattccccacttcaatacaaa

SEQ ID NO: 2483 - RNA, 23 nt, synthetic construct
  source 1..23: mol_type = other RNA; note = Description of Artificial Sequence: Synthetic oligonucleotide
  modified_base 1: mod_base = OTHER; note = 2'-O-methyluridine-3'-phosphorothioate
  modified_base 2: mod_base = OTHER; note = 2'-fluorouridine -3'-phosphorothioate
  modified_base 3: mod_base = OTHER; note = 2'-O-methyluridine-3'-phosphate
  modified_base 4: mod_base = OTHER; note = 2'-O-methylguanosine-3'-phosphate
  modified_base 5: mod_base = OTHER; note = 2'-O-methyluridine-3'-phosphate
  modified_base 6: mod_base = OTHER; note = 2'-fluoroadenosine-3'-phosphate
  modified_base 7: mod_base = OTHER; note = 2'-O-methyluridine-3'-phosphate
  modified_base 8: mod_base = OTHER; note = 2'-fluorouridine-3'-phosphate
  modified_base 9: mod_base = OTHER; note = 2'-fluoroguanosine-3'-phosphate
  modified_base 10: mod_base = OTHER; note = 2'-O-methyladenosine-3'-phosphate
  modified_base 11: mod_base = OTHER; note = 2'-O-methyladenosine-3'-phosphate
  modified_base 12: mod_base = OTHER; note = 2'-O-methylguanosine-3'-phosphate
  modified_base 13: mod_base = OTHER; note = 2'-O-methyluridine-3'-phosphate
  modified_base 14: mod_base = OTHER; note = 2'-fluoroguanosine-3'-phosphate
  modified_base 15: mod_base = OTHER; note = 2'-O-methylguanosine-3'-phosphate
  modified_base 16: mod_base = OTHER; note = 2'-fluoroguanosine-3'-phosphate
  modified_base 17: mod_base = OTHER; note = 2'-O-methylguanosine-3'-phosphate
  modified_base 18: mod_base = OTHER; note = 2'-O-methyladenosine-3'-phosphate
  modified_base 19: mod_base = OTHER; note = 2'-O-methyladenosine-3'-phosphate
  modified_base 20: mod_base = OTHER; note = 2'-O-methyluridine-3'-phosphate
  modified_base 21: mod_base = OTHER; note = 2'-O-methyluridine-3'-phosphorothioate
  modified_base 22: mod_base = OTHER; note = 2'-O-methyladenosine-3'-phosphorothioate
  modified_base 23: mod_base = OTHER; note = 2'-O-methylcytidine-3'-phosphate
tttgtattgaagtggggaattac

SEQ ID NO: 2484 - RNA, 21 nt, synthetic construct
  source 1..21: mol_type = other RNA; note = Description of Artificial Sequence: Synthetic oligonucleotide
  modified_base 1: mod_base = OTHER; note = 2'-O-methyladenosine-3'-phosphorothioate
  modified_base 2: mod_base = OTHER; note = 2'-O-methyluridine-3'-phosphorothioate
  modified_base 3: mod_base = OTHER; note = 2'-O-methyluridine-3'-phosphate
  modified_base 4: mod_base = OTHER; note = 2'-O-methylcytidine-3'-phosphate
  modified_base 5: mod_base = OTHER; note = 2'-O-methylcytidine-3'-phosphate
  modified_base 6: mod_base = OTHER; note = 2'-O-methylcytidine-3'-phosphate
  modified_base 7: mod_base = OTHER; note = 2'-fluorocytidine-3'-phosphate
  modified_base 8: mod_base = OTHER; note = 2'-O-methyladenosine-3'-phosphate
  modified_base 9: mod_base = OTHER; note = 2'-fluorocytidine-3'-phosphate
  modified_base 10: mod_base = OTHER; note = 2'-fluorouridine-3'-phosphate
  modified_base 11: mod_base = OTHER; note = 2'-fluorouridine-3'-phosphate
  modified_base 12: mod_base = OTHER; note = 2'-O-methylcytidine-3'-phosphate
  modified_base 13: mod_base = OTHER; note = 2'-O-methyladenosine-3'-phosphate
  modified_base 14: mod_base = OTHER; note = 2'-O-methyladenosine-3'-phosphate
  modified_base 15: mod_base = OTHER; note = 2'-O-methyluridine-3'-phosphate
  modified_base 16: mod_base = OTHER; note = 2'-O-methyladenosine-3'-phosphate
  modified_base 17: mod_base = OTHER; note = 2'-O-methylcytidine-3'-phosphate
  modified_base 18: mod_base = OTHER; note = 2'-O-methyladenosine-3'-phosphate
  modified_base 19: mod_base = OTHER; note = 2'-O-methyladenosine-3'-phosphate
  modified_base 20: mod_base = OTHER; note = 2'-O-methyladenosine-3'-phosphate
  modified_base 21: mod_base = OTHER; note = 2'-O-methylguanosine-3'-phosphate N-[tris(GalNAc-alkyl)-amidodecanoyl)]-4-hydroxyprolinol Hyp-(GalNAc-alkyl)3
attccccacttcaatacaaag

SEQ ID NO: 2485 - RNA, 23 nt, synthetic construct
  source 1..23: mol_type = other RNA; note = Description of Artificial Sequence: Synthetic oligonucleotide
  modified_base 1: mod_base = OTHER; note = 2'-O-methylcytidine-3'-phosphorothioate
  modified_base 2: mod_base = OTHER; note = 2'-fluorouridine -3'-phosphorothioate
  modified_base 3: mod_base = OTHER; note = 2'-O-methyluridine-3'-phosphate
  modified_base 4: mod_base = OTHER; note = 2'-O-methyluridine-3'-phosphate
  modified_base 5: mod_base = OTHER; note = 2'-O-methylguanosine-3'-phosphate
  modified_base 6: mod_base = OTHER; note = 2'-fluorouridine-3'-phosphate
  modified_base 7: mod_base = OTHER; note = 2'-O-methyladenosine-3'-phosphate
  modified_base 8: mod_base = OTHER; note = 2'-fluorouridine-3'-phosphate
  modified_base 9: mod_base = OTHER; note = 2'-fluorouridine-3'-phosphate
  modified_base 10: mod_base = OTHER; note = 2'-O-methylguanosine-3'-phosphate
  modified_base 11: mod_base = OTHER; note = 2'-O-methyladenosine-3'-phosphate
  modified_base 12: mod_base = OTHER; note = 2'-O-methyladenosine-3'-phosphate
  modified_base 13: mod_base = OTHER; note = 2'-O-methylguanosine-3'-phosphate
  modified_base 14: mod_base = OTHER; note = 2'-fluorouridine-3'-phosphate
  modified_base 15: mod_base = OTHER; note = 2'-O-methylguanosine-3'-phosphate
  modified_base 16: mod_base = OTHER; note = 2'-fluoroguanosine-3'-phosphate
  modified_base 17: mod_base = OTHER; note = 2'-O-methylguanosine-3'-phosphate
  modified_base 18: mod_base = OTHER; note = 2'-O-methylguanosine-3'-phosphate
  modified_base 19: mod_base = OTHER; note = 2'-O-methyladenosine-3'-phosphate
  modified_base 20: mod_base = OTHER; note = 2'-O-methyladenosine-3'-phosphate
  modified_base 21: mod_base = OTHER; note = 2'-O-methyluridine-3'-phosphorothioate
  modified_base 22: mod_base = OTHER; note = 2'-O-methyluridine-3'-phosphorothioate
  modified_base 23: mod_base = OTHER; note = 2'-O-methyladenosine-3'-phosphate
ctttgtattgaagtggggaatta

SEQ ID NO: 2486 - RNA, 21 nt, synthetic construct
  source 1..21: mol_type = other RNA; note = Description of Artificial Sequence: Synthetic oligonucleotide
  modified_base 1: mod_base = OTHER; note = 2'-O-methylcytidine-3'-phosphorothioate
  modified_base 2: mod_base = OTHER; note = 2'-O-methyluridine-3'-phosphorothioate
  modified_base 3: mod_base = OTHER; note = 2'-O-methylguanosine-3'-phosphate
  modified_base 4: mod_base = OTHER; note = 2'-O-methyluridine-3'-phosphate
  modified_base 5: mod_base = OTHER; note = 2'-O-methyladenosine-3'-phosphate
  modified_base 6: mod_base = OTHER; note = 2'-O-methyladenosine-3'-phosphate
  modified_base 7: mod_base = OTHER; note = 2'-fluorouridine-3'-phosphate
  modified_base 8: mod_base = OTHER; note = 2'-O-methyluridine-3'-phosphate
  modified_base 9: mod_base = OTHER; note = 2'-fluorocytidine-3'-phosphate
  modified_base 10: mod_base = OTHER; note = 2'-fluorocytidine-3'-phosphate
  modified_base 11: mod_base = OTHER; note = 2'-fluorocytidine-3'-phosphate
  modified_base 12: mod_base = OTHER; note = 2'-O-methylcytidine-3'-phosphate
  modified_base 13: mod_base = OTHER; note = 2'-O-methyladenosine-3'-phosphate
  modified_base 14: mod_base = OTHER; note = 2'-O-methylcytidine-3'-phosphate
  modified_base 15: mod_base = OTHER; note = 2'-O-methyluridine-3'-phosphate
  modified_base 16: mod_base = OTHER; note = 2'-O-methyluridine-3'-phosphate
  modified_base 17: mod_base = OTHER; note = 2'-O-methylcytidine-3'-phosphate
  modified_base 18: mod_base = OTHER; note = 2'-O-methyladenosine-3'-phosphate
  modified_base 19: mod_base = OTHER; note = 2'-O-methyladenosine-3'-phosphate
  modified_base 20: mod_base = OTHER; note = 2'-O-methyluridine-3'-phosphate
  modified_base 21: mod_base = OTHER; note = 2'-O-methyladenosine-3'-phosphate N-[tris(GalNAc-alkyl)-amidodecanoyl)]-4-hydroxyprolinol Hyp-(GalNAc-alkyl)3
ctgtaattccccacttcaata

SEQ ID NO: 2487 - RNA, 23 nt, synthetic construct
  source 1..23: mol_type = other RNA; note = Description of Artificial Sequence: Synthetic oligonucleotide
  modified_base 1: mod_base = OTHER; note = 2'-O-methyluridine-3'-phosphorothioate
  modified_base 2: mod_base = OTHER; note = 2'-fluoroadenosine-3'-phosphorothioate
  modified_base 3: mod_base = OTHER; note = 2'-O-methyluridine-3'-phosphate
  modified_base 4: mod_base = OTHER; note = 2'-O-methyluridine-3'-phosphate
  modified_base 5: mod_base = OTHER; note = 2'-O-methylguanosine-3'-phosphate
  modified_base 6: mod_base = OTHER; note = 2'-fluoroadenosine-3'-phosphate
  modified_base 7: mod_base = OTHER; note = 2'-O-methyladenosine-3'-phosphate
  modified_base 8: mod_base = OTHER; note = 2'-fluoroguanosine-3'-phosphate
  modified_base 9: mod_base = OTHER; note = 2'-fluorouridine-3'-phosphate
  modified_base 10: mod_base = OTHER; note = 2'-O-methylguanosine-3'-phosphate
  modified_base 11: mod_base = OTHER; note = 2'-O-methylguanosine-3'-phosphate
  modified_base 12: mod_base = OTHER; note = 2'-O-methylguanosine-3'-phosphate
  modified_base 13: mod_base = OTHER; note = 2'-O-methylguanosine-3'-phosphate
  modified_base 14: mod_base = OTHER; note = 2'-fluoroadenosine-3'-phosphate
  modified_base 15: mod_base = OTHER; note = 2'-O-methyladenosine-3'-phosphate
  modified_base 16: mod_base = OTHER; note = 2'-fluorouridine-3'-phosphate
  modified_base 17: mod_base = OTHER; note = 2'-O-methyluridine-3'-phosphate
  modified_base 18: mod_base = OTHER; note = 2'-O-methyladenosine-3'-phosphate
  modified_base 19: mod_base = OTHER; note = 2'-O-methylcytidine-3'-phosphate
  modified_base 20: mod_base = OTHER; note = 2'-O-methyladenosine-3'-phosphate
  modified_base 21: mod_base = OTHER; note = 2'-O-methylguanosine-3'-phosphorothioate
  modified_base 22: mod_base = OTHER; note = 2'-O-methyladenosine-3'-phosphorothioate
  modified_base 23: mod_base = OTHER; note = 2'-O-methylcytidine-3'-phosphate
tattgaagtggggaattacagac

SEQ ID NO: 2488 - RNA, 21 nt, synthetic construct
  source 1..21: mol_type = other RNA; note = Description of Artificial Sequence: Synthetic oligonucleotide
  modified_base 1: mod_base = OTHER; note = 2'-O-methyluridine-3'-phosphorothioate
  modified_base 2: mod_base = OTHER; note = 2'-O-methylcytidine-3'-phosphorothioate
  modified_base 3: mod_base = OTHER; note = 2'-O-methyluridine-3'-phosphate
  modified_base 4: mod_base = OTHER; note = 2'-O-methylguanosine-3'-phosphate
  modified_base 5: mod_base = OTHER; note = 2'-O-methyluridine-3'-phosphate
  modified_base 6: mod_base = OTHER; note = 2'-O-methyladenosine-3'-phosphate
  modified_base 7: mod_base = OTHER; note = 2'-fluoroadenosine-3'-phosphate
  modified_base 8: mod_base = OTHER; note = 2'-O-methyluridine-3'-phosphate
  modified_base 9: mod_base = OTHER; note = 2'-fluorouridine-3'-phosphate
  modified_base 10: mod_base = OTHER; note = 2'-fluorocytidine-3'-phosphate
  modified_base 11: mod_base = OTHER; note = 2'-fluorocytidine-3'-phosphate
  modified_base 12: mod_base = OTHER; note = 2'-O-methylcytidine-3'-phosphate
  modified_base 13: mod_base = OTHER; note = 2'-O-methylcytidine-3'-phosphate
  modified_base 14: mod_base = OTHER; note = 2'-O-methyladenosine-3'-phosphate
  modified_base 15: mod_base = OTHER; note = 2'-O-methylcytidine-3'-phosphate
  modified_base 16: mod_base = OTHER; note = 2'-O-methyluridine-3'-phosphate
  modified_base 17: mod_base = OTHER; note = 2'-O-methyluridine-3'-phosphate
  modified_base 18: mod_base = OTHER; note = 2'-O-methylcytidine-3'-phosphate
  modified_base 19: mod_base = OTHER; note = 2'-O-methyladenosine-3'-phosphate
  modified_base 20: mod_base = OTHER; note = 2'-O-methyladenosine-3'-phosphate
  modified_base 21: mod_base = OTHER; note = 2'-O-methyluridine-3'-phosphate N-[tris(GalNAc-alkyl)-amidodecanoyl)]-4-hydroxyprolinol Hyp-(GalNAc-alkyl)3
tctgtaattccccacttcaat

SEQ ID NO: 2489 - RNA, 23 nt, synthetic construct
  source 1..23: mol_type = other RNA; note = Description of Artificial Sequence: Synthetic oligonucleotide
  modified_base 1: mod_base = OTHER; note = 2'-O-methyladenosine-3'-phosphorothioate
  modified_base 2: mod_base = OTHER; note = 2'-fluorouridine -3'-phosphorothioate
  modified_base 3: mod_base = OTHER; note = 2'-O-methyluridine-3'-phosphate
  modified_base 4: mod_base = OTHER; note = 2'-O-methylguanosine-3'-phosphate
  modified_base 5: mod_base = OTHER; note = 2'-O-methyladenosine-3'-phosphate
  modified_base 6: mod_base = OTHER; note = 2'-fluoroadenosine-3'-phosphate
  modified_base 7: mod_base = OTHER; note = 2'-O-methylguanosine-3'-phosphate
  modified_base 8: mod_base = OTHER; note = 2'-fluorouridine-3'-phosphate
  modified_base 9: mod_base = OTHER; note = 2'-fluoroguanosine-3'-phosphate
  modified_base 10: mod_base = OTHER; note = 2'-O-methylguanosine-3'-phosphate
  modified_base 11: mod_base = OTHER; note = 2'-O-methylguanosine-3'-phosphate
  modified_base 12: mod_base = OTHER; note = 2'-O-methylguanosine-3'-phosphate
  modified_base 13: mod_base = OTHER; note = 2'-O-methyladenosine-3'-phosphate
  modified_base 14: mod_base = OTHER; note = 2'-fluoroadenosine-3'-phosphate
  modified_base 15: mod_base = OTHER; note = 2'-O-methyluridine-3'-phosphate
  modified_base 16: mod_base = OTHER; note = 2'-fluorouridine-3'-phosphate
  modified_base 17: mod_base = OTHER; note = 2'-O-methyladenosine-3'-phosphate
  modified_base 18: mod_base = OTHER; note = 2'-O-methylcytidine-3'-phosphate
  modified_base 19: mod_base = OTHER; note = 2'-O-methyladenosine-3'-phosphate
  modified_base 20: mod_base = OTHER; note = 2'-O-methylguanosine-3'-phosphate
  modified_base 21: mod_base = OTHER; note = 2'-O-methyladenosine-3'-phosphorothioate
  modified_base 22: mod_base = OTHER; note = 2'-O-methylcytidine-3'-phosphorothioate
  modified_base 23: mod_base = OTHER; note = 2'-O-methyluridine-3'-phosphate
attgaagtggggaattacagact

SEQ ID NO: 2490 - RNA, 21 nt, synthetic construct
  source 1..21: mol_type = other RNA; note = Description of Artificial Sequence: Synthetic oligonucleotide
  modified_base 1: mod_base = OTHER; note = 2'-O-methyluridine-3'-phosphorothioate
  modified_base 2: mod_base = OTHER; note = 2'-O-methylguanosine-3'-phosphorothioate
  modified_base 3: mod_base = OTHER; note = 2'-O-methyladenosine-3'-phosphate
  modified_base 4: mod_base = OTHER; note = 2'-O-methyluridine-3'-phosphate
  modified_base 5: mod_base = OTHER; note = 2'-O-methylguanosine-3'-phosphate
  modified_base 6: mod_base = OTHER; note = 2'-O-methyluridine-3'-phosphate
  modified_base 7: mod_base = OTHER; note = 2'-fluoroguanosine-3'-phosphate
  modified_base 8: mod_base = OTHER; note = 2'-O-methylcytidine-3'-phosphate
  modified_base 9: mod_base = OTHER; note = 2'-fluoroguanosine-3'-phosphate
  modified_base 10: mod_base = OTHER; note = 2'-fluorouridine-3'-phosphate
  modified_base 11: mod_base = OTHER; note = 2'-fluoroadenosine-3'-phosphate
  modified_base 12: mod_base = OTHER; note = 2'-O-methyladenosine-3'-phosphate
  modified_base 13: mod_base = OTHER; note = 2'-O-methylcytidine-3'-phosphate
  modified_base 14: mod_base = OTHER; note = 2'-O-methyladenosine-3'-phosphate
  modified_base 15: mod_base = OTHER; note = 2'-O-methylguanosine-3'-phosphate
  modified_base 16: mod_base = OTHER; note = 2'-O-methyladenosine-3'-phosphate
  modified_base 17: mod_base = OTHER; note = 2'-O-methyluridine-3'-phosphate
  modified_base 18: mod_base = OTHER; note = 2'-O-methyluridine-3'-phosphate
  modified_base 19: mod_base = OTHER; note = 2'-O-methylcytidine-3'-phosphate
  modified_base 20: mod_base = OTHER; note = 2'-O-methyladenosine-3'-phosphate
  modified_base 21: mod_base = OTHER; note = 2'-O-methyladenosine-3'-phosphate N-[tris(GalNAc-alkyl)-amidodecanoyl)]-4-hydroxyprolinol Hyp-(GalNAc-alkyl)3
tgatgtgcgtaacagattcaa

SEQ ID NO: 2491 - RNA, 23 nt, synthetic construct
  source 1..23: mol_type = other RNA; note = Description of Artificial Sequence: Synthetic oligonucleotide
  modified_base 1: mod_base = OTHER; note = 2'-O-methyluridine-3'-phosphorothioate
  modified_base 2: mod_base = OTHER; note = 2'-fluorouridine -3'-phosphorothioate
  modified_base 3: mod_base = OTHER; note = 2'-O-methylguanosine-3'-phosphate
  modified_base 4: mod_base = OTHER; note = 2'-O-methyladenosine-3'-phosphate
  modified_base 5: mod_base = OTHER; note = 2'-O-methyladenosine-3'-phosphate
  modified_base 6: mod_base = OTHER; note = 2'-fluorouridine-3'-phosphate
  modified_base 7: mod_base = OTHER; note = 2'-O-methylcytidine-3'-phosphate
  modified_base 8: mod_base = OTHER; note = 2'-fluorouridine-3'-phosphate
  modified_base 9: mod_base = OTHER; note = 2'-fluoroguanosine-3'-phosphate
  modified_base 10: mod_base = OTHER; note = 2'-O-methyluridine-3'-phosphate
  modified_base 11: mod_base = OTHER; note = 2'-O-methyluridine-3'-phosphate
  modified_base 12: mod_base = OTHER; note = 2'-O-methyladenosine-3'-phosphate
  modified_base 13: mod_base = OTHER; note = 2'-O-methylcytidine-3'-phosphate
  modified_base 14: mod_base = OTHER; note = 2'-fluoroguanosine-3'-phosphate
  modified_base 15: mod_base = OTHER; note = 2'-O-methylcytidine-3'-phosphate
  modified_base 16: mod_base = OTHER; note = 2'-fluoroadenosine-3'-phosphate
  modified_base 17: mod_base = OTHER; note = 2'-O-methylcytidine-3'-phosphate
  modified_base 18: mod_base = OTHER; note = 2'-O-methyladenosine-3'-phosphate
  modified_base 19: mod_base = OTHER; note = 2'-O-methyluridine-3'-phosphate
  modified_base 20: mod_base = OTHER; note = 2'-O-methylcytidine-3'-phosphate
  modified_base 21: mod_base = OTHER; note = 2'-O-methyladenosine-3'-phosphorothioate
  modified_base 22: mod_base = OTHER; note = 2'-O-methyluridine-3'-phosphorothioate
  modified_base 23: mod_base = OTHER; note = 2'-O-methylcytidine-3'-phosphate
ttgaatctgttacgcacatcatc

SEQ ID NO: 2492 - RNA, 21 nt, synthetic construct
  source 1..21: mol_type = other RNA; note = Description of Artificial Sequence: Synthetic oligonucleotide
  modified_base 1: mod_base = OTHER; note = 2'-O-methylguanosine-3'-phosphorothioate
  modified_base 2: mod_base = OTHER; note = 2'-O-methyladenosine-3'-phosphorothioate
  modified_base 3: mod_base = OTHER; note = 2'-O-methyluridine-3'-phosphate
  modified_base 4: mod_base = OTHER; note = 2'-O-methylguanosine-3'-phosphate
  modified_base 5: mod_base = OTHER; note = 2'-O-methyluridine-3'-phosphate
  modified_base 6: mod_base = OTHER; note = 2'-O-methylguanosine-3'-phosphate
  modified_base 7: mod_base = OTHER; note = 2'-fluorocytidine-3'-phosphate
  modified_base 8: mod_base = OTHER; note = 2'-O-methylguanosine-3'-phosphate
  modified_base 9: mod_base = OTHER; note = 2'-fluorouridine-3'-phosphate
  modified_base 10: mod_base = OTHER; note = 2'-fluoroadenosine-3'-phosphate
  modified_base 11: mod_base = OTHER; note = 2'-fluoroadenosine-3'-phosphate
  modified_base 12: mod_base = OTHER; note = 2'-O-methylcytidine-3'-phosphate
  modified_base 13: mod_base = OTHER; note = 2'-O-methyladenosine-3'-phosphate
  modified_base 14: mod_base = OTHER; note = 2'-O-methylguanosine-3'-phosphate
  modified_base 15: mod_base = OTHER; note = 2'-O-methyladenosine-3'-phosphate
  modified_base 16: mod_base = OTHER; note = 2'-O-methyluridine-3'-phosphate
  modified_base 17: mod_base = OTHER; note = 2'-O-methyluridine-3'-phosphate
  modified_base 18: mod_base = OTHER; note = 2'-O-methylcytidine-3'-phosphate
  modified_base 19: mod_base = OTHER; note = 2'-O-methyladenosine-3'-phosphate
  modified_base 20: mod_base = OTHER; note = 2'-O-methyladenosine-3'-phosphate
  modified_base 21: mod_base = OTHER; note = 2'-O-methyladenosine-3'-phosphate N-[tris(GalNAc-alkyl)-amidodecanoyl)]-4-hydroxyprolinol Hyp-(GalNAc-alkyl)3
gatgtgcgtaacagattcaaa

SEQ ID NO: 2493 - RNA, 23 nt, synthetic construct
  source 1..23: mol_type = other RNA; note = Description of Artificial Sequence: Synthetic oligonucleotide
  modified_base 1: mod_base = OTHER; note = 2'-O-methyluridine-3'-phosphorothioate
  modified_base 2: mod_base = OTHER; note = 2'-fluorouridine -3'-phosphorothioate
  modified_base 3: mod_base = OTHER; note = 2'-O-methyluridine-3'-phosphate
  modified_base 4: mod_base = OTHER; note = 2'-O-methylguanosine-3'-phosphate
  modified_base 5: mod_base = OTHER; note = 2'-O-methyladenosine-3'-phosphate
  modified_base 6: mod_base = OTHER; note = 2'-fluoroadenosine-3'-phosphate
  modified_base 7: mod_base = OTHER; note = 2'-O-methyluridine-3'-phosphate
  modified_base 8: mod_base = OTHER; note = 2'-fluorocytidine-3'-phosphate
  modified_base 9: mod_base = OTHER; note = 2'-fluorouridine-3'-phosphate
  modified_base 10: mod_base = OTHER; note = 2'-O-methylguanosine-3'-phosphate
  modified_base 11: mod_base = OTHER; note = 2'-O-methyluridine-3'-phosphate
  modified_base 12: mod_base = OTHER; note = 2'-O-methyluridine-3'-phosphate
  modified_base 13: mod_base = OTHER; note = 2'-O-methyladenosine-3'-phosphate
  modified_base 14: mod_base = OTHER; note = 2'-fluorocytidine-3'-phosphate
  modified_base 15: mod_base = OTHER; note = 2'-O-methylguanosine-3'-phosphate
  modified_base 16: mod_base = OTHER; note = 2'-fluorocytidine-3'-phosphate
  modified_base 17: mod_base = OTHER; note = 2'-O-methyladenosine-3'-phosphate
  modified_base 18: mod_base = OTHER; note = 2'-O-methylcytidine-3'-phosphate
  modified_base 19: mod_base = OTHER; note = 2'-O-methyladenosine-3'-phosphate
  modified_base 20: mod_base = OTHER; note = 2'-O-methyluridine-3'-phosphate
  modified_base 21: mod_base = OTHER; note = 2'-O-methylcytidine-3'-phosphorothioate
  modified_base 22: mod_base = OTHER; note = 2'-O-methyladenosine-3'-phosphorothioate
  modified_base 23: mod_base = OTHER; note = 2'-O-methyluridine-3'-phosphate
tttgaatctgttacgcacatcat

SEQ ID NO: 2494 - RNA, 21 nt, synthetic construct
  source 1..21: mol_type = other RNA; note = Description of Artificial Sequence: Synthetic oligonucleotide
  modified_base 1: mod_base = OTHER; note = 2'-O-methyluridine-3'-phosphorothioate
  modified_base 2: mod_base = OTHER; note = 2'-O-methylguanosine-3'-phosphorothioate
  modified_base 3: mod_base = OTHER; note = 2'-O-methylguanosine-3'-phosphate
  modified_base 4: mod_base = OTHER; note = 2'-O-methyladenosine-3'-phosphate
  modified_base 5: mod_base = OTHER; note = 2'-O-methyluridine-3'-phosphate
  modified_base 6: mod_base = OTHER; note = 2'-O-methylguanosine-3'-phosphate
  modified_base 7: mod_base = OTHER; note = 2'-fluoroadenosine-3'-phosphate
  modified_base 8: mod_base = OTHER; note = 2'-O-methyluridine-3'-phosphate
  modified_base 9: mod_base = OTHER; note = 2'-fluoroguanosine-3'-phosphate
  modified_base 10: mod_base = OTHER; note = 2'-fluorouridine-3'-phosphate
  modified_base 11: mod_base = OTHER; note = 2'-fluoroguanosine-3'-phosphate
  modified_base 12: mod_base = OTHER; note = 2'-O-methylcytidine-3'-phosphate
  modified_base 13: mod_base = OTHER; note = 2'-O-methylguanosine-3'-phosphate
  modified_base 14: mod_base = OTHER; note = 2'-O-methyluridine-3'-phosphate
  modified_base 15: mod_base = OTHER; note = 2'-O-methyladenosine-3'-phosphate
  modified_base 16: mod_base = OTHER; note = 2'-O-methyladenosine-3'-phosphate
  modified_base 17: mod_base = OTHER; note = 2'-O-methylcytidine-3'-phosphate
  modified_base 18: mod_base = OTHER; note = 2'-O-methyladenosine-3'-phosphate
  modified_base 19: mod_base = OTHER; note = 2'-O-methylguanosine-3'-phosphate
  modified_base 20: mod_base = OTHER; note = 2'-O-methyladenosine-3'-phosphate
  modified_base 21: mod_base = OTHER; note = 2'-O-methyluridine-3'-phosphate N-[tris(GalNAc-alkyl)-amidodecanoyl)]-4-hydroxyprolinol Hyp-(GalNAc-alkyl)3
tggatgatgtgcgtaacagat

SEQ ID NO: 2495 - RNA, 23 nt, synthetic construct
  source 1..23: mol_type = other RNA; note = Description of Artificial Sequence: Synthetic oligonucleotide
  modified_base 1: mod_base = OTHER; note = 2'-O-methyladenosine-3'-phosphorothioate
  modified_base 2: mod_base = OTHER; note = 2'-fluorouridine -3'-phosphorothioate
  modified_base 3: mod_base = OTHER; note = 2'-O-methylcytidine-3'-phosphate
  modified_base 4: mod_base = OTHER; note = 2'-O-methyluridine-3'-phosphate
  modified_base 5: mod_base = OTHER; note = 2'-O-methylguanosine-3'-phosphate
  modified_base 6: mod_base = OTHER; note = 2'-fluorouridine-3'-phosphate
  modified_base 7: mod_base = OTHER; note = 2'-O-methyluridine-3'-phosphate
  modified_base 8: mod_base = OTHER; note = 2'-fluoroadenosine-3'-phosphate
  modified_base 9: mod_base = OTHER; note = 2'-fluorocytidine-3'-phosphate
  modified_base 10: mod_base = OTHER; note = 2'-O-methylguanosine-3'-phosphate
  modified_base 11: mod_base = OTHER; note = 2'-O-methylcytidine-3'-phosphate
  modified_base 12: mod_base = OTHER; note = 2'-O-methyladenosine-3'-phosphate
  modified_base 13: mod_base = OTHER; note = 2'-O-methylcytidine-3'-phosphate
  modified_base 14: mod_base = OTHER; note = 2'-fluoroadenosine-3'-phosphate
  modified_base 15: mod_base = OTHER; note = 2'-O-methyluridine-3'-phosphate
  modified_base 16: mod_base = OTHER; note = 2'-fluorocytidine-3'-phosphate
  modified_base 17: mod_base = OTHER; note = 2'-O-methyladenosine-3'-phosphate
  modified_base 18: mod_base = OTHER; note = 2'-O-methyluridine-3'-phosphate
  modified_base 19: mod_base = OTHER; note = 2'-O-methylcytidine-3'-phosphate
  modified_base 20: mod_base = OTHER; note = 2'-O-methylcytidine-3'-phosphate
  modified_base 21: mod_base = OTHER; note = 2'-O-methyladenosine-3'-phosphorothioate
  modified_base 22: mod_base = OTHER; note = 2'-O-methylguanosine-3'-phosphorothioate
  modified_base 23: mod_base = OTHER; note = 2'-O-methyladenosine-3'-phosphate
atctgttacgcacatcatccaga

SEQ ID NO: 2496 - RNA, 21 nt, synthetic construct
  source 1..21: mol_type = other RNA; note = Description of Artificial Sequence: Synthetic oligonucleotide
  modified_base 1: mod_base = OTHER; note = 2'-O-methylcytidine-3'-phosphorothioate
  modified_base 2: mod_base = OTHER; note = 2'-O-methyluridine-3'-phosphorothioate
  modified_base 3: mod_base = OTHER; note = 2'-O-methylguanosine-3'-phosphate
  modified_base 4: mod_base = OTHER; note = 2'-O-methylguanosine-3'-phosphate
  modified_base 5: mod_base = OTHER; note = 2'-O-methyladenosine-3'-phosphate
  modified_base 6: mod_base = OTHER; note = 2'-O-methyluridine-3'-phosphate
  modified_base 7: mod_base = OTHER; note = 2'-fluoroguanosine-3'-phosphate
  modified_base 8: mod_base = OTHER; note = 2'-O-methyladenosine-3'-phosphate
  modified_base 9: mod_base = OTHER; note = 2'-fluorouridine-3'-phosphate
  modified_base 10: mod_base = OTHER; note = 2'-fluoroguanosine-3'-phosphate
  modified_base 11: mod_base = OTHER; note = 2'-fluorouridine-3'-phosphate
  modified_base 12: mod_base = OTHER; note = 2'-O-methylguanosine-3'-phosphate
  modified_base 13: mod_base = OTHER; note = 2'-O-methylcytidine-3'-phosphate
  modified_base 14: mod_base = OTHER; note = 2'-O-methylguanosine-3'-phosphate
  modified_base 15: mod_base = OTHER; note = 2'-O-methyluridine-3'-phosphate
  modified_base 16: mod_base = OTHER; note = 2'-O-methyladenosine-3'-phosphate
  modified_base 17: mod_base = OTHER; note = 2'-O-methyladenosine-3'-phosphate
  modified_base 18: mod_base = OTHER; note = 2'-O-methylcytidine-3'-phosphate
  modified_base 19: mod_base = OTHER; note = 2'-O-methyladenosine-3'-phosphate
  modified_base 20: mod_base = OTHER; note = 2'-O-methylguanosine-3'-phosphate
  modified_base 21: mod_base = OTHER; note = 2'-O-methyladenosine-3'-phosphate N-[tris(GalNAc-alkyl)-amidodecanoyl)]-4-hydroxyprolinol Hyp-(GalNAc-alkyl)3
ctggatgatgtgcgtaacaga

SEQ ID NO: 2497 - RNA, 23 nt, synthetic construct
  source 1..23: mol_type = other RNA; note = Description of Artificial Sequence: Synthetic oligonucleotide
  modified_base 1: mod_base = OTHER; note = 2'-O-methyluridine-3'-phosphorothioate
  modified_base 2: mod_base = OTHER; note = 2'-fluorocytidine-3'-phosphorothioate
  modified_base 3: mod_base = OTHER; note = 2'-O-methyluridine-3'-phosphate
  modified_base 4: mod_base = OTHER; note = 2'-O-methylguanosine-3'-phosphate
  modified_base 5: mod_base = OTHER; note = 2'-O-methyluridine-3'-phosphate
  modified_base 6: mod_base = OTHER; note = 2'-fluorouridine-3'-phosphate
  modified_base 7: mod_base = OTHER; note = 2'-O-methyladenosine-3'-phosphate
  modified_base 8: mod_base = OTHER; note = 2'-fluorocytidine-3'-phosphate
  modified_base 9: mod_base = OTHER; note = 2'-fluoroguanosine-3'-phosphate
  modified_base 10: mod_base = OTHER; note = 2'-O-methylcytidine-3'-phosphate
  modified_base 11: mod_base = OTHER; note = 2'-O-methyladenosine-3'-phosphate
  modified_base 12: mod_base = OTHER; note = 2'-O-methylcytidine-3'-phosphate
  modified_base 13: mod_base = OTHER; note = 2'-O-methyladenosine-3'-phosphate
  modified_base 14: mod_base = OTHER; note = 2'-fluorouridine-3'-phosphate
  modified_base 15: mod_base = OTHER; note = 2'-O-methylcytidine-3'-phosphate
  modified_base 16: mod_base = OTHER; note = 2'-fluoroadenosine-3'-phosphate
  modified_base 17: mod_base = OTHER; note = 2'-O-methyluridine-3'-phosphate
  modified_base 18: mod_base = OTHER; note = 2'-O-methylcytidine-3'-phosphate
  modified_base 19: mod_base = OTHER; note = 2'-O-methylcytidine-3'-phosphate
  modified_base 20: mod_base = OTHER; note = 2'-O-methyladenosine-3'-phosphate
  modified_base 21: mod_base = OTHER; note = 2'-O-methylguanosine-3'-phosphorothioate
  modified_base 22: mod_base = OTHER; note = 2'-O-methyladenosine-3'-phosphorothioate
  modified_base 23: mod_base = OTHER; note = 2'-O-methylcytidine-3'-phosphate
tctgttacgcacatcatccagac

SEQ ID NO: 2498 - RNA, 21 nt, synthetic construct
  source 1..21: mol_type = other RNA; note = Description of Artificial Sequence: Synthetic oligonucleotide
  modified_base 1: mod_base = OTHER; note = 2'-O-methylguanosine-3'-phosphorothioate
  modified_base 2: mod_base = OTHER; note = 2'-O-methyladenosine-3'-phosphorothioate
  modified_base 3: mod_base = OTHER; note = 2'-O-methyladenosine-3'-phosphate
  modified_base 4: mod_base = OTHER; note = 2'-O-methyluridine-3'-phosphate
  modified_base 5: mod_base = OTHER; note = 2'-O-methylguanosine-3'-phosphate
  modified_base 6: mod_base = OTHER; note = 2'-O-methylguanosine-3'-phosphate
  modified_base 7: mod_base = OTHER; note = 2'-fluoroguanosine-3'-phosphate
  modified_base 8: mod_base = OTHER; note = 2'-O-methyluridine-3'-phosphate
  modified_base 9: mod_base = OTHER; note = 2'-fluoroguanosine-3'-phosphate
  modified_base 10: mod_base = OTHER; note = 2'-fluoroguanosine-3'-phosphate
  modified_base 11: mod_base = OTHER; note = 2'-fluorocytidine-3'-phosphate
  modified_base 12: mod_base = OTHER; note = 2'-O-methylguanosine-3'-phosphate
  modified_base 13: mod_base = OTHER; note = 2'-O-methylguanosine-3'-phosphate
  modified_base 14: mod_base = OTHER; note = 2'-O-methyluridine-3'-phosphate
  modified_base 15: mod_base = OTHER; note = 2'-O-methyladenosine-3'-phosphate
  modified_base 16: mod_base = OTHER; note = 2'-O-methyladenosine-3'-phosphate
  modified_base 17: mod_base = OTHER; note = 2'-O-methyluridine-3'-phosphate
  modified_base 18: mod_base = OTHER; note = 2'-O-methyluridine-3'-phosphate
  modified_base 19: mod_base = OTHER; note = 2'-O-methylguanosine-3'-phosphate
  modified_base 20: mod_base = OTHER; note = 2'-O-methylguanosine-3'-phosphate
  modified_base 21: mod_base = OTHER; note = 2'-O-methyluridine-3'-phosphate N-[tris(GalNAc-alkyl)-amidodecanoyl)]-4-hydroxyprolinol Hyp-(GalNAc-alkyl)3
gaatgggtggcggtaattggt

SEQ ID NO: 2499 - RNA, 23 nt, synthetic construct
  source 1..23: mol_type = other RNA; note = Description of Artificial Sequence: Synthetic oligonucleotide
  modified_base 1: mod_base = OTHER; note = 2'-O-methyladenosine-3'-phosphorothioate
  modified_base 2: mod_base = OTHER; note = 2'-fluorocytidine-3'-phosphorothioate
  modified_base 3: mod_base = OTHER; note = 2'-O-methylcytidine-3'-phosphate
  modified_base 4: mod_base = OTHER; note = 2'-O-methyladenosine-3'-phosphate
  modified_base 5: mod_base = OTHER; note = 2'-O-methyladenosine-3'-phosphate
  modified_base 6: mod_base = OTHER; note = 2'-fluorouridine-3'-phosphate
  modified_base 7: mod_base = OTHER; note = 2'-O-methyluridine-3'-phosphate
  modified_base 8: mod_base = OTHER; note = 2'-fluoroadenosine-3'-phosphate
  modified_base 9: mod_base = OTHER; note = 2'-fluorocytidine-3'-phosphate
  modified_base 10: mod_base = OTHER; note = 2'-O-methylcytidine-3'-phosphate
  modified_base 11: mod_base = OTHER; note = 2'-O-methylguanosine-3'-phosphate
  modified_base 12: mod_base = OTHER; note = 2'-O-methylcytidine-3'-phosphate
  modified_base 13: mod_base = OTHER; note = 2'-O-methylcytidine-3'-phosphate
  modified_base 14: mod_base = OTHER; note = 2'-fluoroadenosine-3'-phosphate
  modified_base 15: mod_base = OTHER; note = 2'-O-methylcytidine-3'-phosphate
  modified_base 16: mod_base = OTHER; note = 2'-fluorocytidine-3'-phosphate
  modified_base 17: mod_base = OTHER; note = 2'-O-methylcytidine-3'-phosphate
  modified_base 18: mod_base = OTHER; note = 2'-O-methyladenosine-3'-phosphate
  modified_base 19: mod_base = OTHER; note = 2'-O-methyluridine-3'-phosphate
  modified_base 20: mod_base = OTHER; note = 2'-O-methyluridine-3'-phosphate
  modified_base 21: mod_base = OTHER; note = 2'-O-methylcytidine-3'-phosphorothioate
  modified_base 22: mod_base = OTHER; note = 2'-O-methylcytidine-3'-phosphorothioate
  modified_base 23: mod_base = OTHER; note = 2'-O-methyladenosine-3'-phosphate
accaattaccgccacccattcca

SEQ ID NO: 2500 - RNA, 21 nt, synthetic construct
  source 1..21: mol_type = other RNA; note = Description of Artificial Sequence: Synthetic oligonucleotide
  modified_base 1: mod_base = OTHER; note = 2'-O-methyladenosine-3'-phosphorothioate
  modified_base 2: mod_base = OTHER; note = 2'-O-methyladenosine-3'-phosphorothioate
  modified_base 3: mod_base = OTHER; note = 2'-O-methyluridine-3'-phosphate
  modified_base 4: mod_base = OTHER; note = 2'-O-methylguanosine-3'-phosphate
  modified_base 5: mod_base = OTHER; note = 2'-O-methylguanosine-3'-phosphate
  modified_base 6: mod_base = OTHER; note = 2'-O-methylguanosine-3'-phosphate
  modified_base 7: mod_base = OTHER; note = 2'-fluorouridine-3'-phosphate
  modified_base 8: mod_base = OTHER; note = 2'-O-methylguanosine-3'-phosphate
  modified_base 9: mod_base = OTHER; note = 2'-fluoroguanosine-3'-phosphate
  modified_base 10: mod_base = OTHER; note = 2'-fluorocytidine-3'-phosphate
  modified_base 11: mod_base = OTHER; note = 2'-fluoroguanosine-3'-phosphate
  modified_base 12: mod_base = OTHER; note = 2'-O-methylguanosine-3'-phosphate
  modified_base 13: mod_base = OTHER; note = 2'-O-methyluridine-3'-phosphate
  modified_base 14: mod_base = OTHER; note = 2'-O-methyladenosine-3'-phosphate
  modified_base 15: mod_base = OTHER; note = 2'-O-methyladenosine-3'-phosphate
  modified_base 16: mod_base = OTHER; note = 2'-O-methyluridine-3'-phosphate
  modified_base 17: mod_base = OTHER; note = 2'-O-methyluridine-3'-phosphate
  modified_base 18: mod_base = OTHER; note = 2'-O-methylguanosine-3'-phosphate
  modified_base 19: mod_base = OTHER; note = 2'-O-methylguanosine-3'-phosphate
  modified_base 20: mod_base = OTHER; note = 2'-O-methyluridine-3'-phosphate
  modified_base 21: mod_base = OTHER; note = 2'-O-methylguanosine-3'-phosphate N-[tris(GalNAc-alkyl)-amidodecanoyl)]-4-hydroxyprolinol Hyp-(GalNAc-alkyl)3
aatgggtggcggtaattggtg

SEQ ID NO: 2501 - RNA, 23 nt, synthetic construct
  source 1..23: mol_type = other RNA; note = Description of Artificial Sequence: Synthetic oligonucleotide
  modified_base 1: mod_base = OTHER; note = 2'-O-methylcytidine-3'-phosphorothioate
  modified_base 2: mod_base = OTHER; note = 2'-fluoroadenosine-3'-phosphorothioate
  modified_base 3: mod_base = OTHER; note = 2'-O-methylcytidine-3'-phosphate
  modified_base 4: mod_base = OTHER; note = 2'-O-methylcytidine-3'-phosphate
  modified_base 5: mod_base = OTHER; note = 2'-O-methyladenosine-3'-phosphate
  modified_base 6: mod_base = OTHER; note = 2'-fluoroadenosine-3'-phosphate
  modified_base 7: mod_base = OTHER; note = 2'-O-methyluridine-3'-phosphate
  modified_base 8: mod_base = OTHER; note = 2'-fluorouridine-3'-phosphate
  modified_base 9: mod_base = OTHER; note = 2'-fluoroadenosine-3'-phosphate
  modified_base 10: mod_base = OTHER; note = 2'-O-methylcytidine-3'-phosphate
  modified_base 11: mod_base = OTHER; note = 2'-O-methylcytidine-3'-phosphate
  modified_base 12: mod_base = OTHER; note = 2'-O-methylguanosine-3'-phosphate
  modified_base 13: mod_base = OTHER; note = 2'-O-methylcytidine-3'-phosphate
  modified_base 14: mod_base = OTHER; note = 2'-fluorocytidine-3'-phosphate
  modified_base 15: mod_base = OTHER; note = 2'-O-methyladenosine-3'-phosphate
  modified_base 16: mod_base = OTHER; note = 2'-fluorocytidine-3'-phosphate
  modified_base 17: mod_base = OTHER; note = 2'-O-methylcytidine-3'-phosphate
  modified_base 18: mod_base = OTHER; note = 2'-O-methylcytidine-3'-phosphate
  modified_base 19: mod_base = OTHER; note = 2'-O-methyladenosine-3'-phosphate
  modified_base 20: mod_base = OTHER; note = 2'-O-methyluridine-3'-phosphate
  modified_base 21: mod_base = OTHER; note = 2'-O-methyluridine-3'-phosphorothioate
  modified_base 22: mod_base = OTHER; note = 2'-O-methylcytidine-3'-phosphorothioate
  modified_base 23: mod_base = OTHER; note = 2'-O-methylcytidine-3'-phosphate
caccaattaccgccacccattcc

SEQ ID NO: 2502 - RNA, 21 nt, synthetic construct
  source 1..21: mol_type = other RNA; note = Description of Artificial Sequence: Synthetic oligonucleotide
  modified_base 1: mod_base = OTHER; note = 2'-O-methyladenosine-3'-phosphorothioate
  modified_base 2: mod_base = OTHER; note = 2'-O-methyluridine-3'-phosphorothioate
  modified_base 3: mod_base = OTHER; note = 2'-O-methyluridine-3'-phosphate
  modified_base 4: mod_base = OTHER; note = 2'-O-methylguanosine-3'-phosphate
  modified_base 5: mod_base = OTHER; note = 2'-O-methylguanosine-3'-phosphate
  modified_base 6: mod_base = OTHER; note = 2'-O-methyladenosine-3'-phosphate
  modified_base 7: mod_base = OTHER; note = 2'-fluoroadenosine-3'-phosphate
  modified_base 8: mod_base = OTHER; note = 2'-O-methyluridine-3'-phosphate
  modified_base 9: mod_base = OTHER; note = 2'-fluoroguanosine-3'-phosphate
  modified_base 10: mod_base = OTHER; note = 2'-fluoroguanosine-3'-phosphate
  modified_base 11: mod_base = OTHER; note = 2'-fluoroguanosine-3'-phosphate
  modified_base 12: mod_base = OTHER; note = 2'-O-methyluridine-3'-phosphate
  modified_base 13: mod_base = OTHER; note = 2'-O-methylguanosine-3'-phosphate
  modified_base 14: mod_base = OTHER; note = 2'-O-methylguanosine-3'-phosphate
  modified_base 15: mod_base = OTHER; note = 2'-O-methylcytidine-3'-phosphate
  modified_base 16: mod_base = OTHER; note = 2'-O-methylguanosine-3'-phosphate
  modified_base 17: mod_base = OTHER; note = 2'-O-methylguanosine-3'-phosphate
  modified_base 18: mod_base = OTHER; note = 2'-O-methyluridine-3'-phosphate
  modified_base 19: mod_base = OTHER; note = 2'-O-methyladenosine-3'-phosphate
  modified_base 20: mod_base = OTHER; note = 2'-O-methyladenosine-3'-phosphate
  modified_base 21: mod_base = OTHER; note = 2'-O-methyluridine-3'-phosphate N-[tris(GalNAc-alkyl)-amidodecanoyl)]-4-hydroxyprolinol Hyp-(GalNAc-alkyl)3
attggaatgggtggcggtaat

SEQ ID NO: 2503 - RNA, 23 nt, synthetic construct
  source 1..23: mol_type = other RNA; note = Description of Artificial Sequence: Synthetic oligonucleotide
  modified_base 1: mod_base = OTHER; note = 2'-O-methyladenosine-3'-phosphorothioate
  modified_base 2: mod_base = OTHER; note = 2'-fluorouridine -3'-phosphorothioate
  modified_base 3: mod_base = OTHER; note = 2'-O-methyluridine-3'-phosphate
  modified_base 4: mod_base = OTHER; note = 2'-O-methyladenosine-3'-phosphate
  modified_base 5: mod_base = OTHER; note = 2'-O-methylcytidine-3'-phosphate
  modified_base 6: mod_base = OTHER; note = 2'-fluorocytidine-3'-phosphate
  modified_base 7: mod_base = OTHER; note = 2'-O-methylguanosine-3'-phosphate
  modified_base 8: mod_base = OTHER; note = 2'-fluorocytidine-3'-phosphate
  modified_base 9: mod_base = OTHER; note = 2'-fluorocytidine-3'-phosphate
  modified_base 10: mod_base = OTHER; note = 2'-O-methyladenosine-3'-phosphate
  modified_base 11: mod_base = OTHER; note = 2'-O-methylcytidine-3'-phosphate
  modified_base 12: mod_base = OTHER; note = 2'-O-methylcytidine-3'-phosphate
  modified_base 13: mod_base = OTHER; note = 2'-O-methylcytidine-3'-phosphate
  modified_base 14: mod_base = OTHER; note = 2'-fluoroadenosine-3'-phosphate
  modified_base 15: mod_base = OTHER; note = 2'-O-methyluridine-3'-phosphate
  modified_base 16: mod_base = OTHER; note = 2'-fluorouridine-3'-phosphate
  modified_base 17: mod_base = OTHER; note = 2'-O-methylcytidine-3'-phosphate
  modified_base 18: mod_base = OTHER; note = 2'-O-methylcytidine-3'-phosphate
  modified_base 19: mod_base = OTHER; note = 2'-O-methyladenosine-3'-phosphate
  modified_base 20: mod_base = OTHER; note = 2'-O-methyladenosine-3'-phosphate
  modified_base 21: mod_base = OTHER; note = 2'-O-methyluridine-3'-phosphorothioate
  modified_base 22: mod_base = OTHER; note = 2'-O-methyluridine-3'-phosphorothioate
  modified_base 23: mod_base = OTHER; note = 2'-O-methylcytidine-3'-phosphate
attaccgccacccattccaattc

SEQ ID NO: 2504 - RNA, 21 nt, synthetic construct
  source 1..21: mol_type = other RNA; note = Description of Artificial Sequence: Synthetic oligonucleotide
  modified_base 1: mod_base = OTHER; note = 2'-O-methyladenosine-3'-phosphorothioate
  modified_base 2: mod_base = OTHER; note = 2'-O-methyladenosine-3'-phosphorothioate
  modified_base 3: mod_base = OTHER; note = 2'-O-methyluridine-3'-phosphate
  modified_base 4: mod_base = OTHER; note = 2'-O-methyluridine-3'-phosphate
  modified_base 5: mod_base = OTHER; note = 2'-O-methylguanosine-3'-phosphate
  modified_base 6: mod_base = OTHER; note = 2'-O-methylguanosine-3'-phosphate
  modified_base 7: mod_base = OTHER; note = 2'-fluoroadenosine-3'-phosphate
  modified_base 8: mod_base = OTHER; note = 2'-O-methyladenosine-3'-phosphate
  modified_base 9: mod_base = OTHER; note = 2'-fluorouridine-3'-phosphate
  modified_base 10: mod_base = OTHER; note = 2'-fluoroguanosine-3'-phosphate
  modified_base 11: mod_base = OTHER; note = 2'-fluoroguanosine-3'-phosphate
  modified_base 12: mod_base = OTHER; note = 2'-O-methylguanosine-3'-phosphate
  modified_base 13: mod_base = OTHER; note = 2'-O-methyluridine-3'-phosphate
  modified_base 14: mod_base = OTHER; note = 2'-O-methylguanosine-3'-phosphate
  modified_base 15: mod_base = OTHER; note = 2'-O-methylguanosine-3'-phosphate
  modified_base 16: mod_base = OTHER; note = 2'-O-methylcytidine-3'-phosphate
  modified_base 17: mod_base = OTHER; note = 2'-O-methylguanosine-3'-phosphate
  modified_base 18: mod_base = OTHER; note = 2'-O-methylguanosine-3'-phosphate
  modified_base 19: mod_base = OTHER; note = 2'-O-methyluridine-3'-phosphate
  modified_base 20: mod_base = OTHER; note = 2'-O-methyladenosine-3'-phosphate
  modified_base 21: mod_base = OTHER; note = 2'-O-methyladenosine-3'-phosphate N-[tris(GalNAc-alkyl)-amidodecanoyl)]-4-hydroxyprolinol Hyp-(GalNAc-alkyl)3
aattggaatgggtggcggtaa

SEQ ID NO: 2505 - RNA, 23 nt, synthetic construct
  source 1..23: mol_type = other RNA; note = Description of Artificial Sequence: Synthetic oligonucleotide
  modified_base 1: mod_base = OTHER; note = 2'-O-methyluridine-3'-phosphorothioate
  modified_base 2: mod_base = OTHER; note = 2'-fluorouridine -3'-phosphorothioate
  modified_base 3: mod_base = OTHER; note = 2'-O-methyladenosine-3'-phosphate
  modified_base 4: mod_base = OTHER; note = 2'-O-methylcytidine-3'-phosphate
  modified_base 5: mod_base = OTHER; note = 2'-O-methylcytidine-3'-phosphate
  modified_base 6: mod_base = OTHER; note = 2'-fluoroguanosine-3'-phosphate
  modified_base 7: mod_base = OTHER; note = 2'-O-methylcytidine-3'-phosphate
  modified_base 8: mod_base = OTHER; note = 2'-fluorocytidine-3'-phosphate
  modified_base 9: mod_base = OTHER; note = 2'-fluoroadenosine-3'-phosphate
  modified_base 10: mod_base = OTHER; note = 2'-O-methylcytidine-3'-phosphate
  modified_base 11: mod_base = OTHER; note = 2'-O-methylcytidine-3'-phosphate
  modified_base 12: mod_base = OTHER; note = 2'-O-methylcytidine-3'-phosphate
  modified_base 13: mod_base = OTHER; note = 2'-O-methyladenosine-3'-phosphate
  modified_base 14: mod_base = OTHER; note = 2'-fluorouridine-3'-phosphate
  modified_base 15: mod_base = OTHER; note = 2'-O-methyluridine-3'-phosphate
  modified_base 16: mod_base = OTHER; note = 2'-fluorocytidine-3'-phosphate
  modified_base 17: mod_base = OTHER; note = 2'-O-methylcytidine-3'-phosphate
  modified_base 18: mod_base = OTHER; note = 2'-O-methyladenosine-3'-phosphate
  modified_base 19: mod_base = OTHER; note = 2'-O-methyladenosine-3'-phosphate
  modified_base 20: mod_base = OTHER; note = 2'-O-methyluridine-3'-phosphate
  modified_base 21: mod_base = OTHER; note = 2'-O-methyluridine-3'-phosphorothioate
  modified_base 22: mod_base = OTHER; note = 2'-O-methylcytidine-3'-phosphorothioate
  modified_base 23: mod_base = OTHER; note = 2'-O-methyluridine-3'-phosphate
ttaccgccacccattccaattct

SEQ ID NO: 2506 - RNA, 21 nt, synthetic construct
  source 1..21: mol_type = other RNA; note = Description of Artificial Sequence: Synthetic oligonucleotide
  modified_base 1: mod_base = OTHER; note = 2'-O-methyluridine-3'-phosphorothioate
  modified_base 2: mod_base = OTHER; note = 2'-O-methylcytidine-3'-phosphorothioate
  modified_base 3: mod_base = OTHER; note = 2'-O-methylcytidine-3'-phosphate
  modified_base 4: mod_base = OTHER; note = 2'-O-methylguanosine-3'-phosphate
  modified_base 5: mod_base = OTHER; note = 2'-O-methylguanosine-3'-phosphate
  modified_base 6: mod_base = OTHER; note = 2'-O-methyladenosine-3'-phosphate
  modified_base 7: mod_base = OTHER; note = 2'-fluoroadenosine-3'-phosphate
  modified_base 8: mod_base = OTHER; note = 2'-O-methyluridine-3'-phosphate
  modified_base 9: mod_base = OTHER; note = 2'-fluoroguanosine-3'-phosphate
  modified_base 10: mod_base = OTHER; note = 2'-fluorouridine-3'-phosphate
  modified_base 11: mod_base = OTHER; note = 2'-fluorouridine-3'-phosphate
  modified_base 12: mod_base = OTHER; note = 2'-O-methylguanosine-3'-phosphate
  modified_base 13: mod_base = OTHER; note = 2'-O-methylcytidine-3'-phosphate
  modified_base 14: mod_base = OTHER; note = 2'-O-methyluridine-3'-phosphate
  modified_base 15: mod_base = OTHER; note = 2'-O-methylguanosine-3'-phosphate
  modified_base 16: mod_base = OTHER; note = 2'-O-methyladenosine-3'-phosphate
  modified_base 17: mod_base = OTHER; note = 2'-O-methyladenosine-3'-phosphate
  modified_base 18: mod_base = OTHER; note = 2'-O-methyladenosine-3'-phosphate
  modified_base 19: mod_base = OTHER; note = 2'-O-methylcytidine-3'-phosphate
  modified_base 20: mod_base = OTHER; note = 2'-O-methyladenosine-3'-phosphate
  modified_base 21: mod_base = OTHER; note = 2'-O-methylguanosine-3'-phosphate N-[tris(GalNAc-alkyl)-amidodecanoyl)]-4-hydroxyprolinol Hyp-(GalNAc-alkyl)3
tccggaatgttgctgaaacag

SEQ ID NO: 2507 - RNA, 23 nt, synthetic construct
  source 1..23: mol_type = other RNA; note = Description of Artificial Sequence: Synthetic oligonucleotide
  modified_base 1: mod_base = OTHER; note = 2'-O-methylcytidine-3'-phosphorothioate
  modified_base 2: mod_base = OTHER; note = 2'-fluorouridine -3'-phosphorothioate
  modified_base 3: mod_base = OTHER; note = 2'-O-methylguanosine-3'-phosphate
  modified_base 4: mod_base = OTHER; note = 2'-O-methyluridine-3'-phosphate
  modified_base 5: mod_base = OTHER; note = 2'-O-methyluridine-3'-phosphate
  modified_base 6: mod_base = OTHER; note = 2'-fluorouridine-3'-phosphate
  modified_base 7: mod_base = OTHER; note = 2'-O-methylcytidine-3'-phosphate
  modified_base 8: mod_base = OTHER; note = 2'-fluoroadenosine-3'-phosphate
  modified_base 9: mod_base = OTHER; note = 2'-fluoroguanosine-3'-phosphate
  modified_base 10: mod_base = OTHER; note = 2'-O-methylcytidine-3'-phosphate
  modified_base 11: mod_base = OTHER; note = 2'-O-methyladenosine-3'-phosphate
  modified_base 12: mod_base = OTHER; note = 2'-O-methyladenosine-3'-phosphate
  modified_base 13: mod_base = OTHER; note = 2'-O-methylcytidine-3'-phosphate
  modified_base 14: mod_base = OTHER; note = 2'-fluoroadenosine-3'-phosphate
  modified_base 15: mod_base = OTHER; note = 2'-O-methyluridine-3'-phosphate
  modified_base 16: mod_base = OTHER; note = 2'-fluorouridine-3'-phosphate
  modified_base 17: mod_base = OTHER; note = 2'-O-methylcytidine-3'-phosphate
  modified_base 18: mod_base = OTHER; note = 2'-O-methylcytidine-3'-phosphate
  modified_base 19: mod_base = OTHER; note = 2'-O-methylguanosine-3'-phosphate
  modified_base 20: mod_base = OTHER; note = 2'-O-methylguanosine-3'-phosphate
  modified_base 21: mod_base = OTHER; note = 2'-O-methyladenosine-3'-phosphorothioate
  modified_base 22: mod_base = OTHER; note = 2'-O-methylguanosine-3'-phosphorothioate
  modified_base 23: mod_base = OTHER; note = 2'-O-methylcytidine-3'-phosphate
ctgtttcagcaacattccggagc

SEQ ID NO: 2508 - RNA, 21 nt, synthetic construct
  source 1..21: mol_type = other RNA; note = Description of Artificial Sequence: Synthetic oligonucleotide
  modified_base 1: mod_base = OTHER; note = 2'-O-methylcytidine-3'-phosphorothioate
  modified_base 2: mod_base = OTHER; note = 2'-O-methylcytidine-3'-phosphorothioate
  modified_base 3: mod_base = OTHER; note = 2'-O-methylguanosine-3'-phosphate
  modified_base 4: mod_base = OTHER; note = 2'-O-methylguanosine-3'-phosphate
  modified_base 5: mod_base = OTHER; note = 2'-O-methyladenosine-3'-phosphate
  modified_base 6: mod_base = OTHER; note = 2'-O-methyladenosine-3'-phosphate
  modified_base 7: mod_base = OTHER; note = 2'-fluorouridine-3'-phosphate
  modified_base 8: mod_base = OTHER; note = 2'-O-methylguanosine-3'-phosphate
  modified_base 9: mod_base = OTHER; note = 2'-fluorouridine-3'-phosphate
  modified_base 10: mod_base = OTHER; note = 2'-fluorouridine-3'-phosphate
  modified_base 11: mod_base = OTHER; note = 2'-fluoroguanosine-3'-phosphate
  modified_base 12: mod_base = OTHER; note = 2'-O-methylcytidine-3'-phosphate
  modified_base 13: mod_base = OTHER; note = 2'-O-methyluridine-3'-phosphate
  modified_base 14: mod_base = OTHER; note = 2'-O-methylguanosine-3'-phosphate
  modified_base 15: mod_base = OTHER; note = 2'-O-methyladenosine-3'-phosphate
  modified_base 16: mod_base = OTHER; note = 2'-O-methyladenosine-3'-phosphate
  modified_base 17: mod_base = OTHER; note = 2'-O-methyladenosine-3'-phosphate
  modified_base 18: mod_base = OTHER; note = 2'-O-methylcytidine-3'-phosphate
  modified_base 19: mod_base = OTHER; note = 2'-O-methyladenosine-3'-phosphate
  modified_base 20: mod_base = OTHER; note = 2'-O-methylguanosine-3'-phosphate
  modified_base 21: mod_base = OTHER; note = 2'-O-methyladenosine-3'-phosphate N-[tris(GalNAc-alkyl)-amidodecanoyl)]-4-hydroxyprolinol Hyp-(GalNAc-alkyl)3
ccggaatgttgctgaaacaga

SEQ ID NO: 2509 - RNA, 23 nt, synthetic construct
  source 1..23: mol_type = other RNA; note = Description of Artificial Sequence: Synthetic oligonucleotide
  modified_base 1: mod_base = OTHER; note = 2'-O-methyluridine-3'-phosphorothioate
  modified_base 2: mod_base = OTHER; note = 2'-fluorocytidine-3'-phosphorothioate
  modified_base 3: mod_base = OTHER; note = 2'-O-methyluridine-3'-phosphate
  modified_base 4: mod_base = OTHER; note = 2'-O-methylguanosine-3'-phosphate
  modified_base 5: mod_base = OTHER; note = 2'-O-methyluridine-3'-phosphate
  modified_base 6: mod_base = OTHER; note = 2'-fluorouridine-3'-phosphate
  modified_base 7: mod_base = OTHER; note = 2'-O-methyluridine-3'-phosphate
  modified_base 8: mod_base = OTHER; note = 2'-fluorocytidine-3'-phosphate
  modified_base 9: mod_base = OTHER; note = 2'-fluoroadenosine-3'-phosphate
  modified_base 10: mod_base = OTHER; note = 2'-O-methylguanosine-3'-phosphate
  modified_base 11: mod_base = OTHER; note = 2'-O-methylcytidine-3'-phosphate
  modified_base 12: mod_base = OTHER; note = 2'-O-methyladenosine-3'-phosphate
  modified_base 13: mod_base = OTHER; note = 2'-O-methyladenosine-3'-phosphate
  modified_base 14: mod_base = OTHER; note = 2'-fluorocytidine-3'-phosphate
  modified_base 15: mod_base = OTHER; note = 2'-O-methyladenosine-3'-phosphate
  modified_base 16: mod_base = OTHER; note = 2'-fluorouridine-3'-phosphate
  modified_base 17: mod_base = OTHER; note = 2'-O-methyluridine-3'-phosphate
  modified_base 18: mod_base = OTHER; note = 2'-O-methylcytidine-3'-phosphate
  modified_base 19: mod_base = OTHER; note = 2'-O-methylcytidine-3'-phosphate
  modified_base 20: mod_base = OTHER; note = 2'-O-methylguanosine-3'-phosphate
  modified_base 21: mod_base = OTHER; note = 2'-O-methylguanosine-3'-phosphorothioate
  modified_base 22: mod_base = OTHER; note = 2'-O-methyladenosine-3'-phosphorothioate
  modified_base 23: mod_base = OTHER; note = 2'-O-methylguanosine-3'-phosphate
tctgtttcagcaacattccggag

SEQ ID NO: 2510 - RNA, 21 nt, synthetic construct
  source 1..21: mol_type = other RNA; note = Description of Artificial Sequence: Synthetic oligonucleotide
  modified_base 1: mod_base = OTHER; note = 2'-O-methyladenosine-3'-phosphorothioate
  modified_base 2: mod_base = OTHER; note = 2'-O-methyluridine-3'-phosphorothioate
  modified_base 3: mod_base = OTHER; note = 2'-O-methylguanosine-3'-phosphate
  modified_base 4: mod_base = OTHER; note = 2'-O-methylcytidine-3'-phosphate
  modified_base 5: mod_base = OTHER; note = 2'-O-methyluridine-3'-phosphate
  modified_base 6: mod_base = OTHER; note = 2'-O-methylcytidine-3'-phosphate
  modified_base 7: mod_base = OTHER; note = 2'-fluorocytidine-3'-phosphate
  modified_base 8: mod_base = OTHER; note = 2'-O-methylguanosine-3'-phosphate
  modified_base 9: mod_base = OTHER; note = 2'-fluoroguanosine-3'-phosphate
  modified_base 10: mod_base = OTHER; note = 2'-fluoroadenosine-3'-phosphate
  modified_base 11: mod_base = OTHER; note = 2'-fluoroadenosine-3'-phosphate
  modified_base 12: mod_base = OTHER; note = 2'-O-methyluridine-3'-phosphate
  modified_base 13: mod_base = OTHER; note = 2'-O-methylguanosine-3'-phosphate
  modified_base 14: mod_base = OTHER; note = 2'-O-methyluridine-3'-phosphate
  modified_base 15: mod_base = OTHER; note = 2'-O-methyluridine-3'-phosphate
  modified_base 16: mod_base = OTHER; note = 2'-O-methylguanosine-3'-phosphate
  modified_base 17: mod_base = OTHER; note = 2'-O-methylcytidine-3'-phosphate
  modified_base 18: mod_base = OTHER; note = 2'-O-methyluridine-3'-phosphate
  modified_base 19: mod_base = OTHER; note = 2'-O-methylguanosine-3'-phosphate
  modified_base 20: mod_base = OTHER; note = 2'-O-methyladenosine-3'-phosphate
  modified_base 21: mod_base = OTHER; note = 2'-O-methyladenosine-3'-phosphate N-[tris(GalNAc-alkyl)-amidodecanoyl)]-4-hydroxyprolinol Hyp-(GalNAc-alkyl)3
atgctccggaatgttgctgaa

SEQ ID NO: 2511 - RNA, 23 nt, synthetic construct
  source 1..23: mol_type = other RNA; note = Description of Artificial Sequence: Synthetic oligonucleotide
  modified_base 1: mod_base = OTHER; note = 2'-O-methyluridine-3'-phosphorothioate
  modified_base 2: mod_base = OTHER; note = 2'-fluorouridine -3'-phosphorothioate
  modified_base 3: mod_base = OTHER; note = 2'-O-methylcytidine-3'-phosphate
  modified_base 4: mod_base = OTHER; note = 2'-O-methyladenosine-3'-phosphate
  modified_base 5: mod_base = OTHER; note = 2'-O-methylguanosine-3'-phosphate
  modified_base 6: mod_base = OTHER; note = 2'-fluorocytidine-3'-phosphate
  modified_base 7: mod_base = OTHER; note = 2'-O-methyladenosine-3'-phosphate
  modified_base 8: mod_base = OTHER; note = 2'-fluoroadenosine-3'-phosphate
  modified_base 9: mod_base = OTHER; note = 2'-fluorocytidine-3'-phosphate
  modified_base 10: mod_base = OTHER; note = 2'-O-methyladenosine-3'-phosphate
  modified_base 11: mod_base = OTHER; note = 2'-O-methyluridine-3'-phosphate
  modified_base 12: mod_base = OTHER; note = 2'-O-methyluridine-3'-phosphate
  modified_base 13: mod_base = OTHER; note = 2'-O-methylcytidine-3'-phosphate
  modified_base 14: mod_base = OTHER; note = 2'-fluorocytidine-3'-phosphate
  modified_base 15: mod_base = OTHER; note = 2'-O-methylguanosine-3'-phosphate
  modified_base 16: mod_base = OTHER; note = 2'-fluoroguanosine-3'-phosphate
  modified_base 17: mod_base = OTHER; note = 2'-O-methyladenosine-3'-phosphate
  modified_base 18: mod_base = OTHER; note = 2'-O-methylguanosine-3'-phosphate
  modified_base 19: mod_base = OTHER; note = 2'-O-methylcytidine-3'-phosphate
  modified_base 20: mod_base = OTHER; note = 2'-O-methyladenosine-3'-phosphate
  modified_base 21: mod_base = OTHER; note = 2'-O-methyluridine-3'-phosphorothioate
  modified_base 22: mod_base = OTHER; note = 2'-O-methylcytidine-3'-phosphorothioate
  modified_base 23: mod_base = OTHER; note = 2'-O-methylcytidine-3'-phosphate
ttcagcaacattccggagcatcc

SEQ ID NO: 2512 - RNA, 21 nt, synthetic construct
  source 1..21: mol_type = other RNA; note = Description of Artificial Sequence: Synthetic oligonucleotide
  modified_base 1: mod_base = OTHER; note = 2'-O-methylguanosine-3'-phosphorothioate
  modified_base 2: mod_base = OTHER; note = 2'-O-methyladenosine-3'-phosphorothioate
  modified_base 3: mod_base = OTHER; note = 2'-O-methyluridine-3'-phosphate
  modified_base 4: mod_base = OTHER; note = 2'-O-methylguanosine-3'-phosphate
  modified_base 5: mod_base = OTHER; note = 2'-O-methylcytidine-3'-phosphate
  modified_base 6: mod_base = OTHER; note = 2'-O-methyluridine-3'-phosphate
  modified_base 7: mod_base = OTHER; note = 2'-fluorocytidine-3'-phosphate
  modified_base 8: mod_base = OTHER; note = 2'-O-methylcytidine-3'-phosphate
  modified_base 9: mod_base = OTHER; note = 2'-fluoroguanosine-3'-phosphate
  modified_base 10: mod_base = OTHER; note = 2'-fluoroguanosine-3'-phosphate
  modified_base 11: mod_base = OTHER; note = 2'-fluoroadenosine-3'-phosphate
  modified_base 12: mod_base = OTHER; note = 2'-O-methyladenosine-3'-phosphate
  modified_base 13: mod_base = OTHER; note = 2'-O-methyluridine-3'-phosphate
  modified_base 14: mod_base = OTHER; note = 2'-O-methylguanosine-3'-phosphate
  modified_base 15: mod_base = OTHER; note = 2'-O-methyluridine-3'-phosphate
  modified_base 16: mod_base = OTHER; note = 2'-O-methyluridine-3'-phosphate
  modified_base 17: mod_base = OTHER; note = 2'-O-methylguanosine-3'-phosphate
  modified_base 18: mod_base = OTHER; note = 2'-O-methylcytidine-3'-phosphate
  modified_base 19: mod_base = OTHER; note = 2'-O-methyluridine-3'-phosphate
  modified_base 20: mod_base = OTHER; note = 2'-O-methylguanosine-3'-phosphate
  modified_base 21: mod_base = OTHER; note = 2'-O-methyladenosine-3'-phosphate N-[tris(GalNAc-alkyl)-amidodecanoyl)]-4-hydroxyprolinol Hyp-(GalNAc-alkyl)3
gatgctccggaatgttgctga

SEQ ID NO: 2513 - RNA, 23 nt, synthetic construct
  source 1..23: mol_type = other RNA; note = Description of Artificial Sequence: Synthetic oligonucleotide
  modified_base 1: mod_base = OTHER; note = 2'-O-methyluridine-3'-phosphorothioate
  modified_base 2: mod_base = OTHER; note = 2'-fluorocytidine-3'-phosphorothioate
  modified_base 3: mod_base = OTHER; note = 2'-O-methyladenosine-3'-phosphate
  modified_base 4: mod_base = OTHER; note = 2'-O-methylguanosine-3'-phosphate
  modified_base 5: mod_base = OTHER; note = 2'-O-methylcytidine-3'-phosphate
  modified_base 6: mod_base = OTHER; note = 2'-fluoroadenosine-3'-phosphate
  modified_base 7: mod_base = OTHER; note = 2'-O-methyladenosine-3'-phosphate
  modified_base 8: mod_base = OTHER; note = 2'-fluorocytidine-3'-phosphate
  modified_base 9: mod_base = OTHER; note = 2'-fluoroadenosine-3'-phosphate
  modified_base 10: mod_base = OTHER; note = 2'-O-methyluridine-3'-phosphate
  modified_base 11: mod_base = OTHER; note = 2'-O-methyluridine-3'-phosphate
  modified_base 12: mod_base = OTHER; note = 2'-O-methylcytidine-3'-phosphate
  modified_base 13: mod_base = OTHER; note = 2'-O-methylcytidine-3'-phosphate
  modified_base 14: mod_base = OTHER; note = 2'-fluoroguanosine-3'-phosphate
  modified_base 15: mod_base = OTHER; note = 2'-O-methylguanosine-3'-phosphate
  modified_base 16: mod_base = OTHER; note = 2'-fluoroadenosine-3'-phosphate
  modified_base 17: mod_base = OTHER; note = 2'-O-methylguanosine-3'-phosphate
  modified_base 18: mod_base = OTHER; note = 2'-O-methylcytidine-3'-phosphate
  modified_base 19: mod_base = OTHER; note = 2'-O-methyladenosine-3'-phosphate
  modified_base 20: mod_base = OTHER; note = 2'-O-methyluridine-3'-phosphate
  modified_base 21: mod_base = OTHER; note = 2'-O-methylcytidine-3'-phosphorothioate
  modified_base 22: mod_base = OTHER; note = 2'-O-methylcytidine-3'-phosphorothioate
  modified_base 23: mod_base = OTHER; note = 2'-O-methyluridine-3'-phosphate
tcagcaacattccggagcatcct

SEQ ID NO: 2514 - RNA, 21 nt, synthetic construct
  source 1..21: mol_type = other RNA; note = Description of Artificial Sequence: Synthetic oligonucleotide
  modified_base 1: mod_base = OTHER; note = 2'-O-methyluridine-3'-phosphorothioate
  modified_base 2: mod_base = OTHER; note = 2'-O-methylguanosine-3'-phosphorothioate
  modified_base 3: mod_base = OTHER; note = 2'-O-methyluridine-3'-phosphate
  modified_base 4: mod_base = OTHER; note = 2'-O-methylcytidine-3'-phosphate
  modified_base 5: mod_base = OTHER; note = 2'-O-methylcytidine-3'-phosphate
  modified_base 6: mod_base = OTHER; note = 2'-O-methyluridine-3'-phosphate
  modified_base 7: mod_base = OTHER; note = 2'-fluorocytidine-3'-phosphate
  modified_base 8: mod_base = OTHER; note = 2'-O-methylguanosine-3'-phosphate
  modified_base 9: mod_base = OTHER; note = 2'-fluoroadenosine-3'-phosphate
  modified_base 10: mod_base = OTHER; note = 2'-fluoroguanosine-3'-phosphate
  modified_base 11: mod_base = OTHER; note = 2'-fluoroadenosine-3'-phosphate
  modified_base 12: mod_base = OTHER; note = 2'-O-methyluridine-3'-phosphate
  modified_base 13: mod_base = OTHER; note = 2'-O-methyladenosine-3'-phosphate
  modified_base 14: mod_base = OTHER; note = 2'-O-methylcytidine-3'-phosphate
  modified_base 15: mod_base = OTHER; note = 2'-O-methyluridine-3'-phosphate
  modified_base 16: mod_base = OTHER; note = 2'-O-methyladenosine-3'-phosphate
  modified_base 17: mod_base = OTHER; note = 2'-O-methyladenosine-3'-phosphate
  modified_base 18: mod_base = OTHER; note = 2'-O-methyladenosine-3'-phosphate
  modified_base 19: mod_base = OTHER; note = 2'-O-methylguanosine-3'-phosphate
  modified_base 20: mod_base = OTHER; note = 2'-O-methylguanosine-3'-phosphate
  modified_base 21: mod_base = OTHER; note = 2'-O-methyladenosine-3'-phosphate N-[tris(GalNAc-alkyl)-amidodecanoyl)]-4-hydroxyprolinol Hyp-(GalNAc-alkyl)3
tgtcctcgagatactaaagga

SEQ ID NO: 2515 - RNA, 23 nt, synthetic construct
  source 1..23: mol_type = other RNA; note = Description of Artificial Sequence: Synthetic oligonucleotide
  modified_base 1: mod_base = OTHER; note = 2'-O-methyluridine-3'-phosphorothioate
  modified_base 2: mod_base = OTHER; note = 2'-fluorocytidine-3'-phosphorothioate
  modified_base 3: mod_base = OTHER; note = 2'-O-methylcytidine-3'-phosphate
  modified_base 4: mod_base = OTHER; note = 2'-O-methyluridine-3'-phosphate
  modified_base 5: mod_base = OTHER; note = 2'-O-methyluridine-3'-phosphate
  modified_base 6: mod_base = OTHER; note = 2'-fluorouridine-3'-phosphate
  modified_base 7: mod_base = OTHER; note = 2'-O-methyladenosine-3'-phosphate
  modified_base 8: mod_base = OTHER; note = 2'-fluoroguanosine-3'-phosphate
  modified_base 9: mod_base = OTHER; note = 2'-fluorouridine-3'-phosphate
  modified_base 10: mod_base = OTHER; note = 2'-O-methyladenosine-3'-phosphate
  modified_base 11: mod_base = OTHER; note = 2'-O-methyluridine-3'-phosphate
  modified_base 12: mod_base = OTHER; note = 2'-O-methylcytidine-3'-phosphate
  modified_base 13: mod_base = OTHER; note = 2'-O-methyluridine-3'-phosphate
  modified_base 14: mod_base = OTHER; note = 2'-fluorocytidine-3'-phosphate
  modified_base 15: mod_base = OTHER; note = 2'-O-methylguanosine-3'-phosphate
  modified_base 16: mod_base = OTHER; note = 2'-fluoroadenosine-3'-phosphate
  modified_base 17: mod_base = OTHER; note = 2'-O-methylguanosine-3'-phosphate
  modified_base 18: mod_base = OTHER; note = 2'-O-methylguanosine-3'-phosphate
  modified_base 19: mod_base = OTHER; note = 2'-O-methyladenosine-3'-phosphate
  modified_base 20: mod_base = OTHER; note = 2'-O-methylcytidine-3'-phosphate
  modified_base 21: mod_base = OTHER; note = 2'-O-methyladenosine-3'-phosphorothioate
  modified_base 22: mod_base = OTHER; note = 2'-O-methyluridine-3'-phosphorothioate
  modified_base 23: mod_base = OTHER; note = 2'-O-methylcytidine-3'-phosphate
tcctttagtatctcgaggacatc

SEQ ID NO: 2516 - RNA, 21 nt, synthetic construct
  source 1..21: mol_type = other RNA; note = Description of Artificial Sequence: Synthetic oligonucleotide
  modified_base 1: mod_base = OTHER; note = 2'-O-methylguanosine-3'-phosphorothioate
  modified_base 2: mod_base = OTHER; note = 2'-O-methyluridine-3'-phosphorothioate
  modified_base 3: mod_base = OTHER; note = 2'-O-methylcytidine-3'-phosphate
  modified_base 4: mod_base = OTHER; note = 2'-O-methylcytidine-3'-phosphate
  modified_base 5: mod_base = OTHER; note = 2'-O-methyluridine-3'-phosphate
  modified_base 6: mod_base = OTHER; note = 2'-O-methylcytidine-3'-phosphate
  modified_base 7: mod_base = OTHER; note = 2'-fluoroguanosine-3'-phosphate
  modified_base 8: mod_base = OTHER; note = 2'-O-methyladenosine-3'-phosphate
  modified_base 9: mod_base = OTHER; note = 2'-fluoroguanosine-3'-phosphate
  modified_base 10: mod_base = OTHER; note = 2'-fluoroadenosine-3'-phosphate
  modified_base 11: mod_base = OTHER; note = 2'-fluorouridine-3'-phosphate
  modified_base 12: mod_base = OTHER; note = 2'-O-methyladenosine-3'-phosphate
  modified_base 13: mod_base = OTHER; note = 2'-O-methylcytidine-3'-phosphate
  modified_base 14: mod_base = OTHER; note = 2'-O-methyluridine-3'-phosphate
  modified_base 15: mod_base = OTHER; note = 2'-O-methyladenosine-3'-phosphate
  modified_base 16: mod_base = OTHER; note = 2'-O-methyladenosine-3'-phosphate
  modified_base 17: mod_base = OTHER; note = 2'-O-methyladenosine-3'-phosphate
  modified_base 18: mod_base = OTHER; note = 2'-O-methylguanosine-3'-phosphate
  modified_base 19: mod_base = OTHER; note = 2'-O-methylguanosine-3'-phosphate
  modified_base 20: mod_base = OTHER; note = 2'-O-methyladenosine-3'-phosphate
  modified_base 21: mod_base = OTHER; note = 2'-O-methyladenosine-3'-phosphate N-[tris(GalNAc-alkyl)-amidodecanoyl)]-4-hydroxyprolinol Hyp-(GalNAc-alkyl)3
gtcctcgagatactaaaggaa

SEQ ID NO: 2517 - RNA, 23 nt, synthetic construct
  source 1..23: mol_type = other RNA; note = Description of Artificial Sequence: Synthetic oligonucleotide
  modified_base 1: mod_base = OTHER; note = 2'-O-methyluridine-3'-phosphorothioate
  modified_base 2: mod_base = OTHER; note = 2'-fluorouridine -3'-phosphorothioate
  modified_base 3: mod_base = OTHER; note = 2'-O-methylcytidine-3'-phosphate
  modified_base 4: mod_base = OTHER; note = 2'-O-methylcytidine-3'-phosphate
  modified_base 5: mod_base = OTHER; note = 2'-O-methyluridine-3'-phosphate
  modified_base 6: mod_base = OTHER; note = 2'-fluorouridine-3'-phosphate
  modified_base 7: mod_base = OTHER; note = 2'-O-methyluridine-3'-phosphate
  modified_base 8: mod_base = OTHER; note = 2'-fluoroadenosine-3'-phosphate
  modified_base 9: mod_base = OTHER; note = 2'-fluoroguanosine-3'-phosphate
  modified_base 10: mod_base = OTHER; note = 2'-O-methyluridine-3'-phosphate
  modified_base 11: mod_base = OTHER; note = 2'-O-methyladenosine-3'-phosphate
  modified_base 12: mod_base = OTHER; note = 2'-O-methyluridine-3'-phosphate
  modified_base 13: mod_base = OTHER; note = 2'-O-methylcytidine-3'-phosphate
  modified_base 14: mod_base = OTHER; note = 2'-fluorouridine-3'-phosphate
  modified_base 15: mod_base = OTHER; note = 2'-O-methylcytidine-3'-phosphate
  modified_base 16: mod_base = OTHER; note = 2'-fluoroguanosine-3'-phosphate
  modified_base 17: mod_base = OTHER; note = 2'-O-methyladenosine-3'-phosphate
  modified_base 18: mod_base = OTHER; note = 2'-O-methylguanosine-3'-phosphate
  modified_base 19: mod_base = OTHER; note = 2'-O-methylguanosine-3'-phosphate
  modified_base 20: mod_base = OTHER; note = 2'-O-methyladenosine-3'-phosphate
  modified_base 21: mod_base = OTHER; note = 2'-O-methylcytidine-3'-phosphorothioate
  modified_base 22: mod_base = OTHER; note = 2'-O-methyladenosine-3'-phosphorothioate
  modified_base 23: mod_base = OTHER; note = 2'-O-methyluridine-3'-phosphate
ttcctttagtatctcgaggacat

SEQ ID NO: 2518 - RNA, 21 nt, synthetic construct
  source 1..21: mol_type = other RNA; note = Description of Artificial Sequence: Synthetic oligonucleotide
  modified_base 1: mod_base = OTHER; note = 2'-O-methyladenosine-3'-phosphorothioate
  modified_base 2: mod_base = OTHER; note = 2'-O-methyladenosine-3'-phosphorothioate
  modified_base 3: mod_base = OTHER; note = 2'-O-methylguanosine-3'-phosphate
  modified_base 4: mod_base = OTHER; note = 2'-O-methyladenosine-3'-phosphate
  modified_base 5: mod_base = OTHER; note = 2'-O-methyluridine-3'-phosphate
  modified_base 6: mod_base = OTHER; note = 2'-O-methylguanosine-3'-phosphate
  modified_base 7: mod_base = OTHER; note = 2'-fluorouridine-3'-phosphate
  modified_base 8: mod_base = OTHER; note = 2'-O-methylcytidine-3'-phosphate
  modified_base 9: mod_base = OTHER; note = 2'-fluorocytidine-3'-phosphate
  modified_base 10: mod_base = OTHER; note = 2'-fluorouridine-3'-phosphate
  modified_base 11: mod_base = OTHER; note = 2'-fluorocytidine-3'-phosphate
  modified_base 12: mod_base = OTHER; note = 2'-O-methylguanosine-3'-phosphate
  modified_base 13: mod_base = OTHER; note = 2'-O-methyladenosine-3'-phosphate
  modified_base 14: mod_base = OTHER; note = 2'-O-methylguanosine-3'-phosphate
  modified_base 15: mod_base = OTHER; note = 2'-O-methyladenosine-3'-phosphate
  modified_base 16: mod_base = OTHER; note = 2'-O-methyluridine-3'-phosphate
  modified_base 17: mod_base = OTHER; note = 2'-O-methyladenosine-3'-phosphate
  modified_base 18: mod_base = OTHER; note = 2'-O-methylcytidine-3'-phosphate
  modified_base 19: mod_base = OTHER; note = 2'-O-methyluridine-3'-phosphate
  modified_base 20: mod_base = OTHER; note = 2'-O-methyladenosine-3'-phosphate
  modified_base 21: mod_base = OTHER; note = 2'-O-methyladenosine-3'-phosphate N-[tris(GalNAc-alkyl)-amidodecanoyl)]-4-hydroxyprolinol Hyp-(GalNAc-alkyl)3
aagatgtcctcgagatactaa

SEQ ID NO: 2519 - RNA, 23 nt, synthetic construct
  source 1..23: mol_type = other RNA; note = Description of Artificial Sequence: Synthetic oligonucleotide
  modified_base 1: mod_base = OTHER; note = 2'-O-methyluridine-3'-phosphorothioate
  modified_base 2: mod_base = OTHER; note = 2'-fluorouridine -3'-phosphorothioate
  modified_base 3: mod_base = OTHER; note = 2'-O-methyladenosine-3'-phosphate
  modified_base 4: mod_base = OTHER; note = 2'-O-methylguanosine-3'-phosphate
  modified_base 5: mod_base = OTHER; note = 2'-O-methyluridine-3'-phosphate
  modified_base 6: mod_base = OTHER; note = 2'-fluoroadenosine-3'-phosphate
  modified_base 7: mod_base = OTHER; note = 2'-O-methyluridine-3'-phosphate
  modified_base 8: mod_base = OTHER; note = 2'-fluorocytidine-3'-phosphate
  modified_base 9: mod_base = OTHER; note = 2'-fluorouridine-3'-phosphate
  modified_base 10: mod_base = OTHER; note = 2'-O-methylcytidine-3'-phosphate
  modified_base 11: mod_base = OTHER; note = 2'-O-methylguanosine-3'-phosphate
  modified_base 12: mod_base = OTHER; note = 2'-O-methyladenosine-3'-phosphate
  modified_base 13: mod_base = OTHER; note = 2'-O-methylguanosine-3'-phosphate
  modified_base 14: mod_base = OTHER; note = 2'-fluoroguanosine-3'-phosphate
  modified_base 15: mod_base = OTHER; note = 2'-O-methyladenosine-3'-phosphate
  modified_base 16: mod_base = OTHER; note = 2'-fluorocytidine-3'-phosphate
  modified_base 17: mod_base = OTHER; note = 2'-O-methyladenosine-3'-phosphate
  modified_base 18: mod_base = OTHER; note = 2'-O-methyluridine-3'-phosphate
  modified_base 19: mod_base = OTHER; note = 2'-O-methylcytidine-3'-phosphate
  modified_base 20: mod_base = OTHER; note = 2'-O-methyluridine-3'-phosphate
  modified_base 21: mod_base = OTHER; note = 2'-O-methyluridine-3'-phosphorothioate
  modified_base 22: mod_base = OTHER; note = 2'-O-methylguanosine-3'-phosphorothioate
  modified_base 23: mod_base = OTHER; note = 2'-O-methyladenosine-3'-phosphate
ttagtatctcgaggacatcttga

SEQ ID NO: 2520 - RNA, 21 nt, synthetic construct
  source 1..21: mol_type = other RNA; note = Description of Artificial Sequence: Synthetic oligonucleotide
  modified_base 1: mod_base = OTHER; note = 2'-O-methylcytidine-3'-phosphorothioate
  modified_base 2: mod_base = OTHER; note = 2'-O-methyladenosine-3'-phosphorothioate
  modified_base 3: mod_base = OTHER; note = 2'-O-methyladenosine-3'-phosphate
  modified_base 4: mod_base = OTHER; note = 2'-O-methylguanosine-3'-phosphate
  modified_base 5: mod_base = OTHER; note = 2'-O-methyladenosine-3'-phosphate
  modified_base 6: mod_base = OTHER; note = 2'-O-methyluridine-3'-phosphate
  modified_base 7: mod_base = OTHER; note = 2'-fluoroguanosine-3'-phosphate
  modified_base 8: mod_base = OTHER; note = 2'-O-methyluridine-3'-phosphate
  modified_base 9: mod_base = OTHER; note = 2'-fluorocytidine-3'-phosphate
  modified_base 10: mod_base = OTHER; note = 2'-fluorocytidine-3'-phosphate
  modified_base 11: mod_base = OTHER; note = 2'-fluorouridine-3'-phosphate
  modified_base 12: mod_base = OTHER; note = 2'-O-methylcytidine-3'-phosphate
  modified_base 13: mod_base = OTHER; note = 2'-O-methylguanosine-3'-phosphate
  modified_base 14: mod_base = OTHER; note = 2'-O-methyladenosine-3'-phosphate
  modified_base 15: mod_base = OTHER; note = 2'-O-methylguanosine-3'-phosphate
  modified_base 16: mod_base = OTHER; note = 2'-O-methyladenosine-3'-phosphate
  modified_base 17: mod_base = OTHER; note = 2'-O-methyluridine-3'-phosphate
  modified_base 18: mod_base = OTHER; note = 2'-O-methyladenosine-3'-phosphate
  modified_base 19: mod_base = OTHER; note = 2'-O-methylcytidine-3'-phosphate
  modified_base 20: mod_base = OTHER; note = 2'-O-methyluridine-3'-phosphate
  modified_base 21: mod_base = OTHER; note = 2'-O-methyladenosine-3'-phosphate N-[tris(GalNAc-alkyl)-amidodecanoyl)]-4-hydroxyprolinol Hyp-(GalNAc-alkyl)3
caagatgtcctcgagatacta

SEQ ID NO: 2521 - RNA, 23 nt, synthetic construct
  source 1..23: mol_type = other RNA; note = Description of Artificial Sequence: Synthetic oligonucleotide
  modified_base 1: mod_base = OTHER; note = 2'-O-methyluridine-3'-phosphorothioate
  modified_base 2: mod_base = OTHER; note = 2'-fluoroadenosine-3'-phosphorothioate
  modified_base 3: mod_base = OTHER; note = 2'-O-methylguanosine-3'-phosphate
  modified_base 4: mod_base = OTHER; note = 2'-O-methyluridine-3'-phosphate
  modified_base 5: mod_base = OTHER; note = 2'-O-methyladenosine-3'-phosphate
  modified_base 6: mod_base = OTHER; note = 2'-fluorouridine-3'-phosphate
  modified_base 7: mod_base = OTHER; note = 2'-O-methylcytidine-3'-phosphate
  modified_base 8: mod_base = OTHER; note = 2'-fluorouridine-3'-phosphate
  modified_base 9: mod_base = OTHER; note = 2'-fluorocytidine-3'-phosphate
  modified_base 10: mod_base = OTHER; note = 2'-O-methylguanosine-3'-phosphate
  modified_base 11: mod_base = OTHER; note = 2'-O-methyladenosine-3'-phosphate
  modified_base 12: mod_base = OTHER; note = 2'-O-methylguanosine-3'-phosphate
  modified_base 13: mod_base = OTHER; note = 2'-O-methylguanosine-3'-phosphate
  modified_base 14: mod_base = OTHER; note = 2'-fluoroadenosine-3'-phosphate
  modified_base 15: mod_base = OTHER; note = 2'-O-methylcytidine-3'-phosphate
  modified_base 16: mod_base = OTHER; note = 2'-fluoroadenosine-3'-phosphate
  modified_base 17: mod_base = OTHER; note = 2'-O-methyluridine-3'-phosphate
  modified_base 18: mod_base = OTHER; note = 2'-O-methylcytidine-3'-phosphate
  modified_base 19: mod_base = OTHER; note = 2'-O-methyluridine-3'-phosphate
  modified_base 20: mod_base = OTHER; note = 2'-O-methyluridine-3'-phosphate
  modified_base 21: mod_base = OTHER; note = 2'-O-methylguanosine-3'-phosphorothioate
  modified_base 22: mod_base = OTHER; note = 2'-O-methyladenosine-3'-phosphorothioate
  modified_base 23: mod_base = OTHER; note = 2'-O-methyladenosine-3'-phosphate
tagtatctcgaggacatcttgaa

SEQ ID NO: 2522 - RNA, 21 nt, synthetic construct
  source 1..21: mol_type = other RNA; note = Description of Artificial Sequence: Synthetic oligonucleotide
  modified_base 1: mod_base = OTHER; note = 2'-O-methyladenosine-3'-phosphorothioate
  modified_base 2: mod_base = OTHER; note = 2'-O-methylcytidine-3'-phosphorothioate
  modified_base 3: mod_base = OTHER; note = 2'-O-methyladenosine-3'-phosphate
  modified_base 4: mod_base = OTHER; note = 2'-O-methyladenosine-3'-phosphate
  modified_base 5: mod_base = OTHER; note = 2'-O-methylcytidine-3'-phosphate
  modified_base 6: mod_base = OTHER; note = 2'-O-methyladenosine-3'-phosphate
  modified_base 7: mod_base = OTHER; note = 2'-fluorouridine-3'-phosphate
  modified_base 8: mod_base = OTHER; note = 2'-O-methylguanosine-3'-phosphate
  modified_base 9: mod_base = OTHER; note = 2'-fluorocytidine-3'-phosphate
  modified_base 10: mod_base = OTHER; note = 2'-fluorouridine-3'-phosphate
  modified_base 11: mod_base = OTHER; note = 2'-fluoroadenosine-3'-phosphate
  modified_base 12: mod_base = OTHER; note = 2'-O-methyladenosine-3'-phosphate
  modified_base 13: mod_base = OTHER; note = 2'-O-methyladenosine-3'-phosphate
  modified_base 14: mod_base = OTHER; note = 2'-O-methyluridine-3'-phosphate
  modified_base 15: mod_base = OTHER; note = 2'-O-methylcytidine-3'-phosphate
  modified_base 16: mod_base = OTHER; note = 2'-O-methyladenosine-3'-phosphate
  modified_base 17: mod_base = OTHER; note = 2'-O-methylguanosine-3'-phosphate
  modified_base 18: mod_base = OTHER; note = 2'-O-methyluridine-3'-phosphate
  modified_base 19: mod_base = OTHER; note = 2'-O-methyladenosine-3'-phosphate
  modified_base 20: mod_base = OTHER; note = 2'-O-methylcytidine-3'-phosphate
  modified_base 21: mod_base = OTHER; note = 2'-O-methyluridine-3'-phosphate N-[tris(GalNAc-alkyl)-amidodecanoyl)]-4-hydroxyprolinol Hyp-(GalNAc-alkyl)3
acaacatgctaaatcagtact

SEQ ID NO: 2523 - RNA, 23 nt, synthetic construct
  source 1..23: mol_type = other RNA; note = Description of Artificial Sequence: Synthetic oligonucleotide
  modified_base 1: mod_base = OTHER; note = 2'-O-methyladenosine-3'-phosphorothioate
  modified_base 2: mod_base = OTHER; note = 2'-fluoroguanosine-3'-phosphorothioate
  modified_base 3: mod_base = OTHER; note = 2'-O-methyluridine-3'-phosphate
  modified_base 4: mod_base = OTHER; note = 2'-O-methyladenosine-3'-phosphate
  modified_base 5: mod_base = OTHER; note = 2'-O-methylcytidine-3'-phosphate
  modified_base 6: mod_base = OTHER; note = 2'-fluorouridine-3'-phosphate
  modified_base 7: mod_base = OTHER; note = 2'-O-methylguanosine-3'-phosphate
  modified_base 8: mod_base = OTHER; note = 2'-fluoroadenosine-3'-phosphate
  modified_base 9: mod_base = OTHER; note = 2'-fluorouridine-3'-phosphate
  modified_base 10: mod_base = OTHER; note = 2'-O-methyluridine-3'-phosphate
  modified_base 11: mod_base = OTHER; note = 2'-O-methyluridine-3'-phosphate
  modified_base 12: mod_base = OTHER; note = 2'-O-methyladenosine-3'-phosphate
  modified_base 13: mod_base = OTHER; note = 2'-O-methylguanosine-3'-phosphate
  modified_base 14: mod_base = OTHER; note = 2'-fluorocytidine-3'-phosphate
  modified_base 15: mod_base = OTHER; note = 2'-O-methyladenosine-3'-phosphate
  modified_base 16: mod_base = OTHER; note = 2'-fluorouridine-3'-phosphate
  modified_base 17: mod_base = OTHER; note = 2'-O-methylguanosine-3'-phosphate
  modified_base 18: mod_base = OTHER; note = 2'-O-methyluridine-3'-phosphate
  modified_base 19: mod_base = OTHER; note = 2'-O-methyluridine-3'-phosphate
  modified_base 20: mod_base = OTHER; note = 2'-O-methylguanosine-3'-phosphate
  modified_base 21: mod_base = OTHER; note = 2'-O-methyluridine-3'-phosphorothioate
  modified_base 22: mod_base = OTHER; note = 2'-O-methyluridine-3'-phosphorothioate
  modified_base 23: mod_base = OTHER; note = 2'-O-methylcytidine-3'-phosphate
agtactgatttagcatgttgttc

SEQ ID NO: 2524 - RNA, 21 nt, synthetic construct
  source 1..21: mol_type = other RNA; note = Description of Artificial Sequence: Synthetic oligonucleotide
  modified_base 1: mod_base = OTHER; note = 2'-O-methylcytidine-3'-phosphorothioate
  modified_base 2: mod_base = OTHER; note = 2'-O-methyladenosine-3'-phosphorothioate
  modified_base 3: mod_base = OTHER; note = 2'-O-methyladenosine-3'-phosphate
  modified_base 4: mod_base = OTHER; note = 2'-O-methylcytidine-3'-phosphate
  modified_base 5: mod_base = OTHER; note = 2'-O-methyladenosine-3'-phosphate
  modified_base 6: mod_base = OTHER; note = 2'-O-methyluridine-3'-phosphate
  modified_base 7: mod_base = OTHER; note = 2'-fluoroguanosine-3'-phosphate
  modified_base 8: mod_base = OTHER; note = 2'-O-methylcytidine-3'-phosphate
  modified_base 9: mod_base = OTHER; note = 2'-fluorouridine-3'-phosphate
  modified_base 10: mod_base = OTHER; note = 2'-fluoroadenosine-3'-phosphate
  modified_base 11: mod_base = OTHER; note = 2'-fluoroadenosine-3'-phosphate
  modified_base 12: mod_base = OTHER; note = 2'-O-methyladenosine-3'-phosphate
  modified_base 13: mod_base = OTHER; note = 2'-O-methyluridine-3'-phosphate
  modified_base 14: mod_base = OTHER; note = 2'-O-methylcytidine-3'-phosphate
  modified_base 15: mod_base = OTHER; note = 2'-O-methyladenosine-3'-phosphate
  modified_base 16: mod_base = OTHER; note = 2'-O-methylguanosine-3'-phosphate
  modified_base 17: mod_base = OTHER; note = 2'-O-methyluridine-3'-phosphate
  modified_base 18: mod_base = OTHER; note = 2'-O-methyladenosine-3'-phosphate
  modified_base 19: mod_base = OTHER; note = 2'-O-methylcytidine-3'-phosphate
  modified_base 20: mod_base = OTHER; note = 2'-O-methyluridine-3'-phosphate
  modified_base 21: mod_base = OTHER; note = 2'-O-methyluridine-3'-phosphate N-[tris(GalNAc-alkyl)-amidodecanoyl)]-4-hydroxyprolinol Hyp-(GalNAc-alkyl)3
caacatgctaaatcagtactt

SEQ ID NO: 2525 - RNA, 23 nt, synthetic construct
  source 1..23: mol_type = other RNA; note = Description of Artificial Sequence: Synthetic oligonucleotide
  modified_base 1: mod_base = OTHER; note = 2'-O-methyladenosine-3'-phosphorothioate
  modified_base 2: mod_base = OTHER; note = 2'-fluoroadenosine-3'-phosphorothioate
  modified_base 3: mod_base = OTHER; note = 2'-O-methylguanosine-3'-phosphate
  modified_base 4: mod_base = OTHER; note = 2'-O-methyluridine-3'-phosphate
  modified_base 5: mod_base = OTHER; note = 2'-O-methyladenosine-3'-phosphate
  modified_base 6: mod_base = OTHER; note = 2'-fluorocytidine-3'-phosphate
  modified_base 7: mod_base = OTHER; note = 2'-O-methyluridine-3'-phosphate
  modified_base 8: mod_base = OTHER; note = 2'-fluoroguanosine-3'-phosphate
  modified_base 9: mod_base = OTHER; note = 2'-fluoroadenosine-3'-phosphate
  modified_base 10: mod_base = OTHER; note = 2'-O-methyluridine-3'-phosphate
  modified_base 11: mod_base = OTHER; note = 2'-O-methyluridine-3'-phosphate
  modified_base 12: mod_base = OTHER; note = 2'-O-methyluridine-3'-phosphate
  modified_base 13: mod_base = OTHER; note = 2'-O-methyladenosine-3'-phosphate
  modified_base 14: mod_base = OTHER; note = 2'-fluoroguanosine-3'-phosphate
  modified_base 15: mod_base = OTHER; note = 2'-O-methylcytidine-3'-phosphate
  modified_base 16: mod_base = OTHER; note = 2'-fluoroadenosine-3'-phosphate
  modified_base 17: mod_base = OTHER; note = 2'-O-methyluridine-3'-phosphate
  modified_base 18: mod_base = OTHER; note = 2'-O-methylguanosine-3'-phosphate
  modified_base 19: mod_base = OTHER; note = 2'-O-methyluridine-3'-phosphate
  modified_base 20: mod_base = OTHER; note = 2'-O-methyluridine-3'-phosphate
  modified_base 21: mod_base = OTHER; note = 2'-O-methylguanosine-3'-phosphorothioate
  modified_base 22: mod_base = OTHER; note = 2'-O-methyluridine-3'-phosphorothioate
  modified_base 23: mod_base = OTHER; note = 2'-O-methyluridine-3'-phosphate
aagtactgatttagcatgttgtt

SEQ ID NO: 2526 - RNA, 21 nt, synthetic construct
  source 1..21: mol_type = other RNA; note = Description of Artificial Sequence: Synthetic oligonucleotide
  modified_base 1: mod_base = OTHER; note = 2'-O-methyladenosine-3'-phosphorothioate
  modified_base 2: mod_base = OTHER; note = 2'-O-methyluridine-3'-phosphorothioate
  modified_base 3: mod_base = OTHER; note = 2'-O-methylguanosine-3'-phosphate
  modified_base 4: mod_base = OTHER; note = 2'-O-methyladenosine-3'-phosphate
  modified_base 5: mod_base = OTHER; note = 2'-O-methyladenosine-3'-phosphate
  modified_base 6: mod_base = OTHER; note = 2'-O-methylcytidine-3'-phosphate
  modified_base 7: mod_base = OTHER; note = 2'-fluoroadenosine-3'-phosphate
  modified_base 8: mod_base = OTHER; note = 2'-O-methyladenosine-3'-phosphate
  modified_base 9: mod_base = OTHER; note = 2'-fluorocytidine-3'-phosphate
  modified_base 10: mod_base = OTHER; note = 2'-fluoroadenosine-3'-phosphate
  modified_base 11: mod_base = OTHER; note = 2'-fluorouridine-3'-phosphate
  modified_base 12: mod_base = OTHER; note = 2'-O-methylguanosine-3'-phosphate
  modified_base 13: mod_base = OTHER; note = 2'-O-methylcytidine-3'-phosphate
  modified_base 14: mod_base = OTHER; note = 2'-O-methyluridine-3'-phosphate
  modified_base 15: mod_base = OTHER; note = 2'-O-methyladenosine-3'-phosphate
  modified_base 16: mod_base = OTHER; note = 2'-O-methyladenosine-3'-phosphate
  modified_base 17: mod_base = OTHER; note = 2'-O-methyladenosine-3'-phosphate
  modified_base 18: mod_base = OTHER; note = 2'-O-methyluridine-3'-phosphate
  modified_base 19: mod_base = OTHER; note = 2'-O-methylcytidine-3'-phosphate
  modified_base 20: mod_base = OTHER; note = 2'-O-methyladenosine-3'-phosphate
  modified_base 21: mod_base = OTHER; note = 2'-O-methylguanosine-3'-phosphate N-[tris(GalNAc-alkyl)-amidodecanoyl)]-4-hydroxyprolinol Hyp-(GalNAc-alkyl)3
atgaacaacatgctaaatcag

SEQ ID NO: 2527 - RNA, 23 nt, synthetic construct
  source 1..23: mol_type = other RNA; note = Description of Artificial Sequence: Synthetic oligonucleotide
  modified_base 1: mod_base = OTHER; note = 2'-O-methylcytidine-3'-phosphorothioate
  modified_base 2: mod_base = OTHER; note = 2'-fluorouridine -3'-phosphorothioate
  modified_base 3: mod_base = OTHER; note = 2'-O-methylguanosine-3'-phosphate
  modified_base 4: mod_base = OTHER; note = 2'-O-methyladenosine-3'-phosphate
  modified_base 5: mod_base = OTHER; note = 2'-O-methyluridine-3'-phosphate
  modified_base 6: mod_base = OTHER; note = 2'-fluorouridine-3'-phosphate
  modified_base 7: mod_base = OTHER; note = 2'-O-methyluridine-3'-phosphate
  modified_base 8: mod_base = OTHER; note = 2'-fluoroadenosine-3'-phosphate
  modified_base 9: mod_base = OTHER; note = 2'-fluoroguanosine-3'-phosphate
  modified_base 10: mod_base = OTHER; note = 2'-O-methylcytidine-3'-phosphate
  modified_base 11: mod_base = OTHER; note = 2'-O-methyladenosine-3'-phosphate
  modified_base 12: mod_base = OTHER; note = 2'-O-methyluridine-3'-phosphate
  modified_base 13: mod_base = OTHER; note = 2'-O-methylguanosine-3'-phosphate
  modified_base 14: mod_base = OTHER; note = 2'-fluorouridine-3'-phosphate
  modified_base 15: mod_base = OTHER; note = 2'-O-methyluridine-3'-phosphate
  modified_base 16: mod_base = OTHER; note = 2'-fluoroguanosine-3'-phosphate
  modified_base 17: mod_base = OTHER; note = 2'-O-methyluridine-3'-phosphate
  modified_base 18: mod_base = OTHER; note = 2'-O-methyluridine-3'-phosphate
  modified_base 19: mod_base = OTHER; note = 2'-O-methylcytidine-3'-phosphate
  modified_base 20: mod_base = OTHER; note = 2'-O-methyladenosine-3'-phosphate
  modified_base 21: mod_base = OTHER; note = 2'-O-methyluridine-3'-phosphorothioate
  modified_base 22: mod_base = OTHER; note = 2'-O-methyladenosine-3'-phosphorothioate
  modified_base 23: mod_base = OTHER; note = 2'-O-methyladenosine-3'-phosphate
ctgatttagcatgttgttcataa

SEQ ID NO: 2528 - RNA, 21 nt, synthetic construct
  source 1..21: mol_type = other RNA; note = Description of Artificial Sequence: Synthetic oligonucleotide
  modified_base 1: mod_base = OTHER; note = 2'-O-methyluridine-3'-phosphorothioate
  modified_base 2: mod_base = OTHER; note = 2'-O-methyladenosine-3'-phosphorothioate
  modified_base 3: mod_base = OTHER; note = 2'-O-methyluridine-3'-phosphate
  modified_base 4: mod_base = OTHER; note = 2'-O-methylguanosine-3'-phosphate
  modified_base 5: mod_base = OTHER; note = 2'-O-methyladenosine-3'-phosphate
  modified_base 6: mod_base = OTHER; note = 2'-O-methyladenosine-3'-phosphate
  modified_base 7: mod_base = OTHER; note = 2'-fluorocytidine-3'-phosphate
  modified_base 8: mod_base = OTHER; note = 2'-O-methyladenosine-3'-phosphate
  modified_base 9: mod_base = OTHER; note = 2'-fluoroadenosine-3'-phosphate
  modified_base 10: mod_base = OTHER; note = 2'-fluorocytidine-3'-phosphate
  modified_base 11: mod_base = OTHER; note = 2'-fluoroadenosine-3'-phosphate
  modified_base 12: mod_base = OTHER; note = 2'-O-methyluridine-3'-phosphate
  modified_base 13: mod_base = OTHER; note = 2'-O-methylguanosine-3'-phosphate
  modified_base 14: mod_base = OTHER; note = 2'-O-methylcytidine-3'-phosphate
  modified_base 15: mod_base = OTHER; note = 2'-O-methyluridine-3'-phosphate
  modified_base 16: mod_base = OTHER; note = 2'-O-methyladenosine-3'-phosphate
  modified_base 17: mod_base = OTHER; note = 2'-O-methyladenosine-3'-phosphate
  modified_base 18: mod_base = OTHER; note = 2'-O-methyladenosine-3'-phosphate
  modified_base 19: mod_base = OTHER; note = 2'-O-methyluridine-3'-phosphate
  modified_base 20: mod_base = OTHER; note = 2'-O-methylcytidine-3'-phosphate
  modified_base 21: mod_base = OTHER; note = 2'-O-methyladenosine-3'-phosphate N-[tris(GalNAc-alkyl)-amidodecanoyl)]-4-hydroxyprolinol Hyp-(GalNAc-alkyl)3
tatgaacaacatgctaaatca

SEQ ID NO: 2529 - RNA, 23 nt, synthetic construct
  source 1..23: mol_type = other RNA; note = Description of Artificial Sequence: Synthetic oligonucleotide
  modified_base 1: mod_base = OTHER; note = 2'-O-methyluridine-3'-phosphorothioate
  modified_base 2: mod_base = OTHER; note = 2'-fluoroguanosine-3'-phosphorothioate
  modified_base 3: mod_base = OTHER; note = 2'-O-methyladenosine-3'-phosphate
  modified_base 4: mod_base = OTHER; note = 2'-O-methyluridine-3'-phosphate
  modified_base 5: mod_base = OTHER; note = 2'-O-methyluridine-3'-phosphate
  modified_base 6: mod_base = OTHER; note = 2'-fluorouridine-3'-phosphate
  modified_base 7: mod_base = OTHER; note = 2'-O-methyladenosine-3'-phosphate
  modified_base 8: mod_base = OTHER; note = 2'-fluoroguanosine-3'-phosphate
  modified_base 9: mod_base = OTHER; note = 2'-fluorocytidine-3'-phosphate
  modified_base 10: mod_base = OTHER; note = 2'-O-methyladenosine-3'-phosphate
  modified_base 11: mod_base = OTHER; note = 2'-O-methyluridine-3'-phosphate
  modified_base 12: mod_base = OTHER; note = 2'-O-methylguanosine-3'-phosphate
  modified_base 13: mod_base = OTHER; note = 2'-O-methyluridine-3'-phosphate
  modified_base 14: mod_base = OTHER; note = 2'-fluorouridine-3'-phosphate
  modified_base 15: mod_base = OTHER; note = 2'-O-methylguanosine-3'-phosphate
  modified_base 16: mod_base = OTHER; note = 2'-fluorouridine-3'-phosphate
  modified_base 17: mod_base = OTHER; note = 2'-O-methyluridine-3'-phosphate
  modified_base 18: mod_base = OTHER; note = 2'-O-methylcytidine-3'-phosphate
  modified_base 19: mod_base = OTHER; note = 2'-O-methyladenosine-3'-phosphate
  modified_base 20: mod_base = OTHER; note = 2'-O-methyluridine-3'-phosphate
  modified_base 21: mod_base = OTHER; note = 2'-O-methyladenosine-3'-phosphorothioate
  modified_base 22: mod_base = OTHER; note = 2'-O-methyladenosine-3'-phosphorothioate
  modified_base 23: mod_base = OTHER; note = 2'-O-methyluridine-3'-phosphate
tgatttagcatgttgttcataat

SEQ ID NO: 2530 - RNA, 21 nt, synthetic construct
  source 1..21: mol_type = other RNA; note = Description of Artificial Sequence: Synthetic oligonucleotide
  modified_base 1: mod_base = OTHER; note = 2'-O-methylguanosine-3'-phosphorothioate
  modified_base 2: mod_base = OTHER; note = 2'-O-methylcytidine-3'-phosphorothioate
  modified_base 3: mod_base = OTHER; note = 2'-O-methylcytidine-3'-phosphate
  modified_base 4: mod_base = OTHER; note = 2'-O-methyladenosine-3'-phosphate
  modified_base 5: mod_base = OTHER; note = 2'-O-methyladenosine-3'-phosphate
  modified_base 6: mod_base = OTHER; note = 2'-O-methylguanosine-3'-phosphate
  modified_base 7: mod_base = OTHER; note = 2'-fluoroguanosine-3'-phosphate
  modified_base 8: mod_base = OTHER; note = 2'-O-methylcytidine-3'-phosphate
  modified_base 9: mod_base = OTHER; note = 2'-fluorouridine-3'-phosphate
  modified_base 10: mod_base = OTHER; note = 2'-fluoroguanosine-3'-phosphate
  modified_base 11: mod_base = OTHER; note = 2'-fluorouridine-3'-phosphate
  modified_base 12: mod_base = OTHER; note = 2'-O-methylguanosine-3'-phosphate
  modified_base 13: mod_base = OTHER; note = 2'-O-methyluridine-3'-phosphate
  modified_base 14: mod_base = OTHER; note = 2'-O-methyluridine-3'-phosphate
  modified_base 15: mod_base = OTHER; note = 2'-O-methyluridine-3'-phosphate
  modified_base 16: mod_base = OTHER; note = 2'-O-methylguanosine-3'-phosphate
  modified_base 17: mod_base = OTHER; note = 2'-O-methyluridine-3'-phosphate
  modified_base 18: mod_base = OTHER; note = 2'-O-methylguanosine-3'-phosphate
  modified_base 19: mod_base = OTHER; note = 2'-O-methylguanosine-3'-phosphate
  modified_base 20: mod_base = OTHER; note = 2'-O-methylguanosine-3'-phosphate
  modified_base 21: mod_base = OTHER; note = 2'-O-methylguanosine-3'-phosphate N-[tris(GalNAc-alkyl)-amidodecanoyl)]-4-hydroxyprolinol Hyp-(GalNAc-alkyl)3
gccaaggctgtgtttgtgggg

SEQ ID NO: 2531 - RNA, 23 nt, synthetic construct
  source 1..23: mol_type = other RNA; note = Description of Artificial Sequence: Synthetic oligonucleotide
  modified_base 1: mod_base = OTHER; note = 2'-O-methylcytidine-3'-phosphorothioate
  modified_base 2: mod_base = OTHER; note = 2'-fluorocytidine-3'-phosphorothioate
  modified_base 3: mod_base = OTHER; note = 2'-O-methylcytidine-3'-phosphate
  modified_base 4: mod_base = OTHER; note = 2'-O-methylcytidine-3'-phosphate
  modified_base 5: mod_base = OTHER; note = 2'-O-methyladenosine-3'-phosphate
  modified_base 6: mod_base = OTHER; note = 2'-fluorocytidine-3'-phosphate
  modified_base 7: mod_base = OTHER; note = 2'-O-methyladenosine-3'-phosphate
  modified_base 8: mod_base = OTHER; note = 2'-fluoroadenosine-3'-phosphate
  modified_base 9: mod_base = OTHER; note = 2'-fluoroadenosine-3'-phosphate
  modified_base 10: mod_base = OTHER; note = 2'-O-methylcytidine-3'-phosphate
  modified_base 11: mod_base = OTHER; note = 2'-O-methyladenosine-3'-phosphate
  modified_base 12: mod_base = OTHER; note = 2'-O-methylcytidine-3'-phosphate
  modified_base 13: mod_base = OTHER; note = 2'-O-methyladenosine-3'-phosphate
  modified_base 14: mod_base = OTHER; note = 2'-fluoroguanosine-3'-phosphate
  modified_base 15: mod_base = OTHER; note = 2'-O-methylcytidine-3'-phosphate
  modified_base 16: mod_base = OTHER; note = 2'-fluorocytidine-3'-phosphate
  modified_base 17: mod_base = OTHER; note = 2'-O-methyluridine-3'-phosphate
  modified_base 18: mod_base = OTHER; note = 2'-O-methyluridine-3'-phosphate
  modified_base 19: mod_base = OTHER; note = 2'-O-methylguanosine-3'-phosphate
  modified_base 20: mod_base = OTHER; note = 2'-O-methylguanosine-3'-phosphate
  modified_base 21: mod_base = OTHER; note = 2'-O-methylcytidine-3'-phosphorothioate
  modified_base 22: mod_base = OTHER; note = 2'-O-methylguanosine-3'-phosphorothioate
  modified_base 23: mod_base = OTHER; note = 2'-O-methylcytidine-3'-phosphate
ccccacaaacacagccttggcgc

SEQ ID NO: 2532 - RNA, 21 nt, synthetic construct
  source 1..21: mol_type = other RNA; note = Description of Artificial Sequence: Synthetic oligonucleotide
  modified_base 1: mod_base = OTHER; note = 2'-O-methylcytidine-3'-phosphorothioate
  modified_base 2: mod_base = OTHER; note = 2'-O-methylcytidine-3'-phosphorothioate
  modified_base 3: mod_base = OTHER; note = 2'-O-methyladenosine-3'-phosphate
  modified_base 4: mod_base = OTHER; note = 2'-O-methyladenosine-3'-phosphate
  modified_base 5: mod_base = OTHER; note = 2'-O-methylguanosine-3'-phosphate
  modified_base 6: mod_base = OTHER; note = 2'-O-methylguanosine-3'-phosphate
  modified_base 7: mod_base = OTHER; note = 2'-fluorocytidine-3'-phosphate
  modified_base 8: mod_base = OTHER; note = 2'-O-methyluridine-3'-phosphate
  modified_base 9: mod_base = OTHER; note = 2'-fluoroguanosine-3'-phosphate
  modified_base 10: mod_base = OTHER; note = 2'-fluorouridine-3'-phosphate
  modified_base 11: mod_base = OTHER; note = 2'-fluoroguanosine-3'-phosphate
  modified_base 12: mod_base = OTHER; note = 2'-O-methyluridine-3'-phosphate
  modified_base 13: mod_base = OTHER; note = 2'-O-methyluridine-3'-phosphate
  modified_base 14: mod_base = OTHER; note = 2'-O-methyluridine-3'-phosphate
  modified_base 15: mod_base = OTHER; note = 2'-O-methylguanosine-3'-phosphate
  modified_base 16: mod_base = OTHER; note = 2'-O-methyluridine-3'-phosphate
  modified_base 17: mod_base = OTHER; note = 2'-O-methylguanosine-3'-phosphate
  modified_base 18: mod_base = OTHER; note = 2'-O-methylguanosine-3'-phosphate
  modified_base 19: mod_base = OTHER; note = 2'-O-methylguanosine-3'-phosphate
  modified_base 20: mod_base = OTHER; note = 2'-O-methylguanosine-3'-phosphate
  modified_base 21: mod_base = OTHER; note = 2'-O-methyladenosine-3'-phosphate N-[tris(GalNAc-alkyl)-amidodecanoyl)]-4-hydroxyprolinol Hyp-(GalNAc-alkyl)3
ccaaggctgtgtttgtgggga

SEQ ID NO: 2533 - RNA, 23 nt, synthetic construct
  source 1..23: mol_type = other RNA; note = Description of Artificial Sequence: Synthetic oligonucleotide
  modified_base 1: mod_base = OTHER; note = 2'-O-methyluridine-3'-phosphorothioate
  modified_base 2: mod_base = OTHER; note = 2'-fluorocytidine-3'-phosphorothioate
  modified_base 3: mod_base = OTHER; note = 2'-O-methylcytidine-3'-phosphate
  modified_base 4: mod_base = OTHER; note = 2'-O-methylcytidine-3'-phosphate
  modified_base 5: mod_base = OTHER; note = 2'-O-methylcytidine-3'-phosphate
  modified_base 6: mod_base = OTHER; note = 2'-fluoroadenosine-3'-phosphate
  modified_base 7: mod_base = OTHER; note = 2'-O-methylcytidine-3'-phosphate
  modified_base 8: mod_base = OTHER; note = 2'-fluoroadenosine-3'-phosphate
  modified_base 9: mod_base = OTHER; note = 2'-fluoroadenosine-3'-phosphate
  modified_base 10: mod_base = OTHER; note = 2'-O-methyladenosine-3'-phosphate
  modified_base 11: mod_base = OTHER; note = 2'-O-methylcytidine-3'-phosphate
  modified_base 12: mod_base = OTHER; note = 2'-O-methyladenosine-3'-phosphate
  modified_base 13: mod_base = OTHER; note = 2'-O-methylcytidine-3'-phosphate
  modified_base 14: mod_base = OTHER; note = 2'-fluoroadenosine-3'-phosphate
  modified_base 15: mod_base = OTHER; note = 2'-O-methylguanosine-3'-phosphate
  modified_base 16: mod_base = OTHER; note = 2'-fluorocytidine-3'-phosphate
  modified_base 17: mod_base = OTHER; note = 2'-O-methylcytidine-3'-phosphate
  modified_base 18: mod_base = OTHER; note = 2'-O-methyluridine-3'-phosphate
  modified_base 19: mod_base = OTHER; note = 2'-O-methyluridine-3'-phosphate
  modified_base 20: mod_base = OTHER; note = 2'-O-methylguanosine-3'-phosphate
  modified_base 21: mod_base = OTHER; note = 2'-O-methylguanosine-3'-phosphorothioate
  modified_base 22: mod_base = OTHER; note = 2'-O-methylcytidine-3'-phosphorothioate
  modified_base 23: mod_base = OTHER; note = 2'-O-methylguanosine-3'-phosphate
tccccacaaacacagccttggcg

SEQ ID NO: 2534 - RNA, 21 nt, synthetic construct
  source 1..21: mol_type = other RNA; note = Description of Artificial Sequence: Synthetic oligonucleotide
  modified_base 1: mod_base = OTHER; note = 2'-O-methyluridine-3'-phosphorothioate
  modified_base 2: mod_base = OTHER; note = 2'-O-methylguanosine-3'-phosphorothioate
  modified_base 3: mod_base = OTHER; note = 2'-O-methylguanosine-3'-phosphate
  modified_base 4: mod_base = OTHER; note = 2'-O-methylcytidine-3'-phosphate
  modified_base 5: mod_base = OTHER; note = 2'-O-methylguanosine-3'-phosphate
  modified_base 6: mod_base = OTHER; note = 2'-O-methylcytidine-3'-phosphate
  modified_base 7: mod_base = OTHER; note = 2'-fluorocytidine-3'-phosphate
  modified_base 8: mod_base = OTHER; note = 2'-O-methyladenosine-3'-phosphate
  modified_base 9: mod_base = OTHER; note = 2'-fluoroadenosine-3'-phosphate
  modified_base 10: mod_base = OTHER; note = 2'-fluoroguanosine-3'-phosphate
  modified_base 11: mod_base = OTHER; note = 2'-fluoroguanosine-3'-phosphate
  modified_base 12: mod_base = OTHER; note = 2'-O-methylcytidine-3'-phosphate
  modified_base 13: mod_base = OTHER; note = 2'-O-methyluridine-3'-phosphate
  modified_base 14: mod_base = OTHER; note = 2'-O-methylguanosine-3'-phosphate
  modified_base 15: mod_base = OTHER; note = 2'-O-methyluridine-3'-phosphate
  modified_base 16: mod_base = OTHER; note = 2'-O-methylguanosine-3'-phosphate
  modified_base 17: mod_base = OTHER; note = 2'-O-methyluridine-3'-phosphate
  modified_base 18: mod_base = OTHER; note = 2'-O-methyluridine-3'-phosphate
  modified_base 19: mod_base = OTHER; note = 2'-O-methyluridine-3'-phosphate
  modified_base 20: mod_base = OTHER; note = 2'-O-methylguanosine-3'-phosphate
  modified_base 21: mod_base = OTHER; note = 2'-O-methyluridine-3'-phosphate N-[tris(GalNAc-alkyl)-amidodecanoyl)]-4-hydroxyprolinol Hyp-(GalNAc-alkyl)3
tggcgccaaggctgtgtttgt

SEQ ID NO: 2535 - RNA, 23 nt, synthetic construct
  source 1..23: mol_type = other RNA; note = Description of Artificial Sequence: Synthetic oligonucleotide
  modified_base 1: mod_base = OTHER; note = 2'-O-methyladenosine-3'-phosphorothioate
  modified_base 2: mod_base = OTHER; note = 2'-fluorocytidine-3'-phosphorothioate
  modified_base 3: mod_base = OTHER; note = 2'-O-methyladenosine-3'-phosphate
  modified_base 4: mod_base = OTHER; note = 2'-O-methyladenosine-3'-phosphate
  modified_base 5: mod_base = OTHER; note = 2'-O-methyladenosine-3'-phosphate
  modified_base 6: mod_base = OTHER; note = 2'-fluorocytidine-3'-phosphate
  modified_base 7: mod_base = OTHER; note = 2'-O-methyladenosine-3'-phosphate
  modified_base 8: mod_base = OTHER; note = 2'-fluorocytidine-3'-phosphate
  modified_base 9: mod_base = OTHER; note = 2'-fluoroadenosine-3'-phosphate
  modified_base 10: mod_base = OTHER; note = 2'-O-methylguanosine-3'-phosphate
  modified_base 11: mod_base = OTHER; note = 2'-O-methylcytidine-3'-phosphate
  modified_base 12: mod_base = OTHER; note = 2'-O-methylcytidine-3'-phosphate
  modified_base 13: mod_base = OTHER; note = 2'-O-methyluridine-3'-phosphate
  modified_base 14: mod_base = OTHER; note = 2'-fluorouridine-3'-phosphate
  modified_base 15: mod_base = OTHER; note = 2'-O-methylguanosine-3'-phosphate
  modified_base 16: mod_base = OTHER; note = 2'-fluoroguanosine-3'-phosphate
  modified_base 17: mod_base = OTHER; note = 2'-O-methylcytidine-3'-phosphate
  modified_base 18: mod_base = OTHER; note = 2'-O-methylguanosine-3'-phosphate
  modified_base 19: mod_base = OTHER; note = 2'-O-methylcytidine-3'-phosphate
  modified_base 20: mod_base = OTHER; note = 2'-O-methylcytidine-3'-phosphate
  modified_base 21: mod_base = OTHER; note = 2'-O-methyladenosine-3'-phosphorothioate
  modified_base 22: mod_base = OTHER; note = 2'-O-methyladenosine-3'-phosphorothioate
  modified_base 23: mod_base = OTHER; note = 2'-O-methylguanosine-3'-phosphate
acaaacacagccttggcgccaag

SEQ ID NO: 2536 - RNA, 21 nt, synthetic construct
  source 1..21: mol_type = other RNA; note = Description of Artificial Sequence: Synthetic oligonucleotide
  modified_base 1: mod_base = OTHER; note = 2'-O-methyluridine-3'-phosphorothioate
  modified_base 2: mod_base = OTHER; note = 2'-O-methyluridine-3'-phosphorothioate
  modified_base 3: mod_base = OTHER; note = 2'-O-methylguanosine-3'-phosphate
  modified_base 4: mod_base = OTHER; note = 2'-O-methylguanosine-3'-phosphate
  modified_base 5: mod_base = OTHER; note = 2'-O-methylcytidine-3'-phosphate
  modified_base 6: mod_base = OTHER; note = 2'-O-methylguanosine-3'-phosphate
  modified_base 7: mod_base = OTHER; note = 2'-fluorocytidine-3'-phosphate
  modified_base 8: mod_base = OTHER; note = 2'-O-methylcytidine-3'-phosphate
  modified_base 9: mod_base = OTHER; note = 2'-fluoroadenosine-3'-phosphate
  modified_base 10: mod_base = OTHER; note = 2'-fluoroadenosine-3'-phosphate
  modified_base 11: mod_base = OTHER; note = 2'-fluoroguanosine-3'-phosphate
  modified_base 12: mod_base = OTHER; note = 2'-O-methylguanosine-3'-phosphate
  modified_base 13: mod_base = OTHER; note = 2'-O-methylcytidine-3'-phosphate
  modified_base 14: mod_base = OTHER; note = 2'-O-methyluridine-3'-phosphate
  modified_base 15: mod_base = OTHER; note = 2'-O-methylguanosine-3'-phosphate
  modified_base 16: mod_base = OTHER; note = 2'-O-methyluridine-3'-phosphate
  modified_base 17: mod_base = OTHER; note = 2'-O-methylguanosine-3'-phosphate
  modified_base 18: mod_base = OTHER; note = 2'-O-methyluridine-3'-phosphate
  modified_base 19: mod_base = OTHER; note = 2'-O-methyluridine-3'-phosphate
  modified_base 20: mod_base = OTHER; note = 2'-O-methyluridine-3'-phosphate
  modified_base 21: mod_base = OTHER; note = 2'-O-methylguanosine-3'-phosphate N-[tris(GalNAc-alkyl)-amidodecanoyl)]-4-hydroxyprolinol Hyp-(GalNAc-alkyl)3
ttggcgccaaggctgtgtttg

SEQ ID NO: 2537 - RNA, 23 nt, synthetic construct
  source 1..23: mol_type = other RNA; note = Description of Artificial Sequence: Synthetic oligonucleotide
  modified_base 1: mod_base = OTHER; note = 2'-O-methylcytidine-3'-phosphorothioate
  modified_base 2: mod_base = OTHER; note = 2'-fluoroadenosine-3'-phosphorothioate
  modified_base 3: mod_base = OTHER; note = 2'-O-methyladenosine-3'-phosphate
  modified_base 4: mod_base = OTHER; note = 2'-O-methyladenosine-3'-phosphate
  modified_base 5: mod_base = OTHER; note = 2'-O-methylcytidine-3'-phosphate
  modified_base 6: mod_base = OTHER; note = 2'-fluoroadenosine-3'-phosphate
  modified_base 7: mod_base = OTHER; note = 2'-O-methylcytidine-3'-phosphate
  modified_base 8: mod_base = OTHER; note = 2'-fluoroadenosine-3'-phosphate
  modified_base 9: mod_base = OTHER; note = 2'-fluoroguanosine-3'-phosphate
  modified_base 10: mod_base = OTHER; note = 2'-O-methylcytidine-3'-phosphate
  modified_base 11: mod_base = OTHER; note = 2'-O-methylcytidine-3'-phosphate
  modified_base 12: mod_base = OTHER; note = 2'-O-methyluridine-3'-phosphate
  modified_base 13: mod_base = OTHER; note = 2'-O-methyluridine-3'-phosphate
  modified_base 14: mod_base = OTHER; note = 2'-fluoroguanosine-3'-phosphate
  modified_base 15: mod_base = OTHER; note = 2'-O-methylguanosine-3'-phosphate
  modified_base 16: mod_base = OTHER; note = 2'-fluorocytidine-3'-phosphate
  modified_base 17: mod_base = OTHER; note = 2'-O-methylguanosine-3'-phosphate
  modified_base 18: mod_base = OTHER; note = 2'-O-methylcytidine-3'-phosphate
  modified_base 19: mod_base = OTHER; note = 2'-O-methylcytidine-3'-phosphate
  modified_base 20: mod_base = OTHER; note = 2'-O-methyladenosine-3'-phosphate
  modified_base 21: mod_base = OTHER; note = 2'-O-methyladenosine-3'-phosphorothioate
  modified_base 22: mod_base = OTHER; note = 2'-O-methylguanosine-3'-phosphorothioate
  modified_base 23: mod_base = OTHER; note = 2'-O-methyladenosine-3'-phosphate
caaacacagccttggcgccaaga

SEQ ID NO: 2538 - RNA, 21 nt, synthetic construct
  source 1..21: mol_type = other RNA; note = Description of Artificial Sequence: Synthetic oligonucleotide
  modified_base 1: mod_base = OTHER; note = 2'-O-methyluridine-3'-phosphorothioate
  modified_base 2: mod_base = OTHER; note = 2'-O-methylguanosine-3'-phosphorothioate
  modified_base 3: mod_base = OTHER; note = 2'-O-methyladenosine-3'-phosphate
  modified_base 4: mod_base = OTHER; note = 2'-O-methyladenosine-3'-phosphate
  modified_base 5: mod_base = OTHER; note = 2'-O-methyladenosine-3'-phosphate
  modified_base 6: mod_base = OTHER; note = 2'-O-methylguanosine-3'-phosphate
  modified_base 7: mod_base = OTHER; note = 2'-fluorocytidine-3'-phosphate
  modified_base 8: mod_base = OTHER; note = 2'-O-methyluridine-3'-phosphate
  modified_base 9: mod_base = OTHER; note = 2'-fluorocytidine-3'-phosphate
  modified_base 10: mod_base = OTHER; note = 2'-fluorouridine-3'-phosphate
  modified_base 11: mod_base = OTHER; note = 2'-fluoroguanosine-3'-phosphate
  modified_base 12: mod_base = OTHER; note = 2'-O-methylguanosine-3'-phosphate
  modified_base 13: mod_base = OTHER; note = 2'-O-methylcytidine-3'-phosphate
  modified_base 14: mod_base = OTHER; note = 2'-O-methyluridine-3'-phosphate
  modified_base 15: mod_base = OTHER; note = 2'-O-methylcytidine-3'-phosphate
  modified_base 16: mod_base = OTHER; note = 2'-O-methyluridine-3'-phosphate
  modified_base 17: mod_base = OTHER; note = 2'-O-methyluridine-3'-phosphate
  modified_base 18: mod_base = OTHER; note = 2'-O-methylguanosine-3'-phosphate
  modified_base 19: mod_base = OTHER; note = 2'-O-methylguanosine-3'-phosphate
  modified_base 20: mod_base = OTHER; note = 2'-O-methylcytidine-3'-phosphate
  modified_base 21: mod_base = OTHER; note = 2'-O-methylguanosine-3'-phosphate N-[tris(GalNAc-alkyl)-amidodecanoyl)]-4-hydroxyprolinol Hyp-(GalNAc-alkyl)3
tgaaagctctggctcttggcg

SEQ ID NO: 2539 - RNA, 23 nt, synthetic construct
  source 1..23: mol_type = other RNA; note = Description of Artificial Sequence: Synthetic oligonucleotide
  modified_base 1: mod_base = OTHER; note = 2'-O-methylcytidine-3'-phosphorothioate
  modified_base 2: mod_base = OTHER; note = 2'-fluoroguanosine-3'-phosphorothioate
  modified_base 3: mod_base = OTHER; note = 2'-O-methylcytidine-3'-phosphate
  modified_base 4: mod_base = OTHER; note = 2'-O-methylcytidine-3'-phosphate
  modified_base 5: mod_base = OTHER; note = 2'-O-methyladenosine-3'-phosphate
  modified_base 6: mod_base = OTHER; note = 2'-fluoroadenosine-3'-phosphate
  modified_base 7: mod_base = OTHER; note = 2'-O-methylguanosine-3'-phosphate
  modified_base 8: mod_base = OTHER; note = 2'-fluoroadenosine-3'-phosphate
  modified_base 9: mod_base = OTHER; note = 2'-fluoroguanosine-3'-phosphate
  modified_base 10: mod_base = OTHER; note = 2'-O-methylcytidine-3'-phosphate
  modified_base 11: mod_base = OTHER; note = 2'-O-methylcytidine-3'-phosphate
  modified_base 12: mod_base = OTHER; note = 2'-O-methyladenosine-3'-phosphate
  modified_base 13: mod_base = OTHER; note = 2'-O-methylguanosine-3'-phosphate
  modified_base 14: mod_base = OTHER; note = 2'-fluoroadenosine-3'-phosphate
  modified_base 15: mod_base = OTHER; note = 2'-O-methylguanosine-3'-phosphate
  modified_base 16: mod_base = OTHER; note = 2'-fluorocytidine-3'-phosphate
  modified_base 17: mod_base = OTHER; note = 2'-O-methyluridine-3'-phosphate
  modified_base 18: mod_base = OTHER; note = 2'-O-methyluridine-3'-phosphate
  modified_base 19: mod_base = OTHER; note = 2'-O-methyluridine-3'-phosphate
  modified_base 20: mod_base = OTHER; note = 2'-O-methylcytidine-3'-phosphate
  modified_base 21: mod_base = OTHER; note = 2'-O-methyladenosine-3'-phosphorothioate
  modified_base 22: mod_base = OTHER; note = 2'-O-methylguanosine-3'-phosphorothioate
  modified_base 23: mod_base = OTHER; note = 2'-O-methyladenosine-3'-phosphate
cgccaagagccagagctttcaga

SEQ ID NO: 2540 - RNA, 21 nt, synthetic construct
  source 1..21: mol_type = other RNA; note = Description of Artificial Sequence: Synthetic oligonucleotide
  modified_base 1: mod_base = OTHER; note = 2'-O-methylguanosine-3'-phosphorothioate
  modified_base 2: mod_base = OTHER; note = 2'-O-methyladenosine-3'-phosphorothioate
  modified_base 3: mod_base = OTHER; note = 2'-O-methyladenosine-3'-phosphate
  modified_base 4: mod_base = OTHER; note = 2'-O-methyladenosine-3'-phosphate
  modified_base 5: mod_base = OTHER; note = 2'-O-methylguanosine-3'-phosphate
  modified_base 6: mod_base = OTHER; note = 2'-O-methylcytidine-3'-phosphate
  modified_base 7: mod_base = OTHER; note = 2'-fluorouridine-3'-phosphate
  modified_base 8: mod_base = OTHER; note = 2'-O-methylcytidine-3'-phosphate
  modified_base 9: mod_base = OTHER; note = 2'-fluorouridine-3'-phosphate
  modified_base 10: mod_base = OTHER; note = 2'-fluoroguanosine-3'-phosphate
  modified_base 11: mod_base = OTHER; note = 2'-fluoroguanosine-3'-phosphate
  modified_base 12: mod_base = OTHER; note = 2'-O-methylcytidine-3'-phosphate
  modified_base 13: mod_base = OTHER; note = 2'-O-methyluridine-3'-phosphate
  modified_base 14: mod_base = OTHER; note = 2'-O-methylcytidine-3'-phosphate
  modified_base 15: mod_base = OTHER; note = 2'-O-methyluridine-3'-phosphate
  modified_base 16: mod_base = OTHER; note = 2'-O-methyluridine-3'-phosphate
  modified_base 17: mod_base = OTHER; note = 2'-O-methylguanosine-3'-phosphate
  modified_base 18: mod_base = OTHER; note = 2'-O-methylguanosine-3'-phosphate
  modified_base 19: mod_base = OTHER; note = 2'-O-methylcytidine-3'-phosphate
  modified_base 20: mod_base = OTHER; note = 2'-O-methylguanosine-3'-phosphate
  modified_base 21: mod_base = OTHER; note = 2'-O-methylcytidine-3'-phosphate N-[tris(GalNAc-alkyl)-amidodecanoyl)]-4-hydroxyprolinol Hyp-(GalNAc-alkyl)3
gaaagctctggctcttggcgc

SEQ ID NO: 2541 - RNA, 23 nt, synthetic construct
  source 1..23: mol_type = other RNA; note = Description of Artificial Sequence: Synthetic oligonucleotide
  modified_base 1: mod_base = OTHER; note = 2'-O-methylguanosine-3'-phosphorothioate
  modified_base 2: mod_base = OTHER; note = 2'-fluorocytidine-3'-phosphorothioate
  modified_base 3: mod_base = OTHER; note = 2'-O-methylguanosine-3'-phosphate
  modified_base 4: mod_base = OTHER; note = 2'-O-methylcytidine-3'-phosphate
  modified_base 5: mod_base = OTHER; note = 2'-O-methylcytidine-3'-phosphate
  modified_base 6: mod_base = OTHER; note = 2'-fluoroadenosine-3'-phosphate
  modified_base 7: mod_base = OTHER; note = 2'-O-methyladenosine-3'-phosphate
  modified_base 8: mod_base = OTHER; note = 2'-fluoroguanosine-3'-phosphate
  modified_base 9: mod_base = OTHER; note = 2'-fluoroadenosine-3'-phosphate
  modified_base 10: mod_base = OTHER; note = 2'-O-methylguanosine-3'-phosphate
  modified_base 11: mod_base = OTHER; note = 2'-O-methylcytidine-3'-phosphate
  modified_base 12: mod_base = OTHER; note = 2'-O-methylcytidine-3'-phosphate
  modified_base 13: mod_base = OTHER; note = 2'-O-methyladenosine-3'-phosphate
  modified_base 14: mod_base = OTHER; note = 2'-fluoroguanosine-3'-phosphate
  modified_base 15: mod_base = OTHER; note = 2'-O-methyladenosine-3'-phosphate
  modified_base 16: mod_base = OTHER; note = 2'-fluoroguanosine-3'-phosphate
  modified_base 17: mod_base = OTHER; note = 2'-O-methylcytidine-3'-phosphate
  modified_base 18: mod_base = OTHER; note = 2'-O-methyluridine-3'-phosphate
  modified_base 19: mod_base = OTHER; note = 2'-O-methyluridine-3'-phosphate
  modified_base 20: mod_base = OTHER; note = 2'-O-methyluridine-3'-phosphate
  modified_base 21: mod_base = OTHER; note = 2'-O-methylcytidine-3'-phosphorothioate
  modified_base 22: mod_base = OTHER; note = 2'-O-methyladenosine-3'-phosphorothioate
  modified_base 23: mod_base = OTHER; note = 2'-O-methylguanosine-3'-phosphate
gcgccaagagccagagctttcag

SEQ ID NO: 2542 - RNA, 21 nt, synthetic construct
  source 1..21: mol_type = other RNA; note = Description of Artificial Sequence: Synthetic oligonucleotide
  modified_base 1: mod_base = OTHER; note = 2'-O-methylguanosine-3'-phosphorothioate
  modified_base 2: mod_base = OTHER; note = 2'-O-methyluridine-3'-phosphorothioate
  modified_base 3: mod_base = OTHER; note = 2'-O-methyluridine-3'-phosphate
  modified_base 4: mod_base = OTHER; note = 2'-O-methylcytidine-3'-phosphate
  modified_base 5: mod_base = OTHER; note = 2'-O-methyluridine-3'-phosphate
  modified_base 6: mod_base = OTHER; note = 2'-O-methylguanosine-3'-phosphate
  modified_base 7: mod_base = OTHER; note = 2'-fluoroadenosine-3'-phosphate
  modified_base 8: mod_base = OTHER; note = 2'-O-methyladenosine-3'-phosphate
  modified_base 9: mod_base = OTHER; note = 2'-fluoroadenosine-3'-phosphate
  modified_base 10: mod_base = OTHER; note = 2'-fluoroguanosine-3'-phosphate
  modified_base 11: mod_base = OTHER; note = 2'-fluorocytidine-3'-phosphate
  modified_base 12: mod_base = OTHER; note = 2'-O-methyluridine-3'-phosphate
  modified_base 13: mod_base = OTHER; note = 2'-O-methylcytidine-3'-phosphate
  modified_base 14: mod_base = OTHER; note = 2'-O-methyluridine-3'-phosphate
  modified_base 15: mod_base = OTHER; note = 2'-O-methylguanosine-3'-phosphate
  modified_base 16: mod_base = OTHER; note = 2'-O-methylguanosine-3'-phosphate
  modified_base 17: mod_base = OTHER; note = 2'-O-methylcytidine-3'-phosphate
  modified_base 18: mod_base = OTHER; note = 2'-O-methyluridine-3'-phosphate
  modified_base 19: mod_base = OTHER; note = 2'-O-methylcytidine-3'-phosphate
  modified_base 20: mod_base = OTHER; note = 2'-O-methyluridine-3'-phosphate
  modified_base 21: mod_base = OTHER; note = 2'-O-methyluridine-3'-phosphate N-[tris(GalNAc-alkyl)-amidodecanoyl)]-4-hydroxyprolinol Hyp-(GalNAc-alkyl)3
gttctgaaagctctggctctt

SEQ ID NO: 2543 - RNA, 23 nt, synthetic construct
  source 1..23: mol_type = other RNA; note = Description of Artificial Sequence: Synthetic oligonucleotide
  modified_base 1: mod_base = OTHER; note = 2'-O-methyladenosine-3'-phosphorothioate
  modified_base 2: mod_base = OTHER; note = 2'-fluoroadenosine-3'-phosphorothioate
  modified_base 3: mod_base = OTHER; note = 2'-O-methylguanosine-3'-phosphate
  modified_base 4: mod_base = OTHER; note = 2'-O-methyladenosine-3'-phosphate
  modified_base 5: mod_base = OTHER; note = 2'-O-methylguanosine-3'-phosphate
  modified_base 6: mod_base = OTHER; note = 2'-fluorocytidine-3'-phosphate
  modified_base 7: mod_base = OTHER; note = 2'-O-methylcytidine-3'-phosphate
  modified_base 8: mod_base = OTHER; note = 2'-fluoroadenosine-3'-phosphate
  modified_base 9: mod_base = OTHER; note = 2'-fluoroguanosine-3'-phosphate
  modified_base 10: mod_base = OTHER; note = 2'-O-methyladenosine-3'-phosphate
  modified_base 11: mod_base = OTHER; note = 2'-O-methylguanosine-3'-phosphate
  modified_base 12: mod_base = OTHER; note = 2'-O-methylcytidine-3'-phosphate
  modified_base 13: mod_base = OTHER; note = 2'-O-methyluridine-3'-phosphate
  modified_base 14: mod_base = OTHER; note = 2'-fluorouridine-3'-phosphate
  modified_base 15: mod_base = OTHER; note = 2'-O-methyluridine-3'-phosphate
  modified_base 16: mod_base = OTHER; note = 2'-fluorocytidine-3'-phosphate
  modified_base 17: mod_base = OTHER; note = 2'-O-methyladenosine-3'-phosphate
  modified_base 18: mod_base = OTHER; note = 2'-O-methylguanosine-3'-phosphate
  modified_base 19: mod_base = OTHER; note = 2'-O-methyladenosine-3'-phosphate
  modified_base 20: mod_base = OTHER; note = 2'-O-methyladenosine-3'-phosphate
  modified_base 21: mod_base = OTHER; note = 2'-O-methylcytidine-3'-phosphorothioate
  modified_base 22: mod_base = OTHER; note = 2'-O-methyladenosine-3'-phosphorothioate
  modified_base 23: mod_base = OTHER; note = 2'-O-methyluridine-3'-phosphate
aagagccagagctttcagaacat

SEQ ID NO: 2544 - RNA, 21 nt, synthetic construct
  source 1..21: mol_type = other RNA; note = Description of Artificial Sequence: Synthetic oligonucleotide
  modified_base 1: mod_base = OTHER; note = 2'-O-methyluridine-3'-phosphorothioate
  modified_base 2: mod_base = OTHER; note = 2'-O-methylguanosine-3'-phosphorothioate
  modified_base 3: mod_base = OTHER; note = 2'-O-methyluridine-3'-phosphate
  modified_base 4: mod_base = OTHER; note = 2'-O-methyluridine-3'-phosphate
  modified_base 5: mod_base = OTHER; note = 2'-O-methylcytidine-3'-phosphate
  modified_base 6: mod_base = OTHER; note = 2'-O-methyluridine-3'-phosphate
  modified_base 7: mod_base = OTHER; note = 2'-fluoroguanosine-3'-phosphate
  modified_base 8: mod_base = OTHER; note = 2'-O-methyladenosine-3'-phosphate
  modified_base 9: mod_base = OTHER; note = 2'-fluoroadenosine-3'-phosphate
  modified_base 10: mod_base = OTHER; note = 2'-fluoroadenosine-3'-phosphate
  modified_base 11: mod_base = OTHER; note = 2'-fluoroguanosine-3'-phosphate
  modified_base 12: mod_base = OTHER; note = 2'-O-methylcytidine-3'-phosphate
  modified_base 13: mod_base = OTHER; note = 2'-O-methyluridine-3'-phosphate
  modified_base 14: mod_base = OTHER; note = 2'-O-methylcytidine-3'-phosphate
  modified_base 15: mod_base = OTHER; note = 2'-O-methyluridine-3'-phosphate
  modified_base 16: mod_base = OTHER; note = 2'-O-methylguanosine-3'-phosphate
  modified_base 17: mod_base = OTHER; note = 2'-O-methylguanosine-3'-phosphate
  modified_base 18: mod_base = OTHER; note = 2'-O-methylcytidine-3'-phosphate
  modified_base 19: mod_base = OTHER; note = 2'-O-methyluridine-3'-phosphate
  modified_base 20: mod_base = OTHER; note = 2'-O-methylcytidine-3'-phosphate
  modified_base 21: mod_base = OTHER; note = 2'-O-methyluridine-3'-phosphate N-[tris(GalNAc-alkyl)-amidodecanoyl)]-4-hydroxyprolinol Hyp-(GalNAc-alkyl)3
tgttctgaaagctctggctct

SEQ ID NO: 2545 - RNA, 23 nt, synthetic construct
  source 1..23: mol_type = other RNA; note = Description of Artificial Sequence: Synthetic oligonucleotide
  modified_base 1: mod_base = OTHER; note = 2'-O-methyladenosine-3'-phosphorothioate
  modified_base 2: mod_base = OTHER; note = 2'-fluoroguanosine-3'-phosphorothioate
  modified_base 3: mod_base = OTHER; note = 2'-O-methyladenosine-3'-phosphate
  modified_base 4: mod_base = OTHER; note = 2'-O-methylguanosine-3'-phosphate
  modified_base 5: mod_base = OTHER; note = 2'-O-methylcytidine-3'-phosphate
  modified_base 6: mod_base = OTHER; note = 2'-fluorocytidine-3'-phosphate
  modified_base 7: mod_base = OTHER; note = 2'-O-methyladenosine-3'-phosphate
  modified_base 8: mod_base = OTHER; note = 2'-fluoroguanosine-3'-phosphate
  modified_base 9: mod_base = OTHER; note = 2'-fluoroadenosine-3'-phosphate
  modified_base 10: mod_base = OTHER; note = 2'-O-methylguanosine-3'-phosphate
  modified_base 11: mod_base = OTHER; note = 2'-O-methylcytidine-3'-phosphate
  modified_base 12: mod_base = OTHER; note = 2'-O-methyluridine-3'-phosphate
  modified_base 13: mod_base = OTHER; note = 2'-O-methyluridine-3'-phosphate
  modified_base 14: mod_base = OTHER; note = 2'-fluorouridine-3'-phosphate
  modified_base 15: mod_base = OTHER; note = 2'-O-methylcytidine-3'-phosphate
  modified_base 16: mod_base = OTHER; note = 2'-fluoroadenosine-3'-phosphate
  modified_base 17: mod_base = OTHER; note = 2'-O-methylguanosine-3'-phosphate
  modified_base 18: mod_base = OTHER; note = 2'-O-methyladenosine-3'-phosphate
  modified_base 19: mod_base = OTHER; note = 2'-O-methyladenosine-3'-phosphate
  modified_base 20: mod_base = OTHER; note = 2'-O-methylcytidine-3'-phosphate
  modified_base 21: mod_base = OTHER; note = 2'-O-methyladenosine-3'-phosphorothioate
  modified_base 22: mod_base = OTHER; note = 2'-O-methyluridine-3'-phosphorothioate
  modified_base 23: mod_base = OTHER; note = 2'-O-methylcytidine-3'-phosphate
agagccagagctttcagaacatc

SEQ ID NO: 2546 - RNA, 21 nt, synthetic construct
  source 1..21: mol_type = other RNA; note = Description of Artificial Sequence: Synthetic oligonucleotide
  modified_base 1: mod_base = OTHER; note = 2'-O-methylcytidine-3'-phosphorothioate
  modified_base 2: mod_base = OTHER; note = 2'-O-methyladenosine-3'-phosphorothioate
  modified_base 3: mod_base = OTHER; note = 2'-O-methylguanosine-3'-phosphate
  modified_base 4: mod_base = OTHER; note = 2'-O-methylcytidine-3'-phosphate
  modified_base 5: mod_base = OTHER; note = 2'-O-methylcytidine-3'-phosphate
  modified_base 6: mod_base = OTHER; note = 2'-O-methyladenosine-3'-phosphate
  modified_base 7: mod_base = OTHER; note = 2'-fluorocytidine-3'-phosphate
  modified_base 8: mod_base = OTHER; note = 2'-O-methyluridine-3'-phosphate
  modified_base 9: mod_base = OTHER; note = 2'-fluoroadenosine-3'-phosphate
  modified_base 10: mod_base = OTHER; note = 2'-fluorouridine-3'-phosphate
  modified_base 11: mod_base = OTHER; note = 2'-fluorouridine-3'-phosphate
  modified_base 12: mod_base = OTHER; note = 2'-O-methylguanosine-3'-phosphate
  modified_base 13: mod_base = OTHER; note = 2'-O-methyladenosine-3'-phosphate
  modified_base 14: mod_base = OTHER; note = 2'-O-methyluridine-3'-phosphate
  modified_base 15: mod_base = OTHER; note = 2'-O-methylguanosine-3'-phosphate
  modified_base 16: mod_base = OTHER; note = 2'-O-methyluridine-3'-phosphate
  modified_base 17: mod_base = OTHER; note = 2'-O-methyluridine-3'-phosphate
  modified_base 18: mod_base = OTHER; note = 2'-O-methylcytidine-3'-phosphate
  modified_base 19: mod_base = OTHER; note = 2'-O-methyluridine-3'-phosphate
  modified_base 20: mod_base = OTHER; note = 2'-O-methylguanosine-3'-phosphate
  modified_base 21: mod_base = OTHER; note = 2'-O-methylcytidine-3'-phosphate N-[tris(GalNAc-alkyl)-amidodecanoyl)]-4-hydroxyprolinol Hyp-(GalNAc-alkyl)3
cagccactattgatgttctgc

SEQ ID NO: 2547 - RNA, 23 nt, synthetic construct
  source 1..23: mol_type = other RNA; note = Description of Artificial Sequence: Synthetic oligonucleotide
  modified_base 1: mod_base = OTHER; note = 2'-O-methylguanosine-3'-phosphorothioate
  modified_base 2: mod_base = OTHER; note = 2'-fluorocytidine-3'-phosphorothioate
  modified_base 3: mod_base = OTHER; note = 2'-O-methyladenosine-3'-phosphate
  modified_base 4: mod_base = OTHER; note = 2'-O-methylguanosine-3'-phosphate
  modified_base 5: mod_base = OTHER; note = 2'-O-methyladenosine-3'-phosphate
  modified_base 6: mod_base = OTHER; note = 2'-fluoroadenosine-3'-phosphate
  modified_base 7: mod_base = OTHER; note = 2'-O-methylcytidine-3'-phosphate
  modified_base 8: mod_base = OTHER; note = 2'-fluoroadenosine-3'-phosphate
  modified_base 9: mod_base = OTHER; note = 2'-fluorouridine-3'-phosphate
  modified_base 10: mod_base = OTHER; note = 2'-O-methylcytidine-3'-phosphate
  modified_base 11: mod_base = OTHER; note = 2'-O-methyladenosine-3'-phosphate
  modified_base 12: mod_base = OTHER; note = 2'-O-methyladenosine-3'-phosphate
  modified_base 13: mod_base = OTHER; note = 2'-O-methyluridine-3'-phosphate
  modified_base 14: mod_base = OTHER; note = 2'-fluoroadenosine-3'-phosphate
  modified_base 15: mod_base = OTHER; note = 2'-O-methylguanosine-3'-phosphate
  modified_base 16: mod_base = OTHER; note = 2'-fluorouridine-3'-phosphate
  modified_base 17: mod_base = OTHER; note = 2'-O-methylguanosine-3'-phosphate
  modified_base 18: mod_base = OTHER; note = 2'-O-methylguanosine-3'-phosphate
  modified_base 19: mod_base = OTHER; note = 2'-O-methylcytidine-3'-phosphate
  modified_base 20: mod_base = OTHER; note = 2'-O-methyluridine-3'-phosphate
  modified_base 21: mod_base = OTHER; note = 2'-O-methylguanosine-3'-phosphorothioate
  modified_base 22: mod_base = OTHER; note = 2'-O-methylguanosine-3'-phosphorothioate
  modified_base 23: mod_base = OTHER; note = 2'-O-methylcytidine-3'-phosphate
gcagaacatcaatagtggctggc

SEQ ID NO: 2548 - RNA, 21 nt, synthetic construct
  source 1..21: mol_type = other RNA; note = Description of Artificial Sequence: Synthetic oligonucleotide
  modified_base 1: mod_base = OTHER; note = 2'-O-methyladenosine-3'-phosphorothioate
  modified_base 2: mod_base = OTHER; note = 2'-O-methylguanosine-3'-phosphorothioate
  modified_base 3: mod_base = OTHER; note = 2'-O-methylcytidine-3'-phosphate
  modified_base 4: mod_base = OTHER; note = 2'-O-methylcytidine-3'-phosphate
  modified_base 5: mod_base = OTHER; note = 2'-O-methyladenosine-3'-phosphate
  modified_base 6: mod_base = OTHER; note = 2'-O-methylcytidine-3'-phosphate
  modified_base 7: mod_base = OTHER; note = 2'-fluorouridine-3'-phosphate
  modified_base 8: mod_base = OTHER; note = 2'-O-methyladenosine-3'-phosphate
  modified_base 9: mod_base = OTHER; note = 2'-fluorouridine-3'-phosphate
  modified_base 10: mod_base = OTHER; note = 2'-fluorouridine-3'-phosphate
  modified_base 11: mod_base = OTHER; note = 2'-fluoroguanosine-3'-phosphate
  modified_base 12: mod_base = OTHER; note = 2'-O-methyladenosine-3'-phosphate
  modified_base 13: mod_base = OTHER; note = 2'-O-methyluridine-3'-phosphate
  modified_base 14: mod_base = OTHER; note = 2'-O-methylguanosine-3'-phosphate
  modified_base 15: mod_base = OTHER; note = 2'-O-methyluridine-3'-phosphate
  modified_base 16: mod_base = OTHER; note = 2'-O-methyluridine-3'-phosphate
  modified_base 17: mod_base = OTHER; note = 2'-O-methylcytidine-3'-phosphate
  modified_base 18: mod_base = OTHER; note = 2'-O-methyluridine-3'-phosphate
  modified_base 19: mod_base = OTHER; note = 2'-O-methylguanosine-3'-phosphate
  modified_base 20: mod_base = OTHER; note = 2'-O-methylcytidine-3'-phosphate
  modified_base 21: mod_base = OTHER; note = 2'-O-methylcytidine-3'-phosphate N-[tris(GalNAc-alkyl)-amidodecanoyl)]-4-hydroxyprolinol Hyp-(GalNAc-alkyl)3
agccactattgatgttctgcc

SEQ ID NO: 2549 - RNA, 23 nt, synthetic construct
  source 1..23: mol_type = other RNA; note = Description of Artificial Sequence: Synthetic oligonucleotide
  modified_base 1: mod_base = OTHER; note = 2'-O-methylguanosine-3'-phosphorothioate
  modified_base 2: mod_base = OTHER; note = 2'-fluoroguanosine-3'-phosphorothioate
  modified_base 3: mod_base = OTHER; note = 2'-O-methylcytidine-3'-phosphate
  modified_base 4: mod_base = OTHER; note = 2'-O-methyladenosine-3'-phosphate
  modified_base 5: mod_base = OTHER; note = 2'-O-methylguanosine-3'-phosphate
  modified_base 6: mod_base = OTHER; note = 2'-fluoroadenosine-3'-phosphate
  modified_base 7: mod_base = OTHER; note = 2'-O-methyladenosine-3'-phosphate
  modified_base 8: mod_base = OTHER; note = 2'-fluorocytidine-3'-phosphate
  modified_base 9: mod_base = OTHER; note = 2'-fluoroadenosine-3'-phosphate
  modified_base 10: mod_base = OTHER; note = 2'-O-methyluridine-3'-phosphate
  modified_base 11: mod_base = OTHER; note = 2'-O-methylcytidine-3'-phosphate
  modified_base 12: mod_base = OTHER; note = 2'-O-methyladenosine-3'-phosphate
  modified_base 13: mod_base = OTHER; note = 2'-O-methyladenosine-3'-phosphate
  modified_base 14: mod_base = OTHER; note = 2'-fluorouridine-3'-phosphate
  modified_base 15: mod_base = OTHER; note = 2'-O-methyladenosine-3'-phosphate
  modified_base 16: mod_base = OTHER; note = 2'-fluoroguanosine-3'-phosphate
  modified_base 17: mod_base = OTHER; note = 2'-O-methyluridine-3'-phosphate
  modified_base 18: mod_base = OTHER; note = 2'-O-methylguanosine-3'-phosphate
  modified_base 19: mod_base = OTHER; note = 2'-O-methylguanosine-3'-phosphate
  modified_base 20: mod_base = OTHER; note = 2'-O-methylcytidine-3'-phosphate
  modified_base 21: mod_base = OTHER; note = 2'-O-methyluridine-3'-phosphorothioate
  modified_base 22: mod_base = OTHER; note = 2'-O-methylguanosine-3'-phosphorothioate
  modified_base 23: mod_base = OTHER; note = 2'-O-methylguanosine-3'-phosphate
ggcagaacatcaatagtggctgg

SEQ ID NO: 2550 - RNA, 21 nt, synthetic construct
  source 1..21: mol_type = other RNA; note = Description of Artificial Sequence: Synthetic oligonucleotide
  modified_base 1: mod_base = OTHER; note = 2'-O-methylguanosine-3'-phosphorothioate
  modified_base 2: mod_base = OTHER; note = 2'-O-methyluridine-3'-phosphorothioate
  modified_base 3: mod_base = OTHER; note = 2'-O-methylguanosine-3'-phosphate
  modified_base 4: mod_base = OTHER; note = 2'-O-methylcytidine-3'-phosphate
  modified_base 5: mod_base = OTHER; note = 2'-O-methylcytidine-3'-phosphate
  modified_base 6: mod_base = OTHER; note = 2'-O-methyladenosine-3'-phosphate
  modified_base 7: mod_base = OTHER; note = 2'-fluoroguanosine-3'-phosphate
  modified_base 8: mod_base = OTHER; note = 2'-O-methylcytidine-3'-phosphate
  modified_base 9: mod_base = OTHER; note = 2'-fluorocytidine-3'-phosphate
  modified_base 10: mod_base = OTHER; note = 2'-fluoroadenosine-3'-phosphate
  modified_base 11: mod_base = OTHER; note = 2'-fluorocytidine-3'-phosphate
  modified_base 12: mod_base = OTHER; note = 2'-O-methyluridine-3'-phosphate
  modified_base 13: mod_base = OTHER; note = 2'-O-methyladenosine-3'-phosphate
  modified_base 14: mod_base = OTHER; note = 2'-O-methyluridine-3'-phosphate
  modified_base 15: mod_base = OTHER; note = 2'-O-methyluridine-3'-phosphate
  modified_base 16: mod_base = OTHER; note = 2'-O-methylguanosine-3'-phosphate
  modified_base 17: mod_base = OTHER; note = 2'-O-methyladenosine-3'-phosphate
  modified_base 18: mod_base = OTHER; note = 2'-O-methyluridine-3'-phosphate
  modified_base 19: mod_base = OTHER; note = 2'-O-methylguanosine-3'-phosphate
  modified_base 20: mod_base = OTHER; note = 2'-O-methyluridine-3'-phosphate
  modified_base 21: mod_base = OTHER; note = 2'-O-methyluridine-3'-phosphate N-[tris(GalNAc-alkyl)-amidodecanoyl)]-4-hydroxyprolinol Hyp-(GalNAc-alkyl)3
gtgccagccactattgatgtt

SEQ ID NO: 2551 - RNA, 23 nt, synthetic construct
  source 1..23: mol_type = other RNA; note = Description of Artificial Sequence: Synthetic oligonucleotide
  modified_base 1: mod_base = OTHER; note = 2'-O-methyladenosine-3'-phosphorothioate
  modified_base 2: mod_base = OTHER; note = 2'-fluoroadenosine-3'-phosphorothioate
  modified_base 3: mod_base = OTHER; note = 2'-O-methylcytidine-3'-phosphate
  modified_base 4: mod_base = OTHER; note = 2'-O-methyladenosine-3'-phosphate
  modified_base 5: mod_base = OTHER; note = 2'-O-methyluridine-3'-phosphate
  modified_base 6: mod_base = OTHER; note = 2'-fluorocytidine-3'-phosphate
  modified_base 7: mod_base = OTHER; note = 2'-O-methyladenosine-3'-phosphate
  modified_base 8: mod_base = OTHER; note = 2'-fluoroadenosine-3'-phosphate
  modified_base 9: mod_base = OTHER; note = 2'-fluorouridine-3'-phosphate
  modified_base 10: mod_base = OTHER; note = 2'-O-methyladenosine-3'-phosphate
  modified_base 11: mod_base = OTHER; note = 2'-O-methylguanosine-3'-phosphate
  modified_base 12: mod_base = OTHER; note = 2'-O-methyluridine-3'-phosphate
  modified_base 13: mod_base = OTHER; note = 2'-O-methylguanosine-3'-phosphate
  modified_base 14: mod_base = OTHER; note = 2'-fluoroguanosine-3'-phosphate
  modified_base 15: mod_base = OTHER; note = 2'-O-methylcytidine-3'-phosphate
  modified_base 16: mod_base = OTHER; note = 2'-fluorouridine-3'-phosphate
  modified_base 17: mod_base = OTHER; note = 2'-O-methylguanosine-3'-phosphate
  modified_base 18: mod_base = OTHER; note = 2'-O-methylguanosine-3'-phosphate
  modified_base 19: mod_base = OTHER; note = 2'-O-methylcytidine-3'-phosphate
  modified_base 20: mod_base = OTHER; note = 2'-O-methyladenosine-3'-phosphate
  modified_base 21: mod_base = OTHER; note = 2'-O-methylcytidine-3'-phosphorothioate
  modified_base 22: mod_base = OTHER; note = 2'-O-methylcytidine-3'-phosphorothioate
  modified_base 23: mod_base = OTHER; note = 2'-O-methylcytidine-3'-phosphate
aacatcaatagtggctggcaccc

SEQ ID NO: 2552 - RNA, 21 nt, synthetic construct
  source 1..21: mol_type = other RNA; note = Description of Artificial Sequence: Synthetic oligonucleotide
  modified_base 1: mod_base = OTHER; note = 2'-O-methylguanosine-3'-phosphorothioate
  modified_base 2: mod_base = OTHER; note = 2'-O-methylguanosine-3'-phosphorothioate
  modified_base 3: mod_base = OTHER; note = 2'-O-methyluridine-3'-phosphate
  modified_base 4: mod_base = OTHER; note = 2'-O-methylguanosine-3'-phosphate
  modified_base 5: mod_base = OTHER; note = 2'-O-methylcytidine-3'-phosphate
  modified_base 6: mod_base = OTHER; note = 2'-O-methylcytidine-3'-phosphate
  modified_base 7: mod_base = OTHER; note = 2'-fluoroadenosine-3'-phosphate
  modified_base 8: mod_base = OTHER; note = 2'-O-methylguanosine-3'-phosphate
  modified_base 9: mod_base = OTHER; note = 2'-fluorocytidine-3'-phosphate
  modified_base 10: mod_base = OTHER; note = 2'-fluorocytidine-3'-phosphate
  modified_base 11: mod_base = OTHER; note = 2'-fluoroadenosine-3'-phosphate
  modified_base 12: mod_base = OTHER; note = 2'-O-methylcytidine-3'-phosphate
  modified_base 13: mod_base = OTHER; note = 2'-O-methyluridine-3'-phosphate
  modified_base 14: mod_base = OTHER; note = 2'-O-methyladenosine-3'-phosphate
  modified_base 15: mod_base = OTHER; note = 2'-O-methyluridine-3'-phosphate
  modified_base 16: mod_base = OTHER; note = 2'-O-methyluridine-3'-phosphate
  modified_base 17: mod_base = OTHER; note = 2'-O-methylguanosine-3'-phosphate
  modified_base 18: mod_base = OTHER; note = 2'-O-methyladenosine-3'-phosphate
  modified_base 19: mod_base = OTHER; note = 2'-O-methyluridine-3'-phosphate
  modified_base 20: mod_base = OTHER; note = 2'-O-methylguanosine-3'-phosphate
  modified_base 21: mod_base = OTHER; note = 2'-O-methyluridine-3'-phosphate N-[tris(GalNAc-alkyl)-amidodecanoyl)]-4-hydroxyprolinol Hyp-(GalNAc-alkyl)3
ggtgccagccactattgatgt

SEQ ID NO: 2553 - RNA, 23 nt, synthetic construct
  source 1..23: mol_type = other RNA; note = Description of Artificial Sequence: Synthetic oligonucleotide
  modified_base 1: mod_base = OTHER; note = 2'-O-methyladenosine-3'-phosphorothioate
  modified_base 2: mod_base = OTHER; note = 2'-fluorocytidine-3'-phosphorothioate
  modified_base 3: mod_base = OTHER; note = 2'-O-methyladenosine-3'-phosphate
  modified_base 4: mod_base = OTHER; note = 2'-O-methyluridine-3'-phosphate
  modified_base 5: mod_base = OTHER; note = 2'-O-methylcytidine-3'-phosphate
  modified_base 6: mod_base = OTHER; note = 2'-fluoroadenosine-3'-phosphate
  modified_base 7: mod_base = OTHER; note = 2'-O-methyladenosine-3'-phosphate
  modified_base 8: mod_base = OTHER; note = 2'-fluorouridine-3'-phosphate
  modified_base 9: mod_base = OTHER; note = 2'-fluoroadenosine-3'-phosphate
  modified_base 10: mod_base = OTHER; note = 2'-O-methylguanosine-3'-phosphate
  modified_base 11: mod_base = OTHER; note = 2'-O-methyluridine-3'-phosphate
  modified_base 12: mod_base = OTHER; note = 2'-O-methylguanosine-3'-phosphate
  modified_base 13: mod_base = OTHER; note = 2'-O-methylguanosine-3'-phosphate
  modified_base 14: mod_base = OTHER; note = 2'-fluorocytidine-3'-phosphate
  modified_base 15: mod_base = OTHER; note = 2'-O-methyluridine-3'-phosphate
  modified_base 16: mod_base = OTHER; note = 2'-fluoroguanosine-3'-phosphate
  modified_base 17: mod_base = OTHER; note = 2'-O-methylguanosine-3'-phosphate
  modified_base 18: mod_base = OTHER; note = 2'-O-methylcytidine-3'-phosphate
  modified_base 19: mod_base = OTHER; note = 2'-O-methyladenosine-3'-phosphate
  modified_base 20: mod_base = OTHER; note = 2'-O-methylcytidine-3'-phosphate
  modified_base 21: mod_base = OTHER; note = 2'-O-methylcytidine-3'-phosphorothioate
  modified_base 22: mod_base = OTHER; note = 2'-O-methylcytidine-3'-phosphorothioate
  modified_base 23: mod_base = OTHER; note = 2'-O-methylcytidine-3'-phosphate
acatcaatagtggctggcacccc

SEQ ID NO: 2554 - RNA, 21 nt, synthetic construct
  source 1..21: mol_type = other RNA; note = Description of Artificial Sequence: Synthetic oligonucleotide
  modified_base 1: mod_base = OTHER; note = 2'-O-methyladenosine-3'-phosphorothioate
  modified_base 2: mod_base = OTHER; note = 2'-O-methylcytidine-3'-phosphorothioate
  modified_base 3: mod_base = OTHER; note = 2'-O-methyladenosine-3'-phosphate
  modified_base 4: mod_base = OTHER; note = 2'-O-methyladenosine-3'-phosphate
  modified_base 5: mod_base = OTHER; note = 2'-O-methylguanosine-3'-phosphate
  modified_base 6: mod_base = OTHER; note = 2'-O-methylguanosine-3'-phosphate
  modified_base 7: mod_base = OTHER; note = 2'-fluoroadenosine-3'-phosphate
  modified_base 8: mod_base = OTHER; note = 2'-O-methylcytidine-3'-phosphate
  modified_base 9: mod_base = OTHER; note = 2'-fluorocytidine-3'-phosphate
  modified_base 10: mod_base = OTHER; note = 2'-fluoroguanosine-3'-phosphate
  modified_base 11: mod_base = OTHER; note = 2'-fluoroadenosine-3'-phosphate
  modified_base 12: mod_base = OTHER; note = 2'-O-methylguanosine-3'-phosphate
  modified_base 13: mod_base = OTHER; note = 2'-O-methyladenosine-3'-phosphate
  modified_base 14: mod_base = OTHER; note = 2'-O-methyladenosine-3'-phosphate
  modified_base 15: mod_base = OTHER; note = 2'-O-methylguanosine-3'-phosphate
  modified_base 16: mod_base = OTHER; note = 2'-O-methyluridine-3'-phosphate
  modified_base 17: mod_base = OTHER; note = 2'-O-methylcytidine-3'-phosphate
  modified_base 18: mod_base = OTHER; note = 2'-O-methyladenosine-3'-phosphate
  modified_base 19: mod_base = OTHER; note = 2'-O-methylcytidine-3'-phosphate
  modified_base 20: mod_base = OTHER; note = 2'-O-methylcytidine-3'-phosphate
  modified_base 21: mod_base = OTHER; note = 2'-O-methyladenosine-3'-phosphate N-[tris(GalNAc-alkyl)-amidodecanoyl)]-4-hydroxyprolinol Hyp-(GalNAc-alkyl)3
acaaggaccgagaagtcacca

SEQ ID NO: 2555 - RNA, 23 nt, synthetic construct
  source 1..23: mol_type = other RNA; note = Description of Artificial Sequence: Synthetic oligonucleotide
  modified_base 1: mod_base = OTHER; note = 2'-O-methyluridine-3'-phosphorothioate
  modified_base 2: mod_base = OTHER; note = 2'-fluoroguanosine-3'-phosphorothioate
  modified_base 3: mod_base = OTHER; note = 2'-O-methylguanosine-3'-phosphate
  modified_base 4: mod_base = OTHER; note = 2'-O-methyluridine-3'-phosphate
  modified_base 5: mod_base = OTHER; note = 2'-O-methylguanosine-3'-phosphate
  modified_base 6: mod_base = OTHER; note = 2'-fluoroadenosine-3'-phosphate
  modified_base 7: mod_base = OTHER; note = 2'-O-methylcytidine-3'-phosphate
  modified_base 8: mod_base = OTHER; note = 2'-fluorouridine-3'-phosphate
  modified_base 9: mod_base = OTHER; note = 2'-fluorouridine-3'-phosphate
  modified_base 10: mod_base = OTHER; note = 2'-O-methylcytidine-3'-phosphate
  modified_base 11: mod_base = OTHER; note = 2'-O-methyluridine-3'-phosphate
  modified_base 12: mod_base = OTHER; note = 2'-O-methylcytidine-3'-phosphate
  modified_base 13: mod_base = OTHER; note = 2'-O-methylguanosine-3'-phosphate
  modified_base 14: mod_base = OTHER; note = 2'-fluoroguanosine-3'-phosphate
  modified_base 15: mod_base = OTHER; note = 2'-O-methyluridine-3'-phosphate
  modified_base 16: mod_base = OTHER; note = 2'-fluorocytidine-3'-phosphate
  modified_base 17: mod_base = OTHER; note = 2'-O-methylcytidine-3'-phosphate
  modified_base 18: mod_base = OTHER; note = 2'-O-methyluridine-3'-phosphate
  modified_base 19: mod_base = OTHER; note = 2'-O-methyluridine-3'-phosphate
  modified_base 20: mod_base = OTHER; note = 2'-O-methylguanosine-3'-phosphate
  modified_base 21: mod_base = OTHER; note = 2'-O-methyluridine-3'-phosphorothioate
  modified_base 22: mod_base = OTHER; note = 2'-O-methyladenosine-3'-phosphorothioate
  modified_base 23: mod_base = OTHER; note = 2'-O-methylguanosine-3'-phosphate
tggtgacttctcggtccttgtag

SEQ ID NO: 2556 - RNA, 21 nt, synthetic construct
  source 1..21: mol_type = other RNA; note = Description of Artificial Sequence: Synthetic oligonucleotide
  modified_base 1: mod_base = OTHER; note = 2'-O-methylcytidine-3'-phosphorothioate
  modified_base 2: mod_base = OTHER; note = 2'-O-methyladenosine-3'-phosphorothioate
  modified_base 3: mod_base = OTHER; note = 2'-O-methyladenosine-3'-phosphate
  modified_base 4: mod_base = OTHER; note = 2'-O-methylguanosine-3'-phosphate
  modified_base 5: mod_base = OTHER; note = 2'-O-methylguanosine-3'-phosphate
  modified_base 6: mod_base = OTHER; note = 2'-O-methyladenosine-3'-phosphate
  modified_base 7: mod_base = OTHER; note = 2'-fluorocytidine-3'-phosphate
  modified_base 8: mod_base = OTHER; note = 2'-O-methylcytidine-3'-phosphate
  modified_base 9: mod_base = OTHER; note = 2'-fluoroguanosine-3'-phosphate
  modified_base 10: mod_base = OTHER; note = 2'-fluoroadenosine-3'-phosphate
  modified_base 11: mod_base = OTHER; note = 2'-fluoroguanosine-3'-phosphate
  modified_base 12: mod_base = OTHER; note = 2'-O-methyladenosine-3'-phosphate
  modified_base 13: mod_base = OTHER; note = 2'-O-methyladenosine-3'-phosphate
  modified_base 14: mod_base = OTHER; note = 2'-O-methylguanosine-3'-phosphate
  modified_base 15: mod_base = OTHER; note = 2'-O-methyluridine-3'-phosphate
  modified_base 16: mod_base = OTHER; note = 2'-O-methylcytidine-3'-phosphate
  modified_base 17: mod_base = OTHER; note = 2'-O-methyladenosine-3'-phosphate
  modified_base 18: mod_base = OTHER; note = 2'-O-methylcytidine-3'-phosphate
  modified_base 19: mod_base = OTHER; note = 2'-O-methylcytidine-3'-phosphate
  modified_base 20: mod_base = OTHER; note = 2'-O-methyladenosine-3'-phosphate
  modified_base 21: mod_base = OTHER; note = 2'-O-methyladenosine-3'-phosphate N-[tris(GalNAc-alkyl)-amidodecanoyl)]-4-hydroxyprolinol Hyp-(GalNAc-alkyl)3
caaggaccgagaagtcaccaa

SEQ ID NO: 2557 - RNA, 23 nt, synthetic construct
  source 1..23: mol_type = other RNA; note = Description of Artificial Sequence: Synthetic oligonucleotide
  modified_base 1: mod_base = OTHER; note = 2'-O-methyluridine-3'-phosphorothioate
  modified_base 2: mod_base = OTHER; note = 2'-fluorouridine -3'-phosphorothioate
  modified_base 3: mod_base = OTHER; note = 2'-O-methylguanosine-3'-phosphate
  modified_base 4: mod_base = OTHER; note = 2'-O-methylguanosine-3'-phosphate
  modified_base 5: mod_base = OTHER; note = 2'-O-methyluridine-3'-phosphate
  modified_base 6: mod_base = OTHER; note = 2'-fluoroguanosine-3'-phosphate
  modified_base 7: mod_base = OTHER; note = 2'-O-methyladenosine-3'-phosphate
  modified_base 8: mod_base = OTHER; note = 2'-fluorocytidine-3'-phosphate
  modified_base 9: mod_base = OTHER; note = 2'-fluorouridine-3'-phosphate
  modified_base 10: mod_base = OTHER; note = 2'-O-methyluridine-3'-phosphate
  modified_base 11: mod_base = OTHER; note = 2'-O-methylcytidine-3'-phosphate
  modified_base 12: mod_base = OTHER; note = 2'-O-methyluridine-3'-phosphate
  modified_base 13: mod_base = OTHER; note = 2'-O-methylcytidine-3'-phosphate
  modified_base 14: mod_base = OTHER; note = 2'-fluoroguanosine-3'-phosphate
  modified_base 15: mod_base = OTHER; note = 2'-O-methylguanosine-3'-phosphate
  modified_base 16: mod_base = OTHER; note = 2'-fluorouridine-3'-phosphate
  modified_base 17: mod_base = OTHER; note = 2'-O-methylcytidine-3'-phosphate
  modified_base 18: mod_base = OTHER; note = 2'-O-methylcytidine-3'-phosphate
  modified_base 19: mod_base = OTHER; note = 2'-O-methyluridine-3'-phosphate
  modified_base 20: mod_base = OTHER; note = 2'-O-methyluridine-3'-phosphate
  modified_base 21: mod_base = OTHER; note = 2'-O-methylguanosine-3'-phosphorothioate
  modified_base 22: mod_base = OTHER; note = 2'-O-methyluridine-3'-phosphorothioate
  modified_base 23: mod_base = OTHER; note = 2'-O-methyladenosine-3'-phosphate
ttggtgacttctcggtccttgta

SEQ ID NO: 2558 - RNA, 21 nt, synthetic construct
  source 1..21: mol_type = other RNA; note = Description of Artificial Sequence: Synthetic oligonucleotide
  modified_base 1: mod_base = OTHER; note = 2'-O-methyladenosine-3'-phosphorothioate
  modified_base 2: mod_base = OTHER; note = 2'-O-methyluridine-3'-phosphorothioate
  modified_base 3: mod_base = OTHER; note = 2'-O-methylcytidine-3'-phosphate
  modified_base 4: mod_base = OTHER; note = 2'-O-methyluridine-3'-phosphate
  modified_base 5: mod_base = OTHER; note = 2'-O-methyladenosine-3'-phosphate
  modified_base 6: mod_base = OTHER; note = 2'-O-methylcytidine-3'-phosphate
  modified_base 7: mod_base = OTHER; note = 2'-fluoroadenosine-3'-phosphate
  modified_base 8: mod_base = OTHER; note = 2'-O-methyladenosine-3'-phosphate
  modified_base 9: mod_base = OTHER; note = 2'-fluoroguanosine-3'-phosphate
  modified_base 10: mod_base = OTHER; note = 2'-fluoroguanosine-3'-phosphate
  modified_base 11: mod_base = OTHER; note = 2'-fluoroadenosine-3'-phosphate
  modified_base 12: mod_base = OTHER; note = 2'-O-methylcytidine-3'-phosphate
  modified_base 13: mod_base = OTHER; note = 2'-O-methylcytidine-3'-phosphate
  modified_base 14: mod_base = OTHER; note = 2'-O-methylguanosine-3'-phosphate
  modified_base 15: mod_base = OTHER; note = 2'-O-methyladenosine-3'-phosphate
  modified_base 16: mod_base = OTHER; note = 2'-O-methylguanosine-3'-phosphate
  modified_base 17: mod_base = OTHER; note = 2'-O-methyladenosine-3'-phosphate
  modified_base 18: mod_base = OTHER; note = 2'-O-methyladenosine-3'-phosphate
  modified_base 19: mod_base = OTHER; note = 2'-O-methylguanosine-3'-phosphate
  modified_base 20: mod_base = OTHER; note = 2'-O-methyluridine-3'-phosphate
  modified_base 21: mod_base = OTHER; note = 2'-O-methylcytidine-3'-phosphate N-[tris(GalNAc-alkyl)-amidodecanoyl)]-4-hydroxyprolinol Hyp-(GalNAc-alkyl)3
atctacaaggaccgagaagtc

SEQ ID NO: 2559 - RNA, 23 nt, synthetic construct
  source 1..23: mol_type = other RNA; note = Description of Artificial Sequence: Synthetic oligonucleotide
  modified_base 1: mod_base = OTHER; note = 2'-O-methylguanosine-3'-phosphorothioate
  modified_base 2: mod_base = OTHER; note = 2'-fluoroadenosine-3'-phosphorothioate
  modified_base 3: mod_base = OTHER; note = 2'-O-methylcytidine-3'-phosphate
  modified_base 4: mod_base = OTHER; note = 2'-O-methyluridine-3'-phosphate
  modified_base 5: mod_base = OTHER; note = 2'-O-methyluridine-3'-phosphate
  modified_base 6: mod_base = OTHER; note = 2'-fluorocytidine-3'-phosphate
  modified_base 7: mod_base = OTHER; note = 2'-O-methyluridine-3'-phosphate
  modified_base 8: mod_base = OTHER; note = 2'-fluorocytidine-3'-phosphate
  modified_base 9: mod_base = OTHER; note = 2'-fluoroguanosine-3'-phosphate
  modified_base 10: mod_base = OTHER; note = 2'-O-methylguanosine-3'-phosphate
  modified_base 11: mod_base = OTHER; note = 2'-O-methyluridine-3'-phosphate
  modified_base 12: mod_base = OTHER; note = 2'-O-methylcytidine-3'-phosphate
  modified_base 13: mod_base = OTHER; note = 2'-O-methylcytidine-3'-phosphate
  modified_base 14: mod_base = OTHER; note = 2'-fluorouridine-3'-phosphate
  modified_base 15: mod_base = OTHER; note = 2'-O-methyluridine-3'-phosphate
  modified_base 16: mod_base = OTHER; note = 2'-fluoroguanosine-3'-phosphate
  modified_base 17: mod_base = OTHER; note = 2'-O-methyluridine-3'-phosphate
  modified_base 18: mod_base = OTHER; note = 2'-O-methyladenosine-3'-phosphate
  modified_base 19: mod_base = OTHER; note = 2'-O-methylguanosine-3'-phosphate
  modified_base 20: mod_base = OTHER; note = 2'-O-methyladenosine-3'-phosphate
  modified_base 21: mod_base = OTHER; note = 2'-O-methyluridine-3'-phosphorothioate
  modified_base 22: mod_base = OTHER; note = 2'-O-methyladenosine-3'-phosphorothioate
  modified_base 23: mod_base = OTHER; note = 2'-O-methyluridine-3'-phosphate
gacttctcggtccttgtagatat

SEQ ID NO: 2560 - RNA, 21 nt, synthetic construct
  source 1..21: mol_type = other RNA; note = Description of Artificial Sequence: Synthetic oligonucleotide
  modified_base 1: mod_base = OTHER; note = 2'-O-methyluridine-3'-phosphorothioate
  modified_base 2: mod_base = OTHER; note = 2'-O-methyladenosine-3'-phosphorothioate
  modified_base 3: mod_base = OTHER; note = 2'-O-methyluridine-3'-phosphate
  modified_base 4: mod_base = OTHER; note = 2'-O-methylcytidine-3'-phosphate
  modified_base 5: mod_base = OTHER; note = 2'-O-methyluridine-3'-phosphate
  modified_base 6: mod_base = OTHER; note = 2'-O-methyladenosine-3'-phosphate
  modified_base 7: mod_base = OTHER; note = 2'-fluorocytidine-3'-phosphate
  modified_base 8: mod_base = OTHER; note = 2'-O-methyladenosine-3'-phosphate
  modified_base 9: mod_base = OTHER; note = 2'-fluoroadenosine-3'-phosphate
  modified_base 10: mod_base = OTHER; note = 2'-fluoroguanosine-3'-phosphate
  modified_base 11: mod_base = OTHER; note = 2'-fluoroguanosine-3'-phosphate
  modified_base 12: mod_base = OTHER; note = 2'-O-methyladenosine-3'-phosphate
  modified_base 13: mod_base = OTHER; note = 2'-O-methylcytidine-3'-phosphate
  modified_base 14: mod_base = OTHER; note = 2'-O-methylcytidine-3'-phosphate
  modified_base 15: mod_base = OTHER; note = 2'-O-methylguanosine-3'-phosphate
  modified_base 16: mod_base = OTHER; note = 2'-O-methyladenosine-3'-phosphate
  modified_base 17: mod_base = OTHER; note = 2'-O-methylguanosine-3'-phosphate
  modified_base 18: mod_base = OTHER; note = 2'-O-methyladenosine-3'-phosphate
  modified_base 19: mod_base = OTHER; note = 2'-O-methyladenosine-3'-phosphate
  modified_base 20: mod_base = OTHER; note = 2'-O-methylguanosine-3'-phosphate
  modified_base 21: mod_base = OTHER; note = 2'-O-methyluridine-3'-phosphate N-[tris(GalNAc-alkyl)-amidodecanoyl)]-4-hydroxyprolinol Hyp-(GalNAc-alkyl)3
tatctacaaggaccgagaagt

SEQ ID NO: 2561 - RNA, 23 nt, synthetic construct
  source 1..23: mol_type = other RNA; note = Description of Artificial Sequence: Synthetic oligonucleotide
  modified_base 1: mod_base = OTHER; note = 2'-O-methyladenosine-3'-phosphorothioate
  modified_base 2: mod_base = OTHER; note = 2'-fluorocytidine-3'-phosphorothioate
  modified_base 3: mod_base = OTHER; note = 2'-O-methyluridine-3'-phosphate
  modified_base 4: mod_base = OTHER; note = 2'-O-methyluridine-3'-phosphate
  modified_base 5: mod_base = OTHER; note = 2'-O-methylcytidine-3'-phosphate
  modified_base 6: mod_base = OTHER; note = 2'-fluorouridine-3'-phosphate
  modified_base 7: mod_base = OTHER; note = 2'-O-methylcytidine-3'-phosphate
  modified_base 8: mod_base = OTHER; note = 2'-fluoroguanosine-3'-phosphate
  modified_base 9: mod_base = OTHER; note = 2'-fluoroguanosine-3'-phosphate
  modified_base 10: mod_base = OTHER; note = 2'-O-methyluridine-3'-phosphate
  modified_base 11: mod_base = OTHER; note = 2'-O-methylcytidine-3'-phosphate
  modified_base 12: mod_base = OTHER; note = 2'-O-methylcytidine-3'-phosphate
  modified_base 13: mod_base = OTHER; note = 2'-O-methyluridine-3'-phosphate
  modified_base 14: mod_base = OTHER; note = 2'-fluorouridine-3'-phosphate
  modified_base 15: mod_base = OTHER; note = 2'-O-methylguanosine-3'-phosphate
  modified_base 16: mod_base = OTHER; note = 2'-fluorouridine-3'-phosphate
  modified_base 17: mod_base = OTHER; note = 2'-O-methyladenosine-3'-phosphate
  modified_base 18: mod_base = OTHER; note = 2'-O-methylguanosine-3'-phosphate
  modified_base 19: mod_base = OTHER; note = 2'-O-methyladenosine-3'-phosphate
  modified_base 20: mod_base = OTHER; note = 2'-O-methyluridine-3'-phosphate
  modified_base 21: mod_base = OTHER; note = 2'-O-methyladenosine-3'-phosphorothioate
  modified_base 22: mod_base = OTHER; note = 2'-O-methyluridine-3'-phosphorothioate
  modified_base 23: mod_base = OTHER; note = 2'-O-methyladenosine-3'-phosphate
acttctcggtccttgtagatata

SEQ ID NO: 2562 - RNA, 21 nt, synthetic construct
  source 1..21: mol_type = other RNA; note = Description of Artificial Sequence: Synthetic oligonucleotide
  modified_base 1: mod_base = OTHER; note = 2'-O-methylcytidine-3'-phosphorothioate
  modified_base 2: mod_base = OTHER; note = 2'-O-methyladenosine-3'-phosphorothioate
  modified_base 3: mod_base = OTHER; note = 2'-O-methylguanosine-3'-phosphate
  modified_base 4: mod_base = OTHER; note = 2'-O-methyladenosine-3'-phosphate
  modified_base 5: mod_base = OTHER; note = 2'-O-methyladenosine-3'-phosphate
  modified_base 6: mod_base = OTHER; note = 2'-O-methyluridine-3'-phosphate
  modified_base 7: mod_base = OTHER; note = 2'-fluoroguanosine-3'-phosphate
  modified_base 8: mod_base = OTHER; note = 2'-O-methyluridine-3'-phosphate
  modified_base 9: mod_base = OTHER; note = 2'-fluoroguanosine-3'-phosphate
  modified_base 10: mod_base = OTHER; note = 2'-fluoroadenosine-3'-phosphate
  modified_base 11: mod_base = OTHER; note = 2'-fluoroadenosine-3'-phosphate
  modified_base 12: mod_base = OTHER; note = 2'-O-methyladenosine-3'-phosphate
  modified_base 13: mod_base = OTHER; note = 2'-O-methylguanosine-3'-phosphate
  modified_base 14: mod_base = OTHER; note = 2'-O-methyluridine-3'-phosphate
  modified_base 15: mod_base = OTHER; note = 2'-O-methylcytidine-3'-phosphate
  modified_base 16: mod_base = OTHER; note = 2'-O-methyladenosine-3'-phosphate
  modified_base 17: mod_base = OTHER; note = 2'-O-methyluridine-3'-phosphate
  modified_base 18: mod_base = OTHER; note = 2'-O-methylcytidine-3'-phosphate
  modified_base 19: mod_base = OTHER; note = 2'-O-methylguanosine-3'-phosphate
  modified_base 20: mod_base = OTHER; note = 2'-O-methyladenosine-3'-phosphate
  modified_base 21: mod_base = OTHER; note = 2'-O-methylcytidine-3'-phosphate N-[tris(GalNAc-alkyl)-amidodecanoyl)]-4-hydroxyprolinol Hyp-(GalNAc-alkyl)3
cagaatgtgaaagtcatcgac

SEQ ID NO: 2563 - RNA, 23 nt, synthetic construct
  source 1..23: mol_type = other RNA; note = Description of Artificial Sequence: Synthetic oligonucleotide
  modified_base 1: mod_base = OTHER; note = 2'-O-methylguanosine-3'-phosphorothioate
  modified_base 2: mod_base = OTHER; note = 2'-fluorouridine -3'-phosphorothioate
  modified_base 3: mod_base = OTHER; note = 2'-O-methylcytidine-3'-phosphate
  modified_base 4: mod_base = OTHER; note = 2'-O-methylguanosine-3'-phosphate
  modified_base 5: mod_base = OTHER; note = 2'-O-methyladenosine-3'-phosphate
  modified_base 6: mod_base = OTHER; note = 2'-fluorouridine-3'-phosphate
  modified_base 7: mod_base = OTHER; note = 2'-O-methylguanosine-3'-phosphate
  modified_base 8: mod_base = OTHER; note = 2'-fluoroadenosine-3'-phosphate
  modified_base 9: mod_base = OTHER; note = 2'-fluorocytidine-3'-phosphate
  modified_base 10: mod_base = OTHER; note = 2'-O-methyluridine-3'-phosphate
  modified_base 11: mod_base = OTHER; note = 2'-O-methyluridine-3'-phosphate
  modified_base 12: mod_base = OTHER; note = 2'-O-methyluridine-3'-phosphate
  modified_base 13: mod_base = OTHER; note = 2'-O-methylcytidine-3'-phosphate
  modified_base 14: mod_base = OTHER; note = 2'-fluoroadenosine-3'-phosphate
  modified_base 15: mod_base = OTHER; note = 2'-O-methylcytidine-3'-phosphate
  modified_base 16: mod_base = OTHER; note = 2'-fluoroadenosine-3'-phosphate
  modified_base 17: mod_base = OTHER; note = 2'-O-methyluridine-3'-phosphate
  modified_base 18: mod_base = OTHER; note = 2'-O-methyluridine-3'-phosphate
  modified_base 19: mod_base = OTHER; note = 2'-O-methylcytidine-3'-phosphate
  modified_base 20: mod_base = OTHER; note = 2'-O-methyluridine-3'-phosphate
  modified_base 21: mod_base = OTHER; note = 2'-O-methylguanosine-3'-phosphorothioate
  modified_base 22: mod_base = OTHER; note = 2'-O-methylguanosine-3'-phosphorothioate
  modified_base 23: mod_base = OTHER; note = 2'-O-methylcytidine-3'-phosphate
gtcgatgactttcacattctggc

SEQ ID NO: 2564 - RNA, 21 nt, synthetic construct
  source 1..21: mol_type = other RNA; note = Description of Artificial Sequence: Synthetic oligonucleotide
  modified_base 1: mod_base = OTHER; note = 2'-O-methyladenosine-3'-phosphorothioate
  modified_base 2: mod_base = OTHER; note = 2'-O-methylguanosine-3'-phosphorothioate
  modified_base 3: mod_base = OTHER; note = 2'-O-methyladenosine-3'-phosphate
  modified_base 4: mod_base = OTHER; note = 2'-O-methyladenosine-3'-phosphate
  modified_base 5: mod_base = OTHER; note = 2'-O-methyluridine-3'-phosphate
  modified_base 6: mod_base = OTHER; note = 2'-O-methylguanosine-3'-phosphate
  modified_base 7: mod_base = OTHER; note = 2'-fluorouridine-3'-phosphate
  modified_base 8: mod_base = OTHER; note = 2'-O-methylguanosine-3'-phosphate
  modified_base 9: mod_base = OTHER; note = 2'-fluoroadenosine-3'-phosphate
  modified_base 10: mod_base = OTHER; note = 2'-fluoroadenosine-3'-phosphate
  modified_base 11: mod_base = OTHER; note = 2'-fluoroadenosine-3'-phosphate
  modified_base 12: mod_base = OTHER; note = 2'-O-methylguanosine-3'-phosphate
  modified_base 13: mod_base = OTHER; note = 2'-O-methyluridine-3'-phosphate
  modified_base 14: mod_base = OTHER; note = 2'-O-methylcytidine-3'-phosphate
  modified_base 15: mod_base = OTHER; note = 2'-O-methyladenosine-3'-phosphate
  modified_base 16: mod_base = OTHER; note = 2'-O-methyluridine-3'-phosphate
  modified_base 17: mod_base = OTHER; note = 2'-O-methylcytidine-3'-phosphate
  modified_base 18: mod_base = OTHER; note = 2'-O-methylguanosine-3'-phosphate
  modified_base 19: mod_base = OTHER; note = 2'-O-methyladenosine-3'-phosphate
  modified_base 20: mod_base = OTHER; note = 2'-O-methylcytidine-3'-phosphate
  modified_base 21: mod_base = OTHER; note = 2'-O-methyladenosine-3'-phosphate N-[tris(GalNAc-alkyl)-amidodecanoyl)]-4-hydroxyprolinol Hyp-(GalNAc-alkyl)3
agaatgtgaaagtcatcgaca

SEQ ID NO: 2565 - RNA, 23 nt, synthetic construct
  source 1..23: mol_type = other RNA; note = Description of Artificial Sequence: Synthetic oligonucleotide
  modified_base 1: mod_base = OTHER; note = 2'-O-methyluridine-3'-phosphorothioate
  modified_base 2: mod_base = OTHER; note = 2'-fluoroguanosine-3'-phosphorothioate
  modified_base 3: mod_base = OTHER; note = 2'-O-methyluridine-3'-phosphate
  modified_base 4: mod_base = OTHER; note = 2'-O-methylcytidine-3'-phosphate
  modified_base 5: mod_base = OTHER; note = 2'-O-methylguanosine-3'-phosphate
  modified_base 6: mod_base = OTHER; note = 2'-fluoroadenosine-3'-phosphate
  modified_base 7: mod_base = OTHER; note = 2'-O-methyluridine-3'-phosphate
  modified_base 8: mod_base = OTHER; note = 2'-fluoroguanosine-3'-phosphate
  modified_base 9: mod_base = OTHER; note = 2'-fluoroadenosine-3'-phosphate
  modified_base 10: mod_base = OTHER; note = 2'-O-methylcytidine-3'-phosphate
  modified_base 11: mod_base = OTHER; note = 2'-O-methyluridine-3'-phosphate
  modified_base 12: mod_base = OTHER; note = 2'-O-methyluridine-3'-phosphate
  modified_base 13: mod_base = OTHER; note = 2'-O-methyluridine-3'-phosphate
  modified_base 14: mod_base = OTHER; note = 2'-fluorocytidine-3'-phosphate
  modified_base 15: mod_base = OTHER; note = 2'-O-methyladenosine-3'-phosphate
  modified_base 16: mod_base = OTHER; note = 2'-fluorocytidine-3'-phosphate
  modified_base 17: mod_base = OTHER; note = 2'-O-methyladenosine-3'-phosphate
  modified_base 18: mod_base = OTHER; note = 2'-O-methyluridine-3'-phosphate
  modified_base 19: mod_base = OTHER; note = 2'-O-methyluridine-3'-phosphate
  modified_base 20: mod_base = OTHER; note = 2'-O-methylcytidine-3'-phosphate
  modified_base 21: mod_base = OTHER; note = 2'-O-methyluridine-3'-phosphorothioate
  modified_base 22: mod_base = OTHER; note = 2'-O-methylguanosine-3'-phosphorothioate
  modified_base 23: mod_base = OTHER; note = 2'-O-methylguanosine-3'-phosphate
tgtcgatgactttcacattctgg

SEQ ID NO: 2566 - RNA, 21 nt, synthetic construct
  source 1..21: mol_type = other RNA; note = Description of Artificial Sequence: Synthetic oligonucleotide
  modified_base 1: mod_base = OTHER; note = 2'-O-methylguanosine-3'-phosphorothioate
  modified_base 2: mod_base = OTHER; note = 2'-O-methyluridine-3'-phosphorothioate
  modified_base 3: mod_base = OTHER; note = 2'-O-methylguanosine-3'-phosphate
  modified_base 4: mod_base = OTHER; note = 2'-O-methylcytidine-3'-phosphate
  modified_base 5: mod_base = OTHER; note = 2'-O-methylcytidine-3'-phosphate
  modified_base 6: mod_base = OTHER; note = 2'-O-methyladenosine-3'-phosphate
  modified_base 7: mod_base = OTHER; note = 2'-fluoroguanosine-3'-phosphate
  modified_base 8: mod_base = OTHER; note = 2'-O-methyladenosine-3'-phosphate
  modified_base 9: mod_base = OTHER; note = 2'-fluoroadenosine-3'-phosphate
  modified_base 10: mod_base = OTHER; note = 2'-fluorouridine-3'-phosphate
  modified_base 11: mod_base = OTHER; note = 2'-fluoroguanosine-3'-phosphate
  modified_base 12: mod_base = OTHER; note = 2'-O-methyluridine-3'-phosphate
  modified_base 13: mod_base = OTHER; note = 2'-O-methylguanosine-3'-phosphate
  modified_base 14: mod_base = OTHER; note = 2'-O-methyladenosine-3'-phosphate
  modified_base 15: mod_base = OTHER; note = 2'-O-methyladenosine-3'-phosphate
  modified_base 16: mod_base = OTHER; note = 2'-O-methyladenosine-3'-phosphate
  modified_base 17: mod_base = OTHER; note = 2'-O-methylguanosine-3'-phosphate
  modified_base 18: mod_base = OTHER; note = 2'-O-methyluridine-3'-phosphate
  modified_base 19: mod_base = OTHER; note = 2'-O-methylcytidine-3'-phosphate
  modified_base 20: mod_base = OTHER; note = 2'-O-methyladenosine-3'-phosphate
  modified_base 21: mod_base = OTHER; note = 2'-O-methyluridine-3'-phosphate N-[tris(GalNAc-alkyl)-amidodecanoyl)]-4-hydroxyprolinol Hyp-(GalNAc-alkyl)3
gtgccagaatgtgaaagtcat

SEQ ID NO: 2567 - RNA, 23 nt, synthetic construct
  source 1..23: mol_type = other RNA; note = Description of Artificial Sequence: Synthetic oligonucleotide
  modified_base 1: mod_base = OTHER; note = 2'-O-methyladenosine-3'-phosphorothioate
  modified_base 2: mod_base = OTHER; note = 2'-fluorouridine -3'-phosphorothioate
  modified_base 3: mod_base = OTHER; note = 2'-O-methylguanosine-3'-phosphate
  modified_base 4: mod_base = OTHER; note = 2'-O-methyladenosine-3'-phosphate
  modified_base 5: mod_base = OTHER; note = 2'-O-methylcytidine-3'-phosphate
  modified_base 6: mod_base = OTHER; note = 2'-fluorouridine-3'-phosphate
  modified_base 7: mod_base = OTHER; note = 2'-O-methyluridine-3'-phosphate
  modified_base 8: mod_base = OTHER; note = 2'-fluorouridine-3'-phosphate
  modified_base 9: mod_base = OTHER; note = 2'-fluorocytidine-3'-phosphate
  modified_base 10: mod_base = OTHER; note = 2'-O-methyladenosine-3'-phosphate
  modified_base 11: mod_base = OTHER; note = 2'-O-methylcytidine-3'-phosphate
  modified_base 12: mod_base = OTHER; note = 2'-O-methyladenosine-3'-phosphate
  modified_base 13: mod_base = OTHER; note = 2'-O-methyluridine-3'-phosphate
  modified_base 14: mod_base = OTHER; note = 2'-fluorouridine-3'-phosphate
  modified_base 15: mod_base = OTHER; note = 2'-O-methylcytidine-3'-phosphate
  modified_base 16: mod_base = OTHER; note = 2'-fluorouridine-3'-phosphate
  modified_base 17: mod_base = OTHER; note = 2'-O-methylguanosine-3'-phosphate
  modified_base 18: mod_base = OTHER; note = 2'-O-methylguanosine-3'-phosphate
  modified_base 19: mod_base = OTHER; note = 2'-O-methylcytidine-3'-phosphate
  modified_base 20: mod_base = OTHER; note = 2'-O-methyladenosine-3'-phosphate
  modified_base 21: mod_base = OTHER; note = 2'-O-methylcytidine-3'-phosphorothioate
  modified_base 22: mod_base = OTHER; note = 2'-O-methylcytidine-3'-phosphorothioate
  modified_base 23: mod_base = OTHER; note = 2'-O-methylcytidine-3'-phosphate
atgactttcacattctggcaccc

SEQ ID NO: 2568 - RNA, 21 nt, synthetic construct
  source 1..21: mol_type = other RNA; note = Description of Artificial Sequence: Synthetic oligonucleotide
  modified_base 1: mod_base = OTHER; note = 2'-O-methylguanosine-3'-phosphorothioate
  modified_base 2: mod_base = OTHER; note = 2'-O-methylguanosine-3'-phosphorothioate
  modified_base 3: mod_base = OTHER; note = 2'-O-methyluridine-3'-phosphate
  modified_base 4: mod_base = OTHER; note = 2'-O-methylguanosine-3'-phosphate
  modified_base 5: mod_base = OTHER; note = 2'-O-methylcytidine-3'-phosphate
  modified_base 6: mod_base = OTHER; note = 2'-O-methylcytidine-3'-phosphate
  modified_base 7: mod_base = OTHER; note = 2'-fluoroadenosine-3'-phosphate
  modified_base 8: mod_base = OTHER; note = 2'-O-methylguanosine-3'-phosphate
  modified_base 9: mod_base = OTHER; note = 2'-fluoroadenosine-3'-phosphate
  modified_base 10: mod_base = OTHER; note = 2'-fluoroadenosine-3'-phosphate
  modified_base 11: mod_base = OTHER; note = 2'-fluorouridine-3'-phosphate
  modified_base 12: mod_base = OTHER; note = 2'-O-methylguanosine-3'-phosphate
  modified_base 13: mod_base = OTHER; note = 2'-O-methyluridine-3'-phosphate
  modified_base 14: mod_base = OTHER; note = 2'-O-methylguanosine-3'-phosphate
  modified_base 15: mod_base = OTHER; note = 2'-O-methyladenosine-3'-phosphate
  modified_base 16: mod_base = OTHER; note = 2'-O-methyladenosine-3'-phosphate
  modified_base 17: mod_base = OTHER; note = 2'-O-methyladenosine-3'-phosphate
  modified_base 18: mod_base = OTHER; note = 2'-O-methylguanosine-3'-phosphate
  modified_base 19: mod_base = OTHER; note = 2'-O-methyluridine-3'-phosphate
  modified_base 20: mod_base = OTHER; note = 2'-O-methylcytidine-3'-phosphate
  modified_base 21: mod_base = OTHER; note = 2'-O-methyladenosine-3'-phosphate N-[tris(GalNAc-alkyl)-amidodecanoyl)]-4-hydroxyprolinol Hyp-(GalNAc-alkyl)3
ggtgccagaatgtgaaagtca

SEQ ID NO: 2569 - RNA, 23 nt, synthetic construct
  source 1..23: mol_type = other RNA; note = Description of Artificial Sequence: Synthetic oligonucleotide
  modified_base 1: mod_base = OTHER; note = 2'-O-methyluridine-3'-phosphorothioate
  modified_base 2: mod_base = OTHER; note = 2'-fluoroguanosine-3'-phosphorothioate
  modified_base 3: mod_base = OTHER; note = 2'-O-methyladenosine-3'-phosphate
  modified_base 4: mod_base = OTHER; note = 2'-O-methylcytidine-3'-phosphate
  modified_base 5: mod_base = OTHER; note = 2'-O-methyluridine-3'-phosphate
  modified_base 6: mod_base = OTHER; note = 2'-fluorouridine-3'-phosphate
  modified_base 7: mod_base = OTHER; note = 2'-O-methyluridine-3'-phosphate
  modified_base 8: mod_base = OTHER; note = 2'-fluorocytidine-3'-phosphate
  modified_base 9: mod_base = OTHER; note = 2'-fluoroadenosine-3'-phosphate
  modified_base 10: mod_base = OTHER; note = 2'-O-methylcytidine-3'-phosphate
  modified_base 11: mod_base = OTHER; note = 2'-O-methyladenosine-3'-phosphate
  modified_base 12: mod_base = OTHER; note = 2'-O-methyluridine-3'-phosphate
  modified_base 13: mod_base = OTHER; note = 2'-O-methyluridine-3'-phosphate
  modified_base 14: mod_base = OTHER; note = 2'-fluorocytidine-3'-phosphate
  modified_base 15: mod_base = OTHER; note = 2'-O-methyluridine-3'-phosphate
  modified_base 16: mod_base = OTHER; note = 2'-fluoroguanosine-3'-phosphate
  modified_base 17: mod_base = OTHER; note = 2'-O-methylguanosine-3'-phosphate
  modified_base 18: mod_base = OTHER; note = 2'-O-methylcytidine-3'-phosphate
  modified_base 19: mod_base = OTHER; note = 2'-O-methyladenosine-3'-phosphate
  modified_base 20: mod_base = OTHER; note = 2'-O-methylcytidine-3'-phosphate
  modified_base 21: mod_base = OTHER; note = 2'-O-methylcytidine-3'-phosphorothioate
  modified_base 22: mod_base = OTHER; note = 2'-O-methylcytidine-3'-phosphorothioate
  modified_base 23: mod_base = OTHER; note = 2'-O-methyladenosine-3'-phosphate
tgactttcacattctggcaccca

SEQ ID NO: 2570 - RNA, 21 nt, synthetic construct
  source 1..21: mol_type = other RNA; note = Description of Artificial Sequence: Synthetic oligonucleotide
  modified_base 1: mod_base = OTHER; note = 2'-O-methyladenosine-3'-phosphorothioate
  modified_base 2: mod_base = OTHER; note = 2'-O-methylguanosine-3'-phosphorothioate
  modified_base 3: mod_base = OTHER; note = 2'-O-methyladenosine-3'-phosphate
  modified_base 4: mod_base = OTHER; note = 2'-O-methyluridine-3'-phosphate
  modified_base 5: mod_base = OTHER; note = 2'-O-methylguanosine-3'-phosphate
  modified_base 6: mod_base = OTHER; note = 2'-O-methyluridine-3'-phosphate
  modified_base 7: mod_base = OTHER; note = 2'-fluorocytidine-3'-phosphate
  modified_base 8: mod_base = OTHER; note = 2'-O-methylcytidine-3'-phosphate
  modified_base 9: mod_base = OTHER; note = 2'-fluorouridine-3'-phosphate
  modified_base 10: mod_base = OTHER; note = 2'-fluorocytidine-3'-phosphate
  modified_base 11: mod_base = OTHER; note = 2'-fluoroguanosine-3'-phosphate
  modified_base 12: mod_base = OTHER; note = 2'-O-methyladenosine-3'-phosphate
  modified_base 13: mod_base = OTHER; note = 2'-O-methylguanosine-3'-phosphate
  modified_base 14: mod_base = OTHER; note = 2'-O-methyladenosine-3'-phosphate
  modified_base 15: mod_base = OTHER; note = 2'-O-methyluridine-3'-phosphate
  modified_base 16: mod_base = OTHER; note = 2'-O-methyladenosine-3'-phosphate
  modified_base 17: mod_base = OTHER; note = 2'-O-methylcytidine-3'-phosphate
  modified_base 18: mod_base = OTHER; note = 2'-O-methyluridine-3'-phosphate
  modified_base 19: mod_base = OTHER; note = 2'-O-methyladenosine-3'-phosphate
  modified_base 20: mod_base = OTHER; note = 2'-O-methyladenosine-3'-phosphate
  modified_base 21: mod_base = OTHER; note = 2'-O-methyladenosine-3'-phosphate N-[tris(GalNAc-alkyl)-amidodecanoyl)]-4-hydroxyprolinol Hyp-(GalNAc-alkyl)3
agatgtcctcgagatactaaa

SEQ ID NO: 2571 - RNA, 23 nt, synthetic construct
  source 1..23: mol_type = other RNA; note = Description of Artificial Sequence: Synthetic oligonucleotide
  modified_base 1: mod_base = OTHER; note = 2'-O-methyluridine-3'-phosphorothioate
  modified_base 2: mod_base = OTHER; note = 2'-fluorouridine -3'-phosphorothioate
  modified_base 3: mod_base = OTHER; note = 2'-O-methyluridine-3'-phosphate
  modified_base 4: mod_base = OTHER; note = 2'-O-methyladenosine-3'-phosphate
  modified_base 5: mod_base = OTHER; note = 2'-O-methylguanosine-3'-phosphate
  modified_base 6: mod_base = OTHER; note = 2'-fluorouridine-3'-phosphate
  modified_base 7: mod_base = OTHER; note = 2'-O-methyladenosine-3'-phosphate
  modified_base 8: mod_base = OTHER; note = 2'-fluorouridine-3'-phosphate
  modified_base 9: mod_base = OTHER; note = 2'-fluorocytidine-3'-phosphate
  modified_base 10: mod_base = OTHER; note = 2'-O-methyluridine-3'-phosphate
  modified_base 11: mod_base = OTHER; note = 2'-O-methylcytidine-3'-phosphate
  modified_base 12: mod_base = OTHER; note = 2'-O-methylguanosine-3'-phosphate
  modified_base 13: mod_base = OTHER; note = 2'-O-methyladenosine-3'-phosphate
  modified_base 14: mod_base = OTHER; note = 2'-fluoroguanosine-3'-phosphate
  modified_base 15: mod_base = OTHER; note = 2'-O-methylguanosine-3'-phosphate
  modified_base 16: mod_base = OTHER; note = 2'-fluoroadenosine-3'-phosphate
  modified_base 17: mod_base = OTHER; note = 2'-O-methylcytidine-3'-phosphate
  modified_base 18: mod_base = OTHER; note = 2'-O-methyladenosine-3'-phosphate
  modified_base 19: mod_base = OTHER; note = 2'-O-methyluridine-3'-phosphate
  modified_base 20: mod_base = OTHER; note = 2'-O-methylcytidine-3'-phosphate
  modified_base 21: mod_base = OTHER; note = 2'-O-methyluridine-3'-phosphorothioate
  modified_base 22: mod_base = OTHER; note = 2'-O-methyluridine-3'-phosphorothioate
  modified_base 23: mod_base = OTHER; note = 2'-O-methylguanosine-3'-phosphate
tttagtatctcgaggacatcttg

SEQ ID NO: 2572 - RNA, 21 nt, synthetic construct
  source 1..21: mol_type = other RNA; note = Description of Artificial Sequence: Synthetic oligonucleotide
  modified_base 1: mod_base = OTHER; note = 2'-O-methylguanosine-3'-phosphorothioate
  modified_base 2: mod_base = OTHER; note = 2'-O-methyladenosine-3'-phosphorothioate
  modified_base 3: mod_base = OTHER; note = 2'-O-methyluridine-3'-phosphate
  modified_base 4: mod_base = OTHER; note = 2'-O-methylguanosine-3'-phosphate
  modified_base 5: mod_base = OTHER; note = 2'-O-methyluridine-3'-phosphate
  modified_base 6: mod_base = OTHER; note = 2'-O-methylcytidine-3'-phosphate
  modified_base 7: mod_base = OTHER; note = 2'-fluorocytidine-3'-phosphate
  modified_base 8: mod_base = OTHER; note = 2'-O-methyluridine-3'-phosphate
  modified_base 9: mod_base = OTHER; note = 2'-fluorocytidine-3'-phosphate
  modified_base 10: mod_base = OTHER; note = 2'-fluoroguanosine-3'-phosphate
  modified_base 11: mod_base = OTHER; note = 2'-fluoroadenosine-3'-phosphate
  modified_base 12: mod_base = OTHER; note = 2'-O-methylguanosine-3'-phosphate
  modified_base 13: mod_base = OTHER; note = 2'-O-methyladenosine-3'-phosphate
  modified_base 14: mod_base = OTHER; note = 2'-O-methyluridine-3'-phosphate
  modified_base 15: mod_base = OTHER; note = 2'-O-methyladenosine-3'-phosphate
  modified_base 16: mod_base = OTHER; note = 2'-O-methylcytidine-3'-phosphate
  modified_base 17: mod_base = OTHER; note = 2'-O-methyluridine-3'-phosphate
  modified_base 18: mod_base = OTHER; note = 2'-O-methyladenosine-3'-phosphate
  modified_base 19: mod_base = OTHER; note = 2'-O-methyladenosine-3'-phosphate
  modified_base 20: mod_base = OTHER; note = 2'-O-methyladenosine-3'-phosphate
  modified_base 21: mod_base = OTHER; note = 2'-O-methylguanosine-3'-phosphate N-[tris(GalNAc-alkyl)-amidodecanoyl)]-4-hydroxyprolinol Hyp-(GalNAc-alkyl)3
gatgtcctcgagatactaaag

SEQ ID NO: 2573 - RNA, 23 nt, synthetic construct
  source 1..23: mol_type = other RNA; note = Description of Artificial Sequence: Synthetic oligonucleotide
  modified_base 1: mod_base = OTHER; note = 2'-O-methylcytidine-3'-phosphorothioate
  modified_base 2: mod_base = OTHER; note = 2'-fluorouridine -3'-phosphorothioate
  modified_base 3: mod_base = OTHER; note = 2'-O-methyluridine-3'-phosphate
  modified_base 4: mod_base = OTHER; note = 2'-O-methyluridine-3'-phosphate
  modified_base 5: mod_base = OTHER; note = 2'-O-methyladenosine-3'-phosphate
  modified_base 6: mod_base = OTHER; note = 2'-fluoroguanosine-3'-phosphate
  modified_base 7: mod_base = OTHER; note = 2'-O-methyluridine-3'-phosphate
  modified_base 8: mod_base = OTHER; note = 2'-fluoroadenosine-3'-phosphate
  modified_base 9: mod_base = OTHER; note = 2'-fluorouridine-3'-phosphate
  modified_base 10: mod_base = OTHER; note = 2'-O-methylcytidine-3'-phosphate
  modified_base 11: mod_base = OTHER; note = 2'-O-methyluridine-3'-phosphate
  modified_base 12: mod_base = OTHER; note = 2'-O-methylcytidine-3'-phosphate
  modified_base 13: mod_base = OTHER; note = 2'-O-methylguanosine-3'-phosphate
  modified_base 14: mod_base = OTHER; note = 2'-fluoroadenosine-3'-phosphate
  modified_base 15: mod_base = OTHER; note = 2'-O-methylguanosine-3'-phosphate
  modified_base 16: mod_base = OTHER; note = 2'-fluoroguanosine-3'-phosphate
  modified_base 17: mod_base = OTHER; note = 2'-O-methyladenosine-3'-phosphate
  modified_base 18: mod_base = OTHER; note = 2'-O-methylcytidine-3'-phosphate
  modified_base 19: mod_base = OTHER; note = 2'-O-methyladenosine-3'-phosphate
  modified_base 20: mod_base = OTHER; note = 2'-O-methyluridine-3'-phosphate
  modified_base 21: mod_base = OTHER; note = 2'-O-methylcytidine-3'-phosphorothioate
  modified_base 22: mod_base = OTHER; note = 2'-O-methyluridine-3'-phosphorothioate
  modified_base 23: mod_base = OTHER; note = 2'-O-methyluridine-3'-phosphate
ctttagtatctcgaggacatctt

SEQ ID NO: 2574 - RNA, 21 nt, synthetic construct
  source 1..21: mol_type = other RNA; note = Description of Artificial Sequence: Synthetic oligonucleotide
  modified_base 1: mod_base = OTHER; note = 2'-O-methyluridine-3'-phosphorothioate
  modified_base 2: mod_base = OTHER; note = 2'-O-methyluridine-3'-phosphorothioate
  modified_base 3: mod_base = OTHER; note = 2'-O-methylcytidine-3'-phosphate
  modified_base 4: mod_base = OTHER; note = 2'-O-methyladenosine-3'-phosphate
  modified_base 5: mod_base = OTHER; note = 2'-O-methyladenosine-3'-phosphate
  modified_base 6: mod_base = OTHER; note = 2'-O-methylguanosine-3'-phosphate
  modified_base 7: mod_base = OTHER; note = 2'-fluoroadenosine-3'-phosphate
  modified_base 8: mod_base = OTHER; note = 2'-O-methyluridine-3'-phosphate
  modified_base 9: mod_base = OTHER; note = 2'-fluoroguanosine-3'-phosphate
  modified_base 10: mod_base = OTHER; note = 2'-fluorouridine-3'-phosphate
  modified_base 11: mod_base = OTHER; note = 2'-fluorocytidine-3'-phosphate
  modified_base 12: mod_base = OTHER; note = 2'-O-methylcytidine-3'-phosphate
  modified_base 13: mod_base = OTHER; note = 2'-O-methyluridine-3'-phosphate
  modified_base 14: mod_base = OTHER; note = 2'-O-methylcytidine-3'-phosphate
  modified_base 15: mod_base = OTHER; note = 2'-O-methylguanosine-3'-phosphate
  modified_base 16: mod_base = OTHER; note = 2'-O-methyladenosine-3'-phosphate
  modified_base 17: mod_base = OTHER; note = 2'-O-methylguanosine-3'-phosphate
  modified_base 18: mod_base = OTHER; note = 2'-O-methyladenosine-3'-phosphate
  modified_base 19: mod_base = OTHER; note = 2'-O-methyluridine-3'-phosphate
  modified_base 20: mod_base = OTHER; note = 2'-O-methyladenosine-3'-phosphate
  modified_base 21: mod_base = OTHER; note = 2'-O-methylcytidine-3'-phosphate N-[tris(GalNAc-alkyl)-amidodecanoyl)]-4-hydroxyprolinol Hyp-(GalNAc-alkyl)3
ttcaagatgtcctcgagatac

SEQ ID NO: 2575 - RNA, 23 nt, synthetic construct
  source 1..23: mol_type = other RNA; note = Description of Artificial Sequence: Synthetic oligonucleotide
  modified_base 1: mod_base = OTHER; note = 2'-O-methylguanosine-3'-phosphorothioate
  modified_base 2: mod_base = OTHER; note = 2'-fluorouridine -3'-phosphorothioate
  modified_base 3: mod_base = OTHER; note = 2'-O-methyladenosine-3'-phosphate
  modified_base 4: mod_base = OTHER; note = 2'-O-methyluridine-3'-phosphate
  modified_base 5: mod_base = OTHER; note = 2'-O-methylcytidine-3'-phosphate
  modified_base 6: mod_base = OTHER; note = 2'-fluorouridine-3'-phosphate
  modified_base 7: mod_base = OTHER; note = 2'-O-methylcytidine-3'-phosphate
  modified_base 8: mod_base = OTHER; note = 2'-fluoroguanosine-3'-phosphate
  modified_base 9: mod_base = OTHER; note = 2'-fluoroadenosine-3'-phosphate
  modified_base 10: mod_base = OTHER; note = 2'-O-methylguanosine-3'-phosphate
  modified_base 11: mod_base = OTHER; note = 2'-O-methylguanosine-3'-phosphate
  modified_base 12: mod_base = OTHER; note = 2'-O-methyladenosine-3'-phosphate
  modified_base 13: mod_base = OTHER; note = 2'-O-methylcytidine-3'-phosphate
  modified_base 14: mod_base = OTHER; note = 2'-fluoroadenosine-3'-phosphate
  modified_base 15: mod_base = OTHER; note = 2'-O-methyluridine-3'-phosphate
  modified_base 16: mod_base = OTHER; note = 2'-fluorocytidine-3'-phosphate
  modified_base 17: mod_base = OTHER; note = 2'-O-methyluridine-3'-phosphate
  modified_base 18: mod_base = OTHER; note = 2'-O-methyluridine-3'-phosphate
  modified_base 19: mod_base = OTHER; note = 2'-O-methylguanosine-3'-phosphate
  modified_base 20: mod_base = OTHER; note = 2'-O-methyladenosine-3'-phosphate
  modified_base 21: mod_base = OTHER; note = 2'-O-methyladenosine-3'-phosphorothioate
  modified_base 22: mod_base = OTHER; note = 2'-O-methylcytidine-3'-phosphorothioate
  modified_base 23: mod_base = OTHER; note = 2'-O-methyladenosine-3'-phosphate
gtatctcgaggacatcttgaaca

SEQ ID NO: 2576 - RNA, 21 nt, synthetic construct
  source 1..21: mol_type = other RNA; note = Description of Artificial Sequence: Synthetic oligonucleotide
  modified_base 1: mod_base = OTHER; note = 2'-O-methylguanosine-3'-phosphorothioate
  modified_base 2: mod_base = OTHER; note = 2'-O-methyluridine-3'-phosphorothioate
  modified_base 3: mod_base = OTHER; note = 2'-O-methyluridine-3'-phosphate
  modified_base 4: mod_base = OTHER; note = 2'-O-methylcytidine-3'-phosphate
  modified_base 5: mod_base = OTHER; note = 2'-O-methyladenosine-3'-phosphate
  modified_base 6: mod_base = OTHER; note = 2'-O-methyladenosine-3'-phosphate
  modified_base 7: mod_base = OTHER; note = 2'-fluoroguanosine-3'-phosphate
  modified_base 8: mod_base = OTHER; note = 2'-O-methyladenosine-3'-phosphate
  modified_base 9: mod_base = OTHER; note = 2'-fluorouridine-3'-phosphate
  modified_base 10: mod_base = OTHER; note = 2'-fluoroguanosine-3'-phosphate
  modified_base 11: mod_base = OTHER; note = 2'-fluorouridine-3'-phosphate
  modified_base 12: mod_base = OTHER; note = 2'-O-methylcytidine-3'-phosphate
  modified_base 13: mod_base = OTHER; note = 2'-O-methylcytidine-3'-phosphate
  modified_base 14: mod_base = OTHER; note = 2'-O-methyluridine-3'-phosphate
  modified_base 15: mod_base = OTHER; note = 2'-O-methylcytidine-3'-phosphate
  modified_base 16: mod_base = OTHER; note = 2'-O-methylguanosine-3'-phosphate
  modified_base 17: mod_base = OTHER; note = 2'-O-methyladenosine-3'-phosphate
  modified_base 18: mod_base = OTHER; note = 2'-O-methylguanosine-3'-phosphate
  modified_base 19: mod_base = OTHER; note = 2'-O-methyladenosine-3'-phosphate
  modified_base 20: mod_base = OTHER; note = 2'-O-methyluridine-3'-phosphate
  modified_base 21: mod_base = OTHER; note = 2'-O-methyladenosine-3'-phosphate N-[tris(GalNAc-alkyl)-amidodecanoyl)]-4-hydroxyprolinol Hyp-(GalNAc-alkyl)3
gttcaagatgtcctcgagata

SEQ ID NO: 2577 - RNA, 23 nt, synthetic construct
  source 1..23: mol_type = other RNA; note = Description of Artificial Sequence: Synthetic oligonucleotide
  modified_base 1: mod_base = OTHER; note = 2'-O-methyluridine-3'-phosphorothioate
  modified_base 2: mod_base = OTHER; note = 2'-fluoroadenosine-3'-phosphorothioate
  modified_base 3: mod_base = OTHER; note = 2'-O-methyluridine-3'-phosphate
  modified_base 4: mod_base = OTHER; note = 2'-O-methylcytidine-3'-phosphate
  modified_base 5: mod_base = OTHER; note = 2'-O-methyluridine-3'-phosphate
  modified_base 6: mod_base = OTHER; note = 2'-fluorocytidine-3'-phosphate
  modified_base 7: mod_base = OTHER; note = 2'-O-methylguanosine-3'-phosphate
  modified_base 8: mod_base = OTHER; note = 2'-fluoroadenosine-3'-phosphate
  modified_base 9: mod_base = OTHER; note = 2'-fluoroguanosine-3'-phosphate
  modified_base 10: mod_base = OTHER; note = 2'-O-methylguanosine-3'-phosphate
  modified_base 11: mod_base = OTHER; note = 2'-O-methyladenosine-3'-phosphate
  modified_base 12: mod_base = OTHER; note = 2'-O-methylcytidine-3'-phosphate
  modified_base 13: mod_base = OTHER; note = 2'-O-methyladenosine-3'-phosphate
  modified_base 14: mod_base = OTHER; note = 2'-fluorouridine-3'-phosphate
  modified_base 15: mod_base = OTHER; note = 2'-O-methylcytidine-3'-phosphate
  modified_base 16: mod_base = OTHER; note = 2'-fluorouridine-3'-phosphate
  modified_base 17: mod_base = OTHER; note = 2'-O-methyluridine-3'-phosphate
  modified_base 18: mod_base = OTHER; note = 2'-O-methylguanosine-3'-phosphate
  modified_base 19: mod_base = OTHER; note = 2'-O-methyladenosine-3'-phosphate
  modified_base 20: mod_base = OTHER; note = 2'-O-methyladenosine-3'-phosphate
  modified_base 21: mod_base = OTHER; note = 2'-O-methylcytidine-3'-phosphorothioate
  modified_base 22: mod_base = OTHER; note = 2'-O-methyladenosine-3'-phosphorothioate
  modified_base 23: mod_base = OTHER; note = 2'-O-methylcytidine-3'-phosphate
tatctcgaggacatcttgaacac

SEQ ID NO: 2578 - RNA, 21 nt, synthetic construct
  source 1..21: mol_type = other RNA; note = Description of Artificial Sequence: Synthetic oligonucleotide
  modified_base 1: mod_base = OTHER; note = 2'-O-methylguanosine-3'-phosphorothioate
  modified_base 2: mod_base = OTHER; note = 2'-O-methyluridine-3'-phosphorothioate
  modified_base 3: mod_base = OTHER; note = 2'-O-methylguanosine-3'-phosphate
  modified_base 4: mod_base = OTHER; note = 2'-O-methylguanosine-3'-phosphate
  modified_base 5: mod_base = OTHER; note = 2'-O-methyladenosine-3'-phosphate
  modified_base 6: mod_base = OTHER; note = 2'-O-methylcytidine-3'-phosphate
  modified_base 7: mod_base = OTHER; note = 2'-fluorouridine-3'-phosphate
  modified_base 8: mod_base = OTHER; note = 2'-O-methyluridine-3'-phosphate
  modified_base 9: mod_base = OTHER; note = 2'-fluoroguanosine-3'-phosphate
  modified_base 10: mod_base = OTHER; note = 2'-fluorocytidine-3'-phosphate
  modified_base 11: mod_base = OTHER; note = 2'-fluorouridine-3'-phosphate
  modified_base 12: mod_base = OTHER; note = 2'-O-methylguanosine-3'-phosphate
  modified_base 13: mod_base = OTHER; note = 2'-O-methylcytidine-3'-phosphate
  modified_base 14: mod_base = OTHER; note = 2'-O-methyladenosine-3'-phosphate
  modified_base 15: mod_base = OTHER; note = 2'-O-methyluridine-3'-phosphate
  modified_base 16: mod_base = OTHER; note = 2'-O-methyladenosine-3'-phosphate
  modified_base 17: mod_base = OTHER; note = 2'-O-methyluridine-3'-phosphate
  modified_base 18: mod_base = OTHER; note = 2'-O-methylguanosine-3'-phosphate
  modified_base 19: mod_base = OTHER; note = 2'-O-methyluridine-3'-phosphate
  modified_base 20: mod_base = OTHER; note = 2'-O-methylguanosine-3'-phosphate
  modified_base 21: mod_base = OTHER; note = 2'-O-methylguanosine-3'-phosphate N-[tris(GalNAc-alkyl)-amidodecanoyl)]-4-hydroxyprolinol Hyp-(GalNAc-alkyl)3
gtggacttgctgcatatgtgg

SEQ ID NO: 2579 - RNA, 23 nt, synthetic construct
  source 1..23: mol_type = other RNA; note = Description of Artificial Sequence: Synthetic oligonucleotide
  modified_base 1: mod_base = OTHER; note = 2'-O-methylcytidine-3'-phosphorothioate
  modified_base 2: mod_base = OTHER; note = 2'-fluorocytidine-3'-phosphorothioate
  modified_base 3: mod_base = OTHER; note = 2'-O-methyladenosine-3'-phosphate
  modified_base 4: mod_base = OTHER; note = 2'-O-methylcytidine-3'-phosphate
  modified_base 5: mod_base = OTHER; note = 2'-O-methyladenosine-3'-phosphate
  modified_base 6: mod_base = OTHER; note = 2'-fluorouridine-3'-phosphate
  modified_base 7: mod_base = OTHER; note = 2'-O-methyladenosine-3'-phosphate
  modified_base 8: mod_base = OTHER; note = 2'-fluorouridine-3'-phosphate
  modified_base 9: mod_base = OTHER; note = 2'-fluoroguanosine-3'-phosphate
  modified_base 10: mod_base = OTHER; note = 2'-O-methylcytidine-3'-phosphate
  modified_base 11: mod_base = OTHER; note = 2'-O-methyladenosine-3'-phosphate
  modified_base 12: mod_base = OTHER; note = 2'-O-methylguanosine-3'-phosphate
  modified_base 13: mod_base = OTHER; note = 2'-O-methylcytidine-3'-phosphate
  modified_base 14: mod_base = OTHER; note = 2'-fluoroadenosine-3'-phosphate
  modified_base 15: mod_base = OTHER; note = 2'-O-methyladenosine-3'-phosphate
  modified_base 16: mod_base = OTHER; note = 2'-fluoroguanosine-3'-phosphate
  modified_base 17: mod_base = OTHER; note = 2'-O-methyluridine-3'-phosphate
  modified_base 18: mod_base = OTHER; note = 2'-O-methylcytidine-3'-phosphate
  modified_base 19: mod_base = OTHER; note = 2'-O-methylcytidine-3'-phosphate
  modified_base 20: mod_base = OTHER; note = 2'-O-methyladenosine-3'-phosphate
  modified_base 21: mod_base = OTHER; note = 2'-O-methylcytidine-3'-phosphorothioate
  modified_base 22: mod_base = OTHER; note = 2'-O-methyluridine-3'-phosphorothioate
  modified_base 23: mod_base = OTHER; note = 2'-O-methylguanosine-3'-phosphate
ccacatatgcagcaagtccactg

SEQ ID NO: 2580 - RNA, 21 nt, synthetic construct
  source 1..21: mol_type = other RNA; note = Description of Artificial Sequence: Synthetic oligonucleotide
  modified_base 1: mod_base = OTHER; note = 2'-O-methyluridine-3'-phosphorothioate
  modified_base 2: mod_base = OTHER; note = 2'-O-methylguanosine-3'-phosphorothioate
  modified_base 3: mod_base = OTHER; note = 2'-O-methylguanosine-3'-phosphate
  modified_base 4: mod_base = OTHER; note = 2'-O-methyladenosine-3'-phosphate
  modified_base 5: mod_base = OTHER; note = 2'-O-methylcytidine-3'-phosphate
  modified_base 6: mod_base = OTHER; note = 2'-O-methyluridine-3'-phosphate
  modified_base 7: mod_base = OTHER; note = 2'-fluorouridine-3'-phosphate
  modified_base 8: mod_base = OTHER; note = 2'-O-methylguanosine-3'-phosphate
  modified_base 9: mod_base = OTHER; note = 2'-fluorocytidine-3'-phosphate
  modified_base 10: mod_base = OTHER; note = 2'-fluorouridine-3'-phosphate
  modified_base 11: mod_base = OTHER; note = 2'-fluoroguanosine-3'-phosphate
  modified_base 12: mod_base = OTHER; note = 2'-O-methylcytidine-3'-phosphate
  modified_base 13: mod_base = OTHER; note = 2'-O-methyladenosine-3'-phosphate
  modified_base 14: mod_base = OTHER; note = 2'-O-methyluridine-3'-phosphate
  modified_base 15: mod_base = OTHER; note = 2'-O-methyladenosine-3'-phosphate
  modified_base 16: mod_base = OTHER; note = 2'-O-methyluridine-3'-phosphate
  modified_base 17: mod_base = OTHER; note = 2'-O-methylguanosine-3'-phosphate
  modified_base 18: mod_base = OTHER; note = 2'-O-methyluridine-3'-phosphate
  modified_base 19: mod_base = OTHER; note = 2'-O-methylguanosine-3'-phosphate
  modified_base 20: mod_base = OTHER; note = 2'-O-methylguanosine-3'-phosphate
  modified_base 21: mod_base = OTHER; note = 2'-O-methylcytidine-3'-phosphate N-[tris(GalNAc-alkyl)-amidodecanoyl)]-4-hydroxyprolinol Hyp-(GalNAc-alkyl)3
tggacttgctgcatatgtggc

SEQ ID NO: 2581 - RNA, 23 nt, synthetic construct
  source 1..23: mol_type = other RNA; note = Description of Artificial Sequence: Synthetic oligonucleotide
  modified_base 1: mod_base = OTHER; note = 2'-O-methylguanosine-3'-phosphorothioate
  modified_base 2: mod_base = OTHER; note = 2'-fluorocytidine-3'-phosphorothioate
  modified_base 3: mod_base = OTHER; note = 2'-O-methylcytidine-3'-phosphate
  modified_base 4: mod_base = OTHER; note = 2'-O-methyladenosine-3'-phosphate
  modified_base 5: mod_base = OTHER; note = 2'-O-methylcytidine-3'-phosphate
  modified_base 6: mod_base = OTHER; note = 2'-fluoroadenosine-3'-phosphate
  modified_base 7: mod_base = OTHER; note = 2'-O-methyluridine-3'-phosphate
  modified_base 8: mod_base = OTHER; note = 2'-fluoroadenosine-3'-phosphate
  modified_base 9: mod_base = OTHER; note = 2'-fluorouridine-3'-phosphate
  modified_base 10: mod_base = OTHER; note = 2'-O-methylguanosine-3'-phosphate
  modified_base 11: mod_base = OTHER; note = 2'-O-methylcytidine-3'-phosphate
  modified_base 12: mod_base = OTHER; note = 2'-O-methyladenosine-3'-phosphate
  modified_base 13: mod_base = OTHER; note = 2'-O-methylguanosine-3'-phosphate
  modified_base 14: mod_base = OTHER; note = 2'-fluorocytidine-3'-phosphate
  modified_base 15: mod_base = OTHER; note = 2'-O-methyladenosine-3'-phosphate
  modified_base 16: mod_base = OTHER; note = 2'-fluoroadenosine-3'-phosphate
  modified_base 17: mod_base = OTHER; note = 2'-O-methylguanosine-3'-phosphate
  modified_base 18: mod_base = OTHER; note = 2'-O-methyluridine-3'-phosphate
  modified_base 19: mod_base = OTHER; note = 2'-O-methylcytidine-3'-phosphate
  modified_base 20: mod_base = OTHER; note = 2'-O-methylcytidine-3'-phosphate
  modified_base 21: mod_base = OTHER; note = 2'-O-methyladenosine-3'-phosphorothioate
  modified_base 22: mod_base = OTHER; note = 2'-O-methylcytidine-3'-phosphorothioate
  modified_base 23: mod_base = OTHER; note = 2'-O-methyluridine-3'-phosphate
gccacatatgcagcaagtccact

SEQ ID NO: 2582 - RNA, 21 nt, synthetic construct
  source 1..21: mol_type = other RNA; note = Description of Artificial Sequence: Synthetic oligonucleotide
  modified_base 1: mod_base = OTHER; note = 2'-O-methylguanosine-3'-phosphorothioate
  modified_base 2: mod_base = OTHER; note = 2'-O-methyladenosine-3'-phosphorothioate
  modified_base 3: mod_base = OTHER; note = 2'-O-methylcytidine-3'-phosphate
  modified_base 4: mod_base = OTHER; note = 2'-O-methyladenosine-3'-phosphate
  modified_base 5: mod_base = OTHER; note = 2'-O-methylguanosine-3'-phosphate
  modified_base 6: mod_base = OTHER; note = 2'-O-methyluridine-3'-phosphate
  modified_base 7: mod_base = OTHER; note = 2'-fluoroguanosine-3'-phosphate
  modified_base 8: mod_base = OTHER; note = 2'-O-methylguanosine-3'-phosphate
  modified_base 9: mod_base = OTHER; note = 2'-fluoroadenosine-3'-phosphate
  modified_base 10: mod_base = OTHER; note = 2'-fluorocytidine-3'-phosphate
  modified_base 11: mod_base = OTHER; note = 2'-fluorouridine-3'-phosphate
  modified_base 12: mod_base = OTHER; note = 2'-O-methyluridine-3'-phosphate
  modified_base 13: mod_base = OTHER; note = 2'-O-methylguanosine-3'-phosphate
  modified_base 14: mod_base = OTHER; note = 2'-O-methylcytidine-3'-phosphate
  modified_base 15: mod_base = OTHER; note = 2'-O-methyluridine-3'-phosphate
  modified_base 16: mod_base = OTHER; note = 2'-O-methylguanosine-3'-phosphate
  modified_base 17: mod_base = OTHER; note = 2'-O-methylcytidine-3'-phosphate
  modified_base 18: mod_base = OTHER; note = 2'-O-methyladenosine-3'-phosphate
  modified_base 19: mod_base = OTHER; note = 2'-O-methyluridine-3'-phosphate
  modified_base 20: mod_base = OTHER; note = 2'-O-methyladenosine-3'-phosphate
  modified_base 21: mod_base = OTHER; note = 2'-O-methyluridine-3'-phosphate N-[tris(GalNAc-alkyl)-amidodecanoyl)]-4-hydroxyprolinol Hyp-(GalNAc-alkyl)3
gacagtggacttgctgcatat

SEQ ID NO: 2583 - RNA, 23 nt, synthetic construct
  source 1..23: mol_type = other RNA; note = Description of Artificial Sequence: Synthetic oligonucleotide
  modified_base 1: mod_base = OTHER; note = 2'-O-methyladenosine-3'-phosphorothioate
  modified_base 2: mod_base = OTHER; note = 2'-fluorouridine -3'-phosphorothioate
  modified_base 3: mod_base = OTHER; note = 2'-O-methyladenosine-3'-phosphate
  modified_base 4: mod_base = OTHER; note = 2'-O-methyluridine-3'-phosphate
  modified_base 5: mod_base = OTHER; note = 2'-O-methylguanosine-3'-phosphate
  modified_base 6: mod_base = OTHER; note = 2'-fluorocytidine-3'-phosphate
  modified_base 7: mod_base = OTHER; note = 2'-O-methyladenosine-3'-phosphate
  modified_base 8: mod_base = OTHER; note = 2'-fluoroguanosine-3'-phosphate
  modified_base 9: mod_base = OTHER; note = 2'-fluorocytidine-3'-phosphate
  modified_base 10: mod_base = OTHER; note = 2'-O-methyladenosine-3'-phosphate
  modified_base 11: mod_base = OTHER; note = 2'-O-methyladenosine-3'-phosphate
  modified_base 12: mod_base = OTHER; note = 2'-O-methylguanosine-3'-phosphate
  modified_base 13: mod_base = OTHER; note = 2'-O-methyluridine-3'-phosphate
  modified_base 14: mod_base = OTHER; note = 2'-fluorocytidine-3'-phosphate
  modified_base 15: mod_base = OTHER; note = 2'-O-methylcytidine-3'-phosphate
  modified_base 16: mod_base = OTHER; note = 2'-fluoroadenosine-3'-phosphate
  modified_base 17: mod_base = OTHER; note = 2'-O-methylcytidine-3'-phosphate
  modified_base 18: mod_base = OTHER; note = 2'-O-methyluridine-3'-phosphate
  modified_base 19: mod_base = OTHER; note = 2'-O-methylguanosine-3'-phosphate
  modified_base 20: mod_base = OTHER; note = 2'-O-methyluridine-3'-phosphate
  modified_base 21: mod_base = OTHER; note = 2'-O-methylcytidine-3'-phosphorothioate
  modified_base 22: mod_base = OTHER; note = 2'-O-methylguanosine-3'-phosphorothioate
  modified_base 23: mod_base = OTHER; note = 2'-O-methyluridine-3'-phosphate
atatgcagcaagtccactgtcgt

SEQ ID NO: 2584 - RNA, 21 nt, synthetic construct
  source 1..21: mol_type = other RNA; note = Description of Artificial Sequence: Synthetic oligonucleotide
  modified_base 1: mod_base = OTHER; note = 2'-O-methylcytidine-3'-phosphorothioate
  modified_base 2: mod_base = OTHER; note = 2'-O-methylguanosine-3'-phosphorothioate
  modified_base 3: mod_base = OTHER; note = 2'-O-methyladenosine-3'-phosphate
  modified_base 4: mod_base = OTHER; note = 2'-O-methylcytidine-3'-phosphate
  modified_base 5: mod_base = OTHER; note = 2'-O-methyladenosine-3'-phosphate
  modified_base 6: mod_base = OTHER; note = 2'-O-methylguanosine-3'-phosphate
  modified_base 7: mod_base = OTHER; note = 2'-fluorouridine-3'-phosphate
  modified_base 8: mod_base = OTHER; note = 2'-O-methylguanosine-3'-phosphate
  modified_base 9: mod_base = OTHER; note = 2'-fluoroguanosine-3'-phosphate
  modified_base 10: mod_base = OTHER; note = 2'-fluoroadenosine-3'-phosphate
  modified_base 11: mod_base = OTHER; note = 2'-fluorocytidine-3'-phosphate
  modified_base 12: mod_base = OTHER; note = 2'-O-methyluridine-3'-phosphate
  modified_base 13: mod_base = OTHER; note = 2'-O-methyluridine-3'-phosphate
  modified_base 14: mod_base = OTHER; note = 2'-O-methylguanosine-3'-phosphate
  modified_base 15: mod_base = OTHER; note = 2'-O-methylcytidine-3'-phosphate
  modified_base 16: mod_base = OTHER; note = 2'-O-methyluridine-3'-phosphate
  modified_base 17: mod_base = OTHER; note = 2'-O-methylguanosine-3'-phosphate
  modified_base 18: mod_base = OTHER; note = 2'-O-methylcytidine-3'-phosphate
  modified_base 19: mod_base = OTHER; note = 2'-O-methyladenosine-3'-phosphate
  modified_base 20: mod_base = OTHER; note = 2'-O-methyluridine-3'-phosphate
  modified_base 21: mod_base = OTHER; note = 2'-O-methyladenosine-3'-phosphate N-[tris(GalNAc-alkyl)-amidodecanoyl)]-4-hydroxyprolinol Hyp-(GalNAc-alkyl)3
cgacagtggacttgctgcata

SEQ ID NO: 2585 - RNA, 23 nt, synthetic construct
  source 1..23: mol_type = other RNA; note = Description of Artificial Sequence: Synthetic oligonucleotide
  modified_base 1: mod_base = OTHER; note = 2'-O-methyluridine-3'-phosphorothioate
  modified_base 2: mod_base = OTHER; note = 2'-fluoroadenosine-3'-phosphorothioate
  modified_base 3: mod_base = OTHER; note = 2'-O-methyluridine-3'-phosphate
  modified_base 4: mod_base = OTHER; note = 2'-O-methylguanosine-3'-phosphate
  modified_base 5: mod_base = OTHER; note = 2'-O-methylcytidine-3'-phosphate
  modified_base 6: mod_base = OTHER; note = 2'-fluoroadenosine-3'-phosphate
  modified_base 7: mod_base = OTHER; note = 2'-O-methylguanosine-3'-phosphate
  modified_base 8: mod_base = OTHER; note = 2'-fluorocytidine-3'-phosphate
  modified_base 9: mod_base = OTHER; note = 2'-fluoroadenosine-3'-phosphate
  modified_base 10: mod_base = OTHER; note = 2'-O-methyladenosine-3'-phosphate
  modified_base 11: mod_base = OTHER; note = 2'-O-methylguanosine-3'-phosphate
  modified_base 12: mod_base = OTHER; note = 2'-O-methyluridine-3'-phosphate
  modified_base 13: mod_base = OTHER; note = 2'-O-methylcytidine-3'-phosphate
  modified_base 14: mod_base = OTHER; note = 2'-fluorocytidine-3'-phosphate
  modified_base 15: mod_base = OTHER; note = 2'-O-methyladenosine-3'-phosphate
  modified_base 16: mod_base = OTHER; note = 2'-fluorocytidine-3'-phosphate
  modified_base 17: mod_base = OTHER; note = 2'-O-methyluridine-3'-phosphate
  modified_base 18: mod_base = OTHER; note = 2'-O-methylguanosine-3'-phosphate
  modified_base 19: mod_base = OTHER; note = 2'-O-methyluridine-3'-phosphate
  modified_base 20: mod_base = OTHER; note = 2'-O-methylcytidine-3'-phosphate
  modified_base 21: mod_base = OTHER; note = 2'-O-methylguanosine-3'-phosphorothioate
  modified_base 22: mod_base = OTHER; note = 2'-O-methyluridine-3'-phosphorothioate
  modified_base 23: mod_base = OTHER; note = 2'-O-methylcytidine-3'-phosphate
tatgcagcaagtccactgtcgtc

SEQ ID NO: 2586 - RNA, 21 nt, synthetic construct
  source 1..21: mol_type = other RNA; note = Description of Artificial Sequence: Synthetic oligonucleotide
  modified_base 1: mod_base = OTHER; note = 2'-O-methyladenosine-3'-phosphorothioate
  modified_base 2: mod_base = OTHER; note = 2'-O-methyladenosine-3'-phosphorothioate
  modified_base 3: mod_base = OTHER; note = 2'-O-methylcytidine-3'-phosphate
  modified_base 4: mod_base = OTHER; note = 2'-O-methylcytidine-3'-phosphate
  modified_base 5: mod_base = OTHER; note = 2'-O-methyladenosine-3'-phosphate
  modified_base 6: mod_base = OTHER; note = 2'-O-methylguanosine-3'-phosphate
  modified_base 7: mod_base = OTHER; note = 2'-fluorouridine-3'-phosphate
  modified_base 8: mod_base = OTHER; note = 2'-O-methyladenosine-3'-phosphate
  modified_base 9: mod_base = OTHER; note = 2'-fluorocytidine-3'-phosphate
  modified_base 10: mod_base = OTHER; note = 2'-fluorouridine-3'-phosphate
  modified_base 11: mod_base = OTHER; note = 2'-fluorouridine-3'-phosphate
  modified_base 12: mod_base = OTHER; note = 2'-O-methyluridine-3'-phosphate
  modified_base 13: mod_base = OTHER; note = 2'-O-methyladenosine-3'-phosphate
  modified_base 14: mod_base = OTHER; note = 2'-O-methyluridine-3'-phosphate
  modified_base 15: mod_base = OTHER; note = 2'-O-methylcytidine-3'-phosphate
  modified_base 16: mod_base = OTHER; note = 2'-O-methyladenosine-3'-phosphate
  modified_base 17: mod_base = OTHER; note = 2'-O-methyluridine-3'-phosphate
  modified_base 18: mod_base = OTHER; note = 2'-O-methyluridine-3'-phosphate
  modified_base 19: mod_base = OTHER; note = 2'-O-methyluridine-3'-phosphate
  modified_base 20: mod_base = OTHER; note = 2'-O-methyluridine-3'-phosphate
  modified_base 21: mod_base = OTHER; note = 2'-O-methylcytidine-3'-phosphate N-[tris(GalNAc-alkyl)-amidodecanoyl)]-4-hydroxyprolinol Hyp-(GalNAc-alkyl)3
aaccagtactttatcattttc

SEQ ID NO: 2587 - RNA, 23 nt, synthetic construct
  source 1..23: mol_type = other RNA; note = Description of Artificial Sequence: Synthetic oligonucleotide
  modified_base 1: mod_base = OTHER; note = 2'-O-methylguanosine-3'-phosphorothioate
  modified_base 2: mod_base = OTHER; note = 2'-fluoroadenosine-3'-phosphorothioate
  modified_base 3: mod_base = OTHER; note = 2'-O-methyladenosine-3'-phosphate
  modified_base 4: mod_base = OTHER; note = 2'-O-methyladenosine-3'-phosphate
  modified_base 5: mod_base = OTHER; note = 2'-O-methyladenosine-3'-phosphate
  modified_base 6: mod_base = OTHER; note = 2'-fluorouridine-3'-phosphate
  modified_base 7: mod_base = OTHER; note = 2'-O-methylguanosine-3'-phosphate
  modified_base 8: mod_base = OTHER; note = 2'-fluoroadenosine-3'-phosphate
  modified_base 9: mod_base = OTHER; note = 2'-fluorouridine-3'-phosphate
  modified_base 10: mod_base = OTHER; note = 2'-O-methyladenosine-3'-phosphate
  modified_base 11: mod_base = OTHER; note = 2'-O-methyladenosine-3'-phosphate
  modified_base 12: mod_base = OTHER; note = 2'-O-methyladenosine-3'-phosphate
  modified_base 13: mod_base = OTHER; note = 2'-O-methylguanosine-3'-phosphate
  modified_base 14: mod_base = OTHER; note = 2'-fluorouridine-3'-phosphate
  modified_base 15: mod_base = OTHER; note = 2'-O-methyladenosine-3'-phosphate
  modified_base 16: mod_base = OTHER; note = 2'-fluorocytidine-3'-phosphate
  modified_base 17: mod_base = OTHER; note = 2'-O-methyluridine-3'-phosphate
  modified_base 18: mod_base = OTHER; note = 2'-O-methylguanosine-3'-phosphate
  modified_base 19: mod_base = OTHER; note = 2'-O-methylguanosine-3'-phosphate
  modified_base 20: mod_base = OTHER; note = 2'-O-methyluridine-3'-phosphate
  modified_base 21: mod_base = OTHER; note = 2'-O-methyluridine-3'-phosphorothioate
  modified_base 22: mod_base = OTHER; note = 2'-O-methyluridine-3'-phosphorothioate
  modified_base 23: mod_base = OTHER; note = 2'-O-methylcytidine-3'-phosphate
gaaaatgataaagtactggtttc

SEQ ID NO: 2588 - RNA, 21 nt, synthetic construct
  source 1..21: mol_type = other RNA; note = Description of Artificial Sequence: Synthetic oligonucleotide
  modified_base 1: mod_base = OTHER; note = 2'-O-methyladenosine-3'-phosphorothioate
  modified_base 2: mod_base = OTHER; note = 2'-O-methylcytidine-3'-phosphorothioate
  modified_base 3: mod_base = OTHER; note = 2'-O-methylcytidine-3'-phosphate
  modified_base 4: mod_base = OTHER; note = 2'-O-methyladenosine-3'-phosphate
  modified_base 5: mod_base = OTHER; note = 2'-O-methylguanosine-3'-phosphate
  modified_base 6: mod_base = OTHER; note = 2'-O-methyluridine-3'-phosphate
  modified_base 7: mod_base = OTHER; note = 2'-fluoroadenosine-3'-phosphate
  modified_base 8: mod_base = OTHER; note = 2'-O-methylcytidine-3'-phosphate
  modified_base 9: mod_base = OTHER; note = 2'-fluorouridine-3'-phosphate
  modified_base 10: mod_base = OTHER; note = 2'-fluorouridine-3'-phosphate
  modified_base 11: mod_base = OTHER; note = 2'-fluorouridine-3'-phosphate
  modified_base 12: mod_base = OTHER; note = 2'-O-methyladenosine-3'-phosphate
  modified_base 13: mod_base = OTHER; note = 2'-O-methyluridine-3'-phosphate
  modified_base 14: mod_base = OTHER; note = 2'-O-methylcytidine-3'-phosphate
  modified_base 15: mod_base = OTHER; note = 2'-O-methyladenosine-3'-phosphate
  modified_base 16: mod_base = OTHER; note = 2'-O-methyluridine-3'-phosphate
  modified_base 17: mod_base = OTHER; note = 2'-O-methyluridine-3'-phosphate
  modified_base 18: mod_base = OTHER; note = 2'-O-methyluridine-3'-phosphate
  modified_base 19: mod_base = OTHER; note = 2'-O-methyluridine-3'-phosphate
  modified_base 20: mod_base = OTHER; note = 2'-O-methylcytidine-3'-phosphate
  modified_base 21: mod_base = OTHER; note = 2'-O-methyluridine-3'-phosphate N-[tris(GalNAc-alkyl)-amidodecanoyl)]-4-hydroxyprolinol Hyp-(GalNAc-alkyl)3
accagtactttatcattttct

SEQ ID NO: 2589 - RNA, 23 nt, synthetic construct
  source 1..23: mol_type = other RNA; note = Description of Artificial Sequence: Synthetic oligonucleotide
  modified_base 1: mod_base = OTHER; note = 2'-O-methyladenosine-3'-phosphorothioate
  modified_base 2: mod_base = OTHER; note = 2'-fluoroguanosine-3'-phosphorothioate
  modified_base 3: mod_base = OTHER; note = 2'-O-methyladenosine-3'-phosphate
  modified_base 4: mod_base = OTHER; note = 2'-O-methyladenosine-3'-phosphate
  modified_base 5: mod_base = OTHER; note = 2'-O-methyladenosine-3'-phosphate
  modified_base 6: mod_base = OTHER; note = 2'-fluoroadenosine-3'-phosphate
  modified_base 7: mod_base = OTHER; note = 2'-O-methyluridine-3'-phosphate
  modified_base 8: mod_base = OTHER; note = 2'-fluoroguanosine-3'-phosphate
  modified_base 9: mod_base = OTHER; note = 2'-fluoroadenosine-3'-phosphate
  modified_base 10: mod_base = OTHER; note = 2'-O-methyluridine-3'-phosphate
  modified_base 11: mod_base = OTHER; note = 2'-O-methyladenosine-3'-phosphate
  modified_base 12: mod_base = OTHER; note = 2'-O-methyladenosine-3'-phosphate
  modified_base 13: mod_base = OTHER; note = 2'-O-methyladenosine-3'-phosphate
  modified_base 14: mod_base = OTHER; note = 2'-fluoroguanosine-3'-phosphate
  modified_base 15: mod_base = OTHER; note = 2'-O-methyluridine-3'-phosphate
  modified_base 16: mod_base = OTHER; note = 2'-fluoroadenosine-3'-phosphate
  modified_base 17: mod_base = OTHER; note = 2'-O-methylcytidine-3'-phosphate
  modified_base 18: mod_base = OTHER; note = 2'-O-methyluridine-3'-phosphate
  modified_base 19: mod_base = OTHER; note = 2'-O-methylguanosine-3'-phosphate
  modified_base 20: mod_base = OTHER; note = 2'-O-methylguanosine-3'-phosphate
  modified_base 21: mod_base = OTHER; note = 2'-O-methyluridine-3'-phosphorothioate
  modified_base 22: mod_base = OTHER; note = 2'-O-methyluridine-3'-phosphorothioate
  modified_base 23: mod_base = OTHER; note = 2'-O-methyluridine-3'-phosphate
agaaaatgataaagtactggttt

SEQ ID NO: 2590 - RNA, 21 nt, synthetic construct
  source 1..21: mol_type = other RNA; note = Description of Artificial Sequence: Synthetic oligonucleotide
  modified_base 1: mod_base = OTHER; note = 2'-O-methyluridine-3'-phosphorothioate
  modified_base 2: mod_base = OTHER; note = 2'-O-methyluridine-3'-phosphorothioate
  modified_base 3: mod_base = OTHER; note = 2'-O-methylguanosine-3'-phosphate
  modified_base 4: mod_base = OTHER; note = 2'-O-methyladenosine-3'-phosphate
  modified_base 5: mod_base = OTHER; note = 2'-O-methyladenosine-3'-phosphate
  modified_base 6: mod_base = OTHER; note = 2'-O-methyladenosine-3'-phosphate
  modified_base 7: mod_base = OTHER; note = 2'-fluorocytidine-3'-phosphate
  modified_base 8: mod_base = OTHER; note = 2'-O-methylcytidine-3'-phosphate
  modified_base 9: mod_base = OTHER; note = 2'-fluoroadenosine-3'-phosphate
  modified_base 10: mod_base = OTHER; note = 2'-fluoroguanosine-3'-phosphate
  modified_base 11: mod_base = OTHER; note = 2'-fluorouridine-3'-phosphate
  modified_base 12: mod_base = OTHER; note = 2'-O-methyladenosine-3'-phosphate
  modified_base 13: mod_base = OTHER; note = 2'-O-methylcytidine-3'-phosphate
  modified_base 14: mod_base = OTHER; note = 2'-O-methyluridine-3'-phosphate
  modified_base 15: mod_base = OTHER; note = 2'-O-methyluridine-3'-phosphate
  modified_base 16: mod_base = OTHER; note = 2'-O-methyluridine-3'-phosphate
  modified_base 17: mod_base = OTHER; note = 2'-O-methyladenosine-3'-phosphate
  modified_base 18: mod_base = OTHER; note = 2'-O-methyluridine-3'-phosphate
  modified_base 19: mod_base = OTHER; note = 2'-O-methylcytidine-3'-phosphate
  modified_base 20: mod_base = OTHER; note = 2'-O-methyladenosine-3'-phosphate
  modified_base 21: mod_base = OTHER; note = 2'-O-methyluridine-3'-phosphate N-[tris(GalNAc-alkyl)-amidodecanoyl)]-4-hydroxyprolinol Hyp-(GalNAc-alkyl)3
ttgaaaccagtactttatcat

SEQ ID NO: 2591 - RNA, 23 nt, synthetic construct
  source 1..23: mol_type = other RNA; note = Description of Artificial Sequence: Synthetic oligonucleotide
  modified_base 1: mod_base = OTHER; note = 2'-O-methyladenosine-3'-phosphorothioate
  modified_base 2: mod_base = OTHER; note = 2'-fluorouridine -3'-phosphorothioate
  modified_base 3: mod_base = OTHER; note = 2'-O-methylguanosine-3'-phosphate
  modified_base 4: mod_base = OTHER; note = 2'-O-methyladenosine-3'-phosphate
  modified_base 5: mod_base = OTHER; note = 2'-O-methyluridine-3'-phosphate
  modified_base 6: mod_base = OTHER; note = 2'-fluoroadenosine-3'-phosphate
  modified_base 7: mod_base = OTHER; note = 2'-O-methyladenosine-3'-phosphate
  modified_base 8: mod_base = OTHER; note = 2'-fluoroadenosine-3'-phosphate
  modified_base 9: mod_base = OTHER; note = 2'-fluoroguanosine-3'-phosphate
  modified_base 10: mod_base = OTHER; note = 2'-O-methyluridine-3'-phosphate
  modified_base 11: mod_base = OTHER; note = 2'-O-methyladenosine-3'-phosphate
  modified_base 12: mod_base = OTHER; note = 2'-O-methylcytidine-3'-phosphate
  modified_base 13: mod_base = OTHER; note = 2'-O-methyluridine-3'-phosphate
  modified_base 14: mod_base = OTHER; note = 2'-fluoroguanosine-3'-phosphate
  modified_base 15: mod_base = OTHER; note = 2'-O-methylguanosine-3'-phosphate
  modified_base 16: mod_base = OTHER; note = 2'-fluorouridine-3'-phosphate
  modified_base 17: mod_base = OTHER; note = 2'-O-methyluridine-3'-phosphate
  modified_base 18: mod_base = OTHER; note = 2'-O-methyluridine-3'-phosphate
  modified_base 19: mod_base = OTHER; note = 2'-O-methylcytidine-3'-phosphate
  modified_base 20: mod_base = OTHER; note = 2'-O-methyladenosine-3'-phosphate
  modified_base 21: mod_base = OTHER; note = 2'-O-methyladenosine-3'-phosphorothioate
  modified_base 22: mod_base = OTHER; note = 2'-O-methyladenosine-3'-phosphorothioate
  modified_base 23: mod_base = OTHER; note = 2'-O-methyladenosine-3'-phosphate
atgataaagtactggtttcaaaa

SEQ ID NO: 2592 - RNA, 21 nt, synthetic construct
  source 1..21: mol_type = other RNA; note = Description of Artificial Sequence: Synthetic oligonucleotide
  modified_base 1: mod_base = OTHER; note = 2'-O-methyluridine-3'-phosphorothioate
  modified_base 2: mod_base = OTHER; note = 2'-O-methyluridine-3'-phosphorothioate
  modified_base 3: mod_base = OTHER; note = 2'-O-methyluridine-3'-phosphate
  modified_base 4: mod_base = OTHER; note = 2'-O-methylguanosine-3'-phosphate
  modified_base 5: mod_base = OTHER; note = 2'-O-methyladenosine-3'-phosphate
  modified_base 6: mod_base = OTHER; note = 2'-O-methyladenosine-3'-phosphate
  modified_base 7: mod_base = OTHER; note = 2'-fluoroadenosine-3'-phosphate
  modified_base 8: mod_base = OTHER; note = 2'-O-methylcytidine-3'-phosphate
  modified_base 9: mod_base = OTHER; note = 2'-fluorocytidine-3'-phosphate
  modified_base 10: mod_base = OTHER; note = 2'-fluoroadenosine-3'-phosphate
  modified_base 11: mod_base = OTHER; note = 2'-fluoroguanosine-3'-phosphate
  modified_base 12: mod_base = OTHER; note = 2'-O-methyluridine-3'-phosphate
  modified_base 13: mod_base = OTHER; note = 2'-O-methyladenosine-3'-phosphate
  modified_base 14: mod_base = OTHER; note = 2'-O-methylcytidine-3'-phosphate
  modified_base 15: mod_base = OTHER; note = 2'-O-methyluridine-3'-phosphate
  modified_base 16: mod_base = OTHER; note = 2'-O-methyluridine-3'-phosphate
  modified_base 17: mod_base = OTHER; note = 2'-O-methyluridine-3'-phosphate
  modified_base 18: mod_base = OTHER; note = 2'-O-methyladenosine-3'-phosphate
  modified_base 19: mod_base = OTHER; note = 2'-O-methyluridine-3'-phosphate
  modified_base 20: mod_base = OTHER; note = 2'-O-methylcytidine-3'-phosphate
  modified_base 21: mod_base = OTHER; note = 2'-O-methyladenosine-3'-phosphate N-[tris(GalNAc-alkyl)-amidodecanoyl)]-4-hydroxyprolinol Hyp-(GalNAc-alkyl)3
tttgaaaccagtactttatca

SEQ ID NO: 2593 - RNA, 23 nt, synthetic construct
  source 1..23: mol_type = other RNA; note = Description of Artificial Sequence: Synthetic oligonucleotide
  modified_base 1: mod_base = OTHER; note = 2'-O-methyluridine-3'-phosphorothioate
  modified_base 2: mod_base = OTHER; note = 2'-fluoroguanosine-3'-phosphorothioate
  modified_base 3: mod_base = OTHER; note = 2'-O-methyladenosine-3'-phosphate
  modified_base 4: mod_base = OTHER; note = 2'-O-methyluridine-3'-phosphate
  modified_base 5: mod_base = OTHER; note = 2'-O-methyladenosine-3'-phosphate
  modified_base 6: mod_base = OTHER; note = 2'-fluoroadenosine-3'-phosphate
  modified_base 7: mod_base = OTHER; note = 2'-O-methyladenosine-3'-phosphate
  modified_base 8: mod_base = OTHER; note = 2'-fluoroguanosine-3'-phosphate
  modified_base 9: mod_base = OTHER; note = 2'-fluorouridine-3'-phosphate
  modified_base 10: mod_base = OTHER; note = 2'-O-methyladenosine-3'-phosphate
  modified_base 11: mod_base = OTHER; note = 2'-O-methylcytidine-3'-phosphate
  modified_base 12: mod_base = OTHER; note = 2'-O-methyluridine-3'-phosphate
  modified_base 13: mod_base = OTHER; note = 2'-O-methylguanosine-3'-phosphate
  modified_base 14: mod_base = OTHER; note = 2'-fluoroguanosine-3'-phosphate
  modified_base 15: mod_base = OTHER; note = 2'-O-methyluridine-3'-phosphate
  modified_base 16: mod_base = OTHER; note = 2'-fluorouridine-3'-phosphate
  modified_base 17: mod_base = OTHER; note = 2'-O-methyluridine-3'-phosphate
  modified_base 18: mod_base = OTHER; note = 2'-O-methylcytidine-3'-phosphate
  modified_base 19: mod_base = OTHER; note = 2'-O-methyladenosine-3'-phosphate
  modified_base 20: mod_base = OTHER; note = 2'-O-methyladenosine-3'-phosphate
  modified_base 21: mod_base = OTHER; note = 2'-O-methyladenosine-3'-phosphorothioate
  modified_base 22: mod_base = OTHER; note = 2'-O-methyladenosine-3'-phosphorothioate
  modified_base 23: mod_base = OTHER; note = 2'-O-methyluridine-3'-phosphate
tgataaagtactggtttcaaaat

SEQ ID NO: 2594 - RNA, 21 nt, synthetic construct
  source 1..21: mol_type = other RNA; note = Description of Artificial Sequence: Synthetic oligonucleotide
  modified_base 1: mod_base = OTHER; note = 2'-O-methylcytidine-3'-phosphorothioate
  modified_base 2: mod_base = OTHER; note = 2'-O-methylguanosine-3'-phosphorothioate
  modified_base 3: mod_base = OTHER; note = 2'-O-methyladenosine-3'-phosphate
  modified_base 4: mod_base = OTHER; note = 2'-O-methylguanosine-3'-phosphate
  modified_base 5: mod_base = OTHER; note = 2'-O-methyladenosine-3'-phosphate
  modified_base 6: mod_base = OTHER; note = 2'-O-methyladenosine-3'-phosphate
  modified_base 7: mod_base = OTHER; note = 2'-fluoroguanosine-3'-phosphate
  modified_base 8: mod_base = OTHER; note = 2'-O-methyluridine-3'-phosphate
  modified_base 9: mod_base = OTHER; note = 2'-fluorocytidine-3'-phosphate
  modified_base 10: mod_base = OTHER; note = 2'-fluoroadenosine-3'-phosphate
  modified_base 11: mod_base = OTHER; note = 2'-fluorocytidine-3'-phosphate
  modified_base 12: mod_base = OTHER; note = 2'-O-methylcytidine-3'-phosphate
  modified_base 13: mod_base = OTHER; note = 2'-O-methyladenosine-3'-phosphate
  modified_base 14: mod_base = OTHER; note = 2'-O-methyladenosine-3'-phosphate
  modified_base 15: mod_base = OTHER; note = 2'-O-methylguanosine-3'-phosphate
  modified_base 16: mod_base = OTHER; note = 2'-O-methyladenosine-3'-phosphate
  modified_base 17: mod_base = OTHER; note = 2'-O-methyladenosine-3'-phosphate
  modified_base 18: mod_base = OTHER; note = 2'-O-methylguanosine-3'-phosphate
  modified_base 19: mod_base = OTHER; note = 2'-O-methylcytidine-3'-phosphate
  modified_base 20: mod_base = OTHER; note = 2'-O-methyluridine-3'-phosphate
  modified_base 21: mod_base = OTHER; note = 2'-O-methyladenosine-3'-phosphate N-[tris(GalNAc-alkyl)-amidodecanoyl)]-4-hydroxyprolinol Hyp-(GalNAc-alkyl)3
cgagaagtcaccaagaagcta

SEQ ID NO: 2595 - RNA, 23 nt, synthetic construct
  source 1..23: mol_type = other RNA; note = Description of Artificial Sequence: Synthetic oligonucleotide
  modified_base 1: mod_base = OTHER; note = 2'-O-methyluridine-3'-phosphorothioate
  modified_base 2: mod_base = OTHER; note = 2'-fluoroadenosine-3'-phosphorothioate
  modified_base 3: mod_base = OTHER; note = 2'-O-methylguanosine-3'-phosphate
  modified_base 4: mod_base = OTHER; note = 2'-O-methylcytidine-3'-phosphate
  modified_base 5: mod_base = OTHER; note = 2'-O-methyluridine-3'-phosphate
  modified_base 6: mod_base = OTHER; note = 2'-fluorouridine-3'-phosphate
  modified_base 7: mod_base = OTHER; note = 2'-O-methylcytidine-3'-phosphate
  modified_base 8: mod_base = OTHER; note = 2'-fluorouridine-3'-phosphate
  modified_base 9: mod_base = OTHER; note = 2'-fluorouridine-3'-phosphate
  modified_base 10: mod_base = OTHER; note = 2'-O-methylguanosine-3'-phosphate
  modified_base 11: mod_base = OTHER; note = 2'-O-methylguanosine-3'-phosphate
  modified_base 12: mod_base = OTHER; note = 2'-O-methyluridine-3'-phosphate
  modified_base 13: mod_base = OTHER; note = 2'-O-methylguanosine-3'-phosphate
  modified_base 14: mod_base = OTHER; note = 2'-fluoroadenosine-3'-phosphate
  modified_base 15: mod_base = OTHER; note = 2'-O-methylcytidine-3'-phosphate
  modified_base 16: mod_base = OTHER; note = 2'-fluorouridine-3'-phosphate
  modified_base 17: mod_base = OTHER; note = 2'-O-methyluridine-3'-phosphate
  modified_base 18: mod_base = OTHER; note = 2'-O-methylcytidine-3'-phosphate
  modified_base 19: mod_base = OTHER; note = 2'-O-methyluridine-3'-phosphate
  modified_base 20: mod_base = OTHER; note = 2'-O-methylcytidine-3'-phosphate
  modified_base 21: mod_base = OTHER; note = 2'-O-methylguanosine-3'-phosphorothioate
  modified_base 22: mod_base = OTHER; note = 2'-O-methylguanosine-3'-phosphorothioate
  modified_base 23: mod_base = OTHER; note = 2'-O-methyluridine-3'-phosphate
tagcttcttggtgacttctcggt

SEQ ID NO: 2596 - RNA, 21 nt, synthetic construct
  source 1..21: mol_type = other RNA; note = Description of Artificial Sequence: Synthetic oligonucleotide
  modified_base 1: mod_base = OTHER; note = 2'-O-methylguanosine-3'-phosphorothioate
  modified_base 2: mod_base = OTHER; note = 2'-O-methyladenosine-3'-phosphorothioate
  modified_base 3: mod_base = OTHER; note = 2'-O-methylguanosine-3'-phosphate
  modified_base 4: mod_base = OTHER; note = 2'-O-methyladenosine-3'-phosphate
  modified_base 5: mod_base = OTHER; note = 2'-O-methyladenosine-3'-phosphate
  modified_base 6: mod_base = OTHER; note = 2'-O-methylguanosine-3'-phosphate
  modified_base 7: mod_base = OTHER; note = 2'-fluorouridine-3'-phosphate
  modified_base 8: mod_base = OTHER; note = 2'-O-methylcytidine-3'-phosphate
  modified_base 9: mod_base = OTHER; note = 2'-fluoroadenosine-3'-phosphate
  modified_base 10: mod_base = OTHER; note = 2'-fluorocytidine-3'-phosphate
  modified_base 11: mod_base = OTHER; note = 2'-fluorocytidine-3'-phosphate
  modified_base 12: mod_base = OTHER; note = 2'-O-methyladenosine-3'-phosphate
  modified_base 13: mod_base = OTHER; note = 2'-O-methyladenosine-3'-phosphate
  modified_base 14: mod_base = OTHER; note = 2'-O-methylguanosine-3'-phosphate
  modified_base 15: mod_base = OTHER; note = 2'-O-methyladenosine-3'-phosphate
  modified_base 16: mod_base = OTHER; note = 2'-O-methyladenosine-3'-phosphate
  modified_base 17: mod_base = OTHER; note = 2'-O-methylguanosine-3'-phosphate
  modified_base 18: mod_base = OTHER; note = 2'-O-methylcytidine-3'-phosphate
  modified_base 19: mod_base = OTHER; note = 2'-O-methyluridine-3'-phosphate
  modified_base 20: mod_base = OTHER; note = 2'-O-methyladenosine-3'-phosphate
  modified_base 21: mod_base = OTHER; note = 2'-O-methylguanosine-3'-phosphate N-[tris(GalNAc-alkyl)-amidodecanoyl)]-4-hydroxyprolinol Hyp-(GalNAc-alkyl)3
gagaagtcaccaagaagctag

SEQ ID NO: 2597 - RNA, 23 nt, synthetic construct
  source 1..23: mol_type = other RNA; note = Description of Artificial Sequence: Synthetic oligonucleotide
  modified_base 1: mod_base = OTHER; note = 2'-O-methylcytidine-3'-phosphorothioate
  modified_base 2: mod_base = OTHER; note = 2'-fluorouridine -3'-phosphorothioate
  modified_base 3: mod_base = OTHER; note = 2'-O-methyladenosine-3'-phosphate
  modified_base 4: mod_base = OTHER; note = 2'-O-methylguanosine-3'-phosphate
  modified_base 5: mod_base = OTHER; note = 2'-O-methylcytidine-3'-phosphate
  modified_base 6: mod_base = OTHER; note = 2'-fluorouridine-3'-phosphate
  modified_base 7: mod_base = OTHER; note = 2'-O-methyluridine-3'-phosphate
  modified_base 8: mod_base = OTHER; note = 2'-fluorocytidine-3'-phosphate
  modified_base 9: mod_base = OTHER; note = 2'-fluorouridine-3'-phosphate
  modified_base 10: mod_base = OTHER; note = 2'-O-methyluridine-3'-phosphate
  modified_base 11: mod_base = OTHER; note = 2'-O-methylguanosine-3'-phosphate
  modified_base 12: mod_base = OTHER; note = 2'-O-methylguanosine-3'-phosphate
  modified_base 13: mod_base = OTHER; note = 2'-O-methyluridine-3'-phosphate
  modified_base 14: mod_base = OTHER; note = 2'-fluoroguanosine-3'-phosphate
  modified_base 15: mod_base = OTHER; note = 2'-O-methyladenosine-3'-phosphate
  modified_base 16: mod_base = OTHER; note = 2'-fluorocytidine-3'-phosphate
  modified_base 17: mod_base = OTHER; note = 2'-O-methyluridine-3'-phosphate
  modified_base 18: mod_base = OTHER; note = 2'-O-methyluridine-3'-phosphate
  modified_base 19: mod_base = OTHER; note = 2'-O-methylcytidine-3'-phosphate
  modified_base 20: mod_base = OTHER; note = 2'-O-methyluridine-3'-phosphate
  modified_base 21: mod_base = OTHER; note = 2'-O-methylcytidine-3'-phosphorothioate
  modified_base 22: mod_base = OTHER; note = 2'-O-methylguanosine-3'-phosphorothioate
  modified_base 23: mod_base = OTHER; note = 2'-O-methylguanosine-3'-phosphate
ctagcttcttggtgacttctcgg

SEQ ID NO: 2598 - RNA, 21 nt, synthetic construct
  source 1..21: mol_type = other RNA; note = Description of Artificial Sequence: Synthetic oligonucleotide
  modified_base 1: mod_base = OTHER; note = 2'-O-methylguanosine-3'-phosphorothioate
  modified_base 2: mod_base = OTHER; note = 2'-O-methylguanosine-3'-phosphorothioate
  modified_base 3: mod_base = OTHER; note = 2'-O-methyladenosine-3'-phosphate
  modified_base 4: mod_base = OTHER; note = 2'-O-methylcytidine-3'-phosphate
  modified_base 5: mod_base = OTHER; note = 2'-O-methylcytidine-3'-phosphate
  modified_base 6: mod_base = OTHER; note = 2'-O-methylguanosine-3'-phosphate
  modified_base 7: mod_base = OTHER; note = 2'-fluoroadenosine-3'-phosphate
  modified_base 8: mod_base = OTHER; note = 2'-O-methylguanosine-3'-phosphate
  modified_base 9: mod_base = OTHER; note = 2'-fluoroadenosine-3'-phosphate
  modified_base 10: mod_base = OTHER; note = 2'-fluoroadenosine-3'-phosphate
  modified_base 11: mod_base = OTHER; note = 2'-fluoroguanosine-3'-phosphate
  modified_base 12: mod_base = OTHER; note = 2'-O-methyluridine-3'-phosphate
  modified_base 13: mod_base = OTHER; note = 2'-O-methylcytidine-3'-phosphate
  modified_base 14: mod_base = OTHER; note = 2'-O-methyladenosine-3'-phosphate
  modified_base 15: mod_base = OTHER; note = 2'-O-methylcytidine-3'-phosphate
  modified_base 16: mod_base = OTHER; note = 2'-O-methylcytidine-3'-phosphate
  modified_base 17: mod_base = OTHER; note = 2'-O-methyladenosine-3'-phosphate
  modified_base 18: mod_base = OTHER; note = 2'-O-methyladenosine-3'-phosphate
  modified_base 19: mod_base = OTHER; note = 2'-O-methylguanosine-3'-phosphate
  modified_base 20: mod_base = OTHER; note = 2'-O-methyladenosine-3'-phosphate
  modified_base 21: mod_base = OTHER; note = 2'-O-methyladenosine-3'-phosphate N-[tris(GalNAc-alkyl)-amidodecanoyl)]-4-hydroxyprolinol Hyp-(GalNAc-alkyl)3
ggaccgagaagtcaccaagaa

SEQ ID NO: 2599 - RNA, 23 nt, synthetic construct
  source 1..23: mol_type = other RNA; note = Description of Artificial Sequence: Synthetic oligonucleotide
  modified_base 1: mod_base = OTHER; note = 2'-O-methyluridine-3'-phosphorothioate
  modified_base 2: mod_base = OTHER; note = 2'-fluorouridine -3'-phosphorothioate
  modified_base 3: mod_base = OTHER; note = 2'-O-methylcytidine-3'-phosphate
  modified_base 4: mod_base = OTHER; note = 2'-O-methyluridine-3'-phosphate
  modified_base 5: mod_base = OTHER; note = 2'-O-methyluridine-3'-phosphate
  modified_base 6: mod_base = OTHER; note = 2'-fluoroguanosine-3'-phosphate
  modified_base 7: mod_base = OTHER; note = 2'-O-methylguanosine-3'-phosphate
  modified_base 8: mod_base = OTHER; note = 2'-fluorouridine-3'-phosphate
  modified_base 9: mod_base = OTHER; note = 2'-fluoroguanosine-3'-phosphate
  modified_base 10: mod_base = OTHER; note = 2'-O-methyladenosine-3'-phosphate
  modified_base 11: mod_base = OTHER; note = 2'-O-methylcytidine-3'-phosphate
  modified_base 12: mod_base = OTHER; note = 2'-O-methyluridine-3'-phosphate
  modified_base 13: mod_base = OTHER; note = 2'-O-methyluridine-3'-phosphate
  modified_base 14: mod_base = OTHER; note = 2'-fluorocytidine-3'-phosphate
  modified_base 15: mod_base = OTHER; note = 2'-O-methyluridine-3'-phosphate
  modified_base 16: mod_base = OTHER; note = 2'-fluorocytidine-3'-phosphate
  modified_base 17: mod_base = OTHER; note = 2'-O-methylguanosine-3'-phosphate
  modified_base 18: mod_base = OTHER; note = 2'-O-methylguanosine-3'-phosphate
  modified_base 19: mod_base = OTHER; note = 2'-O-methyluridine-3'-phosphate
  modified_base 20: mod_base = OTHER; note = 2'-O-methylcytidine-3'-phosphate
  modified_base 21: mod_base = OTHER; note = 2'-O-methylcytidine-3'-phosphorothioate
  modified_base 22: mod_base = OTHER; note = 2'-O-methyluridine-3'-phosphorothioate
  modified_base 23: mod_base = OTHER; note = 2'-O-methyluridine-3'-phosphate
ttcttggtgacttctcggtcctt

SEQ ID NO: 2600 - RNA, 21 nt, synthetic construct
  source 1..21: mol_type = other RNA; note = Description of Artificial Sequence: Synthetic oligonucleotide
  modified_base 1: mod_base = OTHER; note = 2'-O-methyladenosine-3'-phosphorothioate
  modified_base 2: mod_base = OTHER; note = 2'-O-methylguanosine-3'-phosphorothioate
  modified_base 3: mod_base = OTHER; note = 2'-O-methylguanosine-3'-phosphate
  modified_base 4: mod_base = OTHER; note = 2'-O-methyladenosine-3'-phosphate
  modified_base 5: mod_base = OTHER; note = 2'-O-methylcytidine-3'-phosphate
  modified_base 6: mod_base = OTHER; note = 2'-O-methylcytidine-3'-phosphate
  modified_base 7: mod_base = OTHER; note = 2'-fluoroguanosine-3'-phosphate
  modified_base 8: mod_base = OTHER; note = 2'-O-methyladenosine-3'-phosphate
  modified_base 9: mod_base = OTHER; note = 2'-fluoroguanosine-3'-phosphate
  modified_base 10: mod_base = OTHER; note = 2'-fluoroadenosine-3'-phosphate
  modified_base 11: mod_base = OTHER; note = 2'-fluoroadenosine-3'-phosphate
  modified_base 12: mod_base = OTHER; note = 2'-O-methylguanosine-3'-phosphate
  modified_base 13: mod_base = OTHER; note = 2'-O-methyluridine-3'-phosphate
  modified_base 14: mod_base = OTHER; note = 2'-O-methylcytidine-3'-phosphate
  modified_base 15: mod_base = OTHER; note = 2'-O-methyladenosine-3'-phosphate
  modified_base 16: mod_base = OTHER; note = 2'-O-methylcytidine-3'-phosphate
  modified_base 17: mod_base = OTHER; note = 2'-O-methylcytidine-3'-phosphate
  modified_base 18: mod_base = OTHER; note = 2'-O-methyladenosine-3'-phosphate
  modified_base 19: mod_base = OTHER; note = 2'-O-methyladenosine-3'-phosphate
  modified_base 20: mod_base = OTHER; note = 2'-O-methylguanosine-3'-phosphate
  modified_base 21: mod_base = OTHER; note = 2'-O-methyladenosine-3'-phosphate N-[tris(GalNAc-alkyl)-amidodecanoyl)]-4-hydroxyprolinol Hyp-(GalNAc-alkyl)3
aggaccgagaagtcaccaaga

SEQ ID NO: 2601 - RNA, 23 nt, synthetic construct
  source 1..23: mol_type = other RNA; note = Description of Artificial Sequence: Synthetic oligonucleotide
  modified_base 1: mod_base = OTHER; note = 2'-O-methyluridine-3'-phosphorothioate
  modified_base 2: mod_base = OTHER; note = 2'-fluorocytidine-3'-phosphorothioate
  modified_base 3: mod_base = OTHER; note = 2'-O-methyluridine-3'-phosphate
  modified_base 4: mod_base = OTHER; note = 2'-O-methyluridine-3'-phosphate
  modified_base 5: mod_base = OTHER; note = 2'-O-methylguanosine-3'-phosphate
  modified_base 6: mod_base = OTHER; note = 2'-fluoroguanosine-3'-phosphate
  modified_base 7: mod_base = OTHER; note = 2'-O-methyluridine-3'-phosphate
  modified_base 8: mod_base = OTHER; note = 2'-fluoroguanosine-3'-phosphate
  modified_base 9: mod_base = OTHER; note = 2'-fluoroadenosine-3'-phosphate
  modified_base 10: mod_base = OTHER; note = 2'-O-methylcytidine-3'-phosphate
  modified_base 11: mod_base = OTHER; note = 2'-O-methyluridine-3'-phosphate
  modified_base 12: mod_base = OTHER; note = 2'-O-methyluridine-3'-phosphate
  modified_base 13: mod_base = OTHER; note = 2'-O-methylcytidine-3'-phosphate
  modified_base 14: mod_base = OTHER; note = 2'-fluorouridine-3'-phosphate
  modified_base 15: mod_base = OTHER; note = 2'-O-methylcytidine-3'-phosphate
  modified_base 16: mod_base = OTHER; note = 2'-fluoroguanosine-3'-phosphate
  modified_base 17: mod_base = OTHER; note = 2'-O-methylguanosine-3'-phosphate
  modified_base 18: mod_base = OTHER; note = 2'-O-methyluridine-3'-phosphate
  modified_base 19: mod_base = OTHER; note = 2'-O-methylcytidine-3'-phosphate
  modified_base 20: mod_base = OTHER; note = 2'-O-methylcytidine-3'-phosphate
  modified_base 21: mod_base = OTHER; note = 2'-O-methyluridine-3'-phosphorothioate
  modified_base 22: mod_base = OTHER; note = 2'-O-methyluridine-3'-phosphorothioate
  modified_base 23: mod_base = OTHER; note = 2'-O-methylguanosine-3'-phosphate
tcttggtgacttctcggtccttg

SEQ ID NO: 2602 - RNA, 21 nt, synthetic construct
  source 1..21: mol_type = other RNA; note = Description of Artificial Sequence: Synthetic oligonucleotide
  modified_base 1: mod_base = OTHER; note = 2'-O-methyluridine-3'-phosphorothioate
  modified_base 2: mod_base = OTHER; note = 2'-O-methylcytidine-3'-phosphorothioate
  modified_base 3: mod_base = OTHER; note = 2'-O-methyladenosine-3'-phosphate
  modified_base 4: mod_base = OTHER; note = 2'-O-methyladenosine-3'-phosphate
  modified_base 5: mod_base = OTHER; note = 2'-O-methyladenosine-3'-phosphate
  modified_base 6: mod_base = OTHER; note = 2'-O-methylguanosine-3'-phosphate
  modified_base 7: mod_base = OTHER; note = 2'-fluorouridine-3'-phosphate
  modified_base 8: mod_base = OTHER; note = 2'-O-methylguanosine-3'-phosphate
  modified_base 9: mod_base = OTHER; note = 2'-fluorouridine-3'-phosphate
  modified_base 10: mod_base = OTHER; note = 2'-fluorouridine-3'-phosphate
  modified_base 11: mod_base = OTHER; note = 2'-fluoroguanosine-3'-phosphate
  modified_base 12: mod_base = OTHER; note = 2'-O-methylguanosine-3'-phosphate
  modified_base 13: mod_base = OTHER; note = 2'-O-methyluridine-3'-phosphate
  modified_base 14: mod_base = OTHER; note = 2'-O-methyladenosine-3'-phosphate
  modified_base 15: mod_base = OTHER; note = 2'-O-methyladenosine-3'-phosphate
  modified_base 16: mod_base = OTHER; note = 2'-O-methyluridine-3'-phosphate
  modified_base 17: mod_base = OTHER; note = 2'-O-methylguanosine-3'-phosphate
  modified_base 18: mod_base = OTHER; note = 2'-O-methylcytidine-3'-phosphate
  modified_base 19: mod_base = OTHER; note = 2'-O-methylcytidine-3'-phosphate
  modified_base 20: mod_base = OTHER; note = 2'-O-methyluridine-3'-phosphate
  modified_base 21: mod_base = OTHER; note = 2'-O-methylguanosine-3'-phosphate N-[tris(GalNAc-alkyl)-amidodecanoyl)]-4-hydroxyprolinol Hyp-(GalNAc-alkyl)3
tcaaagtgttggtaatgcctg

SEQ ID NO: 2603 - RNA, 23 nt, synthetic construct
  source 1..23: mol_type = other RNA; note = Description of Artificial Sequence: Synthetic oligonucleotide
  modified_base 1: mod_base = OTHER; note = 2'-O-methylcytidine-3'-phosphorothioate
  modified_base 2: mod_base = OTHER; note = 2'-fluoroadenosine-3'-phosphorothioate
  modified_base 3: mod_base = OTHER; note = 2'-O-methylguanosine-3'-phosphate
  modified_base 4: mod_base = OTHER; note = 2'-O-methylguanosine-3'-phosphate
  modified_base 5: mod_base = OTHER; note = 2'-O-methylcytidine-3'-phosphate
  modified_base 6: mod_base = OTHER; note = 2'-fluoroadenosine-3'-phosphate
  modified_base 7: mod_base = OTHER; note = 2'-O-methyluridine-3'-phosphate
  modified_base 8: mod_base = OTHER; note = 2'-fluorouridine-3'-phosphate
  modified_base 9: mod_base = OTHER; note = 2'-fluoroadenosine-3'-phosphate
  modified_base 10: mod_base = OTHER; note = 2'-O-methylcytidine-3'-phosphate
  modified_base 11: mod_base = OTHER; note = 2'-O-methylcytidine-3'-phosphate
  modified_base 12: mod_base = OTHER; note = 2'-O-methyladenosine-3'-phosphate
  modified_base 13: mod_base = OTHER; note = 2'-O-methyladenosine-3'-phosphate
  modified_base 14: mod_base = OTHER; note = 2'-fluorocytidine-3'-phosphate
  modified_base 15: mod_base = OTHER; note = 2'-O-methyladenosine-3'-phosphate
  modified_base 16: mod_base = OTHER; note = 2'-fluorocytidine-3'-phosphate
  modified_base 17: mod_base = OTHER; note = 2'-O-methyluridine-3'-phosphate
  modified_base 18: mod_base = OTHER; note = 2'-O-methyluridine-3'-phosphate
  modified_base 19: mod_base = OTHER; note = 2'-O-methyluridine-3'-phosphate
  modified_base 20: mod_base = OTHER; note = 2'-O-methylguanosine-3'-phosphate
  modified_base 21: mod_base = OTHER; note = 2'-O-methyladenosine-3'-phosphorothioate
  modified_base 22: mod_base = OTHER; note = 2'-O-methyladenosine-3'-phosphorothioate
  modified_base 23: mod_base = OTHER; note = 2'-O-methylcytidine-3'-phosphate
caggcattaccaacactttgaac

SEQ ID NO: 2604 - RNA, 21 nt, synthetic construct
  source 1..21: mol_type = other RNA; note = Description of Artificial Sequence: Synthetic oligonucleotide
  modified_base 1: mod_base = OTHER; note = 2'-O-methylcytidine-3'-phosphorothioate
  modified_base 2: mod_base = OTHER; note = 2'-O-methyladenosine-3'-phosphorothioate
  modified_base 3: mod_base = OTHER; note = 2'-O-methyladenosine-3'-phosphate
  modified_base 4: mod_base = OTHER; note = 2'-O-methyladenosine-3'-phosphate
  modified_base 5: mod_base = OTHER; note = 2'-O-methylguanosine-3'-phosphate
  modified_base 6: mod_base = OTHER; note = 2'-O-methyluridine-3'-phosphate
  modified_base 7: mod_base = OTHER; note = 2'-fluoroguanosine-3'-phosphate
  modified_base 8: mod_base = OTHER; note = 2'-O-methyluridine-3'-phosphate
  modified_base 9: mod_base = OTHER; note = 2'-fluorouridine-3'-phosphate
  modified_base 10: mod_base = OTHER; note = 2'-fluoroguanosine-3'-phosphate
  modified_base 11: mod_base = OTHER; note = 2'-fluoroguanosine-3'-phosphate
  modified_base 12: mod_base = OTHER; note = 2'-O-methyluridine-3'-phosphate
  modified_base 13: mod_base = OTHER; note = 2'-O-methyladenosine-3'-phosphate
  modified_base 14: mod_base = OTHER; note = 2'-O-methyladenosine-3'-phosphate
  modified_base 15: mod_base = OTHER; note = 2'-O-methyluridine-3'-phosphate
  modified_base 16: mod_base = OTHER; note = 2'-O-methylguanosine-3'-phosphate
  modified_base 17: mod_base = OTHER; note = 2'-O-methylcytidine-3'-phosphate
  modified_base 18: mod_base = OTHER; note = 2'-O-methylcytidine-3'-phosphate
  modified_base 19: mod_base = OTHER; note = 2'-O-methyluridine-3'-phosphate
  modified_base 20: mod_base = OTHER; note = 2'-O-methylguanosine-3'-phosphate
  modified_base 21: mod_base = OTHER; note = 2'-O-methyladenosine-3'-phosphate N-[tris(GalNAc-alkyl)-amidodecanoyl)]-4-hydroxyprolinol Hyp-(GalNAc-alkyl)3
caaagtgttggtaatgcctga

SEQ ID NO: 2605 - RNA, 23 nt, synthetic construct
  source 1..23: mol_type = other RNA; note = Description of Artificial Sequence: Synthetic oligonucleotide
  modified_base 1: mod_base = OTHER; note = 2'-O-methyluridine-3'-phosphorothioate
  modified_base 2: mod_base = OTHER; note = 2'-fluorocytidine-3'-phosphorothioate
  modified_base 3: mod_base = OTHER; note = 2'-O-methyladenosine-3'-phosphate
  modified_base 4: mod_base = OTHER; note = 2'-O-methylguanosine-3'-phosphate
  modified_base 5: mod_base = OTHER; note = 2'-O-methylguanosine-3'-phosphate
  modified_base 6: mod_base = OTHER; note = 2'-fluorocytidine-3'-phosphate
  modified_base 7: mod_base = OTHER; note = 2'-O-methyladenosine-3'-phosphate
  modified_base 8: mod_base = OTHER; note = 2'-fluorouridine-3'-phosphate
  modified_base 9: mod_base = OTHER; note = 2'-fluorouridine-3'-phosphate
  modified_base 10: mod_base = OTHER; note = 2'-O-methyladenosine-3'-phosphate
  modified_base 11: mod_base = OTHER; note = 2'-O-methylcytidine-3'-phosphate
  modified_base 12: mod_base = OTHER; note = 2'-O-methylcytidine-3'-phosphate
  modified_base 13: mod_base = OTHER; note = 2'-O-methyladenosine-3'-phosphate
  modified_base 14: mod_base = OTHER; note = 2'-fluoroadenosine-3'-phosphate
  modified_base 15: mod_base = OTHER; note = 2'-O-methylcytidine-3'-phosphate
  modified_base 16: mod_base = OTHER; note = 2'-fluoroadenosine-3'-phosphate
  modified_base 17: mod_base = OTHER; note = 2'-O-methylcytidine-3'-phosphate
  modified_base 18: mod_base = OTHER; note = 2'-O-methyluridine-3'-phosphate
  modified_base 19: mod_base = OTHER; note = 2'-O-methyluridine-3'-phosphate
  modified_base 20: mod_base = OTHER; note = 2'-O-methyluridine-3'-phosphate
  modified_base 21: mod_base = OTHER; note = 2'-O-methylguanosine-3'-phosphorothioate
  modified_base 22: mod_base = OTHER; note = 2'-O-methyladenosine-3'-phosphorothioate
  modified_base 23: mod_base = OTHER; note = 2'-O-methyladenosine-3'-phosphate
tcaggcattaccaacactttgaa

SEQ ID NO: 2606 - RNA, 21 nt, synthetic construct
  source 1..21: mol_type = other RNA; note = Description of Artificial Sequence: Synthetic oligonucleotide
  modified_base 1: mod_base = OTHER; note = 2'-O-methyladenosine-3'-phosphorothioate
  modified_base 2: mod_base = OTHER; note = 2'-O-methylguanosine-3'-phosphorothioate
  modified_base 3: mod_base = OTHER; note = 2'-O-methylguanosine-3'-phosphate
  modified_base 4: mod_base = OTHER; note = 2'-O-methyluridine-3'-phosphate
  modified_base 5: mod_base = OTHER; note = 2'-O-methyluridine-3'-phosphate
  modified_base 6: mod_base = OTHER; note = 2'-O-methylcytidine-3'-phosphate
  modified_base 7: mod_base = OTHER; note = 2'-fluoroadenosine-3'-phosphate
  modified_base 8: mod_base = OTHER; note = 2'-O-methyladenosine-3'-phosphate
  modified_base 9: mod_base = OTHER; note = 2'-fluoroadenosine-3'-phosphate
  modified_base 10: mod_base = OTHER; note = 2'-fluoroguanosine-3'-phosphate
  modified_base 11: mod_base = OTHER; note = 2'-fluorouridine-3'-phosphate
  modified_base 12: mod_base = OTHER; note = 2'-O-methylguanosine-3'-phosphate
  modified_base 13: mod_base = OTHER; note = 2'-O-methyluridine-3'-phosphate
  modified_base 14: mod_base = OTHER; note = 2'-O-methyluridine-3'-phosphate
  modified_base 15: mod_base = OTHER; note = 2'-O-methylguanosine-3'-phosphate
  modified_base 16: mod_base = OTHER; note = 2'-O-methylguanosine-3'-phosphate
  modified_base 17: mod_base = OTHER; note = 2'-O-methyluridine-3'-phosphate
  modified_base 18: mod_base = OTHER; note = 2'-O-methyladenosine-3'-phosphate
  modified_base 19: mod_base = OTHER; note = 2'-O-methyladenosine-3'-phosphate
  modified_base 20: mod_base = OTHER; note = 2'-O-methyluridine-3'-phosphate
  modified_base 21: mod_base = OTHER; note = 2'-O-methylguanosine-3'-phosphate N-[tris(GalNAc-alkyl)-amidodecanoyl)]-4-hydroxyprolinol Hyp-(GalNAc-alkyl)3
aggttcaaagtgttggtaatg

SEQ ID NO: 2607 - RNA, 23 nt, synthetic construct
  source 1..23: mol_type = other RNA; note = Description of Artificial Sequence: Synthetic oligonucleotide
  modified_base 1: mod_base = OTHER; note = 2'-O-methylcytidine-3'-phosphorothioate
  modified_base 2: mod_base = OTHER; note = 2'-fluoroadenosine-3'-phosphorothioate
  modified_base 3: mod_base = OTHER; note = 2'-O-methyluridine-3'-phosphate
  modified_base 4: mod_base = OTHER; note = 2'-O-methyluridine-3'-phosphate
  modified_base 5: mod_base = OTHER; note = 2'-O-methyladenosine-3'-phosphate
  modified_base 6: mod_base = OTHER; note = 2'-fluorocytidine-3'-phosphate
  modified_base 7: mod_base = OTHER; note = 2'-O-methylcytidine-3'-phosphate
  modified_base 8: mod_base = OTHER; note = 2'-fluoroadenosine-3'-phosphate
  modified_base 9: mod_base = OTHER; note = 2'-fluoroadenosine-3'-phosphate
  modified_base 10: mod_base = OTHER; note = 2'-O-methylcytidine-3'-phosphate
  modified_base 11: mod_base = OTHER; note = 2'-O-methyladenosine-3'-phosphate
  modified_base 12: mod_base = OTHER; note = 2'-O-methylcytidine-3'-phosphate
  modified_base 13: mod_base = OTHER; note = 2'-O-methyluridine-3'-phosphate
  modified_base 14: mod_base = OTHER; note = 2'-fluorouridine-3'-phosphate
  modified_base 15: mod_base = OTHER; note = 2'-O-methyluridine-3'-phosphate
  modified_base 16: mod_base = OTHER; note = 2'-fluoroguanosine-3'-phosphate
  modified_base 17: mod_base = OTHER; note = 2'-O-methyladenosine-3'-phosphate
  modified_base 18: mod_base = OTHER; note = 2'-O-methyladenosine-3'-phosphate
  modified_base 19: mod_base = OTHER; note = 2'-O-methylcytidine-3'-phosphate
  modified_base 20: mod_base = OTHER; note = 2'-O-methylcytidine-3'-phosphate
  modified_base 21: mod_base = OTHER; note = 2'-O-methyluridine-3'-phosphorothioate
  modified_base 22: mod_base = OTHER; note = 2'-O-methylguanosine-3'-phosphorothioate
  modified_base 23: mod_base = OTHER; note = 2'-O-methyladenosine-3'-phosphate
cattaccaacactttgaacctga

SEQ ID NO: 2608 - RNA, 21 nt, synthetic construct
  source 1..21: mol_type = other RNA; note = Description of Artificial Sequence: Synthetic oligonucleotide
  modified_base 1: mod_base = OTHER; note = 2'-O-methylcytidine-3'-phosphorothioate
  modified_base 2: mod_base = OTHER; note = 2'-O-methyladenosine-3'-phosphorothioate
  modified_base 3: mod_base = OTHER; note = 2'-O-methylguanosine-3'-phosphate
  modified_base 4: mod_base = OTHER; note = 2'-O-methylguanosine-3'-phosphate
  modified_base 5: mod_base = OTHER; note = 2'-O-methyluridine-3'-phosphate
  modified_base 6: mod_base = OTHER; note = 2'-O-methyluridine-3'-phosphate
  modified_base 7: mod_base = OTHER; note = 2'-fluorocytidine-3'-phosphate
  modified_base 8: mod_base = OTHER; note = 2'-O-methyladenosine-3'-phosphate
  modified_base 9: mod_base = OTHER; note = 2'-fluoroadenosine-3'-phosphate
  modified_base 10: mod_base = OTHER; note = 2'-fluoroadenosine-3'-phosphate
  modified_base 11: mod_base = OTHER; note = 2'-fluoroguanosine-3'-phosphate
  modified_base 12: mod_base = OTHER; note = 2'-O-methyluridine-3'-phosphate
  modified_base 13: mod_base = OTHER; note = 2'-O-methylguanosine-3'-phosphate
  modified_base 14: mod_base = OTHER; note = 2'-O-methyluridine-3'-phosphate
  modified_base 15: mod_base = OTHER; note = 2'-O-methyluridine-3'-phosphate
  modified_base 16: mod_base = OTHER; note = 2'-O-methylguanosine-3'-phosphate
  modified_base 17: mod_base = OTHER; note = 2'-O-methylguanosine-3'-phosphate
  modified_base 18: mod_base = OTHER; note = 2'-O-methyluridine-3'-phosphate
  modified_base 19: mod_base = OTHER; note = 2'-O-methyladenosine-3'-phosphate
  modified_base 20: mod_base = OTHER; note = 2'-O-methyladenosine-3'-phosphate
  modified_base 21: mod_base = OTHER; note = 2'-O-methyluridine-3'-phosphate N-[tris(GalNAc-alkyl)-amidodecanoyl)]-4-hydroxyprolinol Hyp-(GalNAc-alkyl)3
caggttcaaagtgttggtaat

SEQ ID NO: 2609 - RNA, 23 nt, synthetic construct
  source 1..23: mol_type = other RNA; note = Description of Artificial Sequence: Synthetic oligonucleotide
  modified_base 1: mod_base = OTHER; note = 2'-O-methyladenosine-3'-phosphorothioate
  modified_base 2: mod_base = OTHER; note = 2'-fluorouridine -3'-phosphorothioate
  modified_base 3: mod_base = OTHER; note = 2'-O-methyluridine-3'-phosphate
  modified_base 4: mod_base = OTHER; note = 2'-O-methyladenosine-3'-phosphate
  modified_base 5: mod_base = OTHER; note = 2'-O-methylcytidine-3'-phosphate
  modified_base 6: mod_base = OTHER; note = 2'-fluorocytidine-3'-phosphate
  modified_base 7: mod_base = OTHER; note = 2'-O-methyladenosine-3'-phosphate
  modified_base 8: mod_base = OTHER; note = 2'-fluoroadenosine-3'-phosphate
  modified_base 9: mod_base = OTHER; note = 2'-fluorocytidine-3'-phosphate
  modified_base 10: mod_base = OTHER; note = 2'-O-methyladenosine-3'-phosphate
  modified_base 11: mod_base = OTHER; note = 2'-O-methylcytidine-3'-phosphate
  modified_base 12: mod_base = OTHER; note = 2'-O-methyluridine-3'-phosphate
  modified_base 13: mod_base = OTHER; note = 2'-O-methyluridine-3'-phosphate
  modified_base 14: mod_base = OTHER; note = 2'-fluorouridine-3'-phosphate
  modified_base 15: mod_base = OTHER; note = 2'-O-methylguanosine-3'-phosphate
  modified_base 16: mod_base = OTHER; note = 2'-fluoroadenosine-3'-phosphate
  modified_base 17: mod_base = OTHER; note = 2'-O-methyladenosine-3'-phosphate
  modified_base 18: mod_base = OTHER; note = 2'-O-methylcytidine-3'-phosphate
  modified_base 19: mod_base = OTHER; note = 2'-O-methylcytidine-3'-phosphate
  modified_base 20: mod_base = OTHER; note = 2'-O-methyluridine-3'-phosphate
  modified_base 21: mod_base = OTHER; note = 2'-O-methylguanosine-3'-phosphorothioate
  modified_base 22: mod_base = OTHER; note = 2'-O-methyladenosine-3'-phosphorothioate
  modified_base 23: mod_base = OTHER; note = 2'-O-methylguanosine-3'-phosphate
attaccaacactttgaacctgag

SEQ ID NO: 2610 - RNA, 21 nt, synthetic construct
  source 1..21: mol_type = other RNA; note = Description of Artificial Sequence: Synthetic oligonucleotide
  modified_base 1: mod_base = OTHER; note = 2'-O-methyluridine-3'-phosphorothioate
  modified_base 2: mod_base = OTHER; note = 2'-O-methyladenosine-3'-phosphorothioate
  modified_base 3: mod_base = OTHER; note = 2'-O-methyluridine-3'-phosphate
  modified_base 4: mod_base = OTHER; note = 2'-O-methyluridine-3'-phosphate
  modified_base 5: mod_base = OTHER; note = 2'-O-methyladenosine-3'-phosphate
  modified_base 6: mod_base = OTHER; note = 2'-O-methylcytidine-3'-phosphate
  modified_base 7: mod_base = OTHER; note = 2'-fluorouridine-3'-phosphate
  modified_base 8: mod_base = OTHER; note = 2'-O-methyluridine-3'-phosphate
  modified_base 9: mod_base = OTHER; note = 2'-fluoroguanosine-3'-phosphate
  modified_base 10: mod_base = OTHER; note = 2'-fluoroadenosine-3'-phosphate
  modified_base 11: mod_base = OTHER; note = 2'-fluorocytidine-3'-phosphate
  modified_base 12: mod_base = OTHER; note = 2'-O-methyladenosine-3'-phosphate
  modified_base 13: mod_base = OTHER; note = 2'-O-methyladenosine-3'-phosphate
  modified_base 14: mod_base = OTHER; note = 2'-O-methyladenosine-3'-phosphate
  modified_base 15: mod_base = OTHER; note = 2'-O-methylguanosine-3'-phosphate
  modified_base 16: mod_base = OTHER; note = 2'-O-methyladenosine-3'-phosphate
  modified_base 17: mod_base = OTHER; note = 2'-O-methylguanosine-3'-phosphate
  modified_base 18: mod_base = OTHER; note = 2'-O-methyladenosine-3'-phosphate
  modified_base 19: mod_base = OTHER; note = 2'-O-methylcytidine-3'-phosphate
  modified_base 20: mod_base = OTHER; note = 2'-O-methyladenosine-3'-phosphate
  modified_base 21: mod_base = OTHER; note = 2'-O-methylcytidine-3'-phosphate N-[tris(GalNAc-alkyl)-amidodecanoyl)]-4-hydroxyprolinol Hyp-(GalNAc-alkyl)3
tattacttgacaaagagacac

SEQ ID NO: 2611 - RNA, 23 nt, synthetic construct
  source 1..23: mol_type = other RNA; note = Description of Artificial Sequence: Synthetic oligonucleotide
  modified_base 1: mod_base = OTHER; note = 2'-O-methylguanosine-3'-phosphorothioate
  modified_base 2: mod_base = OTHER; note = 2'-fluorouridine -3'-phosphorothioate
  modified_base 3: mod_base = OTHER; note = 2'-O-methylguanosine-3'-phosphate
  modified_base 4: mod_base = OTHER; note = 2'-O-methyluridine-3'-phosphate
  modified_base 5: mod_base = OTHER; note = 2'-O-methylcytidine-3'-phosphate
  modified_base 6: mod_base = OTHER; note = 2'-fluorouridine-3'-phosphate
  modified_base 7: mod_base = OTHER; note = 2'-O-methylcytidine-3'-phosphate
  modified_base 8: mod_base = OTHER; note = 2'-fluorouridine-3'-phosphate
  modified_base 9: mod_base = OTHER; note = 2'-fluorouridine-3'-phosphate
  modified_base 10: mod_base = OTHER; note = 2'-O-methyluridine-3'-phosphate
  modified_base 11: mod_base = OTHER; note = 2'-O-methylguanosine-3'-phosphate
  modified_base 12: mod_base = OTHER; note = 2'-O-methyluridine-3'-phosphate
  modified_base 13: mod_base = OTHER; note = 2'-O-methylcytidine-3'-phosphate
  modified_base 14: mod_base = OTHER; note = 2'-fluoroadenosine-3'-phosphate
  modified_base 15: mod_base = OTHER; note = 2'-O-methyladenosine-3'-phosphate
  modified_base 16: mod_base = OTHER; note = 2'-fluoroguanosine-3'-phosphate
  modified_base 17: mod_base = OTHER; note = 2'-O-methyluridine-3'-phosphate
  modified_base 18: mod_base = OTHER; note = 2'-O-methyladenosine-3'-phosphate
  modified_base 19: mod_base = OTHER; note = 2'-O-methyladenosine-3'-phosphate
  modified_base 20: mod_base = OTHER; note = 2'-O-methyluridine-3'-phosphate
  modified_base 21: mod_base = OTHER; note = 2'-O-methyladenosine-3'-phosphorothioate
  modified_base 22: mod_base = OTHER; note = 2'-O-methylcytidine-3'-phosphorothioate
  modified_base 23: mod_base = OTHER; note = 2'-O-methyladenosine-3'-phosphate
gtgtctctttgtcaagtaataca

SEQ ID NO: 2612 - RNA, 21 nt, synthetic construct
  source 1..21: mol_type = other RNA; note = Description of Artificial Sequence: Synthetic oligonucleotide
  modified_base 1: mod_base = OTHER; note = 2'-O-methyladenosine-3'-phosphorothioate
  modified_base 2: mod_base = OTHER; note = 2'-O-methyluridine-3'-phosphorothioate
  modified_base 3: mod_base = OTHER; note = 2'-O-methyluridine-3'-phosphate
  modified_base 4: mod_base = OTHER; note = 2'-O-methyladenosine-3'-phosphate
  modified_base 5: mod_base = OTHER; note = 2'-O-methylcytidine-3'-phosphate
  modified_base 6: mod_base = OTHER; note = 2'-O-methyluridine-3'-phosphate
  modified_base 7: mod_base = OTHER; note = 2'-fluorouridine-3'-phosphate
  modified_base 8: mod_base = OTHER; note = 2'-O-methylguanosine-3'-phosphate
  modified_base 9: mod_base = OTHER; note = 2'-fluoroadenosine-3'-phosphate
  modified_base 10: mod_base = OTHER; note = 2'-fluorocytidine-3'-phosphate
  modified_base 11: mod_base = OTHER; note = 2'-fluoroadenosine-3'-phosphate
  modified_base 12: mod_base = OTHER; note = 2'-O-methyladenosine-3'-phosphate
  modified_base 13: mod_base = OTHER; note = 2'-O-methyladenosine-3'-phosphate
  modified_base 14: mod_base = OTHER; note = 2'-O-methylguanosine-3'-phosphate
  modified_base 15: mod_base = OTHER; note = 2'-O-methyladenosine-3'-phosphate
  modified_base 16: mod_base = OTHER; note = 2'-O-methylguanosine-3'-phosphate
  modified_base 17: mod_base = OTHER; note = 2'-O-methyladenosine-3'-phosphate
  modified_base 18: mod_base = OTHER; note = 2'-O-methylcytidine-3'-phosphate
  modified_base 19: mod_base = OTHER; note = 2'-O-methyladenosine-3'-phosphate
  modified_base 20: mod_base = OTHER; note = 2'-O-methylcytidine-3'-phosphate
  modified_base 21: mod_base = OTHER; note = 2'-O-methyluridine-3'-phosphate N-[tris(GalNAc-alkyl)-amidodecanoyl)]-4-hydroxyprolinol Hyp-(GalNAc-alkyl)3
attacttgacaaagagacact

SEQ ID NO: 2613 - RNA, 23 nt, synthetic construct
  source 1..23: mol_type = other RNA; note = Description of Artificial Sequence: Synthetic oligonucleotide
  modified_base 1: mod_base = OTHER; note = 2'-O-methyladenosine-3'-phosphorothioate
  modified_base 2: mod_base = OTHER; note = 2'-fluoroguanosine-3'-phosphorothioate
  modified_base 3: mod_base = OTHER; note = 2'-O-methyluridine-3'-phosphate
  modified_base 4: mod_base = OTHER; note = 2'-O-methylguanosine-3'-phosphate
  modified_base 5: mod_base = OTHER; note = 2'-O-methyluridine-3'-phosphate
  modified_base 6: mod_base = OTHER; note = 2'-fluorocytidine-3'-phosphate
  modified_base 7: mod_base = OTHER; note = 2'-O-methyluridine-3'-phosphate
  modified_base 8: mod_base = OTHER; note = 2'-fluorocytidine-3'-phosphate
  modified_base 9: mod_base = OTHER; note = 2'-fluorouridine-3'-phosphate
  modified_base 10: mod_base = OTHER; note = 2'-O-methyluridine-3'-phosphate
  modified_base 11: mod_base = OTHER; note = 2'-O-methyluridine-3'-phosphate
  modified_base 12: mod_base = OTHER; note = 2'-O-methylguanosine-3'-phosphate
  modified_base 13: mod_base = OTHER; note = 2'-O-methyluridine-3'-phosphate
  modified_base 14: mod_base = OTHER; note = 2'-fluorocytidine-3'-phosphate
  modified_base 15: mod_base = OTHER; note = 2'-O-methyladenosine-3'-phosphate
  modified_base 16: mod_base = OTHER; note = 2'-fluoroadenosine-3'-phosphate
  modified_base 17: mod_base = OTHER; note = 2'-O-methylguanosine-3'-phosphate
  modified_base 18: mod_base = OTHER; note = 2'-O-methyluridine-3'-phosphate
  modified_base 19: mod_base = OTHER; note = 2'-O-methyladenosine-3'-phosphate
  modified_base 20: mod_base = OTHER; note = 2'-O-methyladenosine-3'-phosphate
  modified_base 21: mod_base = OTHER; note = 2'-O-methyluridine-3'-phosphorothioate
  modified_base 22: mod_base = OTHER; note = 2'-O-methyladenosine-3'-phosphorothioate
  modified_base 23: mod_base = OTHER; note = 2'-O-methylcytidine-3'-phosphate
agtgtctctttgtcaagtaatac

SEQ ID NO: 2614 - RNA, 21 nt, synthetic construct
  source 1..21: mol_type = other RNA; note = Description of Artificial Sequence: Synthetic oligonucleotide
  modified_base 1: mod_base = OTHER; note = 2'-O-methylcytidine-3'-phosphorothioate
  modified_base 2: mod_base = OTHER; note = 2'-O-methyladenosine-3'-phosphorothioate
  modified_base 3: mod_base = OTHER; note = 2'-O-methyluridine-3'-phosphate
  modified_base 4: mod_base = OTHER; note = 2'-O-methylguanosine-3'-phosphate
  modified_base 5: mod_base = OTHER; note = 2'-O-methyluridine-3'-phosphate
  modified_base 6: mod_base = OTHER; note = 2'-O-methyladenosine-3'-phosphate
  modified_base 7: mod_base = OTHER; note = 2'-fluorouridine-3'-phosphate
  modified_base 8: mod_base = OTHER; note = 2'-O-methyluridine-3'-phosphate
  modified_base 9: mod_base = OTHER; note = 2'-fluoroadenosine-3'-phosphate
  modified_base 10: mod_base = OTHER; note = 2'-fluorocytidine-3'-phosphate
  modified_base 11: mod_base = OTHER; note = 2'-fluorouridine-3'-phosphate
  modified_base 12: mod_base = OTHER; note = 2'-O-methyluridine-3'-phosphate
  modified_base 13: mod_base = OTHER; note = 2'-O-methylguanosine-3'-phosphate
  modified_base 14: mod_base = OTHER; note = 2'-O-methyladenosine-3'-phosphate
  modified_base 15: mod_base = OTHER; note = 2'-O-methylcytidine-3'-phosphate
  modified_base 16: mod_base = OTHER; note = 2'-O-methyladenosine-3'-phosphate
  modified_base 17: mod_base = OTHER; note = 2'-O-methyladenosine-3'-phosphate
  modified_base 18: mod_base = OTHER; note = 2'-O-methyladenosine-3'-phosphate
  modified_base 19: mod_base = OTHER; note = 2'-O-methylguanosine-3'-phosphate
  modified_base 20: mod_base = OTHER; note = 2'-O-methyladenosine-3'-phosphate
  modified_base 21: mod_base = OTHER; note = 2'-O-methylguanosine-3'-phosphate N-[tris(GalNAc-alkyl)-amidodecanoyl)]-4-hydroxyprolinol Hyp-(GalNAc-alkyl)3
catgtattacttgacaaagag

SEQ ID NO: 2615 - RNA, 23 nt, synthetic construct
  source 1..23: mol_type = other RNA; note = Description of Artificial Sequence: Synthetic oligonucleotide
  modified_base 1: mod_base = OTHER; note = 2'-O-methylcytidine-3'-phosphorothioate
  modified_base 2: mod_base = OTHER; note = 2'-fluorouridine -3'-phosphorothioate
  modified_base 3: mod_base = OTHER; note = 2'-O-methylcytidine-3'-phosphate
  modified_base 4: mod_base = OTHER; note = 2'-O-methyluridine-3'-phosphate
  modified_base 5: mod_base = OTHER; note = 2'-O-methyluridine-3'-phosphate
  modified_base 6: mod_base = OTHER; note = 2'-fluorouridine-3'-phosphate
  modified_base 7: mod_base = OTHER; note = 2'-O-methylguanosine-3'-phosphate
  modified_base 8: mod_base = OTHER; note = 2'-fluorouridine-3'-phosphate
  modified_base 9: mod_base = OTHER; note = 2'-fluorocytidine-3'-phosphate
  modified_base 10: mod_base = OTHER; note = 2'-O-methyladenosine-3'-phosphate
  modified_base 11: mod_base = OTHER; note = 2'-O-methyladenosine-3'-phosphate
  modified_base 12: mod_base = OTHER; note = 2'-O-methylguanosine-3'-phosphate
  modified_base 13: mod_base = OTHER; note = 2'-O-methyluridine-3'-phosphate
  modified_base 14: mod_base = OTHER; note = 2'-fluoroadenosine-3'-phosphate
  modified_base 15: mod_base = OTHER; note = 2'-O-methyladenosine-3'-phosphate
  modified_base 16: mod_base = OTHER; note = 2'-fluorouridine-3'-phosphate
  modified_base 17: mod_base = OTHER; note = 2'-O-methyladenosine-3'-phosphate
  modified_base 18: mod_base = OTHER; note = 2'-O-methylcytidine-3'-phosphate
  modified_base 19: mod_base = OTHER; note = 2'-O-methyladenosine-3'-phosphate
  modified_base 20: mod_base = OTHER; note = 2'-O-methyluridine-3'-phosphate
  modified_base 21: mod_base = OTHER; note = 2'-O-methylguanosine-3'-phosphorothioate
  modified_base 22: mod_base = OTHER; note = 2'-O-methylcytidine-3'-phosphorothioate
  modified_base 23: mod_base = OTHER; note = 2'-O-methyluridine-3'-phosphate
ctctttgtcaagtaatacatgct

SEQ ID NO: 2616 - RNA, 21 nt, synthetic construct
  source 1..21: mol_type = other RNA; note = Description of Artificial Sequence: Synthetic oligonucleotide
  modified_base 1: mod_base = OTHER; note = 2'-O-methylguanosine-3'-phosphorothioate
  modified_base 2: mod_base = OTHER; note = 2'-O-methylcytidine-3'-phosphorothioate
  modified_base 3: mod_base = OTHER; note = 2'-O-methyladenosine-3'-phosphate
  modified_base 4: mod_base = OTHER; note = 2'-O-methyluridine-3'-phosphate
  modified_base 5: mod_base = OTHER; note = 2'-O-methylguanosine-3'-phosphate
  modified_base 6: mod_base = OTHER; note = 2'-O-methyluridine-3'-phosphate
  modified_base 7: mod_base = OTHER; note = 2'-fluoroadenosine-3'-phosphate
  modified_base 8: mod_base = OTHER; note = 2'-O-methyluridine-3'-phosphate
  modified_base 9: mod_base = OTHER; note = 2'-fluorouridine-3'-phosphate
  modified_base 10: mod_base = OTHER; note = 2'-fluoroadenosine-3'-phosphate
  modified_base 11: mod_base = OTHER; note = 2'-fluorocytidine-3'-phosphate
  modified_base 12: mod_base = OTHER; note = 2'-O-methyluridine-3'-phosphate
  modified_base 13: mod_base = OTHER; note = 2'-O-methyluridine-3'-phosphate
  modified_base 14: mod_base = OTHER; note = 2'-O-methylguanosine-3'-phosphate
  modified_base 15: mod_base = OTHER; note = 2'-O-methyladenosine-3'-phosphate
  modified_base 16: mod_base = OTHER; note = 2'-O-methylcytidine-3'-phosphate
  modified_base 17: mod_base = OTHER; note = 2'-O-methyladenosine-3'-phosphate
  modified_base 18: mod_base = OTHER; note = 2'-O-methyladenosine-3'-phosphate
  modified_base 19: mod_base = OTHER; note = 2'-O-methyladenosine-3'-phosphate
  modified_base 20: mod_base = OTHER; note = 2'-O-methylguanosine-3'-phosphate
  modified_base 21: mod_base = OTHER; note = 2'-O-methyladenosine-3'-phosphate N-[tris(GalNAc-alkyl)-amidodecanoyl)]-4-hydroxyprolinol Hyp-(GalNAc-alkyl)3
gcatgtattacttgacaaaga

SEQ ID NO: 2617 - RNA, 23 nt, synthetic construct
  source 1..23: mol_type = other RNA; note = Description of Artificial Sequence: Synthetic oligonucleotide
  modified_base 1: mod_base = OTHER; note = 2'-O-methyluridine-3'-phosphorothioate
  modified_base 2: mod_base = OTHER; note = 2'-fluorocytidine-3'-phosphorothioate
  modified_base 3: mod_base = OTHER; note = 2'-O-methyluridine-3'-phosphate
  modified_base 4: mod_base = OTHER; note = 2'-O-methyluridine-3'-phosphate
  modified_base 5: mod_base = OTHER; note = 2'-O-methyluridine-3'-phosphate
  modified_base 6: mod_base = OTHER; note = 2'-fluoroguanosine-3'-phosphate
  modified_base 7: mod_base = OTHER; note = 2'-O-methyluridine-3'-phosphate
  modified_base 8: mod_base = OTHER; note = 2'-fluorocytidine-3'-phosphate
  modified_base 9: mod_base = OTHER; note = 2'-fluoroadenosine-3'-phosphate
  modified_base 10: mod_base = OTHER; note = 2'-O-methyladenosine-3'-phosphate
  modified_base 11: mod_base = OTHER; note = 2'-O-methylguanosine-3'-phosphate
  modified_base 12: mod_base = OTHER; note = 2'-O-methyluridine-3'-phosphate
  modified_base 13: mod_base = OTHER; note = 2'-O-methyladenosine-3'-phosphate
  modified_base 14: mod_base = OTHER; note = 2'-fluoroadenosine-3'-phosphate
  modified_base 15: mod_base = OTHER; note = 2'-O-methyluridine-3'-phosphate
  modified_base 16: mod_base = OTHER; note = 2'-fluoroadenosine-3'-phosphate
  modified_base 17: mod_base = OTHER; note = 2'-O-methylcytidine-3'-phosphate
  modified_base 18: mod_base = OTHER; note = 2'-O-methyladenosine-3'-phosphate
  modified_base 19: mod_base = OTHER; note = 2'-O-methyluridine-3'-phosphate
  modified_base 20: mod_base = OTHER; note = 2'-O-methylguanosine-3'-phosphate
  modified_base 21: mod_base = OTHER; note = 2'-O-methylcytidine-3'-phosphorothioate
  modified_base 22: mod_base = OTHER; note = 2'-O-methyluridine-3'-phosphorothioate
  modified_base 23: mod_base = OTHER; note = 2'-O-methylguanosine-3'-phosphate
tctttgtcaagtaatacatgctg

SEQ ID NO: 2618 - RNA, 21 nt, synthetic construct
  source 1..21: mol_type = other RNA; note = Description of Artificial Sequence: Synthetic oligonucleotide
  modified_base 1: mod_base = OTHER; note = 2'-O-methyladenosine-3'-phosphorothioate
  modified_base 2: mod_base = OTHER; note = 2'-O-methyladenosine-3'-phosphorothioate
  modified_base 3: mod_base = OTHER; note = 2'-O-methyladenosine-3'-phosphate
  modified_base 4: mod_base = OTHER; note = 2'-O-methylguanosine-3'-phosphate
  modified_base 5: mod_base = OTHER; note = 2'-O-methyluridine-3'-phosphate
  modified_base 6: mod_base = OTHER; note = 2'-O-methylcytidine-3'-phosphate
  modified_base 7: mod_base = OTHER; note = 2'-fluoroadenosine-3'-phosphate
  modified_base 8: mod_base = OTHER; note = 2'-O-methyluridine-3'-phosphate
  modified_base 9: mod_base = OTHER; note = 2'-fluorocytidine-3'-phosphate
  modified_base 10: mod_base = OTHER; note = 2'-fluoroguanosine-3'-phosphate
  modified_base 11: mod_base = OTHER; note = 2'-fluoroadenosine-3'-phosphate
  modified_base 12: mod_base = OTHER; note = 2'-O-methylcytidine-3'-phosphate
  modified_base 13: mod_base = OTHER; note = 2'-O-methyladenosine-3'-phosphate
  modified_base 14: mod_base = OTHER; note = 2'-O-methyladenosine-3'-phosphate
  modified_base 15: mod_base = OTHER; note = 2'-O-methylguanosine-3'-phosphate
  modified_base 16: mod_base = OTHER; note = 2'-O-methyladenosine-3'-phosphate
  modified_base 17: mod_base = OTHER; note = 2'-O-methylcytidine-3'-phosphate
  modified_base 18: mod_base = OTHER; note = 2'-O-methyladenosine-3'-phosphate
  modified_base 19: mod_base = OTHER; note = 2'-O-methyluridine-3'-phosphate
  modified_base 20: mod_base = OTHER; note = 2'-O-methyluridine-3'-phosphate
  modified_base 21: mod_base = OTHER; note = 2'-O-methylguanosine-3'-phosphate N-[tris(GalNAc-alkyl)-amidodecanoyl)]-4-hydroxyprolinol Hyp-(GalNAc-alkyl)3
aaagtcatcgacaagacattg

SEQ ID NO: 2619 - RNA, 23 nt, synthetic construct
  source 1..23: mol_type = other RNA; note = Description of Artificial Sequence: Synthetic oligonucleotide
  modified_base 1: mod_base = OTHER; note = 2'-O-methylcytidine-3'-phosphorothioate
  modified_base 2: mod_base = OTHER; note = 2'-fluoroadenosine-3'-phosphorothioate
  modified_base 3: mod_base = OTHER; note = 2'-O-methyladenosine-3'-phosphate
  modified_base 4: mod_base = OTHER; note = 2'-O-methyluridine-3'-phosphate
  modified_base 5: mod_base = OTHER; note = 2'-O-methylguanosine-3'-phosphate
  modified_base 6: mod_base = OTHER; note = 2'-fluorouridine-3'-phosphate
  modified_base 7: mod_base = OTHER; note = 2'-O-methylcytidine-3'-phosphate
  modified_base 8: mod_base = OTHER; note = 2'-fluorouridine-3'-phosphate
  modified_base 9: mod_base = OTHER; note = 2'-fluorouridine-3'-phosphate
  modified_base 10: mod_base = OTHER; note = 2'-O-methylguanosine-3'-phosphate
  modified_base 11: mod_base = OTHER; note = 2'-O-methyluridine-3'-phosphate
  modified_base 12: mod_base = OTHER; note = 2'-O-methylcytidine-3'-phosphate
  modified_base 13: mod_base = OTHER; note = 2'-O-methylguanosine-3'-phosphate
  modified_base 14: mod_base = OTHER; note = 2'-fluoroadenosine-3'-phosphate
  modified_base 15: mod_base = OTHER; note = 2'-O-methyluridine-3'-phosphate
  modified_base 16: mod_base = OTHER; note = 2'-fluoroguanosine-3'-phosphate
  modified_base 17: mod_base = OTHER; note = 2'-O-methyladenosine-3'-phosphate
  modified_base 18: mod_base = OTHER; note = 2'-O-methylcytidine-3'-phosphate
  modified_base 19: mod_base = OTHER; note = 2'-O-methyluridine-3'-phosphate
  modified_base 20: mod_base = OTHER; note = 2'-O-methyluridine-3'-phosphate
  modified_base 21: mod_base = OTHER; note = 2'-O-methyluridine-3'-phosphorothioate
  modified_base 22: mod_base = OTHER; note = 2'-O-methylcytidine-3'-phosphorothioate
  modified_base 23: mod_base = OTHER; note = 2'-O-methyladenosine-3'-phosphate
caatgtcttgtcgatgactttca

SEQ ID NO: 2620 - RNA, 21 nt, synthetic construct
  source 1..21: mol_type = other RNA; note = Description of Artificial Sequence: Synthetic oligonucleotide
  modified_base 1: mod_base = OTHER; note = 2'-O-methyladenosine-3'-phosphorothioate
  modified_base 2: mod_base = OTHER; note = 2'-O-methyladenosine-3'-phosphorothioate
  modified_base 3: mod_base = OTHER; note = 2'-O-methylguanosine-3'-phosphate
  modified_base 4: mod_base = OTHER; note = 2'-O-methyluridine-3'-phosphate
  modified_base 5: mod_base = OTHER; note = 2'-O-methylcytidine-3'-phosphate
  modified_base 6: mod_base = OTHER; note = 2'-O-methyladenosine-3'-phosphate
  modified_base 7: mod_base = OTHER; note = 2'-fluorouridine-3'-phosphate
  modified_base 8: mod_base = OTHER; note = 2'-O-methylcytidine-3'-phosphate
  modified_base 9: mod_base = OTHER; note = 2'-fluoroguanosine-3'-phosphate
  modified_base 10: mod_base = OTHER; note = 2'-fluoroadenosine-3'-phosphate
  modified_base 11: mod_base = OTHER; note = 2'-fluorocytidine-3'-phosphate
  modified_base 12: mod_base = OTHER; note = 2'-O-methyladenosine-3'-phosphate
  modified_base 13: mod_base = OTHER; note = 2'-O-methyladenosine-3'-phosphate
  modified_base 14: mod_base = OTHER; note = 2'-O-methylguanosine-3'-phosphate
  modified_base 15: mod_base = OTHER; note = 2'-O-methyladenosine-3'-phosphate
  modified_base 16: mod_base = OTHER; note = 2'-O-methylcytidine-3'-phosphate
  modified_base 17: mod_base = OTHER; note = 2'-O-methyladenosine-3'-phosphate
  modified_base 18: mod_base = OTHER; note = 2'-O-methyluridine-3'-phosphate
  modified_base 19: mod_base = OTHER; note = 2'-O-methyluridine-3'-phosphate
  modified_base 20: mod_base = OTHER; note = 2'-O-methylguanosine-3'-phosphate
  modified_base 21: mod_base = OTHER; note = 2'-O-methylguanosine-3'-phosphate N-[tris(GalNAc-alkyl)-amidodecanoyl)]-4-hydroxyprolinol Hyp-(GalNAc-alkyl)3
aagtcatcgacaagacattgg

SEQ ID NO: 2621 - RNA, 23 nt, synthetic construct
  source 1..23: mol_type = other RNA; note = Description of Artificial Sequence: Synthetic oligonucleotide
  modified_base 1: mod_base = OTHER; note = 2'-O-methylcytidine-3'-phosphorothioate
  modified_base 2: mod_base = OTHER; note = 2'-fluorocytidine-3'-phosphorothioate
  modified_base 3: mod_base = OTHER; note = 2'-O-methyladenosine-3'-phosphate
  modified_base 4: mod_base = OTHER; note = 2'-O-methyladenosine-3'-phosphate
  modified_base 5: mod_base = OTHER; note = 2'-O-methyluridine-3'-phosphate
  modified_base 6: mod_base = OTHER; note = 2'-fluoroguanosine-3'-phosphate
  modified_base 7: mod_base = OTHER; note = 2'-O-methyluridine-3'-phosphate
  modified_base 8: mod_base = OTHER; note = 2'-fluorocytidine-3'-phosphate
  modified_base 9: mod_base = OTHER; note = 2'-fluorouridine-3'-phosphate
  modified_base 10: mod_base = OTHER; note = 2'-O-methyluridine-3'-phosphate
  modified_base 11: mod_base = OTHER; note = 2'-O-methylguanosine-3'-phosphate
  modified_base 12: mod_base = OTHER; note = 2'-O-methyluridine-3'-phosphate
  modified_base 13: mod_base = OTHER; note = 2'-O-methylcytidine-3'-phosphate
  modified_base 14: mod_base = OTHER; note = 2'-fluoroguanosine-3'-phosphate
  modified_base 15: mod_base = OTHER; note = 2'-O-methyladenosine-3'-phosphate
  modified_base 16: mod_base = OTHER; note = 2'-fluorouridine-3'-phosphate
  modified_base 17: mod_base = OTHER; note = 2'-O-methylguanosine-3'-phosphate
  modified_base 18: mod_base = OTHER; note = 2'-O-methyladenosine-3'-phosphate
  modified_base 19: mod_base = OTHER; note = 2'-O-methylcytidine-3'-phosphate
  modified_base 20: mod_base = OTHER; note = 2'-O-methyluridine-3'-phosphate
  modified_base 21: mod_base = OTHER; note = 2'-O-methyluridine-3'-phosphorothioate
  modified_base 22: mod_base = OTHER; note = 2'-O-methyluridine-3'-phosphorothioate
  modified_base 23: mod_base = OTHER; note = 2'-O-methylcytidine-3'-phosphate
ccaatgtcttgtcgatgactttc

SEQ ID NO: 2622 - RNA, 21 nt, synthetic construct
  source 1..21: mol_type = other RNA; note = Description of Artificial Sequence: Synthetic oligonucleotide
  modified_base 1: mod_base = OTHER; note = 2'-O-methyluridine-3'-phosphorothioate
  modified_base 2: mod_base = OTHER; note = 2'-O-methylguanosine-3'-phosphorothioate
  modified_base 3: mod_base = OTHER; note = 2'-O-methyluridine-3'-phosphate
  modified_base 4: mod_base = OTHER; note = 2'-O-methylguanosine-3'-phosphate
  modified_base 5: mod_base = OTHER; note = 2'-O-methyladenosine-3'-phosphate
  modified_base 6: mod_base = OTHER; note = 2'-O-methyladenosine-3'-phosphate
  modified_base 7: mod_base = OTHER; note = 2'-fluoroadenosine-3'-phosphate
  modified_base 8: mod_base = OTHER; note = 2'-O-methylguanosine-3'-phosphate
  modified_base 9: mod_base = OTHER; note = 2'-fluorouridine-3'-phosphate
  modified_base 10: mod_base = OTHER; note = 2'-fluorocytidine-3'-phosphate
  modified_base 11: mod_base = OTHER; note = 2'-fluoroadenosine-3'-phosphate
  modified_base 12: mod_base = OTHER; note = 2'-O-methyluridine-3'-phosphate
  modified_base 13: mod_base = OTHER; note = 2'-O-methylcytidine-3'-phosphate
  modified_base 14: mod_base = OTHER; note = 2'-O-methylguanosine-3'-phosphate
  modified_base 15: mod_base = OTHER; note = 2'-O-methyladenosine-3'-phosphate
  modified_base 16: mod_base = OTHER; note = 2'-O-methylcytidine-3'-phosphate
  modified_base 17: mod_base = OTHER; note = 2'-O-methyladenosine-3'-phosphate
  modified_base 18: mod_base = OTHER; note = 2'-O-methyladenosine-3'-phosphate
  modified_base 19: mod_base = OTHER; note = 2'-O-methylguanosine-3'-phosphate
  modified_base 20: mod_base = OTHER; note = 2'-O-methyladenosine-3'-phosphate
  modified_base 21: mod_base = OTHER; note = 2'-O-methylcytidine-3'-phosphate N-[tris(GalNAc-alkyl)-amidodecanoyl)]-4-hydroxyprolinol Hyp-(GalNAc-alkyl)3
tgtgaaagtcatcgacaagac

SEQ ID NO: 2623 - RNA, 23 nt, synthetic construct
  source 1..23: mol_type = other RNA; note = Description of Artificial Sequence: Synthetic oligonucleotide
  modified_base 1: mod_base = OTHER; note = 2'-O-methylguanosine-3'-phosphorothioate
  modified_base 2: mod_base = OTHER; note = 2'-fluorouridine -3'-phosphorothioate
  modified_base 3: mod_base = OTHER; note = 2'-O-methylcytidine-3'-phosphate
  modified_base 4: mod_base = OTHER; note = 2'-O-methyluridine-3'-phosphate
  modified_base 5: mod_base = OTHER; note = 2'-O-methyluridine-3'-phosphate
  modified_base 6: mod_base = OTHER; note = 2'-fluoroguanosine-3'-phosphate
  modified_base 7: mod_base = OTHER; note = 2'-O-methyluridine-3'-phosphate
  modified_base 8: mod_base = OTHER; note = 2'-fluorocytidine-3'-phosphate
  modified_base 9: mod_base = OTHER; note = 2'-fluoroguanosine-3'-phosphate
  modified_base 10: mod_base = OTHER; note = 2'-O-methyladenosine-3'-phosphate
  modified_base 11: mod_base = OTHER; note = 2'-O-methyluridine-3'-phosphate
  modified_base 12: mod_base = OTHER; note = 2'-O-methylguanosine-3'-phosphate
  modified_base 13: mod_base = OTHER; note = 2'-O-methyladenosine-3'-phosphate
  modified_base 14: mod_base = OTHER; note = 2'-fluorocytidine-3'-phosphate
  modified_base 15: mod_base = OTHER; note = 2'-O-methyluridine-3'-phosphate
  modified_base 16: mod_base = OTHER; note = 2'-fluorouridine-3'-phosphate
  modified_base 17: mod_base = OTHER; note = 2'-O-methyluridine-3'-phosphate
  modified_base 18: mod_base = OTHER; note = 2'-O-methylcytidine-3'-phosphate
  modified_base 19: mod_base = OTHER; note = 2'-O-methyladenosine-3'-phosphate
  modified_base 20: mod_base = OTHER; note = 2'-O-methylcytidine-3'-phosphate
  modified_base 21: mod_base = OTHER; note = 2'-O-methyladenosine-3'-phosphorothioate
  modified_base 22: mod_base = OTHER; note = 2'-O-methyluridine-3'-phosphorothioate
  modified_base 23: mod_base = OTHER; note = 2'-O-methyluridine-3'-phosphate
gtcttgtcgatgactttcacatt

SEQ ID NO: 2624 - RNA, 21 nt, synthetic construct
  source 1..21: mol_type = other RNA; note = Description of Artificial Sequence: Synthetic oligonucleotide
  modified_base 1: mod_base = OTHER; note = 2'-O-methyladenosine-3'-phosphorothioate
  modified_base 2: mod_base = OTHER; note = 2'-O-methyluridine-3'-phosphorothioate
  modified_base 3: mod_base = OTHER; note = 2'-O-methylguanosine-3'-phosphate
  modified_base 4: mod_base = OTHER; note = 2'-O-methyluridine-3'-phosphate
  modified_base 5: mod_base = OTHER; note = 2'-O-methylguanosine-3'-phosphate
  modified_base 6: mod_base = OTHER; note = 2'-O-methyladenosine-3'-phosphate
  modified_base 7: mod_base = OTHER; note = 2'-fluoroadenosine-3'-phosphate
  modified_base 8: mod_base = OTHER; note = 2'-O-methyladenosine-3'-phosphate
  modified_base 9: mod_base = OTHER; note = 2'-fluoroguanosine-3'-phosphate
  modified_base 10: mod_base = OTHER; note = 2'-fluorouridine-3'-phosphate
  modified_base 11: mod_base = OTHER; note = 2'-fluorocytidine-3'-phosphate
  modified_base 12: mod_base = OTHER; note = 2'-O-methyladenosine-3'-phosphate
  modified_base 13: mod_base = OTHER; note = 2'-O-methyluridine-3'-phosphate
  modified_base 14: mod_base = OTHER; note = 2'-O-methylcytidine-3'-phosphate
  modified_base 15: mod_base = OTHER; note = 2'-O-methylguanosine-3'-phosphate
  modified_base 16: mod_base = OTHER; note = 2'-O-methyladenosine-3'-phosphate
  modified_base 17: mod_base = OTHER; note = 2'-O-methylcytidine-3'-phosphate
  modified_base 18: mod_base = OTHER; note = 2'-O-methyladenosine-3'-phosphate
  modified_base 19: mod_base = OTHER; note = 2'-O-methyladenosine-3'-phosphate
  modified_base 20: mod_base = OTHER; note = 2'-O-methylguanosine-3'-phosphate
  modified_base 21: mod_base = OTHER; note = 2'-O-methyladenosine-3'-phosphate N-[tris(GalNAc-alkyl)-amidodecanoyl)]-4-hydroxyprolinol Hyp-(GalNAc-alkyl)3
atgtgaaagtcatcgacaaga

SEQ ID NO: 2625 - RNA, 23 nt, synthetic construct
  source 1..23: mol_type = other RNA; note = Description of Artificial Sequence: Synthetic oligonucleotide
  modified_base 1: mod_base = OTHER; note = 2'-O-methyluridine-3'-phosphorothioate
  modified_base 2: mod_base = OTHER; note = 2'-fluorocytidine-3'-phosphorothioate
  modified_base 3: mod_base = OTHER; note = 2'-O-methyluridine-3'-phosphate
  modified_base 4: mod_base = OTHER; note = 2'-O-methyluridine-3'-phosphate
  modified_base 5: mod_base = OTHER; note = 2'-O-methylguanosine-3'-phosphate
  modified_base 6: mod_base = OTHER; note = 2'-fluorouridine-3'-phosphate
  modified_base 7: mod_base = OTHER; note = 2'-O-methylcytidine-3'-phosphate
  modified_base 8: mod_base = OTHER; note = 2'-fluoroguanosine-3'-phosphate
  modified_base 9: mod_base = OTHER; note = 2'-fluoroadenosine-3'-phosphate
  modified_base 10: mod_base = OTHER; note = 2'-O-methyluridine-3'-phosphate
  modified_base 11: mod_base = OTHER; note = 2'-O-methylguanosine-3'-phosphate
  modified_base 12: mod_base = OTHER; note = 2'-O-methyladenosine-3'-phosphate
  modified_base 13: mod_base = OTHER; note = 2'-O-methylcytidine-3'-phosphate
  modified_base 14: mod_base = OTHER; note = 2'-fluorouridine-3'-phosphate
  modified_base 15: mod_base = OTHER; note = 2'-O-methyluridine-3'-phosphate
  modified_base 16: mod_base = OTHER; note = 2'-fluorouridine-3'-phosphate
  modified_base 17: mod_base = OTHER; note = 2'-O-methylcytidine-3'-phosphate
  modified_base 18: mod_base = OTHER; note = 2'-O-methyladenosine-3'-phosphate
  modified_base 19: mod_base = OTHER; note = 2'-O-methylcytidine-3'-phosphate
  modified_base 20: mod_base = OTHER; note = 2'-O-methyladenosine-3'-phosphate
  modified_base 21: mod_base = OTHER; note = 2'-O-methyluridine-3'-phosphorothioate
  modified_base 22: mod_base = OTHER; note = 2'-O-methyluridine-3'-phosphorothioate
  modified_base 23: mod_base = OTHER; note = 2'-O-methylcytidine-3'-phosphate
tcttgtcgatgactttcacattc

SEQ ID NO: 2626 - RNA, 21 nt, synthetic construct
  source 1..21: mol_type = other RNA; note = Description of Artificial Sequence: Synthetic oligonucleotide
  modified_base 1: mod_base = OTHER; note = 2'-O-methyladenosine-3'-phosphorothioate
  modified_base 2: mod_base = OTHER; note = 2'-O-methyluridine-3'-phosphorothioate
  modified_base 3: mod_base = OTHER; note = 2'-O-methyladenosine-3'-phosphate
  modified_base 4: mod_base = OTHER; note = 2'-O-methyluridine-3'-phosphate
  modified_base 5: mod_base = OTHER; note = 2'-O-methylguanosine-3'-phosphate
  modified_base 6: mod_base = OTHER; note = 2'-O-methyluridine-3'-phosphate
  modified_base 7: mod_base = OTHER; note = 2'-fluoroguanosine-3'-phosphate
  modified_base 8: mod_base = OTHER; note = 2'-O-methylguanosine-3'-phosphate
  modified_base 9: mod_base = OTHER; note = 2'-fluorocytidine-3'-phosphate
  modified_base 10: mod_base = OTHER; note = 2'-fluorouridine-3'-phosphate
  modified_base 11: mod_base = OTHER; note = 2'-fluoroadenosine-3'-phosphate
  modified_base 12: mod_base = OTHER; note = 2'-O-methyladenosine-3'-phosphate
  modified_base 13: mod_base = OTHER; note = 2'-O-methyladenosine-3'-phosphate
  modified_base 14: mod_base = OTHER; note = 2'-O-methylguanosine-3'-phosphate
  modified_base 15: mod_base = OTHER; note = 2'-O-methylcytidine-3'-phosphate
  modified_base 16: mod_base = OTHER; note = 2'-O-methyladenosine-3'-phosphate
  modified_base 17: mod_base = OTHER; note = 2'-O-methyladenosine-3'-phosphate
  modified_base 18: mod_base = OTHER; note = 2'-O-methyluridine-3'-phosphate
  modified_base 19: mod_base = OTHER; note = 2'-O-methyladenosine-3'-phosphate
  modified_base 20: mod_base = OTHER; note = 2'-O-methylguanosine-3'-phosphate
  modified_base 21: mod_base = OTHER; note = 2'-O-methyladenosine-3'-phosphate N-[tris(GalNAc-alkyl)-amidodecanoyl)]-4-hydroxyprolinol Hyp-(GalNAc-alkyl)3
atatgtggctaaagcaataga

SEQ ID NO: 2627 - RNA, 23 nt, synthetic construct
  source 1..23: mol_type = other RNA; note = Description of Artificial Sequence: Synthetic oligonucleotide
  modified_base 1: mod_base = OTHER; note = 2'-O-methyluridine-3'-phosphorothioate
  modified_base 2: mod_base = OTHER; note = 2'-fluorocytidine-3'-phosphorothioate
  modified_base 3: mod_base = OTHER; note = 2'-O-methyluridine-3'-phosphate
  modified_base 4: mod_base = OTHER; note = 2'-O-methyladenosine-3'-phosphate
  modified_base 5: mod_base = OTHER; note = 2'-O-methyluridine-3'-phosphate
  modified_base 6: mod_base = OTHER; note = 2'-fluorouridine-3'-phosphate
  modified_base 7: mod_base = OTHER; note = 2'-O-methylguanosine-3'-phosphate
  modified_base 8: mod_base = OTHER; note = 2'-fluorocytidine-3'-phosphate
  modified_base 9: mod_base = OTHER; note = 2'-fluorouridine-3'-phosphate
  modified_base 10: mod_base = OTHER; note = 2'-O-methyluridine-3'-phosphate
  modified_base 11: mod_base = OTHER; note = 2'-O-methyluridine-3'-phosphate
  modified_base 12: mod_base = OTHER; note = 2'-O-methyladenosine-3'-phosphate
  modified_base 13: mod_base = OTHER; note = 2'-O-methylguanosine-3'-phosphate
  modified_base 14: mod_base = OTHER; note = 2'-fluorocytidine-3'-phosphate
  modified_base 15: mod_base = OTHER; note = 2'-O-methylcytidine-3'-phosphate
  modified_base 16: mod_base = OTHER; note = 2'-fluoroadenosine-3'-phosphate
  modified_base 17: mod_base = OTHER; note = 2'-O-methylcytidine-3'-phosphate
  modified_base 18: mod_base = OTHER; note = 2'-O-methyladenosine-3'-phosphate
  modified_base 19: mod_base = OTHER; note = 2'-O-methyluridine-3'-phosphate
  modified_base 20: mod_base = OTHER; note = 2'-O-methyladenosine-3'-phosphate
  modified_base 21: mod_base = OTHER; note = 2'-O-methyluridine-3'-phosphorothioate
  modified_base 22: mod_base = OTHER; note = 2'-O-methylguanosine-3'-phosphorothioate
  modified_base 23: mod_base = OTHER; note = 2'-O-methylcytidine-3'-phosphate
tctattgctttagccacatatgc

SEQ ID NO: 2628 - RNA, 21 nt, synthetic construct
  source 1..21: mol_type = other RNA; note = Description of Artificial Sequence: Synthetic oligonucleotide
  modified_base 1: mod_base = OTHER; note = 2'-O-methyluridine-3'-phosphorothioate
  modified_base 2: mod_base = OTHER; note = 2'-O-methyladenosine-3'-phosphorothioate
  modified_base 3: mod_base = OTHER; note = 2'-O-methyluridine-3'-phosphate
  modified_base 4: mod_base = OTHER; note = 2'-O-methylguanosine-3'-phosphate
  modified_base 5: mod_base = OTHER; note = 2'-O-methyluridine-3'-phosphate
  modified_base 6: mod_base = OTHER; note = 2'-O-methylguanosine-3'-phosphate
  modified_base 7: mod_base = OTHER; note = 2'-fluoroguanosine-3'-phosphate
  modified_base 8: mod_base = OTHER; note = 2'-O-methylcytidine-3'-phosphate
  modified_base 9: mod_base = OTHER; note = 2'-fluorouridine-3'-phosphate
  modified_base 10: mod_base = OTHER; note = 2'-fluoroadenosine-3'-phosphate
  modified_base 11: mod_base = OTHER; note = 2'-fluoroadenosine-3'-phosphate
  modified_base 12: mod_base = OTHER; note = 2'-O-methyladenosine-3'-phosphate
  modified_base 13: mod_base = OTHER; note = 2'-O-methylguanosine-3'-phosphate
  modified_base 14: mod_base = OTHER; note = 2'-O-methylcytidine-3'-phosphate
  modified_base 15: mod_base = OTHER; note = 2'-O-methyladenosine-3'-phosphate
  modified_base 16: mod_base = OTHER; note = 2'-O-methyladenosine-3'-phosphate
  modified_base 17: mod_base = OTHER; note = 2'-O-methyluridine-3'-phosphate
  modified_base 18: mod_base = OTHER; note = 2'-O-methyladenosine-3'-phosphate
  modified_base 19: mod_base = OTHER; note = 2'-O-methylguanosine-3'-phosphate
  modified_base 20: mod_base = OTHER; note = 2'-O-methyladenosine-3'-phosphate
  modified_base 21: mod_base = OTHER; note = 2'-O-methylcytidine-3'-phosphate N-[tris(GalNAc-alkyl)-amidodecanoyl)]-4-hydroxyprolinol Hyp-(GalNAc-alkyl)3
tatgtggctaaagcaatagac

SEQ ID NO: 2629 - RNA, 23 nt, synthetic construct
  source 1..23: mol_type = other RNA; note = Description of Artificial Sequence: Synthetic oligonucleotide
  modified_base 1: mod_base = OTHER; note = 2'-O-methylguanosine-3'-phosphorothioate
  modified_base 2: mod_base = OTHER; note = 2'-fluorouridine -3'-phosphorothioate
  modified_base 3: mod_base = OTHER; note = 2'-O-methylcytidine-3'-phosphate
  modified_base 4: mod_base = OTHER; note = 2'-O-methyluridine-3'-phosphate
  modified_base 5: mod_base = OTHER; note = 2'-O-methyladenosine-3'-phosphate
  modified_base 6: mod_base = OTHER; note = 2'-fluorouridine-3'-phosphate
  modified_base 7: mod_base = OTHER; note = 2'-O-methyluridine-3'-phosphate
  modified_base 8: mod_base = OTHER; note = 2'-fluoroguanosine-3'-phosphate
  modified_base 9: mod_base = OTHER; note = 2'-fluorocytidine-3'-phosphate
  modified_base 10: mod_base = OTHER; note = 2'-O-methyluridine-3'-phosphate
  modified_base 11: mod_base = OTHER; note = 2'-O-methyluridine-3'-phosphate
  modified_base 12: mod_base = OTHER; note = 2'-O-methyluridine-3'-phosphate
  modified_base 13: mod_base = OTHER; note = 2'-O-methyladenosine-3'-phosphate
  modified_base 14: mod_base = OTHER; note = 2'-fluoroguanosine-3'-phosphate
  modified_base 15: mod_base = OTHER; note = 2'-O-methylcytidine-3'-phosphate
  modified_base 16: mod_base = OTHER; note = 2'-fluorocytidine-3'-phosphate
  modified_base 17: mod_base = OTHER; note = 2'-O-methyladenosine-3'-phosphate
  modified_base 18: mod_base = OTHER; note = 2'-O-methylcytidine-3'-phosphate
  modified_base 19: mod_base = OTHER; note = 2'-O-methyladenosine-3'-phosphate
  modified_base 20: mod_base = OTHER; note = 2'-O-methyluridine-3'-phosphate
  modified_base 21: mod_base = OTHER; note = 2'-O-methyladenosine-3'-phosphorothioate
  modified_base 22: mod_base = OTHER; note = 2'-O-methyluridine-3'-phosphorothioate
  modified_base 23: mod_base = OTHER; note = 2'-O-methylguanosine-3'-phosphate
gtctattgctttagccacatatg

SEQ ID NO: 2630 - RNA, 21 nt, synthetic construct
  source 1..21: mol_type = other RNA; note = Description of Artificial Sequence: Synthetic oligonucleotide
  modified_base 1: mod_base = OTHER; note = 2'-O-methylcytidine-3'-phosphorothioate
  modified_base 2: mod_base = OTHER; note = 2'-O-methyluridine-3'-phosphorothioate
  modified_base 3: mod_base = OTHER; note = 2'-O-methylguanosine-3'-phosphate
  modified_base 4: mod_base = OTHER; note = 2'-O-methylcytidine-3'-phosphate
  modified_base 5: mod_base = OTHER; note = 2'-O-methyladenosine-3'-phosphate
  modified_base 6: mod_base = OTHER; note = 2'-O-methyluridine-3'-phosphate
  modified_base 7: mod_base = OTHER; note = 2'-fluoroadenosine-3'-phosphate
  modified_base 8: mod_base = OTHER; note = 2'-O-methyluridine-3'-phosphate
  modified_base 9: mod_base = OTHER; note = 2'-fluoroguanosine-3'-phosphate
  modified_base 10: mod_base = OTHER; note = 2'-fluorouridine-3'-phosphate
  modified_base 11: mod_base = OTHER; note = 2'-fluoroguanosine-3'-phosphate
  modified_base 12: mod_base = OTHER; note = 2'-O-methylguanosine-3'-phosphate
  modified_base 13: mod_base = OTHER; note = 2'-O-methylcytidine-3'-phosphate
  modified_base 14: mod_base = OTHER; note = 2'-O-methyluridine-3'-phosphate
  modified_base 15: mod_base = OTHER; note = 2'-O-methyladenosine-3'-phosphate
  modified_base 16: mod_base = OTHER; note = 2'-O-methyladenosine-3'-phosphate
  modified_base 17: mod_base = OTHER; note = 2'-O-methyladenosine-3'-phosphate
  modified_base 18: mod_base = OTHER; note = 2'-O-methylguanosine-3'-phosphate
  modified_base 19: mod_base = OTHER; note = 2'-O-methylcytidine-3'-phosphate
  modified_base 20: mod_base = OTHER; note = 2'-O-methyladenosine-3'-phosphate
  modified_base 21: mod_base = OTHER; note = 2'-O-methyladenosine-3'-phosphate N-[tris(GalNAc-alkyl)-amidodecanoyl)]-4-hydroxyprolinol Hyp-(GalNAc-alkyl)3
ctgcatatgtggctaaagcaa

SEQ ID NO: 2631 - RNA, 23 nt, synthetic construct
  source 1..23: mol_type = other RNA; note = Description of Artificial Sequence: Synthetic oligonucleotide
  modified_base 1: mod_base = OTHER; note = 2'-O-methyluridine-3'-phosphorothioate
  modified_base 2: mod_base = OTHER; note = 2'-fluorouridine -3'-phosphorothioate
  modified_base 3: mod_base = OTHER; note = 2'-O-methylguanosine-3'-phosphate
  modified_base 4: mod_base = OTHER; note = 2'-O-methylcytidine-3'-phosphate
  modified_base 5: mod_base = OTHER; note = 2'-O-methyluridine-3'-phosphate
  modified_base 6: mod_base = OTHER; note = 2'-fluorouridine-3'-phosphate
  modified_base 7: mod_base = OTHER; note = 2'-O-methyluridine-3'-phosphate
  modified_base 8: mod_base = OTHER; note = 2'-fluoroadenosine-3'-phosphate
  modified_base 9: mod_base = OTHER; note = 2'-fluoroguanosine-3'-phosphate
  modified_base 10: mod_base = OTHER; note = 2'-O-methylcytidine-3'-phosphate
  modified_base 11: mod_base = OTHER; note = 2'-O-methylcytidine-3'-phosphate
  modified_base 12: mod_base = OTHER; note = 2'-O-methyladenosine-3'-phosphate
  modified_base 13: mod_base = OTHER; note = 2'-O-methylcytidine-3'-phosphate
  modified_base 14: mod_base = OTHER; note = 2'-fluoroadenosine-3'-phosphate
  modified_base 15: mod_base = OTHER; note = 2'-O-methyluridine-3'-phosphate
  modified_base 16: mod_base = OTHER; note = 2'-fluoroadenosine-3'-phosphate
  modified_base 17: mod_base = OTHER; note = 2'-O-methyluridine-3'-phosphate
  modified_base 18: mod_base = OTHER; note = 2'-O-methylguanosine-3'-phosphate
  modified_base 19: mod_base = OTHER; note = 2'-O-methylcytidine-3'-phosphate
  modified_base 20: mod_base = OTHER; note = 2'-O-methyladenosine-3'-phosphate
  modified_base 21: mod_base = OTHER; note = 2'-O-methylguanosine-3'-phosphorothioate
  modified_base 22: mod_base = OTHER; note = 2'-O-methylcytidine-3'-phosphorothioate
  modified_base 23: mod_base = OTHER; note = 2'-O-methyladenosine-3'-phosphate
ttgctttagccacatatgcagca

SEQ ID NO: 2632 - RNA, 21 nt, synthetic construct
  source 1..21: mol_type = other RNA; note = Description of Artificial Sequence: Synthetic oligonucleotide
  modified_base 1: mod_base = OTHER; note = 2'-O-methylguanosine-3'-phosphorothioate
  modified_base 2: mod_base = OTHER; note = 2'-O-methylcytidine-3'-phosphorothioate
  modified_base 3: mod_base = OTHER; note = 2'-O-methyluridine-3'-phosphate
  modified_base 4: mod_base = OTHER; note = 2'-O-methylguanosine-3'-phosphate
  modified_base 5: mod_base = OTHER; note = 2'-O-methylcytidine-3'-phosphate
  modified_base 6: mod_base = OTHER; note = 2'-O-methyladenosine-3'-phosphate
  modified_base 7: mod_base = OTHER; note = 2'-fluorouridine-3'-phosphate
  modified_base 8: mod_base = OTHER; note = 2'-O-methyladenosine-3'-phosphate
  modified_base 9: mod_base = OTHER; note = 2'-fluorouridine-3'-phosphate
  modified_base 10: mod_base = OTHER; note = 2'-fluoroguanosine-3'-phosphate
  modified_base 11: mod_base = OTHER; note = 2'-fluorouridine-3'-phosphate
  modified_base 12: mod_base = OTHER; note = 2'-O-methylguanosine-3'-phosphate
  modified_base 13: mod_base = OTHER; note = 2'-O-methylguanosine-3'-phosphate
  modified_base 14: mod_base = OTHER; note = 2'-O-methylcytidine-3'-phosphate
  modified_base 15: mod_base = OTHER; note = 2'-O-methyluridine-3'-phosphate
  modified_base 16: mod_base = OTHER; note = 2'-O-methyladenosine-3'-phosphate
  modified_base 17: mod_base = OTHER; note = 2'-O-methyladenosine-3'-phosphate
  modified_base 18: mod_base = OTHER; note = 2'-O-methyladenosine-3'-phosphate
  modified_base 19: mod_base = OTHER; note = 2'-O-methylguanosine-3'-phosphate
  modified_base 20: mod_base = OTHER; note = 2'-O-methylcytidine-3'-phosphate
  modified_base 21: mod_base = OTHER; note = 2'-O-methyladenosine-3'-phosphate N-[tris(GalNAc-alkyl)-amidodecanoyl)]-4-hydroxyprolinol Hyp-(GalNAc-alkyl)3
gctgcatatgtggctaaagca

SEQ ID NO: 2633 - RNA, 23 nt, synthetic construct
  source 1..23: mol_type = other RNA; note = Description of Artificial Sequence: Synthetic oligonucleotide
  modified_base 1: mod_base = OTHER; note = 2'-O-methyluridine-3'-phosphorothioate
  modified_base 2: mod_base = OTHER; note = 2'-fluoroguanosine-3'-phosphorothioate
  modified_base 3: mod_base = OTHER; note = 2'-O-methylcytidine-3'-phosphate
  modified_base 4: mod_base = OTHER; note = 2'-O-methyluridine-3'-phosphate
  modified_base 5: mod_base = OTHER; note = 2'-O-methyluridine-3'-phosphate
  modified_base 6: mod_base = OTHER; note = 2'-fluorouridine-3'-phosphate
  modified_base 7: mod_base = OTHER; note = 2'-O-methyladenosine-3'-phosphate
  modified_base 8: mod_base = OTHER; note = 2'-fluoroguanosine-3'-phosphate
  modified_base 9: mod_base = OTHER; note = 2'-fluorocytidine-3'-phosphate
  modified_base 10: mod_base = OTHER; note = 2'-O-methylcytidine-3'-phosphate
  modified_base 11: mod_base = OTHER; note = 2'-O-methyladenosine-3'-phosphate
  modified_base 12: mod_base = OTHER; note = 2'-O-methylcytidine-3'-phosphate
  modified_base 13: mod_base = OTHER; note = 2'-O-methyladenosine-3'-phosphate
  modified_base 14: mod_base = OTHER; note = 2'-fluorouridine-3'-phosphate
  modified_base 15: mod_base = OTHER; note = 2'-O-methyladenosine-3'-phosphate
  modified_base 16: mod_base = OTHER; note = 2'-fluorouridine-3'-phosphate
  modified_base 17: mod_base = OTHER; note = 2'-O-methylguanosine-3'-phosphate
  modified_base 18: mod_base = OTHER; note = 2'-O-methylcytidine-3'-phosphate
  modified_base 19: mod_base = OTHER; note = 2'-O-methyladenosine-3'-phosphate
  modified_base 20: mod_base = OTHER; note = 2'-O-methylguanosine-3'-phosphate
  modified_base 21: mod_base = OTHER; note = 2'-O-methylcytidine-3'-phosphorothioate
  modified_base 22: mod_base = OTHER; note = 2'-O-methyladenosine-3'-phosphorothioate
  modified_base 23: mod_base = OTHER; note = 2'-O-methyladenosine-3'-phosphate
tgctttagccacatatgcagcaa

SEQ ID NO: 2634 - RNA, 21 nt, synthetic construct
  source 1..21: mol_type = other RNA; note = Description of Artificial Sequence: Synthetic oligonucleotide
  modified_base 1: mod_base = OTHER; note = 2'-O-methyladenosine-3'-phosphorothioate
  modified_base 2: mod_base = OTHER; note = 2'-O-methylguanosine-3'-phosphorothioate
  modified_base 3: mod_base = OTHER; note = 2'-O-methyladenosine-3'-phosphate
  modified_base 4: mod_base = OTHER; note = 2'-O-methylcytidine-3'-phosphate
  modified_base 5: mod_base = OTHER; note = 2'-O-methylguanosine-3'-phosphate
  modified_base 6: mod_base = OTHER; note = 2'-O-methyladenosine-3'-phosphate
  modified_base 7: mod_base = OTHER; note = 2'-fluorocytidine-3'-phosphate
  modified_base 8: mod_base = OTHER; note = 2'-O-methyladenosine-3'-phosphate
  modified_base 9: mod_base = OTHER; note = 2'-fluoroguanosine-3'-phosphate
  modified_base 10: mod_base = OTHER; note = 2'-fluorouridine-3'-phosphate
  modified_base 11: mod_base = OTHER; note = 2'-fluoroguanosine-3'-phosphate
  modified_base 12: mod_base = OTHER; note = 2'-O-methylguanosine-3'-phosphate
  modified_base 13: mod_base = OTHER; note = 2'-O-methyladenosine-3'-phosphate
  modified_base 14: mod_base = OTHER; note = 2'-O-methylcytidine-3'-phosphate
  modified_base 15: mod_base = OTHER; note = 2'-O-methyluridine-3'-phosphate
  modified_base 16: mod_base = OTHER; note = 2'-O-methyluridine-3'-phosphate
  modified_base 17: mod_base = OTHER; note = 2'-O-methylguanosine-3'-phosphate
  modified_base 18: mod_base = OTHER; note = 2'-O-methylcytidine-3'-phosphate
  modified_base 19: mod_base = OTHER; note = 2'-O-methyluridine-3'-phosphate
  modified_base 20: mod_base = OTHER; note = 2'-O-methylguanosine-3'-phosphate
  modified_base 21: mod_base = OTHER; note = 2'-O-methylcytidine-3'-phosphate N-[tris(GalNAc-alkyl)-amidodecanoyl)]-4-hydroxyprolinol Hyp-(GalNAc-alkyl)3
agacgacagtggacttgctgc

SEQ ID NO: 2635 - RNA, 23 nt, synthetic construct
  source 1..23: mol_type = other RNA; note = Description of Artificial Sequence: Synthetic oligonucleotide
  modified_base 1: mod_base = OTHER; note = 2'-O-methylguanosine-3'-phosphorothioate
  modified_base 2: mod_base = OTHER; note = 2'-fluorocytidine-3'-phosphorothioate
  modified_base 3: mod_base = OTHER; note = 2'-O-methyladenosine-3'-phosphate
  modified_base 4: mod_base = OTHER; note = 2'-O-methylguanosine-3'-phosphate
  modified_base 5: mod_base = OTHER; note = 2'-O-methylcytidine-3'-phosphate
  modified_base 6: mod_base = OTHER; note = 2'-fluoroadenosine-3'-phosphate
  modified_base 7: mod_base = OTHER; note = 2'-O-methyladenosine-3'-phosphate
  modified_base 8: mod_base = OTHER; note = 2'-fluoroguanosine-3'-phosphate
  modified_base 9: mod_base = OTHER; note = 2'-fluorouridine-3'-phosphate
  modified_base 10: mod_base = OTHER; note = 2'-O-methylcytidine-3'-phosphate
  modified_base 11: mod_base = OTHER; note = 2'-O-methylcytidine-3'-phosphate
  modified_base 12: mod_base = OTHER; note = 2'-O-methyladenosine-3'-phosphate
  modified_base 13: mod_base = OTHER; note = 2'-O-methylcytidine-3'-phosphate
  modified_base 14: mod_base = OTHER; note = 2'-fluorouridine-3'-phosphate
  modified_base 15: mod_base = OTHER; note = 2'-O-methylguanosine-3'-phosphate
  modified_base 16: mod_base = OTHER; note = 2'-fluorouridine-3'-phosphate
  modified_base 17: mod_base = OTHER; note = 2'-O-methylcytidine-3'-phosphate
  modified_base 18: mod_base = OTHER; note = 2'-O-methylguanosine-3'-phosphate
  modified_base 19: mod_base = OTHER; note = 2'-O-methyluridine-3'-phosphate
  modified_base 20: mod_base = OTHER; note = 2'-O-methylcytidine-3'-phosphate
  modified_base 21: mod_base = OTHER; note = 2'-O-methyluridine-3'-phosphorothioate
  modified_base 22: mod_base = OTHER; note = 2'-O-methylcytidine-3'-phosphorothioate
  modified_base 23: mod_base = OTHER; note = 2'-O-methylcytidine-3'-phosphate
gcagcaagtccactgtcgtctcc

SEQ ID NO: 2636 - RNA, 21 nt, synthetic construct
  source 1..21: mol_type = other RNA; note = Description of Artificial Sequence: Synthetic oligonucleotide
  modified_base 1: mod_base = OTHER; note = 2'-O-methylguanosine-3'-phosphorothioate
  modified_base 2: mod_base = OTHER; note = 2'-O-methyladenosine-3'-phosphorothioate
  modified_base 3: mod_base = OTHER; note = 2'-O-methylcytidine-3'-phosphate
  modified_base 4: mod_base = OTHER; note = 2'-O-methylguanosine-3'-phosphate
  modified_base 5: mod_base = OTHER; note = 2'-O-methyladenosine-3'-phosphate
  modified_base 6: mod_base = OTHER; note = 2'-O-methylcytidine-3'-phosphate
  modified_base 7: mod_base = OTHER; note = 2'-fluoroadenosine-3'-phosphate
  modified_base 8: mod_base = OTHER; note = 2'-O-methylguanosine-3'-phosphate
  modified_base 9: mod_base = OTHER; note = 2'-fluorouridine-3'-phosphate
  modified_base 10: mod_base = OTHER; note = 2'-fluoroguanosine-3'-phosphate
  modified_base 11: mod_base = OTHER; note = 2'-fluoroguanosine-3'-phosphate
  modified_base 12: mod_base = OTHER; note = 2'-O-methyladenosine-3'-phosphate
  modified_base 13: mod_base = OTHER; note = 2'-O-methylcytidine-3'-phosphate
  modified_base 14: mod_base = OTHER; note = 2'-O-methyluridine-3'-phosphate
  modified_base 15: mod_base = OTHER; note = 2'-O-methyluridine-3'-phosphate
  modified_base 16: mod_base = OTHER; note = 2'-O-methylguanosine-3'-phosphate
  modified_base 17: mod_base = OTHER; note = 2'-O-methylcytidine-3'-phosphate
  modified_base 18: mod_base = OTHER; note = 2'-O-methyluridine-3'-phosphate
  modified_base 19: mod_base = OTHER; note = 2'-O-methylguanosine-3'-phosphate
  modified_base 20: mod_base = OTHER; note = 2'-O-methylcytidine-3'-phosphate
  modified_base 21: mod_base = OTHER; note = 2'-O-methyladenosine-3'-phosphate N-[tris(GalNAc-alkyl)-amidodecanoyl)]-4-hydroxyprolinol Hyp-(GalNAc-alkyl)3
gacgacagtggacttgctgca

SEQ ID NO: 2637 - RNA, 23 nt, synthetic construct
  source 1..23: mol_type = other RNA; note = Description of Artificial Sequence: Synthetic oligonucleotide
  modified_base 1: mod_base = OTHER; note = 2'-O-methyluridine-3'-phosphorothioate
  modified_base 2: mod_base = OTHER; note = 2'-fluoroguanosine-3'-phosphorothioate
  modified_base 3: mod_base = OTHER; note = 2'-O-methylcytidine-3'-phosphate
  modified_base 4: mod_base = OTHER; note = 2'-O-methyladenosine-3'-phosphate
  modified_base 5: mod_base = OTHER; note = 2'-O-methylguanosine-3'-phosphate
  modified_base 6: mod_base = OTHER; note = 2'-fluorocytidine-3'-phosphate
  modified_base 7: mod_base = OTHER; note = 2'-O-methyladenosine-3'-phosphate
  modified_base 8: mod_base = OTHER; note = 2'-fluoroadenosine-3'-phosphate
  modified_base 9: mod_base = OTHER; note = 2'-fluoroguanosine-3'-phosphate
  modified_base 10: mod_base = OTHER; note = 2'-O-methyluridine-3'-phosphate
  modified_base 11: mod_base = OTHER; note = 2'-O-methylcytidine-3'-phosphate
  modified_base 12: mod_base = OTHER; note = 2'-O-methylcytidine-3'-phosphate
  modified_base 13: mod_base = OTHER; note = 2'-O-methyladenosine-3'-phosphate
  modified_base 14: mod_base = OTHER; note = 2'-fluorocytidine-3'-phosphate
  modified_base 15: mod_base = OTHER; note = 2'-O-methyluridine-3'-phosphate
  modified_base 16: mod_base = OTHER; note = 2'-fluoroguanosine-3'-phosphate
  modified_base 17: mod_base = OTHER; note = 2'-O-methyluridine-3'-phosphate
  modified_base 18: mod_base = OTHER; note = 2'-O-methylcytidine-3'-phosphate
  modified_base 19: mod_base = OTHER; note = 2'-O-methylguanosine-3'-phosphate
  modified_base 20: mod_base = OTHER; note = 2'-O-methyluridine-3'-phosphate
  modified_base 21: mod_base = OTHER; note = 2'-O-methylcytidine-3'-phosphorothioate
  modified_base 22: mod_base = OTHER; note = 2'-O-methyluridine-3'-phosphorothioate
  modified_base 23: mod_base = OTHER; note = 2'-O-methylcytidine-3'-phosphate
tgcagcaagtccactgtcgtctc

SEQ ID NO: 2638 - RNA, 21 nt, synthetic construct
  source 1..21: mol_type = other RNA; note = Description of Artificial Sequence: Synthetic oligonucleotide
  modified_base 1: mod_base = OTHER; note = 2'-O-methyluridine-3'-phosphorothioate
  modified_base 2: mod_base = OTHER; note = 2'-O-methyluridine-3'-phosphorothioate
  modified_base 3: mod_base = OTHER; note = 2'-O-methylguanosine-3'-phosphate
  modified_base 4: mod_base = OTHER; note = 2'-O-methylguanosine-3'-phosphate
  modified_base 5: mod_base = OTHER; note = 2'-O-methyladenosine-3'-phosphate
  modified_base 6: mod_base = OTHER; note = 2'-O-methylguanosine-3'-phosphate
  modified_base 7: mod_base = OTHER; note = 2'-fluoroadenosine-3'-phosphate
  modified_base 8: mod_base = OTHER; note = 2'-O-methylcytidine-3'-phosphate
  modified_base 9: mod_base = OTHER; note = 2'-fluoroguanosine-3'-phosphate
  modified_base 10: mod_base = OTHER; note = 2'-fluoroadenosine-3'-phosphate
  modified_base 11: mod_base = OTHER; note = 2'-fluorocytidine-3'-phosphate
  modified_base 12: mod_base = OTHER; note = 2'-O-methyladenosine-3'-phosphate
  modified_base 13: mod_base = OTHER; note = 2'-O-methylguanosine-3'-phosphate
  modified_base 14: mod_base = OTHER; note = 2'-O-methyluridine-3'-phosphate
  modified_base 15: mod_base = OTHER; note = 2'-O-methylguanosine-3'-phosphate
  modified_base 16: mod_base = OTHER; note = 2'-O-methylguanosine-3'-phosphate
  modified_base 17: mod_base = OTHER; note = 2'-O-methyladenosine-3'-phosphate
  modified_base 18: mod_base = OTHER; note = 2'-O-methylcytidine-3'-phosphate
  modified_base 19: mod_base = OTHER; note = 2'-O-methyluridine-3'-phosphate
  modified_base 20: mod_base = OTHER; note = 2'-O-methyluridine-3'-phosphate
  modified_base 21: mod_base = OTHER; note = 2'-O-methylguanosine-3'-phosphate N-[tris(GalNAc-alkyl)-amidodecanoyl)]-4-hydroxyprolinol Hyp-(GalNAc-alkyl)3
ttggagacgacagtggacttg

SEQ ID NO: 2639 - RNA, 23 nt, synthetic construct
  source 1..23: mol_type = other RNA; note = Description of Artificial Sequence: Synthetic oligonucleotide
  modified_base 1: mod_base = OTHER; note = 2'-O-methylcytidine-3'-phosphorothioate
  modified_base 2: mod_base = OTHER; note = 2'-fluoroadenosine-3'-phosphorothioate
  modified_base 3: mod_base = OTHER; note = 2'-O-methyladenosine-3'-phosphate
  modified_base 4: mod_base = OTHER; note = 2'-O-methylguanosine-3'-phosphate
  modified_base 5: mod_base = OTHER; note = 2'-O-methyluridine-3'-phosphate
  modified_base 6: mod_base = OTHER; note = 2'-fluorocytidine-3'-phosphate
  modified_base 7: mod_base = OTHER; note = 2'-O-methylcytidine-3'-phosphate
  modified_base 8: mod_base = OTHER; note = 2'-fluoroadenosine-3'-phosphate
  modified_base 9: mod_base = OTHER; note = 2'-fluorocytidine-3'-phosphate
  modified_base 10: mod_base = OTHER; note = 2'-O-methyluridine-3'-phosphate
  modified_base 11: mod_base = OTHER; note = 2'-O-methylguanosine-3'-phosphate
  modified_base 12: mod_base = OTHER; note = 2'-O-methyluridine-3'-phosphate
  modified_base 13: mod_base = OTHER; note = 2'-O-methylcytidine-3'-phosphate
  modified_base 14: mod_base = OTHER; note = 2'-fluoroguanosine-3'-phosphate
  modified_base 15: mod_base = OTHER; note = 2'-O-methyluridine-3'-phosphate
  modified_base 16: mod_base = OTHER; note = 2'-fluorocytidine-3'-phosphate
  modified_base 17: mod_base = OTHER; note = 2'-O-methyluridine-3'-phosphate
  modified_base 18: mod_base = OTHER; note = 2'-O-methylcytidine-3'-phosphate
  modified_base 19: mod_base = OTHER; note = 2'-O-methylcytidine-3'-phosphate
  modified_base 20: mod_base = OTHER; note = 2'-O-methyladenosine-3'-phosphate
  modified_base 21: mod_base = OTHER; note = 2'-O-methyladenosine-3'-phosphorothioate
  modified_base 22: mod_base = OTHER; note = 2'-O-methyladenosine-3'-phosphorothioate
  modified_base 23: mod_base = OTHER; note = 2'-O-methyladenosine-3'-phosphate
caagtccactgtcgtctccaaaa

SEQ ID NO: 2640 - RNA, 21 nt, synthetic construct
  source 1..21: mol_type = other RNA; note = Description of Artificial Sequence: Synthetic oligonucleotide
  modified_base 1: mod_base = OTHER; note = 2'-O-methyluridine-3'-phosphorothioate
  modified_base 2: mod_base = OTHER; note = 2'-O-methyluridine-3'-phosphorothioate
  modified_base 3: mod_base = OTHER; note = 2'-O-methyluridine-3'-phosphate
  modified_base 4: mod_base = OTHER; note = 2'-O-methylguanosine-3'-phosphate
  modified_base 5: mod_base = OTHER; note = 2'-O-methylguanosine-3'-phosphate
  modified_base 6: mod_base = OTHER; note = 2'-O-methyladenosine-3'-phosphate
  modified_base 7: mod_base = OTHER; note = 2'-fluoroguanosine-3'-phosphate
  modified_base 8: mod_base = OTHER; note = 2'-O-methyladenosine-3'-phosphate
  modified_base 9: mod_base = OTHER; note = 2'-fluorocytidine-3'-phosphate
  modified_base 10: mod_base = OTHER; note = 2'-fluoroguanosine-3'-phosphate
  modified_base 11: mod_base = OTHER; note = 2'-fluoroadenosine-3'-phosphate
  modified_base 12: mod_base = OTHER; note = 2'-O-methylcytidine-3'-phosphate
  modified_base 13: mod_base = OTHER; note = 2'-O-methyladenosine-3'-phosphate
  modified_base 14: mod_base = OTHER; note = 2'-O-methylguanosine-3'-phosphate
  modified_base 15: mod_base = OTHER; note = 2'-O-methyluridine-3'-phosphate
  modified_base 16: mod_base = OTHER; note = 2'-O-methylguanosine-3'-phosphate
  modified_base 17: mod_base = OTHER; note = 2'-O-methylguanosine-3'-phosphate
  modified_base 18: mod_base = OTHER; note = 2'-O-methyladenosine-3'-phosphate
  modified_base 19: mod_base = OTHER; note = 2'-O-methylcytidine-3'-phosphate
  modified_base 20: mod_base = OTHER; note = 2'-O-methyluridine-3'-phosphate
  modified_base 21: mod_base = OTHER; note = 2'-O-methyluridine-3'-phosphate N-[tris(GalNAc-alkyl)-amidodecanoyl)]-4-hydroxyprolinol Hyp-(GalNAc-alkyl)3
tttggagacgacagtggactt

SEQ ID NO: 2641 - RNA, 23 nt, synthetic construct
  source 1..23: mol_type = other RNA; note = Description of Artificial Sequence: Synthetic oligonucleotide
  modified_base 1: mod_base = OTHER; note = 2'-O-methyladenosine-3'-phosphorothioate
  modified_base 2: mod_base = OTHER; note = 2'-fluoroadenosine-3'-phosphorothioate
  modified_base 3: mod_base = OTHER; note = 2'-O-methylguanosine-3'-phosphate
  modified_base 4: mod_base = OTHER; note = 2'-O-methyluridine-3'-phosphate
  modified_base 5: mod_base = OTHER; note = 2'-O-methylcytidine-3'-phosphate
  modified_base 6: mod_base = OTHER; note = 2'-fluorocytidine-3'-phosphate
  modified_base 7: mod_base = OTHER; note = 2'-O-methyladenosine-3'-phosphate
  modified_base 8: mod_base = OTHER; note = 2'-fluorocytidine-3'-phosphate
  modified_base 9: mod_base = OTHER; note = 2'-fluorouridine-3'-phosphate
  modified_base 10: mod_base = OTHER; note = 2'-O-methylguanosine-3'-phosphate
  modified_base 11: mod_base = OTHER; note = 2'-O-methyluridine-3'-phosphate
  modified_base 12: mod_base = OTHER; note = 2'-O-methylcytidine-3'-phosphate
  modified_base 13: mod_base = OTHER; note = 2'-O-methylguanosine-3'-phosphate
  modified_base 14: mod_base = OTHER; note = 2'-fluorouridine-3'-phosphate
  modified_base 15: mod_base = OTHER; note = 2'-O-methylcytidine-3'-phosphate
  modified_base 16: mod_base = OTHER; note = 2'-fluorouridine-3'-phosphate
  modified_base 17: mod_base = OTHER; note = 2'-O-methylcytidine-3'-phosphate
  modified_base 18: mod_base = OTHER; note = 2'-O-methylcytidine-3'-phosphate
  modified_base 19: mod_base = OTHER; note = 2'-O-methyladenosine-3'-phosphate
  modified_base 20: mod_base = OTHER; note = 2'-O-methyladenosine-3'-phosphate
  modified_base 21: mod_base = OTHER; note = 2'-O-methyladenosine-3'-phosphorothioate
  modified_base 22: mod_base = OTHER; note = 2'-O-methyladenosine-3'-phosphorothioate
  modified_base 23: mod_base = OTHER; note = 2'-O-methyluridine-3'-phosphate
aagtccactgtcgtctccaaaat

SEQ ID NO: 2642 - RNA, 21 nt, synthetic construct
  source 1..21: mol_type = other RNA; note = Description of Artificial Sequence: Synthetic oligonucleotide
  modified_base 1: mod_base = OTHER; note = 2'-O-methylguanosine-3'-phosphorothioate
  modified_base 2: mod_base = OTHER; note = 2'-O-methylguanosine-3'-phosphorothioate
  modified_base 3: mod_base = OTHER; note = 2'-O-methylcytidine-3'-phosphate
  modified_base 4: mod_base = OTHER; note = 2'-O-methylcytidine-3'-phosphate
  modified_base 5: mod_base = OTHER; note = 2'-O-methyladenosine-3'-phosphate
  modified_base 6: mod_base = OTHER; note = 2'-O-methylcytidine-3'-phosphate
  modified_base 7: mod_base = OTHER; note = 2'-fluorocytidine-3'-phosphate
  modified_base 8: mod_base = OTHER; note = 2'-O-methyluridine-3'-phosphate
  modified_base 9: mod_base = OTHER; note = 2'-fluorocytidine-3'-phosphate
  modified_base 10: mod_base = OTHER; note = 2'-fluorocytidine-3'-phosphate
  modified_base 11: mod_base = OTHER; note = 2'-fluorouridine-3'-phosphate
  modified_base 12: mod_base = OTHER; note = 2'-O-methylcytidine-3'-phosphate
  modified_base 13: mod_base = OTHER; note = 2'-O-methyladenosine-3'-phosphate
  modified_base 14: mod_base = OTHER; note = 2'-O-methyladenosine-3'-phosphate
  modified_base 15: mod_base = OTHER; note = 2'-O-methyluridine-3'-phosphate
  modified_base 16: mod_base = OTHER; note = 2'-O-methyluridine-3'-phosphate
  modified_base 17: mod_base = OTHER; note = 2'-O-methylguanosine-3'-phosphate
  modified_base 18: mod_base = OTHER; note = 2'-O-methyladenosine-3'-phosphate
  modified_base 19: mod_base = OTHER; note = 2'-O-methyladenosine-3'-phosphate
  modified_base 20: mod_base = OTHER; note = 2'-O-methylguanosine-3'-phosphate
  modified_base 21: mod_base = OTHER; note = 2'-O-methyladenosine-3'-phosphate N-[tris(GalNAc-alkyl)-amidodecanoyl)]-4-hydroxyprolinol Hyp-(GalNAc-alkyl)3
ggccacctcctcaattgaaga

SEQ ID NO: 2643 - RNA, 23 nt, synthetic construct
  source 1..23: mol_type = other RNA; note = Description of Artificial Sequence: Synthetic oligonucleotide
  modified_base 1: mod_base = OTHER; note = 2'-O-methyluridine-3'-phosphorothioate
  modified_base 2: mod_base = OTHER; note = 2'-fluorocytidine-3'-phosphorothioate
  modified_base 3: mod_base = OTHER; note = 2'-O-methyluridine-3'-phosphate
  modified_base 4: mod_base = OTHER; note = 2'-O-methyluridine-3'-phosphate
  modified_base 5: mod_base = OTHER; note = 2'-O-methylcytidine-3'-phosphate
  modified_base 6: mod_base = OTHER; note = 2'-fluoroadenosine-3'-phosphate
  modified_base 7: mod_base = OTHER; note = 2'-O-methyladenosine-3'-phosphate
  modified_base 8: mod_base = OTHER; note = 2'-fluorouridine-3'-phosphate
  modified_base 9: mod_base = OTHER; note = 2'-fluorouridine-3'-phosphate
  modified_base 10: mod_base = OTHER; note = 2'-O-methylguanosine-3'-phosphate
  modified_base 11: mod_base = OTHER; note = 2'-O-methyladenosine-3'-phosphate
  modified_base 12: mod_base = OTHER; note = 2'-O-methylguanosine-3'-phosphate
  modified_base 13: mod_base = OTHER; note = 2'-O-methylguanosine-3'-phosphate
  modified_base 14: mod_base = OTHER; note = 2'-fluoroadenosine-3'-phosphate
  modified_base 15: mod_base = OTHER; note = 2'-O-methylguanosine-3'-phosphate
  modified_base 16: mod_base = OTHER; note = 2'-fluoroguanosine-3'-phosphate
  modified_base 17: mod_base = OTHER; note = 2'-O-methyluridine-3'-phosphate
  modified_base 18: mod_base = OTHER; note = 2'-O-methylguanosine-3'-phosphate
  modified_base 19: mod_base = OTHER; note = 2'-O-methylguanosine-3'-phosphate
  modified_base 20: mod_base = OTHER; note = 2'-O-methylcytidine-3'-phosphate
  modified_base 21: mod_base = OTHER; note = 2'-O-methylcytidine-3'-phosphorothioate
  modified_base 22: mod_base = OTHER; note = 2'-O-methylcytidine-3'-phosphorothioate
  modified_base 23: mod_base = OTHER; note = 2'-O-methyladenosine-3'-phosphate
tcttcaattgaggaggtggccca

SEQ ID NO: 2644 - RNA, 21 nt, synthetic construct
  source 1..21: mol_type = other RNA; note = Description of Artificial Sequence: Synthetic oligonucleotide
  modified_base 1: mod_base = OTHER; note = 2'-O-methylguanosine-3'-phosphorothioate
  modified_base 2: mod_base = OTHER; note = 2'-O-methylcytidine-3'-phosphorothioate
  modified_base 3: mod_base = OTHER; note = 2'-O-methylcytidine-3'-phosphate
  modified_base 4: mod_base = OTHER; note = 2'-O-methyladenosine-3'-phosphate
  modified_base 5: mod_base = OTHER; note = 2'-O-methylcytidine-3'-phosphate
  modified_base 6: mod_base = OTHER; note = 2'-O-methylcytidine-3'-phosphate
  modified_base 7: mod_base = OTHER; note = 2'-fluorouridine-3'-phosphate
  modified_base 8: mod_base = OTHER; note = 2'-O-methylcytidine-3'-phosphate
  modified_base 9: mod_base = OTHER; note = 2'-fluorocytidine-3'-phosphate
  modified_base 10: mod_base = OTHER; note = 2'-fluorouridine-3'-phosphate
  modified_base 11: mod_base = OTHER; note = 2'-fluorocytidine-3'-phosphate
  modified_base 12: mod_base = OTHER; note = 2'-O-methyladenosine-3'-phosphate
  modified_base 13: mod_base = OTHER; note = 2'-O-methyladenosine-3'-phosphate
  modified_base 14: mod_base = OTHER; note = 2'-O-methyluridine-3'-phosphate
  modified_base 15: mod_base = OTHER; note = 2'-O-methyluridine-3'-phosphate
  modified_base 16: mod_base = OTHER; note = 2'-O-methylguanosine-3'-phosphate
  modified_base 17: mod_base = OTHER; note = 2'-O-methyladenosine-3'-phosphate
  modified_base 18: mod_base = OTHER; note = 2'-O-methyladenosine-3'-phosphate
  modified_base 19: mod_base = OTHER; note = 2'-O-methylguanosine-3'-phosphate
  modified_base 20: mod_base = OTHER; note = 2'-O-methyladenosine-3'-phosphate
  modified_base 21: mod_base = OTHER; note = 2'-O-methyladenosine-3'-phosphate N-[tris(GalNAc-alkyl)-amidodecanoyl)]-4-hydroxyprolinol Hyp-(GalNAc-alkyl)3
gccacctcctcaattgaagaa

SEQ ID NO: 2645 - RNA, 23 nt, synthetic construct
  source 1..23: mol_type = other RNA; note = Description of Artificial Sequence: Synthetic oligonucleotide
  modified_base 1: mod_base = OTHER; note = 2'-O-methyluridine-3'-phosphorothioate
  modified_base 2: mod_base = OTHER; note = 2'-fluorouridine -3'-phosphorothioate
  modified_base 3: mod_base = OTHER; note = 2'-O-methylcytidine-3'-phosphate
  modified_base 4: mod_base = OTHER; note = 2'-O-methyluridine-3'-phosphate
  modified_base 5: mod_base = OTHER; note = 2'-O-methyluridine-3'-phosphate
  modified_base 6: mod_base = OTHER; note = 2'-fluorocytidine-3'-phosphate
  modified_base 7: mod_base = OTHER; note = 2'-O-methyladenosine-3'-phosphate
  modified_base 8: mod_base = OTHER; note = 2'-fluoroadenosine-3'-phosphate
  modified_base 9: mod_base = OTHER; note = 2'-fluorouridine-3'-phosphate
  modified_base 10: mod_base = OTHER; note = 2'-O-methyluridine-3'-phosphate
  modified_base 11: mod_base = OTHER; note = 2'-O-methylguanosine-3'-phosphate
  modified_base 12: mod_base = OTHER; note = 2'-O-methyladenosine-3'-phosphate
  modified_base 13: mod_base = OTHER; note = 2'-O-methylguanosine-3'-phosphate
  modified_base 14: mod_base = OTHER; note = 2'-fluoroguanosine-3'-phosphate
  modified_base 15: mod_base = OTHER; note = 2'-O-methyladenosine-3'-phosphate
  modified_base 16: mod_base = OTHER; note = 2'-fluoroguanosine-3'-phosphate
  modified_base 17: mod_base = OTHER; note = 2'-O-methylguanosine-3'-phosphate
  modified_base 18: mod_base = OTHER; note = 2'-O-methyluridine-3'-phosphate
  modified_base 19: mod_base = OTHER; note = 2'-O-methylguanosine-3'-phosphate
  modified_base 20: mod_base = OTHER; note = 2'-O-methylguanosine-3'-phosphate
  modified_base 21: mod_base = OTHER; note = 2'-O-methylcytidine-3'-phosphorothioate
  modified_base 22: mod_base = OTHER; note = 2'-O-methylcytidine-3'-phosphorothioate
  modified_base 23: mod_base = OTHER; note = 2'-O-methylcytidine-3'-phosphate
ttcttcaattgaggaggtggccc

SEQ ID NO: 2646 - RNA, 21 nt, synthetic construct
  source 1..21: mol_type = other RNA; note = Description of Artificial Sequence: Synthetic oligonucleotide
  modified_base 1: mod_base = OTHER; note = 2'-O-methylcytidine-3'-phosphorothioate
  modified_base 2: mod_base = OTHER; note = 2'-O-methylcytidine-3'-phosphorothioate
  modified_base 3: mod_base = OTHER; note = 2'-O-methyluridine-3'-phosphate
  modified_base 4: mod_base = OTHER; note = 2'-O-methylguanosine-3'-phosphate
  modified_base 5: mod_base = OTHER; note = 2'-O-methylguanosine-3'-phosphate
  modified_base 6: mod_base = OTHER; note = 2'-O-methylguanosine-3'-phosphate
  modified_base 7: mod_base = OTHER; note = 2'-fluorocytidine-3'-phosphate
  modified_base 8: mod_base = OTHER; note = 2'-O-methylcytidine-3'-phosphate
  modified_base 9: mod_base = OTHER; note = 2'-fluoroadenosine-3'-phosphate
  modified_base 10: mod_base = OTHER; note = 2'-fluorocytidine-3'-phosphate
  modified_base 11: mod_base = OTHER; note = 2'-fluorocytidine-3'-phosphate
  modified_base 12: mod_base = OTHER; note = 2'-O-methyluridine-3'-phosphate
  modified_base 13: mod_base = OTHER; note = 2'-O-methylcytidine-3'-phosphate
  modified_base 14: mod_base = OTHER; note = 2'-O-methylcytidine-3'-phosphate
  modified_base 15: mod_base = OTHER; note = 2'-O-methyluridine-3'-phosphate
  modified_base 16: mod_base = OTHER; note = 2'-O-methylcytidine-3'-phosphate
  modified_base 17: mod_base = OTHER; note = 2'-O-methyladenosine-3'-phosphate
  modified_base 18: mod_base = OTHER; note = 2'-O-methyladenosine-3'-phosphate
  modified_base 19: mod_base = OTHER; note = 2'-O-methyluridine-3'-phosphate
  modified_base 20: mod_base = OTHER; note = 2'-O-methyluridine-3'-phosphate
  modified_base 21: mod_base = OTHER; note = 2'-O-methylguanosine-3'-phosphate N-[tris(GalNAc-alkyl)-amidodecanoyl)]-4-hydroxyprolinol Hyp-(GalNAc-alkyl)3
cctgggccacctcctcaattg

SEQ ID NO: 2647 - RNA, 23 nt, synthetic construct
  source 1..23: mol_type = other RNA; note = Description of Artificial Sequence: Synthetic oligonucleotide
  modified_base 1: mod_base = OTHER; note = 2'-O-methylcytidine-3'-phosphorothioate
  modified_base 2: mod_base = OTHER; note = 2'-fluoroadenosine-3'-phosphorothioate
  modified_base 3: mod_base = OTHER; note = 2'-O-methyladenosine-3'-phosphate
  modified_base 4: mod_base = OTHER; note = 2'-O-methyluridine-3'-phosphate
  modified_base 5: mod_base = OTHER; note = 2'-O-methyluridine-3'-phosphate
  modified_base 6: mod_base = OTHER; note = 2'-fluoroguanosine-3'-phosphate
  modified_base 7: mod_base = OTHER; note = 2'-O-methyladenosine-3'-phosphate
  modified_base 8: mod_base = OTHER; note = 2'-fluoroguanosine-3'-phosphate
  modified_base 9: mod_base = OTHER; note = 2'-fluoroguanosine-3'-phosphate
  modified_base 10: mod_base = OTHER; note = 2'-O-methyladenosine-3'-phosphate
  modified_base 11: mod_base = OTHER; note = 2'-O-methylguanosine-3'-phosphate
  modified_base 12: mod_base = OTHER; note = 2'-O-methylguanosine-3'-phosphate
  modified_base 13: mod_base = OTHER; note = 2'-O-methyluridine-3'-phosphate
  modified_base 14: mod_base = OTHER; note = 2'-fluoroguanosine-3'-phosphate
  modified_base 15: mod_base = OTHER; note = 2'-O-methylguanosine-3'-phosphate
  modified_base 16: mod_base = OTHER; note = 2'-fluorocytidine-3'-phosphate
  modified_base 17: mod_base = OTHER; note = 2'-O-methylcytidine-3'-phosphate
  modified_base 18: mod_base = OTHER; note = 2'-O-methylcytidine-3'-phosphate
  modified_base 19: mod_base = OTHER; note = 2'-O-methyladenosine-3'-phosphate
  modified_base 20: mod_base = OTHER; note = 2'-O-methylguanosine-3'-phosphate
  modified_base 21: mod_base = OTHER; note = 2'-O-methylguanosine-3'-phosphorothioate
  modified_base 22: mod_base = OTHER; note = 2'-O-methyladenosine-3'-phosphorothioate
  modified_base 23: mod_base = OTHER; note = 2'-O-methyladenosine-3'-phosphate
caattgaggaggtggcccaggaa

SEQ ID NO: 2648 - RNA, 21 nt, synthetic construct
  source 1..21: mol_type = other RNA; note = Description of Artificial Sequence: Synthetic oligonucleotide
  modified_base 1: mod_base = OTHER; note = 2'-O-methyluridine-3'-phosphorothioate
  modified_base 2: mod_base = OTHER; note = 2'-O-methylcytidine-3'-phosphorothioate
  modified_base 3: mod_base = OTHER; note = 2'-O-methylcytidine-3'-phosphate
  modified_base 4: mod_base = OTHER; note = 2'-O-methyluridine-3'-phosphate
  modified_base 5: mod_base = OTHER; note = 2'-O-methylguanosine-3'-phosphate
  modified_base 6: mod_base = OTHER; note = 2'-O-methylguanosine-3'-phosphate
  modified_base 7: mod_base = OTHER; note = 2'-fluoroguanosine-3'-phosphate
  modified_base 8: mod_base = OTHER; note = 2'-O-methylcytidine-3'-phosphate
  modified_base 9: mod_base = OTHER; note = 2'-fluorocytidine-3'-phosphate
  modified_base 10: mod_base = OTHER; note = 2'-fluoroadenosine-3'-phosphate
  modified_base 11: mod_base = OTHER; note = 2'-fluorocytidine-3'-phosphate
  modified_base 12: mod_base = OTHER; note = 2'-O-methylcytidine-3'-phosphate
  modified_base 13: mod_base = OTHER; note = 2'-O-methyluridine-3'-phosphate
  modified_base 14: mod_base = OTHER; note = 2'-O-methylcytidine-3'-phosphate
  modified_base 15: mod_base = OTHER; note = 2'-O-methylcytidine-3'-phosphate
  modified_base 16: mod_base = OTHER; note = 2'-O-methyluridine-3'-phosphate
  modified_base 17: mod_base = OTHER; note = 2'-O-methylcytidine-3'-phosphate
  modified_base 18: mod_base = OTHER; note = 2'-O-methyladenosine-3'-phosphate
  modified_base 19: mod_base = OTHER; note = 2'-O-methyladenosine-3'-phosphate
  modified_base 20: mod_base = OTHER; note = 2'-O-methyluridine-3'-phosphate
  modified_base 21: mod_base = OTHER; note = 2'-O-methyluridine-3'-phosphate N-[tris(GalNAc-alkyl)-amidodecanoyl)]-4-hydroxyprolinol Hyp-(GalNAc-alkyl)3
tcctgggccacctcctcaatt

SEQ ID NO: 2649 - RNA, 23 nt, synthetic construct
  source 1..23: mol_type = other RNA; note = Description of Artificial Sequence: Synthetic oligonucleotide
  modified_base 1: mod_base = OTHER; note = 2'-O-methyladenosine-3'-phosphorothioate
  modified_base 2: mod_base = OTHER; note = 2'-fluoroadenosine-3'-phosphorothioate
  modified_base 3: mod_base = OTHER; note = 2'-O-methyluridine-3'-phosphate
  modified_base 4: mod_base = OTHER; note = 2'-O-methyluridine-3'-phosphate
  modified_base 5: mod_base = OTHER; note = 2'-O-methylguanosine-3'-phosphate
  modified_base 6: mod_base = OTHER; note = 2'-fluoroadenosine-3'-phosphate
  modified_base 7: mod_base = OTHER; note = 2'-O-methylguanosine-3'-phosphate
  modified_base 8: mod_base = OTHER; note = 2'-fluoroguanosine-3'-phosphate
  modified_base 9: mod_base = OTHER; note = 2'-fluoroadenosine-3'-phosphate
  modified_base 10: mod_base = OTHER; note = 2'-O-methylguanosine-3'-phosphate
  modified_base 11: mod_base = OTHER; note = 2'-O-methylguanosine-3'-phosphate
  modified_base 12: mod_base = OTHER; note = 2'-O-methyluridine-3'-phosphate
  modified_base 13: mod_base = OTHER; note = 2'-O-methylguanosine-3'-phosphate
  modified_base 14: mod_base = OTHER; note = 2'-fluoroguanosine-3'-phosphate
  modified_base 15: mod_base = OTHER; note = 2'-O-methylcytidine-3'-phosphate
  modified_base 16: mod_base = OTHER; note = 2'-fluorocytidine-3'-phosphate
  modified_base 17: mod_base = OTHER; note = 2'-O-methylcytidine-3'-phosphate
  modified_base 18: mod_base = OTHER; note = 2'-O-methyladenosine-3'-phosphate
  modified_base 19: mod_base = OTHER; note = 2'-O-methylguanosine-3'-phosphate
  modified_base 20: mod_base = OTHER; note = 2'-O-methylguanosine-3'-phosphate
  modified_base 21: mod_base = OTHER; note = 2'-O-methyladenosine-3'-phosphorothioate
  modified_base 22: mod_base = OTHER; note = 2'-O-methyladenosine-3'-phosphorothioate
  modified_base 23: mod_base = OTHER; note = 2'-O-methylcytidine-3'-phosphate
aattgaggaggtggcccaggaac

SEQ ID NO: 2650 - RNA, 21 nt, synthetic construct
  source 1..21: mol_type = other RNA; note = Description of Artificial Sequence: Synthetic oligonucleotide
  modified_base 1: mod_base = OTHER; note = 2'-O-methyluridine-3'-phosphorothioate
  modified_base 2: mod_base = OTHER; note = 2'-O-methylguanosine-3'-phosphorothioate
  modified_base 3: mod_base = OTHER; note = 2'-O-methyluridine-3'-phosphate
  modified_base 4: mod_base = OTHER; note = 2'-O-methyladenosine-3'-phosphate
  modified_base 5: mod_base = OTHER; note = 2'-O-methyluridine-3'-phosphate
  modified_base 6: mod_base = OTHER; note = 2'-O-methylguanosine-3'-phosphate
  modified_base 7: mod_base = OTHER; note = 2'-fluorouridine-3'-phosphate
  modified_base 8: mod_base = OTHER; note = 2'-O-methyluridine-3'-phosphate
  modified_base 9: mod_base = OTHER; note = 2'-fluoroadenosine-3'-phosphate
  modified_base 10: mod_base = OTHER; note = 2'-fluorocytidine-3'-phosphate
  modified_base 11: mod_base = OTHER; note = 2'-fluorouridine-3'-phosphate
  modified_base 12: mod_base = OTHER; note = 2'-O-methyluridine-3'-phosphate
  modified_base 13: mod_base = OTHER; note = 2'-O-methylcytidine-3'-phosphate
  modified_base 14: mod_base = OTHER; note = 2'-O-methyluridine-3'-phosphate
  modified_base 15: mod_base = OTHER; note = 2'-O-methyluridine-3'-phosphate
  modified_base 16: mod_base = OTHER; note = 2'-O-methyladenosine-3'-phosphate
  modified_base 17: mod_base = OTHER; note = 2'-O-methylguanosine-3'-phosphate
  modified_base 18: mod_base = OTHER; note = 2'-O-methyladenosine-3'-phosphate
  modified_base 19: mod_base = OTHER; note = 2'-O-methylguanosine-3'-phosphate
  modified_base 20: mod_base = OTHER; note = 2'-O-methyladenosine-3'-phosphate
  modified_base 21: mod_base = OTHER; note = 2'-O-methylguanosine-3'-phosphate N-[tris(GalNAc-alkyl)-amidodecanoyl)]-4-hydroxyprolinol Hyp-(GalNAc-alkyl)3
tgtatgttacttcttagagag

SEQ ID NO: 2651 - RNA, 23 nt, synthetic construct
  source 1..23: mol_type = other RNA; note = Description of Artificial Sequence: Synthetic oligonucleotide
  modified_base 1: mod_base = OTHER; note = 2'-O-methylcytidine-3'-phosphorothioate
  modified_base 2: mod_base = OTHER; note = 2'-fluorouridine -3'-phosphorothioate
  modified_base 3: mod_base = OTHER; note = 2'-O-methylcytidine-3'-phosphate
  modified_base 4: mod_base = OTHER; note = 2'-O-methyluridine-3'-phosphate
  modified_base 5: mod_base = OTHER; note = 2'-O-methylcytidine-3'-phosphate
  modified_base 6: mod_base = OTHER; note = 2'-fluorouridine-3'-phosphate
  modified_base 7: mod_base = OTHER; note = 2'-O-methyladenosine-3'-phosphate
  modified_base 8: mod_base = OTHER; note = 2'-fluoroadenosine-3'-phosphate
  modified_base 9: mod_base = OTHER; note = 2'-fluoroguanosine-3'-phosphate
  modified_base 10: mod_base = OTHER; note = 2'-O-methyladenosine-3'-phosphate
  modified_base 11: mod_base = OTHER; note = 2'-O-methyladenosine-3'-phosphate
  modified_base 12: mod_base = OTHER; note = 2'-O-methylguanosine-3'-phosphate
  modified_base 13: mod_base = OTHER; note = 2'-O-methyluridine-3'-phosphate
  modified_base 14: mod_base = OTHER; note = 2'-fluoroadenosine-3'-phosphate
  modified_base 15: mod_base = OTHER; note = 2'-O-methyladenosine-3'-phosphate
  modified_base 16: mod_base = OTHER; note = 2'-fluorocytidine-3'-phosphate
  modified_base 17: mod_base = OTHER; note = 2'-O-methyladenosine-3'-phosphate
  modified_base 18: mod_base = OTHER; note = 2'-O-methyluridine-3'-phosphate
  modified_base 19: mod_base = OTHER; note = 2'-O-methyladenosine-3'-phosphate
  modified_base 20: mod_base = OTHER; note = 2'-O-methylcytidine-3'-phosphate
  modified_base 21: mod_base = OTHER; note = 2'-O-methyladenosine-3'-phosphorothioate
  modified_base 22: mod_base = OTHER; note = 2'-O-methyluridine-3'-phosphorothioate
  modified_base 23: mod_base = OTHER; note = 2'-O-methylcytidine-3'-phosphate
ctctctaagaagtaacatacatc

SEQ ID NO: 2652 - RNA, 21 nt, synthetic construct
  source 1..21: mol_type = other RNA; note = Description of Artificial Sequence: Synthetic oligonucleotide
  modified_base 1: mod_base = OTHER; note = 2'-O-methylguanosine-3'-phosphorothioate
  modified_base 2: mod_base = OTHER; note = 2'-O-methyluridine-3'-phosphorothioate
  modified_base 3: mod_base = OTHER; note = 2'-O-methyladenosine-3'-phosphate
  modified_base 4: mod_base = OTHER; note = 2'-O-methyluridine-3'-phosphate
  modified_base 5: mod_base = OTHER; note = 2'-O-methylguanosine-3'-phosphate
  modified_base 6: mod_base = OTHER; note = 2'-O-methyluridine-3'-phosphate
  modified_base 7: mod_base = OTHER; note = 2'-fluorouridine-3'-phosphate
  modified_base 8: mod_base = OTHER; note = 2'-O-methyladenosine-3'-phosphate
  modified_base 9: mod_base = OTHER; note = 2'-fluorocytidine-3'-phosphate
  modified_base 10: mod_base = OTHER; note = 2'-fluorouridine-3'-phosphate
  modified_base 11: mod_base = OTHER; note = 2'-fluorouridine-3'-phosphate
  modified_base 12: mod_base = OTHER; note = 2'-O-methylcytidine-3'-phosphate
  modified_base 13: mod_base = OTHER; note = 2'-O-methyluridine-3'-phosphate
  modified_base 14: mod_base = OTHER; note = 2'-O-methyluridine-3'-phosphate
  modified_base 15: mod_base = OTHER; note = 2'-O-methyladenosine-3'-phosphate
  modified_base 16: mod_base = OTHER; note = 2'-O-methylguanosine-3'-phosphate
  modified_base 17: mod_base = OTHER; note = 2'-O-methyladenosine-3'-phosphate
  modified_base 18: mod_base = OTHER; note = 2'-O-methylguanosine-3'-phosphate
  modified_base 19: mod_base = OTHER; note = 2'-O-methyladenosine-3'-phosphate
  modified_base 20: mod_base = OTHER; note = 2'-O-methylguanosine-3'-phosphate
  modified_base 21: mod_base = OTHER; note = 2'-O-methyladenosine-3'-phosphate N-[tris(GalNAc-alkyl)-amidodecanoyl)]-4-hydroxyprolinol Hyp-(GalNAc-alkyl)3
gtatgttacttcttagagaga

SEQ ID NO: 2653 - RNA, 23 nt, synthetic construct
  source 1..23: mol_type = other RNA; note = Description of Artificial Sequence: Synthetic oligonucleotide
  modified_base 1: mod_base = OTHER; note = 2'-O-methyluridine-3'-phosphorothioate
  modified_base 2: mod_base = OTHER; note = 2'-fluorocytidine-3'-phosphorothioate
  modified_base 3: mod_base = OTHER; note = 2'-O-methyluridine-3'-phosphate
  modified_base 4: mod_base = OTHER; note = 2'-O-methylcytidine-3'-phosphate
  modified_base 5: mod_base = OTHER; note = 2'-O-methyluridine-3'-phosphate
  modified_base 6: mod_base = OTHER; note = 2'-fluorocytidine-3'-phosphate
  modified_base 7: mod_base = OTHER; note = 2'-O-methyluridine-3'-phosphate
  modified_base 8: mod_base = OTHER; note = 2'-fluoroadenosine-3'-phosphate
  modified_base 9: mod_base = OTHER; note = 2'-fluoroadenosine-3'-phosphate
  modified_base 10: mod_base = OTHER; note = 2'-O-methylguanosine-3'-phosphate
  modified_base 11: mod_base = OTHER; note = 2'-O-methyladenosine-3'-phosphate
  modified_base 12: mod_base = OTHER; note = 2'-O-methyladenosine-3'-phosphate
  modified_base 13: mod_base = OTHER; note = 2'-O-methylguanosine-3'-phosphate
  modified_base 14: mod_base = OTHER; note = 2'-fluorouridine-3'-phosphate
  modified_base 15: mod_base = OTHER; note = 2'-O-methyladenosine-3'-phosphate
  modified_base 16: mod_base = OTHER; note = 2'-fluoroadenosine-3'-phosphate
  modified_base 17: mod_base = OTHER; note = 2'-O-methylcytidine-3'-phosphate
  modified_base 18: mod_base = OTHER; note = 2'-O-methyladenosine-3'-phosphate
  modified_base 19: mod_base = OTHER; note = 2'-O-methyluridine-3'-phosphate
  modified_base 20: mod_base = OTHER; note = 2'-O-methyladenosine-3'-phosphate
  modified_base 21: mod_base = OTHER; note = 2'-O-methylcytidine-3'-phosphorothioate
  modified_base 22: mod_base = OTHER; note = 2'-O-methyladenosine-3'-phosphorothioate
  modified_base 23: mod_base = OTHER; note = 2'-O-methyluridine-3'-phosphate
tctctctaagaagtaacatacat

SEQ ID NO: 2654 - RNA, 21 nt, synthetic construct
  source 1..21: mol_type = other RNA; note = Description of Artificial Sequence: Synthetic oligonucleotide
  modified_base 1: mod_base = OTHER; note = 2'-O-methyladenosine-3'-phosphorothioate
  modified_base 2: mod_base = OTHER; note = 2'-O-methylguanosine-3'-phosphorothioate
  modified_base 3: mod_base = OTHER; note = 2'-O-methylguanosine-3'-phosphate
  modified_base 4: mod_base = OTHER; note = 2'-O-methyladenosine-3'-phosphate
  modified_base 5: mod_base = OTHER; note = 2'-O-methyluridine-3'-phosphate
  modified_base 6: mod_base = OTHER; note = 2'-O-methylguanosine-3'-phosphate
  modified_base 7: mod_base = OTHER; note = 2'-fluorouridine-3'-phosphate
  modified_base 8: mod_base = OTHER; note = 2'-O-methyladenosine-3'-phosphate
  modified_base 9: mod_base = OTHER; note = 2'-fluorouridine-3'-phosphate
  modified_base 10: mod_base = OTHER; note = 2'-fluoroguanosine-3'-phosphate
  modified_base 11: mod_base = OTHER; note = 2'-fluorouridine-3'-phosphate
  modified_base 12: mod_base = OTHER; note = 2'-O-methyluridine-3'-phosphate
  modified_base 13: mod_base = OTHER; note = 2'-O-methyladenosine-3'-phosphate
  modified_base 14: mod_base = OTHER; note = 2'-O-methylcytidine-3'-phosphate
  modified_base 15: mod_base = OTHER; note = 2'-O-methyluridine-3'-phosphate
  modified_base 16: mod_base = OTHER; note = 2'-O-methyluridine-3'-phosphate
  modified_base 17: mod_base = OTHER; note = 2'-O-methylcytidine-3'-phosphate
  modified_base 18: mod_base = OTHER; note = 2'-O-methyluridine-3'-phosphate
  modified_base 19: mod_base = OTHER; note = 2'-O-methyluridine-3'-phosphate
  modified_base 20: mod_base = OTHER; note = 2'-O-methyladenosine-3'-phosphate
  modified_base 21: mod_base = OTHER; note = 2'-O-methylguanosine-3'-phosphate N-[tris(GalNAc-alkyl)-amidodecanoyl)]-4-hydroxyprolinol Hyp-(GalNAc-alkyl)3
aggatgtatgttacttcttag

SEQ ID NO: 2655 - RNA, 23 nt, synthetic construct
  source 1..23: mol_type = other RNA; note = Description of Artificial Sequence: Synthetic oligonucleotide
  modified_base 1: mod_base = OTHER; note = 2'-O-methylcytidine-3'-phosphorothioate
  modified_base 2: mod_base = OTHER; note = 2'-fluorouridine -3'-phosphorothioate
  modified_base 3: mod_base = OTHER; note = 2'-O-methyladenosine-3'-phosphate
  modified_base 4: mod_base = OTHER; note = 2'-O-methyladenosine-3'-phosphate
  modified_base 5: mod_base = OTHER; note = 2'-O-methylguanosine-3'-phosphate
  modified_base 6: mod_base = OTHER; note = 2'-fluoroadenosine-3'-phosphate
  modified_base 7: mod_base = OTHER; note = 2'-O-methyladenosine-3'-phosphate
  modified_base 8: mod_base = OTHER; note = 2'-fluoroguanosine-3'-phosphate
  modified_base 9: mod_base = OTHER; note = 2'-fluorouridine-3'-phosphate
  modified_base 10: mod_base = OTHER; note = 2'-O-methyladenosine-3'-phosphate
  modified_base 11: mod_base = OTHER; note = 2'-O-methyladenosine-3'-phosphate
  modified_base 12: mod_base = OTHER; note = 2'-O-methylcytidine-3'-phosphate
  modified_base 13: mod_base = OTHER; note = 2'-O-methyladenosine-3'-phosphate
  modified_base 14: mod_base = OTHER; note = 2'-fluorouridine-3'-phosphate
  modified_base 15: mod_base = OTHER; note = 2'-O-methyladenosine-3'-phosphate
  modified_base 16: mod_base = OTHER; note = 2'-fluorocytidine-3'-phosphate
  modified_base 17: mod_base = OTHER; note = 2'-O-methyladenosine-3'-phosphate
  modified_base 18: mod_base = OTHER; note = 2'-O-methyluridine-3'-phosphate
  modified_base 19: mod_base = OTHER; note = 2'-O-methylcytidine-3'-phosphate
  modified_base 20: mod_base = OTHER; note = 2'-O-methylcytidine-3'-phosphate
  modified_base 21: mod_base = OTHER; note = 2'-O-methyluridine-3'-phosphorothioate
  modified_base 22: mod_base = OTHER; note = 2'-O-methyladenosine-3'-phosphorothioate
  modified_base 23: mod_base = OTHER; note = 2'-O-methyladenosine-3'-phosphate
ctaagaagtaacatacatcctaa

SEQ ID NO: 2656 - RNA, 21 nt, synthetic construct
  source 1..21: mol_type = other RNA; note = Description of Artificial Sequence: Synthetic oligonucleotide
  modified_base 1: mod_base = OTHER; note = 2'-O-methyluridine-3'-phosphorothioate
  modified_base 2: mod_base = OTHER; note = 2'-O-methyladenosine-3'-phosphorothioate
  modified_base 3: mod_base = OTHER; note = 2'-O-methylguanosine-3'-phosphate
  modified_base 4: mod_base = OTHER; note = 2'-O-methylguanosine-3'-phosphate
  modified_base 5: mod_base = OTHER; note = 2'-O-methyladenosine-3'-phosphate
  modified_base 6: mod_base = OTHER; note = 2'-O-methyluridine-3'-phosphate
  modified_base 7: mod_base = OTHER; note = 2'-fluoroguanosine-3'-phosphate
  modified_base 8: mod_base = OTHER; note = 2'-O-methyluridine-3'-phosphate
  modified_base 9: mod_base = OTHER; note = 2'-fluoroadenosine-3'-phosphate
  modified_base 10: mod_base = OTHER; note = 2'-fluorouridine-3'-phosphate
  modified_base 11: mod_base = OTHER; note = 2'-fluoroguanosine-3'-phosphate
  modified_base 12: mod_base = OTHER; note = 2'-O-methyluridine-3'-phosphate
  modified_base 13: mod_base = OTHER; note = 2'-O-methyluridine-3'-phosphate
  modified_base 14: mod_base = OTHER; note = 2'-O-methyladenosine-3'-phosphate
  modified_base 15: mod_base = OTHER; note = 2'-O-methylcytidine-3'-phosphate
  modified_base 16: mod_base = OTHER; note = 2'-O-methyluridine-3'-phosphate
  modified_base 17: mod_base = OTHER; note = 2'-O-methyluridine-3'-phosphate
  modified_base 18: mod_base = OTHER; note = 2'-O-methylcytidine-3'-phosphate
  modified_base 19: mod_base = OTHER; note = 2'-O-methyluridine-3'-phosphate
  modified_base 20: mod_base = OTHER; note = 2'-O-methyluridine-3'-phosphate
  modified_base 21: mod_base = OTHER; note = 2'-O-methyladenosine-3'-phosphate N-[tris(GalNAc-alkyl)-amidodecanoyl)]-4-hydroxyprolinol Hyp-(GalNAc-alkyl)3
taggatgtatgttacttctta

SEQ ID NO: 2657 - RNA, 23 nt, synthetic construct
  source 1..23: mol_type = other RNA; note = Description of Artificial Sequence: Synthetic oligonucleotide
  modified_base 1: mod_base = OTHER; note = 2'-O-methyluridine-3'-phosphorothioate
  modified_base 2: mod_base = OTHER; note = 2'-fluoroadenosine-3'-phosphorothioate
  modified_base 3: mod_base = OTHER; note = 2'-O-methyladenosine-3'-phosphate
  modified_base 4: mod_base = OTHER; note = 2'-O-methylguanosine-3'-phosphate
  modified_base 5: mod_base = OTHER; note = 2'-O-methyladenosine-3'-phosphate
  modified_base 6: mod_base = OTHER; note = 2'-fluoroadenosine-3'-phosphate
  modified_base 7: mod_base = OTHER; note = 2'-O-methylguanosine-3'-phosphate
  modified_base 8: mod_base = OTHER; note = 2'-fluorouridine-3'-phosphate
  modified_base 9: mod_base = OTHER; note = 2'-fluoroadenosine-3'-phosphate
  modified_base 10: mod_base = OTHER; note = 2'-O-methyladenosine-3'-phosphate
  modified_base 11: mod_base = OTHER; note = 2'-O-methylcytidine-3'-phosphate
  modified_base 12: mod_base = OTHER; note = 2'-O-methyladenosine-3'-phosphate
  modified_base 13: mod_base = OTHER; note = 2'-O-methyluridine-3'-phosphate
  modified_base 14: mod_base = OTHER; note = 2'-fluoroadenosine-3'-phosphate
  modified_base 15: mod_base = OTHER; note = 2'-O-methylcytidine-3'-phosphate
  modified_base 16: mod_base = OTHER; note = 2'-fluoroadenosine-3'-phosphate
  modified_base 17: mod_base = OTHER; note = 2'-O-methyluridine-3'-phosphate
  modified_base 18: mod_base = OTHER; note = 2'-O-methylcytidine-3'-phosphate
  modified_base 19: mod_base = OTHER; note = 2'-O-methylcytidine-3'-phosphate
  modified_base 20: mod_base = OTHER; note = 2'-O-methyluridine-3'-phosphate
  modified_base 21: mod_base = OTHER; note = 2'-O-methyladenosine-3'-phosphorothioate
  modified_base 22: mod_base = OTHER; note = 2'-O-methyladenosine-3'-phosphorothioate
  modified_base 23: mod_base = OTHER; note = 2'-O-methyladenosine-3'-phosphate
taagaagtaacatacatcctaaa

SEQ ID NO: 2658 - RNA, 21 nt, synthetic construct
  source 1..21: mol_type = other RNA; note = Description of Artificial Sequence: Synthetic oligonucleotide
  modified_base 1: mod_base = OTHER; note = 2'-O-methyladenosine-3'-phosphorothioate
  modified_base 2: mod_base = OTHER; note = 2'-O-methyladenosine-3'-phosphorothioate
  modified_base 3: mod_base = OTHER; note = 2'-O-methyladenosine-3'-phosphate
  modified_base 4: mod_base = OTHER; note = 2'-O-methyluridine-3'-phosphate
  modified_base 5: mod_base = OTHER; note = 2'-O-methylguanosine-3'-phosphate
  modified_base 6: mod_base = OTHER; note = 2'-O-methyluridine-3'-phosphate
  modified_base 7: mod_base = OTHER; note = 2'-fluorouridine-3'-phosphate
  modified_base 8: mod_base = OTHER; note = 2'-O-methyluridine-3'-phosphate
  modified_base 9: mod_base = OTHER; note = 2'-fluorouridine-3'-phosphate
  modified_base 10: mod_base = OTHER; note = 2'-fluoroadenosine-3'-phosphate
  modified_base 11: mod_base = OTHER; note = 2'-fluoroguanosine-3'-phosphate
  modified_base 12: mod_base = OTHER; note = 2'-O-methylguanosine-3'-phosphate
  modified_base 13: mod_base = OTHER; note = 2'-O-methyladenosine-3'-phosphate
  modified_base 14: mod_base = OTHER; note = 2'-O-methyluridine-3'-phosphate
  modified_base 15: mod_base = OTHER; note = 2'-O-methylguanosine-3'-phosphate
  modified_base 16: mod_base = OTHER; note = 2'-O-methyluridine-3'-phosphate
  modified_base 17: mod_base = OTHER; note = 2'-O-methyladenosine-3'-phosphate
  modified_base 18: mod_base = OTHER; note = 2'-O-methyluridine-3'-phosphate
  modified_base 19: mod_base = OTHER; note = 2'-O-methylguanosine-3'-phosphate
  modified_base 20: mod_base = OTHER; note = 2'-O-methyluridine-3'-phosphate
  modified_base 21: mod_base = OTHER; note = 2'-O-methyluridine-3'-phosphate N-[tris(GalNAc-alkyl)-amidodecanoyl)]-4-hydroxyprolinol Hyp-(GalNAc-alkyl)3
aaatgttttaggatgtatgtt

SEQ ID NO: 2659 - RNA, 23 nt, synthetic construct
  source 1..23: mol_type = other RNA; note = Description of Artificial Sequence: Synthetic oligonucleotide
  modified_base 1: mod_base = OTHER; note = 2'-O-methyladenosine-3'-phosphorothioate
  modified_base 2: mod_base = OTHER; note = 2'-fluoroadenosine-3'-phosphorothioate
  modified_base 3: mod_base = OTHER; note = 2'-O-methylcytidine-3'-phosphate
  modified_base 4: mod_base = OTHER; note = 2'-O-methyladenosine-3'-phosphate
  modified_base 5: mod_base = OTHER; note = 2'-O-methyluridine-3'-phosphate
  modified_base 6: mod_base = OTHER; note = 2'-fluoroadenosine-3'-phosphate
  modified_base 7: mod_base = OTHER; note = 2'-O-methylcytidine-3'-phosphate
  modified_base 8: mod_base = OTHER; note = 2'-fluoroadenosine-3'-phosphate
  modified_base 9: mod_base = OTHER; note = 2'-fluorouridine-3'-phosphate
  modified_base 10: mod_base = OTHER; note = 2'-O-methylcytidine-3'-phosphate
  modified_base 11: mod_base = OTHER; note = 2'-O-methylcytidine-3'-phosphate
  modified_base 12: mod_base = OTHER; note = 2'-O-methyluridine-3'-phosphate
  modified_base 13: mod_base = OTHER; note = 2'-O-methyladenosine-3'-phosphate
  modified_base 14: mod_base = OTHER; note = 2'-fluoroadenosine-3'-phosphate
  modified_base 15: mod_base = OTHER; note = 2'-O-methyladenosine-3'-phosphate
  modified_base 16: mod_base = OTHER; note = 2'-fluoroadenosine-3'-phosphate
  modified_base 17: mod_base = OTHER; note = 2'-O-methylcytidine-3'-phosphate
  modified_base 18: mod_base = OTHER; note = 2'-O-methyladenosine-3'-phosphate
  modified_base 19: mod_base = OTHER; note = 2'-O-methyluridine-3'-phosphate
  modified_base 20: mod_base = OTHER; note = 2'-O-methyluridine-3'-phosphate
  modified_base 21: mod_base = OTHER; note = 2'-O-methyluridine-3'-phosphorothioate
  modified_base 22: mod_base = OTHER; note = 2'-O-methylguanosine-3'-phosphorothioate
  modified_base 23: mod_base = OTHER; note = 2'-O-methylguanosine-3'-phosphate
aacatacatcctaaaacatttgg

SEQ ID NO: 2660 - RNA, 21 nt, synthetic construct
  source 1..21: mol_type = other RNA; note = Description of Artificial Sequence: Synthetic oligonucleotide
  modified_base 1: mod_base = OTHER; note = 2'-O-methyladenosine-3'-phosphorothioate
  modified_base 2: mod_base = OTHER; note = 2'-O-methyladenosine-3'-phosphorothioate
  modified_base 3: mod_base = OTHER; note = 2'-O-methyluridine-3'-phosphate
  modified_base 4: mod_base = OTHER; note = 2'-O-methylguanosine-3'-phosphate
  modified_base 5: mod_base = OTHER; note = 2'-O-methyluridine-3'-phosphate
  modified_base 6: mod_base = OTHER; note = 2'-O-methyluridine-3'-phosphate
  modified_base 7: mod_base = OTHER; note = 2'-fluorouridine-3'-phosphate
  modified_base 8: mod_base = OTHER; note = 2'-O-methyluridine-3'-phosphate
  modified_base 9: mod_base = OTHER; note = 2'-fluoroadenosine-3'-phosphate
  modified_base 10: mod_base = OTHER; note = 2'-fluoroguanosine-3'-phosphate
  modified_base 11: mod_base = OTHER; note = 2'-fluoroguanosine-3'-phosphate
  modified_base 12: mod_base = OTHER; note = 2'-O-methyladenosine-3'-phosphate
  modified_base 13: mod_base = OTHER; note = 2'-O-methyluridine-3'-phosphate
  modified_base 14: mod_base = OTHER; note = 2'-O-methylguanosine-3'-phosphate
  modified_base 15: mod_base = OTHER; note = 2'-O-methyluridine-3'-phosphate
  modified_base 16: mod_base = OTHER; note = 2'-O-methyladenosine-3'-phosphate
  modified_base 17: mod_base = OTHER; note = 2'-O-methyluridine-3'-phosphate
  modified_base 18: mod_base = OTHER; note = 2'-O-methylguanosine-3'-phosphate
  modified_base 19: mod_base = OTHER; note = 2'-O-methyluridine-3'-phosphate
  modified_base 20: mod_base = OTHER; note = 2'-O-methyluridine-3'-phosphate
  modified_base 21: mod_base = OTHER; note = 2'-O-methyladenosine-3'-phosphate N-[tris(GalNAc-alkyl)-amidodecanoyl)]-4-hydroxyprolinol Hyp-(GalNAc-alkyl)3
aatgttttaggatgtatgtta

SEQ ID NO: 2661 - RNA, 23 nt, synthetic construct
  source 1..23: mol_type = other RNA; note = Description of Artificial Sequence: Synthetic oligonucleotide
  modified_base 1: mod_base = OTHER; note = 2'-O-methyluridine-3'-phosphorothioate
  modified_base 2: mod_base = OTHER; note = 2'-fluoroadenosine-3'-phosphorothioate
  modified_base 3: mod_base = OTHER; note = 2'-O-methyladenosine-3'-phosphate
  modified_base 4: mod_base = OTHER; note = 2'-O-methylcytidine-3'-phosphate
  modified_base 5: mod_base = OTHER; note = 2'-O-methyladenosine-3'-phosphate
  modified_base 6: mod_base = OTHER; note = 2'-fluorouridine-3'-phosphate
  modified_base 7: mod_base = OTHER; note = 2'-O-methyladenosine-3'-phosphate
  modified_base 8: mod_base = OTHER; note = 2'-fluorocytidine-3'-phosphate
  modified_base 9: mod_base = OTHER; note = 2'-fluoroadenosine-3'-phosphate
  modified_base 10: mod_base = OTHER; note = 2'-O-methyluridine-3'-phosphate
  modified_base 11: mod_base = OTHER; note = 2'-O-methylcytidine-3'-phosphate
  modified_base 12: mod_base = OTHER; note = 2'-O-methylcytidine-3'-phosphate
  modified_base 13: mod_base = OTHER; note = 2'-O-methyluridine-3'-phosphate
  modified_base 14: mod_base = OTHER; note = 2'-fluoroadenosine-3'-phosphate
  modified_base 15: mod_base = OTHER; note = 2'-O-methyladenosine-3'-phosphate
  modified_base 16: mod_base = OTHER; note = 2'-fluoroadenosine-3'-phosphate
  modified_base 17: mod_base = OTHER; note = 2'-O-methyladenosine-3'-phosphate
  modified_base 18: mod_base = OTHER; note = 2'-O-methylcytidine-3'-phosphate
  modified_base 19: mod_base = OTHER; note = 2'-O-methyladenosine-3'-phosphate
  modified_base 20: mod_base = OTHER; note = 2'-O-methyluridine-3'-phosphate
  modified_base 21: mod_base = OTHER; note = 2'-O-methyluridine-3'-phosphorothioate
  modified_base 22: mod_base = OTHER; note = 2'-O-methyluridine-3'-phosphorothioate
  modified_base 23: mod_base = OTHER; note = 2'-O-methylguanosine-3'-phosphate
taacatacatcctaaaacatttg

SEQ ID NO: 2662 - RNA, 21 nt, synthetic construct
  source 1..21: mol_type = other RNA; note = Description of Artificial Sequence: Synthetic oligonucleotide
  modified_base 1: mod_base = OTHER; note = 2'-O-methyladenosine-3'-phosphorothioate
  modified_base 2: mod_base = OTHER; note = 2'-O-methyluridine-3'-phosphorothioate
  modified_base 3: mod_base = OTHER; note = 2'-O-methylcytidine-3'-phosphate
  modified_base 4: mod_base = OTHER; note = 2'-O-methylcytidine-3'-phosphate
  modified_base 5: mod_base = OTHER; note = 2'-O-methyladenosine-3'-phosphate
  modified_base 6: mod_base = OTHER; note = 2'-O-methyladenosine-3'-phosphate
  modified_base 7: mod_base = OTHER; note = 2'-fluoroadenosine-3'-phosphate
  modified_base 8: mod_base = OTHER; note = 2'-O-methyluridine-3'-phosphate
  modified_base 9: mod_base = OTHER; note = 2'-fluoroguanosine-3'-phosphate
  modified_base 10: mod_base = OTHER; note = 2'-fluorouridine-3'-phosphate
  modified_base 11: mod_base = OTHER; note = 2'-fluorouridine-3'-phosphate
  modified_base 12: mod_base = OTHER; note = 2'-O-methyluridine-3'-phosphate
  modified_base 13: mod_base = OTHER; note = 2'-O-methyluridine-3'-phosphate
  modified_base 14: mod_base = OTHER; note = 2'-O-methyladenosine-3'-phosphate
  modified_base 15: mod_base = OTHER; note = 2'-O-methylguanosine-3'-phosphate
  modified_base 16: mod_base = OTHER; note = 2'-O-methylguanosine-3'-phosphate
  modified_base 17: mod_base = OTHER; note = 2'-O-methyladenosine-3'-phosphate
  modified_base 18: mod_base = OTHER; note = 2'-O-methyluridine-3'-phosphate
  modified_base 19: mod_base = OTHER; note = 2'-O-methylguanosine-3'-phosphate
  modified_base 20: mod_base = OTHER; note = 2'-O-methyluridine-3'-phosphate
  modified_base 21: mod_base = OTHER; note = 2'-O-methyladenosine-3'-phosphate N-[tris(GalNAc-alkyl)-amidodecanoyl)]-4-hydroxyprolinol Hyp-(GalNAc-alkyl)3
atccaaatgttttaggatgta

SEQ ID NO: 2663 - RNA, 23 nt, synthetic construct
  source 1..23: mol_type = other RNA; note = Description of Artificial Sequence: Synthetic oligonucleotide
  modified_base 1: mod_base = OTHER; note = 2'-O-methyluridine-3'-phosphorothioate
  modified_base 2: mod_base = OTHER; note = 2'-fluoroadenosine-3'-phosphorothioate
  modified_base 3: mod_base = OTHER; note = 2'-O-methylcytidine-3'-phosphate
  modified_base 4: mod_base = OTHER; note = 2'-O-methyladenosine-3'-phosphate
  modified_base 5: mod_base = OTHER; note = 2'-O-methyluridine-3'-phosphate
  modified_base 6: mod_base = OTHER; note = 2'-fluorocytidine-3'-phosphate
  modified_base 7: mod_base = OTHER; note = 2'-O-methylcytidine-3'-phosphate
  modified_base 8: mod_base = OTHER; note = 2'-fluorouridine-3'-phosphate
  modified_base 9: mod_base = OTHER; note = 2'-fluoroadenosine-3'-phosphate
  modified_base 10: mod_base = OTHER; note = 2'-O-methyladenosine-3'-phosphate
  modified_base 11: mod_base = OTHER; note = 2'-O-methyladenosine-3'-phosphate
  modified_base 12: mod_base = OTHER; note = 2'-O-methyladenosine-3'-phosphate
  modified_base 13: mod_base = OTHER; note = 2'-O-methylcytidine-3'-phosphate
  modified_base 14: mod_base = OTHER; note = 2'-fluoroadenosine-3'-phosphate
  modified_base 15: mod_base = OTHER; note = 2'-O-methyluridine-3'-phosphate
  modified_base 16: mod_base = OTHER; note = 2'-fluorouridine-3'-phosphate
  modified_base 17: mod_base = OTHER; note = 2'-O-methyluridine-3'-phosphate
  modified_base 18: mod_base = OTHER; note = 2'-O-methylguanosine-3'-phosphate
  modified_base 19: mod_base = OTHER; note = 2'-O-methylguanosine-3'-phosphate
  modified_base 20: mod_base = OTHER; note = 2'-O-methyladenosine-3'-phosphate
  modified_base 21: mod_base = OTHER; note = 2'-O-methyluridine-3'-phosphorothioate
  modified_base 22: mod_base = OTHER; note = 2'-O-methyladenosine-3'-phosphorothioate
  modified_base 23: mod_base = OTHER; note = 2'-O-methyluridine-3'-phosphate
tacatcctaaaacatttggatat

SEQ ID NO: 2664 - RNA, 21 nt, synthetic construct
  source 1..21: mol_type = other RNA; note = Description of Artificial Sequence: Synthetic oligonucleotide
  modified_base 1: mod_base = OTHER; note = 2'-O-methyluridine-3'-phosphorothioate
  modified_base 2: mod_base = OTHER; note = 2'-O-methyladenosine-3'-phosphorothioate
  modified_base 3: mod_base = OTHER; note = 2'-O-methyluridine-3'-phosphate
  modified_base 4: mod_base = OTHER; note = 2'-O-methylcytidine-3'-phosphate
  modified_base 5: mod_base = OTHER; note = 2'-O-methylcytidine-3'-phosphate
  modified_base 6: mod_base = OTHER; note = 2'-O-methyladenosine-3'-phosphate
  modified_base 7: mod_base = OTHER; note = 2'-fluoroadenosine-3'-phosphate
  modified_base 8: mod_base = OTHER; note = 2'-O-methyladenosine-3'-phosphate
  modified_base 9: mod_base = OTHER; note = 2'-fluorouridine-3'-phosphate
  modified_base 10: mod_base = OTHER; note = 2'-fluoroguanosine-3'-phosphate
  modified_base 11: mod_base = OTHER; note = 2'-fluorouridine-3'-phosphate
  modified_base 12: mod_base = OTHER; note = 2'-O-methyluridine-3'-phosphate
  modified_base 13: mod_base = OTHER; note = 2'-O-methyluridine-3'-phosphate
  modified_base 14: mod_base = OTHER; note = 2'-O-methyluridine-3'-phosphate
  modified_base 15: mod_base = OTHER; note = 2'-O-methyladenosine-3'-phosphate
  modified_base 16: mod_base = OTHER; note = 2'-O-methylguanosine-3'-phosphate
  modified_base 17: mod_base = OTHER; note = 2'-O-methylguanosine-3'-phosphate
  modified_base 18: mod_base = OTHER; note = 2'-O-methyladenosine-3'-phosphate
  modified_base 19: mod_base = OTHER; note = 2'-O-methyluridine-3'-phosphate
  modified_base 20: mod_base = OTHER; note = 2'-O-methylguanosine-3'-phosphate
  modified_base 21: mod_base = OTHER; note = 2'-O-methyluridine-3'-phosphate N-[tris(GalNAc-alkyl)-amidodecanoyl)]-4-hydroxyprolinol Hyp-(GalNAc-alkyl)3
tatccaaatgttttaggatgt

SEQ ID NO: 2665 - RNA, 23 nt, synthetic construct
  source 1..23: mol_type = other RNA; note = Description of Artificial Sequence: Synthetic oligonucleotide
  modified_base 1: mod_base = OTHER; note = 2'-O-methyladenosine-3'-phosphorothioate
  modified_base 2: mod_base = OTHER; note = 2'-fluorocytidine-3'-phosphorothioate
  modified_base 3: mod_base = OTHER; note = 2'-O-methyladenosine-3'-phosphate
  modified_base 4: mod_base = OTHER; note = 2'-O-methyluridine-3'-phosphate
  modified_base 5: mod_base = OTHER; note = 2'-O-methylcytidine-3'-phosphate
  modified_base 6: mod_base = OTHER; note = 2'-fluorocytidine-3'-phosphate
  modified_base 7: mod_base = OTHER; note = 2'-O-methyluridine-3'-phosphate
  modified_base 8: mod_base = OTHER; note = 2'-fluoroadenosine-3'-phosphate
  modified_base 9: mod_base = OTHER; note = 2'-fluoroadenosine-3'-phosphate
  modified_base 10: mod_base = OTHER; note = 2'-O-methyladenosine-3'-phosphate
  modified_base 11: mod_base = OTHER; note = 2'-O-methyladenosine-3'-phosphate
  modified_base 12: mod_base = OTHER; note = 2'-O-methylcytidine-3'-phosphate
  modified_base 13: mod_base = OTHER; note = 2'-O-methyladenosine-3'-phosphate
  modified_base 14: mod_base = OTHER; note = 2'-fluorouridine-3'-phosphate
  modified_base 15: mod_base = OTHER; note = 2'-O-methyluridine-3'-phosphate
  modified_base 16: mod_base = OTHER; note = 2'-fluorouridine-3'-phosphate
  modified_base 17: mod_base = OTHER; note = 2'-O-methylguanosine-3'-phosphate
  modified_base 18: mod_base = OTHER; note = 2'-O-methylguanosine-3'-phosphate
  modified_base 19: mod_base = OTHER; note = 2'-O-methyladenosine-3'-phosphate
  modified_base 20: mod_base = OTHER; note = 2'-O-methyluridine-3'-phosphate
  modified_base 21: mod_base = OTHER; note = 2'-O-methyladenosine-3'-phosphorothioate
  modified_base 22: mod_base = OTHER; note = 2'-O-methyluridine-3'-phosphorothioate
  modified_base 23: mod_base = OTHER; note = 2'-O-methyladenosine-3'-phosphate
acatcctaaaacatttggatata

SEQ ID NO: 2666 - RNA, 21 nt, synthetic construct
  source 1..21: mol_type = other RNA; note = Description of Artificial Sequence: Synthetic oligonucleotide
  modified_base 1: mod_base = OTHER; note = 2'-O-methyladenosine-3'-phosphorothioate
  modified_base 2: mod_base = OTHER; note = 2'-O-methyluridine-3'-phosphorothioate
  modified_base 3: mod_base = OTHER; note = 2'-O-methylguanosine-3'-phosphate
  modified_base 4: mod_base = OTHER; note = 2'-O-methylguanosine-3'-phosphate
  modified_base 5: mod_base = OTHER; note = 2'-O-methylguanosine-3'-phosphate
  modified_base 6: mod_base = OTHER; note = 2'-O-methyluridine-3'-phosphate
  modified_base 7: mod_base = OTHER; note = 2'-fluoroguanosine-3'-phosphate
  modified_base 8: mod_base = OTHER; note = 2'-O-methylguanosine-3'-phosphate
  modified_base 9: mod_base = OTHER; note = 2'-fluorocytidine-3'-phosphate
  modified_base 10: mod_base = OTHER; note = 2'-fluoroguanosine-3'-phosphate
  modified_base 11: mod_base = OTHER; note = 2'-fluoroguanosine-3'-phosphate
  modified_base 12: mod_base = OTHER; note = 2'-O-methyluridine-3'-phosphate
  modified_base 13: mod_base = OTHER; note = 2'-O-methyladenosine-3'-phosphate
  modified_base 14: mod_base = OTHER; note = 2'-O-methyladenosine-3'-phosphate
  modified_base 15: mod_base = OTHER; note = 2'-O-methyluridine-3'-phosphate
  modified_base 16: mod_base = OTHER; note = 2'-O-methyluridine-3'-phosphate
  modified_base 17: mod_base = OTHER; note = 2'-O-methylguanosine-3'-phosphate
  modified_base 18: mod_base = OTHER; note = 2'-O-methylguanosine-3'-phosphate
  modified_base 19: mod_base = OTHER; note = 2'-O-methyluridine-3'-phosphate
  modified_base 20: mod_base = OTHER; note = 2'-O-methylguanosine-3'-phosphate
  modified_base 21: mod_base = OTHER; note = 2'-O-methyladenosine-3'-phosphate N-[tris(GalNAc-alkyl)-amidodecanoyl)]-4-hydroxyprolinol Hyp-(GalNAc-alkyl)3
atgggtggcggtaattggtga

SEQ ID NO: 2667 - RNA, 23 nt, synthetic construct
  source 1..23: mol_type = other RNA; note = Description of Artificial Sequence: Synthetic oligonucleotide
  modified_base 1: mod_base = OTHER; note = 2'-O-methyluridine-3'-phosphorothioate
  modified_base 2: mod_base = OTHER; note = 2'-fluorocytidine-3'-phosphorothioate
  modified_base 3: mod_base = OTHER; note = 2'-O-methyladenosine-3'-phosphate
  modified_base 4: mod_base = OTHER; note = 2'-O-methylcytidine-3'-phosphate
  modified_base 5: mod_base = OTHER; note = 2'-O-methylcytidine-3'-phosphate
  modified_base 6: mod_base = OTHER; note = 2'-fluoroadenosine-3'-phosphate
  modified_base 7: mod_base = OTHER; note = 2'-O-methyladenosine-3'-phosphate
  modified_base 8: mod_base = OTHER; note = 2'-fluorouridine-3'-phosphate
  modified_base 9: mod_base = OTHER; note = 2'-fluorouridine-3'-phosphate
  modified_base 10: mod_base = OTHER; note = 2'-O-methyladenosine-3'-phosphate
  modified_base 11: mod_base = OTHER; note = 2'-O-methylcytidine-3'-phosphate
  modified_base 12: mod_base = OTHER; note = 2'-O-methylcytidine-3'-phosphate
  modified_base 13: mod_base = OTHER; note = 2'-O-methylguanosine-3'-phosphate
  modified_base 14: mod_base = OTHER; note = 2'-fluorocytidine-3'-phosphate
  modified_base 15: mod_base = OTHER; note = 2'-O-methylcytidine-3'-phosphate
  modified_base 16: mod_base = OTHER; note = 2'-fluoroadenosine-3'-phosphate
  modified_base 17: mod_base = OTHER; note = 2'-O-methylcytidine-3'-phosphate
  modified_base 18: mod_base = OTHER; note = 2'-O-methylcytidine-3'-phosphate
  modified_base 19: mod_base = OTHER; note = 2'-O-methylcytidine-3'-phosphate
  modified_base 20: mod_base = OTHER; note = 2'-O-methyladenosine-3'-phosphate
  modified_base 21: mod_base = OTHER; note = 2'-O-methyluridine-3'-phosphorothioate
  modified_base 22: mod_base = OTHER; note = 2'-O-methyluridine-3'-phosphorothioate
  modified_base 23: mod_base = OTHER; note = 2'-O-methylcytidine-3'-phosphate
tcaccaattaccgccacccattc

SEQ ID NO: 2668 - RNA, 21 nt, synthetic construct
  source 1..21: mol_type = other RNA; note = Description of Artificial Sequence: Synthetic oligonucleotide
  modified_base 1: mod_base = OTHER; note = 2'-O-methyluridine-3'-phosphorothioate
  modified_base 2: mod_base = OTHER; note = 2'-O-methylguanosine-3'-phosphorothioate
  modified_base 3: mod_base = OTHER; note = 2'-O-methylguanosine-3'-phosphate
  modified_base 4: mod_base = OTHER; note = 2'-O-methylguanosine-3'-phosphate
  modified_base 5: mod_base = OTHER; note = 2'-O-methyluridine-3'-phosphate
  modified_base 6: mod_base = OTHER; note = 2'-O-methylguanosine-3'-phosphate
  modified_base 7: mod_base = OTHER; note = 2'-fluoroguanosine-3'-phosphate
  modified_base 8: mod_base = OTHER; note = 2'-O-methylcytidine-3'-phosphate
  modified_base 9: mod_base = OTHER; note = 2'-fluoroguanosine-3'-phosphate
  modified_base 10: mod_base = OTHER; note = 2'-fluoroguanosine-3'-phosphate
  modified_base 11: mod_base = OTHER; note = 2'-fluorouridine-3'-phosphate
  modified_base 12: mod_base = OTHER; note = 2'-O-methyladenosine-3'-phosphate
  modified_base 13: mod_base = OTHER; note = 2'-O-methyladenosine-3'-phosphate
  modified_base 14: mod_base = OTHER; note = 2'-O-methyluridine-3'-phosphate
  modified_base 15: mod_base = OTHER; note = 2'-O-methyluridine-3'-phosphate
  modified_base 16: mod_base = OTHER; note = 2'-O-methylguanosine-3'-phosphate
  modified_base 17: mod_base = OTHER; note = 2'-O-methylguanosine-3'-phosphate
  modified_base 18: mod_base = OTHER; note = 2'-O-methyluridine-3'-phosphate
  modified_base 19: mod_base = OTHER; note = 2'-O-methylguanosine-3'-phosphate
  modified_base 20: mod_base = OTHER; note = 2'-O-methyladenosine-3'-phosphate
  modified_base 21: mod_base = OTHER; note = 2'-O-methyluridine-3'-phosphate N-[tris(GalNAc-alkyl)-amidodecanoyl)]-4-hydroxyprolinol Hyp-(GalNAc-alkyl)3
tgggtggcggtaattggtgat

SEQ ID NO: 2669 - RNA, 23 nt, synthetic construct
  source 1..23: mol_type = other RNA; note = Description of Artificial Sequence: Synthetic oligonucleotide
  modified_base 1: mod_base = OTHER; note = 2'-O-methyladenosine-3'-phosphorothioate
  modified_base 2: mod_base = OTHER; note = 2'-fluorouridine -3'-phosphorothioate
  modified_base 3: mod_base = OTHER; note = 2'-O-methylcytidine-3'-phosphate
  modified_base 4: mod_base = OTHER; note = 2'-O-methyladenosine-3'-phosphate
  modified_base 5: mod_base = OTHER; note = 2'-O-methylcytidine-3'-phosphate
  modified_base 6: mod_base = OTHER; note = 2'-fluorocytidine-3'-phosphate
  modified_base 7: mod_base = OTHER; note = 2'-O-methyladenosine-3'-phosphate
  modified_base 8: mod_base = OTHER; note = 2'-fluoroadenosine-3'-phosphate
  modified_base 9: mod_base = OTHER; note = 2'-fluorouridine-3'-phosphate
  modified_base 10: mod_base = OTHER; note = 2'-O-methyluridine-3'-phosphate
  modified_base 11: mod_base = OTHER; note = 2'-O-methyladenosine-3'-phosphate
  modified_base 12: mod_base = OTHER; note = 2'-O-methylcytidine-3'-phosphate
  modified_base 13: mod_base = OTHER; note = 2'-O-methylcytidine-3'-phosphate
  modified_base 14: mod_base = OTHER; note = 2'-fluoroguanosine-3'-phosphate
  modified_base 15: mod_base = OTHER; note = 2'-O-methylcytidine-3'-phosphate
  modified_base 16: mod_base = OTHER; note = 2'-fluorocytidine-3'-phosphate
  modified_base 17: mod_base = OTHER; note = 2'-O-methyladenosine-3'-phosphate
  modified_base 18: mod_base = OTHER; note = 2'-O-methylcytidine-3'-phosphate
  modified_base 19: mod_base = OTHER; note = 2'-O-methylcytidine-3'-phosphate
  modified_base 20: mod_base = OTHER; note = 2'-O-methylcytidine-3'-phosphate
  modified_base 21: mod_base = OTHER; note = 2'-O-methyladenosine-3'-phosphorothioate
  modified_base 22: mod_base = OTHER; note = 2'-O-methyluridine-3'-phosphorothioate
  modified_base 23: mod_base = OTHER; note = 2'-O-methyluridine-3'-phosphate
atcaccaattaccgccacccatt

SEQ ID NO: 2670 - RNA, 21 nt, synthetic construct
  source 1..21: mol_type = other RNA; note = Description of Artificial Sequence: Synthetic oligonucleotide
  modified_base 1: mod_base = OTHER; note = 2'-O-methyluridine-3'-phosphorothioate
  modified_base 2: mod_base = OTHER; note = 2'-O-methylguanosine-3'-phosphorothioate
  modified_base 3: mod_base = OTHER; note = 2'-O-methylguanosine-3'-phosphate
  modified_base 4: mod_base = OTHER; note = 2'-O-methyladenosine-3'-phosphate
  modified_base 5: mod_base = OTHER; note = 2'-O-methyladenosine-3'-phosphate
  modified_base 6: mod_base = OTHER; note = 2'-O-methyluridine-3'-phosphate
  modified_base 7: mod_base = OTHER; note = 2'-fluoroguanosine-3'-phosphate
  modified_base 8: mod_base = OTHER; note = 2'-O-methylguanosine-3'-phosphate
  modified_base 9: mod_base = OTHER; note = 2'-fluoroguanosine-3'-phosphate
  modified_base 10: mod_base = OTHER; note = 2'-fluorouridine-3'-phosphate
  modified_base 11: mod_base = OTHER; note = 2'-fluoroguanosine-3'-phosphate
  modified_base 12: mod_base = OTHER; note = 2'-O-methylguanosine-3'-phosphate
  modified_base 13: mod_base = OTHER; note = 2'-O-methylcytidine-3'-phosphate
  modified_base 14: mod_base = OTHER; note = 2'-O-methylguanosine-3'-phosphate
  modified_base 15: mod_base = OTHER; note = 2'-O-methylguanosine-3'-phosphate
  modified_base 16: mod_base = OTHER; note = 2'-O-methyluridine-3'-phosphate
  modified_base 17: mod_base = OTHER; note = 2'-O-methyladenosine-3'-phosphate
  modified_base 18: mod_base = OTHER; note = 2'-O-methyladenosine-3'-phosphate
  modified_base 19: mod_base = OTHER; note = 2'-O-methyluridine-3'-phosphate
  modified_base 20: mod_base = OTHER; note = 2'-O-methyluridine-3'-phosphate
  modified_base 21: mod_base = OTHER; note = 2'-O-methylguanosine-3'-phosphate N-[tris(GalNAc-alkyl)-amidodecanoyl)]-4-hydroxyprolinol Hyp-(GalNAc-alkyl)3
tggaatgggtggcggtaattg

SEQ ID NO: 2671 - RNA, 23 nt, synthetic construct
  source 1..23: mol_type = other RNA; note = Description of Artificial Sequence: Synthetic oligonucleotide
  modified_base 1: mod_base = OTHER; note = 2'-O-methylcytidine-3'-phosphorothioate
  modified_base 2: mod_base = OTHER; note = 2'-fluoroadenosine-3'-phosphorothioate
  modified_base 3: mod_base = OTHER; note = 2'-O-methyladenosine-3'-phosphate
  modified_base 4: mod_base = OTHER; note = 2'-O-methyluridine-3'-phosphate
  modified_base 5: mod_base = OTHER; note = 2'-O-methyluridine-3'-phosphate
  modified_base 6: mod_base = OTHER; note = 2'-fluoroadenosine-3'-phosphate
  modified_base 7: mod_base = OTHER; note = 2'-O-methylcytidine-3'-phosphate
  modified_base 8: mod_base = OTHER; note = 2'-fluorocytidine-3'-phosphate
  modified_base 9: mod_base = OTHER; note = 2'-fluoroguanosine-3'-phosphate
  modified_base 10: mod_base = OTHER; note = 2'-O-methylcytidine-3'-phosphate
  modified_base 11: mod_base = OTHER; note = 2'-O-methylcytidine-3'-phosphate
  modified_base 12: mod_base = OTHER; note = 2'-O-methyladenosine-3'-phosphate
  modified_base 13: mod_base = OTHER; note = 2'-O-methylcytidine-3'-phosphate
  modified_base 14: mod_base = OTHER; note = 2'-fluorocytidine-3'-phosphate
  modified_base 15: mod_base = OTHER; note = 2'-O-methylcytidine-3'-phosphate
  modified_base 16: mod_base = OTHER; note = 2'-fluoroadenosine-3'-phosphate
  modified_base 17: mod_base = OTHER; note = 2'-O-methyluridine-3'-phosphate
  modified_base 18: mod_base = OTHER; note = 2'-O-methyluridine-3'-phosphate
  modified_base 19: mod_base = OTHER; note = 2'-O-methylcytidine-3'-phosphate
  modified_base 20: mod_base = OTHER; note = 2'-O-methylcytidine-3'-phosphate
  modified_base 21: mod_base = OTHER; note = 2'-O-methyladenosine-3'-phosphorothioate
  modified_base 22: mod_base = OTHER; note = 2'-O-methyladenosine-3'-phosphorothioate
  modified_base 23: mod_base = OTHER; note = 2'-O-methyluridine-3'-phosphate
caattaccgccacccattccaat

SEQ ID NO: 2672 - RNA, 21 nt, synthetic construct
  source 1..21: mol_type = other RNA; note = Description of Artificial Sequence: Synthetic oligonucleotide
  modified_base 1: mod_base = OTHER; note = 2'-O-methyluridine-3'-phosphorothioate
  modified_base 2: mod_base = OTHER; note = 2'-O-methyluridine-3'-phosphorothioate
  modified_base 3: mod_base = OTHER; note = 2'-O-methylguanosine-3'-phosphate
  modified_base 4: mod_base = OTHER; note = 2'-O-methylguanosine-3'-phosphate
  modified_base 5: mod_base = OTHER; note = 2'-O-methyladenosine-3'-phosphate
  modified_base 6: mod_base = OTHER; note = 2'-O-methyladenosine-3'-phosphate
  modified_base 7: mod_base = OTHER; note = 2'-fluorouridine-3'-phosphate
  modified_base 8: mod_base = OTHER; note = 2'-O-methylguanosine-3'-phosphate
  modified_base 9: mod_base = OTHER; note = 2'-fluoroguanosine-3'-phosphate
  modified_base 10: mod_base = OTHER; note = 2'-fluoroguanosine-3'-phosphate
  modified_base 11: mod_base = OTHER; note = 2'-fluorouridine-3'-phosphate
  modified_base 12: mod_base = OTHER; note = 2'-O-methylguanosine-3'-phosphate
  modified_base 13: mod_base = OTHER; note = 2'-O-methylguanosine-3'-phosphate
  modified_base 14: mod_base = OTHER; note = 2'-O-methylcytidine-3'-phosphate
  modified_base 15: mod_base = OTHER; note = 2'-O-methylguanosine-3'-phosphate
  modified_base 16: mod_base = OTHER; note = 2'-O-methylguanosine-3'-phosphate
  modified_base 17: mod_base = OTHER; note = 2'-O-methyluridine-3'-phosphate
  modified_base 18: mod_base = OTHER; note = 2'-O-methyladenosine-3'-phosphate
  modified_base 19: mod_base = OTHER; note = 2'-O-methyladenosine-3'-phosphate
  modified_base 20: mod_base = OTHER; note = 2'-O-methyluridine-3'-phosphate
  modified_base 21: mod_base = OTHER; note = 2'-O-methyluridine-3'-phosphate N-[tris(GalNAc-alkyl)-amidodecanoyl)]-4-hydroxyprolinol Hyp-(GalNAc-alkyl)3
ttggaatgggtggcggtaatt

SEQ ID NO: 2673 - RNA, 23 nt, synthetic construct
  source 1..23: mol_type = other RNA; note = Description of Artificial Sequence: Synthetic oligonucleotide
  modified_base 1: mod_base = OTHER; note = 2'-O-methyladenosine-3'-phosphorothioate
  modified_base 2: mod_base = OTHER; note = 2'-fluoroadenosine-3'-phosphorothioate
  modified_base 3: mod_base = OTHER; note = 2'-O-methyluridine-3'-phosphate
  modified_base 4: mod_base = OTHER; note = 2'-O-methyluridine-3'-phosphate
  modified_base 5: mod_base = OTHER; note = 2'-O-methyladenosine-3'-phosphate
  modified_base 6: mod_base = OTHER; note = 2'-fluorocytidine-3'-phosphate
  modified_base 7: mod_base = OTHER; note = 2'-O-methylcytidine-3'-phosphate
  modified_base 8: mod_base = OTHER; note = 2'-fluoroguanosine-3'-phosphate
  modified_base 9: mod_base = OTHER; note = 2'-fluorocytidine-3'-phosphate
  modified_base 10: mod_base = OTHER; note = 2'-O-methylcytidine-3'-phosphate
  modified_base 11: mod_base = OTHER; note = 2'-O-methyladenosine-3'-phosphate
  modified_base 12: mod_base = OTHER; note = 2'-O-methylcytidine-3'-phosphate
  modified_base 13: mod_base = OTHER; note = 2'-O-methylcytidine-3'-phosphate
  modified_base 14: mod_base = OTHER; note = 2'-fluorocytidine-3'-phosphate
  modified_base 15: mod_base = OTHER; note = 2'-O-methyladenosine-3'-phosphate
  modified_base 16: mod_base = OTHER; note = 2'-fluorouridine-3'-phosphate
  modified_base 17: mod_base = OTHER; note = 2'-O-methyluridine-3'-phosphate
  modified_base 18: mod_base = OTHER; note = 2'-O-methylcytidine-3'-phosphate
  modified_base 19: mod_base = OTHER; note = 2'-O-methylcytidine-3'-phosphate
  modified_base 20: mod_base = OTHER; note = 2'-O-methyladenosine-3'-phosphate
  modified_base 21: mod_base = OTHER; note = 2'-O-methyladenosine-3'-phosphorothioate
  modified_base 22: mod_base = OTHER; note = 2'-O-methyluridine-3'-phosphorothioate
  modified_base 23: mod_base = OTHER; note = 2'-O-methyluridine-3'-phosphate
aattaccgccacccattccaatt

SEQ ID NO: 2674 - RNA, 21 nt, synthetic construct
  source 1..21: mol_type = other RNA; note = Description of Artificial Sequence: Synthetic oligonucleotide
  modified_base 1: mod_base = OTHER; note = 2'-O-methyluridine-3'-phosphorothioate
  modified_base 2: mod_base = OTHER; note = 2'-O-methyluridine-3'-phosphorothioate
  modified_base 3: mod_base = OTHER; note = 2'-O-methylcytidine-3'-phosphate
  modified_base 4: mod_base = OTHER; note = 2'-O-methyladenosine-3'-phosphate
  modified_base 5: mod_base = OTHER; note = 2'-O-methyladenosine-3'-phosphate
  modified_base 6: mod_base = OTHER; note = 2'-O-methyladenosine-3'-phosphate
  modified_base 7: mod_base = OTHER; note = 2'-fluoroguanosine-3'-phosphate
  modified_base 8: mod_base = OTHER; note = 2'-O-methyluridine-3'-phosphate
  modified_base 9: mod_base = OTHER; note = 2'-fluoroguanosine-3'-phosphate
  modified_base 10: mod_base = OTHER; note = 2'-fluorouridine-3'-phosphate
  modified_base 11: mod_base = OTHER; note = 2'-fluorouridine-3'-phosphate
  modified_base 12: mod_base = OTHER; note = 2'-O-methylguanosine-3'-phosphate
  modified_base 13: mod_base = OTHER; note = 2'-O-methylguanosine-3'-phosphate
  modified_base 14: mod_base = OTHER; note = 2'-O-methyluridine-3'-phosphate
  modified_base 15: mod_base = OTHER; note = 2'-O-methyladenosine-3'-phosphate
  modified_base 16: mod_base = OTHER; note = 2'-O-methyladenosine-3'-phosphate
  modified_base 17: mod_base = OTHER; note = 2'-O-methyluridine-3'-phosphate
  modified_base 18: mod_base = OTHER; note = 2'-O-methylguanosine-3'-phosphate
  modified_base 19: mod_base = OTHER; note = 2'-O-methylcytidine-3'-phosphate
  modified_base 20: mod_base = OTHER; note = 2'-O-methylcytidine-3'-phosphate
  modified_base 21: mod_base = OTHER; note = 2'-O-methyluridine-3'-phosphate N-[tris(GalNAc-alkyl)-amidodecanoyl)]-4-hydroxyprolinol Hyp-(GalNAc-alkyl)3
ttcaaagtgttggtaatgcct

SEQ ID NO: 2675 - RNA, 23 nt, synthetic construct
  source 1..23: mol_type = other RNA; note = Description of Artificial Sequence: Synthetic oligonucleotide
  modified_base 1: mod_base = OTHER; note = 2'-O-methyladenosine-3'-phosphorothioate
  modified_base 2: mod_base = OTHER; note = 2'-fluoroguanosine-3'-phosphorothioate
  modified_base 3: mod_base = OTHER; note = 2'-O-methylguanosine-3'-phosphate
  modified_base 4: mod_base = OTHER; note = 2'-O-methylcytidine-3'-phosphate
  modified_base 5: mod_base = OTHER; note = 2'-O-methyladenosine-3'-phosphate
  modified_base 6: mod_base = OTHER; note = 2'-fluorouridine-3'-phosphate
  modified_base 7: mod_base = OTHER; note = 2'-O-methyluridine-3'-phosphate
  modified_base 8: mod_base = OTHER; note = 2'-fluoroadenosine-3'-phosphate
  modified_base 9: mod_base = OTHER; note = 2'-fluorocytidine-3'-phosphate
  modified_base 10: mod_base = OTHER; note = 2'-O-methylcytidine-3'-phosphate
  modified_base 11: mod_base = OTHER; note = 2'-O-methyladenosine-3'-phosphate
  modified_base 12: mod_base = OTHER; note = 2'-O-methyladenosine-3'-phosphate
  modified_base 13: mod_base = OTHER; note = 2'-O-methylcytidine-3'-phosphate
  modified_base 14: mod_base = OTHER; note = 2'-fluoroadenosine-3'-phosphate
  modified_base 15: mod_base = OTHER; note = 2'-O-methylcytidine-3'-phosphate
  modified_base 16: mod_base = OTHER; note = 2'-fluorouridine-3'-phosphate
  modified_base 17: mod_base = OTHER; note = 2'-O-methyluridine-3'-phosphate
  modified_base 18: mod_base = OTHER; note = 2'-O-methyluridine-3'-phosphate
  modified_base 19: mod_base = OTHER; note = 2'-O-methylguanosine-3'-phosphate
  modified_base 20: mod_base = OTHER; note = 2'-O-methyladenosine-3'-phosphate
  modified_base 21: mod_base = OTHER; note = 2'-O-methyladenosine-3'-phosphorothioate
  modified_base 22: mod_base = OTHER; note = 2'-O-methylcytidine-3'-phosphorothioate
  modified_base 23: mod_base = OTHER; note = 2'-O-methylcytidine-3'-phosphate
aggcattaccaacactttgaacc

SEQ ID NO: 2676 - RNA, 21 nt, synthetic construct
  source 1..21: mol_type = other RNA; note = Description of Artificial Sequence: Synthetic oligonucleotide
  modified_base 1: mod_base = OTHER; note = 2'-O-methyluridine-3'-phosphorothioate
  modified_base 2: mod_base = OTHER; note = 2'-O-methylcytidine-3'-phosphorothioate
  modified_base 3: mod_base = OTHER; note = 2'-O-methyladenosine-3'-phosphate
  modified_base 4: mod_base = OTHER; note = 2'-O-methyladenosine-3'-phosphate
  modified_base 5: mod_base = OTHER; note = 2'-O-methyladenosine-3'-phosphate
  modified_base 6: mod_base = OTHER; note = 2'-O-methylguanosine-3'-phosphate
  modified_base 7: mod_base = OTHER; note = 2'-fluorouridine-3'-phosphate
  modified_base 8: mod_base = OTHER; note = 2'-O-methylguanosine-3'-phosphate
  modified_base 9: mod_base = OTHER; note = 2'-fluorouridine-3'-phosphate
  modified_base 10: mod_base = OTHER; note = 2'-fluorouridine-3'-phosphate
  modified_base 11: mod_base = OTHER; note = 2'-fluoroguanosine-3'-phosphate
  modified_base 12: mod_base = OTHER; note = 2'-O-methylguanosine-3'-phosphate
  modified_base 13: mod_base = OTHER; note = 2'-O-methyluridine-3'-phosphate
  modified_base 14: mod_base = OTHER; note = 2'-O-methyladenosine-3'-phosphate
  modified_base 15: mod_base = OTHER; note = 2'-O-methyladenosine-3'-phosphate
  modified_base 16: mod_base = OTHER; note = 2'-O-methyluridine-3'-phosphate
  modified_base 17: mod_base = OTHER; note = 2'-O-methylguanosine-3'-phosphate
  modified_base 18: mod_base = OTHER; note = 2'-O-methylcytidine-3'-phosphate
  modified_base 19: mod_base = OTHER; note = 2'-O-methylcytidine-3'-phosphate
  modified_base 20: mod_base = OTHER; note = 2'-O-methyluridine-3'-phosphate
  modified_base 21: mod_base = OTHER; note = 2'-O-methylguanosine-3'-phosphate N-[tris(GalNAc-alkyl)-amidodecanoyl)]-4-hydroxyprolinol Hyp-(GalNAc-alkyl)3
tcaaagtgttggtaatgcctg

SEQ ID NO: 2677 - RNA, 23 nt, synthetic construct
  source 1..23: mol_type = other RNA; note = Description of Artificial Sequence: Synthetic oligonucleotide
  modified_base 1: mod_base = OTHER; note = 2'-O-methylcytidine-3'-phosphorothioate
  modified_base 2: mod_base = OTHER; note = 2'-fluoroadenosine-3'-phosphorothioate
  modified_base 3: mod_base = OTHER; note = 2'-O-methylguanosine-3'-phosphate
  modified_base 4: mod_base = OTHER; note = 2'-O-methylguanosine-3'-phosphate
  modified_base 5: mod_base = OTHER; note = 2'-O-methylcytidine-3'-phosphate
  modified_base 6: mod_base = OTHER; note = 2'-fluoroadenosine-3'-phosphate
  modified_base 7: mod_base = OTHER; note = 2'-O-methyluridine-3'-phosphate
  modified_base 8: mod_base = OTHER; note = 2'-fluorouridine-3'-phosphate
  modified_base 9: mod_base = OTHER; note = 2'-fluoroadenosine-3'-phosphate
  modified_base 10: mod_base = OTHER; note = 2'-O-methylcytidine-3'-phosphate
  modified_base 11: mod_base = OTHER; note = 2'-O-methylcytidine-3'-phosphate
  modified_base 12: mod_base = OTHER; note = 2'-O-methyladenosine-3'-phosphate
  modified_base 13: mod_base = OTHER; note = 2'-O-methyladenosine-3'-phosphate
  modified_base 14: mod_base = OTHER; note = 2'-fluorocytidine-3'-phosphate
  modified_base 15: mod_base = OTHER; note = 2'-O-methyladenosine-3'-phosphate
  modified_base 16: mod_base = OTHER; note = 2'-fluorocytidine-3'-phosphate
  modified_base 17: mod_base = OTHER; note = 2'-O-methyluridine-3'-phosphate
  modified_base 18: mod_base = OTHER; note = 2'-O-methyluridine-3'-phosphate
  modified_base 19: mod_base = OTHER; note = 2'-O-methyluridine-3'-phosphate
  modified_base 20: mod_base = OTHER; note = 2'-O-methylguanosine-3'-phosphate
  modified_base 21: mod_base = OTHER; note = 2'-O-methyladenosine-3'-phosphorothioate
  modified_base 22: mod_base = OTHER; note = 2'-O-methyladenosine-3'-phosphorothioate
  modified_base 23: mod_base = OTHER; note = 2'-O-methylcytidine-3'-phosphate
caggcattaccaacactttgaac

SEQ ID NO: 2678 - RNA, 21 nt, synthetic construct
  source 1..21: mol_type = other RNA; note = Description of Artificial Sequence: Synthetic oligonucleotide
  modified_base 1: mod_base = OTHER; note = 2'-O-methylcytidine-3'-phosphorothioate
  modified_base 2: mod_base = OTHER; note = 2'-O-methyladenosine-3'-phosphorothioate
  modified_base 3: mod_base = OTHER; note = 2'-O-methylguanosine-3'-phosphate
  modified_base 4: mod_base = OTHER; note = 2'-O-methylguanosine-3'-phosphate
  modified_base 5: mod_base = OTHER; note = 2'-O-methyluridine-3'-phosphate
  modified_base 6: mod_base = OTHER; note = 2'-O-methyluridine-3'-phosphate
  modified_base 7: mod_base = OTHER; note = 2'-fluorocytidine-3'-phosphate
  modified_base 8: mod_base = OTHER; note = 2'-O-methyladenosine-3'-phosphate
  modified_base 9: mod_base = OTHER; note = 2'-fluoroadenosine-3'-phosphate
  modified_base 10: mod_base = OTHER; note = 2'-fluoroadenosine-3'-phosphate
  modified_base 11: mod_base = OTHER; note = 2'-fluoroguanosine-3'-phosphate
  modified_base 12: mod_base = OTHER; note = 2'-O-methyluridine-3'-phosphate
  modified_base 13: mod_base = OTHER; note = 2'-O-methylguanosine-3'-phosphate
  modified_base 14: mod_base = OTHER; note = 2'-O-methyluridine-3'-phosphate
  modified_base 15: mod_base = OTHER; note = 2'-O-methyluridine-3'-phosphate
  modified_base 16: mod_base = OTHER; note = 2'-O-methylguanosine-3'-phosphate
  modified_base 17: mod_base = OTHER; note = 2'-O-methylguanosine-3'-phosphate
  modified_base 18: mod_base = OTHER; note = 2'-O-methyluridine-3'-phosphate
  modified_base 19: mod_base = OTHER; note = 2'-O-methyladenosine-3'-phosphate
  modified_base 20: mod_base = OTHER; note = 2'-O-methyladenosine-3'-phosphate
  modified_base 21: mod_base = OTHER; note = 2'-O-methyluridine-3'-phosphate N-[tris(GalNAc-alkyl)-amidodecanoyl)]-4-hydroxyprolinol Hyp-(GalNAc-alkyl)3
caggttcaaagtgttggtaat

SEQ ID NO: 2679 - RNA, 23 nt, synthetic construct
  source 1..23: mol_type = other RNA; note = Description of Artificial Sequence: Synthetic oligonucleotide
  modified_base 1: mod_base = OTHER; note = 2'-O-methyladenosine-3'-phosphorothioate
  modified_base 2: mod_base = OTHER; note = 2'-fluorouridine -3'-phosphorothioate
  modified_base 3: mod_base = OTHER; note = 2'-O-methyluridine-3'-phosphate
  modified_base 4: mod_base = OTHER; note = 2'-O-methyladenosine-3'-phosphate
  modified_base 5: mod_base = OTHER; note = 2'-O-methylcytidine-3'-phosphate
  modified_base 6: mod_base = OTHER; note = 2'-fluorocytidine-3'-phosphate
  modified_base 7: mod_base = OTHER; note = 2'-O-methyladenosine-3'-phosphate
  modified_base 8: mod_base = OTHER; note = 2'-fluoroadenosine-3'-phosphate
  modified_base 9: mod_base = OTHER; note = 2'-fluorocytidine-3'-phosphate
  modified_base 10: mod_base = OTHER; note = 2'-O-methyladenosine-3'-phosphate
  modified_base 11: mod_base = OTHER; note = 2'-O-methylcytidine-3'-phosphate
  modified_base 12: mod_base = OTHER; note = 2'-O-methyluridine-3'-phosphate
  modified_base 13: mod_base = OTHER; note = 2'-O-methyluridine-3'-phosphate
  modified_base 14: mod_base = OTHER; note = 2'-fluorouridine-3'-phosphate
  modified_base 15: mod_base = OTHER; note = 2'-O-methylguanosine-3'-phosphate
  modified_base 16: mod_base = OTHER; note = 2'-fluoroadenosine-3'-phosphate
  modified_base 17: mod_base = OTHER; note = 2'-O-methyladenosine-3'-phosphate
  modified_base 18: mod_base = OTHER; note = 2'-O-methylcytidine-3'-phosphate
  modified_base 19: mod_base = OTHER; note = 2'-O-methylcytidine-3'-phosphate
  modified_base 20: mod_base = OTHER; note = 2'-O-methyluridine-3'-phosphate
  modified_base 21: mod_base = OTHER; note = 2'-O-methylguanosine-3'-phosphorothioate
  modified_base 22: mod_base = OTHER; note = 2'-O-methyladenosine-3'-phosphorothioate
  modified_base 23: mod_base = OTHER; note = 2'-O-methylguanosine-3'-phosphate
attaccaacactttgaacctgag

SEQ ID NO: 2680 - RNA, 21 nt, synthetic construct
  source 1..21: mol_type = other RNA; note = Description of Artificial Sequence: Synthetic oligonucleotide
  modified_base 1: mod_base = OTHER; note = 2'-O-methyluridine-3'-phosphorothioate
  modified_base 2: mod_base = OTHER; note = 2'-O-methylcytidine-3'-phosphorothioate
  modified_base 3: mod_base = OTHER; note = 2'-O-methyladenosine-3'-phosphate
  modified_base 4: mod_base = OTHER; note = 2'-O-methylguanosine-3'-phosphate
  modified_base 5: mod_base = OTHER; note = 2'-O-methylguanosine-3'-phosphate
  modified_base 6: mod_base = OTHER; note = 2'-O-methyluridine-3'-phosphate
  modified_base 7: mod_base = OTHER; note = 2'-fluorouridine-3'-phosphate
  modified_base 8: mod_base = OTHER; note = 2'-O-methylcytidine-3'-phosphate
  modified_base 9: mod_base = OTHER; note = 2'-fluoroadenosine-3'-phosphate
  modified_base 10: mod_base = OTHER; note = 2'-fluoroadenosine-3'-phosphate
  modified_base 11: mod_base = OTHER; note = 2'-fluoroadenosine-3'-phosphate
  modified_base 12: mod_base = OTHER; note = 2'-O-methylguanosine-3'-phosphate
  modified_base 13: mod_base = OTHER; note = 2'-O-methyluridine-3'-phosphate
  modified_base 14: mod_base = OTHER; note = 2'-O-methylguanosine-3'-phosphate
  modified_base 15: mod_base = OTHER; note = 2'-O-methyluridine-3'-phosphate
  modified_base 16: mod_base = OTHER; note = 2'-O-methyluridine-3'-phosphate
  modified_base 17: mod_base = OTHER; note = 2'-O-methylguanosine-3'-phosphate
  modified_base 18: mod_base = OTHER; note = 2'-O-methylguanosine-3'-phosphate
  modified_base 19: mod_base = OTHER; note = 2'-O-methyluridine-3'-phosphate
  modified_base 20: mod_base = OTHER; note = 2'-O-methyladenosine-3'-phosphate
  modified_base 21: mod_base = OTHER; note = 2'-O-methyladenosine-3'-phosphate N-[tris(GalNAc-alkyl)-amidodecanoyl)]-4-hydroxyprolinol Hyp-(GalNAc-alkyl)3
tcaggttcaaagtgttggtaa

SEQ ID NO: 2681 - RNA, 23 nt, synthetic construct
  source 1..23: mol_type = other RNA; note = Description of Artificial Sequence: Synthetic oligonucleotide
  modified_base 1: mod_base = OTHER; note = 2'-O-methyluridine-3'-phosphorothioate
  modified_base 2: mod_base = OTHER; note = 2'-fluorouridine -3'-phosphorothioate
  modified_base 3: mod_base = OTHER; note = 2'-O-methyladenosine-3'-phosphate
  modified_base 4: mod_base = OTHER; note = 2'-O-methylcytidine-3'-phosphate
  modified_base 5: mod_base = OTHER; note = 2'-O-methylcytidine-3'-phosphate
  modified_base 6: mod_base = OTHER; note = 2'-fluoroadenosine-3'-phosphate
  modified_base 7: mod_base = OTHER; note = 2'-O-methyladenosine-3'-phosphate
  modified_base 8: mod_base = OTHER; note = 2'-fluorocytidine-3'-phosphate
  modified_base 9: mod_base = OTHER; note = 2'-fluoroadenosine-3'-phosphate
  modified_base 10: mod_base = OTHER; note = 2'-O-methylcytidine-3'-phosphate
  modified_base 11: mod_base = OTHER; note = 2'-O-methyluridine-3'-phosphate
  modified_base 12: mod_base = OTHER; note = 2'-O-methyluridine-3'-phosphate
  modified_base 13: mod_base = OTHER; note = 2'-O-methyluridine-3'-phosphate
  modified_base 14: mod_base = OTHER; note = 2'-fluoroguanosine-3'-phosphate
  modified_base 15: mod_base = OTHER; note = 2'-O-methyladenosine-3'-phosphate
  modified_base 16: mod_base = OTHER; note = 2'-fluoroadenosine-3'-phosphate
  modified_base 17: mod_base = OTHER; note = 2'-O-methylcytidine-3'-phosphate
  modified_base 18: mod_base = OTHER; note = 2'-O-methylcytidine-3'-phosphate
  modified_base 19: mod_base = OTHER; note = 2'-O-methyluridine-3'-phosphate
  modified_base 20: mod_base = OTHER; note = 2'-O-methylguanosine-3'-phosphate
  modified_base 21: mod_base = OTHER; note = 2'-O-methyladenosine-3'-phosphorothioate
  modified_base 22: mod_base = OTHER; note = 2'-O-methylguanosine-3'-phosphorothioate
  modified_base 23: mod_base = OTHER; note = 2'-O-methylcytidine-3'-phosphate
ttaccaacactttgaacctgagc

SEQ ID NO: 2682 - RNA, 21 nt, synthetic construct
  source 1..21: mol_type = other RNA; note = Description of Artificial Sequence: Synthetic oligonucleotide
  modified_base 1: mod_base = OTHER; note = 2'-O-methylcytidine-3'-phosphorothioate
  modified_base 2: mod_base = OTHER; note = 2'-O-methylcytidine-3'-phosphorothioate
  modified_base 3: mod_base = OTHER; note = 2'-O-methyladenosine-3'-phosphate
  modified_base 4: mod_base = OTHER; note = 2'-O-methylcytidine-3'-phosphate
  modified_base 5: mod_base = OTHER; note = 2'-O-methylcytidine-3'-phosphate
  modified_base 6: mod_base = OTHER; note = 2'-O-methyluridine-3'-phosphate
  modified_base 7: mod_base = OTHER; note = 2'-fluorocytidine-3'-phosphate
  modified_base 8: mod_base = OTHER; note = 2'-O-methylcytidine-3'-phosphate
  modified_base 9: mod_base = OTHER; note = 2'-fluorouridine-3'-phosphate
  modified_base 10: mod_base = OTHER; note = 2'-fluorocytidine-3'-phosphate
  modified_base 11: mod_base = OTHER; note = 2'-fluoroadenosine-3'-phosphate
  modified_base 12: mod_base = OTHER; note = 2'-O-methyladenosine-3'-phosphate
  modified_base 13: mod_base = OTHER; note = 2'-O-methyluridine-3'-phosphate
  modified_base 14: mod_base = OTHER; note = 2'-O-methyluridine-3'-phosphate
  modified_base 15: mod_base = OTHER; note = 2'-O-methylguanosine-3'-phosphate
  modified_base 16: mod_base = OTHER; note = 2'-O-methyladenosine-3'-phosphate
  modified_base 17: mod_base = OTHER; note = 2'-O-methyladenosine-3'-phosphate
  modified_base 18: mod_base = OTHER; note = 2'-O-methylguanosine-3'-phosphate
  modified_base 19: mod_base = OTHER; note = 2'-O-methyladenosine-3'-phosphate
  modified_base 20: mod_base = OTHER; note = 2'-O-methyladenosine-3'-phosphate
  modified_base 21: mod_base = OTHER; note = 2'-O-methylguanosine-3'-phosphate N-[tris(GalNAc-alkyl)-amidodecanoyl)]-4-hydroxyprolinol Hyp-(GalNAc-alkyl)3
ccacctcctcaattgaagaag

SEQ ID NO: 2683 - RNA, 23 nt, synthetic construct
  source 1..23: mol_type = other RNA; note = Description of Artificial Sequence: Synthetic oligonucleotide
  modified_base 1: mod_base = OTHER; note = 2'-O-methylcytidine-3'-phosphorothioate
  modified_base 2: mod_base = OTHER; note = 2'-fluorouridine -3'-phosphorothioate
  modified_base 3: mod_base = OTHER; note = 2'-O-methyluridine-3'-phosphate
  modified_base 4: mod_base = OTHER; note = 2'-O-methylcytidine-3'-phosphate
  modified_base 5: mod_base = OTHER; note = 2'-O-methyluridine-3'-phosphate
  modified_base 6: mod_base = OTHER; note = 2'-fluorouridine-3'-phosphate
  modified_base 7: mod_base = OTHER; note = 2'-O-methylcytidine-3'-phosphate
  modified_base 8: mod_base = OTHER; note = 2'-fluoroadenosine-3'-phosphate
  modified_base 9: mod_base = OTHER; note = 2'-fluoroadenosine-3'-phosphate
  modified_base 10: mod_base = OTHER; note = 2'-O-methyluridine-3'-phosphate
  modified_base 11: mod_base = OTHER; note = 2'-O-methyluridine-3'-phosphate
  modified_base 12: mod_base = OTHER; note = 2'-O-methylguanosine-3'-phosphate
  modified_base 13: mod_base = OTHER; note = 2'-O-methyladenosine-3'-phosphate
  modified_base 14: mod_base = OTHER; note = 2'-fluoroguanosine-3'-phosphate
  modified_base 15: mod_base = OTHER; note = 2'-O-methylguanosine-3'-phosphate
  modified_base 16: mod_base = OTHER; note = 2'-fluoroadenosine-3'-phosphate
  modified_base 17: mod_base = OTHER; note = 2'-O-methylguanosine-3'-phosphate
  modified_base 18: mod_base = OTHER; note = 2'-O-methylguanosine-3'-phosphate
  modified_base 19: mod_base = OTHER; note = 2'-O-methyluridine-3'-phosphate
  modified_base 20: mod_base = OTHER; note = 2'-O-methylguanosine-3'-phosphate
  modified_base 21: mod_base = OTHER; note = 2'-O-methylguanosine-3'-phosphorothioate
  modified_base 22: mod_base = OTHER; note = 2'-O-methylcytidine-3'-phosphorothioate
  modified_base 23: mod_base = OTHER; note = 2'-O-methylcytidine-3'-phosphate
cttcttcaattgaggaggtggcc

SEQ ID NO: 2684 - RNA, 21 nt, synthetic construct
  source 1..21: mol_type = other RNA; note = Description of Artificial Sequence: Synthetic oligonucleotide
  modified_base 1: mod_base = OTHER; note = 2'-O-methylcytidine-3'-phosphorothioate
  modified_base 2: mod_base = OTHER; note = 2'-O-methyladenosine-3'-phosphorothioate
  modified_base 3: mod_base = OTHER; note = 2'-O-methylcytidine-3'-phosphate
  modified_base 4: mod_base = OTHER; note = 2'-O-methylcytidine-3'-phosphate
  modified_base 5: mod_base = OTHER; note = 2'-O-methyluridine-3'-phosphate
  modified_base 6: mod_base = OTHER; note = 2'-O-methylcytidine-3'-phosphate
  modified_base 7: mod_base = OTHER; note = 2'-fluorocytidine-3'-phosphate
  modified_base 8: mod_base = OTHER; note = 2'-O-methyluridine-3'-phosphate
  modified_base 9: mod_base = OTHER; note = 2'-fluorocytidine-3'-phosphate
  modified_base 10: mod_base = OTHER; note = 2'-fluoroadenosine-3'-phosphate
  modified_base 11: mod_base = OTHER; note = 2'-fluoroadenosine-3'-phosphate
  modified_base 12: mod_base = OTHER; note = 2'-O-methyluridine-3'-phosphate
  modified_base 13: mod_base = OTHER; note = 2'-O-methyluridine-3'-phosphate
  modified_base 14: mod_base = OTHER; note = 2'-O-methylguanosine-3'-phosphate
  modified_base 15: mod_base = OTHER; note = 2'-O-methyladenosine-3'-phosphate
  modified_base 16: mod_base = OTHER; note = 2'-O-methyladenosine-3'-phosphate
  modified_base 17: mod_base = OTHER; note = 2'-O-methylguanosine-3'-phosphate
  modified_base 18: mod_base = OTHER; note = 2'-O-methyladenosine-3'-phosphate
  modified_base 19: mod_base = OTHER; note = 2'-O-methyladenosine-3'-phosphate
  modified_base 20: mod_base = OTHER; note = 2'-O-methylguanosine-3'-phosphate
  modified_base 21: mod_base = OTHER; note = 2'-O-methyluridine-3'-phosphate N-[tris(GalNAc-alkyl)-amidodecanoyl)]-4-hydroxyprolinol Hyp-(GalNAc-alkyl)3
cacctcctcaattgaagaagt

SEQ ID NO: 2685 - RNA, 23 nt, synthetic construct
  source 1..23: mol_type = other RNA; note = Description of Artificial Sequence: Synthetic oligonucleotide
  modified_base 1: mod_base = OTHER; note = 2'-O-methyladenosine-3'-phosphorothioate
  modified_base 2: mod_base = OTHER; note = 2'-fluorocytidine-3'-phosphorothioate
  modified_base 3: mod_base = OTHER; note = 2'-O-methyluridine-3'-phosphate
  modified_base 4: mod_base = OTHER; note = 2'-O-methyluridine-3'-phosphate
  modified_base 5: mod_base = OTHER; note = 2'-O-methylcytidine-3'-phosphate
  modified_base 6: mod_base = OTHER; note = 2'-fluorouridine-3'-phosphate
  modified_base 7: mod_base = OTHER; note = 2'-O-methyluridine-3'-phosphate
  modified_base 8: mod_base = OTHER; note = 2'-fluorocytidine-3'-phosphate
  modified_base 9: mod_base = OTHER; note = 2'-fluoroadenosine-3'-phosphate
  modified_base 10: mod_base = OTHER; note = 2'-O-methyladenosine-3'-phosphate
  modified_base 11: mod_base = OTHER; note = 2'-O-methyluridine-3'-phosphate
  modified_base 12: mod_base = OTHER; note = 2'-O-methyluridine-3'-phosphate
  modified_base 13: mod_base = OTHER; note = 2'-O-methylguanosine-3'-phosphate
  modified_base 14: mod_base = OTHER; note = 2'-fluoroadenosine-3'-phosphate
  modified_base 15: mod_base = OTHER; note = 2'-O-methylguanosine-3'-phosphate
  modified_base 16: mod_base = OTHER; note = 2'-fluoroguanosine-3'-phosphate
  modified_base 17: mod_base = OTHER; note = 2'-O-methyladenosine-3'-phosphate
  modified_base 18: mod_base = OTHER; note = 2'-O-methylguanosine-3'-phosphate
  modified_base 19: mod_base = OTHER; note = 2'-O-methylguanosine-3'-phosphate
  modified_base 20: mod_base = OTHER; note = 2'-O-methyluridine-3'-phosphate
  modified_base 21: mod_base = OTHER; note = 2'-O-methylguanosine-3'-phosphorothioate
  modified_base 22: mod_base = OTHER; note = 2'-O-methylguanosine-3'-phosphorothioate
  modified_base 23: mod_base = OTHER; note = 2'-O-methylcytidine-3'-phosphate
acttcttcaattgaggaggtggc

SEQ ID NO: 2686 - RNA, 21 nt, synthetic construct
  source 1..21: mol_type = other RNA; note = Description of Artificial Sequence: Synthetic oligonucleotide
  modified_base 1: mod_base = OTHER; note = 2'-O-methyluridine-3'-phosphorothioate
  modified_base 2: mod_base = OTHER; note = 2'-O-methylguanosine-3'-phosphorothioate
  modified_base 3: mod_base = OTHER; note = 2'-O-methylguanosine-3'-phosphate
  modified_base 4: mod_base = OTHER; note = 2'-O-methylguanosine-3'-phosphate
  modified_base 5: mod_base = OTHER; note = 2'-O-methylcytidine-3'-phosphate
  modified_base 6: mod_base = OTHER; note = 2'-O-methylcytidine-3'-phosphate
  modified_base 7: mod_base = OTHER; note = 2'-fluoroadenosine-3'-phosphate
  modified_base 8: mod_base = OTHER; note = 2'-O-methylcytidine-3'-phosphate
  modified_base 9: mod_base = OTHER; note = 2'-fluorocytidine-3'-phosphate
  modified_base 10: mod_base = OTHER; note = 2'-fluorouridine-3'-phosphate
  modified_base 11: mod_base = OTHER; note = 2'-fluorocytidine-3'-phosphate
  modified_base 12: mod_base = OTHER; note = 2'-O-methylcytidine-3'-phosphate
  modified_base 13: mod_base = OTHER; note = 2'-O-methyluridine-3'-phosphate
  modified_base 14: mod_base = OTHER; note = 2'-O-methylcytidine-3'-phosphate
  modified_base 15: mod_base = OTHER; note = 2'-O-methyladenosine-3'-phosphate
  modified_base 16: mod_base = OTHER; note = 2'-O-methyladenosine-3'-phosphate
  modified_base 17: mod_base = OTHER; note = 2'-O-methyluridine-3'-phosphate
  modified_base 18: mod_base = OTHER; note = 2'-O-methyluridine-3'-phosphate
  modified_base 19: mod_base = OTHER; note = 2'-O-methylguanosine-3'-phosphate
  modified_base 20: mod_base = OTHER; note = 2'-O-methyladenosine-3'-phosphate
  modified_base 21: mod_base = OTHER; note = 2'-O-methyladenosine-3'-phosphate N-[tris(GalNAc-alkyl)-amidodecanoyl)]-4-hydroxyprolinol Hyp-(GalNAc-alkyl)3
tgggccacctcctcaattgaa

SEQ ID NO: 2687 - RNA, 23 nt, synthetic construct
  source 1..23: mol_type = other RNA; note = Description of Artificial Sequence: Synthetic oligonucleotide
  modified_base 1: mod_base = OTHER; note = 2'-O-methyluridine-3'-phosphorothioate
  modified_base 2: mod_base = OTHER; note = 2'-fluorouridine -3'-phosphorothioate
  modified_base 3: mod_base = OTHER; note = 2'-O-methylcytidine-3'-phosphate
  modified_base 4: mod_base = OTHER; note = 2'-O-methyladenosine-3'-phosphate
  modified_base 5: mod_base = OTHER; note = 2'-O-methyladenosine-3'-phosphate
  modified_base 6: mod_base = OTHER; note = 2'-fluorouridine-3'-phosphate
  modified_base 7: mod_base = OTHER; note = 2'-O-methyluridine-3'-phosphate
  modified_base 8: mod_base = OTHER; note = 2'-fluoroguanosine-3'-phosphate
  modified_base 9: mod_base = OTHER; note = 2'-fluoroadenosine-3'-phosphate
  modified_base 10: mod_base = OTHER; note = 2'-O-methylguanosine-3'-phosphate
  modified_base 11: mod_base = OTHER; note = 2'-O-methylguanosine-3'-phosphate
  modified_base 12: mod_base = OTHER; note = 2'-O-methyladenosine-3'-phosphate
  modified_base 13: mod_base = OTHER; note = 2'-O-methylguanosine-3'-phosphate
  modified_base 14: mod_base = OTHER; note = 2'-fluoroguanosine-3'-phosphate
  modified_base 15: mod_base = OTHER; note = 2'-O-methyluridine-3'-phosphate
  modified_base 16: mod_base = OTHER; note = 2'-fluoroguanosine-3'-phosphate
  modified_base 17: mod_base = OTHER; note = 2'-O-methylguanosine-3'-phosphate
  modified_base 18: mod_base = OTHER; note = 2'-O-methylcytidine-3'-phosphate
  modified_base 19: mod_base = OTHER; note = 2'-O-methylcytidine-3'-phosphate
  modified_base 20: mod_base = OTHER; note = 2'-O-methylcytidine-3'-phosphate
  modified_base 21: mod_base = OTHER; note = 2'-O-methyladenosine-3'-phosphorothioate
  modified_base 22: mod_base = OTHER; note = 2'-O-methylguanosine-3'-phosphorothioate
  modified_base 23: mod_base = OTHER; note = 2'-O-methylguanosine-3'-phosphate
ttcaattgaggaggtggcccagg

SEQ ID NO: 2688 - RNA, 21 nt, synthetic construct
  source 1..21: mol_type = other RNA; note = Description of Artificial Sequence: Synthetic oligonucleotide
  modified_base 1: mod_base = OTHER; note = 2'-O-methylcytidine-3'-phosphorothioate
  modified_base 2: mod_base = OTHER; note = 2'-O-methyluridine-3'-phosphorothioate
  modified_base 3: mod_base = OTHER; note = 2'-O-methylguanosine-3'-phosphate
  modified_base 4: mod_base = OTHER; note = 2'-O-methylguanosine-3'-phosphate
  modified_base 5: mod_base = OTHER; note = 2'-O-methylguanosine-3'-phosphate
  modified_base 6: mod_base = OTHER; note = 2'-O-methylcytidine-3'-phosphate
  modified_base 7: mod_base = OTHER; note = 2'-fluorocytidine-3'-phosphate
  modified_base 8: mod_base = OTHER; note = 2'-O-methyladenosine-3'-phosphate
  modified_base 9: mod_base = OTHER; note = 2'-fluorocytidine-3'-phosphate
  modified_base 10: mod_base = OTHER; note = 2'-fluorocytidine-3'-phosphate
  modified_base 11: mod_base = OTHER; note = 2'-fluorouridine-3'-phosphate
  modified_base 12: mod_base = OTHER; note = 2'-O-methylcytidine-3'-phosphate
  modified_base 13: mod_base = OTHER; note = 2'-O-methylcytidine-3'-phosphate
  modified_base 14: mod_base = OTHER; note = 2'-O-methyluridine-3'-phosphate
  modified_base 15: mod_base = OTHER; note = 2'-O-methylcytidine-3'-phosphate
  modified_base 16: mod_base = OTHER; note = 2'-O-methyladenosine-3'-phosphate
  modified_base 17: mod_base = OTHER; note = 2'-O-methyladenosine-3'-phosphate
  modified_base 18: mod_base = OTHER; note = 2'-O-methyluridine-3'-phosphate
  modified_base 19: mod_base = OTHER; note = 2'-O-methyluridine-3'-phosphate
  modified_base 20: mod_base = OTHER; note = 2'-O-methylguanosine-3'-phosphate
  modified_base 21: mod_base = OTHER; note = 2'-O-methyladenosine-3'-phosphate N-[tris(GalNAc-alkyl)-amidodecanoyl)]-4-hydroxyprolinol Hyp-(GalNAc-alkyl)3
ctgggccacctcctcaattga

SEQ ID NO: 2689 - RNA, 23 nt, synthetic construct
  source 1..23: mol_type = other RNA; note = Description of Artificial Sequence: Synthetic oligonucleotide
  modified_base 1: mod_base = OTHER; note = 2'-O-methyluridine-3'-phosphorothioate
  modified_base 2: mod_base = OTHER; note = 2'-fluorocytidine-3'-phosphorothioate
  modified_base 3: mod_base = OTHER; note = 2'-O-methyladenosine-3'-phosphate
  modified_base 4: mod_base = OTHER; note = 2'-O-methyladenosine-3'-phosphate
  modified_base 5: mod_base = OTHER; note = 2'-O-methyluridine-3'-phosphate
  modified_base 6: mod_base = OTHER; note = 2'-fluorouridine-3'-phosphate
  modified_base 7: mod_base = OTHER; note = 2'-O-methylguanosine-3'-phosphate
  modified_base 8: mod_base = OTHER; note = 2'-fluoroadenosine-3'-phosphate
  modified_base 9: mod_base = OTHER; note = 2'-fluoroguanosine-3'-phosphate
  modified_base 10: mod_base = OTHER; note = 2'-O-methylguanosine-3'-phosphate
  modified_base 11: mod_base = OTHER; note = 2'-O-methyladenosine-3'-phosphate
  modified_base 12: mod_base = OTHER; note = 2'-O-methylguanosine-3'-phosphate
  modified_base 13: mod_base = OTHER; note = 2'-O-methylguanosine-3'-phosphate
  modified_base 14: mod_base = OTHER; note = 2'-fluorouridine-3'-phosphate
  modified_base 15: mod_base = OTHER; note = 2'-O-methylguanosine-3'-phosphate
  modified_base 16: mod_base = OTHER; note = 2'-fluoroguanosine-3'-phosphate
  modified_base 17: mod_base = OTHER; note = 2'-O-methylcytidine-3'-phosphate
  modified_base 18: mod_base = OTHER; note = 2'-O-methylcytidine-3'-phosphate
  modified_base 19: mod_base = OTHER; note = 2'-O-methylcytidine-3'-phosphate
  modified_base 20: mod_base = OTHER; note = 2'-O-methyladenosine-3'-phosphate
  modified_base 21: mod_base = OTHER; note = 2'-O-methylguanosine-3'-phosphorothioate
  modified_base 22: mod_base = OTHER; note = 2'-O-methylguanosine-3'-phosphorothioate
  modified_base 23: mod_base = OTHER; note = 2'-O-methyladenosine-3'-phosphate
tcaattgaggaggtggcccagga

SEQ ID NO: 2690 - RNA, 21 nt, synthetic construct
  source 1..21: mol_type = other RNA; note = Description of Artificial Sequence: Synthetic oligonucleotide
  modified_base 1: mod_base = OTHER; note = 2'-O-methylguanosine-3'-phosphorothioate
  modified_base 2: mod_base = OTHER; note = 2'-O-methyladenosine-3'-phosphorothioate
  modified_base 3: mod_base = OTHER; note = 2'-O-methylguanosine-3'-phosphate
  modified_base 4: mod_base = OTHER; note = 2'-O-methyluridine-3'-phosphate
  modified_base 5: mod_base = OTHER; note = 2'-O-methylguanosine-3'-phosphate
  modified_base 6: mod_base = OTHER; note = 2'-O-methylguanosine-3'-phosphate
  modified_base 7: mod_base = OTHER; note = 2'-fluoroguanosine-3'-phosphate
  modified_base 8: mod_base = OTHER; note = 2'-O-methyluridine-3'-phosphate
  modified_base 9: mod_base = OTHER; note = 2'-fluoroguanosine-3'-phosphate
  modified_base 10: mod_base = OTHER; note = 2'-fluorocytidine-3'-phosphate
  modified_base 11: mod_base = OTHER; note = 2'-fluorocytidine-3'-phosphate
  modified_base 12: mod_base = OTHER; note = 2'-O-methyladenosine-3'-phosphate
  modified_base 13: mod_base = OTHER; note = 2'-O-methylguanosine-3'-phosphate
  modified_base 14: mod_base = OTHER; note = 2'-O-methyladenosine-3'-phosphate
  modified_base 15: mod_base = OTHER; note = 2'-O-methyladenosine-3'-phosphate
  modified_base 16: mod_base = OTHER; note = 2'-O-methyluridine-3'-phosphate
  modified_base 17: mod_base = OTHER; note = 2'-O-methylguanosine-3'-phosphate
  modified_base 18: mod_base = OTHER; note = 2'-O-methyluridine-3'-phosphate
  modified_base 19: mod_base = OTHER; note = 2'-O-methylguanosine-3'-phosphate
  modified_base 20: mod_base = OTHER; note = 2'-O-methyladenosine-3'-phosphate
  modified_base 21: mod_base = OTHER; note = 2'-O-methyladenosine-3'-phosphate N-[tris(GalNAc-alkyl)-amidodecanoyl)]-4-hydroxyprolinol Hyp-(GalNAc-alkyl)3
gagtgggtgccagaatgtgaa

SEQ ID NO: 2691 - RNA, 23 nt, synthetic construct
  source 1..23: mol_type = other RNA; note = Description of Artificial Sequence: Synthetic oligonucleotide
  modified_base 1: mod_base = OTHER; note = 2'-O-methyluridine-3'-phosphorothioate
  modified_base 2: mod_base = OTHER; note = 2'-fluorouridine -3'-phosphorothioate
  modified_base 3: mod_base = OTHER; note = 2'-O-methylcytidine-3'-phosphate
  modified_base 4: mod_base = OTHER; note = 2'-O-methyladenosine-3'-phosphate
  modified_base 5: mod_base = OTHER; note = 2'-O-methylcytidine-3'-phosphate
  modified_base 6: mod_base = OTHER; note = 2'-fluoroadenosine-3'-phosphate
  modified_base 7: mod_base = OTHER; note = 2'-O-methyluridine-3'-phosphate
  modified_base 8: mod_base = OTHER; note = 2'-fluorouridine-3'-phosphate
  modified_base 9: mod_base = OTHER; note = 2'-fluorocytidine-3'-phosphate
  modified_base 10: mod_base = OTHER; note = 2'-O-methyluridine-3'-phosphate
  modified_base 11: mod_base = OTHER; note = 2'-O-methylguanosine-3'-phosphate
  modified_base 12: mod_base = OTHER; note = 2'-O-methylguanosine-3'-phosphate
  modified_base 13: mod_base = OTHER; note = 2'-O-methylcytidine-3'-phosphate
  modified_base 14: mod_base = OTHER; note = 2'-fluoroadenosine-3'-phosphate
  modified_base 15: mod_base = OTHER; note = 2'-O-methylcytidine-3'-phosphate
  modified_base 16: mod_base = OTHER; note = 2'-fluorocytidine-3'-phosphate
  modified_base 17: mod_base = OTHER; note = 2'-O-methylcytidine-3'-phosphate
  modified_base 18: mod_base = OTHER; note = 2'-O-methyladenosine-3'-phosphate
  modified_base 19: mod_base = OTHER; note = 2'-O-methylcytidine-3'-phosphate
  modified_base 20: mod_base = OTHER; note = 2'-O-methyluridine-3'-phosphate
  modified_base 21: mod_base = OTHER; note = 2'-O-methylcytidine-3'-phosphorothioate
  modified_base 22: mod_base = OTHER; note = 2'-O-methyladenosine-3'-phosphorothioate
  modified_base 23: mod_base = OTHER; note = 2'-O-methylguanosine-3'-phosphate
ttcacattctggcacccactcag

SEQ ID NO: 2692 - RNA, 21 nt, synthetic construct
  source 1..21: mol_type = other RNA; note = Description of Artificial Sequence: Synthetic oligonucleotide
  modified_base 1: mod_base = OTHER; note = 2'-O-methyladenosine-3'-phosphorothioate
  modified_base 2: mod_base = OTHER; note = 2'-O-methylguanosine-3'-phosphorothioate
  modified_base 3: mod_base = OTHER; note = 2'-O-methyluridine-3'-phosphate
  modified_base 4: mod_base = OTHER; note = 2'-O-methylguanosine-3'-phosphate
  modified_base 5: mod_base = OTHER; note = 2'-O-methylguanosine-3'-phosphate
  modified_base 6: mod_base = OTHER; note = 2'-O-methylguanosine-3'-phosphate
  modified_base 7: mod_base = OTHER; note = 2'-fluorouridine-3'-phosphate
  modified_base 8: mod_base = OTHER; note = 2'-O-methylguanosine-3'-phosphate
  modified_base 9: mod_base = OTHER; note = 2'-fluorocytidine-3'-phosphate
  modified_base 10: mod_base = OTHER; note = 2'-fluorocytidine-3'-phosphate
  modified_base 11: mod_base = OTHER; note = 2'-fluoroadenosine-3'-phosphate
  modified_base 12: mod_base = OTHER; note = 2'-O-methylguanosine-3'-phosphate
  modified_base 13: mod_base = OTHER; note = 2'-O-methyladenosine-3'-phosphate
  modified_base 14: mod_base = OTHER; note = 2'-O-methyladenosine-3'-phosphate
  modified_base 15: mod_base = OTHER; note = 2'-O-methyluridine-3'-phosphate
  modified_base 16: mod_base = OTHER; note = 2'-O-methylguanosine-3'-phosphate
  modified_base 17: mod_base = OTHER; note = 2'-O-methyluridine-3'-phosphate
  modified_base 18: mod_base = OTHER; note = 2'-O-methylguanosine-3'-phosphate
  modified_base 19: mod_base = OTHER; note = 2'-O-methyladenosine-3'-phosphate
  modified_base 20: mod_base = OTHER; note = 2'-O-methyladenosine-3'-phosphate
  modified_base 21: mod_base = OTHER; note = 2'-O-methyladenosine-3'-phosphate N-[tris(GalNAc-alkyl)-amidodecanoyl)]-4-hydroxyprolinol Hyp-(GalNAc-alkyl)3
agtgggtgccagaatgtgaaa

SEQ ID NO: 2693 - RNA, 23 nt, synthetic construct
  source 1..23: mol_type = other RNA; note = Description of Artificial Sequence: Synthetic oligonucleotide
  modified_base 1: mod_base = OTHER; note = 2'-O-methyluridine-3'-phosphorothioate
  modified_base 2: mod_base = OTHER; note = 2'-fluorouridine -3'-phosphorothioate
  modified_base 3: mod_base = OTHER; note = 2'-O-methyluridine-3'-phosphate
  modified_base 4: mod_base = OTHER; note = 2'-O-methylcytidine-3'-phosphate
  modified_base 5: mod_base = OTHER; note = 2'-O-methyladenosine-3'-phosphate
  modified_base 6: mod_base = OTHER; note = 2'-fluorocytidine-3'-phosphate
  modified_base 7: mod_base = OTHER; note = 2'-O-methyladenosine-3'-phosphate
  modified_base 8: mod_base = OTHER; note = 2'-fluorouridine-3'-phosphate
  modified_base 9: mod_base = OTHER; note = 2'-fluorouridine-3'-phosphate
  modified_base 10: mod_base = OTHER; note = 2'-O-methylcytidine-3'-phosphate
  modified_base 11: mod_base = OTHER; note = 2'-O-methyluridine-3'-phosphate
  modified_base 12: mod_base = OTHER; note = 2'-O-methylguanosine-3'-phosphate
  modified_base 13: mod_base = OTHER; note = 2'-O-methylguanosine-3'-phosphate
  modified_base 14: mod_base = OTHER; note = 2'-fluorocytidine-3'-phosphate
  modified_base 15: mod_base = OTHER; note = 2'-O-methyladenosine-3'-phosphate
  modified_base 16: mod_base = OTHER; note = 2'-fluorocytidine-3'-phosphate
  modified_base 17: mod_base = OTHER; note = 2'-O-methylcytidine-3'-phosphate
  modified_base 18: mod_base = OTHER; note = 2'-O-methylcytidine-3'-phosphate
  modified_base 19: mod_base = OTHER; note = 2'-O-methyladenosine-3'-phosphate
  modified_base 20: mod_base = OTHER; note = 2'-O-methylcytidine-3'-phosphate
  modified_base 21: mod_base = OTHER; note = 2'-O-methyluridine-3'-phosphorothioate
  modified_base 22: mod_base = OTHER; note = 2'-O-methylcytidine-3'-phosphorothioate
  modified_base 23: mod_base = OTHER; note = 2'-O-methyladenosine-3'-phosphate
tttcacattctggcacccactca

SEQ ID NO: 2694 - RNA, 21 nt, synthetic construct
  source 1..21: mol_type = other RNA; note = Description of Artificial Sequence: Synthetic oligonucleotide
  modified_base 1: mod_base = OTHER; note = 2'-O-methylcytidine-3'-phosphorothioate
  modified_base 2: mod_base = OTHER; note = 2'-O-methyluridine-3'-phosphorothioate
  modified_base 3: mod_base = OTHER; note = 2'-O-methylcytidine-3'-phosphate
  modified_base 4: mod_base = OTHER; note = 2'-O-methyluridine-3'-phosphate
  modified_base 5: mod_base = OTHER; note = 2'-O-methylguanosine-3'-phosphate
  modified_base 6: mod_base = OTHER; note = 2'-O-methyladenosine-3'-phosphate
  modified_base 7: mod_base = OTHER; note = 2'-fluoroguanosine-3'-phosphate
  modified_base 8: mod_base = OTHER; note = 2'-O-methyluridine-3'-phosphate
  modified_base 9: mod_base = OTHER; note = 2'-fluoroguanosine-3'-phosphate
  modified_base 10: mod_base = OTHER; note = 2'-fluoroguanosine-3'-phosphate
  modified_base 11: mod_base = OTHER; note = 2'-fluoroguanosine-3'-phosphate
  modified_base 12: mod_base = OTHER; note = 2'-O-methyluridine-3'-phosphate
  modified_base 13: mod_base = OTHER; note = 2'-O-methylguanosine-3'-phosphate
  modified_base 14: mod_base = OTHER; note = 2'-O-methylcytidine-3'-phosphate
  modified_base 15: mod_base = OTHER; note = 2'-O-methylcytidine-3'-phosphate
  modified_base 16: mod_base = OTHER; note = 2'-O-methyladenosine-3'-phosphate
  modified_base 17: mod_base = OTHER; note = 2'-O-methylguanosine-3'-phosphate
  modified_base 18: mod_base = OTHER; note = 2'-O-methyladenosine-3'-phosphate
  modified_base 19: mod_base = OTHER; note = 2'-O-methyladenosine-3'-phosphate
  modified_base 20: mod_base = OTHER; note = 2'-O-methyluridine-3'-phosphate
  modified_base 21: mod_base = OTHER; note = 2'-O-methylguanosine-3'-phosphate N-[tris(GalNAc-alkyl)-amidodecanoyl)]-4-hydroxyprolinol Hyp-(GalNAc-alkyl)3
ctctgagtgggtgccagaatg

SEQ ID NO: 2695 - RNA, 23 nt, synthetic construct
  source 1..23: mol_type = other RNA; note = Description of Artificial Sequence: Synthetic oligonucleotide
  modified_base 1: mod_base = OTHER; note = 2'-O-methylcytidine-3'-phosphorothioate
  modified_base 2: mod_base = OTHER; note = 2'-fluoroadenosine-3'-phosphorothioate
  modified_base 3: mod_base = OTHER; note = 2'-O-methyluridine-3'-phosphate
  modified_base 4: mod_base = OTHER; note = 2'-O-methyluridine-3'-phosphate
  modified_base 5: mod_base = OTHER; note = 2'-O-methylcytidine-3'-phosphate
  modified_base 6: mod_base = OTHER; note = 2'-fluorouridine-3'-phosphate
  modified_base 7: mod_base = OTHER; note = 2'-O-methylguanosine-3'-phosphate
  modified_base 8: mod_base = OTHER; note = 2'-fluoroguanosine-3'-phosphate
  modified_base 9: mod_base = OTHER; note = 2'-fluorocytidine-3'-phosphate
  modified_base 10: mod_base = OTHER; note = 2'-O-methyladenosine-3'-phosphate
  modified_base 11: mod_base = OTHER; note = 2'-O-methylcytidine-3'-phosphate
  modified_base 12: mod_base = OTHER; note = 2'-O-methylcytidine-3'-phosphate
  modified_base 13: mod_base = OTHER; note = 2'-O-methylcytidine-3'-phosphate
  modified_base 14: mod_base = OTHER; note = 2'-fluoroadenosine-3'-phosphate
  modified_base 15: mod_base = OTHER; note = 2'-O-methylcytidine-3'-phosphate
  modified_base 16: mod_base = OTHER; note = 2'-fluorouridine-3'-phosphate
  modified_base 17: mod_base = OTHER; note = 2'-O-methylcytidine-3'-phosphate
  modified_base 18: mod_base = OTHER; note = 2'-O-methyladenosine-3'-phosphate
  modified_base 19: mod_base = OTHER; note = 2'-O-methylguanosine-3'-phosphate
  modified_base 20: mod_base = OTHER; note = 2'-O-methyladenosine-3'-phosphate
  modified_base 21: mod_base = OTHER; note = 2'-O-methylguanosine-3'-phosphorothioate
  modified_base 22: mod_base = OTHER; note = 2'-O-methylcytidine-3'-phosphorothioate
  modified_base 23: mod_base = OTHER; note = 2'-O-methylcytidine-3'-phosphate
cattctggcacccactcagagcc

SEQ ID NO: 2696 - RNA, 21 nt, synthetic construct
  source 1..21: mol_type = other RNA; note = Description of Artificial Sequence: Synthetic oligonucleotide
  modified_base 1: mod_base = OTHER; note = 2'-O-methylguanosine-3'-phosphorothioate
  modified_base 2: mod_base = OTHER; note = 2'-O-methylcytidine-3'-phosphorothioate
  modified_base 3: mod_base = OTHER; note = 2'-O-methyluridine-3'-phosphate
  modified_base 4: mod_base = OTHER; note = 2'-O-methylcytidine-3'-phosphate
  modified_base 5: mod_base = OTHER; note = 2'-O-methyluridine-3'-phosphate
  modified_base 6: mod_base = OTHER; note = 2'-O-methylguanosine-3'-phosphate
  modified_base 7: mod_base = OTHER; note = 2'-fluoroadenosine-3'-phosphate
  modified_base 8: mod_base = OTHER; note = 2'-O-methylguanosine-3'-phosphate
  modified_base 9: mod_base = OTHER; note = 2'-fluorouridine-3'-phosphate
  modified_base 10: mod_base = OTHER; note = 2'-fluoroguanosine-3'-phosphate
  modified_base 11: mod_base = OTHER; note = 2'-fluoroguanosine-3'-phosphate
  modified_base 12: mod_base = OTHER; note = 2'-O-methylguanosine-3'-phosphate
  modified_base 13: mod_base = OTHER; note = 2'-O-methyluridine-3'-phosphate
  modified_base 14: mod_base = OTHER; note = 2'-O-methylguanosine-3'-phosphate
  modified_base 15: mod_base = OTHER; note = 2'-O-methylcytidine-3'-phosphate
  modified_base 16: mod_base = OTHER; note = 2'-O-methylcytidine-3'-phosphate
  modified_base 17: mod_base = OTHER; note = 2'-O-methyladenosine-3'-phosphate
  modified_base 18: mod_base = OTHER; note = 2'-O-methylguanosine-3'-phosphate
  modified_base 19: mod_base = OTHER; note = 2'-O-methyladenosine-3'-phosphate
  modified_base 20: mod_base = OTHER; note = 2'-O-methyladenosine-3'-phosphate
  modified_base 21: mod_base = OTHER; note = 2'-O-methyluridine-3'-phosphate N-[tris(GalNAc-alkyl)-amidodecanoyl)]-4-hydroxyprolinol Hyp-(GalNAc-alkyl)3
gctctgagtgggtgccagaat

SEQ ID NO: 2697 - RNA, 23 nt, synthetic construct
  source 1..23: mol_type = other RNA; note = Description of Artificial Sequence: Synthetic oligonucleotide
  modified_base 1: mod_base = OTHER; note = 2'-O-methyladenosine-3'-phosphorothioate
  modified_base 2: mod_base = OTHER; note = 2'-fluorouridine -3'-phosphorothioate
  modified_base 3: mod_base = OTHER; note = 2'-O-methyluridine-3'-phosphate
  modified_base 4: mod_base = OTHER; note = 2'-O-methylcytidine-3'-phosphate
  modified_base 5: mod_base = OTHER; note = 2'-O-methyluridine-3'-phosphate
  modified_base 6: mod_base = OTHER; note = 2'-fluoroguanosine-3'-phosphate
  modified_base 7: mod_base = OTHER; note = 2'-O-methylguanosine-3'-phosphate
  modified_base 8: mod_base = OTHER; note = 2'-fluorocytidine-3'-phosphate
  modified_base 9: mod_base = OTHER; note = 2'-fluoroadenosine-3'-phosphate
  modified_base 10: mod_base = OTHER; note = 2'-O-methylcytidine-3'-phosphate
  modified_base 11: mod_base = OTHER; note = 2'-O-methylcytidine-3'-phosphate
  modified_base 12: mod_base = OTHER; note = 2'-O-methylcytidine-3'-phosphate
  modified_base 13: mod_base = OTHER; note = 2'-O-methyladenosine-3'-phosphate
  modified_base 14: mod_base = OTHER; note = 2'-fluorocytidine-3'-phosphate
  modified_base 15: mod_base = OTHER; note = 2'-O-methyluridine-3'-phosphate
  modified_base 16: mod_base = OTHER; note = 2'-fluorocytidine-3'-phosphate
  modified_base 17: mod_base = OTHER; note = 2'-O-methyladenosine-3'-phosphate
  modified_base 18: mod_base = OTHER; note = 2'-O-methylguanosine-3'-phosphate
  modified_base 19: mod_base = OTHER; note = 2'-O-methyladenosine-3'-phosphate
  modified_base 20: mod_base = OTHER; note = 2'-O-methylguanosine-3'-phosphate
  modified_base 21: mod_base = OTHER; note = 2'-O-methylcytidine-3'-phosphorothioate
  modified_base 22: mod_base = OTHER; note = 2'-O-methylcytidine-3'-phosphorothioate
  modified_base 23: mod_base = OTHER; note = 2'-O-methyladenosine-3'-phosphate
attctggcacccactcagagcca

SEQ ID NO: 2698 - RNA, 21 nt, synthetic construct
  source 1..21: mol_type = other RNA; note = Description of Artificial Sequence: Synthetic oligonucleotide
  modified_base 1: mod_base = OTHER; note = 2'-O-methylguanosine-3'-phosphorothioate
  modified_base 2: mod_base = OTHER; note = 2'-O-methylcytidine-3'-phosphorothioate
  modified_base 3: mod_base = OTHER; note = 2'-O-methyladenosine-3'-phosphate
  modified_base 4: mod_base = OTHER; note = 2'-O-methylcytidine-3'-phosphate
  modified_base 5: mod_base = OTHER; note = 2'-O-methyluridine-3'-phosphate
  modified_base 6: mod_base = OTHER; note = 2'-O-methylguanosine-3'-phosphate
  modified_base 7: mod_base = OTHER; note = 2'-fluoroadenosine-3'-phosphate
  modified_base 8: mod_base = OTHER; note = 2'-O-methyluridine-3'-phosphate
  modified_base 9: mod_base = OTHER; note = 2'-fluoroguanosine-3'-phosphate
  modified_base 10: mod_base = OTHER; note = 2'-fluorouridine-3'-phosphate
  modified_base 11: mod_base = OTHER; note = 2'-fluorouridine-3'-phosphate
  modified_base 12: mod_base = OTHER; note = 2'-O-methylcytidine-3'-phosphate
  modified_base 13: mod_base = OTHER; note = 2'-O-methyluridine-3'-phosphate
  modified_base 14: mod_base = OTHER; note = 2'-O-methylguanosine-3'-phosphate
  modified_base 15: mod_base = OTHER; note = 2'-O-methyladenosine-3'-phosphate
  modified_base 16: mod_base = OTHER; note = 2'-O-methyladenosine-3'-phosphate
  modified_base 17: mod_base = OTHER; note = 2'-O-methyladenosine-3'-phosphate
  modified_base 18: mod_base = OTHER; note = 2'-O-methylguanosine-3'-phosphate
  modified_base 19: mod_base = OTHER; note = 2'-O-methylcytidine-3'-phosphate
  modified_base 20: mod_base = OTHER; note = 2'-O-methyluridine-3'-phosphate
  modified_base 21: mod_base = OTHER; note = 2'-O-methylcytidine-3'-phosphate N-[tris(GalNAc-alkyl)-amidodecanoyl)]-4-hydroxyprolinol Hyp-(GalNAc-alkyl)3
gcactgatgttctgaaagctc

SEQ ID NO: 2699 - RNA, 23 nt, synthetic construct
  source 1..23: mol_type = other RNA; note = Description of Artificial Sequence: Synthetic oligonucleotide
  modified_base 1: mod_base = OTHER; note = 2'-O-methylguanosine-3'-phosphorothioate
  modified_base 2: mod_base = OTHER; note = 2'-fluoroadenosine-3'-phosphorothioate
  modified_base 3: mod_base = OTHER; note = 2'-O-methylguanosine-3'-phosphate
  modified_base 4: mod_base = OTHER; note = 2'-O-methylcytidine-3'-phosphate
  modified_base 5: mod_base = OTHER; note = 2'-O-methyluridine-3'-phosphate
  modified_base 6: mod_base = OTHER; note = 2'-fluorouridine-3'-phosphate
  modified_base 7: mod_base = OTHER; note = 2'-O-methyluridine-3'-phosphate
  modified_base 8: mod_base = OTHER; note = 2'-fluorocytidine-3'-phosphate
  modified_base 9: mod_base = OTHER; note = 2'-fluoroadenosine-3'-phosphate
  modified_base 10: mod_base = OTHER; note = 2'-O-methylguanosine-3'-phosphate
  modified_base 11: mod_base = OTHER; note = 2'-O-methyladenosine-3'-phosphate
  modified_base 12: mod_base = OTHER; note = 2'-O-methyladenosine-3'-phosphate
  modified_base 13: mod_base = OTHER; note = 2'-O-methylcytidine-3'-phosphate
  modified_base 14: mod_base = OTHER; note = 2'-fluoroadenosine-3'-phosphate
  modified_base 15: mod_base = OTHER; note = 2'-O-methyluridine-3'-phosphate
  modified_base 16: mod_base = OTHER; note = 2'-fluorocytidine-3'-phosphate
  modified_base 17: mod_base = OTHER; note = 2'-O-methyladenosine-3'-phosphate
  modified_base 18: mod_base = OTHER; note = 2'-O-methylguanosine-3'-phosphate
  modified_base 19: mod_base = OTHER; note = 2'-O-methyluridine-3'-phosphate
  modified_base 20: mod_base = OTHER; note = 2'-O-methylguanosine-3'-phosphate
  modified_base 21: mod_base = OTHER; note = 2'-O-methylcytidine-3'-phosphorothioate
  modified_base 22: mod_base = OTHER; note = 2'-O-methylcytidine-3'-phosphorothioate
  modified_base 23: mod_base = OTHER; note = 2'-O-methyluridine-3'-phosphate
gagctttcagaacatcagtgcct

SEQ ID NO: 2700 - RNA, 21 nt, synthetic construct
  source 1..21: mol_type = other RNA; note = Description of Artificial Sequence: Synthetic oligonucleotide
  modified_base 1: mod_base = OTHER; note = 2'-O-methylcytidine-3'-phosphorothioate
  modified_base 2: mod_base = OTHER; note = 2'-O-methyladenosine-3'-phosphorothioate
  modified_base 3: mod_base = OTHER; note = 2'-O-methylcytidine-3'-phosphate
  modified_base 4: mod_base = OTHER; note = 2'-O-methyluridine-3'-phosphate
  modified_base 5: mod_base = OTHER; note = 2'-O-methylguanosine-3'-phosphate
  modified_base 6: mod_base = OTHER; note = 2'-O-methyladenosine-3'-phosphate
  modified_base 7: mod_base = OTHER; note = 2'-fluorouridine-3'-phosphate
  modified_base 8: mod_base = OTHER; note = 2'-O-methylguanosine-3'-phosphate
  modified_base 9: mod_base = OTHER; note = 2'-fluorouridine-3'-phosphate
  modified_base 10: mod_base = OTHER; note = 2'-fluorouridine-3'-phosphate
  modified_base 11: mod_base = OTHER; note = 2'-fluorocytidine-3'-phosphate
  modified_base 12: mod_base = OTHER; note = 2'-O-methyluridine-3'-phosphate
  modified_base 13: mod_base = OTHER; note = 2'-O-methylguanosine-3'-phosphate
  modified_base 14: mod_base = OTHER; note = 2'-O-methyladenosine-3'-phosphate
  modified_base 15: mod_base = OTHER; note = 2'-O-methyladenosine-3'-phosphate
  modified_base 16: mod_base = OTHER; note = 2'-O-methyladenosine-3'-phosphate
  modified_base 17: mod_base = OTHER; note = 2'-O-methylguanosine-3'-phosphate
  modified_base 18: mod_base = OTHER; note = 2'-O-methylcytidine-3'-phosphate
  modified_base 19: mod_base = OTHER; note = 2'-O-methyluridine-3'-phosphate
  modified_base 20: mod_base = OTHER; note = 2'-O-methylcytidine-3'-phosphate
  modified_base 21: mod_base = OTHER; note = 2'-O-methyluridine-3'-phosphate N-[tris(GalNAc-alkyl)-amidodecanoyl)]-4-hydroxyprolinol Hyp-(GalNAc-alkyl)3
cactgatgttctgaaagctct

SEQ ID NO: 2701 - RNA, 23 nt, synthetic construct
  source 1..23: mol_type = other RNA; note = Description of Artificial Sequence: Synthetic oligonucleotide
  modified_base 1: mod_base = OTHER; note = 2'-O-methyladenosine-3'-phosphorothioate
  modified_base 2: mod_base = OTHER; note = 2'-fluoroguanosine-3'-phosphorothioate
  modified_base 3: mod_base = OTHER; note = 2'-O-methyladenosine-3'-phosphate
  modified_base 4: mod_base = OTHER; note = 2'-O-methylguanosine-3'-phosphate
  modified_base 5: mod_base = OTHER; note = 2'-O-methylcytidine-3'-phosphate
  modified_base 6: mod_base = OTHER; note = 2'-fluorouridine-3'-phosphate
  modified_base 7: mod_base = OTHER; note = 2'-O-methyluridine-3'-phosphate
  modified_base 8: mod_base = OTHER; note = 2'-fluorouridine-3'-phosphate
  modified_base 9: mod_base = OTHER; note = 2'-fluorocytidine-3'-phosphate
  modified_base 10: mod_base = OTHER; note = 2'-O-methyladenosine-3'-phosphate
  modified_base 11: mod_base = OTHER; note = 2'-O-methylguanosine-3'-phosphate
  modified_base 12: mod_base = OTHER; note = 2'-O-methyladenosine-3'-phosphate
  modified_base 13: mod_base = OTHER; note = 2'-O-methyladenosine-3'-phosphate
  modified_base 14: mod_base = OTHER; note = 2'-fluorocytidine-3'-phosphate
  modified_base 15: mod_base = OTHER; note = 2'-O-methyladenosine-3'-phosphate
  modified_base 16: mod_base = OTHER; note = 2'-fluorouridine-3'-phosphate
  modified_base 17: mod_base = OTHER; note = 2'-O-methylcytidine-3'-phosphate
  modified_base 18: mod_base = OTHER; note = 2'-O-methyladenosine-3'-phosphate
  modified_base 19: mod_base = OTHER; note = 2'-O-methylguanosine-3'-phosphate
  modified_base 20: mod_base = OTHER; note = 2'-O-methyluridine-3'-phosphate
  modified_base 21: mod_base = OTHER; note = 2'-O-methylguanosine-3'-phosphorothioate
  modified_base 22: mod_base = OTHER; note = 2'-O-methylcytidine-3'-phosphorothioate
  modified_base 23: mod_base = OTHER; note = 2'-O-methylcytidine-3'-phosphate
agagctttcagaacatcagtgcc

SEQ ID NO: 2702 - RNA, 21 nt, synthetic construct
  source 1..21: mol_type = other RNA; note = Description of Artificial Sequence: Synthetic oligonucleotide
  modified_base 1: mod_base = OTHER; note = 2'-O-methyladenosine-3'-phosphorothioate
  modified_base 2: mod_base = OTHER; note = 2'-O-methyladenosine-3'-phosphorothioate
  modified_base 3: mod_base = OTHER; note = 2'-O-methyladenosine-3'-phosphate
  modified_base 4: mod_base = OTHER; note = 2'-O-methylguanosine-3'-phosphate
  modified_base 5: mod_base = OTHER; note = 2'-O-methylguanosine-3'-phosphate
  modified_base 6: mod_base = OTHER; note = 2'-O-methylcytidine-3'-phosphate
  modified_base 7: mod_base = OTHER; note = 2'-fluoroadenosine-3'-phosphate
  modified_base 8: mod_base = OTHER; note = 2'-O-methylcytidine-3'-phosphate
  modified_base 9: mod_base = OTHER; note = 2'-fluorouridine-3'-phosphate
  modified_base 10: mod_base = OTHER; note = 2'-fluoroguanosine-3'-phosphate
  modified_base 11: mod_base = OTHER; note = 2'-fluoroadenosine-3'-phosphate
  modified_base 12: mod_base = OTHER; note = 2'-O-methyluridine-3'-phosphate
  modified_base 13: mod_base = OTHER; note = 2'-O-methylguanosine-3'-phosphate
  modified_base 14: mod_base = OTHER; note = 2'-O-methyluridine-3'-phosphate
  modified_base 15: mod_base = OTHER; note = 2'-O-methyluridine-3'-phosphate
  modified_base 16: mod_base = OTHER; note = 2'-O-methylcytidine-3'-phosphate
  modified_base 17: mod_base = OTHER; note = 2'-O-methyluridine-3'-phosphate
  modified_base 18: mod_base = OTHER; note = 2'-O-methylguanosine-3'-phosphate
  modified_base 19: mod_base = OTHER; note = 2'-O-methyladenosine-3'-phosphate
  modified_base 20: mod_base = OTHER; note = 2'-O-methyladenosine-3'-phosphate
  modified_base 21: mod_base = OTHER; note = 2'-O-methyladenosine-3'-phosphate N-[tris(GalNAc-alkyl)-amidodecanoyl)]-4-hydroxyprolinol Hyp-(GalNAc-alkyl)3
aaaggcactgatgttctgaaa

SEQ ID NO: 2703 - RNA, 23 nt, synthetic construct
  source 1..23: mol_type = other RNA; note = Description of Artificial Sequence: Synthetic oligonucleotide
  modified_base 1: mod_base = OTHER; note = 2'-O-methyluridine-3'-phosphorothioate
  modified_base 2: mod_base = OTHER; note = 2'-fluorouridine -3'-phosphorothioate
  modified_base 3: mod_base = OTHER; note = 2'-O-methyluridine-3'-phosphate
  modified_base 4: mod_base = OTHER; note = 2'-O-methylcytidine-3'-phosphate
  modified_base 5: mod_base = OTHER; note = 2'-O-methyladenosine-3'-phosphate
  modified_base 6: mod_base = OTHER; note = 2'-fluoroguanosine-3'-phosphate
  modified_base 7: mod_base = OTHER; note = 2'-O-methyladenosine-3'-phosphate
  modified_base 8: mod_base = OTHER; note = 2'-fluoroadenosine-3'-phosphate
  modified_base 9: mod_base = OTHER; note = 2'-fluorocytidine-3'-phosphate
  modified_base 10: mod_base = OTHER; note = 2'-O-methyladenosine-3'-phosphate
  modified_base 11: mod_base = OTHER; note = 2'-O-methyluridine-3'-phosphate
  modified_base 12: mod_base = OTHER; note = 2'-O-methylcytidine-3'-phosphate
  modified_base 13: mod_base = OTHER; note = 2'-O-methyladenosine-3'-phosphate
  modified_base 14: mod_base = OTHER; note = 2'-fluoroguanosine-3'-phosphate
  modified_base 15: mod_base = OTHER; note = 2'-O-methyluridine-3'-phosphate
  modified_base 16: mod_base = OTHER; note = 2'-fluoroguanosine-3'-phosphate
  modified_base 17: mod_base = OTHER; note = 2'-O-methylcytidine-3'-phosphate
  modified_base 18: mod_base = OTHER; note = 2'-O-methylcytidine-3'-phosphate
  modified_base 19: mod_base = OTHER; note = 2'-O-methyluridine-3'-phosphate
  modified_base 20: mod_base = OTHER; note = 2'-O-methyluridine-3'-phosphate
  modified_base 21: mod_base = OTHER; note = 2'-O-methyluridine-3'-phosphorothioate
  modified_base 22: mod_base = OTHER; note = 2'-O-methylcytidine-3'-phosphorothioate
  modified_base 23: mod_base = OTHER; note = 2'-O-methylcytidine-3'-phosphate
tttcagaacatcagtgcctttcc

SEQ ID NO: 2704 - RNA, 21 nt, synthetic construct
  source 1..21: mol_type = other RNA; note = Description of Artificial Sequence: Synthetic oligonucleotide
  modified_base 1: mod_base = OTHER; note = 2'-O-methylguanosine-3'-phosphorothioate
  modified_base 2: mod_base = OTHER; note = 2'-O-methyladenosine-3'-phosphorothioate
  modified_base 3: mod_base = OTHER; note = 2'-O-methyladenosine-3'-phosphate
  modified_base 4: mod_base = OTHER; note = 2'-O-methyladenosine-3'-phosphate
  modified_base 5: mod_base = OTHER; note = 2'-O-methylguanosine-3'-phosphate
  modified_base 6: mod_base = OTHER; note = 2'-O-methylguanosine-3'-phosphate
  modified_base 7: mod_base = OTHER; note = 2'-fluorocytidine-3'-phosphate
  modified_base 8: mod_base = OTHER; note = 2'-O-methyladenosine-3'-phosphate
  modified_base 9: mod_base = OTHER; note = 2'-fluorocytidine-3'-phosphate
  modified_base 10: mod_base = OTHER; note = 2'-fluorouridine-3'-phosphate
  modified_base 11: mod_base = OTHER; note = 2'-fluoroguanosine-3'-phosphate
  modified_base 12: mod_base = OTHER; note = 2'-O-methyladenosine-3'-phosphate
  modified_base 13: mod_base = OTHER; note = 2'-O-methyluridine-3'-phosphate
  modified_base 14: mod_base = OTHER; note = 2'-O-methylguanosine-3'-phosphate
  modified_base 15: mod_base = OTHER; note = 2'-O-methyluridine-3'-phosphate
  modified_base 16: mod_base = OTHER; note = 2'-O-methyluridine-3'-phosphate
  modified_base 17: mod_base = OTHER; note = 2'-O-methylcytidine-3'-phosphate
  modified_base 18: mod_base = OTHER; note = 2'-O-methyluridine-3'-phosphate
  modified_base 19: mod_base = OTHER; note = 2'-O-methylguanosine-3'-phosphate
  modified_base 20: mod_base = OTHER; note = 2'-O-methyladenosine-3'-phosphate
  modified_base 21: mod_base = OTHER; note = 2'-O-methyladenosine-3'-phosphate N-[tris(GalNAc-alkyl)-amidodecanoyl)]-4-hydroxyprolinol Hyp-(GalNAc-alkyl)3
gaaaggcactgatgttctgaa

SEQ ID NO: 2705 - RNA, 23 nt, synthetic construct
  source 1..23: mol_type = other RNA; note = Description of Artificial Sequence: Synthetic oligonucleotide
  modified_base 1: mod_base = OTHER; note = 2'-O-methyluridine-3'-phosphorothioate
  modified_base 2: mod_base = OTHER; note = 2'-fluorouridine -3'-phosphorothioate
  modified_base 3: mod_base = OTHER; note = 2'-O-methylcytidine-3'-phosphate
  modified_base 4: mod_base = OTHER; note = 2'-O-methyladenosine-3'-phosphate
  modified_base 5: mod_base = OTHER; note = 2'-O-methylguanosine-3'-phosphate
  modified_base 6: mod_base = OTHER; note = 2'-fluoroadenosine-3'-phosphate
  modified_base 7: mod_base = OTHER; note = 2'-O-methyladenosine-3'-phosphate
  modified_base 8: mod_base = OTHER; note = 2'-fluorocytidine-3'-phosphate
  modified_base 9: mod_base = OTHER; note = 2'-fluoroadenosine-3'-phosphate
  modified_base 10: mod_base = OTHER; note = 2'-O-methyluridine-3'-phosphate
  modified_base 11: mod_base = OTHER; note = 2'-O-methylcytidine-3'-phosphate
  modified_base 12: mod_base = OTHER; note = 2'-O-methyladenosine-3'-phosphate
  modified_base 13: mod_base = OTHER; note = 2'-O-methylguanosine-3'-phosphate
  modified_base 14: mod_base = OTHER; note = 2'-fluorouridine-3'-phosphate
  modified_base 15: mod_base = OTHER; note = 2'-O-methylguanosine-3'-phosphate
  modified_base 16: mod_base = OTHER; note = 2'-fluorocytidine-3'-phosphate
  modified_base 17: mod_base = OTHER; note = 2'-O-methylcytidine-3'-phosphate
  modified_base 18: mod_base = OTHER; note = 2'-O-methyluridine-3'-phosphate
  modified_base 19: mod_base = OTHER; note = 2'-O-methyluridine-3'-phosphate
  modified_base 20: mod_base = OTHER; note = 2'-O-methyluridine-3'-phosphate
  modified_base 21: mod_base = OTHER; note = 2'-O-methylcytidine-3'-phosphorothioate
  modified_base 22: mod_base = OTHER; note = 2'-O-methylcytidine-3'-phosphorothioate
  modified_base 23: mod_base = OTHER; note = 2'-O-methylguanosine-3'-phosphate
ttcagaacatcagtgcctttccg

SEQ ID NO: 2706 - RNA, 21 nt, synthetic construct
  source 1..21: mol_type = other RNA; note = Description of Artificial Sequence: Synthetic oligonucleotide
  modified_base 1: mod_base = OTHER; note = 2'-O-methylguanosine-3'-phosphorothioate
  modified_base 2: mod_base = OTHER; note = 2'-O-methylguanosine-3'-phosphorothioate
  modified_base 3: mod_base = OTHER; note = 2'-O-methylguanosine-3'-phosphate
  modified_base 4: mod_base = OTHER; note = 2'-O-methyladenosine-3'-phosphate
  modified_base 5: mod_base = OTHER; note = 2'-O-methyladenosine-3'-phosphate
  modified_base 6: mod_base = OTHER; note = 2'-O-methylguanosine-3'-phosphate
  modified_base 7: mod_base = OTHER; note = 2'-fluoroguanosine-3'-phosphate
  modified_base 8: mod_base = OTHER; note = 2'-O-methyluridine-3'-phosphate
  modified_base 9: mod_base = OTHER; note = 2'-fluoroguanosine-3'-phosphate
  modified_base 10: mod_base = OTHER; note = 2'-fluoroguanosine-3'-phosphate
  modified_base 11: mod_base = OTHER; note = 2'-fluoroadenosine-3'-phosphate
  modified_base 12: mod_base = OTHER; note = 2'-O-methyladenosine-3'-phosphate
  modified_base 13: mod_base = OTHER; note = 2'-O-methylguanosine-3'-phosphate
  modified_base 14: mod_base = OTHER; note = 2'-O-methyluridine-3'-phosphate
  modified_base 15: mod_base = OTHER; note = 2'-O-methylcytidine-3'-phosphate
  modified_base 16: mod_base = OTHER; note = 2'-O-methyluridine-3'-phosphate
  modified_base 17: mod_base = OTHER; note = 2'-O-methyluridine-3'-phosphate
  modified_base 18: mod_base = OTHER; note = 2'-O-methylcytidine-3'-phosphate
  modified_base 19: mod_base = OTHER; note = 2'-O-methylcytidine-3'-phosphate
  modified_base 20: mod_base = OTHER; note = 2'-O-methyluridine-3'-phosphate
  modified_base 21: mod_base = OTHER; note = 2'-O-methylguanosine-3'-phosphate N-[tris(GalNAc-alkyl)-amidodecanoyl)]-4-hydroxyprolinol Hyp-(GalNAc-alkyl)3
gggaaggtggaagtcttcctg

SEQ ID NO: 2707 - RNA, 23 nt, synthetic construct
  source 1..23: mol_type = other RNA; note = Description of Artificial Sequence: Synthetic oligonucleotide
  modified_base 1: mod_base = OTHER; note = 2'-O-methylcytidine-3'-phosphorothioate
  modified_base 2: mod_base = OTHER; note = 2'-fluoroadenosine-3'-phosphorothioate
  modified_base 3: mod_base = OTHER; note = 2'-O-methylguanosine-3'-phosphate
  modified_base 4: mod_base = OTHER; note = 2'-O-methylguanosine-3'-phosphate
  modified_base 5: mod_base = OTHER; note = 2'-O-methyladenosine-3'-phosphate
  modified_base 6: mod_base = OTHER; note = 2'-fluoroadenosine-3'-phosphate
  modified_base 7: mod_base = OTHER; note = 2'-O-methylguanosine-3'-phosphate
  modified_base 8: mod_base = OTHER; note = 2'-fluoroadenosine-3'-phosphate
  modified_base 9: mod_base = OTHER; note = 2'-fluorocytidine-3'-phosphate
  modified_base 10: mod_base = OTHER; note = 2'-O-methyluridine-3'-phosphate
  modified_base 11: mod_base = OTHER; note = 2'-O-methyluridine-3'-phosphate
  modified_base 12: mod_base = OTHER; note = 2'-O-methylcytidine-3'-phosphate
  modified_base 13: mod_base = OTHER; note = 2'-O-methylcytidine-3'-phosphate
  modified_base 14: mod_base = OTHER; note = 2'-fluoroadenosine-3'-phosphate
  modified_base 15: mod_base = OTHER; note = 2'-O-methylcytidine-3'-phosphate
  modified_base 16: mod_base = OTHER; note = 2'-fluorocytidine-3'-phosphate
  modified_base 17: mod_base = OTHER; note = 2'-O-methyluridine-3'-phosphate
  modified_base 18: mod_base = OTHER; note = 2'-O-methyluridine-3'-phosphate
  modified_base 19: mod_base = OTHER; note = 2'-O-methylcytidine-3'-phosphate
  modified_base 20: mod_base = OTHER; note = 2'-O-methylcytidine-3'-phosphate
  modified_base 21: mod_base = OTHER; note = 2'-O-methylcytidine-3'-phosphorothioate
  modified_base 22: mod_base = OTHER; note = 2'-O-methyluridine-3'-phosphorothioate
  modified_base 23: mod_base = OTHER; note = 2'-O-methyluridine-3'-phosphate
caggaagacttccaccttccctt

SEQ ID NO: 2708 - RNA, 21 nt, synthetic construct
  source 1..21: mol_type = other RNA; note = Description of Artificial Sequence: Synthetic oligonucleotide
  modified_base 1: mod_base = OTHER; note = 2'-O-methylguanosine-3'-phosphorothioate
  modified_base 2: mod_base = OTHER; note = 2'-O-methylguanosine-3'-phosphorothioate
  modified_base 3: mod_base = OTHER; note = 2'-O-methyladenosine-3'-phosphate
  modified_base 4: mod_base = OTHER; note = 2'-O-methyladenosine-3'-phosphate
  modified_base 5: mod_base = OTHER; note = 2'-O-methylguanosine-3'-phosphate
  modified_base 6: mod_base = OTHER; note = 2'-O-methylguanosine-3'-phosphate
  modified_base 7: mod_base = OTHER; note = 2'-fluorouridine-3'-phosphate
  modified_base 8: mod_base = OTHER; note = 2'-O-methylguanosine-3'-phosphate
  modified_base 9: mod_base = OTHER; note = 2'-fluoroguanosine-3'-phosphate
  modified_base 10: mod_base = OTHER; note = 2'-fluoroadenosine-3'-phosphate
  modified_base 11: mod_base = OTHER; note = 2'-fluoroadenosine-3'-phosphate
  modified_base 12: mod_base = OTHER; note = 2'-O-methylguanosine-3'-phosphate
  modified_base 13: mod_base = OTHER; note = 2'-O-methyluridine-3'-phosphate
  modified_base 14: mod_base = OTHER; note = 2'-O-methylcytidine-3'-phosphate
  modified_base 15: mod_base = OTHER; note = 2'-O-methyluridine-3'-phosphate
  modified_base 16: mod_base = OTHER; note = 2'-O-methyluridine-3'-phosphate
  modified_base 17: mod_base = OTHER; note = 2'-O-methylcytidine-3'-phosphate
  modified_base 18: mod_base = OTHER; note = 2'-O-methylcytidine-3'-phosphate
  modified_base 19: mod_base = OTHER; note = 2'-O-methyluridine-3'-phosphate
  modified_base 20: mod_base = OTHER; note = 2'-O-methylguanosine-3'-phosphate
  modified_base 21: mod_base = OTHER; note = 2'-O-methylguanosine-3'-phosphate N-[tris(GalNAc-alkyl)-amidodecanoyl)]-4-hydroxyprolinol Hyp-(GalNAc-alkyl)3
ggaaggtggaagtcttcctgg

SEQ ID NO: 2709 - RNA, 23 nt, synthetic construct
  source 1..23: mol_type = other RNA; note = Description of Artificial Sequence: Synthetic oligonucleotide
  modified_base 1: mod_base = OTHER; note = 2'-O-methylcytidine-3'-phosphorothioate
  modified_base 2: mod_base = OTHER; note = 2'-fluorocytidine-3'-phosphorothioate
  modified_base 3: mod_base = OTHER; note = 2'-O-methyladenosine-3'-phosphate
  modified_base 4: mod_base = OTHER; note = 2'-O-methylguanosine-3'-phosphate
  modified_base 5: mod_base = OTHER; note = 2'-O-methylguanosine-3'-phosphate
  modified_base 6: mod_base = OTHER; note = 2'-fluoroadenosine-3'-phosphate
  modified_base 7: mod_base = OTHER; note = 2'-O-methyladenosine-3'-phosphate
  modified_base 8: mod_base = OTHER; note = 2'-fluoroguanosine-3'-phosphate
  modified_base 9: mod_base = OTHER; note = 2'-fluoroadenosine-3'-phosphate
  modified_base 10: mod_base = OTHER; note = 2'-O-methylcytidine-3'-phosphate
  modified_base 11: mod_base = OTHER; note = 2'-O-methyluridine-3'-phosphate
  modified_base 12: mod_base = OTHER; note = 2'-O-methyluridine-3'-phosphate
  modified_base 13: mod_base = OTHER; note = 2'-O-methylcytidine-3'-phosphate
  modified_base 14: mod_base = OTHER; note = 2'-fluorocytidine-3'-phosphate
  modified_base 15: mod_base = OTHER; note = 2'-O-methyladenosine-3'-phosphate
  modified_base 16: mod_base = OTHER; note = 2'-fluorocytidine-3'-phosphate
  modified_base 17: mod_base = OTHER; note = 2'-O-methylcytidine-3'-phosphate
  modified_base 18: mod_base = OTHER; note = 2'-O-methyluridine-3'-phosphate
  modified_base 19: mod_base = OTHER; note = 2'-O-methyluridine-3'-phosphate
  modified_base 20: mod_base = OTHER; note = 2'-O-methylcytidine-3'-phosphate
  modified_base 21: mod_base = OTHER; note = 2'-O-methylcytidine-3'-phosphorothioate
  modified_base 22: mod_base = OTHER; note = 2'-O-methylcytidine-3'-phosphorothioate
  modified_base 23: mod_base = OTHER; note = 2'-O-methyluridine-3'-phosphate
ccaggaagacttccaccttccct

SEQ ID NO: 2710 - RNA, 21 nt, synthetic construct
  source 1..21: mol_type = other RNA; note = Description of Artificial Sequence: Synthetic oligonucleotide
  modified_base 1: mod_base = OTHER; note = 2'-O-methylguanosine-3'-phosphorothioate
  modified_base 2: mod_base = OTHER; note = 2'-O-methylguanosine-3'-phosphorothioate
  modified_base 3: mod_base = OTHER; note = 2'-O-methyladenosine-3'-phosphate
  modified_base 4: mod_base = OTHER; note = 2'-O-methyladenosine-3'-phosphate
  modified_base 5: mod_base = OTHER; note = 2'-O-methylguanosine-3'-phosphate
  modified_base 6: mod_base = OTHER; note = 2'-O-methylguanosine-3'-phosphate
  modified_base 7: mod_base = OTHER; note = 2'-fluoroguanosine-3'-phosphate
  modified_base 8: mod_base = OTHER; note = 2'-O-methyladenosine-3'-phosphate
  modified_base 9: mod_base = OTHER; note = 2'-fluoroadenosine-3'-phosphate
  modified_base 10: mod_base = OTHER; note = 2'-fluoroguanosine-3'-phosphate
  modified_base 11: mod_base = OTHER; note = 2'-fluoroguanosine-3'-phosphate
  modified_base 12: mod_base = OTHER; note = 2'-O-methyluridine-3'-phosphate
  modified_base 13: mod_base = OTHER; note = 2'-O-methylguanosine-3'-phosphate
  modified_base 14: mod_base = OTHER; note = 2'-O-methylguanosine-3'-phosphate
  modified_base 15: mod_base = OTHER; note = 2'-O-methyladenosine-3'-phosphate
  modified_base 16: mod_base = OTHER; note = 2'-O-methyladenosine-3'-phosphate
  modified_base 17: mod_base = OTHER; note = 2'-O-methylguanosine-3'-phosphate
  modified_base 18: mod_base = OTHER; note = 2'-O-methyluridine-3'-phosphate
  modified_base 19: mod_base = OTHER; note = 2'-O-methylcytidine-3'-phosphate
  modified_base 20: mod_base = OTHER; note = 2'-O-methyluridine-3'-phosphate
  modified_base 21: mod_base = OTHER; note = 2'-O-methyluridine-3'-phosphate N-[tris(GalNAc-alkyl)-amidodecanoyl)]-4-hydroxyprolinol Hyp-(GalNAc-alkyl)3
ggaagggaaggtggaagtctt

SEQ ID NO: 2711 - RNA, 23 nt, synthetic construct
  source 1..23: mol_type = other RNA; note = Description of Artificial Sequence: Synthetic oligonucleotide
  modified_base 1: mod_base = OTHER; note = 2'-O-methyladenosine-3'-phosphorothioate
  modified_base 2: mod_base = OTHER; note = 2'-fluoroadenosine-3'-phosphorothioate
  modified_base 3: mod_base = OTHER; note = 2'-O-methylguanosine-3'-phosphate
  modified_base 4: mod_base = OTHER; note = 2'-O-methyladenosine-3'-phosphate
  modified_base 5: mod_base = OTHER; note = 2'-O-methylcytidine-3'-phosphate
  modified_base 6: mod_base = OTHER; note = 2'-fluorouridine-3'-phosphate
  modified_base 7: mod_base = OTHER; note = 2'-O-methyluridine-3'-phosphate
  modified_base 8: mod_base = OTHER; note = 2'-fluorocytidine-3'-phosphate
  modified_base 9: mod_base = OTHER; note = 2'-fluorocytidine-3'-phosphate
  modified_base 10: mod_base = OTHER; note = 2'-O-methyladenosine-3'-phosphate
  modified_base 11: mod_base = OTHER; note = 2'-O-methylcytidine-3'-phosphate
  modified_base 12: mod_base = OTHER; note = 2'-O-methylcytidine-3'-phosphate
  modified_base 13: mod_base = OTHER; note = 2'-O-methyluridine-3'-phosphate
  modified_base 14: mod_base = OTHER; note = 2'-fluorouridine-3'-phosphate
  modified_base 15: mod_base = OTHER; note = 2'-O-methylcytidine-3'-phosphate
  modified_base 16: mod_base = OTHER; note = 2'-fluorocytidine-3'-phosphate
  modified_base 17: mod_base = OTHER; note = 2'-O-methylcytidine-3'-phosphate
  modified_base 18: mod_base = OTHER; note = 2'-O-methyluridine-3'-phosphate
  modified_base 19: mod_base = OTHER; note = 2'-O-methyluridine-3'-phosphate
  modified_base 20: mod_base = OTHER; note = 2'-O-methylcytidine-3'-phosphate
  modified_base 21: mod_base = OTHER; note = 2'-O-methylcytidine-3'-phosphorothioate
  modified_base 22: mod_base = OTHER; note = 2'-O-methyladenosine-3'-phosphorothioate
  modified_base 23: mod_base = OTHER; note = 2'-O-methylcytidine-3'-phosphate
aagacttccaccttcccttccac

SEQ ID NO: 2712 - RNA, 21 nt, synthetic construct
  source 1..21: mol_type = other RNA; note = Description of Artificial Sequence: Synthetic oligonucleotide
  modified_base 1: mod_base = OTHER; note = 2'-O-methyluridine-3'-phosphorothioate
  modified_base 2: mod_base = OTHER; note = 2'-O-methylguanosine-3'-phosphorothioate
  modified_base 3: mod_base = OTHER; note = 2'-O-methylguanosine-3'-phosphate
  modified_base 4: mod_base = OTHER; note = 2'-O-methyladenosine-3'-phosphate
  modified_base 5: mod_base = OTHER; note = 2'-O-methyladenosine-3'-phosphate
  modified_base 6: mod_base = OTHER; note = 2'-O-methylguanosine-3'-phosphate
  modified_base 7: mod_base = OTHER; note = 2'-fluoroguanosine-3'-phosphate
  modified_base 8: mod_base = OTHER; note = 2'-O-methylguanosine-3'-phosphate
  modified_base 9: mod_base = OTHER; note = 2'-fluoroadenosine-3'-phosphate
  modified_base 10: mod_base = OTHER; note = 2'-fluoroadenosine-3'-phosphate
  modified_base 11: mod_base = OTHER; note = 2'-fluoroguanosine-3'-phosphate
  modified_base 12: mod_base = OTHER; note = 2'-O-methylguanosine-3'-phosphate
  modified_base 13: mod_base = OTHER; note = 2'-O-methyluridine-3'-phosphate
  modified_base 14: mod_base = OTHER; note = 2'-O-methylguanosine-3'-phosphate
  modified_base 15: mod_base = OTHER; note = 2'-O-methylguanosine-3'-phosphate
  modified_base 16: mod_base = OTHER; note = 2'-O-methyladenosine-3'-phosphate
  modified_base 17: mod_base = OTHER; note = 2'-O-methyladenosine-3'-phosphate
  modified_base 18: mod_base = OTHER; note = 2'-O-methylguanosine-3'-phosphate
  modified_base 19: mod_base = OTHER; note = 2'-O-methyluridine-3'-phosphate
  modified_base 20: mod_base = OTHER; note = 2'-O-methylcytidine-3'-phosphate
  modified_base 21: mod_base = OTHER; note = 2'-O-methyluridine-3'-phosphate N-[tris(GalNAc-alkyl)-amidodecanoyl)]-4-hydroxyprolinol Hyp-(GalNAc-alkyl)3
tggaagggaaggtggaagtct

SEQ ID NO: 2713 - RNA, 23 nt, synthetic construct
  source 1..23: mol_type = other RNA; note = Description of Artificial Sequence: Synthetic oligonucleotide
  modified_base 1: mod_base = OTHER; note = 2'-O-methyladenosine-3'-phosphorothioate
  modified_base 2: mod_base = OTHER; note = 2'-fluoroguanosine-3'-phosphorothioate
  modified_base 3: mod_base = OTHER; note = 2'-O-methyladenosine-3'-phosphate
  modified_base 4: mod_base = OTHER; note = 2'-O-methylcytidine-3'-phosphate
  modified_base 5: mod_base = OTHER; note = 2'-O-methyluridine-3'-phosphate
  modified_base 6: mod_base = OTHER; note = 2'-fluorouridine-3'-phosphate
  modified_base 7: mod_base = OTHER; note = 2'-O-methylcytidine-3'-phosphate
  modified_base 8: mod_base = OTHER; note = 2'-fluorocytidine-3'-phosphate
  modified_base 9: mod_base = OTHER; note = 2'-fluoroadenosine-3'-phosphate
  modified_base 10: mod_base = OTHER; note = 2'-O-methylcytidine-3'-phosphate
  modified_base 11: mod_base = OTHER; note = 2'-O-methylcytidine-3'-phosphate
  modified_base 12: mod_base = OTHER; note = 2'-O-methyluridine-3'-phosphate
  modified_base 13: mod_base = OTHER; note = 2'-O-methyluridine-3'-phosphate
  modified_base 14: mod_base = OTHER; note = 2'-fluorocytidine-3'-phosphate
  modified_base 15: mod_base = OTHER; note = 2'-O-methylcytidine-3'-phosphate
  modified_base 16: mod_base = OTHER; note = 2'-fluorocytidine-3'-phosphate
  modified_base 17: mod_base = OTHER; note = 2'-O-methyluridine-3'-phosphate
  modified_base 18: mod_base = OTHER; note = 2'-O-methyluridine-3'-phosphate
  modified_base 19: mod_base = OTHER; note = 2'-O-methylcytidine-3'-phosphate
  modified_base 20: mod_base = OTHER; note = 2'-O-methylcytidine-3'-phosphate
  modified_base 21: mod_base = OTHER; note = 2'-O-methyladenosine-3'-phosphorothioate
  modified_base 22: mod_base = OTHER; note = 2'-O-methylcytidine-3'-phosphorothioate
  modified_base 23: mod_base = OTHER; note = 2'-O-methyladenosine-3'-phosphate
agacttccaccttcccttccaca

SEQ ID NO: 2714 - RNA, 21 nt, synthetic construct
  source 1..21: mol_type = other RNA; note = Description of Artificial Sequence: Synthetic oligonucleotide
  modified_base 1: mod_base = OTHER; note = 2'-O-methyluridine-3'-phosphorothioate
  modified_base 2: mod_base = OTHER; note = 2'-O-methylguanosine-3'-phosphorothioate
  modified_base 3: mod_base = OTHER; note = 2'-O-methylcytidine-3'-phosphate
  modified_base 4: mod_base = OTHER; note = 2'-O-methyluridine-3'-phosphate
  modified_base 5: mod_base = OTHER; note = 2'-O-methyladenosine-3'-phosphate
  modified_base 6: mod_base = OTHER; note = 2'-O-methyladenosine-3'-phosphate
  modified_base 7: mod_base = OTHER; note = 2'-fluoroadenosine-3'-phosphate
  modified_base 8: mod_base = OTHER; note = 2'-O-methyluridine-3'-phosphate
  modified_base 9: mod_base = OTHER; note = 2'-fluorocytidine-3'-phosphate
  modified_base 10: mod_base = OTHER; note = 2'-fluoroadenosine-3'-phosphate
  modified_base 11: mod_base = OTHER; note = 2'-fluoroguanosine-3'-phosphate
  modified_base 12: mod_base = OTHER; note = 2'-O-methyluridine-3'-phosphate
  modified_base 13: mod_base = OTHER; note = 2'-O-methyladenosine-3'-phosphate
  modified_base 14: mod_base = OTHER; note = 2'-O-methylcytidine-3'-phosphate
  modified_base 15: mod_base = OTHER; note = 2'-O-methyluridine-3'-phosphate
  modified_base 16: mod_base = OTHER; note = 2'-O-methyluridine-3'-phosphate
  modified_base 17: mod_base = OTHER; note = 2'-O-methylcytidine-3'-phosphate
  modified_base 18: mod_base = OTHER; note = 2'-O-methylcytidine-3'-phosphate
  modified_base 19: mod_base = OTHER; note = 2'-O-methyladenosine-3'-phosphate
  modified_base 20: mod_base = OTHER; note = 2'-O-methyladenosine-3'-phosphate
  modified_base 21: mod_base = OTHER; note = 2'-O-methyladenosine-3'-phosphate N-[tris(GalNAc-alkyl)-amidodecanoyl)]-4-hydroxyprolinol Hyp-(GalNAc-alkyl)3
tgctaaatcagtacttccaaa

SEQ ID NO: 2715 - RNA, 23 nt, synthetic construct
  source 1..23: mol_type = other RNA; note = Description of Artificial Sequence: Synthetic oligonucleotide
  modified_base 1: mod_base = OTHER; note = 2'-O-methyluridine-3'-phosphorothioate
  modified_base 2: mod_base = OTHER; note = 2'-fluorouridine -3'-phosphorothioate
  modified_base 3: mod_base = OTHER; note = 2'-O-methyluridine-3'-phosphate
  modified_base 4: mod_base = OTHER; note = 2'-O-methylguanosine-3'-phosphate
  modified_base 5: mod_base = OTHER; note = 2'-O-methylguanosine-3'-phosphate
  modified_base 6: mod_base = OTHER; note = 2'-fluoroadenosine-3'-phosphate
  modified_base 7: mod_base = OTHER; note = 2'-O-methyladenosine-3'-phosphate
  modified_base 8: mod_base = OTHER; note = 2'-fluoroguanosine-3'-phosphate
  modified_base 9: mod_base = OTHER; note = 2'-fluorouridine-3'-phosphate
  modified_base 10: mod_base = OTHER; note = 2'-O-methyladenosine-3'-phosphate
  modified_base 11: mod_base = OTHER; note = 2'-O-methylcytidine-3'-phosphate
  modified_base 12: mod_base = OTHER; note = 2'-O-methyluridine-3'-phosphate
  modified_base 13: mod_base = OTHER; note = 2'-O-methylguanosine-3'-phosphate
  modified_base 14: mod_base = OTHER; note = 2'-fluoroadenosine-3'-phosphate
  modified_base 15: mod_base = OTHER; note = 2'-O-methyluridine-3'-phosphate
  modified_base 16: mod_base = OTHER; note = 2'-fluorouridine-3'-phosphate
  modified_base 17: mod_base = OTHER; note = 2'-O-methyluridine-3'-phosphate
  modified_base 18: mod_base = OTHER; note = 2'-O-methyladenosine-3'-phosphate
  modified_base 19: mod_base = OTHER; note = 2'-O-methylguanosine-3'-phosphate
  modified_base 20: mod_base = OTHER; note = 2'-O-methylcytidine-3'-phosphate
  modified_base 21: mod_base = OTHER; note = 2'-O-methyladenosine-3'-phosphorothioate
  modified_base 22: mod_base = OTHER; note = 2'-O-methyluridine-3'-phosphorothioate
  modified_base 23: mod_base = OTHER; note = 2'-O-methylguanosine-3'-phosphate
tttggaagtactgatttagcatg

SEQ ID NO: 2716 - RNA, 21 nt, synthetic construct
  source 1..21: mol_type = other RNA; note = Description of Artificial Sequence: Synthetic oligonucleotide
  modified_base 1: mod_base = OTHER; note = 2'-O-methylguanosine-3'-phosphorothioate
  modified_base 2: mod_base = OTHER; note = 2'-O-methylcytidine-3'-phosphorothioate
  modified_base 3: mod_base = OTHER; note = 2'-O-methyluridine-3'-phosphate
  modified_base 4: mod_base = OTHER; note = 2'-O-methyladenosine-3'-phosphate
  modified_base 5: mod_base = OTHER; note = 2'-O-methyladenosine-3'-phosphate
  modified_base 6: mod_base = OTHER; note = 2'-O-methyladenosine-3'-phosphate
  modified_base 7: mod_base = OTHER; note = 2'-fluorouridine-3'-phosphate
  modified_base 8: mod_base = OTHER; note = 2'-O-methylcytidine-3'-phosphate
  modified_base 9: mod_base = OTHER; note = 2'-fluoroadenosine-3'-phosphate
  modified_base 10: mod_base = OTHER; note = 2'-fluoroguanosine-3'-phosphate
  modified_base 11: mod_base = OTHER; note = 2'-fluorouridine-3'-phosphate
  modified_base 12: mod_base = OTHER; note = 2'-O-methyladenosine-3'-phosphate
  modified_base 13: mod_base = OTHER; note = 2'-O-methylcytidine-3'-phosphate
  modified_base 14: mod_base = OTHER; note = 2'-O-methyluridine-3'-phosphate
  modified_base 15: mod_base = OTHER; note = 2'-O-methyluridine-3'-phosphate
  modified_base 16: mod_base = OTHER; note = 2'-O-methylcytidine-3'-phosphate
  modified_base 17: mod_base = OTHER; note = 2'-O-methylcytidine-3'-phosphate
  modified_base 18: mod_base = OTHER; note = 2'-O-methyladenosine-3'-phosphate
  modified_base 19: mod_base = OTHER; note = 2'-O-methyladenosine-3'-phosphate
  modified_base 20: mod_base = OTHER; note = 2'-O-methyladenosine-3'-phosphate
  modified_base 21: mod_base = OTHER; note = 2'-O-methylguanosine-3'-phosphate N-[tris(GalNAc-alkyl)-amidodecanoyl)]-4-hydroxyprolinol Hyp-(GalNAc-alkyl)3
gctaaatcagtacttccaaag

SEQ ID NO: 2717 - RNA, 23 nt, synthetic construct
  source 1..23: mol_type = other RNA; note = Description of Artificial Sequence: Synthetic oligonucleotide
  modified_base 1: mod_base = OTHER; note = 2'-O-methylcytidine-3'-phosphorothioate
  modified_base 2: mod_base = OTHER; note = 2'-fluorouridine -3'-phosphorothioate
  modified_base 3: mod_base = OTHER; note = 2'-O-methyluridine-3'-phosphate
  modified_base 4: mod_base = OTHER; note = 2'-O-methyluridine-3'-phosphate
  modified_base 5: mod_base = OTHER; note = 2'-O-methylguanosine-3'-phosphate
  modified_base 6: mod_base = OTHER; note = 2'-fluoroguanosine-3'-phosphate
  modified_base 7: mod_base = OTHER; note = 2'-O-methyladenosine-3'-phosphate
  modified_base 8: mod_base = OTHER; note = 2'-fluoroadenosine-3'-phosphate
  modified_base 9: mod_base = OTHER; note = 2'-fluoroguanosine-3'-phosphate
  modified_base 10: mod_base = OTHER; note = 2'-O-methyluridine-3'-phosphate
  modified_base 11: mod_base = OTHER; note = 2'-O-methyladenosine-3'-phosphate
  modified_base 12: mod_base = OTHER; note = 2'-O-methylcytidine-3'-phosphate
  modified_base 13: mod_base = OTHER; note = 2'-O-methyluridine-3'-phosphate
  modified_base 14: mod_base = OTHER; note = 2'-fluoroguanosine-3'-phosphate
  modified_base 15: mod_base = OTHER; note = 2'-O-methyladenosine-3'-phosphate
  modified_base 16: mod_base = OTHER; note = 2'-fluorouridine-3'-phosphate
  modified_base 17: mod_base = OTHER; note = 2'-O-methyluridine-3'-phosphate
  modified_base 18: mod_base = OTHER; note = 2'-O-methyluridine-3'-phosphate
  modified_base 19: mod_base = OTHER; note = 2'-O-methyladenosine-3'-phosphate
  modified_base 20: mod_base = OTHER; note = 2'-O-methylguanosine-3'-phosphate
  modified_base 21: mod_base = OTHER; note = 2'-O-methylcytidine-3'-phosphorothioate
  modified_base 22: mod_base = OTHER; note = 2'-O-methyladenosine-3'-phosphorothioate
  modified_base 23: mod_base = OTHER; note = 2'-O-methyluridine-3'-phosphate
ctttggaagtactgatttagcat

SEQ ID NO: 2718 - RNA, 21 nt, synthetic construct
  source 1..21: mol_type = other RNA; note = Description of Artificial Sequence: Synthetic oligonucleotide
  modified_base 1: mod_base = OTHER; note = 2'-O-methyladenosine-3'-phosphorothioate
  modified_base 2: mod_base = OTHER; note = 2'-O-methyladenosine-3'-phosphorothioate
  modified_base 3: mod_base = OTHER; note = 2'-O-methylcytidine-3'-phosphate
  modified_base 4: mod_base = OTHER; note = 2'-O-methyladenosine-3'-phosphate
  modified_base 5: mod_base = OTHER; note = 2'-O-methyluridine-3'-phosphate
  modified_base 6: mod_base = OTHER; note = 2'-O-methylguanosine-3'-phosphate
  modified_base 7: mod_base = OTHER; note = 2'-fluorocytidine-3'-phosphate
  modified_base 8: mod_base = OTHER; note = 2'-O-methyluridine-3'-phosphate
  modified_base 9: mod_base = OTHER; note = 2'-fluoroadenosine-3'-phosphate
  modified_base 10: mod_base = OTHER; note = 2'-fluoroadenosine-3'-phosphate
  modified_base 11: mod_base = OTHER; note = 2'-fluoroadenosine-3'-phosphate
  modified_base 12: mod_base = OTHER; note = 2'-O-methyluridine-3'-phosphate
  modified_base 13: mod_base = OTHER; note = 2'-O-methylcytidine-3'-phosphate
  modified_base 14: mod_base = OTHER; note = 2'-O-methyladenosine-3'-phosphate
  modified_base 15: mod_base = OTHER; note = 2'-O-methylguanosine-3'-phosphate
  modified_base 16: mod_base = OTHER; note = 2'-O-methyluridine-3'-phosphate
  modified_base 17: mod_base = OTHER; note = 2'-O-methyladenosine-3'-phosphate
  modified_base 18: mod_base = OTHER; note = 2'-O-methylcytidine-3'-phosphate
  modified_base 19: mod_base = OTHER; note = 2'-O-methyluridine-3'-phosphate
  modified_base 20: mod_base = OTHER; note = 2'-O-methyluridine-3'-phosphate
  modified_base 21: mod_base = OTHER; note = 2'-O-methylcytidine-3'-phosphate N-[tris(GalNAc-alkyl)-amidodecanoyl)]-4-hydroxyprolinol Hyp-(GalNAc-alkyl)3
aacatgctaaatcagtacttc

SEQ ID NO: 2719 - RNA, 23 nt, synthetic construct
  source 1..23: mol_type = other RNA; note = Description of Artificial Sequence: Synthetic oligonucleotide
  modified_base 1: mod_base = OTHER; note = 2'-O-methylguanosine-3'-phosphorothioate
  modified_base 2: mod_base = OTHER; note = 2'-fluoroadenosine-3'-phosphorothioate
  modified_base 3: mod_base = OTHER; note = 2'-O-methyladenosine-3'-phosphate
  modified_base 4: mod_base = OTHER; note = 2'-O-methylguanosine-3'-phosphate
  modified_base 5: mod_base = OTHER; note = 2'-O-methyluridine-3'-phosphate
  modified_base 6: mod_base = OTHER; note = 2'-fluoroadenosine-3'-phosphate
  modified_base 7: mod_base = OTHER; note = 2'-O-methylcytidine-3'-phosphate
  modified_base 8: mod_base = OTHER; note = 2'-fluorouridine-3'-phosphate
  modified_base 9: mod_base = OTHER; note = 2'-fluoroguanosine-3'-phosphate
  modified_base 10: mod_base = OTHER; note = 2'-O-methyladenosine-3'-phosphate
  modified_base 11: mod_base = OTHER; note = 2'-O-methyluridine-3'-phosphate
  modified_base 12: mod_base = OTHER; note = 2'-O-methyluridine-3'-phosphate
  modified_base 13: mod_base = OTHER; note = 2'-O-methyluridine-3'-phosphate
  modified_base 14: mod_base = OTHER; note = 2'-fluoroadenosine-3'-phosphate
  modified_base 15: mod_base = OTHER; note = 2'-O-methylguanosine-3'-phosphate
  modified_base 16: mod_base = OTHER; note = 2'-fluorocytidine-3'-phosphate
  modified_base 17: mod_base = OTHER; note = 2'-O-methyladenosine-3'-phosphate
  modified_base 18: mod_base = OTHER; note = 2'-O-methyluridine-3'-phosphate
  modified_base 19: mod_base = OTHER; note = 2'-O-methylguanosine-3'-phosphate
  modified_base 20: mod_base = OTHER; note = 2'-O-methyluridine-3'-phosphate
  modified_base 21: mod_base = OTHER; note = 2'-O-methyluridine-3'-phosphorothioate
  modified_base 22: mod_base = OTHER; note = 2'-O-methylguanosine-3'-phosphorothioate
  modified_base 23: mod_base = OTHER; note = 2'-O-methyluridine-3'-phosphate
gaagtactgatttagcatgttgt

SEQ ID NO: 2720 - RNA, 21 nt, synthetic construct
  source 1..21: mol_type = other RNA; note = Description of Artificial Sequence: Synthetic oligonucleotide
  modified_base 1: mod_base = OTHER; note = 2'-O-methylcytidine-3'-phosphorothioate
  modified_base 2: mod_base = OTHER; note = 2'-O-methyladenosine-3'-phosphorothioate
  modified_base 3: mod_base = OTHER; note = 2'-O-methyladenosine-3'-phosphate
  modified_base 4: mod_base = OTHER; note = 2'-O-methylcytidine-3'-phosphate
  modified_base 5: mod_base = OTHER; note = 2'-O-methyladenosine-3'-phosphate
  modified_base 6: mod_base = OTHER; note = 2'-O-methyluridine-3'-phosphate
  modified_base 7: mod_base = OTHER; note = 2'-fluoroguanosine-3'-phosphate
  modified_base 8: mod_base = OTHER; note = 2'-O-methylcytidine-3'-phosphate
  modified_base 9: mod_base = OTHER; note = 2'-fluorouridine-3'-phosphate
  modified_base 10: mod_base = OTHER; note = 2'-fluoroadenosine-3'-phosphate
  modified_base 11: mod_base = OTHER; note = 2'-fluoroadenosine-3'-phosphate
  modified_base 12: mod_base = OTHER; note = 2'-O-methyladenosine-3'-phosphate
  modified_base 13: mod_base = OTHER; note = 2'-O-methyluridine-3'-phosphate
  modified_base 14: mod_base = OTHER; note = 2'-O-methylcytidine-3'-phosphate
  modified_base 15: mod_base = OTHER; note = 2'-O-methyladenosine-3'-phosphate
  modified_base 16: mod_base = OTHER; note = 2'-O-methylguanosine-3'-phosphate
  modified_base 17: mod_base = OTHER; note = 2'-O-methyluridine-3'-phosphate
  modified_base 18: mod_base = OTHER; note = 2'-O-methyladenosine-3'-phosphate
  modified_base 19: mod_base = OTHER; note = 2'-O-methylcytidine-3'-phosphate
  modified_base 20: mod_base = OTHER; note = 2'-O-methyluridine-3'-phosphate
  modified_base 21: mod_base = OTHER; note = 2'-O-methyluridine-3'-phosphate N-[tris(GalNAc-alkyl)-amidodecanoyl)]-4-hydroxyprolinol Hyp-(GalNAc-alkyl)3
caacatgctaaatcagtactt

SEQ ID NO: 2721 - RNA, 23 nt, synthetic construct
  source 1..23: mol_type = other RNA; note = Description of Artificial Sequence: Synthetic oligonucleotide
  modified_base 1: mod_base = OTHER; note = 2'-O-methyladenosine-3'-phosphorothioate
  modified_base 2: mod_base = OTHER; note = 2'-fluoroadenosine-3'-phosphorothioate
  modified_base 3: mod_base = OTHER; note = 2'-O-methylguanosine-3'-phosphate
  modified_base 4: mod_base = OTHER; note = 2'-O-methyluridine-3'-phosphate
  modified_base 5: mod_base = OTHER; note = 2'-O-methyladenosine-3'-phosphate
  modified_base 6: mod_base = OTHER; note = 2'-fluorocytidine-3'-phosphate
  modified_base 7: mod_base = OTHER; note = 2'-O-methyluridine-3'-phosphate
  modified_base 8: mod_base = OTHER; note = 2'-fluoroguanosine-3'-phosphate
  modified_base 9: mod_base = OTHER; note = 2'-fluoroadenosine-3'-phosphate
  modified_base 10: mod_base = OTHER; note = 2'-O-methyluridine-3'-phosphate
  modified_base 11: mod_base = OTHER; note = 2'-O-methyluridine-3'-phosphate
  modified_base 12: mod_base = OTHER; note = 2'-O-methyluridine-3'-phosphate
  modified_base 13: mod_base = OTHER; note = 2'-O-methyladenosine-3'-phosphate
  modified_base 14: mod_base = OTHER; note = 2'-fluoroguanosine-3'-phosphate
  modified_base 15: mod_base = OTHER; note = 2'-O-methylcytidine-3'-phosphate
  modified_base 16: mod_base = OTHER; note = 2'-fluoroadenosine-3'-phosphate
  modified_base 17: mod_base = OTHER; note = 2'-O-methyluridine-3'-phosphate
  modified_base 18: mod_base = OTHER; note = 2'-O-methylguanosine-3'-phosphate
  modified_base 19: mod_base = OTHER; note = 2'-O-methyluridine-3'-phosphate
  modified_base 20: mod_base = OTHER; note = 2'-O-methyluridine-3'-phosphate
  modified_base 21: mod_base = OTHER; note = 2'-O-methylguanosine-3'-phosphorothioate
  modified_base 22: mod_base = OTHER; note = 2'-O-methyluridine-3'-phosphorothioate
  modified_base 23: mod_base = OTHER; note = 2'-O-methyluridine-3'-phosphate
aagtactgatttagcatgttgtt

SEQ ID NO: 2722 - RNA, 21 nt, synthetic construct
  source 1..21: mol_type = other RNA; note = Description of Artificial Sequence: Synthetic oligonucleotide
  modified_base 1: mod_base = OTHER; note = 2'-O-methylcytidine-3'-phosphorothioate
  modified_base 2: mod_base = OTHER; note = 2'-O-methylcytidine-3'-phosphorothioate
  modified_base 3: mod_base = OTHER; note = 2'-O-methyladenosine-3'-phosphate
  modified_base 4: mod_base = OTHER; note = 2'-O-methylcytidine-3'-phosphate
  modified_base 5: mod_base = OTHER; note = 2'-O-methyladenosine-3'-phosphate
  modified_base 6: mod_base = OTHER; note = 2'-O-methyladenosine-3'-phosphate
  modified_base 7: mod_base = OTHER; note = 2'-fluorocytidine-3'-phosphate
  modified_base 8: mod_base = OTHER; note = 2'-O-methyluridine-3'-phosphate
  modified_base 9: mod_base = OTHER; note = 2'-fluorocytidine-3'-phosphate
  modified_base 10: mod_base = OTHER; note = 2'-fluoroadenosine-3'-phosphate
  modified_base 11: mod_base = OTHER; note = 2'-fluoroguanosine-3'-phosphate
  modified_base 12: mod_base = OTHER; note = 2'-O-methylguanosine-3'-phosphate
  modified_base 13: mod_base = OTHER; note = 2'-O-methyladenosine-3'-phosphate
  modified_base 14: mod_base = OTHER; note = 2'-O-methyluridine-3'-phosphate
  modified_base 15: mod_base = OTHER; note = 2'-O-methylguanosine-3'-phosphate
  modified_base 16: mod_base = OTHER; note = 2'-O-methyladenosine-3'-phosphate
  modified_base 17: mod_base = OTHER; note = 2'-O-methyladenosine-3'-phosphate
  modified_base 18: mod_base = OTHER; note = 2'-O-methyladenosine-3'-phosphate
  modified_base 19: mod_base = OTHER; note = 2'-O-methyladenosine-3'-phosphate
  modified_base 20: mod_base = OTHER; note = 2'-O-methyladenosine-3'-phosphate
  modified_base 21: mod_base = OTHER; note = 2'-O-methyluridine-3'-phosphate N-[tris(GalNAc-alkyl)-amidodecanoyl)]-4-hydroxyprolinol Hyp-(GalNAc-alkyl)3
ccacaactcaggatgaaaaat

SEQ ID NO: 2723 - RNA, 23 nt, synthetic construct
  source 1..23: mol_type = other RNA; note = Description of Artificial Sequence: Synthetic oligonucleotide
  modified_base 1: mod_base = OTHER; note = 2'-O-methyladenosine-3'-phosphorothioate
  modified_base 2: mod_base = OTHER; note = 2'-fluorouridine -3'-phosphorothioate
  modified_base 3: mod_base = OTHER; note = 2'-O-methyluridine-3'-phosphate
  modified_base 4: mod_base = OTHER; note = 2'-O-methyluridine-3'-phosphate
  modified_base 5: mod_base = OTHER; note = 2'-O-methyluridine-3'-phosphate
  modified_base 6: mod_base = OTHER; note = 2'-fluorouridine-3'-phosphate
  modified_base 7: mod_base = OTHER; note = 2'-O-methylcytidine-3'-phosphate
  modified_base 8: mod_base = OTHER; note = 2'-fluoroadenosine-3'-phosphate
  modified_base 9: mod_base = OTHER; note = 2'-fluorouridine-3'-phosphate
  modified_base 10: mod_base = OTHER; note = 2'-O-methylcytidine-3'-phosphate
  modified_base 11: mod_base = OTHER; note = 2'-O-methylcytidine-3'-phosphate
  modified_base 12: mod_base = OTHER; note = 2'-O-methyluridine-3'-phosphate
  modified_base 13: mod_base = OTHER; note = 2'-O-methylguanosine-3'-phosphate
  modified_base 14: mod_base = OTHER; note = 2'-fluoroadenosine-3'-phosphate
  modified_base 15: mod_base = OTHER; note = 2'-O-methylguanosine-3'-phosphate
  modified_base 16: mod_base = OTHER; note = 2'-fluorouridine-3'-phosphate
  modified_base 17: mod_base = OTHER; note = 2'-O-methyluridine-3'-phosphate
  modified_base 18: mod_base = OTHER; note = 2'-O-methylguanosine-3'-phosphate
  modified_base 19: mod_base = OTHER; note = 2'-O-methyluridine-3'-phosphate
  modified_base 20: mod_base = OTHER; note = 2'-O-methylguanosine-3'-phosphate
  modified_base 21: mod_base = OTHER; note = 2'-O-methylguanosine-3'-phosphorothioate
  modified_base 22: mod_base = OTHER; note = 2'-O-methylcytidine-3'-phosphorothioate
  modified_base 23: mod_base = OTHER; note = 2'-O-methylguanosine-3'-phosphate
atttttcatcctgagttgtggcg

SEQ ID NO: 2724 - RNA, 21 nt, synthetic construct
  source 1..21: mol_type = other RNA; note = Description of Artificial Sequence: Synthetic oligonucleotide
  modified_base 1: mod_base = OTHER; note = 2'-O-methylcytidine-3'-phosphorothioate
  modified_base 2: mod_base = OTHER; note = 2'-O-methyladenosine-3'-phosphorothioate
  modified_base 3: mod_base = OTHER; note = 2'-O-methylcytidine-3'-phosphate
  modified_base 4: mod_base = OTHER; note = 2'-O-methyladenosine-3'-phosphate
  modified_base 5: mod_base = OTHER; note = 2'-O-methyladenosine-3'-phosphate
  modified_base 6: mod_base = OTHER; note = 2'-O-methylcytidine-3'-phosphate
  modified_base 7: mod_base = OTHER; note = 2'-fluorouridine-3'-phosphate
  modified_base 8: mod_base = OTHER; note = 2'-O-methylcytidine-3'-phosphate
  modified_base 9: mod_base = OTHER; note = 2'-fluoroadenosine-3'-phosphate
  modified_base 10: mod_base = OTHER; note = 2'-fluoroguanosine-3'-phosphate
  modified_base 11: mod_base = OTHER; note = 2'-fluoroguanosine-3'-phosphate
  modified_base 12: mod_base = OTHER; note = 2'-O-methyladenosine-3'-phosphate
  modified_base 13: mod_base = OTHER; note = 2'-O-methyluridine-3'-phosphate
  modified_base 14: mod_base = OTHER; note = 2'-O-methylguanosine-3'-phosphate
  modified_base 15: mod_base = OTHER; note = 2'-O-methyladenosine-3'-phosphate
  modified_base 16: mod_base = OTHER; note = 2'-O-methyladenosine-3'-phosphate
  modified_base 17: mod_base = OTHER; note = 2'-O-methyladenosine-3'-phosphate
  modified_base 18: mod_base = OTHER; note = 2'-O-methyladenosine-3'-phosphate
  modified_base 19: mod_base = OTHER; note = 2'-O-methyladenosine-3'-phosphate
  modified_base 20: mod_base = OTHER; note = 2'-O-methyluridine-3'-phosphate
  modified_base 21: mod_base = OTHER; note = 2'-O-methyluridine-3'-phosphate N-[tris(GalNAc-alkyl)-amidodecanoyl)]-4-hydroxyprolinol Hyp-(GalNAc-alkyl)3
cacaactcaggatgaaaaatt

SEQ ID NO: 2725 - RNA, 23 nt, synthetic construct
  source 1..23: mol_type = other RNA; note = Description of Artificial Sequence: Synthetic oligonucleotide
  modified_base 1: mod_base = OTHER; note = 2'-O-methyladenosine-3'-phosphorothioate
  modified_base 2: mod_base = OTHER; note = 2'-fluoroadenosine-3'-phosphorothioate
  modified_base 3: mod_base = OTHER; note = 2'-O-methyluridine-3'-phosphate
  modified_base 4: mod_base = OTHER; note = 2'-O-methyluridine-3'-phosphate
  modified_base 5: mod_base = OTHER; note = 2'-O-methyluridine-3'-phosphate
  modified_base 6: mod_base = OTHER; note = 2'-fluorouridine-3'-phosphate
  modified_base 7: mod_base = OTHER; note = 2'-O-methyluridine-3'-phosphate
  modified_base 8: mod_base = OTHER; note = 2'-fluorocytidine-3'-phosphate
  modified_base 9: mod_base = OTHER; note = 2'-fluoroadenosine-3'-phosphate
  modified_base 10: mod_base = OTHER; note = 2'-O-methyluridine-3'-phosphate
  modified_base 11: mod_base = OTHER; note = 2'-O-methylcytidine-3'-phosphate
  modified_base 12: mod_base = OTHER; note = 2'-O-methylcytidine-3'-phosphate
  modified_base 13: mod_base = OTHER; note = 2'-O-methyluridine-3'-phosphate
  modified_base 14: mod_base = OTHER; note = 2'-fluoroguanosine-3'-phosphate
  modified_base 15: mod_base = OTHER; note = 2'-O-methyladenosine-3'-phosphate
  modified_base 16: mod_base = OTHER; note = 2'-fluoroguanosine-3'-phosphate
  modified_base 17: mod_base = OTHER; note = 2'-O-methyluridine-3'-phosphate
  modified_base 18: mod_base = OTHER; note = 2'-O-methyluridine-3'-phosphate
  modified_base 19: mod_base = OTHER; note = 2'-O-methylguanosine-3'-phosphate
  modified_base 20: mod_base = OTHER; note = 2'-O-methyluridine-3'-phosphate
  modified_base 21: mod_base = OTHER; note = 2'-O-methylguanosine-3'-phosphorothioate
  modified_base 22: mod_base = OTHER; note = 2'-O-methylguanosine-3'-phosphorothioate
  modified_base 23: mod_base = OTHER; note = 2'-O-methylcytidine-3'-phosphate
aatttttcatcctgagttgtggc

SEQ ID NO: 2726 - RNA, 21 nt, synthetic construct
  source 1..21: mol_type = other RNA; note = Description of Artificial Sequence: Synthetic oligonucleotide
  modified_base 1: mod_base = OTHER; note = 2'-O-methylguanosine-3'-phosphorothioate
  modified_base 2: mod_base = OTHER; note = 2'-O-methylcytidine-3'-phosphorothioate
  modified_base 3: mod_base = OTHER; note = 2'-O-methylcytidine-3'-phosphate
  modified_base 4: mod_base = OTHER; note = 2'-O-methylguanosine-3'-phosphate
  modified_base 5: mod_base = OTHER; note = 2'-O-methylcytidine-3'-phosphate
  modified_base 6: mod_base = OTHER; note = 2'-O-methylcytidine-3'-phosphate
  modified_base 7: mod_base = OTHER; note = 2'-fluoroadenosine-3'-phosphate
  modified_base 8: mod_base = OTHER; note = 2'-O-methylcytidine-3'-phosphate
  modified_base 9: mod_base = OTHER; note = 2'-fluoroadenosine-3'-phosphate
  modified_base 10: mod_base = OTHER; note = 2'-fluoroadenosine-3'-phosphate
  modified_base 11: mod_base = OTHER; note = 2'-fluorocytidine-3'-phosphate
  modified_base 12: mod_base = OTHER; note = 2'-O-methyluridine-3'-phosphate
  modified_base 13: mod_base = OTHER; note = 2'-O-methylcytidine-3'-phosphate
  modified_base 14: mod_base = OTHER; note = 2'-O-methyladenosine-3'-phosphate
  modified_base 15: mod_base = OTHER; note = 2'-O-methylguanosine-3'-phosphate
  modified_base 16: mod_base = OTHER; note = 2'-O-methylguanosine-3'-phosphate
  modified_base 17: mod_base = OTHER; note = 2'-O-methyladenosine-3'-phosphate
  modified_base 18: mod_base = OTHER; note = 2'-O-methyluridine-3'-phosphate
  modified_base 19: mod_base = OTHER; note = 2'-O-methylguanosine-3'-phosphate
  modified_base 20: mod_base = OTHER; note = 2'-O-methyladenosine-3'-phosphate
  modified_base 21: mod_base = OTHER; note = 2'-O-methyladenosine-3'-phosphate N-[tris(GalNAc-alkyl)-amidodecanoyl)]-4-hydroxyprolinol Hyp-(GalNAc-alkyl)3
gccgccacaactcaggatgaa

SEQ ID NO: 2727 - RNA, 23 nt, synthetic construct
  source 1..23: mol_type = other RNA; note = Description of Artificial Sequence: Synthetic oligonucleotide
  modified_base 1: mod_base = OTHER; note = 2'-O-methyluridine-3'-phosphorothioate
  modified_base 2: mod_base = OTHER; note = 2'-fluorouridine -3'-phosphorothioate
  modified_base 3: mod_base = OTHER; note = 2'-O-methylcytidine-3'-phosphate
  modified_base 4: mod_base = OTHER; note = 2'-O-methyladenosine-3'-phosphate
  modified_base 5: mod_base = OTHER; note = 2'-O-methyluridine-3'-phosphate
  modified_base 6: mod_base = OTHER; note = 2'-fluorocytidine-3'-phosphate
  modified_base 7: mod_base = OTHER; note = 2'-O-methylcytidine-3'-phosphate
  modified_base 8: mod_base = OTHER; note = 2'-fluorouridine-3'-phosphate
  modified_base 9: mod_base = OTHER; note = 2'-fluoroguanosine-3'-phosphate
  modified_base 10: mod_base = OTHER; note = 2'-O-methyladenosine-3'-phosphate
  modified_base 11: mod_base = OTHER; note = 2'-O-methylguanosine-3'-phosphate
  modified_base 12: mod_base = OTHER; note = 2'-O-methyluridine-3'-phosphate
  modified_base 13: mod_base = OTHER; note = 2'-O-methyluridine-3'-phosphate
  modified_base 14: mod_base = OTHER; note = 2'-fluoroguanosine-3'-phosphate
  modified_base 15: mod_base = OTHER; note = 2'-O-methyluridine-3'-phosphate
  modified_base 16: mod_base = OTHER; note = 2'-fluoroguanosine-3'-phosphate
  modified_base 17: mod_base = OTHER; note = 2'-O-methylguanosine-3'-phosphate
  modified_base 18: mod_base = OTHER; note = 2'-O-methylcytidine-3'-phosphate
  modified_base 19: mod_base = OTHER; note = 2'-O-methylguanosine-3'-phosphate
  modified_base 20: mod_base = OTHER; note = 2'-O-methylguanosine-3'-phosphate
  modified_base 21: mod_base = OTHER; note = 2'-O-methylcytidine-3'-phosphorothioate
  modified_base 22: mod_base = OTHER; note = 2'-O-methyladenosine-3'-phosphorothioate
  modified_base 23: mod_base = OTHER; note = 2'-O-methylguanosine-3'-phosphate
ttcatcctgagttgtggcggcag

SEQ ID NO: 2728 - RNA, 21 nt, synthetic construct
  source 1..21: mol_type = other RNA; note = Description of Artificial Sequence: Synthetic oligonucleotide
  modified_base 1: mod_base = OTHER; note = 2'-O-methyluridine-3'-phosphorothioate
  modified_base 2: mod_base = OTHER; note = 2'-O-methylguanosine-3'-phosphorothioate
  modified_base 3: mod_base = OTHER; note = 2'-O-methylcytidine-3'-phosphate
  modified_base 4: mod_base = OTHER; note = 2'-O-methylcytidine-3'-phosphate
  modified_base 5: mod_base = OTHER; note = 2'-O-methylguanosine-3'-phosphate
  modified_base 6: mod_base = OTHER; note = 2'-O-methylcytidine-3'-phosphate
  modified_base 7: mod_base = OTHER; note = 2'-fluorocytidine-3'-phosphate
  modified_base 8: mod_base = OTHER; note = 2'-O-methyladenosine-3'-phosphate
  modified_base 9: mod_base = OTHER; note = 2'-fluorocytidine-3'-phosphate
  modified_base 10: mod_base = OTHER; note = 2'-fluoroadenosine-3'-phosphate
  modified_base 11: mod_base = OTHER; note = 2'-fluoroadenosine-3'-phosphate
  modified_base 12: mod_base = OTHER; note = 2'-O-methylcytidine-3'-phosphate
  modified_base 13: mod_base = OTHER; note = 2'-O-methyluridine-3'-phosphate
  modified_base 14: mod_base = OTHER; note = 2'-O-methylcytidine-3'-phosphate
  modified_base 15: mod_base = OTHER; note = 2'-O-methyladenosine-3'-phosphate
  modified_base 16: mod_base = OTHER; note = 2'-O-methylguanosine-3'-phosphate
  modified_base 17: mod_base = OTHER; note = 2'-O-methylguanosine-3'-phosphate
  modified_base 18: mod_base = OTHER; note = 2'-O-methyladenosine-3'-phosphate
  modified_base 19: mod_base = OTHER; note = 2'-O-methyluridine-3'-phosphate
  modified_base 20: mod_base = OTHER; note = 2'-O-methylguanosine-3'-phosphate
  modified_base 21: mod_base = OTHER; note = 2'-O-methyladenosine-3'-phosphate N-[tris(GalNAc-alkyl)-amidodecanoyl)]-4-hydroxyprolinol Hyp-(GalNAc-alkyl)3
tgccgccacaactcaggatga

SEQ ID NO: 2729 - RNA, 23 nt, synthetic construct
  source 1..23: mol_type = other RNA; note = Description of Artificial Sequence: Synthetic oligonucleotide
  modified_base 1: mod_base = OTHER; note = 2'-O-methyluridine-3'-phosphorothioate
  modified_base 2: mod_base = OTHER; note = 2'-fluorocytidine-3'-phosphorothioate
  modified_base 3: mod_base = OTHER; note = 2'-O-methyladenosine-3'-phosphate
  modified_base 4: mod_base = OTHER; note = 2'-O-methyluridine-3'-phosphate
  modified_base 5: mod_base = OTHER; note = 2'-O-methylcytidine-3'-phosphate
  modified_base 6: mod_base = OTHER; note = 2'-fluorocytidine-3'-phosphate
  modified_base 7: mod_base = OTHER; note = 2'-O-methyluridine-3'-phosphate
  modified_base 8: mod_base = OTHER; note = 2'-fluoroguanosine-3'-phosphate
  modified_base 9: mod_base = OTHER; note = 2'-fluoroadenosine-3'-phosphate
  modified_base 10: mod_base = OTHER; note = 2'-O-methylguanosine-3'-phosphate
  modified_base 11: mod_base = OTHER; note = 2'-O-methyluridine-3'-phosphate
  modified_base 12: mod_base = OTHER; note = 2'-O-methyluridine-3'-phosphate
  modified_base 13: mod_base = OTHER; note = 2'-O-methylguanosine-3'-phosphate
  modified_base 14: mod_base = OTHER; note = 2'-fluorouridine-3'-phosphate
  modified_base 15: mod_base = OTHER; note = 2'-O-methylguanosine-3'-phosphate
  modified_base 16: mod_base = OTHER; note = 2'-fluoroguanosine-3'-phosphate
  modified_base 17: mod_base = OTHER; note = 2'-O-methylcytidine-3'-phosphate
  modified_base 18: mod_base = OTHER; note = 2'-O-methylguanosine-3'-phosphate
  modified_base 19: mod_base = OTHER; note = 2'-O-methylguanosine-3'-phosphate
  modified_base 20: mod_base = OTHER; note = 2'-O-methylcytidine-3'-phosphate
  modified_base 21: mod_base = OTHER; note = 2'-O-methyladenosine-3'-phosphorothioate
  modified_base 22: mod_base = OTHER; note = 2'-O-methylguanosine-3'-phosphorothioate
  modified_base 23: mod_base = OTHER; note = 2'-O-methyluridine-3'-phosphate
tcatcctgagttgtggcggcagt

SEQ ID NO: 2730 - RNA, 21 nt, synthetic construct
  source 1..21: mol_type = other RNA; note = Description of Artificial Sequence: Synthetic oligonucleotide
  modified_base 1: mod_base = OTHER; note = 2'-O-methylguanosine-3'-phosphorothioate
  modified_base 2: mod_base = OTHER; note = 2'-O-methylcytidine-3'-phosphorothioate
  modified_base 3: mod_base = OTHER; note = 2'-O-methyladenosine-3'-phosphate
  modified_base 4: mod_base = OTHER; note = 2'-O-methyladenosine-3'-phosphate
  modified_base 5: mod_base = OTHER; note = 2'-O-methylcytidine-3'-phosphate
  modified_base 6: mod_base = OTHER; note = 2'-O-methylcytidine-3'-phosphate
  modified_base 7: mod_base = OTHER; note = 2'-fluoroguanosine-3'-phosphate
  modified_base 8: mod_base = OTHER; note = 2'-O-methyluridine-3'-phosphate
  modified_base 9: mod_base = OTHER; note = 2'-fluorocytidine-3'-phosphate
  modified_base 10: mod_base = OTHER; note = 2'-fluorouridine-3'-phosphate
  modified_base 11: mod_base = OTHER; note = 2'-fluoroguanosine-3'-phosphate
  modified_base 12: mod_base = OTHER; note = 2'-O-methylguanosine-3'-phosphate
  modified_base 13: mod_base = OTHER; note = 2'-O-methyladenosine-3'-phosphate
  modified_base 14: mod_base = OTHER; note = 2'-O-methyluridine-3'-phosphate
  modified_base 15: mod_base = OTHER; note = 2'-O-methylguanosine-3'-phosphate
  modified_base 16: mod_base = OTHER; note = 2'-O-methyladenosine-3'-phosphate
  modified_base 17: mod_base = OTHER; note = 2'-O-methyluridine-3'-phosphate
  modified_base 18: mod_base = OTHER; note = 2'-O-methylguanosine-3'-phosphate
  modified_base 19: mod_base = OTHER; note = 2'-O-methyluridine-3'-phosphate
  modified_base 20: mod_base = OTHER; note = 2'-O-methylguanosine-3'-phosphate
  modified_base 21: mod_base = OTHER; note = 2'-O-methylcytidine-3'-phosphate N-[tris(GalNAc-alkyl)-amidodecanoyl)]-4-hydroxyprolinol Hyp-(GalNAc-alkyl)3
gcaaccgtctggatgatgtgc

SEQ ID NO: 2731 - RNA, 23 nt, synthetic construct
  source 1..23: mol_type = other RNA; note = Description of Artificial Sequence: Synthetic oligonucleotide
  modified_base 1: mod_base = OTHER; note = 2'-O-methylguanosine-3'-phosphorothioate
  modified_base 2: mod_base = OTHER; note = 2'-fluorocytidine-3'-phosphorothioate
  modified_base 3: mod_base = OTHER; note = 2'-O-methyladenosine-3'-phosphate
  modified_base 4: mod_base = OTHER; note = 2'-O-methylcytidine-3'-phosphate
  modified_base 5: mod_base = OTHER; note = 2'-O-methyladenosine-3'-phosphate
  modified_base 6: mod_base = OTHER; note = 2'-fluorouridine-3'-phosphate
  modified_base 7: mod_base = OTHER; note = 2'-O-methylcytidine-3'-phosphate
  modified_base 8: mod_base = OTHER; note = 2'-fluoroadenosine-3'-phosphate
  modified_base 9: mod_base = OTHER; note = 2'-fluorouridine-3'-phosphate
  modified_base 10: mod_base = OTHER; note = 2'-O-methylcytidine-3'-phosphate
  modified_base 11: mod_base = OTHER; note = 2'-O-methylcytidine-3'-phosphate
  modified_base 12: mod_base = OTHER; note = 2'-O-methyladenosine-3'-phosphate
  modified_base 13: mod_base = OTHER; note = 2'-O-methylguanosine-3'-phosphate
  modified_base 14: mod_base = OTHER; note = 2'-fluoroadenosine-3'-phosphate
  modified_base 15: mod_base = OTHER; note = 2'-O-methylcytidine-3'-phosphate
  modified_base 16: mod_base = OTHER; note = 2'-fluoroguanosine-3'-phosphate
  modified_base 17: mod_base = OTHER; note = 2'-O-methylguanosine-3'-phosphate
  modified_base 18: mod_base = OTHER; note = 2'-O-methyluridine-3'-phosphate
  modified_base 19: mod_base = OTHER; note = 2'-O-methyluridine-3'-phosphate
  modified_base 20: mod_base = OTHER; note = 2'-O-methylguanosine-3'-phosphate
  modified_base 21: mod_base = OTHER; note = 2'-O-methylcytidine-3'-phosphorothioate
  modified_base 22: mod_base = OTHER; note = 2'-O-methylcytidine-3'-phosphorothioate
  modified_base 23: mod_base = OTHER; note = 2'-O-methylcytidine-3'-phosphate
gcacatcatccagacggttgccc

SEQ ID NO: 2732 - RNA, 21 nt, synthetic construct
  source 1..21: mol_type = other RNA; note = Description of Artificial Sequence: Synthetic oligonucleotide
  modified_base 1: mod_base = OTHER; note = 2'-O-methylcytidine-3'-phosphorothioate
  modified_base 2: mod_base = OTHER; note = 2'-O-methyladenosine-3'-phosphorothioate
  modified_base 3: mod_base = OTHER; note = 2'-O-methyladenosine-3'-phosphate
  modified_base 4: mod_base = OTHER; note = 2'-O-methylcytidine-3'-phosphate
  modified_base 5: mod_base = OTHER; note = 2'-O-methylcytidine-3'-phosphate
  modified_base 6: mod_base = OTHER; note = 2'-O-methylguanosine-3'-phosphate
  modified_base 7: mod_base = OTHER; note = 2'-fluorouridine-3'-phosphate
  modified_base 8: mod_base = OTHER; note = 2'-O-methylcytidine-3'-phosphate
  modified_base 9: mod_base = OTHER; note = 2'-fluorouridine-3'-phosphate
  modified_base 10: mod_base = OTHER; note = 2'-fluoroguanosine-3'-phosphate
  modified_base 11: mod_base = OTHER; note = 2'-fluoroguanosine-3'-phosphate
  modified_base 12: mod_base = OTHER; note = 2'-O-methyladenosine-3'-phosphate
  modified_base 13: mod_base = OTHER; note = 2'-O-methyluridine-3'-phosphate
  modified_base 14: mod_base = OTHER; note = 2'-O-methylguanosine-3'-phosphate
  modified_base 15: mod_base = OTHER; note = 2'-O-methyladenosine-3'-phosphate
  modified_base 16: mod_base = OTHER; note = 2'-O-methyluridine-3'-phosphate
  modified_base 17: mod_base = OTHER; note = 2'-O-methylguanosine-3'-phosphate
  modified_base 18: mod_base = OTHER; note = 2'-O-methyluridine-3'-phosphate
  modified_base 19: mod_base = OTHER; note = 2'-O-methylguanosine-3'-phosphate
  modified_base 20: mod_base = OTHER; note = 2'-O-methylcytidine-3'-phosphate
  modified_base 21: mod_base = OTHER; note = 2'-O-methylguanosine-3'-phosphate N-[tris(GalNAc-alkyl)-amidodecanoyl)]-4-hydroxyprolinol Hyp-(GalNAc-alkyl)3
caaccgtctggatgatgtgcg

SEQ ID NO: 2733 - RNA, 23 nt, synthetic construct
  source 1..23: mol_type = other RNA; note = Description of Artificial Sequence: Synthetic oligonucleotide
  modified_base 1: mod_base = OTHER; note = 2'-O-methylcytidine-3'-phosphorothioate
  modified_base 2: mod_base = OTHER; note = 2'-fluoroguanosine-3'-phosphorothioate
  modified_base 3: mod_base = OTHER; note = 2'-O-methylcytidine-3'-phosphate
  modified_base 4: mod_base = OTHER; note = 2'-O-methyladenosine-3'-phosphate
  modified_base 5: mod_base = OTHER; note = 2'-O-methylcytidine-3'-phosphate
  modified_base 6: mod_base = OTHER; note = 2'-fluoroadenosine-3'-phosphate
  modified_base 7: mod_base = OTHER; note = 2'-O-methyluridine-3'-phosphate
  modified_base 8: mod_base = OTHER; note = 2'-fluorocytidine-3'-phosphate
  modified_base 9: mod_base = OTHER; note = 2'-fluoroadenosine-3'-phosphate
  modified_base 10: mod_base = OTHER; note = 2'-O-methyluridine-3'-phosphate
  modified_base 11: mod_base = OTHER; note = 2'-O-methylcytidine-3'-phosphate
  modified_base 12: mod_base = OTHER; note = 2'-O-methylcytidine-3'-phosphate
  modified_base 13: mod_base = OTHER; note = 2'-O-methyladenosine-3'-phosphate
  modified_base 14: mod_base = OTHER; note = 2'-fluoroguanosine-3'-phosphate
  modified_base 15: mod_base = OTHER; note = 2'-O-methyladenosine-3'-phosphate
  modified_base 16: mod_base = OTHER; note = 2'-fluorocytidine-3'-phosphate
  modified_base 17: mod_base = OTHER; note = 2'-O-methylguanosine-3'-phosphate
  modified_base 18: mod_base = OTHER; note = 2'-O-methylguanosine-3'-phosphate
  modified_base 19: mod_base = OTHER; note = 2'-O-methyluridine-3'-phosphate
  modified_base 20: mod_base = OTHER; note = 2'-O-methyluridine-3'-phosphate
  modified_base 21: mod_base = OTHER; note = 2'-O-methylguanosine-3'-phosphorothioate
  modified_base 22: mod_base = OTHER; note = 2'-O-methylcytidine-3'-phosphorothioate
  modified_base 23: mod_base = OTHER; note = 2'-O-methylcytidine-3'-phosphate
cgcacatcatccagacggttgcc

SEQ ID NO: 2734 - RNA, 21 nt, synthetic construct
  source 1..21: mol_type = other RNA; note = Description of Artificial Sequence: Synthetic oligonucleotide
  modified_base 1: mod_base = OTHER; note = 2'-O-methylcytidine-3'-phosphorothioate
  modified_base 2: mod_base = OTHER; note = 2'-O-methyluridine-3'-phosphorothioate
  modified_base 3: mod_base = OTHER; note = 2'-O-methylguanosine-3'-phosphate
  modified_base 4: mod_base = OTHER; note = 2'-O-methylguanosine-3'-phosphate
  modified_base 5: mod_base = OTHER; note = 2'-O-methylguanosine-3'-phosphate
  modified_base 6: mod_base = OTHER; note = 2'-O-methylcytidine-3'-phosphate
  modified_base 7: mod_base = OTHER; note = 2'-fluoroadenosine-3'-phosphate
  modified_base 8: mod_base = OTHER; note = 2'-O-methyladenosine-3'-phosphate
  modified_base 9: mod_base = OTHER; note = 2'-fluorocytidine-3'-phosphate
  modified_base 10: mod_base = OTHER; note = 2'-fluorocytidine-3'-phosphate
  modified_base 11: mod_base = OTHER; note = 2'-fluoroguanosine-3'-phosphate
  modified_base 12: mod_base = OTHER; note = 2'-O-methyluridine-3'-phosphate
  modified_base 13: mod_base = OTHER; note = 2'-O-methylcytidine-3'-phosphate
  modified_base 14: mod_base = OTHER; note = 2'-O-methyluridine-3'-phosphate
  modified_base 15: mod_base = OTHER; note = 2'-O-methylguanosine-3'-phosphate
  modified_base 16: mod_base = OTHER; note = 2'-O-methylguanosine-3'-phosphate
  modified_base 17: mod_base = OTHER; note = 2'-O-methyladenosine-3'-phosphate
  modified_base 18: mod_base = OTHER; note = 2'-O-methyluridine-3'-phosphate
  modified_base 19: mod_base = OTHER; note = 2'-O-methylguanosine-3'-phosphate
  modified_base 20: mod_base = OTHER; note = 2'-O-methyladenosine-3'-phosphate
  modified_base 21: mod_base = OTHER; note = 2'-O-methyluridine-3'-phosphate N-[tris(GalNAc-alkyl)-amidodecanoyl)]-4-hydroxyprolinol Hyp-(GalNAc-alkyl)3
ctgggcaaccgtctggatgat

SEQ ID NO: 2735 - RNA, 23 nt, synthetic construct
  source 1..23: mol_type = other RNA; note = Description of Artificial Sequence: Synthetic oligonucleotide
  modified_base 1: mod_base = OTHER; note = 2'-O-methyladenosine-3'-phosphorothioate
  modified_base 2: mod_base = OTHER; note = 2'-fluorouridine -3'-phosphorothioate
  modified_base 3: mod_base = OTHER; note = 2'-O-methylcytidine-3'-phosphate
  modified_base 4: mod_base = OTHER; note = 2'-O-methyladenosine-3'-phosphate
  modified_base 5: mod_base = OTHER; note = 2'-O-methyluridine-3'-phosphate
  modified_base 6: mod_base = OTHER; note = 2'-fluorocytidine-3'-phosphate
  modified_base 7: mod_base = OTHER; note = 2'-O-methylcytidine-3'-phosphate
  modified_base 8: mod_base = OTHER; note = 2'-fluoroadenosine-3'-phosphate
  modified_base 9: mod_base = OTHER; note = 2'-fluoroguanosine-3'-phosphate
  modified_base 10: mod_base = OTHER; note = 2'-O-methyladenosine-3'-phosphate
  modified_base 11: mod_base = OTHER; note = 2'-O-methylcytidine-3'-phosphate
  modified_base 12: mod_base = OTHER; note = 2'-O-methylguanosine-3'-phosphate
  modified_base 13: mod_base = OTHER; note = 2'-O-methylguanosine-3'-phosphate
  modified_base 14: mod_base = OTHER; note = 2'-fluorouridine-3'-phosphate
  modified_base 15: mod_base = OTHER; note = 2'-O-methyluridine-3'-phosphate
  modified_base 16: mod_base = OTHER; note = 2'-fluoroguanosine-3'-phosphate
  modified_base 17: mod_base = OTHER; note = 2'-O-methylcytidine-3'-phosphate
  modified_base 18: mod_base = OTHER; note = 2'-O-methylcytidine-3'-phosphate
  modified_base 19: mod_base = OTHER; note = 2'-O-methylcytidine-3'-phosphate
  modified_base 20: mod_base = OTHER; note = 2'-O-methyladenosine-3'-phosphate
  modified_base 21: mod_base = OTHER; note = 2'-O-methylguanosine-3'-phosphorothioate
  modified_base 22: mod_base = OTHER; note = 2'-O-methylguanosine-3'-phosphorothioate
  modified_base 23: mod_base = OTHER; note = 2'-O-methyluridine-3'-phosphate
atcatccagacggttgcccaggt

SEQ ID NO: 2736 - RNA, 21 nt, synthetic construct
  source 1..21: mol_type = other RNA; note = Description of Artificial Sequence: Synthetic oligonucleotide
  modified_base 1: mod_base = OTHER; note = 2'-O-methylcytidine-3'-phosphorothioate
  modified_base 2: mod_base = OTHER; note = 2'-O-methylcytidine-3'-phosphorothioate
  modified_base 3: mod_base = OTHER; note = 2'-O-methyluridine-3'-phosphate
  modified_base 4: mod_base = OTHER; note = 2'-O-methylguanosine-3'-phosphate
  modified_base 5: mod_base = OTHER; note = 2'-O-methylguanosine-3'-phosphate
  modified_base 6: mod_base = OTHER; note = 2'-O-methylguanosine-3'-phosphate
  modified_base 7: mod_base = OTHER; note = 2'-fluorocytidine-3'-phosphate
  modified_base 8: mod_base = OTHER; note = 2'-O-methyladenosine-3'-phosphate
  modified_base 9: mod_base = OTHER; note = 2'-fluoroadenosine-3'-phosphate
  modified_base 10: mod_base = OTHER; note = 2'-fluorocytidine-3'-phosphate
  modified_base 11: mod_base = OTHER; note = 2'-fluorocytidine-3'-phosphate
  modified_base 12: mod_base = OTHER; note = 2'-O-methylguanosine-3'-phosphate
  modified_base 13: mod_base = OTHER; note = 2'-O-methyluridine-3'-phosphate
  modified_base 14: mod_base = OTHER; note = 2'-O-methylcytidine-3'-phosphate
  modified_base 15: mod_base = OTHER; note = 2'-O-methyluridine-3'-phosphate
  modified_base 16: mod_base = OTHER; note = 2'-O-methylguanosine-3'-phosphate
  modified_base 17: mod_base = OTHER; note = 2'-O-methylguanosine-3'-phosphate
  modified_base 18: mod_base = OTHER; note = 2'-O-methyladenosine-3'-phosphate
  modified_base 19: mod_base = OTHER; note = 2'-O-methyluridine-3'-phosphate
  modified_base 20: mod_base = OTHER; note = 2'-O-methylguanosine-3'-phosphate
  modified_base 21: mod_base = OTHER; note = 2'-O-methyladenosine-3'-phosphate N-[tris(GalNAc-alkyl)-amidodecanoyl)]-4-hydroxyprolinol Hyp-(GalNAc-alkyl)3
cctgggcaaccgtctggatga

SEQ ID NO: 2737 - RNA, 23 nt, synthetic construct
  source 1..23: mol_type = other RNA; note = Description of Artificial Sequence: Synthetic oligonucleotide
  modified_base 1: mod_base = OTHER; note = 2'-O-methyluridine-3'-phosphorothioate
  modified_base 2: mod_base = OTHER; note = 2'-fluorocytidine-3'-phosphorothioate
  modified_base 3: mod_base = OTHER; note = 2'-O-methyladenosine-3'-phosphate
  modified_base 4: mod_base = OTHER; note = 2'-O-methyluridine-3'-phosphate
  modified_base 5: mod_base = OTHER; note = 2'-O-methylcytidine-3'-phosphate
  modified_base 6: mod_base = OTHER; note = 2'-fluorocytidine-3'-phosphate
  modified_base 7: mod_base = OTHER; note = 2'-O-methyladenosine-3'-phosphate
  modified_base 8: mod_base = OTHER; note = 2'-fluoroguanosine-3'-phosphate
  modified_base 9: mod_base = OTHER; note = 2'-fluoroadenosine-3'-phosphate
  modified_base 10: mod_base = OTHER; note = 2'-O-methylcytidine-3'-phosphate
  modified_base 11: mod_base = OTHER; note = 2'-O-methylguanosine-3'-phosphate
  modified_base 12: mod_base = OTHER; note = 2'-O-methylguanosine-3'-phosphate
  modified_base 13: mod_base = OTHER; note = 2'-O-methyluridine-3'-phosphate
  modified_base 14: mod_base = OTHER; note = 2'-fluorouridine-3'-phosphate
  modified_base 15: mod_base = OTHER; note = 2'-O-methylguanosine-3'-phosphate
  modified_base 16: mod_base = OTHER; note = 2'-fluorocytidine-3'-phosphate
  modified_base 17: mod_base = OTHER; note = 2'-O-methylcytidine-3'-phosphate
  modified_base 18: mod_base = OTHER; note = 2'-O-methylcytidine-3'-phosphate
  modified_base 19: mod_base = OTHER; note = 2'-O-methyladenosine-3'-phosphate
  modified_base 20: mod_base = OTHER; note = 2'-O-methylguanosine-3'-phosphate
  modified_base 21: mod_base = OTHER; note = 2'-O-methylguanosine-3'-phosphorothioate
  modified_base 22: mod_base = OTHER; note = 2'-O-methyluridine-3'-phosphorothioate
  modified_base 23: mod_base = OTHER; note = 2'-O-methyladenosine-3'-phosphate
tcatccagacggttgcccaggta

SEQ ID NO: 2738 - RNA, 21 nt, synthetic construct
  source 1..21: mol_type = other RNA; note = Description of Artificial Sequence: Synthetic oligonucleotide
  modified_base 1: mod_base = OTHER; note = 2'-O-methylguanosine-3'-phosphorothioate
  modified_base 2: mod_base = OTHER; note = 2'-O-methylcytidine-3'-phosphorothioate
  modified_base 3: mod_base = OTHER; note = 2'-O-methyladenosine-3'-phosphate
  modified_base 4: mod_base = OTHER; note = 2'-O-methyladenosine-3'-phosphate
  modified_base 5: mod_base = OTHER; note = 2'-O-methyladenosine-3'-phosphate
  modified_base 6: mod_base = OTHER; note = 2'-O-methyluridine-3'-phosphate
  modified_base 7: mod_base = OTHER; note = 2'-fluoroguanosine-3'-phosphate
  modified_base 8: mod_base = OTHER; note = 2'-O-methyladenosine-3'-phosphate
  modified_base 9: mod_base = OTHER; note = 2'-fluorouridine-3'-phosphate
  modified_base 10: mod_base = OTHER; note = 2'-fluoroguanosine-3'-phosphate
  modified_base 11: mod_base = OTHER; note = 2'-fluoroadenosine-3'-phosphate
  modified_base 12: mod_base = OTHER; note = 2'-O-methyladenosine-3'-phosphate
  modified_base 13: mod_base = OTHER; note = 2'-O-methylguanosine-3'-phosphate
  modified_base 14: mod_base = OTHER; note = 2'-O-methyladenosine-3'-phosphate
  modified_base 15: mod_base = OTHER; note = 2'-O-methyladenosine-3'-phosphate
  modified_base 16: mod_base = OTHER; note = 2'-O-methyladenosine-3'-phosphate
  modified_base 17: mod_base = OTHER; note = 2'-O-methylcytidine-3'-phosphate
  modified_base 18: mod_base = OTHER; note = 2'-O-methyluridine-3'-phosphate
  modified_base 19: mod_base = OTHER; note = 2'-O-methyluridine-3'-phosphate
  modified_base 20: mod_base = OTHER; note = 2'-O-methyluridine-3'-phosphate
  modified_base 21: mod_base = OTHER; note = 2'-O-methylguanosine-3'-phosphate N-[tris(GalNAc-alkyl)-amidodecanoyl)]-4-hydroxyprolinol Hyp-(GalNAc-alkyl)3
gcaaatgatgaagaaactttg

SEQ ID NO: 2739 - RNA, 23 nt, synthetic construct
  source 1..23: mol_type = other RNA; note = Description of Artificial Sequence: Synthetic oligonucleotide
  modified_base 1: mod_base = OTHER; note = 2'-O-methylcytidine-3'-phosphorothioate
  modified_base 2: mod_base = OTHER; note = 2'-fluoroadenosine-3'-phosphorothioate
  modified_base 3: mod_base = OTHER; note = 2'-O-methyladenosine-3'-phosphate
  modified_base 4: mod_base = OTHER; note = 2'-O-methyladenosine-3'-phosphate
  modified_base 5: mod_base = OTHER; note = 2'-O-methylguanosine-3'-phosphate
  modified_base 6: mod_base = OTHER; note = 2'-fluorouridine-3'-phosphate
  modified_base 7: mod_base = OTHER; note = 2'-O-methyluridine-3'-phosphate
  modified_base 8: mod_base = OTHER; note = 2'-fluorouridine-3'-phosphate
  modified_base 9: mod_base = OTHER; note = 2'-fluorocytidine-3'-phosphate
  modified_base 10: mod_base = OTHER; note = 2'-O-methyluridine-3'-phosphate
  modified_base 11: mod_base = OTHER; note = 2'-O-methyluridine-3'-phosphate
  modified_base 12: mod_base = OTHER; note = 2'-O-methylcytidine-3'-phosphate
  modified_base 13: mod_base = OTHER; note = 2'-O-methyladenosine-3'-phosphate
  modified_base 14: mod_base = OTHER; note = 2'-fluorouridine-3'-phosphate
  modified_base 15: mod_base = OTHER; note = 2'-O-methylcytidine-3'-phosphate
  modified_base 16: mod_base = OTHER; note = 2'-fluoroadenosine-3'-phosphate
  modified_base 17: mod_base = OTHER; note = 2'-O-methyluridine-3'-phosphate
  modified_base 18: mod_base = OTHER; note = 2'-O-methyluridine-3'-phosphate
  modified_base 19: mod_base = OTHER; note = 2'-O-methyluridine-3'-phosphate
  modified_base 20: mod_base = OTHER; note = 2'-O-methylguanosine-3'-phosphate
  modified_base 21: mod_base = OTHER; note = 2'-O-methylcytidine-3'-phosphorothioate
  modified_base 22: mod_base = OTHER; note = 2'-O-methylcytidine-3'-phosphorothioate
  modified_base 23: mod_base = OTHER; note = 2'-O-methylcytidine-3'-phosphate
caaagtttcttcatcatttgccc

SEQ ID NO: 2740 - RNA, 21 nt, synthetic construct
  source 1..21: mol_type = other RNA; note = Description of Artificial Sequence: Synthetic oligonucleotide
  modified_base 1: mod_base = OTHER; note = 2'-O-methylcytidine-3'-phosphorothioate
  modified_base 2: mod_base = OTHER; note = 2'-O-methyladenosine-3'-phosphorothioate
  modified_base 3: mod_base = OTHER; note = 2'-O-methyladenosine-3'-phosphate
  modified_base 4: mod_base = OTHER; note = 2'-O-methyladenosine-3'-phosphate
  modified_base 5: mod_base = OTHER; note = 2'-O-methyluridine-3'-phosphate
  modified_base 6: mod_base = OTHER; note = 2'-O-methylguanosine-3'-phosphate
  modified_base 7: mod_base = OTHER; note = 2'-fluoroadenosine-3'-phosphate
  modified_base 8: mod_base = OTHER; note = 2'-O-methyluridine-3'-phosphate
  modified_base 9: mod_base = OTHER; note = 2'-fluoroguanosine-3'-phosphate
  modified_base 10: mod_base = OTHER; note = 2'-fluoroadenosine-3'-phosphate
  modified_base 11: mod_base = OTHER; note = 2'-fluoroadenosine-3'-phosphate
  modified_base 12: mod_base = OTHER; note = 2'-O-methylguanosine-3'-phosphate
  modified_base 13: mod_base = OTHER; note = 2'-O-methyladenosine-3'-phosphate
  modified_base 14: mod_base = OTHER; note = 2'-O-methyladenosine-3'-phosphate
  modified_base 15: mod_base = OTHER; note = 2'-O-methyladenosine-3'-phosphate
  modified_base 16: mod_base = OTHER; note = 2'-O-methylcytidine-3'-phosphate
  modified_base 17: mod_base = OTHER; note = 2'-O-methyluridine-3'-phosphate
  modified_base 18: mod_base = OTHER; note = 2'-O-methyluridine-3'-phosphate
  modified_base 19: mod_base = OTHER; note = 2'-O-methyluridine-3'-phosphate
  modified_base 20: mod_base = OTHER; note = 2'-O-methylguanosine-3'-phosphate
  modified_base 21: mod_base = OTHER; note = 2'-O-methylguanosine-3'-phosphate N-[tris(GalNAc-alkyl)-amidodecanoyl)]-4-hydroxyprolinol Hyp-(GalNAc-alkyl)3
caaatgatgaagaaactttgg

SEQ ID NO: 2741 - RNA, 23 nt, synthetic construct
  source 1..23: mol_type = other RNA; note = Description of Artificial Sequence: Synthetic oligonucleotide
  modified_base 1: mod_base = OTHER; note = 2'-O-methylcytidine-3'-phosphorothioate
  modified_base 2: mod_base = OTHER; note = 2'-fluorocytidine-3'-phosphorothioate
  modified_base 3: mod_base = OTHER; note = 2'-O-methyladenosine-3'-phosphate
  modified_base 4: mod_base = OTHER; note = 2'-O-methyladenosine-3'-phosphate
  modified_base 5: mod_base = OTHER; note = 2'-O-methyladenosine-3'-phosphate
  modified_base 6: mod_base = OTHER; note = 2'-fluoroguanosine-3'-phosphate
  modified_base 7: mod_base = OTHER; note = 2'-O-methyluridine-3'-phosphate
  modified_base 8: mod_base = OTHER; note = 2'-fluorouridine-3'-phosphate
  modified_base 9: mod_base = OTHER; note = 2'-fluorouridine-3'-phosphate
  modified_base 10: mod_base = OTHER; note = 2'-O-methylcytidine-3'-phosphate
  modified_base 11: mod_base = OTHER; note = 2'-O-methyluridine-3'-phosphate
  modified_base 12: mod_base = OTHER; note = 2'-O-methyluridine-3'-phosphate
  modified_base 13: mod_base = OTHER; note = 2'-O-methylcytidine-3'-phosphate
  modified_base 14: mod_base = OTHER; note = 2'-fluoroadenosine-3'-phosphate
  modified_base 15: mod_base = OTHER; note = 2'-O-methyluridine-3'-phosphate
  modified_base 16: mod_base = OTHER; note = 2'-fluorocytidine-3'-phosphate
  modified_base 17: mod_base = OTHER; note = 2'-O-methyladenosine-3'-phosphate
  modified_base 18: mod_base = OTHER; note = 2'-O-methyluridine-3'-phosphate
  modified_base 19: mod_base = OTHER; note = 2'-O-methyluridine-3'-phosphate
  modified_base 20: mod_base = OTHER; note = 2'-O-methyluridine-3'-phosphate
  modified_base 21: mod_base = OTHER; note = 2'-O-methylguanosine-3'-phosphorothioate
  modified_base 22: mod_base = OTHER; note = 2'-O-methylcytidine-3'-phosphorothioate
  modified_base 23: mod_base = OTHER; note = 2'-O-methylcytidine-3'-phosphate
ccaaagtttcttcatcatttgcc

SEQ ID NO: 2742 - RNA, 21 nt, synthetic construct
  source 1..21: mol_type = other RNA; note = Description of Artificial Sequence: Synthetic oligonucleotide
  modified_base 1: mod_base = OTHER; note = 2'-O-methyluridine-3'-phosphorothioate
  modified_base 2: mod_base = OTHER; note = 2'-O-methylguanosine-3'-phosphorothioate
  modified_base 3: mod_base = OTHER; note = 2'-O-methylguanosine-3'-phosphate
  modified_base 4: mod_base = OTHER; note = 2'-O-methylguanosine-3'-phosphate
  modified_base 5: mod_base = OTHER; note = 2'-O-methylguanosine-3'-phosphate
  modified_base 6: mod_base = OTHER; note = 2'-O-methylcytidine-3'-phosphate
  modified_base 7: mod_base = OTHER; note = 2'-fluoroadenosine-3'-phosphate
  modified_base 8: mod_base = OTHER; note = 2'-O-methyladenosine-3'-phosphate
  modified_base 9: mod_base = OTHER; note = 2'-fluoroadenosine-3'-phosphate
  modified_base 10: mod_base = OTHER; note = 2'-fluorouridine-3'-phosphate
  modified_base 11: mod_base = OTHER; note = 2'-fluoroguanosine-3'-phosphate
  modified_base 12: mod_base = OTHER; note = 2'-O-methyladenosine-3'-phosphate
  modified_base 13: mod_base = OTHER; note = 2'-O-methyluridine-3'-phosphate
  modified_base 14: mod_base = OTHER; note = 2'-O-methylguanosine-3'-phosphate
  modified_base 15: mod_base = OTHER; note = 2'-O-methyladenosine-3'-phosphate
  modified_base 16: mod_base = OTHER; note = 2'-O-methyladenosine-3'-phosphate
  modified_base 17: mod_base = OTHER; note = 2'-O-methylguanosine-3'-phosphate
  modified_base 18: mod_base = OTHER; note = 2'-O-methyladenosine-3'-phosphate
  modified_base 19: mod_base = OTHER; note = 2'-O-methyladenosine-3'-phosphate
  modified_base 20: mod_base = OTHER; note = 2'-O-methyladenosine-3'-phosphate
  modified_base 21: mod_base = OTHER; note = 2'-O-methylcytidine-3'-phosphate N-[tris(GalNAc-alkyl)-amidodecanoyl)]-4-hydroxyprolinol Hyp-(GalNAc-alkyl)3
tggggcaaatgatgaagaaac

SEQ ID NO: 2743 - RNA, 23 nt, synthetic construct
  source 1..23: mol_type = other RNA; note = Description of Artificial Sequence: Synthetic oligonucleotide
  modified_base 1: mod_base = OTHER; note = 2'-O-methylguanosine-3'-phosphorothioate
  modified_base 2: mod_base = OTHER; note = 2'-fluorouridine -3'-phosphorothioate
  modified_base 3: mod_base = OTHER; note = 2'-O-methyluridine-3'-phosphate
  modified_base 4: mod_base = OTHER; note = 2'-O-methyluridine-3'-phosphate
  modified_base 5: mod_base = OTHER; note = 2'-O-methylcytidine-3'-phosphate
  modified_base 6: mod_base = OTHER; note = 2'-fluorouridine-3'-phosphate
  modified_base 7: mod_base = OTHER; note = 2'-O-methyluridine-3'-phosphate
  modified_base 8: mod_base = OTHER; note = 2'-fluorocytidine-3'-phosphate
  modified_base 9: mod_base = OTHER; note = 2'-fluoroadenosine-3'-phosphate
  modified_base 10: mod_base = OTHER; note = 2'-O-methyluridine-3'-phosphate
  modified_base 11: mod_base = OTHER; note = 2'-O-methylcytidine-3'-phosphate
  modified_base 12: mod_base = OTHER; note = 2'-O-methyladenosine-3'-phosphate
  modified_base 13: mod_base = OTHER; note = 2'-O-methyluridine-3'-phosphate
  modified_base 14: mod_base = OTHER; note = 2'-fluorouridine-3'-phosphate
  modified_base 15: mod_base = OTHER; note = 2'-O-methyluridine-3'-phosphate
  modified_base 16: mod_base = OTHER; note = 2'-fluoroguanosine-3'-phosphate
  modified_base 17: mod_base = OTHER; note = 2'-O-methylcytidine-3'-phosphate
  modified_base 18: mod_base = OTHER; note = 2'-O-methylcytidine-3'-phosphate
  modified_base 19: mod_base = OTHER; note = 2'-O-methylcytidine-3'-phosphate
  modified_base 20: mod_base = OTHER; note = 2'-O-methylcytidine-3'-phosphate
  modified_base 21: mod_base = OTHER; note = 2'-O-methyladenosine-3'-phosphorothioate
  modified_base 22: mod_base = OTHER; note = 2'-O-methylguanosine-3'-phosphorothioate
  modified_base 23: mod_base = OTHER; note = 2'-O-methyladenosine-3'-phosphate
gtttcttcatcatttgccccaga

SEQ ID NO: 2744 - RNA, 21 nt, synthetic construct
  source 1..21: mol_type = other RNA; note = Description of Artificial Sequence: Synthetic oligonucleotide
  modified_base 1: mod_base = OTHER; note = 2'-O-methylcytidine-3'-phosphorothioate
  modified_base 2: mod_base = OTHER; note = 2'-O-methyluridine-3'-phosphorothioate
  modified_base 3: mod_base = OTHER; note = 2'-O-methylguanosine-3'-phosphate
  modified_base 4: mod_base = OTHER; note = 2'-O-methylguanosine-3'-phosphate
  modified_base 5: mod_base = OTHER; note = 2'-O-methylguanosine-3'-phosphate
  modified_base 6: mod_base = OTHER; note = 2'-O-methylguanosine-3'-phosphate
  modified_base 7: mod_base = OTHER; note = 2'-fluorocytidine-3'-phosphate
  modified_base 8: mod_base = OTHER; note = 2'-O-methyladenosine-3'-phosphate
  modified_base 9: mod_base = OTHER; note = 2'-fluoroadenosine-3'-phosphate
  modified_base 10: mod_base = OTHER; note = 2'-fluoroadenosine-3'-phosphate
  modified_base 11: mod_base = OTHER; note = 2'-fluorouridine-3'-phosphate
  modified_base 12: mod_base = OTHER; note = 2'-O-methylguanosine-3'-phosphate
  modified_base 13: mod_base = OTHER; note = 2'-O-methyladenosine-3'-phosphate
  modified_base 14: mod_base = OTHER; note = 2'-O-methyluridine-3'-phosphate
  modified_base 15: mod_base = OTHER; note = 2'-O-methylguanosine-3'-phosphate
  modified_base 16: mod_base = OTHER; note = 2'-O-methyladenosine-3'-phosphate
  modified_base 17: mod_base = OTHER; note = 2'-O-methyladenosine-3'-phosphate
  modified_base 18: mod_base = OTHER; note = 2'-O-methylguanosine-3'-phosphate
  modified_base 19: mod_base = OTHER; note = 2'-O-methyladenosine-3'-phosphate
  modified_base 20: mod_base = OTHER; note = 2'-O-methyladenosine-3'-phosphate
  modified_base 21: mod_base = OTHER; note = 2'-O-methyladenosine-3'-phosphate N-[tris(GalNAc-alkyl)-amidodecanoyl)]-4-hydroxyprolinol Hyp-(GalNAc-alkyl)3
ctggggcaaatgatgaagaaa

SEQ ID NO: 2745 - RNA, 23 nt, synthetic construct
  source 1..23: mol_type = other RNA; note = Description of Artificial Sequence: Synthetic oligonucleotide
  modified_base 1: mod_base = OTHER; note = 2'-O-methyluridine-3'-phosphorothioate
  modified_base 2: mod_base = OTHER; note = 2'-fluorouridine -3'-phosphorothioate
  modified_base 3: mod_base = OTHER; note = 2'-O-methyluridine-3'-phosphate
  modified_base 4: mod_base = OTHER; note = 2'-O-methylcytidine-3'-phosphate
  modified_base 5: mod_base = OTHER; note = 2'-O-methyluridine-3'-phosphate
  modified_base 6: mod_base = OTHER; note = 2'-fluorouridine-3'-phosphate
  modified_base 7: mod_base = OTHER; note = 2'-O-methylcytidine-3'-phosphate
  modified_base 8: mod_base = OTHER; note = 2'-fluoroadenosine-3'-phosphate
  modified_base 9: mod_base = OTHER; note = 2'-fluorouridine-3'-phosphate
  modified_base 10: mod_base = OTHER; note = 2'-O-methylcytidine-3'-phosphate
  modified_base 11: mod_base = OTHER; note = 2'-O-methyladenosine-3'-phosphate
  modified_base 12: mod_base = OTHER; note = 2'-O-methyluridine-3'-phosphate
  modified_base 13: mod_base = OTHER; note = 2'-O-methyluridine-3'-phosphate
  modified_base 14: mod_base = OTHER; note = 2'-fluorouridine-3'-phosphate
  modified_base 15: mod_base = OTHER; note = 2'-O-methylguanosine-3'-phosphate
  modified_base 16: mod_base = OTHER; note = 2'-fluorocytidine-3'-phosphate
  modified_base 17: mod_base = OTHER; note = 2'-O-methylcytidine-3'-phosphate
  modified_base 18: mod_base = OTHER; note = 2'-O-methylcytidine-3'-phosphate
  modified_base 19: mod_base = OTHER; note = 2'-O-methylcytidine-3'-phosphate
  modified_base 20: mod_base = OTHER; note = 2'-O-methyladenosine-3'-phosphate
  modified_base 21: mod_base = OTHER; note = 2'-O-methylguanosine-3'-phosphorothioate
  modified_base 22: mod_base = OTHER; note = 2'-O-methyladenosine-3'-phosphorothioate
  modified_base 23: mod_base = OTHER; note = 2'-O-methylcytidine-3'-phosphate
tttcttcatcatttgccccagac

SEQ ID NO: 2746 - RNA, 21 nt, synthetic construct
  source 1..21: mol_type = other RNA; note = Description of Artificial Sequence: Synthetic oligonucleotide
  modified_base 1: mod_base = OTHER; note = 2'-O-methylcytidine-3'-phosphorothioate
  modified_base 2: mod_base = OTHER; note = 2'-O-methylcytidine-3'-phosphorothioate
  modified_base 3: mod_base = OTHER; note = 2'-O-methyladenosine-3'-phosphate
  modified_base 4: mod_base = OTHER; note = 2'-O-methyladenosine-3'-phosphate
  modified_base 5: mod_base = OTHER; note = 2'-O-methylguanosine-3'-phosphate
  modified_base 6: mod_base = OTHER; note = 2'-O-methylguanosine-3'-phosphate
  modified_base 7: mod_base = OTHER; note = 2'-fluorocytidine-3'-phosphate
  modified_base 8: mod_base = OTHER; note = 2'-O-methyluridine-3'-phosphate
  modified_base 9: mod_base = OTHER; note = 2'-fluoroguanosine-3'-phosphate
  modified_base 10: mod_base = OTHER; note = 2'-fluorouridine-3'-phosphate
  modified_base 11: mod_base = OTHER; note = 2'-fluoroguanosine-3'-phosphate
  modified_base 12: mod_base = OTHER; note = 2'-O-methyluridine-3'-phosphate
  modified_base 13: mod_base = OTHER; note = 2'-O-methyluridine-3'-phosphate
  modified_base 14: mod_base = OTHER; note = 2'-O-methyluridine-3'-phosphate
  modified_base 15: mod_base = OTHER; note = 2'-O-methylguanosine-3'-phosphate
  modified_base 16: mod_base = OTHER; note = 2'-O-methyluridine-3'-phosphate
  modified_base 17: mod_base = OTHER; note = 2'-O-methylguanosine-3'-phosphate
  modified_base 18: mod_base = OTHER; note = 2'-O-methylguanosine-3'-phosphate
  modified_base 19: mod_base = OTHER; note = 2'-O-methylguanosine-3'-phosphate
  modified_base 20: mod_base = OTHER; note = 2'-O-methylguanosine-3'-phosphate
  modified_base 21: mod_base = OTHER; note = 2'-O-methyladenosine-3'-phosphate N-[tris(GalNAc-alkyl)-amidodecanoyl)]-4-hydroxyprolinol Hyp-(GalNAc-alkyl)3
ccaaggctgtgtttgtgggga

SEQ ID NO: 2747 - RNA, 23 nt, synthetic construct
  source 1..23: mol_type = other RNA; note = Description of Artificial Sequence: Synthetic oligonucleotide
  modified_base 1: mod_base = OTHER; note = 2'-O-methyluridine-3'-phosphorothioate
  modified_base 2: mod_base = OTHER; note = 2'-fluorocytidine-3'-phosphorothioate
  modified_base 3: mod_base = OTHER; note = 2'-O-methylcytidine-3'-phosphate
  modified_base 4: mod_base = OTHER; note = 2'-O-methylcytidine-3'-phosphate
  modified_base 5: mod_base = OTHER; note = 2'-O-methylcytidine-3'-phosphate
  modified_base 6: mod_base = OTHER; note = 2'-fluoroadenosine-3'-phosphate
  modified_base 7: mod_base = OTHER; note = 2'-O-methylcytidine-3'-phosphate
  modified_base 8: mod_base = OTHER; note = 2'-fluoroadenosine-3'-phosphate
  modified_base 9: mod_base = OTHER; note = 2'-fluoroadenosine-3'-phosphate
  modified_base 10: mod_base = OTHER; note = 2'-O-methyladenosine-3'-phosphate
  modified_base 11: mod_base = OTHER; note = 2'-O-methylcytidine-3'-phosphate
  modified_base 12: mod_base = OTHER; note = 2'-O-methyladenosine-3'-phosphate
  modified_base 13: mod_base = OTHER; note = 2'-O-methylcytidine-3'-phosphate
  modified_base 14: mod_base = OTHER; note = 2'-fluoroadenosine-3'-phosphate
  modified_base 15: mod_base = OTHER; note = 2'-O-methylguanosine-3'-phosphate
  modified_base 16: mod_base = OTHER; note = 2'-fluorocytidine-3'-phosphate
  modified_base 17: mod_base = OTHER; note = 2'-O-methylcytidine-3'-phosphate
  modified_base 18: mod_base = OTHER; note = 2'-O-methyluridine-3'-phosphate
  modified_base 19: mod_base = OTHER; note = 2'-O-methyluridine-3'-phosphate
  modified_base 20: mod_base = OTHER; note = 2'-O-methylguanosine-3'-phosphate
  modified_base 21: mod_base = OTHER; note = 2'-O-methylguanosine-3'-phosphorothioate
  modified_base 22: mod_base = OTHER; note = 2'-O-methylcytidine-3'-phosphorothioate
  modified_base 23: mod_base = OTHER; note = 2'-O-methylguanosine-3'-phosphate
tccccacaaacacagccttggcg

SEQ ID NO: 2748 - RNA, 21 nt, synthetic construct
  source 1..21: mol_type = other RNA; note = Description of Artificial Sequence: Synthetic oligonucleotide
  modified_base 1: mod_base = OTHER; note = 2'-O-methylcytidine-3'-phosphorothioate
  modified_base 2: mod_base = OTHER; note = 2'-O-methyladenosine-3'-phosphorothioate
  modified_base 3: mod_base = OTHER; note = 2'-O-methyladenosine-3'-phosphate
  modified_base 4: mod_base = OTHER; note = 2'-O-methylguanosine-3'-phosphate
  modified_base 5: mod_base = OTHER; note = 2'-O-methylguanosine-3'-phosphate
  modified_base 6: mod_base = OTHER; note = 2'-O-methylcytidine-3'-phosphate
  modified_base 7: mod_base = OTHER; note = 2'-fluorouridine-3'-phosphate
  modified_base 8: mod_base = OTHER; note = 2'-O-methylguanosine-3'-phosphate
  modified_base 9: mod_base = OTHER; note = 2'-fluorouridine-3'-phosphate
  modified_base 10: mod_base = OTHER; note = 2'-fluoroguanosine-3'-phosphate
  modified_base 11: mod_base = OTHER; note = 2'-fluorouridine-3'-phosphate
  modified_base 12: mod_base = OTHER; note = 2'-O-methyluridine-3'-phosphate
  modified_base 13: mod_base = OTHER; note = 2'-O-methyluridine-3'-phosphate
  modified_base 14: mod_base = OTHER; note = 2'-O-methylguanosine-3'-phosphate
  modified_base 15: mod_base = OTHER; note = 2'-O-methyluridine-3'-phosphate
  modified_base 16: mod_base = OTHER; note = 2'-O-methylguanosine-3'-phosphate
  modified_base 17: mod_base = OTHER; note = 2'-O-methylguanosine-3'-phosphate
  modified_base 18: mod_base = OTHER; note = 2'-O-methylguanosine-3'-phosphate
  modified_base 19: mod_base = OTHER; note = 2'-O-methylguanosine-3'-phosphate
  modified_base 20: mod_base = OTHER; note = 2'-O-methyladenosine-3'-phosphate
  modified_base 21: mod_base = OTHER; note = 2'-O-methylguanosine-3'-phosphate N-[tris(GalNAc-alkyl)-amidodecanoyl)]-4-hydroxyprolinol Hyp-(GalNAc-alkyl)3
caaggctgtgtttgtggggag

SEQ ID NO: 2749 - RNA, 23 nt, synthetic construct
  source 1..23: mol_type = other RNA; note = Description of Artificial Sequence: Synthetic oligonucleotide
  modified_base 1: mod_base = OTHER; note = 2'-O-methylcytidine-3'-phosphorothioate
  modified_base 2: mod_base = OTHER; note = 2'-fluorouridine -3'-phosphorothioate
  modified_base 3: mod_base = OTHER; note = 2'-O-methylcytidine-3'-phosphate
  modified_base 4: mod_base = OTHER; note = 2'-O-methylcytidine-3'-phosphate
  modified_base 5: mod_base = OTHER; note = 2'-O-methylcytidine-3'-phosphate
  modified_base 6: mod_base = OTHER; note = 2'-fluorocytidine-3'-phosphate
  modified_base 7: mod_base = OTHER; note = 2'-O-methyladenosine-3'-phosphate
  modified_base 8: mod_base = OTHER; note = 2'-fluorocytidine-3'-phosphate
  modified_base 9: mod_base = OTHER; note = 2'-fluoroadenosine-3'-phosphate
  modified_base 10: mod_base = OTHER; note = 2'-O-methyladenosine-3'-phosphate
  modified_base 11: mod_base = OTHER; note = 2'-O-methyladenosine-3'-phosphate
  modified_base 12: mod_base = OTHER; note = 2'-O-methylcytidine-3'-phosphate
  modified_base 13: mod_base = OTHER; note = 2'-O-methyladenosine-3'-phosphate
  modified_base 14: mod_base = OTHER; note = 2'-fluorocytidine-3'-phosphate
  modified_base 15: mod_base = OTHER; note = 2'-O-methyladenosine-3'-phosphate
  modified_base 16: mod_base = OTHER; note = 2'-fluoroguanosine-3'-phosphate
  modified_base 17: mod_base = OTHER; note = 2'-O-methylcytidine-3'-phosphate
  modified_base 18: mod_base = OTHER; note = 2'-O-methylcytidine-3'-phosphate
  modified_base 19: mod_base = OTHER; note = 2'-O-methyluridine-3'-phosphate
  modified_base 20: mod_base = OTHER; note = 2'-O-methyluridine-3'-phosphate
  modified_base 21: mod_base = OTHER; note = 2'-O-methylguanosine-3'-phosphorothioate
  modified_base 22: mod_base = OTHER; note = 2'-O-methylguanosine-3'-phosphorothioate
  modified_base 23: mod_base = OTHER; note = 2'-O-methylcytidine-3'-phosphate
ctccccacaaacacagccttggc

SEQ ID NO: 2750 - RNA, 21 nt, synthetic construct
  source 1..21: mol_type = other RNA; note = Description of Artificial Sequence: Synthetic oligonucleotide
  modified_base 1: mod_base = OTHER; note = 2'-O-methylguanosine-3'-phosphorothioate
  modified_base 2: mod_base = OTHER; note = 2'-O-methylguanosine-3'-phosphorothioate
  modified_base 3: mod_base = OTHER; note = 2'-O-methylcytidine-3'-phosphate
  modified_base 4: mod_base = OTHER; note = 2'-O-methylguanosine-3'-phosphate
  modified_base 5: mod_base = OTHER; note = 2'-O-methylcytidine-3'-phosphate
  modified_base 6: mod_base = OTHER; note = 2'-O-methylcytidine-3'-phosphate
  modified_base 7: mod_base = OTHER; note = 2'-fluoroadenosine-3'-phosphate
  modified_base 8: mod_base = OTHER; note = 2'-O-methyladenosine-3'-phosphate
  modified_base 9: mod_base = OTHER; note = 2'-fluoroguanosine-3'-phosphate
  modified_base 10: mod_base = OTHER; note = 2'-fluoroguanosine-3'-phosphate
  modified_base 11: mod_base = OTHER; note = 2'-fluorocytidine-3'-phosphate
  modified_base 12: mod_base = OTHER; note = 2'-O-methyluridine-3'-phosphate
  modified_base 13: mod_base = OTHER; note = 2'-O-methylguanosine-3'-phosphate
  modified_base 14: mod_base = OTHER; note = 2'-O-methyluridine-3'-phosphate
  modified_base 15: mod_base = OTHER; note = 2'-O-methylguanosine-3'-phosphate
  modified_base 16: mod_base = OTHER; note = 2'-O-methyluridine-3'-phosphate
  modified_base 17: mod_base = OTHER; note = 2'-O-methyluridine-3'-phosphate
  modified_base 18: mod_base = OTHER; note = 2'-O-methyluridine-3'-phosphate
  modified_base 19: mod_base = OTHER; note = 2'-O-methylguanosine-3'-phosphate
  modified_base 20: mod_base = OTHER; note = 2'-O-methyluridine-3'-phosphate
  modified_base 21: mod_base = OTHER; note = 2'-O-methylguanosine-3'-phosphate N-[tris(GalNAc-alkyl)-amidodecanoyl)]-4-hydroxyprolinol Hyp-(GalNAc-alkyl)3
ggcgccaaggctgtgtttgtg

SEQ ID NO: 2751 - RNA, 23 nt, synthetic construct
  source 1..23: mol_type = other RNA; note = Description of Artificial Sequence: Synthetic oligonucleotide
  modified_base 1: mod_base = OTHER; note = 2'-O-methylcytidine-3'-phosphorothioate
  modified_base 2: mod_base = OTHER; note = 2'-fluoroadenosine-3'-phosphorothioate
  modified_base 3: mod_base = OTHER; note = 2'-O-methylcytidine-3'-phosphate
  modified_base 4: mod_base = OTHER; note = 2'-O-methyladenosine-3'-phosphate
  modified_base 5: mod_base = OTHER; note = 2'-O-methyladenosine-3'-phosphate
  modified_base 6: mod_base = OTHER; note = 2'-fluoroadenosine-3'-phosphate
  modified_base 7: mod_base = OTHER; note = 2'-O-methylcytidine-3'-phosphate
  modified_base 8: mod_base = OTHER; note = 2'-fluoroadenosine-3'-phosphate
  modified_base 9: mod_base = OTHER; note = 2'-fluorocytidine-3'-phosphate
  modified_base 10: mod_base = OTHER; note = 2'-O-methyladenosine-3'-phosphate
  modified_base 11: mod_base = OTHER; note = 2'-O-methylguanosine-3'-phosphate
  modified_base 12: mod_base = OTHER; note = 2'-O-methylcytidine-3'-phosphate
  modified_base 13: mod_base = OTHER; note = 2'-O-methylcytidine-3'-phosphate
  modified_base 14: mod_base = OTHER; note = 2'-fluorouridine-3'-phosphate
  modified_base 15: mod_base = OTHER; note = 2'-O-methyluridine-3'-phosphate
  modified_base 16: mod_base = OTHER; note = 2'-fluoroguanosine-3'-phosphate
  modified_base 17: mod_base = OTHER; note = 2'-O-methylguanosine-3'-phosphate
  modified_base 18: mod_base = OTHER; note = 2'-O-methylcytidine-3'-phosphate
  modified_base 19: mod_base = OTHER; note = 2'-O-methylguanosine-3'-phosphate
  modified_base 20: mod_base = OTHER; note = 2'-O-methylcytidine-3'-phosphate
  modified_base 21: mod_base = OTHER; note = 2'-O-methylcytidine-3'-phosphorothioate
  modified_base 22: mod_base = OTHER; note = 2'-O-methyladenosine-3'-phosphorothioate
  modified_base 23: mod_base = OTHER; note = 2'-O-methyladenosine-3'-phosphate
cacaaacacagccttggcgccaa

SEQ ID NO: 2752 - RNA, 21 nt, synthetic construct
  source 1..21: mol_type = other RNA; note = Description of Artificial Sequence: Synthetic oligonucleotide
  modified_base 1: mod_base = OTHER; note = 2'-O-methyluridine-3'-phosphorothioate
  modified_base 2: mod_base = OTHER; note = 2'-O-methylguanosine-3'-phosphorothioate
  modified_base 3: mod_base = OTHER; note = 2'-O-methylguanosine-3'-phosphate
  modified_base 4: mod_base = OTHER; note = 2'-O-methylcytidine-3'-phosphate
  modified_base 5: mod_base = OTHER; note = 2'-O-methylguanosine-3'-phosphate
  modified_base 6: mod_base = OTHER; note = 2'-O-methylcytidine-3'-phosphate
  modified_base 7: mod_base = OTHER; note = 2'-fluorocytidine-3'-phosphate
  modified_base 8: mod_base = OTHER; note = 2'-O-methyladenosine-3'-phosphate
  modified_base 9: mod_base = OTHER; note = 2'-fluoroadenosine-3'-phosphate
  modified_base 10: mod_base = OTHER; note = 2'-fluoroguanosine-3'-phosphate
  modified_base 11: mod_base = OTHER; note = 2'-fluoroguanosine-3'-phosphate
  modified_base 12: mod_base = OTHER; note = 2'-O-methylcytidine-3'-phosphate
  modified_base 13: mod_base = OTHER; note = 2'-O-methyluridine-3'-phosphate
  modified_base 14: mod_base = OTHER; note = 2'-O-methylguanosine-3'-phosphate
  modified_base 15: mod_base = OTHER; note = 2'-O-methyluridine-3'-phosphate
  modified_base 16: mod_base = OTHER; note = 2'-O-methylguanosine-3'-phosphate
  modified_base 17: mod_base = OTHER; note = 2'-O-methyluridine-3'-phosphate
  modified_base 18: mod_base = OTHER; note = 2'-O-methyluridine-3'-phosphate
  modified_base 19: mod_base = OTHER; note = 2'-O-methyluridine-3'-phosphate
  modified_base 20: mod_base = OTHER; note = 2'-O-methylguanosine-3'-phosphate
  modified_base 21: mod_base = OTHER; note = 2'-O-methyluridine-3'-phosphate N-[tris(GalNAc-alkyl)-amidodecanoyl)]-4-hydroxyprolinol Hyp-(GalNAc-alkyl)3
tggcgccaaggctgtgtttgt

SEQ ID NO: 2753 - RNA, 23 nt, synthetic construct
  source 1..23: mol_type = other RNA; note = Description of Artificial Sequence: Synthetic oligonucleotide
  modified_base 1: mod_base = OTHER; note = 2'-O-methyladenosine-3'-phosphorothioate
  modified_base 2: mod_base = OTHER; note = 2'-fluorocytidine-3'-phosphorothioate
  modified_base 3: mod_base = OTHER; note = 2'-O-methyladenosine-3'-phosphate
  modified_base 4: mod_base = OTHER; note = 2'-O-methyladenosine-3'-phosphate
  modified_base 5: mod_base = OTHER; note = 2'-O-methyladenosine-3'-phosphate
  modified_base 6: mod_base = OTHER; note = 2'-fluorocytidine-3'-phosphate
  modified_base 7: mod_base = OTHER; note = 2'-O-methyladenosine-3'-phosphate
  modified_base 8: mod_base = OTHER; note = 2'-fluorocytidine-3'-phosphate
  modified_base 9: mod_base = OTHER; note = 2'-fluoroadenosine-3'-phosphate
  modified_base 10: mod_base = OTHER; note = 2'-O-methylguanosine-3'-phosphate
  modified_base 11: mod_base = OTHER; note = 2'-O-methylcytidine-3'-phosphate
  modified_base 12: mod_base = OTHER; note = 2'-O-methylcytidine-3'-phosphate
  modified_base 13: mod_base = OTHER; note = 2'-O-methyluridine-3'-phosphate
  modified_base 14: mod_base = OTHER; note = 2'-fluorouridine-3'-phosphate
  modified_base 15: mod_base = OTHER; note = 2'-O-methylguanosine-3'-phosphate
  modified_base 16: mod_base = OTHER; note = 2'-fluoroguanosine-3'-phosphate
  modified_base 17: mod_base = OTHER; note = 2'-O-methylcytidine-3'-phosphate
  modified_base 18: mod_base = OTHER; note = 2'-O-methylguanosine-3'-phosphate
  modified_base 19: mod_base = OTHER; note = 2'-O-methylcytidine-3'-phosphate
  modified_base 20: mod_base = OTHER; note = 2'-O-methylcytidine-3'-phosphate
  modified_base 21: mod_base = OTHER; note = 2'-O-methyladenosine-3'-phosphorothioate
  modified_base 22: mod_base = OTHER; note = 2'-O-methyladenosine-3'-phosphorothioate
  modified_base 23: mod_base = OTHER; note = 2'-O-methylguanosine-3'-phosphate
acaaacacagccttggcgccaag

SEQ ID NO: 2754 - RNA, 21 nt, synthetic construct
  source 1..21: mol_type = other RNA; note = Description of Artificial Sequence: Synthetic oligonucleotide
  modified_base 1: mod_base = OTHER; note = 2'-O-methyladenosine-3'-phosphorothioate
  modified_base 2: mod_base = OTHER; note = 2'-O-methylcytidine-3'-phosphorothioate
  modified_base 3: mod_base = OTHER; note = 2'-O-methyluridine-3'-phosphate
  modified_base 4: mod_base = OTHER; note = 2'-O-methylguanosine-3'-phosphate
  modified_base 5: mod_base = OTHER; note = 2'-O-methylcytidine-3'-phosphate
  modified_base 6: mod_base = OTHER; note = 2'-O-methylcytidine-3'-phosphate
  modified_base 7: mod_base = OTHER; note = 2'-fluoroguanosine-3'-phosphate
  modified_base 8: mod_base = OTHER; note = 2'-O-methylcytidine-3'-phosphate
  modified_base 9: mod_base = OTHER; note = 2'-fluorocytidine-3'-phosphate
  modified_base 10: mod_base = OTHER; note = 2'-fluoroadenosine-3'-phosphate
  modified_base 11: mod_base = OTHER; note = 2'-fluorocytidine-3'-phosphate
  modified_base 12: mod_base = OTHER; note = 2'-O-methyladenosine-3'-phosphate
  modified_base 13: mod_base = OTHER; note = 2'-O-methyladenosine-3'-phosphate
  modified_base 14: mod_base = OTHER; note = 2'-O-methylcytidine-3'-phosphate
  modified_base 15: mod_base = OTHER; note = 2'-O-methyluridine-3'-phosphate
  modified_base 16: mod_base = OTHER; note = 2'-O-methylcytidine-3'-phosphate
  modified_base 17: mod_base = OTHER; note = 2'-O-methyladenosine-3'-phosphate
  modified_base 18: mod_base = OTHER; note = 2'-O-methylguanosine-3'-phosphate
  modified_base 19: mod_base = OTHER; note = 2'-O-methylguanosine-3'-phosphate
  modified_base 20: mod_base = OTHER; note = 2'-O-methyladenosine-3'-phosphate
  modified_base 21: mod_base = OTHER; note = 2'-O-methyluridine-3'-phosphate N-[tris(GalNAc-alkyl)-amidodecanoyl)]-4-hydroxyprolinol Hyp-(GalNAc-alkyl)3
actgccgccacaactcaggat

SEQ ID NO: 2755 - RNA, 23 nt, synthetic construct
  source 1..23: mol_type = other RNA; note = Description of Artificial Sequence: Synthetic oligonucleotide
  modified_base 1: mod_base = OTHER; note = 2'-O-methyladenosine-3'-phosphorothioate
  modified_base 2: mod_base = OTHER; note = 2'-fluorouridine -3'-phosphorothioate
  modified_base 3: mod_base = OTHER; note = 2'-O-methylcytidine-3'-phosphate
  modified_base 4: mod_base = OTHER; note = 2'-O-methylcytidine-3'-phosphate
  modified_base 5: mod_base = OTHER; note = 2'-O-methyluridine-3'-phosphate
  modified_base 6: mod_base = OTHER; note = 2'-fluoroguanosine-3'-phosphate
  modified_base 7: mod_base = OTHER; note = 2'-O-methyladenosine-3'-phosphate
  modified_base 8: mod_base = OTHER; note = 2'-fluoroguanosine-3'-phosphate
  modified_base 9: mod_base = OTHER; note = 2'-fluorouridine-3'-phosphate
  modified_base 10: mod_base = OTHER; note = 2'-O-methyluridine-3'-phosphate
  modified_base 11: mod_base = OTHER; note = 2'-O-methylguanosine-3'-phosphate
  modified_base 12: mod_base = OTHER; note = 2'-O-methyluridine-3'-phosphate
  modified_base 13: mod_base = OTHER; note = 2'-O-methylguanosine-3'-phosphate
  modified_base 14: mod_base = OTHER; note = 2'-fluoroguanosine-3'-phosphate
  modified_base 15: mod_base = OTHER; note = 2'-O-methylcytidine-3'-phosphate
  modified_base 16: mod_base = OTHER; note = 2'-fluoroguanosine-3'-phosphate
  modified_base 17: mod_base = OTHER; note = 2'-O-methylguanosine-3'-phosphate
  modified_base 18: mod_base = OTHER; note = 2'-O-methylcytidine-3'-phosphate
  modified_base 19: mod_base = OTHER; note = 2'-O-methyladenosine-3'-phosphate
  modified_base 20: mod_base = OTHER; note = 2'-O-methylguanosine-3'-phosphate
  modified_base 21: mod_base = OTHER; note = 2'-O-methyluridine-3'-phosphorothioate
  modified_base 22: mod_base = OTHER; note = 2'-O-methyluridine-3'-phosphorothioate
  modified_base 23: mod_base = OTHER; note = 2'-O-methyluridine-3'-phosphate
atcctgagttgtggcggcagttt

SEQ ID NO: 2756 - RNA, 21 nt, synthetic construct
  source 1..21: mol_type = other RNA; note = Description of Artificial Sequence: Synthetic oligonucleotide
  modified_base 1: mod_base = OTHER; note = 2'-O-methylcytidine-3'-phosphorothioate
  modified_base 2: mod_base = OTHER; note = 2'-O-methyluridine-3'-phosphorothioate
  modified_base 3: mod_base = OTHER; note = 2'-O-methylguanosine-3'-phosphate
  modified_base 4: mod_base = OTHER; note = 2'-O-methylcytidine-3'-phosphate
  modified_base 5: mod_base = OTHER; note = 2'-O-methylcytidine-3'-phosphate
  modified_base 6: mod_base = OTHER; note = 2'-O-methylguanosine-3'-phosphate
  modified_base 7: mod_base = OTHER; note = 2'-fluorocytidine-3'-phosphate
  modified_base 8: mod_base = OTHER; note = 2'-O-methylcytidine-3'-phosphate
  modified_base 9: mod_base = OTHER; note = 2'-fluoroadenosine-3'-phosphate
  modified_base 10: mod_base = OTHER; note = 2'-fluorocytidine-3'-phosphate
  modified_base 11: mod_base = OTHER; note = 2'-fluoroadenosine-3'-phosphate
  modified_base 12: mod_base = OTHER; note = 2'-O-methyladenosine-3'-phosphate
  modified_base 13: mod_base = OTHER; note = 2'-O-methylcytidine-3'-phosphate
  modified_base 14: mod_base = OTHER; note = 2'-O-methyluridine-3'-phosphate
  modified_base 15: mod_base = OTHER; note = 2'-O-methylcytidine-3'-phosphate
  modified_base 16: mod_base = OTHER; note = 2'-O-methyladenosine-3'-phosphate
  modified_base 17: mod_base = OTHER; note = 2'-O-methylguanosine-3'-phosphate
  modified_base 18: mod_base = OTHER; note = 2'-O-methylguanosine-3'-phosphate
  modified_base 19: mod_base = OTHER; note = 2'-O-methyladenosine-3'-phosphate
  modified_base 20: mod_base = OTHER; note = 2'-O-methyluridine-3'-phosphate
  modified_base 21: mod_base = OTHER; note = 2'-O-methylguanosine-3'-phosphate N-[tris(GalNAc-alkyl)-amidodecanoyl)]-4-hydroxyprolinol Hyp-(GalNAc-alkyl)3
ctgccgccacaactcaggatg

SEQ ID NO: 2757 - RNA, 23 nt, synthetic construct
  source 1..23: mol_type = other RNA; note = Description of Artificial Sequence: Synthetic oligonucleotide
  modified_base 1: mod_base = OTHER; note = 2'-O-methylcytidine-3'-phosphorothioate
  modified_base 2: mod_base = OTHER; note = 2'-fluoroadenosine-3'-phosphorothioate
  modified_base 3: mod_base = OTHER; note = 2'-O-methyluridine-3'-phosphate
  modified_base 4: mod_base = OTHER; note = 2'-O-methylcytidine-3'-phosphate
  modified_base 5: mod_base = OTHER; note = 2'-O-methylcytidine-3'-phosphate
  modified_base 6: mod_base = OTHER; note = 2'-fluorouridine-3'-phosphate
  modified_base 7: mod_base = OTHER; note = 2'-O-methylguanosine-3'-phosphate
  modified_base 8: mod_base = OTHER; note = 2'-fluoroadenosine-3'-phosphate
  modified_base 9: mod_base = OTHER; note = 2'-fluoroguanosine-3'-phosphate
  modified_base 10: mod_base = OTHER; note = 2'-O-methyluridine-3'-phosphate
  modified_base 11: mod_base = OTHER; note = 2'-O-methyluridine-3'-phosphate
  modified_base 12: mod_base = OTHER; note = 2'-O-methylguanosine-3'-phosphate
  modified_base 13: mod_base = OTHER; note = 2'-O-methyluridine-3'-phosphate
  modified_base 14: mod_base = OTHER; note = 2'-fluoroguanosine-3'-phosphate
  modified_base 15: mod_base = OTHER; note = 2'-O-methylguanosine-3'-phosphate
  modified_base 16: mod_base = OTHER; note = 2'-fluorocytidine-3'-phosphate
  modified_base 17: mod_base = OTHER; note = 2'-O-methylguanosine-3'-phosphate
  modified_base 18: mod_base = OTHER; note = 2'-O-methylguanosine-3'-phosphate
  modified_base 19: mod_base = OTHER; note = 2'-O-methylcytidine-3'-phosphate
  modified_base 20: mod_base = OTHER; note = 2'-O-methyladenosine-3'-phosphate
  modified_base 21: mod_base = OTHER; note = 2'-O-methylguanosine-3'-phosphorothioate
  modified_base 22: mod_base = OTHER; note = 2'-O-methyluridine-3'-phosphorothioate
  modified_base 23: mod_base = OTHER; note = 2'-O-methyluridine-3'-phosphate
catcctgagttgtggcggcagtt

SEQ ID NO: 2758 - RNA, 21 nt, synthetic construct
  source 1..21: mol_type = other RNA; note = Description of Artificial Sequence: Synthetic oligonucleotide
  modified_base 1: mod_base = OTHER; note = 2'-O-methyluridine-3'-phosphorothioate
  modified_base 2: mod_base = OTHER; note = 2'-O-methylcytidine-3'-phosphorothioate
  modified_base 3: mod_base = OTHER; note = 2'-O-methyladenosine-3'-phosphate
  modified_base 4: mod_base = OTHER; note = 2'-O-methyladenosine-3'-phosphate
  modified_base 5: mod_base = OTHER; note = 2'-O-methyladenosine-3'-phosphate
  modified_base 6: mod_base = OTHER; note = 2'-O-methylcytidine-3'-phosphate
  modified_base 7: mod_base = OTHER; note = 2'-fluorouridine-3'-phosphate
  modified_base 8: mod_base = OTHER; note = 2'-O-methylguanosine-3'-phosphate
  modified_base 9: mod_base = OTHER; note = 2'-fluorocytidine-3'-phosphate
  modified_base 10: mod_base = OTHER; note = 2'-fluorocytidine-3'-phosphate
  modified_base 11: mod_base = OTHER; note = 2'-fluoroguanosine-3'-phosphate
  modified_base 12: mod_base = OTHER; note = 2'-O-methylcytidine-3'-phosphate
  modified_base 13: mod_base = OTHER; note = 2'-O-methylcytidine-3'-phosphate
  modified_base 14: mod_base = OTHER; note = 2'-O-methyladenosine-3'-phosphate
  modified_base 15: mod_base = OTHER; note = 2'-O-methylcytidine-3'-phosphate
  modified_base 16: mod_base = OTHER; note = 2'-O-methyladenosine-3'-phosphate
  modified_base 17: mod_base = OTHER; note = 2'-O-methyladenosine-3'-phosphate
  modified_base 18: mod_base = OTHER; note = 2'-O-methylcytidine-3'-phosphate
  modified_base 19: mod_base = OTHER; note = 2'-O-methyluridine-3'-phosphate
  modified_base 20: mod_base = OTHER; note = 2'-O-methylcytidine-3'-phosphate
  modified_base 21: mod_base = OTHER; note = 2'-O-methyladenosine-3'-phosphate N-[tris(GalNAc-alkyl)-amidodecanoyl)]-4-hydroxyprolinol Hyp-(GalNAc-alkyl)3
tcaaactgccgccacaactca

SEQ ID NO: 2759 - RNA, 23 nt, synthetic construct
  source 1..23: mol_type = other RNA; note = Description of Artificial Sequence: Synthetic oligonucleotide
  modified_base 1: mod_base = OTHER; note = 2'-O-methyluridine-3'-phosphorothioate
  modified_base 2: mod_base = OTHER; note = 2'-fluoroguanosine-3'-phosphorothioate
  modified_base 3: mod_base = OTHER; note = 2'-O-methyladenosine-3'-phosphate
  modified_base 4: mod_base = OTHER; note = 2'-O-methylguanosine-3'-phosphate
  modified_base 5: mod_base = OTHER; note = 2'-O-methyluridine-3'-phosphate
  modified_base 6: mod_base = OTHER; note = 2'-fluorouridine-3'-phosphate
  modified_base 7: mod_base = OTHER; note = 2'-O-methylguanosine-3'-phosphate
  modified_base 8: mod_base = OTHER; note = 2'-fluorouridine-3'-phosphate
  modified_base 9: mod_base = OTHER; note = 2'-fluoroguanosine-3'-phosphate
  modified_base 10: mod_base = OTHER; note = 2'-O-methylguanosine-3'-phosphate
  modified_base 11: mod_base = OTHER; note = 2'-O-methylcytidine-3'-phosphate
  modified_base 12: mod_base = OTHER; note = 2'-O-methylguanosine-3'-phosphate
  modified_base 13: mod_base = OTHER; note = 2'-O-methylguanosine-3'-phosphate
  modified_base 14: mod_base = OTHER; note = 2'-fluorocytidine-3'-phosphate
  modified_base 15: mod_base = OTHER; note = 2'-O-methyladenosine-3'-phosphate
  modified_base 16: mod_base = OTHER; note = 2'-fluoroguanosine-3'-phosphate
  modified_base 17: mod_base = OTHER; note = 2'-O-methyluridine-3'-phosphate
  modified_base 18: mod_base = OTHER; note = 2'-O-methyluridine-3'-phosphate
  modified_base 19: mod_base = OTHER; note = 2'-O-methyluridine-3'-phosphate
  modified_base 20: mod_base = OTHER; note = 2'-O-methylguanosine-3'-phosphate
  modified_base 21: mod_base = OTHER; note = 2'-O-methyladenosine-3'-phosphorothioate
  modified_base 22: mod_base = OTHER; note = 2'-O-methyladenosine-3'-phosphorothioate
  modified_base 23: mod_base = OTHER; note = 2'-O-methyluridine-3'-phosphate
tgagttgtggcggcagtttgaat

SEQ ID NO: 2760 - RNA, 21 nt, synthetic construct
  source 1..21: mol_type = other RNA; note = Description of Artificial Sequence: Synthetic oligonucleotide
  modified_base 1: mod_base = OTHER; note = 2'-O-methyluridine-3'-phosphorothioate
  modified_base 2: mod_base = OTHER; note = 2'-O-methyluridine-3'-phosphorothioate
  modified_base 3: mod_base = OTHER; note = 2'-O-methylcytidine-3'-phosphate
  modified_base 4: mod_base = OTHER; note = 2'-O-methyladenosine-3'-phosphate
  modified_base 5: mod_base = OTHER; note = 2'-O-methyladenosine-3'-phosphate
  modified_base 6: mod_base = OTHER; note = 2'-O-methyladenosine-3'-phosphate
  modified_base 7: mod_base = OTHER; note = 2'-fluorocytidine-3'-phosphate
  modified_base 8: mod_base = OTHER; note = 2'-O-methyluridine-3'-phosphate
  modified_base 9: mod_base = OTHER; note = 2'-fluoroguanosine-3'-phosphate
  modified_base 10: mod_base = OTHER; note = 2'-fluorocytidine-3'-phosphate
  modified_base 11: mod_base = OTHER; note = 2'-fluorocytidine-3'-phosphate
  modified_base 12: mod_base = OTHER; note = 2'-O-methylguanosine-3'-phosphate
  modified_base 13: mod_base = OTHER; note = 2'-O-methylcytidine-3'-phosphate
  modified_base 14: mod_base = OTHER; note = 2'-O-methylcytidine-3'-phosphate
  modified_base 15: mod_base = OTHER; note = 2'-O-methyladenosine-3'-phosphate
  modified_base 16: mod_base = OTHER; note = 2'-O-methylcytidine-3'-phosphate
  modified_base 17: mod_base = OTHER; note = 2'-O-methyladenosine-3'-phosphate
  modified_base 18: mod_base = OTHER; note = 2'-O-methyladenosine-3'-phosphate
  modified_base 19: mod_base = OTHER; note = 2'-O-methylcytidine-3'-phosphate
  modified_base 20: mod_base = OTHER; note = 2'-O-methyluridine-3'-phosphate
  modified_base 21: mod_base = OTHER; note = 2'-O-methylcytidine-3'-phosphate N-[tris(GalNAc-alkyl)-amidodecanoyl)]-4-hydroxyprolinol Hyp-(GalNAc-alkyl)3
ttcaaactgccgccacaactc

SEQ ID NO: 2761 - RNA, 23 nt, synthetic construct
  source 1..23: mol_type = other RNA; note = Description of Artificial Sequence: Synthetic oligonucleotide
  modified_base 1: mod_base = OTHER; note = 2'-O-methylguanosine-3'-phosphorothioate
  modified_base 2: mod_base = OTHER; note = 2'-fluoroadenosine-3'-phosphorothioate
  modified_base 3: mod_base = OTHER; note = 2'-O-methylguanosine-3'-phosphate
  modified_base 4: mod_base = OTHER; note = 2'-O-methyluridine-3'-phosphate
  modified_base 5: mod_base = OTHER; note = 2'-O-methyluridine-3'-phosphate
  modified_base 6: mod_base = OTHER; note = 2'-fluoroguanosine-3'-phosphate
  modified_base 7: mod_base = OTHER; note = 2'-O-methyluridine-3'-phosphate
  modified_base 8: mod_base = OTHER; note = 2'-fluoroguanosine-3'-phosphate
  modified_base 9: mod_base = OTHER; note = 2'-fluoroguanosine-3'-phosphate
  modified_base 10: mod_base = OTHER; note = 2'-O-methylcytidine-3'-phosphate
  modified_base 11: mod_base = OTHER; note = 2'-O-methylguanosine-3'-phosphate
  modified_base 12: mod_base = OTHER; note = 2'-O-methylguanosine-3'-phosphate
  modified_base 13: mod_base = OTHER; note = 2'-O-methylcytidine-3'-phosphate
  modified_base 14: mod_base = OTHER; note = 2'-fluoroadenosine-3'-phosphate
  modified_base 15: mod_base = OTHER; note = 2'-O-methylguanosine-3'-phosphate
  modified_base 16: mod_base = OTHER; note = 2'-fluorouridine-3'-phosphate
  modified_base 17: mod_base = OTHER; note = 2'-O-methyluridine-3'-phosphate
  modified_base 18: mod_base = OTHER; note = 2'-O-methyluridine-3'-phosphate
  modified_base 19: mod_base = OTHER; note = 2'-O-methylguanosine-3'-phosphate
  modified_base 20: mod_base = OTHER; note = 2'-O-methyladenosine-3'-phosphate
  modified_base 21: mod_base = OTHER; note = 2'-O-methyladenosine-3'-phosphorothioate
  modified_base 22: mod_base = OTHER; note = 2'-O-methyluridine-3'-phosphorothioate
  modified_base 23: mod_base = OTHER; note = 2'-O-methylcytidine-3'-phosphate
gagttgtggcggcagtttgaatc

SEQ ID NO: 2762 - RNA, 21 nt, synthetic construct
  source 1..21: mol_type = other RNA; note = Description of Artificial Sequence: Synthetic oligonucleotide
  modified_base 1: mod_base = OTHER; note = 2'-O-methylguanosine-3'-phosphorothioate
  modified_base 2: mod_base = OTHER; note = 2'-O-methylguanosine-3'-phosphorothioate
  modified_base 3: mod_base = OTHER; note = 2'-O-methylguanosine-3'-phosphate
  modified_base 4: mod_base = OTHER; note = 2'-O-methyladenosine-3'-phosphate
  modified_base 5: mod_base = OTHER; note = 2'-O-methyladenosine-3'-phosphate
  modified_base 6: mod_base = OTHER; note = 2'-O-methylguanosine-3'-phosphate
  modified_base 7: mod_base = OTHER; note = 2'-fluoroadenosine-3'-phosphate
  modified_base 8: mod_base = OTHER; note = 2'-O-methyluridine-3'-phosphate
  modified_base 9: mod_base = OTHER; note = 2'-fluoroadenosine-3'-phosphate
  modified_base 10: mod_base = OTHER; note = 2'-fluorouridine-3'-phosphate
  modified_base 11: mod_base = OTHER; note = 2'-fluorocytidine-3'-phosphate
  modified_base 12: mod_base = OTHER; note = 2'-O-methyladenosine-3'-phosphate
  modified_base 13: mod_base = OTHER; note = 2'-O-methyladenosine-3'-phosphate
  modified_base 14: mod_base = OTHER; note = 2'-O-methyladenosine-3'-phosphate
  modified_base 15: mod_base = OTHER; note = 2'-O-methyluridine-3'-phosphate
  modified_base 16: mod_base = OTHER; note = 2'-O-methylguanosine-3'-phosphate
  modified_base 17: mod_base = OTHER; note = 2'-O-methylguanosine-3'-phosphate
  modified_base 18: mod_base = OTHER; note = 2'-O-methylcytidine-3'-phosphate
  modified_base 19: mod_base = OTHER; note = 2'-O-methyluridine-3'-phosphate
  modified_base 20: mod_base = OTHER; note = 2'-O-methylguanosine-3'-phosphate
  modified_base 21: mod_base = OTHER; note = 2'-O-methyladenosine-3'-phosphate N-[tris(GalNAc-alkyl)-amidodecanoyl)]-4-hydroxyprolinol Hyp-(GalNAc-alkyl)3
gggaagatatcaaatggctga

SEQ ID NO: 2763 - RNA, 23 nt, synthetic construct
  source 1..23: mol_type = other RNA; note = Description of Artificial Sequence: Synthetic oligonucleotide
  modified_base 1: mod_base = OTHER; note = 2'-O-methyluridine-3'-phosphorothioate
  modified_base 2: mod_base = OTHER; note = 2'-fluorocytidine-3'-phosphorothioate
  modified_base 3: mod_base = OTHER; note = 2'-O-methyladenosine-3'-phosphate
  modified_base 4: mod_base = OTHER; note = 2'-O-methylguanosine-3'-phosphate
  modified_base 5: mod_base = OTHER; note = 2'-O-methylcytidine-3'-phosphate
  modified_base 6: mod_base = OTHER; note = 2'-fluorocytidine-3'-phosphate
  modified_base 7: mod_base = OTHER; note = 2'-O-methyladenosine-3'-phosphate
  modified_base 8: mod_base = OTHER; note = 2'-fluorouridine-3'-phosphate
  modified_base 9: mod_base = OTHER; note = 2'-fluorouridine-3'-phosphate
  modified_base 10: mod_base = OTHER; note = 2'-O-methyluridine-3'-phosphate
  modified_base 11: mod_base = OTHER; note = 2'-O-methylguanosine-3'-phosphate
  modified_base 12: mod_base = OTHER; note = 2'-O-methyladenosine-3'-phosphate
  modified_base 13: mod_base = OTHER; note = 2'-O-methyluridine-3'-phosphate
  modified_base 14: mod_base = OTHER; note = 2'-fluoroadenosine-3'-phosphate
  modified_base 15: mod_base = OTHER; note = 2'-O-methyluridine-3'-phosphate
  modified_base 16: mod_base = OTHER; note = 2'-fluorocytidine-3'-phosphate
  modified_base 17: mod_base = OTHER; note = 2'-O-methyluridine-3'-phosphate
  modified_base 18: mod_base = OTHER; note = 2'-O-methyluridine-3'-phosphate
  modified_base 19: mod_base = OTHER; note = 2'-O-methylcytidine-3'-phosphate
  modified_base 20: mod_base = OTHER; note = 2'-O-methylcytidine-3'-phosphate
  modified_base 21: mod_base = OTHER; note = 2'-O-methylcytidine-3'-phosphorothioate
  modified_base 22: mod_base = OTHER; note = 2'-O-methyladenosine-3'-phosphorothioate
  modified_base 23: mod_base = OTHER; note = 2'-O-methylguanosine-3'-phosphate
tcagccatttgatatcttcccag

SEQ ID NO: 2764 - RNA, 21 nt, synthetic construct
  source 1..21: mol_type = other RNA; note = Description of Artificial Sequence: Synthetic oligonucleotide
  modified_base 1: mod_base = OTHER; note = 2'-O-methylguanosine-3'-phosphorothioate
  modified_base 2: mod_base = OTHER; note = 2'-O-methylguanosine-3'-phosphorothioate
  modified_base 3: mod_base = OTHER; note = 2'-O-methyladenosine-3'-phosphate
  modified_base 4: mod_base = OTHER; note = 2'-O-methyladenosine-3'-phosphate
  modified_base 5: mod_base = OTHER; note = 2'-O-methylguanosine-3'-phosphate
  modified_base 6: mod_base = OTHER; note = 2'-O-methyladenosine-3'-phosphate
  modified_base 7: mod_base = OTHER; note = 2'-fluorouridine-3'-phosphate
  modified_base 8: mod_base = OTHER; note = 2'-O-methyladenosine-3'-phosphate
  modified_base 9: mod_base = OTHER; note = 2'-fluorouridine-3'-phosphate
  modified_base 10: mod_base = OTHER; note = 2'-fluorocytidine-3'-phosphate
  modified_base 11: mod_base = OTHER; note = 2'-fluoroadenosine-3'-phosphate
  modified_base 12: mod_base = OTHER; note = 2'-O-methyladenosine-3'-phosphate
  modified_base 13: mod_base = OTHER; note = 2'-O-methyladenosine-3'-phosphate
  modified_base 14: mod_base = OTHER; note = 2'-O-methyluridine-3'-phosphate
  modified_base 15: mod_base = OTHER; note = 2'-O-methylguanosine-3'-phosphate
  modified_base 16: mod_base = OTHER; note = 2'-O-methylguanosine-3'-phosphate
  modified_base 17: mod_base = OTHER; note = 2'-O-methylcytidine-3'-phosphate
  modified_base 18: mod_base = OTHER; note = 2'-O-methyluridine-3'-phosphate
  modified_base 19: mod_base = OTHER; note = 2'-O-methylguanosine-3'-phosphate
  modified_base 20: mod_base = OTHER; note = 2'-O-methyladenosine-3'-phosphate
  modified_base 21: mod_base = OTHER; note = 2'-O-methylguanosine-3'-phosphate N-[tris(GalNAc-alkyl)-amidodecanoyl)]-4-hydroxyprolinol Hyp-(GalNAc-alkyl)3
ggaagatatcaaatggctgag

SEQ ID NO: 2765 - RNA, 23 nt, synthetic construct
  source 1..23: mol_type = other RNA; note = Description of Artificial Sequence: Synthetic oligonucleotide
  modified_base 1: mod_base = OTHER; note = 2'-O-methylcytidine-3'-phosphorothioate
  modified_base 2: mod_base = OTHER; note = 2'-fluorouridine -3'-phosphorothioate
  modified_base 3: mod_base = OTHER; note = 2'-O-methylcytidine-3'-phosphate
  modified_base 4: mod_base = OTHER; note = 2'-O-methyladenosine-3'-phosphate
  modified_base 5: mod_base = OTHER; note = 2'-O-methylguanosine-3'-phosphate
  modified_base 6: mod_base = OTHER; note = 2'-fluorocytidine-3'-phosphate
  modified_base 7: mod_base = OTHER; note = 2'-O-methylcytidine-3'-phosphate
  modified_base 8: mod_base = OTHER; note = 2'-fluoroadenosine-3'-phosphate
  modified_base 9: mod_base = OTHER; note = 2'-fluorouridine-3'-phosphate
  modified_base 10: mod_base = OTHER; note = 2'-O-methyluridine-3'-phosphate
  modified_base 11: mod_base = OTHER; note = 2'-O-methyluridine-3'-phosphate
  modified_base 12: mod_base = OTHER; note = 2'-O-methylguanosine-3'-phosphate
  modified_base 13: mod_base = OTHER; note = 2'-O-methyladenosine-3'-phosphate
  modified_base 14: mod_base = OTHER; note = 2'-fluorouridine-3'-phosphate
  modified_base 15: mod_base = OTHER; note = 2'-O-methyladenosine-3'-phosphate
  modified_base 16: mod_base = OTHER; note = 2'-fluorouridine-3'-phosphate
  modified_base 17: mod_base = OTHER; note = 2'-O-methylcytidine-3'-phosphate
  modified_base 18: mod_base = OTHER; note = 2'-O-methyluridine-3'-phosphate
  modified_base 19: mod_base = OTHER; note = 2'-O-methyluridine-3'-phosphate
  modified_base 20: mod_base = OTHER; note = 2'-O-methylcytidine-3'-phosphate
  modified_base 21: mod_base = OTHER; note = 2'-O-methylcytidine-3'-phosphorothioate
  modified_base 22: mod_base = OTHER; note = 2'-O-methylcytidine-3'-phosphorothioate
  modified_base 23: mod_base = OTHER; note = 2'-O-methyladenosine-3'-phosphate
ctcagccatttgatatcttccca

SEQ ID NO: 2766 - RNA, 21 nt, synthetic construct
  source 1..21: mol_type = other RNA; note = Description of Artificial Sequence: Synthetic oligonucleotide
  modified_base 1: mod_base = OTHER; note = 2'-O-methyladenosine-3'-phosphorothioate
  modified_base 2: mod_base = OTHER; note = 2'-O-methylguanosine-3'-phosphorothioate
  modified_base 3: mod_base = OTHER; note = 2'-O-methylcytidine-3'-phosphate
  modified_base 4: mod_base = OTHER; note = 2'-O-methyluridine-3'-phosphate
  modified_base 5: mod_base = OTHER; note = 2'-O-methylguanosine-3'-phosphate
  modified_base 6: mod_base = OTHER; note = 2'-O-methylguanosine-3'-phosphate
  modified_base 7: mod_base = OTHER; note = 2'-fluoroguanosine-3'-phosphate
  modified_base 8: mod_base = OTHER; note = 2'-O-methyladenosine-3'-phosphate
  modified_base 9: mod_base = OTHER; note = 2'-fluoroadenosine-3'-phosphate
  modified_base 10: mod_base = OTHER; note = 2'-fluoroguanosine-3'-phosphate
  modified_base 11: mod_base = OTHER; note = 2'-fluoroadenosine-3'-phosphate
  modified_base 12: mod_base = OTHER; note = 2'-O-methyluridine-3'-phosphate
  modified_base 13: mod_base = OTHER; note = 2'-O-methyladenosine-3'-phosphate
  modified_base 14: mod_base = OTHER; note = 2'-O-methyluridine-3'-phosphate
  modified_base 15: mod_base = OTHER; note = 2'-O-methylcytidine-3'-phosphate
  modified_base 16: mod_base = OTHER; note = 2'-O-methyladenosine-3'-phosphate
  modified_base 17: mod_base = OTHER; note = 2'-O-methyladenosine-3'-phosphate
  modified_base 18: mod_base = OTHER; note = 2'-O-methyladenosine-3'-phosphate
  modified_base 19: mod_base = OTHER; note = 2'-O-methyluridine-3'-phosphate
  modified_base 20: mod_base = OTHER; note = 2'-O-methylguanosine-3'-phosphate
  modified_base 21: mod_base = OTHER; note = 2'-O-methylguanosine-3'-phosphate N-[tris(GalNAc-alkyl)-amidodecanoyl)]-4-hydroxyprolinol Hyp-(GalNAc-alkyl)3
agctgggaagatatcaaatgg

SEQ ID NO: 2767 - RNA, 23 nt, synthetic construct
  source 1..23: mol_type = other RNA; note = Description of Artificial Sequence: Synthetic oligonucleotide
  modified_base 1: mod_base = OTHER; note = 2'-O-methylcytidine-3'-phosphorothioate
  modified_base 2: mod_base = OTHER; note = 2'-fluorocytidine-3'-phosphorothioate
  modified_base 3: mod_base = OTHER; note = 2'-O-methyladenosine-3'-phosphate
  modified_base 4: mod_base = OTHER; note = 2'-O-methyluridine-3'-phosphate
  modified_base 5: mod_base = OTHER; note = 2'-O-methyluridine-3'-phosphate
  modified_base 6: mod_base = OTHER; note = 2'-fluorouridine-3'-phosphate
  modified_base 7: mod_base = OTHER; note = 2'-O-methylguanosine-3'-phosphate
  modified_base 8: mod_base = OTHER; note = 2'-fluoroadenosine-3'-phosphate
  modified_base 9: mod_base = OTHER; note = 2'-fluorouridine-3'-phosphate
  modified_base 10: mod_base = OTHER; note = 2'-O-methyladenosine-3'-phosphate
  modified_base 11: mod_base = OTHER; note = 2'-O-methyluridine-3'-phosphate
  modified_base 12: mod_base = OTHER; note = 2'-O-methylcytidine-3'-phosphate
  modified_base 13: mod_base = OTHER; note = 2'-O-methyluridine-3'-phosphate
  modified_base 14: mod_base = OTHER; note = 2'-fluorouridine-3'-phosphate
  modified_base 15: mod_base = OTHER; note = 2'-O-methylcytidine-3'-phosphate
  modified_base 16: mod_base = OTHER; note = 2'-fluorocytidine-3'-phosphate
  modified_base 17: mod_base = OTHER; note = 2'-O-methylcytidine-3'-phosphate
  modified_base 18: mod_base = OTHER; note = 2'-O-methyladenosine-3'-phosphate
  modified_base 19: mod_base = OTHER; note = 2'-O-methylguanosine-3'-phosphate
  modified_base 20: mod_base = OTHER; note = 2'-O-methylcytidine-3'-phosphate
  modified_base 21: mod_base = OTHER; note = 2'-O-methyluridine-3'-phosphorothioate
  modified_base 22: mod_base = OTHER; note = 2'-O-methylguanosine-3'-phosphorothioate
  modified_base 23: mod_base = OTHER; note = 2'-O-methyladenosine-3'-phosphate
ccatttgatatcttcccagctga

SEQ ID NO: 2768 - RNA, 21 nt, synthetic construct
  source 1..21: mol_type = other RNA; note = Description of Artificial Sequence: Synthetic oligonucleotide
  modified_base 1: mod_base = OTHER; note = 2'-O-methylcytidine-3'-phosphorothioate
  modified_base 2: mod_base = OTHER; note = 2'-O-methyladenosine-3'-phosphorothioate
  modified_base 3: mod_base = OTHER; note = 2'-O-methylguanosine-3'-phosphate
  modified_base 4: mod_base = OTHER; note = 2'-O-methylcytidine-3'-phosphate
  modified_base 5: mod_base = OTHER; note = 2'-O-methyluridine-3'-phosphate
  modified_base 6: mod_base = OTHER; note = 2'-O-methylguanosine-3'-phosphate
  modified_base 7: mod_base = OTHER; note = 2'-fluoroguanosine-3'-phosphate
  modified_base 8: mod_base = OTHER; note = 2'-O-methylguanosine-3'-phosphate
  modified_base 9: mod_base = OTHER; note = 2'-fluoroadenosine-3'-phosphate
  modified_base 10: mod_base = OTHER; note = 2'-fluoroadenosine-3'-phosphate
  modified_base 11: mod_base = OTHER; note = 2'-fluoroguanosine-3'-phosphate
  modified_base 12: mod_base = OTHER; note = 2'-O-methyladenosine-3'-phosphate
  modified_base 13: mod_base = OTHER; note = 2'-O-methyluridine-3'-phosphate
  modified_base 14: mod_base = OTHER; note = 2'-O-methyladenosine-3'-phosphate
  modified_base 15: mod_base = OTHER; note = 2'-O-methyluridine-3'-phosphate
  modified_base 16: mod_base = OTHER; note = 2'-O-methylcytidine-3'-phosphate
  modified_base 17: mod_base = OTHER; note = 2'-O-methyladenosine-3'-phosphate
  modified_base 18: mod_base = OTHER; note = 2'-O-methyladenosine-3'-phosphate
  modified_base 19: mod_base = OTHER; note = 2'-O-methyladenosine-3'-phosphate
  modified_base 20: mod_base = OTHER; note = 2'-O-methyluridine-3'-phosphate
  modified_base 21: mod_base = OTHER; note = 2'-O-methylguanosine-3'-phosphate N-[tris(GalNAc-alkyl)-amidodecanoyl)]-4-hydroxyprolinol Hyp-(GalNAc-alkyl)3
cagctgggaagatatcaaatg

SEQ ID NO: 2769 - RNA, 23 nt, synthetic construct
  source 1..23: mol_type = other RNA; note = Description of Artificial Sequence: Synthetic oligonucleotide
  modified_base 1: mod_base = OTHER; note = 2'-O-methylcytidine-3'-phosphorothioate
  modified_base 2: mod_base = OTHER; note = 2'-fluoroadenosine-3'-phosphorothioate
  modified_base 3: mod_base = OTHER; note = 2'-O-methyluridine-3'-phosphate
  modified_base 4: mod_base = OTHER; note = 2'-O-methyluridine-3'-phosphate
  modified_base 5: mod_base = OTHER; note = 2'-O-methyluridine-3'-phosphate
  modified_base 6: mod_base = OTHER; note = 2'-fluoroguanosine-3'-phosphate
  modified_base 7: mod_base = OTHER; note = 2'-O-methyladenosine-3'-phosphate
  modified_base 8: mod_base = OTHER; note = 2'-fluorouridine-3'-phosphate
  modified_base 9: mod_base = OTHER; note = 2'-fluoroadenosine-3'-phosphate
  modified_base 10: mod_base = OTHER; note = 2'-O-methyluridine-3'-phosphate
  modified_base 11: mod_base = OTHER; note = 2'-O-methylcytidine-3'-phosphate
  modified_base 12: mod_base = OTHER; note = 2'-O-methyluridine-3'-phosphate
  modified_base 13: mod_base = OTHER; note = 2'-O-methyluridine-3'-phosphate
  modified_base 14: mod_base = OTHER; note = 2'-fluorocytidine-3'-phosphate
  modified_base 15: mod_base = OTHER; note = 2'-O-methylcytidine-3'-phosphate
  modified_base 16: mod_base = OTHER; note = 2'-fluorocytidine-3'-phosphate
  modified_base 17: mod_base = OTHER; note = 2'-O-methyladenosine-3'-phosphate
  modified_base 18: mod_base = OTHER; note = 2'-O-methylguanosine-3'-phosphate
  modified_base 19: mod_base = OTHER; note = 2'-O-methylcytidine-3'-phosphate
  modified_base 20: mod_base = OTHER; note = 2'-O-methyluridine-3'-phosphate
  modified_base 21: mod_base = OTHER; note = 2'-O-methylguanosine-3'-phosphorothioate
  modified_base 22: mod_base = OTHER; note = 2'-O-methyladenosine-3'-phosphorothioate
  modified_base 23: mod_base = OTHER; note = 2'-O-methyluridine-3'-phosphate
catttgatatcttcccagctgat

SEQ ID NO: 2770 - RNA, 21 nt, synthetic construct
  source 1..21: mol_type = other RNA; note = Description of Artificial Sequence: Synthetic oligonucleotide
  modified_base 1: mod_base = OTHER; note = 2'-O-methyladenosine-3'-phosphorothioate
  modified_base 2: mod_base = OTHER; note = 2'-O-methyladenosine-3'-phosphorothioate
  modified_base 3: mod_base = OTHER; note = 2'-O-methyluridine-3'-phosphate
  modified_base 4: mod_base = OTHER; note = 2'-O-methylcytidine-3'-phosphate
  modified_base 5: mod_base = OTHER; note = 2'-O-methyladenosine-3'-phosphate
  modified_base 6: mod_base = OTHER; note = 2'-O-methylguanosine-3'-phosphate
  modified_base 7: mod_base = OTHER; note = 2'-fluorouridine-3'-phosphate
  modified_base 8: mod_base = OTHER; note = 2'-O-methyladenosine-3'-phosphate
  modified_base 9: mod_base = OTHER; note = 2'-fluorocytidine-3'-phosphate
  modified_base 10: mod_base = OTHER; note = 2'-fluorouridine-3'-phosphate
  modified_base 11: mod_base = OTHER; note = 2'-fluorouridine-3'-phosphate
  modified_base 12: mod_base = OTHER; note = 2'-O-methylcytidine-3'-phosphate
  modified_base 13: mod_base = OTHER; note = 2'-O-methylcytidine-3'-phosphate
  modified_base 14: mod_base = OTHER; note = 2'-O-methyladenosine-3'-phosphate
  modified_base 15: mod_base = OTHER; note = 2'-O-methyladenosine-3'-phosphate
  modified_base 16: mod_base = OTHER; note = 2'-O-methyladenosine-3'-phosphate
  modified_base 17: mod_base = OTHER; note = 2'-O-methylguanosine-3'-phosphate
  modified_base 18: mod_base = OTHER; note = 2'-O-methyluridine-3'-phosphate
  modified_base 19: mod_base = OTHER; note = 2'-O-methylcytidine-3'-phosphate
  modified_base 20: mod_base = OTHER; note = 2'-O-methyluridine-3'-phosphate
  modified_base 21: mod_base = OTHER; note = 2'-O-methyladenosine-3'-phosphate N-[tris(GalNAc-alkyl)-amidodecanoyl)]-4-hydroxyprolinol Hyp-(GalNAc-alkyl)3
aatcagtacttccaaagtcta

SEQ ID NO: 2771 - RNA, 23 nt, synthetic construct
  source 1..23: mol_type = other RNA; note = Description of Artificial Sequence: Synthetic oligonucleotide
  modified_base 1: mod_base = OTHER; note = 2'-O-methyluridine-3'-phosphorothioate
  modified_base 2: mod_base = OTHER; note = 2'-fluoroadenosine-3'-phosphorothioate
  modified_base 3: mod_base = OTHER; note = 2'-O-methylguanosine-3'-phosphate
  modified_base 4: mod_base = OTHER; note = 2'-O-methyladenosine-3'-phosphate
  modified_base 5: mod_base = OTHER; note = 2'-O-methylcytidine-3'-phosphate
  modified_base 6: mod_base = OTHER; note = 2'-fluorouridine-3'-phosphate
  modified_base 7: mod_base = OTHER; note = 2'-O-methyluridine-3'-phosphate
  modified_base 8: mod_base = OTHER; note = 2'-fluorouridine-3'-phosphate
  modified_base 9: mod_base = OTHER; note = 2'-fluoroguanosine-3'-phosphate
  modified_base 10: mod_base = OTHER; note = 2'-O-methylguanosine-3'-phosphate
  modified_base 11: mod_base = OTHER; note = 2'-O-methyladenosine-3'-phosphate
  modified_base 12: mod_base = OTHER; note = 2'-O-methyladenosine-3'-phosphate
  modified_base 13: mod_base = OTHER; note = 2'-O-methylguanosine-3'-phosphate
  modified_base 14: mod_base = OTHER; note = 2'-fluorouridine-3'-phosphate
  modified_base 15: mod_base = OTHER; note = 2'-O-methyladenosine-3'-phosphate
  modified_base 16: mod_base = OTHER; note = 2'-fluorocytidine-3'-phosphate
  modified_base 17: mod_base = OTHER; note = 2'-O-methyluridine-3'-phosphate
  modified_base 18: mod_base = OTHER; note = 2'-O-methylguanosine-3'-phosphate
  modified_base 19: mod_base = OTHER; note = 2'-O-methyladenosine-3'-phosphate
  modified_base 20: mod_base = OTHER; note = 2'-O-methyluridine-3'-phosphate
  modified_base 21: mod_base = OTHER; note = 2'-O-methyluridine-3'-phosphorothioate
  modified_base 22: mod_base = OTHER; note = 2'-O-methyluridine-3'-phosphorothioate
  modified_base 23: mod_base = OTHER; note = 2'-O-methyladenosine-3'-phosphate
tagactttggaagtactgattta

SEQ ID NO: 2772 - RNA, 21 nt, synthetic construct
  source 1..21: mol_type = other RNA; note = Description of Artificial Sequence: Synthetic oligonucleotide
  modified_base 1: mod_base = OTHER; note = 2'-O-methyladenosine-3'-phosphorothioate
  modified_base 2: mod_base = OTHER; note = 2'-O-methyluridine-3'-phosphorothioate
  modified_base 3: mod_base = OTHER; note = 2'-O-methylcytidine-3'-phosphate
  modified_base 4: mod_base = OTHER; note = 2'-O-methyladenosine-3'-phosphate
  modified_base 5: mod_base = OTHER; note = 2'-O-methylguanosine-3'-phosphate
  modified_base 6: mod_base = OTHER; note = 2'-O-methyluridine-3'-phosphate
  modified_base 7: mod_base = OTHER; note = 2'-fluoroadenosine-3'-phosphate
  modified_base 8: mod_base = OTHER; note = 2'-O-methylcytidine-3'-phosphate
  modified_base 9: mod_base = OTHER; note = 2'-fluorouridine-3'-phosphate
  modified_base 10: mod_base = OTHER; note = 2'-fluorouridine-3'-phosphate
  modified_base 11: mod_base = OTHER; note = 2'-fluorocytidine-3'-phosphate
  modified_base 12: mod_base = OTHER; note = 2'-O-methylcytidine-3'-phosphate
  modified_base 13: mod_base = OTHER; note = 2'-O-methyladenosine-3'-phosphate
  modified_base 14: mod_base = OTHER; note = 2'-O-methyladenosine-3'-phosphate
  modified_base 15: mod_base = OTHER; note = 2'-O-methyladenosine-3'-phosphate
  modified_base 16: mod_base = OTHER; note = 2'-O-methylguanosine-3'-phosphate
  modified_base 17: mod_base = OTHER; note = 2'-O-methyluridine-3'-phosphate
  modified_base 18: mod_base = OTHER; note = 2'-O-methylcytidine-3'-phosphate
  modified_base 19: mod_base = OTHER; note = 2'-O-methyluridine-3'-phosphate
  modified_base 20: mod_base = OTHER; note = 2'-O-methyladenosine-3'-phosphate
  modified_base 21: mod_base = OTHER; note = 2'-O-methyluridine-3'-phosphate N-[tris(GalNAc-alkyl)-amidodecanoyl)]-4-hydroxyprolinol Hyp-(GalNAc-alkyl)3
atcagtacttccaaagtctat

SEQ ID NO: 2773 - RNA, 23 nt, synthetic construct
  source 1..23: mol_type = other RNA; note = Description of Artificial Sequence: Synthetic oligonucleotide
  modified_base 1: mod_base = OTHER; note = 2'-O-methyladenosine-3'-phosphorothioate
  modified_base 2: mod_base = OTHER; note = 2'-fluorouridine -3'-phosphorothioate
  modified_base 3: mod_base = OTHER; note = 2'-O-methyladenosine-3'-phosphate
  modified_base 4: mod_base = OTHER; note = 2'-O-methylguanosine-3'-phosphate
  modified_base 5: mod_base = OTHER; note = 2'-O-methyladenosine-3'-phosphate
  modified_base 6: mod_base = OTHER; note = 2'-fluorocytidine-3'-phosphate
  modified_base 7: mod_base = OTHER; note = 2'-O-methyluridine-3'-phosphate
  modified_base 8: mod_base = OTHER; note = 2'-fluorouridine-3'-phosphate
  modified_base 9: mod_base = OTHER; note = 2'-fluorouridine-3'-phosphate
  modified_base 10: mod_base = OTHER; note = 2'-O-methylguanosine-3'-phosphate
  modified_base 11: mod_base = OTHER; note = 2'-O-methylguanosine-3'-phosphate
  modified_base 12: mod_base = OTHER; note = 2'-O-methyladenosine-3'-phosphate
  modified_base 13: mod_base = OTHER; note = 2'-O-methyladenosine-3'-phosphate
  modified_base 14: mod_base = OTHER; note = 2'-fluoroguanosine-3'-phosphate
  modified_base 15: mod_base = OTHER; note = 2'-O-methyluridine-3'-phosphate
  modified_base 16: mod_base = OTHER; note = 2'-fluoroadenosine-3'-phosphate
  modified_base 17: mod_base = OTHER; note = 2'-O-methylcytidine-3'-phosphate
  modified_base 18: mod_base = OTHER; note = 2'-O-methyluridine-3'-phosphate
  modified_base 19: mod_base = OTHER; note = 2'-O-methylguanosine-3'-phosphate
  modified_base 20: mod_base = OTHER; note = 2'-O-methyladenosine-3'-phosphate
  modified_base 21: mod_base = OTHER; note = 2'-O-methyluridine-3'-phosphorothioate
  modified_base 22: mod_base = OTHER; note = 2'-O-methyluridine-3'-phosphorothioate
  modified_base 23: mod_base = OTHER; note = 2'-O-methyluridine-3'-phosphate
atagactttggaagtactgattt

SEQ ID NO: 2774 - RNA, 21 nt, synthetic construct
  source 1..21: mol_type = other RNA; note = Description of Artificial Sequence: Synthetic oligonucleotide
  modified_base 1: mod_base = OTHER; note = 2'-O-methylguanosine-3'-phosphorothioate
  modified_base 2: mod_base = OTHER; note = 2'-O-methylcytidine-3'-phosphorothioate
  modified_base 3: mod_base = OTHER; note = 2'-O-methyluridine-3'-phosphate
  modified_base 4: mod_base = OTHER; note = 2'-O-methyladenosine-3'-phosphate
  modified_base 5: mod_base = OTHER; note = 2'-O-methyladenosine-3'-phosphate
  modified_base 6: mod_base = OTHER; note = 2'-O-methyladenosine-3'-phosphate
  modified_base 7: mod_base = OTHER; note = 2'-fluorouridine-3'-phosphate
  modified_base 8: mod_base = OTHER; note = 2'-O-methylcytidine-3'-phosphate
  modified_base 9: mod_base = OTHER; note = 2'-fluoroadenosine-3'-phosphate
  modified_base 10: mod_base = OTHER; note = 2'-fluoroguanosine-3'-phosphate
  modified_base 11: mod_base = OTHER; note = 2'-fluorouridine-3'-phosphate
  modified_base 12: mod_base = OTHER; note = 2'-O-methyladenosine-3'-phosphate
  modified_base 13: mod_base = OTHER; note = 2'-O-methylcytidine-3'-phosphate
  modified_base 14: mod_base = OTHER; note = 2'-O-methyluridine-3'-phosphate
  modified_base 15: mod_base = OTHER; note = 2'-O-methyluridine-3'-phosphate
  modified_base 16: mod_base = OTHER; note = 2'-O-methylcytidine-3'-phosphate
  modified_base 17: mod_base = OTHER; note = 2'-O-methylcytidine-3'-phosphate
  modified_base 18: mod_base = OTHER; note = 2'-O-methyladenosine-3'-phosphate
  modified_base 19: mod_base = OTHER; note = 2'-O-methyladenosine-3'-phosphate
  modified_base 20: mod_base = OTHER; note = 2'-O-methyladenosine-3'-phosphate
  modified_base 21: mod_base = OTHER; note = 2'-O-methylguanosine-3'-phosphate N-[tris(GalNAc-alkyl)-amidodecanoyl)]-4-hydroxyprolinol Hyp-(GalNAc-alkyl)3
gctaaatcagtacttccaaag

SEQ ID NO: 2775 - RNA, 23 nt, synthetic construct
  source 1..23: mol_type = other RNA; note = Description of Artificial Sequence: Synthetic oligonucleotide
  modified_base 1: mod_base = OTHER; note = 2'-O-methylcytidine-3'-phosphorothioate
  modified_base 2: mod_base = OTHER; note = 2'-fluorouridine -3'-phosphorothioate
  modified_base 3: mod_base = OTHER; note = 2'-O-methyluridine-3'-phosphate
  modified_base 4: mod_base = OTHER; note = 2'-O-methyluridine-3'-phosphate
  modified_base 5: mod_base = OTHER; note = 2'-O-methylguanosine-3'-phosphate
  modified_base 6: mod_base = OTHER; note = 2'-fluoroguanosine-3'-phosphate
  modified_base 7: mod_base = OTHER; note = 2'-O-methyladenosine-3'-phosphate
  modified_base 8: mod_base = OTHER; note = 2'-fluoroadenosine-3'-phosphate
  modified_base 9: mod_base = OTHER; note = 2'-fluoroguanosine-3'-phosphate
  modified_base 10: mod_base = OTHER; note = 2'-O-methyluridine-3'-phosphate
  modified_base 11: mod_base = OTHER; note = 2'-O-methyladenosine-3'-phosphate
  modified_base 12: mod_base = OTHER; note = 2'-O-methylcytidine-3'-phosphate
  modified_base 13: mod_base = OTHER; note = 2'-O-methyluridine-3'-phosphate
  modified_base 14: mod_base = OTHER; note = 2'-fluoroguanosine-3'-phosphate
  modified_base 15: mod_base = OTHER; note = 2'-O-methyladenosine-3'-phosphate
  modified_base 16: mod_base = OTHER; note = 2'-fluorouridine-3'-phosphate
  modified_base 17: mod_base = OTHER; note = 2'-O-methyluridine-3'-phosphate
  modified_base 18: mod_base = OTHER; note = 2'-O-methyluridine-3'-phosphate
  modified_base 19: mod_base = OTHER; note = 2'-O-methyladenosine-3'-phosphate
  modified_base 20: mod_base = OTHER; note = 2'-O-methylguanosine-3'-phosphate
  modified_base 21: mod_base = OTHER; note = 2'-O-methylcytidine-3'-phosphorothioate
  modified_base 22: mod_base = OTHER; note = 2'-O-methyladenosine-3'-phosphorothioate
  modified_base 23: mod_base = OTHER; note = 2'-O-methyluridine-3'-phosphate
ctttggaagtactgatttagcat

SEQ ID NO: 2776 - RNA, 21 nt, synthetic construct
  source 1..21: mol_type = other RNA; note = Description of Artificial Sequence: Synthetic oligonucleotide
  modified_base 1: mod_base = OTHER; note = 2'-O-methyluridine-3'-phosphorothioate
  modified_base 2: mod_base = OTHER; note = 2'-O-methylguanosine-3'-phosphorothioate
  modified_base 3: mod_base = OTHER; note = 2'-O-methylcytidine-3'-phosphate
  modified_base 4: mod_base = OTHER; note = 2'-O-methyluridine-3'-phosphate
  modified_base 5: mod_base = OTHER; note = 2'-O-methyladenosine-3'-phosphate
  modified_base 6: mod_base = OTHER; note = 2'-O-methyladenosine-3'-phosphate
  modified_base 7: mod_base = OTHER; note = 2'-fluoroadenosine-3'-phosphate
  modified_base 8: mod_base = OTHER; note = 2'-O-methyluridine-3'-phosphate
  modified_base 9: mod_base = OTHER; note = 2'-fluorocytidine-3'-phosphate
  modified_base 10: mod_base = OTHER; note = 2'-fluoroadenosine-3'-phosphate
  modified_base 11: mod_base = OTHER; note = 2'-fluoroguanosine-3'-phosphate
  modified_base 12: mod_base = OTHER; note = 2'-O-methyluridine-3'-phosphate
  modified_base 13: mod_base = OTHER; note = 2'-O-methyladenosine-3'-phosphate
  modified_base 14: mod_base = OTHER; note = 2'-O-methylcytidine-3'-phosphate
  modified_base 15: mod_base = OTHER; note = 2'-O-methyluridine-3'-phosphate
  modified_base 16: mod_base = OTHER; note = 2'-O-methyluridine-3'-phosphate
  modified_base 17: mod_base = OTHER; note = 2'-O-methylcytidine-3'-phosphate
  modified_base 18: mod_base = OTHER; note = 2'-O-methylcytidine-3'-phosphate
  modified_base 19: mod_base = OTHER; note = 2'-O-methyladenosine-3'-phosphate
  modified_base 20: mod_base = OTHER; note = 2'-O-methyladenosine-3'-phosphate
  modified_base 21: mod_base = OTHER; note = 2'-O-methyladenosine-3'-phosphate N-[tris(GalNAc-alkyl)-amidodecanoyl)]-4-hydroxyprolinol Hyp-(GalNAc-alkyl)3
tgctaaatcagtacttccaaa

SEQ ID NO: 2777 - RNA, 23 nt, synthetic construct
  source 1..23: mol_type = other RNA; note = Description of Artificial Sequence: Synthetic oligonucleotide
  modified_base 1: mod_base = OTHER; note = 2'-O-methyluridine-3'-phosphorothioate
  modified_base 2: mod_base = OTHER; note = 2'-fluorouridine -3'-phosphorothioate
  modified_base 3: mod_base = OTHER; note = 2'-O-methyluridine-3'-phosphate
  modified_base 4: mod_base = OTHER; note = 2'-O-methylguanosine-3'-phosphate
  modified_base 5: mod_base = OTHER; note = 2'-O-methylguanosine-3'-phosphate
  modified_base 6: mod_base = OTHER; note = 2'-fluoroadenosine-3'-phosphate
  modified_base 7: mod_base = OTHER; note = 2'-O-methyladenosine-3'-phosphate
  modified_base 8: mod_base = OTHER; note = 2'-fluoroguanosine-3'-phosphate
  modified_base 9: mod_base = OTHER; note = 2'-fluorouridine-3'-phosphate
  modified_base 10: mod_base = OTHER; note = 2'-O-methyladenosine-3'-phosphate
  modified_base 11: mod_base = OTHER; note = 2'-O-methylcytidine-3'-phosphate
  modified_base 12: mod_base = OTHER; note = 2'-O-methyluridine-3'-phosphate
  modified_base 13: mod_base = OTHER; note = 2'-O-methylguanosine-3'-phosphate
  modified_base 14: mod_base = OTHER; note = 2'-fluoroadenosine-3'-phosphate
  modified_base 15: mod_base = OTHER; note = 2'-O-methyluridine-3'-phosphate
  modified_base 16: mod_base = OTHER; note = 2'-fluorouridine-3'-phosphate
  modified_base 17: mod_base = OTHER; note = 2'-O-methyluridine-3'-phosphate
  modified_base 18: mod_base = OTHER; note = 2'-O-methyladenosine-3'-phosphate
  modified_base 19: mod_base = OTHER; note = 2'-O-methylguanosine-3'-phosphate
  modified_base 20: mod_base = OTHER; note = 2'-O-methylcytidine-3'-phosphate
  modified_base 21: mod_base = OTHER; note = 2'-O-methyladenosine-3'-phosphorothioate
  modified_base 22: mod_base = OTHER; note = 2'-O-methyluridine-3'-phosphorothioate
  modified_base 23: mod_base = OTHER; note = 2'-O-methylguanosine-3'-phosphate
tttggaagtactgatttagcatg

SEQ ID NO: 2778 - RNA, 21 nt, synthetic construct
  source 1..21: mol_type = other RNA; note = Description of Artificial Sequence: Synthetic oligonucleotide
  modified_base 1: mod_base = OTHER; note = 2'-O-methyluridine-3'-phosphorothioate
  modified_base 2: mod_base = OTHER; note = 2'-O-methylcytidine-3'-phosphorothioate
  modified_base 3: mod_base = OTHER; note = 2'-O-methyladenosine-3'-phosphate
  modified_base 4: mod_base = OTHER; note = 2'-O-methylguanosine-3'-phosphate
  modified_base 5: mod_base = OTHER; note = 2'-O-methylcytidine-3'-phosphate
  modified_base 6: mod_base = OTHER; note = 2'-O-methyladenosine-3'-phosphate
  modified_base 7: mod_base = OTHER; note = 2'-fluorouridine-3'-phosphate
  modified_base 8: mod_base = OTHER; note = 2'-O-methylguanosine-3'-phosphate
  modified_base 9: mod_base = OTHER; note = 2'-fluorocytidine-3'-phosphate
  modified_base 10: mod_base = OTHER; note = 2'-fluorocytidine-3'-phosphate
  modified_base 11: mod_base = OTHER; note = 2'-fluoroadenosine-3'-phosphate
  modified_base 12: mod_base = OTHER; note = 2'-O-methyladenosine-3'-phosphate
  modified_base 13: mod_base = OTHER; note = 2'-O-methyluridine-3'-phosphate
  modified_base 14: mod_base = OTHER; note = 2'-O-methyladenosine-3'-phosphate
  modified_base 15: mod_base = OTHER; note = 2'-O-methyluridine-3'-phosphate
  modified_base 16: mod_base = OTHER; note = 2'-O-methylguanosine-3'-phosphate
  modified_base 17: mod_base = OTHER; note = 2'-O-methyluridine-3'-phosphate
  modified_base 18: mod_base = OTHER; note = 2'-O-methylguanosine-3'-phosphate
  modified_base 19: mod_base = OTHER; note = 2'-O-methyluridine-3'-phosphate
  modified_base 20: mod_base = OTHER; note = 2'-O-methylguanosine-3'-phosphate
  modified_base 21: mod_base = OTHER; note = 2'-O-methylguanosine-3'-phosphate N-[tris(GalNAc-alkyl)-amidodecanoyl)]-4-hydroxyprolinol Hyp-(GalNAc-alkyl)3
tcagcatgccaatatgtgtgg

SEQ ID NO: 2779 - RNA, 23 nt, synthetic construct
  source 1..23: mol_type = other RNA; note = Description of Artificial Sequence: Synthetic oligonucleotide
  modified_base 1: mod_base = OTHER; note = 2'-O-methylcytidine-3'-phosphorothioate
  modified_base 2: mod_base = OTHER; note = 2'-fluorocytidine-3'-phosphorothioate
  modified_base 3: mod_base = OTHER; note = 2'-O-methyladenosine-3'-phosphate
  modified_base 4: mod_base = OTHER; note = 2'-O-methylcytidine-3'-phosphate
  modified_base 5: mod_base = OTHER; note = 2'-O-methyladenosine-3'-phosphate
  modified_base 6: mod_base = OTHER; note = 2'-fluorocytidine-3'-phosphate
  modified_base 7: mod_base = OTHER; note = 2'-O-methyladenosine-3'-phosphate
  modified_base 8: mod_base = OTHER; note = 2'-fluorouridine-3'-phosphate
  modified_base 9: mod_base = OTHER; note = 2'-fluoroadenosine-3'-phosphate
  modified_base 10: mod_base = OTHER; note = 2'-O-methyluridine-3'-phosphate
  modified_base 11: mod_base = OTHER; note = 2'-O-methyluridine-3'-phosphate
  modified_base 12: mod_base = OTHER; note = 2'-O-methylguanosine-3'-phosphate
  modified_base 13: mod_base = OTHER; note = 2'-O-methylguanosine-3'-phosphate
  modified_base 14: mod_base = OTHER; note = 2'-fluorocytidine-3'-phosphate
  modified_base 15: mod_base = OTHER; note = 2'-O-methyladenosine-3'-phosphate
  modified_base 16: mod_base = OTHER; note = 2'-fluorouridine-3'-phosphate
  modified_base 17: mod_base = OTHER; note = 2'-O-methylguanosine-3'-phosphate
  modified_base 18: mod_base = OTHER; note = 2'-O-methylcytidine-3'-phosphate
  modified_base 19: mod_base = OTHER; note = 2'-O-methyluridine-3'-phosphate
  modified_base 20: mod_base = OTHER; note = 2'-O-methylguanosine-3'-phosphate
  modified_base 21: mod_base = OTHER; note = 2'-O-methyladenosine-3'-phosphorothioate
  modified_base 22: mod_base = OTHER; note = 2'-O-methylcytidine-3'-phosphorothioate
  modified_base 23: mod_base = OTHER; note = 2'-O-methylcytidine-3'-phosphate
ccacacatattggcatgctgacc

SEQ ID NO: 2780 - RNA, 21 nt, synthetic construct
  source 1..21: mol_type = other RNA; note = Description of Artificial Sequence: Synthetic oligonucleotide
  modified_base 1: mod_base = OTHER; note = 2'-O-methylcytidine-3'-phosphorothioate
  modified_base 2: mod_base = OTHER; note = 2'-O-methyladenosine-3'-phosphorothioate
  modified_base 3: mod_base = OTHER; note = 2'-O-methylguanosine-3'-phosphate
  modified_base 4: mod_base = OTHER; note = 2'-O-methylcytidine-3'-phosphate
  modified_base 5: mod_base = OTHER; note = 2'-O-methyladenosine-3'-phosphate
  modified_base 6: mod_base = OTHER; note = 2'-O-methyluridine-3'-phosphate
  modified_base 7: mod_base = OTHER; note = 2'-fluoroguanosine-3'-phosphate
  modified_base 8: mod_base = OTHER; note = 2'-O-methylcytidine-3'-phosphate
  modified_base 9: mod_base = OTHER; note = 2'-fluorocytidine-3'-phosphate
  modified_base 10: mod_base = OTHER; note = 2'-fluoroadenosine-3'-phosphate
  modified_base 11: mod_base = OTHER; note = 2'-fluoroadenosine-3'-phosphate
  modified_base 12: mod_base = OTHER; note = 2'-O-methyluridine-3'-phosphate
  modified_base 13: mod_base = OTHER; note = 2'-O-methyladenosine-3'-phosphate
  modified_base 14: mod_base = OTHER; note = 2'-O-methyluridine-3'-phosphate
  modified_base 15: mod_base = OTHER; note = 2'-O-methylguanosine-3'-phosphate
  modified_base 16: mod_base = OTHER; note = 2'-O-methyluridine-3'-phosphate
  modified_base 17: mod_base = OTHER; note = 2'-O-methylguanosine-3'-phosphate
  modified_base 18: mod_base = OTHER; note = 2'-O-methyluridine-3'-phosphate
  modified_base 19: mod_base = OTHER; note = 2'-O-methylguanosine-3'-phosphate
  modified_base 20: mod_base = OTHER; note = 2'-O-methylguanosine-3'-phosphate
  modified_base 21: mod_base = OTHER; note = 2'-O-methylguanosine-3'-phosphate N-[tris(GalNAc-alkyl)-amidodecanoyl)]-4-hydroxyprolinol Hyp-(GalNAc-alkyl)3
cagcatgccaatatgtgtggg

SEQ ID NO: 2781 - RNA, 23 nt, synthetic construct
  source 1..23: mol_type = other RNA; note = Description of Artificial Sequence: Synthetic oligonucleotide
  modified_base 1: mod_base = OTHER; note = 2'-O-methylcytidine-3'-phosphorothioate
  modified_base 2: mod_base = OTHER; note = 2'-fluorocytidine-3'-phosphorothioate
  modified_base 3: mod_base = OTHER; note = 2'-O-methylcytidine-3'-phosphate
  modified_base 4: mod_base = OTHER; note = 2'-O-methyladenosine-3'-phosphate
  modified_base 5: mod_base = OTHER; note = 2'-O-methylcytidine-3'-phosphate
  modified_base 6: mod_base = OTHER; note = 2'-fluoroadenosine-3'-phosphate
  modified_base 7: mod_base = OTHER; note = 2'-O-methylcytidine-3'-phosphate
  modified_base 8: mod_base = OTHER; note = 2'-fluoroadenosine-3'-phosphate
  modified_base 9: mod_base = OTHER; note = 2'-fluorouridine-3'-phosphate
  modified_base 10: mod_base = OTHER; note = 2'-O-methyladenosine-3'-phosphate
  modified_base 11: mod_base = OTHER; note = 2'-O-methyluridine-3'-phosphate
  modified_base 12: mod_base = OTHER; note = 2'-O-methyluridine-3'-phosphate
  modified_base 13: mod_base = OTHER; note = 2'-O-methylguanosine-3'-phosphate
  modified_base 14: mod_base = OTHER; note = 2'-fluoroguanosine-3'-phosphate
  modified_base 15: mod_base = OTHER; note = 2'-O-methylcytidine-3'-phosphate
  modified_base 16: mod_base = OTHER; note = 2'-fluoroadenosine-3'-phosphate
  modified_base 17: mod_base = OTHER; note = 2'-O-methyluridine-3'-phosphate
  modified_base 18: mod_base = OTHER; note = 2'-O-methylguanosine-3'-phosphate
  modified_base 19: mod_base = OTHER; note = 2'-O-methylcytidine-3'-phosphate
  modified_base 20: mod_base = OTHER; note = 2'-O-methyluridine-3'-phosphate
  modified_base 21: mod_base = OTHER; note = 2'-O-methylguanosine-3'-phosphorothioate
  modified_base 22: mod_base = OTHER; note = 2'-O-methyladenosine-3'-phosphorothioate
  modified_base 23: mod_base = OTHER; note = 2'-O-methylcytidine-3'-phosphate
cccacacatattggcatgctgac

SEQ ID NO: 2782 - RNA, 21 nt, synthetic construct
  source 1..21: mol_type = other RNA; note = Description of Artificial Sequence: Synthetic oligonucleotide
  modified_base 1: mod_base = OTHER; note = 2'-O-methyladenosine-3'-phosphorothioate
  modified_base 2: mod_base = OTHER; note = 2'-O-methylguanosine-3'-phosphorothioate
  modified_base 3: mod_base = OTHER; note = 2'-O-methylguanosine-3'-phosphate
  modified_base 4: mod_base = OTHER; note = 2'-O-methylguanosine-3'-phosphate
  modified_base 5: mod_base = OTHER; note = 2'-O-methyluridine-3'-phosphate
  modified_base 6: mod_base = OTHER; note = 2'-O-methylcytidine-3'-phosphate
  modified_base 7: mod_base = OTHER; note = 2'-fluoroadenosine-3'-phosphate
  modified_base 8: mod_base = OTHER; note = 2'-O-methylguanosine-3'-phosphate
  modified_base 9: mod_base = OTHER; note = 2'-fluorocytidine-3'-phosphate
  modified_base 10: mod_base = OTHER; note = 2'-fluoroadenosine-3'-phosphate
  modified_base 11: mod_base = OTHER; note = 2'-fluorouridine-3'-phosphate
  modified_base 12: mod_base = OTHER; note = 2'-O-methylguanosine-3'-phosphate
  modified_base 13: mod_base = OTHER; note = 2'-O-methylcytidine-3'-phosphate
  modified_base 14: mod_base = OTHER; note = 2'-O-methylcytidine-3'-phosphate
  modified_base 15: mod_base = OTHER; note = 2'-O-methyladenosine-3'-phosphate
  modified_base 16: mod_base = OTHER; note = 2'-O-methyladenosine-3'-phosphate
  modified_base 17: mod_base = OTHER; note = 2'-O-methyluridine-3'-phosphate
  modified_base 18: mod_base = OTHER; note = 2'-O-methyladenosine-3'-phosphate
  modified_base 19: mod_base = OTHER; note = 2'-O-methyluridine-3'-phosphate
  modified_base 20: mod_base = OTHER; note = 2'-O-methylguanosine-3'-phosphate
  modified_base 21: mod_base = OTHER; note = 2'-O-methyluridine-3'-phosphate N-[tris(GalNAc-alkyl)-amidodecanoyl)]-4-hydroxyprolinol Hyp-(GalNAc-alkyl)3
agggtcagcatgccaatatgt

SEQ ID NO: 2783 - RNA, 23 nt, synthetic construct
  source 1..23: mol_type = other RNA; note = Description of Artificial Sequence: Synthetic oligonucleotide
  modified_base 1: mod_base = OTHER; note = 2'-O-methyladenosine-3'-phosphorothioate
  modified_base 2: mod_base = OTHER; note = 2'-fluorocytidine-3'-phosphorothioate
  modified_base 3: mod_base = OTHER; note = 2'-O-methyladenosine-3'-phosphate
  modified_base 4: mod_base = OTHER; note = 2'-O-methyluridine-3'-phosphate
  modified_base 5: mod_base = OTHER; note = 2'-O-methyladenosine-3'-phosphate
  modified_base 6: mod_base = OTHER; note = 2'-fluorouridine-3'-phosphate
  modified_base 7: mod_base = OTHER; note = 2'-O-methyluridine-3'-phosphate
  modified_base 8: mod_base = OTHER; note = 2'-fluoroguanosine-3'-phosphate
  modified_base 9: mod_base = OTHER; note = 2'-fluoroguanosine-3'-phosphate
  modified_base 10: mod_base = OTHER; note = 2'-O-methylcytidine-3'-phosphate
  modified_base 11: mod_base = OTHER; note = 2'-O-methyladenosine-3'-phosphate
  modified_base 12: mod_base = OTHER; note = 2'-O-methyluridine-3'-phosphate
  modified_base 13: mod_base = OTHER; note = 2'-O-methylguanosine-3'-phosphate
  modified_base 14: mod_base = OTHER; note = 2'-fluorocytidine-3'-phosphate
  modified_base 15: mod_base = OTHER; note = 2'-O-methyluridine-3'-phosphate
  modified_base 16: mod_base = OTHER; note = 2'-fluoroguanosine-3'-phosphate
  modified_base 17: mod_base = OTHER; note = 2'-O-methyladenosine-3'-phosphate
  modified_base 18: mod_base = OTHER; note = 2'-O-methylcytidine-3'-phosphate
  modified_base 19: mod_base = OTHER; note = 2'-O-methylcytidine-3'-phosphate
  modified_base 20: mod_base = OTHER; note = 2'-O-methylcytidine-3'-phosphate
  modified_base 21: mod_base = OTHER; note = 2'-O-methyluridine-3'-phosphorothioate
  modified_base 22: mod_base = OTHER; note = 2'-O-methylcytidine-3'-phosphorothioate
  modified_base 23: mod_base = OTHER; note = 2'-O-methyluridine-3'-phosphate
acatattggcatgctgaccctct

SEQ ID NO: 2784 - RNA, 21 nt, synthetic construct
  source 1..21: mol_type = other RNA; note = Description of Artificial Sequence: Synthetic oligonucleotide
  modified_base 1: mod_base = OTHER; note = 2'-O-methylguanosine-3'-phosphorothioate
  modified_base 2: mod_base = OTHER; note = 2'-O-methyladenosine-3'-phosphorothioate
  modified_base 3: mod_base = OTHER; note = 2'-O-methylguanosine-3'-phosphate
  modified_base 4: mod_base = OTHER; note = 2'-O-methylguanosine-3'-phosphate
  modified_base 5: mod_base = OTHER; note = 2'-O-methylguanosine-3'-phosphate
  modified_base 6: mod_base = OTHER; note = 2'-O-methyluridine-3'-phosphate
  modified_base 7: mod_base = OTHER; note = 2'-fluorocytidine-3'-phosphate
  modified_base 8: mod_base = OTHER; note = 2'-O-methyladenosine-3'-phosphate
  modified_base 9: mod_base = OTHER; note = 2'-fluoroguanosine-3'-phosphate
  modified_base 10: mod_base = OTHER; note = 2'-fluorocytidine-3'-phosphate
  modified_base 11: mod_base = OTHER; note = 2'-fluoroadenosine-3'-phosphate
  modified_base 12: mod_base = OTHER; note = 2'-O-methyluridine-3'-phosphate
  modified_base 13: mod_base = OTHER; note = 2'-O-methylguanosine-3'-phosphate
  modified_base 14: mod_base = OTHER; note = 2'-O-methylcytidine-3'-phosphate
  modified_base 15: mod_base = OTHER; note = 2'-O-methylcytidine-3'-phosphate
  modified_base 16: mod_base = OTHER; note = 2'-O-methyladenosine-3'-phosphate
  modified_base 17: mod_base = OTHER; note = 2'-O-methyladenosine-3'-phosphate
  modified_base 18: mod_base = OTHER; note = 2'-O-methyluridine-3'-phosphate
  modified_base 19: mod_base = OTHER; note = 2'-O-methyladenosine-3'-phosphate
  modified_base 20: mod_base = OTHER; note = 2'-O-methyluridine-3'-phosphate
  modified_base 21: mod_base = OTHER; note = 2'-O-methylguanosine-3'-phosphate N-[tris(GalNAc-alkyl)-amidodecanoyl)]-4-hydroxyprolinol Hyp-(GalNAc-alkyl)3
gagggtcagcatgccaatatg

SEQ ID NO: 2785 - RNA, 23 nt, synthetic construct
  source 1..23: mol_type = other RNA; note = Description of Artificial Sequence: Synthetic oligonucleotide
  modified_base 1: mod_base = OTHER; note = 2'-O-methylcytidine-3'-phosphorothioate
  modified_base 2: mod_base = OTHER; note = 2'-fluoroadenosine-3'-phosphorothioate
  modified_base 3: mod_base = OTHER; note = 2'-O-methyluridine-3'-phosphate
  modified_base 4: mod_base = OTHER; note = 2'-O-methyladenosine-3'-phosphate
  modified_base 5: mod_base = OTHER; note = 2'-O-methyluridine-3'-phosphate
  modified_base 6: mod_base = OTHER; note = 2'-fluorouridine-3'-phosphate
  modified_base 7: mod_base = OTHER; note = 2'-O-methylguanosine-3'-phosphate
  modified_base 8: mod_base = OTHER; note = 2'-fluoroguanosine-3'-phosphate
  modified_base 9: mod_base = OTHER; note = 2'-fluorocytidine-3'-phosphate
  modified_base 10: mod_base = OTHER; note = 2'-O-methyladenosine-3'-phosphate
  modified_base 11: mod_base = OTHER; note = 2'-O-methyluridine-3'-phosphate
  modified_base 12: mod_base = OTHER; note = 2'-O-methylguanosine-3'-phosphate
  modified_base 13: mod_base = OTHER; note = 2'-O-methylcytidine-3'-phosphate
  modified_base 14: mod_base = OTHER; note = 2'-fluorouridine-3'-phosphate
  modified_base 15: mod_base = OTHER; note = 2'-O-methylguanosine-3'-phosphate
  modified_base 16: mod_base = OTHER; note = 2'-fluoroadenosine-3'-phosphate
  modified_base 17: mod_base = OTHER; note = 2'-O-methylcytidine-3'-phosphate
  modified_base 18: mod_base = OTHER; note = 2'-O-methylcytidine-3'-phosphate
  modified_base 19: mod_base = OTHER; note = 2'-O-methylcytidine-3'-phosphate
  modified_base 20: mod_base = OTHER; note = 2'-O-methyluridine-3'-phosphate
  modified_base 21: mod_base = OTHER; note = 2'-O-methylcytidine-3'-phosphorothioate
  modified_base 22: mod_base = OTHER; note = 2'-O-methyluridine-3'-phosphorothioate
  modified_base 23: mod_base = OTHER; note = 2'-O-methylguanosine-3'-phosphate
catattggcatgctgaccctctg

SEQ ID NO: 2786 - RNA, 21 nt, synthetic construct
  source 1..21: mol_type = other RNA; note = Description of Artificial Sequence: Synthetic oligonucleotide
  modified_base 1: mod_base = OTHER; note = 2'-O-methylguanosine-3'-phosphorothioate
  modified_base 2: mod_base = OTHER; note = 2'-O-methylcytidine-3'-phosphorothioate
  modified_base 3: mod_base = OTHER; note = 2'-O-methyladenosine-3'-phosphate
  modified_base 4: mod_base = OTHER; note = 2'-O-methyluridine-3'-phosphate
  modified_base 5: mod_base = OTHER; note = 2'-O-methyladenosine-3'-phosphate
  modified_base 6: mod_base = OTHER; note = 2'-O-methyluridine-3'-phosphate
  modified_base 7: mod_base = OTHER; note = 2'-fluoroguanosine-3'-phosphate
  modified_base 8: mod_base = OTHER; note = 2'-O-methyluridine-3'-phosphate
  modified_base 9: mod_base = OTHER; note = 2'-fluoroguanosine-3'-phosphate
  modified_base 10: mod_base = OTHER; note = 2'-fluoroguanosine-3'-phosphate
  modified_base 11: mod_base = OTHER; note = 2'-fluorocytidine-3'-phosphate
  modified_base 12: mod_base = OTHER; note = 2'-O-methyluridine-3'-phosphate
  modified_base 13: mod_base = OTHER; note = 2'-O-methyladenosine-3'-phosphate
  modified_base 14: mod_base = OTHER; note = 2'-O-methyladenosine-3'-phosphate
  modified_base 15: mod_base = OTHER; note = 2'-O-methyladenosine-3'-phosphate
  modified_base 16: mod_base = OTHER; note = 2'-O-methylguanosine-3'-phosphate
  modified_base 17: mod_base = OTHER; note = 2'-O-methylcytidine-3'-phosphate
  modified_base 18: mod_base = OTHER; note = 2'-O-methyladenosine-3'-phosphate
  modified_base 19: mod_base = OTHER; note = 2'-O-methyladenosine-3'-phosphate
  modified_base 20: mod_base = OTHER; note = 2'-O-methyluridine-3'-phosphate
  modified_base 21: mod_base = OTHER; note = 2'-O-methyladenosine-3'-phosphate N-[tris(GalNAc-alkyl)-amidodecanoyl)]-4-hydroxyprolinol Hyp-(GalNAc-alkyl)3
gcatatgtggctaaagcaata

(The sequence listing continues in the following parts.)
